United States Patent Application Publication US 2010/0120628 A1 - sequence listing, part 4

SEQ ID NO: 5676 - DNA, 1555 bp, Homo sapiens
acacacacccccgcttgggcctcctctctctctccggctccattttctccgccgccgggggccggggtctcctgtggggggcccagccggtatcccaggtctcccttcagtgccggggtgaacccccgggggagccgggagccgggggcagacgggcgggggttggggcggagggagcagcggccccagcgagtttggggggagaagtaaccaggcggggggaggggcggagcagggagggggcctcagggcccccccccagctatggacgaacggctactggggccgccccctccaggcgggggccgggggggcctgggattggtgagtggggagcctgggggccctggcgagcctcccggtggcggagaccccggtgggggtagcgggggggtcccgggaggccgagggaagcaagacatcggggacattctgcagcagataatgaccatcaccgaccagagcctggacgaggcccaggccaagaaacacgccctaaactgccaccgaatgaagcctgctctctttagcgtcctgtgtgaaatcaaggagaaaactggcctcagcattcggagctcccaggaggaggagccggtggacccacagctgatgcgcttggacaacatgcttctggcagagggtgtggctgggcccgagaaagggggcggctcagcagcagcagctgcagccgctgcagcctctggtggtggtgtgtcccctgacaactccatcgaacactcggactatcgcagcaaacttgcccagatccgtcacatataccactcggagctggagaagtatgagcaggcatgtaatgagttcacgacccatgtcatgaacctgctgagggagcagagccgcaccaggcccgtggcccccaaagagatggaacgcatggtgagcatcatccatcgaaagttcagcgccatccagatgcagctgaagcagagcacctgcgaggctgtgatgatcctgcgctcccgtttcctggatgccagacgaaagcgccgtaacttcagcaaacaggccactgaggtcctaaatgagtatttctactcccacctgagtaacccatatcctagtgaggaggccaaggaggagcttgccaagaagtgtggcatcaccgtgtctcaggtctccaactggtttggcaacaagaggattcgctataagaaaaacatcggaaagttccaagaggaggcaaacatctatgctgtcaagaccgccgtgtcagtcacccaggggggccacagccgcaccagctccccgacacccccttcctctgcaggtggatcccactgtcaccccggctgactgttttgcacacttcctgcttttgttcccacttcctatctaggcaggatcatagcagagagggggccttttggggtgagagggaccgagctgagataggctggagatgtcaggggacagaggccattccagtgatcttagttctgcctttcttcccacgggtggccaaggaacagcctgctctttctgtgtgttggaatgttattttgtggataattggagtatagtagcatgtccccac

SEQ ID NO: 5677 - protein, 349 aa, Homo sapiens
MDERLLGPPPPGGGRGGLGLVSGEPGGPGEPPGGGDPGGGSGGVPGGRGKQDIGDILQQIMTITDQSLDEAQAKKHALNCHRMKPALFSVLCEIKEKTGLSIRSSQEEEPVDPQLMRLDNMLLAEGVAGPEKGGGSAAAAAAAAASGGGVSPDNSIEHSDYRSKLAQIRHIYHSELEKYEQACNEFTTHVMNLLREQSRTRPVAPKEMERMVSIIHRKFSAIQMQLKQSTCEAVMILRSRFLDARRKRRNFSKQATEVLNEYFYSHLSNPYPSEEAKEELAKKCGITVSQVSNWFGNKRIRYKKNIGKFQEEANIYAVKTAVSVTQGGHSRTSSPTPPSSAGGSHCHPG

SEQ ID NO: 5678 - DNA, 1427 bp, Homo sapiens
cattccacccccaactcattccacccccaatccgcttcctccctccgcagactgaccctcctccctccttgttctcaggccccctgctctgtttctctagctcctcaacttttctctttccccactcccactcctcccaaggaaacacgccctaaactgccaccgaatgaagcctgctctctttagcgtcctgtgtgaaatcaaggagaaaactggtatgtgggccccccccggattgctcaactctgggaacagaaccctgttcattatagggctagagtgtgacaacttggggccctgaggaaagtaaggagtcagggggactggggaaggaaccaaagcctgggaacttggctctccaggaagcaccaggaggactgagcactgggtattggggtctctgggtccctaagtccactcgcctgcatgctaggcctcagcattcggagctcccaggaggaggagccggtggacccacagctgatgcgcttggacaacatgcttctggcagagggtgtggctgggcccgagaaagggggcggctcagcagcagcagctgcagccgctgcagcctctggtggtggtgtgtcccctgacaactccatcgaacactcggactatcgcagcaaacttgcccagatccgtcacatataccactcggagctggagaagtatgagcaggcatgtaatgagttcacgacccatgtcatgaacctgctgagggagcagagccgcaccaggcccgtggcccccaaagagatggaacgcatggtgagcatcatccatcgaaagttcagcgccatccagatgcagctgaagcagagcacctgcgaggctgtgatgatcctgcgctcccgtttcctggatgccagacgaaagcgccgtaacttcagcaaacaggccactgaggtcctaaatgagtatttctactcccacctgagtaacccatatcctagtgaggaggccaaggaggagcttgccaagaagtgtggcatcaccgtgtctcaggtctccaactggtttggcaacaagaggattcgctataagaaaaacatcggaaagttccaagaggaggcaaacatctatgctgtcaagaccgccgtgtcagtcacccaggggggccacagccgcaccagctccccgacacccccttcctctgcaggtggatcccactgtcaccccggctgactgttttgcacacttcctgcttttgttcccacttcctatctaggcaggatcatagcagagagggggccttttggggtgagagggaccgagctgagataggctggagatgtcaggggacagaggccattccagtgatcttagttctgcctttcttcccacgggtggccaaggaacagcctgctctttctgtgtgttggaatgttattttgtggataattggagtatagtagcatgtcccc

SEQ ID NO: 5679 - protein, 253 aa, Homo sapiens [sequence omitted]

SEQ ID NO: 5680 - DNA, 1679 bp, Homo sapiens
ctgctcagtacccaggcatccagcccccagctcacccccaccccttccagcccccactcccctcaggaacccaaggttccagccctcctcccaaatcccagccacccctcccccaccagtttctcccctctaggggatggaggctgagagaccccaggaagaagaggatggtgagcaggtgagctgggcacggggttggggaggctgacactgggaaagaagggaggtgagaggacctggggcagaaatgtagggacacaggggccttgaaaggcttgggcaaactgaggcaggaacagagacacacagagaggaaacgggccactggcctagccccctgtccactcctcccgcttcaaccaccactgcttgactagaatggacatattttggcatcagggcccccctcaggatgaggaaggctggccccctccaaactccaccactcggccttggcgatctgctcctccatcccctcctcctccagggacccgccacacaggtacccctacccacccagggagagccccgaccctagtgcccacatcctgaccccattaccaaggcccactccattgtgggccctctccccacctcctccagactccccttgggattccccattgcaccccctctcctctgatccaaagtccctaatcacgtcaccctgtccacactcccccacggctcctgtctgccaacctctctgggtctctgagccctccacacccctctccccagccctgggaccccgctcggcctccctgctctccctgcagactgaactccttctggacctggtggctgaagcccagtcccgccgcctggaggagcagagggccaccttctacaccccccaaaacccctcaagcctagcccctgccccactccgtcctctcgaggacagagaacagctttacagcactatcctcagtcaccagtgccagcggatggaagcccagcggtcagagcctcccctccctccaggggggcaagagctcctggagttgctgctgagagttcagggtgggggtcgaatggaggagcaaaggtcccggccccccacacacacctgctgagacttgagccccaaccagcccttccttgccactggtctcaaagctgggcagcccattgcatgccctcaactcttgcttggcaggggtaccagagactgaaagacacggcacaaatctcaatattcatctcccacatcaccttccctgggaactggacagggtgaaagtcctcaaactctgggaacaggcgagatggaacagggatttaactccccgcccacaggtccatgggagcttgaggcagtaagggggatcccaggcacccatctcaaggagtggctgggagtcttttccctaacttgtggggacaccaccagttgtcaagctactaggcagtagggtctgagggctcaggcctccacctgagaggttataacctgagagacagctctacccttcctcccagtaagaagggaaggtgggtgggcacctgagagattaagactattctcccagtcccactaccagcacccccgatccctgagactgaggggtttacgggctgtgaatggaccttcagccctgcccaccctccctccccactgctgctgagtctgtctgatgttttggttgtgtgaataaatataattcccctctgga

SEQ ID NO: 5681 - protein, 57 aa, Homo sapiens
MDIFWHQGPPQDEEGWPPPNSTTRPWRSAPPSPPPPGTRHTGTPTHPGRAPTLVPTS

SEQ ID NO: 5682 - DNA, 1254 bp, Homo sapiens
gggagcagagccagggattaggggactactgaggctctggagatgagaccgccaggagtccttccccaccatgagccccctccactcctgcagctggaggagtttttcccagtctcagtgctgccctggggcgagagagactgaacaagctgtttgggtgggaagagaatggaggaagctgagagaccccaggaagaagaggatggtgagcagggcccccctcaggatgaggaaggctggccccctccaaactccaccactcggccttggcgatctgctcctccatcccctcctcctccagggacccgccacacagccctgggaccccgctcggcctccctgctctccctgcagactgaactccttctggacctggtggctgaagcccagtcccgccgcctggaggagcagagggccaccttctacaccccccaaaacccctcaagcctagcccctgccccactccgtcctctcgaggacagagaacagctttacagcactatcctcagtcaccagtgccagcggatggaagcccagcggtcagagcctcccctccctccaggggggcaagagctcctggagttgctgctgagagttcagggtgggggtcgaatggaggagcaaaggtcccggccccccacacacacctgctgagacttgagccccaaccagcccttccttgccactggtctcaaagctgggcagcccattgcatgccctcaactcttgcttggcaggggtaccagagactgaaagacacggcacaaatctcaatattcatctcccacatcaccttccctgggaactggacagggtgaaagtcctcaaactctgggaacaggcgagatggaacagggatttaactccccgcccacaggtccatgggagcttgaggcagtaagggggatcccaggcacccatctcaaggagtggctgggagtcttttccctaacttgtggggacaccaccagttgtcaagctactaggcagtagggtctgagggctcaggcctccacctgagaggttataacctgagagacagctctacccttcctcccagtaagaagggaaggtgggtgggcacctgagagattaagactattctcccagtcccactaccagcacccccgatccctgagactgaggggtttacgggctgtgaatggaccttcagccctgcccaccctccctccccactgctgctgagtctgtctgatgttttggttgtgtgaataaatataattcccctctgga

SEQ ID NO: 5683 - protein, 161 aa, Homo sapiens
MEEAERPQEEEDGEQGPPQDEEGWPPPNSTTRPWRSAPPSPPPPGTRHTALGPRSASLLSLQTELLLDLVAEAQSRRLEEQRATFYTPQNPSSLAPAPLRPLEDREQLYSTILSHQCQRMEAQRSEPPLPPGGQELLELLLRVQGGGRMEEQRSRPPTHTC

SEQ ID NO: 5684 - DNA, 1495 bp, Homo sapiens
gctagttcctgtgttgacagaaagagcagaagaggaggtggggtggagggagcagagccagggattaggggactactgaggctctggagatgagaccgccaggagtccttccccaccatgagccccctccactcctgcagctggaggagtttttcccagtctcagtgctgccctggggcgagagagactgaacaagctgtttgggtgggaagagaatggaggaagttgacagggatgggcggggcccgtgggggggctgaccaggaacccagcttcctgctcagtacccaggcatccagcccccagctcacccccaccccttccagcccccactcccctcaggaacccaaggttccagccctcctcccaaatcccagccacccctcccccaccagtttctcccctctaggggatggaggctgagagaccccaggaagaagaggatggtgagcagggcccccctcaggatgaggaaggctggccccctccaaactccaccactcggccttggcgatctgctcctccatcccctcctcctccagggacccgccacacagccctgggaccccgctcggcctccctgctctccctgcagactgaactccttctggacctggtggctgaagcccagtcccgccgcctggaggagcagagggccaccttctacaccccccaaaacccctcaagcctagcccctgccccactccgtcctctcgaggacagagaacagctttacagcactatcctcagtcaccagtgccagcggatggaagcccagcggtcagagcctcccctccctccaggggggcaagagctcctggagttgctgctgagagttcagggtgggggtcgaatggaggagcaaaggtcccggccccccacacacacctgctgagacttgagccccaaccagcccttccttgccactggtctcaaagctgggcagcccattgcatgccctcaactcttgcttggcaggggtaccagagactgaaagacacggcacaaatctcaatattcatctcccacatcaccttccctgggaactggacagggtgaaagtcctcaaactctgggaacaggcgagatggaacagggatttaactccccgcccacaggtccatgggagcttgaggcagtaagggggatcccaggcacccatctcaaggagtggctgggagtcttttccctaacttgtggggacaccaccagttgtcaagctactaggcagtagggtctgagggctcaggcctccacctgagaggttataacctgagagacagctctacccttcctcccagtaagaagggaaggtgggtgggcacctgagagattaagactattctcccagtcccactaccagcacccccgatccctgagactgaggggtttacgggctgtgaatggaccttcagccctgcccaccctccctccccactgctgctgagtctgtctgatgttttggttgtgtgaataaatataattcccctctgga

SEQ ID NO: 5685 - protein, 160 aa, Homo sapiens; identical to SEQ ID NO: 738

SEQ ID NO: 5686 - DNA, 1457 bp, Homo sapiens
gctagttcctgtgttgacagaaagagcagaagaggaggtggggtggagggagcagagccagggattaggggactactgaggctctggagatgagaccgccaggagtccttccccaccatgagccccctccactcctgcagctggaggagtttttcccagtctcagtgctgccctggggcgagagagactgaacaagctgtttgggtgggaagagaatggaggaagttgacagggatgggcggggcccgtgggggggctgaccaggaacccagcttcctgctcagtacccaggcatccagcccccagctcacccccaccccttccagcccccactcccctcaggaacccaaggttccagccctcctcccaaatcccagccacccctcccccaccagtttctcccctctaggggatggaggctgagagaccccaggaagaagaggatggtgagcagggcccccctcaggatgaggaaggctggccccctccaaactccaccactcggccttggcgatctgctcctccatcccctcctcctccagggacccgccacacagactgaactccttctggacctggtggctgaagcccagtcccgccgcctggaggagcagagggccaccttctacaccccccaaaacccctcaagcctagcccctgccccactccgtcctctcgaggacagagaacagctttacagcactatcctcagtcaccagtgccagcggatggaagcccagcggtcagagcctcccctccctccaggggggcaagagctcctggagttgctgctgagagttcagggtgggggtcgaatggaggagcaaaggtcccggccccccacacacacctgctgagacttgagccccaaccagcccttccttgccactggtctcaaagctgggcagcccattgcatgccctcaactcttgcttggcaggggtaccagagactgaaagacacggcacaaatctcaatattcatctcccacatcaccttccctgggaactggacagggtgaaagtcctcaaactctgggaacaggcgagatggaacagggatttaactccccgcccacaggtccatgggagcttgaggcagtaagggggatcccaggcacccatctcaaggagtggctgggagtcttttccctaacttgtggggacaccaccagttgtcaagctactaggcagtagggtctgagggctcaggcctccacctgagaggttataacctgagagacagctctacccttcctcccagtaagaagggaaggtgggtgggcacctgagagattaagactattctcccagtcccactaccagcacccccgatccctgagactgaggggtttacgggctgtgaatggaccttcagccctgcccaccctccctccccactgctgctgagtctgtctgatgttttggttgtgtgaataaatataattcccctctgga

SEQ ID NO: 5687 - protein, 137 aa, Homo sapiens [sequence omitted]

SEQ ID NO: 5688 - DNA, 1456 bp, Homo sapiens
ccggagcggggatcacctcaacttgactgtggtcccccagccctccaagaaatgcccataaaccaaggaggagagggtaaaaaatagaagaatacatggaattggggagaagaatgggaaaaaagatgggagtgactgcataatgtcagcattttgtgcttttggctcagcatttggattggatggaggattttcatcctgaaaccagccctccgtcgccaccgaccatggaataattgtcttccacgaaactcttccctggtgccaaaaagggttttatgtatatatttgagagctccacatccctggatctgaatcctccacttcccactggaaccatgcccctcccagtcccgtttctcccctctaggggatggaggctgagagaccccaggaagaagaggatggtgagcagggcccccctcaggatgaggaaggctggccccctccaaactccaccactcggccttggcgatctgctcctccatcccctcctcctccagggacccgccacacagccctgggaccccgctcggcctccctgctctccctgcagactgaactccttctggacctggtggctgaagcccagtcccgccgcctggaggagcagagggccaccttctacaccccccaaaacccctcaagcctagcccctgccccactccgtcctctcgaggacagagaacagctttacagcactatcctcagtcaccagtgccagcggatggaagcccagcggtcagagcctcccctccctccaggggggcaagagctcctggagttgctgctgagagttcagggtgggggtcgaatggaggagcaaaggtcccggccccccacacacacctgctgagacttgagccccaaccagcccttccttgccactggtctcaaagctgggcagcccattgcatgccctcaactcttgcttggcaggggtaccagagactgaaagacacggcacaaatctcaatattcatctcccacatcaccttccctgggaactggacagggtgaaagtcctcaaactctgggaacaggcgagatggaacagggatttaactccccgcccacaggtccatgggagcttgaggcagtaagggggatcccaggcacccatctcaaggagtggctgggagtcttttccctaacttgtggggacaccaccagttgtcaagctactaggcagtagggtctgagggctcaggcctccacctgagaggttataacctgagagacagctctacccttcctcccagtaagaagggaaggtgggtgggcacctgagagattaagactattctcccagtcccactaccagcacccccgatccctgagactgaggggtttacgggctgtgaatggaccttcagccctgcccaccctccctccccactgctgctgagtctgtctgatgttttggttgtgtgaataaatataattcccctctgga

SEQ ID NO: 5689 - protein, 160 aa, Homo sapiens; identical to SEQ ID NO: 738

SEQ ID NO: 5690 - DNA, 609 bp, Homo sapiens
cagtgccagcggatggaagcccagcggtcagagcctcccctccctccaggggggcaagagctcctggagttgctgctgagagttcagggtgggggtcgaatggaggagcaaaggtcccggccccccacacacacctgctgagacttgagccccaaccagcccttccttgccactggtctcaaagctgggcagcccattgcatgccctcaactcttgcttggcaggggtaccagagactgaaagacacggcacaaatctcaatattcatctcccacatcaccttccctgggaactggacagggtgaaagtcctcaaactctgggaacaggcgagatggaacagggatttaactccccgcccacaggtccatgggagcttgaggcagtaagggggatcccaggcacccatctcaaggagtggctgggagtcttttccctaacttgtggggacaccaccagttgtcaagctactaggcagtagggtctgagggctcaggcctccacctgagaggttataacctgagagacagctctacccttccctccctccccactgctgctgagtctgtctgatgttttggttgtgtgaataaatataattcccctctgg

SEQ ID NO: 5691 - protein, 48 aa, Homo sapiens
MEQGFNSPPTGPWELEAVRGIPGTHLKEWLGVFSLTCGDTTSCQATRQ

SEQ ID NO: 5692 - DNA, 638 bp, Homo sapiens
cagtgccagcggatggaagcccagcggtcagagcctcccctccctccaggggggcaagagctcctggagttgctgctgagagttcagggtgggggtcgaatggaggagcaaaggtcccggccccccacacacacctgctgagacttgagccccaaccagcccttccttgccactggtctcaaagctgggcagcccattgcatgccctcaactcttgcttggcaggggtaccagagactgaaagacacggcacaaatctcaatattcatctcccacatcaccttccctgggaactggacagggtgaaagtcctcaaactctgggaacaggcgagatggaacagggatttaactccccgcccacaggtccatgggagcttgaggcagtaagggggatcccaggcacccatctcaaggagtggctgggagtcttttccctaacttgtggggacaccaccagttgtcaagctactaggcagtagggtctgagggctcaggcctccacctgagaggttataacctgagaactgaggggtttacgggctgtgaatggaccttcagccctgcccaccctccctccccactgctgctgagtctgtctgatgttttggttgtgtgaataaatataattcccctctgg

SEQ ID NO: 5693 - protein, 48 aa, Homo sapiens; identical to SEQ ID NO: 5691

SEQ ID NO: 5694 - DNA, 986 bp, Homo sapiens
gctagttcctgtgttgacagaaagagcagaagaggaggtggggtggagggagcagagccagggattaggggactactgaggctctggagatgagaccgccaggagtccttccccaccatgagccccctccactcctgcagctggaggagtttttcccagtctcagtgctgccctggggcgagagagactgaacaagctgtttgggtgggaagagaatggaggaagttgacagggatgggcggggcccgtgggggggctgaccaggaacccagcttcctgctcagtacccaggcatccagcccccagctcacccccaccccttccagcccccactcccctcaggaacccaaggttccagccctcctcccaaatcccagccacccctcccccaccagtttctcccctctaggggatggaggctgagagaccccaggaagaagaggatggtgagcagggcccccctcaggatgaggaaggctggccccctccaaactccaccactcggccttggcgatctgctcctccatcccctcctcctccagggacccgccacacaggtacccctacccacccagggagagccccgaccctagtgcccacatcctgaccccattaccaaggcccactccattgtgggccctctccccacctcctccagactccccttgggattccccattgcaccccctctcctctgatccaaagtccctaatcacgtcaccctgtccacactcccccacggctcctgtctgccaacctctctgggtctctgagccctccacacccctctccccagccctgggaccccgctcggcctccctgctctccctgcagactgaactccttctggacctggtggctgaagcccagtcccgccgcctggaggagcagagggccaccttctacaccccccaaaacccctcaagcctagcccctgccccactccgtcctctcgaggacagagaacagctttacagcactatcct

SEQ ID NO: 5695 - protein, 64 aa, Homo sapiens
MEAERPQEEEDGEQGPPQDEEGWPPPNSTTRPWRSAPPSPPPPGTRHTGTPTHPGRAPTLVPTS

SEQ ID NO: 5696 - DNA, 1534 bp, Homo sapiens
aacgcttcccgcctttgagggaccagccggcccgaatagcccttcccccaaggccagaacccgtgggaaaccggaacccaggcgtctggcccccaactggggtaacaacctcccacgtcgtcccctagggaaaactgcgctgcactgggctgctgccgtgaacaacgcccgagccgcccgctcgcttctccaggccggagccgataaagatgcccaggacaacagggagcagacgccgctattcctggcggcgcgggaaggagcggtggaagtagcccagctactgctggggctgggggcagcccgagagctgcgggaccaggctgggctagcgccggcggacgtcgctcaccaacgtaaccactgggatctgctgacgctgctggaaggggctgggccaccagaggcccgtcacaaagccacgccgggccgcgaggctgggcccttcccgcgcgcacggacggtgtcagtaagcgtgcccccgcatgggggcggggctctgccgcgctgccggacgctgtcagccggagcaggccctcgtgggggcggagcttgtctgcaggctcggacttggtccgtagacttggctgcgcgggggggcggggcctattctcattgccggagcctctcgggagtaggagcaggaggaggcccgacccctcgcggccgtaggttttctgcaggcatgcgcgggcctcggcccaaccctgcgataatgcgaggaagatacggagtggctgccgggcgcggaggcagggtctcaacggatgactggccctgtgattgggtggccctgggagcttgcggttctgcctccaacattccgatcccgcctccttgccttactccgtccccggagcggggatcacctcaacttgactgtggtcccccagccctccaagaaatgcccataaaccaaggaggagagggtaaaaaatagaagaatacatggtagggaggaattccaaaaatgattacccattaaaaggcaggctggaaggccttcctggttttaagatggatcccccaaaatgaagggttgtgagtttagtttctctcctaaaatgaatgtatgcccaccagagcagacatcttccacgtggagaagctgcagctctggaaagagggtttaagatgctaggatgaggcaggcccagtcctcctccagaaaataagacaggccacaggagggcagagtggagtggaaatacccctaagttggaaccaagaattgcaggcatatgggatgtaagatgttctttcctatatatggtttccaaagggtgcccctatgatccattgtccccactgcccacaaatggctgacaaatatttattgggcacctactatgtgccaggcactgtgtaggtgctgaaaagtggccaagggccacccccgctgatgactccttgcattccctcccctcacaacaaagaactccactgtggggatgaagcgcttcttctagccactgctatcgctatttaagaaccctaaatctgtcacccataataaagctgatttgaagtgtta

SEQ ID NO: 5697 - protein, 84 aa, Homo sapiens
MRGPRPNPAIMRGRYGVAAGRGGRVSTDDWPCDWVALGACGSASNIPIPPPCLTPSPERGSPQLDCGPPALQEMPINQGGEGKK

SEQ ID NO: 5698 - DNA, 5182 bp, Homo sapiens
cctgctttcatggagggacctgtgaggccacagcaggatcacccctgggtttcatctgccactgccccaaggcaagtgaccacaaatctgccttctctgttgccccctatgctgacaaggcaagaatacctcagttggaatcccagaagggactgtgggtgagcactgatgtggaaattattggaaaaagccatgccaagctcacagtgggaagtgtctctcagaagcagtcaaaggcaaggcaggatcagttgatagcatgaatggaattttcaaaaatcacaggcgttgcctaagggaaggtcaggagctccccaagctcaagctgcgtggtgggtggcctcagataggttattttaactctgtgtgtgtttgtatatgtatttatggacctcagatgcatggaattagactaatcttaagctttggttcctgatacactgacattggtttatgcctggtcttcttttattttattattctaacaatgtaacacccatgaacctaacccaagaatttcaatattaataataacttacatctacttaagtcctcctcctgtatcctgttccctctccagaggaagaggaagacatatgatcctatttctaaggagtaagataataatataacagccggccgggcacagtggctcacgcctgtaatcccagcactttgggaggccgaggcaggcggatcacctgaggtcgggcattcgagaccagcctgacaaacatggagaaaccctgtctctactaaaaatacaaattagctgggcgtggtggtgcatggctgtaatcccagctattgggaaggctgaggcaggagaattgcttgaacccgggaggcagaggttgcaatgagctgagattgcaccattgcactccagcctggacaacaagagcgaaactctgtctcaaaaataataataataataatataatagcattctattaactgtttagtcttctaggacttgcactgtaatgccacagtccatcaggttgttgcacacagctgtgcttcatccattttcaacagaatgtaatatgtcattgtgtgaaattaccacaggacatggtttcaacatccacaaaatgattaacttgatgctctctgaggcgccttttagatatgagaatctaggaccctctgcaccgtcttaacccaagagtttgcttgatggagagcgggaagaataatgcaagttgcatctccaatatctcccctcccctccacagggttttgaaggccccacctgcagccacagggccccttcctgcggcttccatcactgccaccacggaggcctgtgtctgccctcccctaagccaggcttcccaccacgctgtgcctgcctcagtggctatgggggtcctgactgcctgaccccaccagctcctaaaggctgtggccctccctccccatgcctatacaatggcagctgctcagagaccacgggcttggggggcccaggctttcgatgctcctgccctcacagctctccagggccccggtgtcagaaacccggagccaaggggtgtgagggcagaagtggagatggggcctgcgatgctggctgcagtggcccgggaggaaactgggatggaggggactgctctctgggagtcccagacccctggaagggctgcccctcccactctcggtgctggcttctcttccgggacgggcagtgccacccacagtgtgactctgaagagtgtctgtttgatggctacgactgtgagacccctccagcctgcacgtgagcctgaaatccactggagccagggaaggagaggggtgggtgagaggaggaggaaggacgtagatggctctgagttacagtgtggccacagccttgggctccagggagtttccaccctaataaccatcactaaacaggggtcgaagactctggactccaacctagggtaatggggtggcatcagtatttaatgtggggcgtggcctttgggctcctctctaagagttgaaggaactcaggtctcaagcctccttccctaagccttgctgccatggagtatttcccctagcagtcagcacctcacagagggaaaagggcctgggactctcctttagaaacagaggagagcttgggagggtacagagaggggacagtctagggagacaggggtgttagcagacattggggtgtctggactaccatccaggacttgactaagctcattgctccacagctgcccccacttagcaaccaaagccctagagggcacaaaatatggggaattctttctagggtgaagaaaagagtcaggttttagggaggtcctgagtccccctctccttaccccacagtccagcctatgaccagtactgccatgatcacttccacaacgggcactgtgagaaaggctgcaacactgcagagtgtggctgggatggaggtgactgcaggcctgaagatggggacccagagtgggggccctccctggccctgctggtggtactgagccccccagccctagaccagcagctgtttgccctggcccgggtgctgtccctgactctgagggtaggactctgggtaaggaaggatcgtgatggcagggacatggtgtacccctatcctggggcccgggctgaagaaaagctaggaggaactcgggaccccacctatcaggagagagcagcccctcaaacgcagcccctgggcaaggagaccgactccctcagtgctgggtttgtggtggtcatgggtgtggatttgtcccgctgtggccctgaccacccggcatcccgctgtccctgggaccctgggcttctactccgcttccttgctgcgatggctgcagtgggagccctggagcccctgctgcctggaccactgctggctgtccaccctcatgcagggaccgcaccccctgccaaccagcttccctggcctgtgctgtgctccccagtggccggggtgattctcctggccctaggggctcttctcgtcctccagctcatccggcgtcgacgccgagagcatggagctctctggctgccccctggtttcactcgacggcctcggactcagtcagctccccaccgacgccggcccccactaggcgaggacagcattggtctcaaggcactgaagccaaaggcagaagttgatgaggatggagttgtgatgtgctcaggccctgaggagggagaggaggctgaagaaacaggcccaccctccacgtgccagctctggtctctgagtggtggctgtggggcgctccctcaggcagccatgctaactcctccccaggaatctgagatggaagcccctgacctggacacccgtggacctgatggggtgacacccctgatgtcagcagtttgctgtggggaagtacagtccgggaccttccaaggggcatggttgggatgtcctgagccctgggaacctctgctggatggaggggcctgtccccaggctcacaccgtgggcactggggagacccccctgcacctggctgcccgattctcccggccaaccgctgcccgccgcctccttgaggctggagccaaccccaaccagccagaccgggcagggcgcacaccccttcatgctgctgtggctgctgatgctcgggaggtctgccagcttctgctccgtagcagacaaactgcagtggacgctcgcacagaggacgggaccacacccttgatgctggctgccaggctggcggtggaagacctggttgaagaactgattgcagcccaagcagacgtgggggccagagataaatgggggaaaactgcgctgcactgggctgctgccgtgaacaacgcccgagccgcccgctcgcttctccaggccggagccgataaagatgcccaggacaacagggagcagacgccgctattcctggcggcgcgggaaggagcggtggaagtagcccagctactgctggggctgggggcagcccgagagctgcgggaccaggctgggctagcgccggcggacgtcgctcaccaacgtaaccactgggatctgctgacgctgctggaaggggctgggccaccagaggcccgtcacaaagccacgccgggccgcgaggctgggcccttcccgcgcgcacggacggtgtcagtaagcgtgcccccgcatgggggcggggctctgccgcgctgccggacgctgtcagccggagcaggccctcgtgggggcggagcttgtctgcaggctcggacttggtccgtagacttggctgcgcgggggggcggggcctattctcattgccggagcctctcgggagtaggagcaggaggaggcccgacccctcgcggccgtaggttttctgcaggcatgcgcgggcctcggcccaaccctgcgataatgcgaggaagatacggagtggctgccgggcgcggaggcagggtctcaacggatgactggccctgtgattgggtggccctgggagcttgcggttctgcctccaacattccgatcccgcctccttgccttactccgtccccggagcggggatcacctcaacttgactgtggtcccccagccctccaagaaatgcccataaaccaaggaggagagggtaaaaaatagaagaatacatggtagggaggaattccaaaaatgattacccattaaaaggcaggctggaaggccttcctggttttaagatggatcccccaaaatgaagggttgtgagtttagtttctctcctaaaatgaatgtatgcccaccagagcagacatcttccacgtggagaagctgcagctctggaaagagggtttaagatgctaggatgaggcaggcccagtcctcctccagaaaataagacaggccacaggagggcagagtggagtggaaatacccctaagttggaaccaagaattgcaggcatatgggatgtaagatgttctttcctatatatggtttccaaagggtgcccctatgatccattgtccccactgcccacaaatggctgacaaatatttattgggcacctactatgtgccaggcactgtgtaggtgctgaaaagtggccaagggccacccccgctgatgactccttgcattccctcccctcacaacaaagaactccactgtggggatgaagcgcttcttctagccactgctatcgctatttaagaaccctaaatctgtcacccataataaagctgatttgaagtgtta

SEQ ID NO: 5699 - protein, 663 aa, Homo sapiens
MVYPYPGARAEEKLGGTRDPTYQERAAPQTQPLGKETDSLSAGFVVVMGVDLSRCGPDHPASRCPWDPGLLLRFLAAMAAVGALEPLLPGPLLAVHPHAGTAPPANQLPWPVLCSPVAGVILLALGALLVLQLIRRRRREHGALWLPPGFTRRPRTQSAPHRRRPPLGEDSIGLKALKPKAEVDEDGVVMCSGPEEGEEAEETGPPSTCQLWSLSGGCGALPQAAMLTPPQESEMEAPDLDTRGPDGVTPLMSAVCCGEVQSGTFQGAWLGCPEPWEPLLDGGACPQAHTVGTGETPLHLAARFSRPTAARRLLEAGANPNQPDRAGRTPLHAAVAADAREVCQLLLRSRQTAVDARTEDGTTPLMLAARLAVEDLVEELIAAQADVGARDKWGKTALHWAAAVNNARAARSLLQAGADKDAQDNREQTPLFLAAREGAVEVAQLLLGLGAARELRDQAGLAPADVAHQRNHWDLLTLLEGAGPPEARHKATPGREAGPFPRARTVSVSVPPHGGGALPRCRTLSAGAGPRGGGACLQARTWSVDLAARGGGAYSHCRSLSGVGAGGGPTPRGRRFSAGMRGPRPNPAIMRGRYGVAAGRGGRVSTDDWPCDWVALGACGSASNIPIPPPCLTPSPERGSPQLDCGPPALQEMPINQGGEGKK

SEQ ID NO: 5700 - DNA, 6736 bp, Homo sapiens
agacgtgaggcttgcagcaggccgaggaggaagaagaggggcagtgggagcagaggaggtggctcctgccccagtgagagctctgagggtccctgcctgaagagggacagggaccggggcttggagaaggggctgtggaatgcagcccccttcactgctgctgctgctgctgctgctgctgctgctatgtgtctcagtggtcagacccagagggctgctgtgtgggagtttcccagaaccctgtgccaatggaggcacctgcctgagcctgtctctgggacaagggacctgccagtgtgcccctggcttcctgggtgagacgtgccagtttcctgacccctgccagaacgcccagctctgccaaaatggaggcagctgccaagccctgcttcccgctcccctagggctccccagctctccctctccattgacacccagcttcttgtgcacttgcctccctggcttcactggtgagagatgccaggccaagcttgaagacccttgtcctccctccttctgttccaaaaggggccgctgccacatccaggcctcgggccgcccacagtgctcctgcatgcctggatggacaggtgagcagtgccagcttcgggacttctgttcagccaacccatgtgttaatggaggggtgtgtctggccacatacccccagatccagtgccactgcccaccgggcttcgagggccatgcctgtgaacgtgatgtcaacgagtgcttccaggacccaggaccctgccccaaaggcacctcctgccataacaccctgggctccttccagtgcctctgccctgtggggcaggagggtccacgttgtgagctgcgggcaggaccctgccctcctaggggctgttcgaatgggggcacctgccagctgatgccagagaaagactccacctttcacctctgcctctgtcccccaggtttcataggcccagactgtgaggtgaatccagacaactgtgtcagccaccagtgtcagaatgggggcacttgccaggatgggctggacacctacacctgcctctgcccagaaacctggacaggctgggactgctccgaagatgtggatgagtgtgagacccagggtccccctcactgcagaaacgggggcacctgccagaactctgctggtagctttcactgcgtgtgtgtgagtggctggggcggcacaagctgtgaggagaacctggatgactgtattgctgccacctgtgccccgggatccacctgcattgaccgggtgggctctttctcctgcctctgcccacctggacgcacaggactcctgtgccacttggaagacatgtgtctgagccagccgtgccatggggatgcccaatgcagcaccaaccccctcacaggctccacactctgcctgtgtcagcctggctattcggggcccacctgccaccaggacctggacgagtgtctgatggcccagcaaggcccaagtccctgtgaacatggcggttcctgcctcaacactcctggctccttcaactgcctctgtccacctggctacacaggctcccgttgtgaggctgatcacaatgagtgcctctcccagccctgccacccaggaagcacctgtctggacctacttgccaccttccactgcctctgcccgccaggcttagaagggcagctctgtgaggtggagaccaacgagtgtgcctcagctccctgcctgaaccacgcggattgccatgacctgctcaacggcttccagtgcatctgcctgcctggattctccggcacccgatgtgaggaggatatcgatgagtgcagaagctctccctgtgccaatggtgggcagtgccaggaccagcctggagccttccactgcaagtgtctcccaggctttgaagggccacgctgtcaaacagaggtggatgagtgcctgagtgacccatgtcccgttggagccagctgccttgatcttccaggagccttcttttgcctctgcccctctggtttcacaggccagctctgtgaggttcccctgtgtgctcccaacctgtgccagcccaagcagatatgtaaggaccagaaagacaaggccaactgcctctgtcctgatggaagccctggctgtgccccacctgaggacaactgcacctgccaccacgggcactgccagagatcctcatgtgtgtgtgacgtgggttggacggggccagagtgtgaggcagagctagggggctgcatctctgcaccctgtgcccatggggggacctgctacccccagccctctggctacaactgcacctgccctacaggctacacaggacccacctgtagtgaggagatgacagcttgtcactcagggccatgtctcaatggcggctcctgcaaccctagccctggaggctactactgcacctgccctccaagccacacagggccccagtgccaaaccagcactgactactgtgtgtctgccccgtgcttcaatgggggtacctgtgtgaacaggcctggcaccttctcctgcctctgtgccatgggcttccagggcccgcgctgtgagggaaagctccgccccagctgtgcagacagcccctgtaggaatagggcaacctgccaggacagccctcagggtccccgctgcctctgccccactggctacaccggaggcagctgccagactctgatggacttatgtgcccagaagccctgcccacgcaattcccactgcctccagactgggccctccttccactgcttgtgcctccagggatggaccgggcctctctgcaaccttccactgtcctcctgccagaaggctgcactgagccaaggcatagacgtctcttccctttgccacaatggaggcctctgtgtcgacagcggcccctcctatttctgccactgcccccctggattccaaggcagcctgtgccaggatcacgtgaacccatgtgagtccaggccttgccagaacggggccacctgcatggcccagcccagtgggtatctctgccagtgtgccccaggctacgatggacagaactgctcaaaggaactcgatgcttgtcagtcccaaccctgtcacaaccatggaacctgtactcccaaacctggaggattccactgtgcctgccctccaggctttgtggggctacgctgtgagggagacgtggacgagtgtctggaccagccctgccaccccacaggcactgcagcctgccactctctggccaatgccttctactgccagtgtctgcctggacacacaggccagtggtgtgaggtggagatagacccctgccacagccaaccctgctttcatggagggacctgtgaggccacagcaggatcacccctgggtttcatctgccactgccccaagggttttgaaggccccacctgcagccacagggccccttcctgcggcttccatcactgccaccacggaggcctgtgtctgccctcccctaagccaggcttcccaccacgctgtgcctgcctcagtggctatgggggtcctgactgcctgaccccaccagctcctaaaggctgtggccctccctccccatgcctatacaatggcagctgctcagagaccacgggcttggggggcccaggctttcgatgctcctgccctcacagctctccagggccccggtgtcagaaacccggagccaaggggtgtgagggcagaagtggagatggggcctgcgatgctggctgcagtggcccgggaggaaactgggatggaggggactgctctctgggagtcccagacccctggaagggctgcccctcccactctcggtgctggcttctcttccgggacgggcagtgccacccacagtgtgactctgaagagtgtctgtttgatggctacgactgtgagacccctccagcctgcactccagcctatgaccagtactgccatgatcacttccacaacgggcactgtgagaaaggctgcaacactgcagagtgtggctgggatggaggtgactgcaggcctgaagatggggacccagagtgggggccctccctggccctgctggtggtactgagccccccagccctagaccagcagctgtttgccctggcccgggtgctgtccctgactctgagggtaggactctgggtaaggaaggatcgtgatggcagggacatggtgtacccctatcctggggcccgggctgaagaaaagctaggaggaactcgggaccccacctatcaggagagagcagcccctcaaacgcagcccctgggcaaggagaccgactccctcagtgctgggtttgtggtggtcatgggtgtggatttgtcccgctgtggccctgaccacccggcatcccgctgtccctgggaccctgggcttctactccgcttccttgctgcgatggctgcagtgggagccctggagcccctgctgcctggaccactgctggctgtccaccctcatgcagggaccgcaccccctgccaaccagcttccctggcctgtgctgtgctccccagtggccggggtgattctcctggccctaggggctcttctcgtcctccagctcatccggcgtcgacgccgagagcatggagctctctggctgccccctggtttcactcgacggcctcggactcagtcagctccccaccgacgccggcccccactaggcgaggacagcattggtctcaaggcactgaagccaaaggcagaagttgatgaggatggagttgtgatgtgctcaggccctgaggagggagaggaggctgaagaaacaggcccaccctccacgtgccagctctggtctctgagtggtggctgtggggcgctccctcaggcagccatgctaactcctccccaggaatctgagatggaagcccctgacctggacacccgtggacctgatggggtgacacccctgatgtcagcagtttgctgtggggaagtacagtccgggaccttccaaggggcatggttgggatgtcctgagccctgggaacctctgctggatggaggggcctgtccccaggctcacaccgtgggcactggggagacccccctgcacctggctgcccgattctcccggccaaccgctgcccgccgcctccttgaggctggagccaaccccaaccagccagaccgggcagggcgcacaccccttcatgctgctgtggctgctgatgctcgggaggtctgccagcttctgctccgtagcagacaaactgcagtggacgctcgcacagaggacgggaccacacccttgatgctggctgccaggctggcggtggaagacctggttgaagaactgattgcagcccaagcagacgtgggggccagagataaatgggggaaaactgcgctgcactgggctgctgccgtgaacaacgcccgagccgcccgctcgcttctccaggccggagccgataaagatgcccaggacaacagggagcagacgccgctattcctggcggcgcgggaaggagcggtggaagtagcccagctactgctggggctgggggcagcccgagagctgcgggaccaggctgggctagcgccggcggacgtcgctcaccaacgtaaccactgggatctgctgacgctgctggaaggggctgggccaccagaggcccgtcacaaagccacgccgggccgcgaggctgggcccttcccgcgcgcacggacggtgtcagtaagcgtgcccccgcatgggggcggggctctgccgcgctgccggacgctgtcagccggagcaggccctcgtgggggcggagcttgtctgcaggctcggacttggtccgtagacttggctgcgcgggggggcggggcctattctcattgccggagcctctcgggagtaggagcaggaggaggcccgacccctcgcggccgtaggttttctgcaggcatgcgcgggcctcggcccaaccctgcgataatgcgaggaagatacggagtggctgccgggcgcggaggcagggtctcaacggatgactggccctgtgattgggtggccctgggagcttgcggttctgcctccaacattccgatcccgcctccttgccttactccgtccccggagcggggatcacctcaacttgactgtggtcccccagccctccaagaaatgcccataaaccaaggaggagagggtaaaaaatagaagaatacatggtagggaggaattccaaaaatgattacccattaaaaggcaggctggaaggccttcctggttttaagatggatcccccaaaatgaagggttgtgagtttagtttctctcctaaaatgaatgtatgcccaccagagcagacatcttccacgtggagaagctgcagctctggaaagagggtttaagatgctaggatgaggcaggcccagtcctcctccagaaaataagacaggccacaggagggcagagtggagtggaaatacccctaagttggaaccaagaattgcaggcatatgggatgtaagatgttctttcctatatatggtttccaaagggtgcccctatgatccattgtccccactgcccacaaatggctgacaaatatttattgggcacctactatgtgccaggcactgtgtaggtgctgaaaagtggccaagggccacccccgctgatgactccttgcattccctcccctcacaacaaagaactccactgtggggatgaagcgcttcttctagccactgctatcgctatttaagaaccctaaatctgtcacccataataaagctgatttgaagtgtta

SEQ ID NO: 5701 - protein, 2000 aa, Homo sapiens
MQPPSLLLLLLLLLLLCVSVVRPRGLLCGSFPEPCANGGTCLSLSLGQGTCQCAPGFLGETCQFPDPCQNAQLCQNGGSCQALLPAPLGLPSSPSPLTPSFLCTCLPGFTGERCQAKLEDPCPPSFCSKRGRCHIQASGRPQCSCMPGWTGEQCQLRDFCSANPCVNGGVCLATYPQIQCHCPPGFEGHACERDVNECFQDPGPCPKGTSCHNTLGSFQCLCPVGQEGPRCELRAGPCPPRGCSNGGTCQLMPEKDSTFHLCLCPPGFIGPDCEVNPDNCVSHQCQNGGTCQDGLDTYTCLCPETWTGWDCSEDVDECETQGPPHCRNGGTCQNSAGSFHCVCVSGWGGTSCEENLDDCIAATCAPGSTCIDRVGSFSCLCPPGRTGLLCHLEDMCLSQPCHGDAQCSTNPLTGSTLCLCQPGYSGPTCHQDLDECLMAQQGPSPCEHGGSCLNTPGSFNCLCPPGYTGSRCEADHNECLSQPCHPGSTCLDLLATFHCLCPPGLEGQLCEVETNECASAPCLNHADCHDLLNGFQCICLPGFSGTRCEEDIDECRSSPCANGGQCQDQPGAFHCKCLPGFEGPRCQTEVDECLSDPCPVGASCLDLPGAFFCLCPSGFTGQLCEVPLCAPNLCQPKQICKDQKDKANCLCPDGSPGCAPPEDNCTCHHGHCQRSSCVCDVGWTGPECEAELGGCISAPCAHGGTCYPQPSGYNCTCPTGYTGPTCSEEMTACHSGPCLNGGSCNPSPGGYYCTCPPSHTGPQCQTSTDYCVSAPCFNGGTCVNRPGTFSCLCAMGFQGPRCEGKLRPSCADSPCRNRATCQDSPQGPRCLCPTGYTGGSCQTLMDLCAQKPCPRNSHCLQTGPSFHCLCLQGWTGPLCNLPLSSCQKAALSQGIDVSSLCHNGGLCVDSGPSYFCHCPPGFQGSLCQDHVNPCESRPCQNGATCMAQPSGYLCQCAPGYDGQNCSKELDACQSQPCHNHGTCTPKPGGFHCACPPGFVGLRCEGDVDECLDQPCHPTGTAACHSLANAFYCQCLPGHTGQWCEVEIDPCHSQPCFHGGTCEATAGSPLGFICHCPKGFEGPTCSHRAPSCGFHHCHHGGLCLPSPKPGFPPRCACLSGYGGPDCLTPPAPKGCGPPSPCLYNGSCSETTGLGGPGFRCSCPHSSPGPRCQKPGAKGCEGRSGDGACDAGCSGPGGNWDGGDCSLGVPDPWKGCPSHSRCWLLFRDGQCHPQCDSEECLFDGYDCETPPACTPAYDQYCHDHFHNGHCEKGCNTAECGWDGGDCRPEDGDPEWGPSLALLVVLSPPALDQQLFALARVLSLTLRVGLWVRKDRDGRDMVYPYPGARAEEKLGGTRDPTYQERAAPQTQPLGKETDSLSAGFVVVMGVDLSRCGPDHPASRCPWDPGLLLRFLAAMAAVGALEPLLPGPLLAVHPHAGTAPPANQLPWPVLCSPVAGVILLALGALLVLQLIRRRRREHGALWLPPGFTRRPRTQSAPHRRRPPLGEDSIGLKALKPKAEVDEDGVVMCSGPEEGEEAEETGPPSTCQLWSLSGGCGALPQAAMLTPPQESEMEAPDLDTRGPDGVTPLMSAVCCGEVQSGTFQGAWLGCPEPWEPLLDGGACPQAHTVGTGETPLHLAARFSRPTAARRLLEAGANPNQPDRAGRTPLHAAVAADAREVCQLLLRSRQTAVDARTEDGTTPLMLAARLAVEDLVEELIAAQADVGARDKWGKTALHWAAAVNNARAARSLLQAGADKDAQDNREQTPLFLAAREGAVEVAQLLLGLGAARELRDQAGLAPADVAHQRNHWDLLTLLEGAGPPEARHKATPGREAGPFPRARTVSVSVPPHGGGALPRCRTLSAGAGPRGGGACLQARTWSVDLAARGGGAYSHCRSLSGVGAGGGPTPRGRRFSAGMRGPRPNPAIMRGRYGVAAGRGGRVSTDDWPCDWVALGACGSASNIPIPPPCLTPSPERGSPQLDCGPPALQEMPINQGGEGKK

SEQ ID NO: 5702 - DNA, 1289 bp, Homo sapiens
gccttctactgccagtgtctgcctggacacacaggccagtggtgtgaggtggagatagacccctgccacagccaaccctgctttcatggagggacctgtgaggccacagcaggatcacccctgggtttcatctgccactgccccaaggcaagtgaccacaaatctgccttctctgttgccccctatgctgacaaggcaagaatacctcagttggaatcccagaagggactgtgggtgagcactgatgtggaaattattggaaaaagccatgccaagctcacagtgggaagtgtctctcagaagcagtcaaaggcaaggcaggatcagttgatagcatgaatggaattttcaaaaatcacaggcgttgcctaagggaaggtcaggagctccccaagctcaagctgcgtggtgggtggcctcagataggttattttaactctgtgtgtgtttgtatatgtatttatggacctcagatgcatggaattagactaatcttaagctttggttcctgatacactgacattggtttatgcctggtcttcttttattttattattctaacaatgtaacacccatgaacctaacccaagaatttcaatattaataataacttacatctacttaagtcctcctcctgtatcctgttccctctccagaggaagaggaagacatatgatcctatttctaaggagtaagataataatataacagccggccgggcacagtggctcacgcctgtaatcccagcactttgggaggccgaggcaggcggatcacctgaggtcgggcattcgagaccagcctgacaaacatggagaaaccctgtctctactaaaaatacaaattagctgggcgtggtggtgcatggctgtaatcccagctattgggaaggctgaggcaggagaattgcttgaacccgggaggcagaggttgcaatgagctgagattgcaccattgcactccagcctggacaacaagagcgaaactctgtctcaaaaataataataataataatataatagcattctattaactgtttagtcttctaggacttgcactgtaatgccacagtccatcaggttgttgcacacagctgtgcttcatccattttcaacagaatgtaatatgtcattgtgtgaaattaccacaggacatggtttcaacatccacaaaatgattaacttgatgctctctgaggcgccttttagatatgagaatctaggaccctctgcaccgtcttaacccaagagtttgcttgatggagagcgggaagaataatgcaagttgca

SEQ ID NO: 5703 - protein, 59 aa, Homo sapiens
MPQSIRLLHTAVLHPFSTECNMSLCEITTGHGFNIHKMINLMLSEAPFRYENLGPSAPS

SEQ ID NO: 5704 - DNA, 568 bp, Homo sapiens
cctcatgtgtgtgtgacgtgggttggacggggccagagtgtgaggcagagctagggggctgcatctctgcaccctgtgcccatggggggacctgctacccccagccctctggctacaactgcacctgccctacaggctacacaggacccacctgtagtgaggagatgacagcttgtcactcagggccatgtctcaatggcggctcctgcaaccctagccctggaggctactactgcacctgccctccaagccacacagggccccagtgccaaaccagcactgactactgtgtgtctgccccgtgcttcaatgggggtacctgtgtgaacaggcctggcaccttctcctgcctctgtgccatgggcttccagggcccgcgctgtgagggaaagctccgccccagctgtgcagacagactctgatggacttatgtgcccagaagccctgcccacgcaattcccactgcctccagactgggccctccttccactgcttgtgcctccagggatggaccgggcctctctgcaaccttccactgtcctcctgccagaaggctgcactgagccaa

SEQ ID NO: 5705 - protein, 85 aa, Homo sapiens
MTACHSGPCLNGGSCNPSPGGYYCTCPPSHTGPQCQTSTDYCVSAPCFNGGTCVNRPGTFSCLCAMGFQGPRCEGKLRPSCADRL

SEQ ID NO: 5706 - DNA, 3072 bp, Homo sapiens
agacgtgaggcttgcagcaggccgaggaggaagaagaggggcagtgggagcagaggaggtggctcctgccccagtgagagctctgagggtccctgcctgaagagggacagggaccggggcttggagaaggggctgtggaatgcagcccccttcactgctgctgctgctgctgctgctgctgctgctatgtgtctcagtggtcagacccagagggctgctgtgtgggagtttcccagaaccctgtgccaatggaggcacctgcctgagcctgtctctgggacaagggacctgccagtgtgcccctggcttcctgggtgagacgtgccagtttcctgacccctgccagaacgcccagctctgccaaaatggaggcagctgccaagccctgcttcccgctcccctagggctccccagctctccctctccattgacacccagcttcttgtgcacttgcctccctggcttcactggtgagagatgccaggccaagcttgaagacccttgtcctccctccttctgttccaaaaggggccgctgccacatccaggcctcgggccgcccacagtgctcctgcatgcctggatggacaggtgagcagtgccagcttcgggacttctgttcagccaacccatgtgttaatggaggggtgtgtctggccacatacccccagatccagtgccactgcccaccgggcttcgagggccatgcctgtgaacgtgatgtcaacgagtgcttccaggacccaggaccctgccccaaaggcacctcctgccataacaccctgggctccttccagtgcctctgccctgtggggcaggagggtccacgttgtgagctgcgggcaggaccctgccctcctaggggctgttcgaatgggggcacctgccagctgatgccagagaaagactccacctttcacctctgcctctgtcccccaggtttcataggcccagactgtgaggtgaatccagacaactgtgtcagccaccagtgtcagaatgggggcacttgccaggatgggctggacacctacacctgcctctgcccagaaacctggacaggctgggactgctccgaagatgtggatgagtgtgagacccagggtccccctcactgcagaaacgggggcacctgccagaactctgctggtagctttcactgcgtgtgtgtgagtggctggggcggcacaagctgtgaggagaacctggatgactgtattgctgccacctgtgccccgggatccacctgcattgaccgggtgggctctttctcctgcctctgcccacctggacgcacaggactcctgtgccacttggaagacatgtgtctgagccagccgtgccatggggatgcccaatgcagcaccaaccccctcacaggctccacactctgcctgtgtcagcctggctattcggggcccacctgccaccaggacctggacgagtgtctgatggcccagcaaggcccaagtccctgtgaacatggcggttcctgcctcaacactcctggctccttcaactgcctctgtccacctggctacacaggctcccgttgtgaggctgatcacaatgagtgcctctcccagccctgccacccaggaagcacctgtctggacctacttgccaccttccactgcctctgcccgccaggcttagaagggcagctctgtgaggtggagaccaacgagtgtgcctcagctccctgcctgaaccacgcggattgccatgacctgctcaacggcttccagtgcatctgcctgcctggattctccggcacccgatgtgaggaggatatcgatgagtgcagaagctctccctgtgccaatggtgggcagtgccaggaccagcctggagccttccactgcaagtgtctcccaggctttgaagggccacgctgtcaaacagaggtggatgagtgcctgagtgacccatgtcccgttggagccagctgccttgatcttccaggagccttcttttgcctctgcccctctggtttcacaggttcacaggggaggcactggaaagaactggcagaatattttattccatttgggttggggcagagttcattggtgggtgtttgatggttgggatgtgagaatagaatgagaatggtatcctttaaagttatttagtgtaaaacctgcacaattgtacaaccatggggacaagggcaggggttaccgtagggcccacatgggcccagtgtaaatggtgtgattgcggcttgggagcagaggacggggctcaaagaaaaggcattcacttgcttatttagcaagcacttaccaactgcctactatgccagatacggaggcaaatctgagtaagacagttgccatcttcatgtgactttaagtctaatacagagagaccaacaagtctcctgttgatcatagcccacagaggtgctctgagagaaaaacgtgcaggatattacaagagcacagaggaccagccaacccagactaaaaatggaggaggtgatggctgagatgagtcttgaaagataagcagaggctgggcgtggtggctcacgcctatagtcccagcacttcgggaagccgaggcgggtggatcacccgagattaggagttcgagatcagcctggccaacatggtgaaacctcgtctctattaaaaatacaaaaattacactttgggaggccgaggcgggtggatcatgaggtcaggagatcgacactatcctggctaacacggtgaaaccccatctcaactaaaaatacaaaaaaataactgggcgtggtggcgggcgcctatagtcccagctactccagaggctgaggcaggagaatggcgtgaacccgggaggcggagcttgcagtgagctgagatcacgccactgcactccagcctgggtggcagagtaagactccacctcaaaaaaaaaaaaaaatacaaaaattagccaggcgtggtggcgggcgcctgcaatcccagctattggggaggctgaggcaagagaatcgcttgaacctgggaagcagtggttgcagtgagctgagatcactccactgcactccagcctgggtgacagagcaagattccatctc

SEQ ID NO: 5707 - protein, 647 aa, Homo sapiens
MQPPSLLLLLLLLLLLCVSVVRPRGLLCGSFPEPCANGGTCLSLSLGQGTCQCAPGFLGETCQFPDPCQNAQLCQNGGSCQALLPAPLGLPSSPSPLTPSFLCTCLPGFTGERCQAKLEDPCPPSFCSKRGRCHIQASGRPQCSCMPGWTGEQCQLRDFCSANPCVNGGVCLATYPQIQCHCPPGFEGHACERDVNECFQDPGPCPKGTSCHNTLGSFQCLCPVGQEGPRCELRAGPCPPRGCSNGGTCQLMPEKDSTFHLCLCPPGFIGPDCEVNPDNCVSHQCQNGGTCQDGLDTYTCLCPETWTGWDCSEDVDECETQGPPHCRNGGTCQNSAGSFHCVCVSGWGGTSCEENLDDCIAATCAPGSTCIDRVGSFSCLCPPGRTGLLCHLEDMCLSQPCHGDAQCSTNPLTGSTLCLCQPGYSGPTCHQDLDECLMAQQGPSPCEHGGSCLNTPGSFNCLCPPGYTGSRCEADHNECLSQPCHPGSTCLDLLATFHCLCPPGLEGQLCEVETNECASAPCLNHADCHDLLNGFQCICLPGFSGTRCEEDIDECRSSPCANGGQCQDQPGAFHCKCLPGFEGPRCQTEVDECLSDPCPVGASCLDLPGAFFCLCPSGFTGSQGRHWKELAEYFIPFGLGQSSLVGV

SEQ ID NO: 5708 - DNA, 735 bp, Homo sapiens
atggcctcatgggatgaaaaagacctgactatccgccagcccaacacccgtaaagggattgatatgtatatagaaggtatggcagatttgaatgaaatgatccttcttctgcccatatgtcaacctgaggaaaaagatgtcaaacttgccttgatcgaagagagaatgaaaaattgctatttccctacctttgagaaagccctgaaaaccagaatcagcaacctccccacagtgaagaagtttctgcagcctggcagccagaggaggcctcccgtagatgtgaaagctttagaagaagcaaggaagactttcaaggctgatggaaggtttaaaattgcaaatatgggatttgagtcctttgcagaaggtacccaaaagactctagagtacctgcaatcaagaggatggactagcaacccaaagaaagtccaggggccagggggcactgtaaaattcctggatgtgatctggtcaggactctcctcactgagaagctgggttgtagttttcatggaagctgttcgtgccttgagtgtggcccccattgtgggaaaaatgtctacttatgaacatcaggaagatgtaaagaacctggtgctagccgtgcaggccctggtagatgcactggcagtgggcaggcagtgccccatactggtgggcactagtccagtggatctcacccagccctgtcactgtggagtcagtagctcctcccacactgggacagaggtctag

SEQ ID NO: 5709 - protein, 244 aa, Homo sapiens
MASWDEKDLTIRQPNTRKGIDMYIEGMADLNEMILLLPICQPEEKDVKLALIEERMKNCYFPTFEKALKTRISNLPTVKKFLQPGSQRRPPVDVKALEEARKTFKADGRFKIANMGFESFAEGTQKTLEYLQSRGWTSNPKKVQGPGGTVKFLDVIWSGLSSLRSWVVVFMEAVRALSVAPIVGKMSTYEHQEDVKNLVLAVQALVDALAVGRQCPILVGTSPVDLTQPCHCGVSSSSHTGTEV

SEQ ID NO: 5710 - DNA, 524 bp, Homo sapiens; identical to SEQ ID NO: 741

SEQ ID NO: 5711 - protein, 85 aa, Homo sapiens [sequence omitted]

SEQ ID NO: 5712 - DNA, 563 bp, Homo sapiens
gtgcactgccaaactcagaaatcttatattctccaaatgatgcaccagataggggctattcaaagtcagaagtttataatgctatggaatgaactaacgaaaactcatttactgtttctgtctccagtttgaccagaaatttctagaatctgcagaagaattggacaagttaagaaatggattgatatgtatatagaaggtatggcagatttgaatgaaatgatccttcttctgcccatatgtcaacctgaggaaaaagatgtcaaacttgccttgatcgaagagagaatgaaaaattgctatttccctacctttgagaaagccctgaaaaccagaatcagcaacctccccacagtgaagaagtttctgcagcctggcagccagaggaggcctcccgtagatgtgaaagctttagaagaagcaaggaagactttcaaggtttgaaaaagaagccatcgaggccaagcacatgcaagaccaattttctaaagttctgcaacaatgaagtgatttacctaagtgttgattctgattgttgtgagaccaataaagttttccaaagt

SEQ ID NO: 5713 - protein, 85 aa, Homo sapiens [sequence omitted]

SEQ ID NO: 5714 - DNA, 3553 bp, Homo sapiens
attccagaaacagacactgctacatgttcttcataaattaacaccctcataaaggtaaaccaagaaggttatcctcaatcatctggtatcaatatataattatttttcacatttctgttactttttaatgagatttgaggttgttctgtgattgttatcagaattaccaatgcacaaaagccagaatgtatttggaaactagaagagctatttttgttttttggatttttctccaagttcaaggaaccaaagatatctccattaacatataccattctgaaactaaagacatagacaatcccccaagaaatgaaacaactgaaagtactgaaaaaatgtacaaaatgtcaactatgagacgaatattcgatttggcaaagcatcgaacaaaaagatccgcatttttcccaacgggggttaaagtctgtccacaggaatccatgaaacagattttagacagtcttcaagcttattatagattgagagtgtgtcaggaagcagtatgggaagcatatcggatctttctggatcgcatccctgacacaggggaatatcaggactgggtcagcatctgccagcaggagaccttctgcctctttgacattggaaaaaacttcagcaattcccaggagcacctggatcttctccagcagagaataaaacagagaagtttccctgacaggcaaatgaaatatctgcagagaagacattgggagagcctggtgaaaccattgtcatttcaacagatgttgccaacgtctcacttgggcctttccctctcactcctgatgacaccctcctcaatgaaattctcgataatacactcaacgacaccaagatgcctacaacagaaagagaaacagaattcgctgtgttggaggagcagagggtggagctcagcgtctctctggtaaaccagaagttcaaggcagagctcgctgactcccagtccccatattaccaggagctagcaggaaagtcccaacttcagatgcaaaagatatttaagaaacttccaggattcaaaaaaatccatgtgttaggatttagaccaaagaaagaaaaagatggctcaagctccacagagatgcaacttacggccatctttaagagacacagtgcagaagcaaaaagccctgcaagtgacctcctgtcttttgattccaacaaaattgaaagtgaggaagtctatcatggaaccatggaggaggacaagcaaccagaaatctatctcacagctacagacctcaaaaggctgatcagcaaagcactagaggaagaacaatctttggatgtggggacaattcagttcactgatgaaattgctggatcactgccagcctttggtcctgacacccaatcagagctgcccacatcttttgctgttataacagaggatgctactttgagtccagaacttcctcctgttgaaccccagcttgagacagtggacggagcagagcatggtctacctgacacttcttggtctccacctgctatggcctctacctccctgtcagaagctccacctttctttatggcatcaagcatcttctctctgactgatcaaggcaccacagatacaatggccactgaccagacaatgctagtaccagggctcaccatccccaccagtgattattctgcaatcagccaactggctctgggaatttcacatccacctgcatcttcagatgacagccgatcaagtgcaggtggcgaagatatggtcagacacctagatgaaatggatctgtctgacactcctgccccatctgaggtaccagagctcagcgaatatgtttctgtcccagatcatttcttggaggataccactcctgtctcagctttacagtatatcaccactagttctatgaccattgcccccaagggccgagagctggtagtgttcttcagtctgcgtgttgctaacatggccttctccaacgacctgttcaacaagagctctctggagtaccgagctctggagcaacaattcacacagctgctggttccatatctacgatccaatcttacaggatttaagcaacttgaaatacttaacttcagaaacgggagtgtgattgtgaatagcaaaatgaagtttgctaagtcagtgccgtataacctcaccaaggctgtgcacggggtcttggaggattttcgttctgctgcagcccaacaactccatctggaaatagacagctactctctcaacattgaaccagctgatcaagcagatccctgcaagttcctggcctgcggcgaatttgcccaatgtgtaaagaacgaacggactgaggaagcggagtgtcgctgcaaaccaggatatgacagccaggggagcctggacggtctggaaccaggcctctgtggccctggcacaaaggaatgcgaggtcctccagggaaagggagctccatgcaggttgccagatcactctgaaaatcaagcatacaaaactagtgttaaaaagttccaaaatcaacaaaataacaaggtaatcagtaaaagaaattctgaattactgaccgtagaatatgaagaatttaaccatcaagattgggaaggaaattaaaaactgaaaatgtacaattatcatttaggctatctcaagagagatgatttgccttctcaaggaaaatggagacaggcatattcatgggtcatcaaaatccagacatacagtcaacactgagaatcagcacacaccatatttcaaatatagaagagtcatgtacttggcaaccagtaaattctgaagaaaaagacacttacttattattaaaaccccaaatgcaatcagcgaaacatatttttactattcttggatgatagtcaaaatgatcataagccaggtttgcttccaccttccctgaaaattttactcacagatcatttgcaacaagcatagcttacttattgtttagggactgaacaatttattgggaagcaaactctttatatgctagaaagtacatttaaaagatgactacttacgcagggagatgcaggtctctctaaacgcatgaatgtatgtagtgtgtaggcactgtagtgagtgtatatatgctccacactacgtctgataaacacaaacctcagtattcagttattaggcacactagttttatacgcaactactgcttacatagtagactgttttgttgccaataatctttgaattgttctttaaaagaaactgaggttcagatacacataccatggaaaaatcttacttttcttgttactacacaaagctattttaaagaagatgctatgttgggagaagggcgaagttgtactatatgacataatcaattcctgtcttccaccacagatgaacaatgtcttcctataataacttcagaatatttcctcacaccaactttagtgtgtgtatacctagactggcatcaatgtaatccaattcagtccattttttatgtgctgcttaatgaaaatgaatctgtctctatctctttcaaatgttctaatatcagatatatttgctacaaaccttaatttcaataaagtaaaagtgatatactca

SEQ ID NO: 5715 - protein, 579 aa, Homo sapiens
MPTTERETEFAVLEEQRVELSVSLVNQKFKAELADSQSPYYQELAGKSQLQMQKIFKKLPGFKKIHVLGFRPKKEKDGSSSTEMQLTAIFKRHSAEAKSPASDLLSFDSNKIESEEVYHGTMEEDKQPEIYLTATDLKRLISKALEEEQSLDVGTIQFTDEIAGSLPAFGPDTQSELPTSFAVITEDATLSPELPPVEPQLETVDGAEHGLPDTSWSPPAMASTSLSEAPPFFMASSIFSLTDQGTTDTMATDQTMLVPGLTIPTSDYSAISQLALGISHPPASSDDSRSSAGGEDMVRHLDEMDLSDTPAPSEVPELSEYVSVPDHFLEDTTPVSALQYITTSSMTIAPKGRELVVFFSLRVANMAFSNDLFNKSSLEYRALEQQFTQLLVPYLRSNLTGFKQLEILNFRNGSVIVNSKMKFAKSVPYNLTKAVHGVLEDFRSAAAQQLHLEIDSYSLNIEPADQADPCKFLACGEFAQCVKNERTEEAECRCKPGYDSQGSLDGLEPGLCGPGTKECEVLQGKGAPCRLPDHSENQAYKTSVKKFQNQQNNKVISKRNSELLTVEYEEFNHQDWEGN

SEQ ID NO: 5716 - DNA, 632 bp, Homo sapiens
gttcttcataaattaacaccctcataaaggtaaaccaagaaggttatcctcaatcatctggtatcaatatataattatttttcacatttctgttactttttaatgagatttgaggttgttctgtgattgttatcagaattaccaatgcacaaaagccagaatgtatttggaaactagaagagctatttttgttttttggatttttctccaagttcaaggaaccaaagtgtgtcaggaagcagtatgggaagcatatcggatctttctggatcgcatccctgacacaggggaatatcaggactgggtcagcatctgccagcaggagaccttctgcctctttgacattggaaaaaacttcagcaattcccaggagcacctggatcttctccagcagagaataaaacagagaagtttccctgacaggcaaatgaaatatctgcagagaagacattgggagagcctggtgaaaccattgtcatttcaacagatgttgccaacgtctcacttgggcctttccctctcactcctgatgacaccctcctcaatgaaattctcgataatacactcaacgacaccaagatgcctacaacagaaagagaaacagaattcgctgtgttggaggagcagagggt

SEQ ID NO: 5717 - protein, 156 aa, Homo sapiens
MYLETRRAIFVFWIFLQVQGTKVCQEAVWEAYRIFLDRIPDTGEYQDWVSICQQETFCLFDIGKNFSNSQEHLDLLQQRIKQRSFPDRQMKYLQRRHWESLVKPLSFQQMLPTSHLGLSLSLLMTPSSMKFSIIHSTTPRCLQQKEKQNSLCWRSR

SEQ ID NO: 5718 - DNA, 911 bp, Homo sapiens
aggactgaccagggccaagtggcgctcggcgggcactacatggcggagggtgaagggtacttcgccatgtctgaggacgagctggcctgcagcccctacatccccctaggcggcgacttcggcggcggcgacttcggcggcggcgacttcggcggcggcgacttcggcggtggcggcagcttcggtgggcattgcttggactattgcgaaagccctacggcgcactgcaatgtgctgaactgggagcaagtgcagcggctggacggcatcctgagcgagaccattccgattcacgggcgcggcaacttccccacgctcgagctgcagccgagcctgatcgtgaaggtggtgcggcggcgcctggccgagaagcgcattggcgtccgcgacgtgcgcctcaacggctcggcagccagccatgtcctgcaccaggacagcggcctgggctacaaggacctggacctcatcttctgcgccgacctgcgcggggaaggggagtttcagactgtgaaggacgtcgtgctggactgcctgttggacttcttacccgagggggtgaacaaagagaagatcacaccactcacgctcaaggaagaaagtcacacaaccacatattttctgaacataagctgaacttctacttccatggagtgagttacttcacctcattggcaaaagacaacagaagagtccaaagtctgaggggactgggcaagcttctgtcacatgctttcagaatgaagacaatctgcaagaattttaagttgtgacctctacagagaaaagaatgaaaagtagccaaatctccacatgagagattttggactattttgcagtgtaaaccccatctgatttatatgaagtaagcagactttctctccaagagttcaaaataaattaattctaatgct

SEQ ID NO: 5719 - protein, 197 aa, Homo sapiens
MAEGEGYFAMSEDELACSPYIPLGGDFGGGDFGGGDFGGGDFGGGGSFGGHCLDYCESPTAHCNVLNWEQVQRLDGILSETIPIHGRGNFPTLELQPSLIVKVVRRRLAEKRIGVRDVRLNGSAASHVLHQDSGLGYKDLDLIFCADLRGEGEFQTVKDVVLDCLLDFLPEGVNKEKITPLTLKEESHTTTYFLNIS

SEQ ID NO: 5720 - DNA, 1232 bp, Homo sapiens
aggaaaacagcctgttcatttcatggaaggacgttttggaaaaatagatccagacctacatagaaaggtatgacagctaccttaattcatccatcaagacctttcttcttaattgtgaattaccaactatagatcatcagagaatttaagaaaatcgacaaactaaatgcaaagaaacaagctaatgaaatagaacaaatgactaaaggaaacagaagtaattcaatgaacataagaaaacttaaaaaatattctaattacattctcagaaagatttgagtgcacactacatacattagaagagaaaaataaaggaaaatcagactgctatgaaaaccaagtttcccacttcatgctaaaaagtggtaacattgcatgtcagactgaagaaagacacctgagtctatgttgagttgtgtttggccccttgcaaggttgtcataaatgattcattgttttggcttaaggggctttcagctggatgacaaagcataaggacaaaaaatatgaaatttgtcattaaatgtcttcatcatttagcctgtttaattgtgctaagatcttttaagaaacaatgaatacagagatttccagattatacttccatgaaagcctaaatcttctcaggtattcacagtttaaaaaaattgaagtataccaaatgatatccaagtttactgtgaaagcaaatggcccataaaattttgcatttacatttgaattttaatctagagagaaggagaccacataagtaaaacacaatctatctcataggctgaagcgtcaggtattacaaatgtatgtggttagcttctctttatttagttctcattgatttaggtactaattctacccattctttgctttaatcatttagtattaagaaatattgactttcatcagagcttaatatacaactggctccaaatctagaaaatcaatttaaattctttatagtagtatgtaattggttaattcagtcatttttaaaacaatatatttgtttaaaaatatttattttgctaaccagctaccagacattgttctaggtaattcttacagaagtgcgtaagacagatagtgtggcttcccacatagggcatatagattacaaagagaagacatagctaaagaattaaaccaataataaaaacatcaaattctctgaaaaaaagagctgctgccagtatcagtgaatacttctttcatgtaacacaaactgacacttaaag

SEQ ID NO: 5721 - protein, 41 aa, Homo sapiens
MNTEISRLYFHESLNLLRYSQFKKIEVYQMISKFTVKANGP

SEQ ID NO: 5722 - DNA, 1119 bp, Homo sapiens
gagtatgagtctgttgactttttatatggaacccaaatcagattgaagaagtttctttctcttctgagattgcaaaaagtttttgtcaaaggaaaacagcctgttcatttcatggaaggacgttttggaaaaatagatccagacctacatagaaagaaagatttgagtgcacactacatacattagaagagaaaaataaaggaaaatcagactgctatgaaaaccaagtttcccacttcatgctaaaaagtggtaacattgcatgtcagactgaagaaagacacctgagtctatgttgagttgtgtttggccccttgcaaggttgtcataaatgattcattgttttggcttaaggggctttcagctggatgacaaagcataaggacaaaaaatatgaaatttgtcattaaatgtcttcatcatttagcctgtttaattgtgctaagatcttttaagaaacaatgaatacagagatttccagattatacttccatgaaagcctaaatcttctcaggtattcacagtttaaaaaaattgaagtataccaaatgatatccaagtttactgtgaaagcaaatggcccataaaattttgcatttacatttgaattttaatctagagagaaggagaccacataagtaaaacacaatctatctcataggctgaagcgtcaggtattacaaatgtatgtggttagcttctctttatttagttctcattgatttaggtactaattctacccattctttgctttaatcatttagtattaagaaatattgactttcatcagagcttaatatacaactggctccaaatctagaaaatcaatttaaattctttatagtagtatgtaattggttaattcagtcatttttaaaacaatatatttgtttaaaaatatttattttgctaaccagctaccagacattgttctaggtaattcttacagaagtgcgtaagacagatagtgtggcttcccacatagggcatatagattacaaagagaagacatagctaaagaattaaaccaataataaaaacatcaaattctctgaaaaaaagagctgctgccagtatcagtgaatacttctttcatgtaacacaaactgacacttaaag

SEQ ID NO: 5723 - protein, 41 aa, Homo sapiens; identical to SEQ ID NO: 5721

SEQ ID NO: 5724 - DNA, 6053 bp, Homo sapiens
cttcctctacatccccgttcccgattcctgtagtagcggctgtattgcagccgcctgccgaactgacccgggtctggggactggcccctctggcgccgttcggtttctcttattgccttcactgaggatgagtccctttgtggctctatgtggaccctgcggaatccaccggcgcagtttcatctagcgactggtcacccttgcaattatggatatttaaaagggtcagacagtgtggagggggagttcccctcctcactcccccttggtgcttgactccaggaataatttataaactgtggaatttttttaaatgaagaacttgtatttgatatgaactttatagagctatttataatttttttgatttaagtgccaaaaaattgtataaagatatatagttttatactattgtcaggaggatttaaattatcctaaaaaggtaatttattctctgtaacttcctcaatagcacctttgtgtcctggctttttcattttttaaaattagttttcacgattctgaagtaagtggtataaaaacagttaggatgagttcacccatgcctgactgcacatcaaagtgtcgatccctgaagcatgctttggatgtcctttctgtggtaacaaaggggagcgaaaaccagattaaggcctttctctccagtcattgttacaatgctgcaactatcaaggatgtttttggcaggaatgccctccaccttgtttcctcctgtggaaagaaaggagtgttagattggcttattcagaaaggagtggatctgttggtgaaagacaaagagtctggatggacagcattgcacagaagcattttttatggacatattgattgtgtttggtctctattgaagcatggtgttagtctgtatattcaagataaagaaggcttgtcagctttggatcttgtaatgaaggatagaccaactcatgtagtattcaagaatactgatcctacagatgtttatacttggggcgataatacaaattttaccctgggtcatggaagccagaatagcaaacatcatccagagttggtggatctgttctccaggagtgggatttatatcaagcaggtggtgctttgtaaatttcactccgtgtttctgtctcagaaagggcaggtttatacctgtggtcatggtcctggagggcgattaggacatggagatgaacagacatgcttggtccctcggcttgtggaaggactgaatggtcataattgttcccaagtggcagctgctaaggatcatactgttgtattaactgaagatggatgtgtttatacatttggtctaaacatttttcatcaattaggaattattccaccgccttccagttgtaatgtacccagacagatacaggcaaaatatctgaaaggaaggacaatcattggcgttgcagcaggcaggtttcatacagtcctatggactagagaagctgtttacactatgggactaaatggtggacaactgggttgtttgctagatcccaatggagaaaagtgtgtaactgctcctcgtcaggtctctgcccttcaccataaagacattgctctgtctttggttgctgcaagtgatggagctacagtctgtgttaccacaaggggagatatttacttacttgcagactatcagtgcaagaagatggcttctaaacagttgaacttgaaaaaagttcttgtgtctgggggtcatatggaatacaaggttgatcctgaacatttgaaagaaaatgggggtcaaaaaatttgcattcttgcaatggatggagctggaagggtgttttgctggagatcagtcaacagttctctgaagcagtgtcgatgggcctatccacgtcaggtcttcatttctgatattgctttaaatagaaatgaaattctatttgttacgcaagatggagaaggatttagagggagatggtttgaagagaaaagaaagagttctgaaaagaaagagattttatcaaaccttcacaattcctcatcagatgtgtcttatgtctctgatataaatagtgtgtatgaaagaattcgacttgagaaacttacctttgcacatagagctgttagtgtcagcacagatccaagtggatgcaactttgcaatcctgcagtcagatcctaaaacaagcctttatgaaattccagctgtgtcctcatcatccttttttgaagagtttggcaaactgttgagggaagcagatgaaatggacagcattcatgatgtgacatttcaagttggcaatagactcttccctgcacataaatatattttggcagtgcattctgatttttttcagaaattgtttctttcagatggtaatacttcagaatttacagatatttaccagaaagatgaagattctgcagggtgccatctctttgtggtagagaaggttcatcctgacatgtttgaataccttttacaatttatatacacagatacttgtgactttttaactcatggcttcaaaccaagaatacacttaaacaaaaacccagaagaatatcagggaactctgaattctcatttgaataaagtgaatttccatgaagatgataaccagaagtctgcatttgaagtttacaaaagtaatcaagctcaaacagttagtgagaggcagaagagcaaacctaaatcttgtaaaaaaggaaaaaatattagggaagatgatcctgtaagaatgttgcaaactgttgcaaagaaattcgacttcagtaatttgagtagtaggttagatggagtcagatttgaaaatgaaaaaattaatgttattgccaagaacactggtaataaactgaagctaagtcagaaaaaatgttcatttctgtgtgacgtgaccatgaaatcagtggatggaaaggaatttccttgtcataaatgtgttctttgtgctagacttgaatattttcatagtatgctgagtagctcatggattgaggcttccagttgtgcagctctggaaatgccaatacattctgatatattaaaagttattttggactacctctatactgatgaagctgtggtgataaaagaatctcaaaatgtagattttatttgtagtgttcttgtggtggctgatcaacttctcataacccggttgaaagagatttgtgaagtagcattaactgaaaaacttaccctgaagaatgctgctatgctactggaatttgcagcaatgtatagtgcaaaacagttgaaactgtcttgtttacagtttataggattgaatatggcagctttacttgaagcaaggtctcttgatgttttaagcgatggtgttttgaaggatctttctgagttttaccggaaaatgattccagcaatggatagaagagtcattacaccatatcaagatggaccagatattagctatttggaagtagaagatggagatatcttcttgaaagaagaaataaatatggaacaaaatcattcggaaactatgttcaagaaagcaaaaacaaaagctaaaaagaagccacgtaaacgttcagatagttctggaggttataacctttcagatattattcagagtccatcatctacaggattattaaagtctggtaagaccaattctgtggaatctcttccagaactgttgacatcagactctgaaggaagctatgcaggagtgggtagtcctagagatttacagtcccctgatttcacaacaggatttcattcagataagattgaggcgaaagtcaaaccgtatgttaatggtacatctcctgtgtattctagggaagatttaaaaccatgggaaaagtcaccaatacttaaaatatctgctccacagcctattcccagtaacagaattgatactaccagctctgccagttgggttgctggttctttcagtcctgtcagccctcctgttgtggatctcagaactatcatggaaatagaagaaagtagacaaaaatgtggagctacaccaaagtcacatttaggcaaaacagtttctcatggagttaaactttctcagaagcaacgaaaaatgattgcattgactaccaaggaaaacaattcaggaatgaatagcatggaaacagttttattcactccttcaaaagcccccaaaccagtgaatgcatgggcatcttctctgcattcagtttcatccaagtcattccgggatttcttactagaagaaaaaaagtctgttactagccatagttcaggcgatcatgtcaaaaaagtttcttttaaaggaattgaaaattctcaggcaccaaaaattgtcagatgctctacccatggtaccccaggaccagaaggcaaccatatttcagatttaccacttctagacagtcccaatccctggctatcttcttcagtgactgctccatccatggtagccccagtcacttttgcatctattgtagaagaagaactacaacaagaagcagctcttattagaagtcgagaaaaaccgttggctctgattcagattgaggagcatgccatacaagatttattggttttctatgaggcatttggcaaccctgaagagtttgtcattgttgaaaggacaccgcagggaccactggcagtacctatgtggaataagcatggatgctagttcactgtggagttgagatgcattttacataattatgagtttgttcatataaagaaaagctgtggaaaagagtcttagagattttgtaatatcattctaaatagattaagaaaagatataatttctttactgcagttaaatcatataatgtttgtatgattaaaaataaatttctcagaattgtgattttagtaactttatataaaatgtgtgagacaaaaacttattaaggttaaatagaattgtttcttctgaataatctaacaaaggaaaatataagtgattgaatcataagatataaggggggtaaagtattaaaaataacttttttgtttgataacttgagaatttagaagattttgccaagtatgtgttgttgcttgacttcttaaatatggcattgatgaatttaaagtaggagcatcagttattacttctgattcattaatggccagaattttgtgtttggtgtaatagttgtgtcaccattcttgttgctttttaaaaatcaggctaatcatgtggtccatgtctcttcaaagcttgacctgcacaaatgccatatttctatttggaccacatattctccattttgcattgagcagtagagtacagtggaaagggaataagaatactgattattctgaacagtttagtcccaagagaatagcgttttaaaaaagaaaaacaagatttggagtcattgtgggttatttttggtgggatggaggatcttaaaaatgcctaattgtgagagaatcaattgctgaaagtgttaaaatttctgaaaataaatgcttaattacatatacaggaattaaatagtttggaagagggttggattatcattacctttacaatactgtataatcagaagttctctgaacctcaattgtatatctagacataaaaattgttttctgtataggatgttgtttggtttgtttctgagtgtttaaattttgcaaaaacaaatgttaaatttgtgcttcagtacctagataaattggaaaggttaatgttctagtttctggaaggtaagcctgggagacacataagcaattcactgctataatttagttgatgtaaaatgacggaaactgactcaatatgtcaggtttaactctgcccaaaagcagcagacatgtaagcagatgtgcaataaaaaatgatcttgatccatttcactaatgtgtgcttgacattttttactatattgacatttattatggaaagagttaataattattttttctgatgtgctacactagtggccagtatatggttaagttgatgctgtatttattctaagacggatttaaaaaggcagttttctaaatatgaacttgtgaatttttgtatgtgtgtttgagtaaattgagaaatgaattttataaatgttctattgatgttgcagtaaagaagccttttgaagtaattg

SEQ ID NO: 5725 - protein, 1353 aa, Homo sapiens; identical to SEQ ID NO: 745

SEQ ID NO: 5726 - DNA, 3133 bp, Homo sapiens
gattaaatattgtgatttttatagttgttatagccagtgtgactcaatttgttatactgtcttaaattctgttctgttattttatatgtcattttgtatgttgtttcctcaactagcttgtgaattcttagaaggtaaagatcatattttatatttctgtcctatctgtaatcctttgctcataaagtatattagttccttacaaaattcggctgttaattatctgatttagagattattggtttatctggtgtgtgtatatatatatttattattagaaataggctatttcttgcagtatctttctctatgatattttatacagaaggttttataaatatagattattttgtttacttataattttaaaggtaagcttgactgcactcatttaatttgcctctggagtcaggagtttacaattcttcctctgtatctattaataagcagtttgactaatattactagaagctttaatctttaattttggcatttgttttgcagatgctctacccatggtaccccaggaccagaaggcaaccatatttcagatttaccacttctagacagtcccaagtaaggttaattgataagttatgggcctccaaagctaagttgctgcttagcattgaaaacattaaggctgagtgcagtggctcatgcctataatcccagcactctgggagactgaggcgggtggatcatctgaggtcaggagttcaagaccagcctagccaacatggcaaaaccctgtctttactaaaaatacaaaacttagctgggcatggtggcgcatgcctgtgatgccagctactcatgaagctaggacaggagaatcgtttgaacctgggaggcagagattgcattgagccgcgatcatgccactgtactccagccggggcgacacagtgagactctgtctcaaaaaaaaaaaaaaaaaaagagaataagagaatgttaagaaattgggaatagtatggtattgagtagaatgtattacttgtatcctctccgtactgtagtttgagttacctttctgttcagttatgttgtttctgctccctccccatttcctggtactttccaaaattttctctctaatactggtccaaataaaacattagttcttctgtttttctgtttctcacctcatcattctgtaatctctgcgaaagcttccaggttcgctcatcgtaggtcactggaaaaaattgtagcattgctaaagagtatttcagagaaaattttgcatgcaaaaatttaggaagatgagtgaaactcatcattctgtaatctctgtgaaagcttccaggttcgttcattgtaggtcactggaaagaattgtagcattgctaaaaagtatttcagagaaaattttgcatgcaaaaatttaggaagatgaatgaaactcattattattattctttcagtccctggctatcttcttcagtgactgctccatccatggtagccccagtcacttttgcatctattgtagaagaagaactacaacaagaagcagctcttattagaagtcgagaaaaaccgttggctctgattcagattgaggagcatgccatacaagatttattggttttctatgaggcatttggcaaccctgaagagtttgtcattgttgaaaggacaccgcagggaccactggcagtacctatgtggaataagcatggatgctagttcactgtggagttgagatgcattttacataattatgagtttgttcatataaagaaaagctgtggaaaagagtcttagagattttgtaatatcattctaaatagattaagaaaagatataatttctttactgcagttaaatcatataatgtttgtatgattaaaaataaatttctcagaattgtgattttagtaactttatataaaatgtgtgagacaaaaacttattaaggttaaatagaattgtttcttctgaataatctaacaaaggaaaatataagtgattgaatcataagatataaggggggtaaagtattaaaaataacttttttgtttgataacttgagaatttagaagattttgccaagtatgtgttgttgcttgacttcttaaatatggcattgatgaatttaaagtaggagcatcagttattacttctgattcattaatggccagaattttgtgtttggtgtaatagttgtgtcaccattcttgttgctttttaaaaatcaggctaatcatgtggtccatgtctcttcaaagcttgacctgcacaaatgccatatttctatttggaccacatattctccattttgcattgagcagtagagtacagtggaaagggaataagaatactgattattctgaacagtttagtcccaagagaatagcgttttaaaaaagaaaaacaagatttggagtcattgtgggttatttttggtgggatggaggatcttaaaaatgcctaattgtgagagaatcaattgctgaaagtgttaaaatttctgaaaataaatgcttaattacatatacaggaattaaatagtttggaagagggttggattatcattacctttacaatactgtataatcagaagttctctgaacctcaattgtatatctagacataaaaattgttttctgtataggatgttgtttggtttgtttctgagtgtttaaattttgcaaaaacaaatgttaaatttgtgcttcagtacctagataaattggaaaggttaatgttctagtttctggaaggtaagcctgggagacacataagcaattcactgctataatttagttgatgtaaaatgacggaaactgactcaatatgtcaggtttaactctgcccaaaagcagcagacatgtaagcagatgtgcaataaaaaatgatcttgatccatttcactaatgtgtgcttgacattttttactatattgacatttattatggaaagagttaataattattttttctgatgtgctacactagtggccagtatatggttaagttgatgctgtatttattctaagacggatttaaaaaggcagttttctaaatatgaacttgtgaatttttgtatgtgtgtttgagtaaattgagaaatgaattttataaatgttctattgatgttgcagtaaagaagccttttgaagtaa

SEQ ID NO: 5727 - protein, 104 aa, Homo sapiens
MQKFRKMNETHYYYSFSPWLSSSVTAPSMVAPVTFASIVEEELQQEAALIRSREKPLALIQIEEHAIQDLLVFYEAFGNPEEFVIVERTPQGPLAVPMWNKHGC

SEQ ID NO: 5728 - DNA, 2580 bp, Homo sapiens
cagacttactgcatctttcttattatttttctgcatttgatgttatagttaattatacatccttttctgggcaatttagcctccataatattatttcttaaatatgtgctaaagatagagttgagttgataatccagctcttgtagaatacagtattacatcccagaaacttgactctaaaatgatcattgtggactattggctacaaaagccaaagagttaaggcttgtgatgcaagttctttttgaaatttgtgatatgttggagggctcatatgtagctattacttgatcattgttagtataaactgatattttcattgttgaaacttgtgagcattttgatccaataatggtaaaataacatgaaataaatagaaaacattattattaccagtaacctttattaagcagaaattaatgttaattgatataatttctagcaaaatgatttctcatggaattaaactttgtcagaagaaaccactgaaactaattggtttaatttctagcaaaacagtttctcatggagttaaactttctcagaagcaacgaaaaatgattgcattgactaccaaggaaaacaattcaggaatgaatagcatggaaacagttttattcactccttcaaaagcccccaaaccagtgaatgcatgggcatcttctctgcattcagtttcatccaagtcattccgggatttcttactagaagaaaaaaagtctgttactagccatagttcaggcgatcatgtcaaaaaagtttcttttaaaggaattgaaaattctcaggcaccaaaaattgtcagatgctctacccatggtaccccaggaccagaaggcaaccatatttcagatttaccacttctagacagtcccaatccctggctatcttcttcagtgactgctccatccatggtagccccagtcacttttgcatctattgtagaagaagaactacaacaagaagcagctcttattagaagtcgagaaaaaccgttggctctgattcagattgaggagcatgccatacaagatttattggttttctatgaggcatttggcaaccctgaagagtttgtcattgttgaaaggacaccgcagggaccactggcagtacctatgtggaataagcatggatgctagttcactgtggagttgagatgcattttacataattatgagtttgttcatataaagaaaagctgtggaaaagagtcttagagattttgtaatatcattctaaatagattaagaaaagatataatttctttactgcagttaaatcatataatgtttgtatgattaaaaataaatttctcagaattgtgattttagtaactttatataaaatgtgtgagacaaaaacttattaaggttaaatagaattgtttcttctgaataatctaacaaaggaaaatataagtgattgaatcataagatataaggggggtaaagtattaaaaataacttttttgtttgataacttgagaatttagaagattttgccaagtatgtgttgttgcttgacttcttaaatatggcattgatgaatttaaagtaggagcatcagttattacttctgattcattaatggccagaattttgtgtttggtgtaatagttgtgtcaccattcttgttgctttttaaaaatcaggctaatcatgtggtccatgtctcttcaaagcttgacctgcacaaatgccatatttctatttggaccacatattctccattttgcattgagcagtagagtacagtggaaagggaataagaatactgattattctgaacagtttagtcccaagagaatagcgttttaaaaaagaaaaacaagatttggagtcattgtgggttatttttggtgggatggaggatcttaaaaatgcctaattgtgagagaatcaattgctgaaagtgttaaaatttctgaaaataaatgcttaattacatatacaggaattaaatagtttggaagagggttggattatcattacctttacaatactgtataatcagaagttctctgaacctcaattgtatatctagacataaaaattgttttctgtataggatgttgtttggtttgtttctgagtgtttaaattttgcaaaaacaaatgttaaatttgtgcttcagtacctagataaattggaaaggttaatgttctagtttctggaaggtaagcctgggagacacataagcaattcactgctataatttagttgatgtaaaatgacggaaactgactcaatatgtcaggtttaactctgcccaaaagcagcagacatgtaagcagatgtgcaataaaaaatgatcttgatccatttcactaatgtgtgcttgacattttttactatattgacatttattatggaaagagttaataattattttttctgatgtgctacactagtggccagtatatggttaagttgatgctgtatttattctaagacggatttaaaaaggcagttttctaaatatgaacttgtgaatttttgtatgtgtgtttgagtaaattgagaaatgaattttataaatgttctattgatgttgcagtaaagaagccttttgaagtaa

SEQ ID NO: 5729 - protein, 240 aa, Homo sapiens
MLIDIISSKMISHGIKLCQKKPLKLIGLISSKTVSHGVKLSQKQRKMIALTTKENNSGMNSMETVLFTPSKAPKPVNAWASSLHSVSSKSFRDFLLEEKKSVTSHSSGDHVKKVSFKGIENSQAPKIVRCSTHGTPGPEGNHISDLPLLDSPNPWLSSSVTAPSMVAPVTFASIVEEELQQEAALIRSREKPLALIQIEEHAIQDLLVFYEAFGNPEEFVIVERTPQGPLAVPMWNKHGC

SEQ ID NO: 5730 - DNA, 3911 bp, Homo sapiens
ctgtgtcagatttttttcttcttaatctttttttccctttcctctcttcctctgttatttttttctttcaatttatgttgttattttggcagtggctcaggggcaaaaagccattagtagtactgaggaccaagaaagttgttttattttttatttttttgagatggagtctcactctgttgcccaggctggagtgcagtggcgtgatctcgtctcattgcaacctctgcctcccatgttcaagcaattctcgtgcctcagcctccccggtaactgggactacaggcatgtgccaccacgccctgctaatgtgtgtatttttagtagagatatgttcaccatgttggccaggctggtctcaaactcctggtcttaagtggtcggtctgcctccacctcccatagtgctgggattacaggcgtgagccaccacacctggcccaagaaagttgttttaaattaaggaagtccaatagttacaaaaaagcactcttagatgacaaattttgttttaaataagaaagcataagagcattatttccccaccctttatatattaagtgtgatgctgagatttgacttttccctctttgtattagcttgagaagtgtttttctaacaacatgggagattataaacaagtcaggcattctagtgggcttctagactgaaatgatcaatttaagttggccattttatggtcctagtgtgagatcaagacattttggtgtaattttgtcagctttctacctaaaaaatagaaatatattttgatgtatttactttttattatggttgccctttcaacatttagaaaataatcttaaatctcttttctagtgtactaattacttcaaattttttttttacttaaatctcttttctagtgtactaattacttcaaatttttttttctaggtataatgtatacaaagaaaaagtgatgcttgttttctttctttttttagaatctcaaaatgtagattttatttgtagtgttcttgtggtggctgatcaacttctcataacccggttgaaagagatttgtgaagtagcattaactgaaaaacttaccctgaagaatgctgctatgctactggaatttgcagcaatgtatagtgcaaaacagttgaaactgtcttgtttacagtttataggattgaatatggcagctttacttgaagcaaggtctcttgatgttttaagcgatggtgttttgaaggatctttctgagttttaccggaaaatgattccagcaatggatagaagagtcattacaccatatcaagatggaccagatattagctatttggaagtagaagatggagatatcttcttgaaagaagaaataaatatggaacaaaatcattcggaaactatgttcaagaaagcaaaaacaaaagctaaaaagaagccacgtaaacgttcagatagttctggaggttataacctttcagatattattcagagtccatcatctacaggattattaaagtctggtaagaccaattctgtggaatctcttccagaactgttgacatcagactctgaaggaagctatgcaggagtgggtagtcctagagatttacagtcccctgatttcacaacaggatttcattcagataagattgagggaagatttaaaaccatgggaaaagtcaccaatacttaaaatatctgctccacagcctattcccagtaacagaattgatactaccagctctgccagttgggttgctggttctttcagtcctgtcagccctcctgttgtggatctcagaactatcatggaaatagaagaaagtagacaaaaatgtggagctacaccaaagtcacatttaggcaaaacagtttctcatggagttaaactttctcagaagcaacgaaaaatgattgcattgactaccaaggaaaacaattcaggaatgaatagcatggaaacagttttattcactccttcaaaagcccccaaaccagtgaatgcatgggcatcttctctgcattcagtttcatccaagtcattccgggatttcttactagaagaaaaaaagtctgttactagccatagttcaggcgatcatgtcaaaaaagtttcttttaaaggaattgaaaattctcaggcaccaaaaattgtcagatgctctacccatggtaccccaggaccagaaggcaaccatatttcagatttaccacttctagacagtcccaatccctggctatcttcttcagtgactgctccatccatggtagccccagtcacttttgcatctattgtagaagaagaactacaacaagaagcagctcttattagaagtcgagaaaaaccgttggctctgattcagattgaggagcatgccatacaagatttattggttttctatgaggcatttggcaaccctgaagagtttgtcattgttgaaaggacaccgcagggaccactggcagtacctatgtggaataagcatggatgctagttcactgtggagttgagatgcattttacataattatgagtttgttcatataaagaaaagctgtggaaaagagtcttagagattttgtaatatcattctaaatagattaagaaaagatataatttctttactgcagttaaatcatataatgtttgtatgattaaaaataaatttctcagaattgtgattttagtaactttatataaaatgtgtgagacaaaaacttattaaggttaaatagaattgtttcttctgaataatctaacaaaggaaaatataagtgattgaatcataagatataaggggggtaaagtattaaaaataacttttttgtttgataacttgagaatttagaagattttgccaagtatgtgttgttgcttgacttcttaaatatggcattgatgaatttaaagtaggagcatcagttattacttctgattcattaatggccagaattttgtgtttggtgtaatagttgtgtcaccattcttgttgctttttaaaaatcaggctaatcatgtggtccatgtctcttcaaagcttgacctgcacaaatgccatatttctatttggaccacatattctccattttgcattgagcagtagagtacagtggaaagggaataagaatactgattattctgaacagtttagtcccaagagaatagcgttttaaaaaagaaaaacaagatttggagtcattgtgggttatttttggtgggatggaggatcttaaaaatgcctaattgtgagagaatcaattgctgaaagtgttaaaatttctgaaaataaatgcttaattacatatacaggaattaaatagtttggaagagggttggattatcattacctttacaatactgtataatcagaagttctctgaacctcaattgtatatctagacataaaaattgttttctgtataggatgttgtttggtttgtttctgagtgtttaaattttgcaaaaacaaatgttaaatttgtgcttcagtacctagataaattggaaaggttaatgttctagtttctggaaggtaagcctgggagacacataagcaattcactgctataatttagttgatgtaaaatgacggaaactgactcaatatgtcaggtttaactctgcccaaaagcagcagacatgtaagcagatgtgcaataaaaaatgatcttgatccatttcactaatgtgtgcttgacattttttactatattgacatttattatggaaagagttaataattattttttctgatgtgctacactagtggccagtatatggttaagttgatgctgtatttattctaagacggatttaaaaaggcagttttctaaatatgaacttgtgaatttttgtatgtgtgtttgagtaaattgagaaatgaattttataaatgttctattgatgttgcagtaaagaagccttttgaagtaa

SEQ ID NO: 5731 - protein, 304 aa, Homo sapiens
MQEWVVLEIYSPLISQQDFIQIRLREDLKPWEKSPILKISAPQPIPSNRIDTTSSASWVAGSFSPVSPPVVDLRTIMEIEESRQKCGATPKSHLGKTVSHGVKLSQKQRKMIALTTKENNSGMNSMETVLFTPSKAPKPVNAWASSLHSVSSKSFRDFLLEEKKSVTSHSSGDHVKKVSFKGIENSQAPKIVRCSTHGTPGPEGNHISDLPLLDSPNPWLSSSVTAPSMVAPVTFASIVEEELQQEAALIRSREKPLALIQIEEHAIQDLLVFYEAFGNPEEFVIVERTPQGPLAVPMWNKHGC

SEQ ID NO: 5732 - DNA, 2884 bp, Homo sapiens
gattaaatattgtgatttttatagttgttatagccagtgtgactcaatttgttatactgtcttaaattctgttctgttattttatatgtcattttgtatgttgtttcctcaactagcttgtgaattcttagaaggtaaagatcatattttatatttctgtcctatctgtaatcctttgctcataaagtatattagttccttacaaaattcggctgttaattatctgatttagagattattggtttatctggtgtgtgtatatatatatttattattagaaataggctatttcttgcagtatctttctctatgatattttatacagaaggttttataaatatagattattttgtttacttataattttaaaggtaagcttgactgcactcatttaatttgcctctggagtcaggagtttacaattcttcctctgtatctattaataagcagtttgactaatattactagaagctttaatctttaattttggcatttgttttgcagatgctctacccatggtaccccaggaccagaaggcaaccatatttcagatttaccacttctagacagtcccaagtaaggttaattgataagttatgggcctccaaagctaagttgctgcttagcattgaaaacattaaggctgagtgcagtggctcatgcctataatcccagcactctgggagactgaggcgggtggatcatctgaggtcaggagttcaagaccagcctagccaacatggcaaaaccctgtctttactaaaaatacaaaacttagctgggcatggtggcgcatgcctgtgatgccagctactcatgaagctaggacaggagaatcgtttgaacctgggaggcagagattgcattgagccgcgatcatgccactgtactccagccggggcgacacagtgagactctgtctcaaaaaaaaaaaaaaaaaaagagaataagagaatgttaagaaattgggaatagtatggtattgagtagaatgtattacttgtatcctctccgtactgtagtttgagttacctttctgttcagttatgttgtttctgctccctccccatttcctggtactttccaaaattttctctctaatactggtccaaataaaacattagttcttctgtttttctgtttctcacctcatcattctgtaatctctgcgaaagcttccaggttcgctcatcgtaggtcactggaaaaaattgtagcattgctaaagagtatttcagagaaaattttgcatgcaaaaatttaggaagatgagtgaaactcatcattctgtaatctctgtgaaagcttccaggttcgttcattgtaggtcactggaaagaattgtagcattgctaaaaagtatttcagagaaaattttgcatgcaaaaatttaggaagatgaatgaaactcattattattattctttcagtccctggctatcttcttcagtgactgctccatccatggtagccccagtcacttttgcatctattgtagaagaagaactacaacaagaagcagctcttattagaagtcgagaaaaaccgttggctctgattcagattgaggagcatgccatacaagatttattggttttctatgaggcatttggcaaccctgaagagtttgtcattgttgaaaggacaccgcagggaccactggcagtacctatgtggaataagcatggatgctagttcactgtggagttgagatgcattttacataattatgagtttgttcatataaagaaaagctgtggaaaagagtcttagagattttgtaatatcattctaaatagattaagaaaagatataatttctttactgcagttaaatcatataatgtttgtatgattaaaaataaatttctcagaattgtgattttagtaactttatataaaatgtgtgagacaaaaacttattaaggttaaatagaattgtttcttctgaataatctaacaaaggaaaatataagtgattgaatcataagatataaggggggtaaagtattaaaaataacttttttgtttgataacttgagaatttagaagattttgccaagtatgtgttgttgcttgacttcttaaatatggcattgatgaatttaaagtaggagcatcagttattacttctgattcattaatggccagaattttgtgtttggtgtaatagttgtgtcaccattcttgttgctttttaaaaatcaggctaatcatgtggtccatgtctcttcaaagcttgacctgcacaaatgccatatttctatttggaccacatattctccattttgcattgagcagtagagtacagtggaaagggaataagaatactgattattctgaacagtttagtcccaagagaatagcgttttaaaaaagaaaaacaagatttggagtcattgtgggttatttttggtgggatggaggatcttaaaaatgcctaattgtgagagaatcaattgctgaaagtgttaaaatttctgaaaataaatgcttaattacatatacaggaattaaatagtttggaagagggttggattatcattacctttacaatactgtataatcagaagttctctgaacctcaattgtatatctagacataaaaattgttttctgtataggatgttgtttggtttgtttctgagtgtttaaattttgcaaaaacaaatgttaaatttgtgcttcagtacctagataaattggaaaggttaatgttctagtttctggaaggtaagcctgggagacacataagcaattcactgctataatttagttgatgtaaaatgacggaaactgactcaatatgtcaggtttaactctgcccaaaagcagcagacatgtaagcagatgtgcaataaaaaatgatcttgatccatttcact

SEQ ID NO: 5733 - protein, 104 aa, Homo sapiens; identical to SEQ ID NO: 5727

SEQ ID NO: 5734 - DNA, 1611 bp, Homo sapiens
ggcttgatctcagctcaccgcaacctctgcctcctgggttcaagcgattctcctgcctccgccaccctagtagctgggattacagatgctctacccatggtaccccaggaccagaaggcaaccatatttcagatttaccacttctagacagtcccaatccctggctatcttcttcagtgactgctccatccatggtagccccagtcacttttgcatctattgtagaagaagaactacaacaagaagcagctcttattagaagtcgagaaaaaccgttggctctgattcagattgaggagcatgccatacaagatttattggttttctatgaggcatttggcaaccctgaagagtttgtcattgttgaaaggacaccgcagggaccactggcagtacctatgtggaataagcatggatgctagttcactgtggagttgagatgcattttacataattatgagtttgttcatataaagaaaagctgtggaaaagagtcttagagattttgtaatatcattctaaatagattaagaaaagatataatttctttactgcagttaaatcatataatgtttgtatgattaaaaataaatttctcagaattgtgattttagtaactttatataaaatgtgtgagacaaaaacttattaaggttaaatagaattgtttcttctgaataatctaacaaaggaaaatataagtgattgaatcataagatataaggggggtaaagtattaaaaataacttttttgtttgataacttgagaatttagaagattttgccaagtatgtgttgttgcttgacttcttaaatatggcattgatgaatttaaagtaggagcatcagttattacttctgattcattaatggccagaattttgtgtttggtgtaatagttgtgtcaccattcttgttgctttttaaaaatcaggctaatcatgtggtccatgtctcttcaaagcttgacctgcacaaatgccatatttctatttggaccacatattctccattttgcattgagcagtagagtacagtggaaagggaataagaatactgattattctgaacagtttagtcccaagagaatagcgttttaaaaaagaaaaacaagatttggagtcattgtgggttatttttggtgggatggaggatcttaaaaatgcctaattgtgagagaatcaattgctgaaagtgttaaaatttctgaaaataaatgcttaattacatatacaggaattaaatagtttggaagagggttggattatcattacctttacaatactgtataatcagaagttctctgaacctcaattgtatatctagacataaaaattgttttctgtataggatgttgtttggtttgtttctgagtgtttaaattttgcaaaaacaaatgttaaatttgtgcttcagtacctagataaattggaaaggttaatgttctagtttctggaaggtaagcctgggagacacataagcaattcactgctataatttagttgatgtaaaatgacggaaactgactcaatatgtcaggtttaactctgcccaaaagcagcagacatgtaagcagatgtgcaataaaaaatgatcttgatccatttcact

SEQ ID NO: 5735 - protein, 76 aa, Homo sapiens
MVAPVTFASIVEEELQQEAALIRSREKPLALIQIEEHAIQDLLVFYEAFGNPEEFVIVERTPQGPLAVPMWNKHGC

SEQ ID NO: 5736 - DNA, 2137 bp, Homo sapiens
cagacttactgcatctttcttattatttttctgcatttgatgttatagttaattatacatccttttctgggcaatttagcctccataatattatttcttaaatatgtgctaaagatagagttgagttgataatccagctcttgtagaatacagtattacatcccagaaacttgactctaaaatgatcattgtggactattggctacaaaagccaaagagttaaggcttgtgatgcaagttctttttgaaatttgtgatatgttggagggctcatatgtagctattacttgatcattgttagtataaactgatattttcattgttgaaacttgtgagcattttgatccaataatggtaaaataacatgaaataaatagaaaacattattattaccagtaacctttattaagcagaaattaatgttaattgatataatttctagcaaaatgatttattgactaccaaggaaaacaattcaggaatgaatagcatggaaacagttttattcactccttcaaaagcccccaaaccagtgaatgcatgggcatcttctctgcattcagtttcatccaagtcattccgggatttcttactagaagaaaaaaagtctgttactagccatagttcaggcgatcatgtcaaaaaagtttcttttaaaggaattgaaaattctcaggcaccaaaaattgtcagatgctctacccatggtaccccaggaccagaaggcaaccatatttcagatttaccacttctagacagtcccaatccctggctatcttcttcagtgactgctccatccatggtagccccagtcacttttgcatctattgtagaagaagaactacaacaagaagcagctcttattagaagtcgagaaaaaccgttggctctgattcagcaccgcagggaccactggcagtacctatgtggaataagcatggatgctagttcactgtggagttgagatgcattttacataattatgagtttgttcatataaagaaaagctgtggaaaagagtcttagagattttgtaatatcattctaaatagattaagaaaagatataatttctttactgcagttaaatcatataatgtttgtatgattaaaaataaatttctcagaattgtgattttagtaactttatataaaatgtgtgagacaaaaacttattaaggttaaatagaattgtttcttctgaataatctaacaaaggaaaatataagtgattgaatcataagatataaggggggtaaagtattaaaaataacttttttgtttgataacttgagaatttagaagattttgccaagtatgtgttgttgcttgacttcttaaatatggcattgatgaatttaaagtaggagcatcagttattacttctgattcattaatggccagaattttgtgtttggtgtaatagttgtgtcaccattcttgttgctttttaaaaatcaggctaatcatgtggtccatgtctcttcaaagcttgacctgcacaaatgccatatttctatttggaccacatattctccattttgcattgagcagtagagtacagtggaaagggaataagaatactgattattctgaacagtttagtcccaagagaatagcgttttaaaaaagaaaaacaagatttggagtcattgtgggttatttttggtgggatggaggatcttaaaaatgcctaattgtgagagaatcaattgctgaaagtgttaaaatttctgaaaataaatgcttaattacatatacaggaattaaatagtttggaagagggttggattatcattacctttacaatactgtataatcagaagttctctgaacctcaattgtatatctagacataaaaattgttttctgtataggatgttgtttggtttgtttctgagtgtttaaattttgcaaaaacaaatgttaaatttgtgcttcagtacctagataaattggaaaggttaatgttctagtttctggaaggtaagcctgggagacacataagcaattcactgctataatttagttgatgtaaaatgacggaaactgactcaatatgtcaggtttaactctgcccaaaagcagcagacatgtaagcagatgtgcaataaaaaatgatcttgatccatttcact

SEQ ID NO: 5737 - protein, 160 aa, Homo sapiens
MNSMETVLFTPSKAPKPVNAWASSLHSVSSKSFRDFLLEEKKSVTSHSSGDHVKKVSFKGIENSQAPKIVRCSTHGTPGPEGNHISDLPLLDSPNPWLSSSVTAPSMVAPVTFASIVEEELQQEAALIRSREKPLALIQHRRDHWQYLCGISMDASSLWS

SEQ ID NO: 5738 - DNA, 2331 bp, Homo sapiens
cagacttactgcatctttcttattatttttctgcatttgatgttatagttaattatacatccttttctgggcaatttagcctccataatattatttcttaaatatgtgctaaagatagagttgagttgataatccagctcttgtagaatacagtattacatcccagaaacttgactctaaaatgatcattgtggactattggctacaaaagccaaagagttaaggcttgtgatgcaagttctttttgaaatttgtgatatgttggagggctcatatgtagctattacttgatcattgttagtataaactgatattttcattgttgaaacttgtgagcattttgatccaataatggtaaaataacatgaaataaatagaaaacattattattaccagtaacctttattaagcagaaattaatgttaattgatataatttctagcaaaatgatttctcatggaattaaactttgtcagaagaaaccactgaaactaattggtttaatttctagcaaaacagtttctcatggagttaaactttctcagaagcaacgaaaaatgattgcattgactaccaaggaaaacaattcaggaatgaatagcatggaaacagttttattcactccttcaaaagcccccaaaccagtgaatgcatgggcatcttctctgcattcagtttcatccaagtcattccgggatttcttactagaagaaaaaaagtctgttactagccatagttcaggcgatcatgtcaaaaaagtttcttttaaaggaattgaaaattctcaggcaccaaaaattgtcagatgctctacccatggtaccccaggaccagaaggcaaccatatttcagatttaccacttctagacagtcccaatccctggctatcttcttcagtgactgctccatccatggtagccccagtcacttttgcatctattgtagaagaagaactacaacaagaagcagctcttattagaagtcgagaaaaaccgttggctctgattcagattgaggagcatgccatacaagatttattggttttctatgaggcatttggcaaccctgaagagtttgtcattgttgaaaggacaccgcagggaccactggcagtacctatgtggaataagcatggatgctagttcactgtggagttgagatgcattttacataattatgagtttgttcatataaagaaaagctgtggaaaagagtcttagagattttgtaatatcattctaaatagattaagaaaagatataatttctttactgcagttaaatcatataatgtttgtatgattaaaaataaatttctcagaattgtgattttagtaactttatataaaatgtgtgagacaaaaacttattaaggttaaatagaattgtttcttctgaataatctaacaaaggaaaatataagtgattgaatcataagatataaggggggtaaagtattaaaaataacttttttgtttgataacttgagaatttagaagattttgccaagtatgtgttgttgcttgacttcttaaatatggcattgatgaatttaaagtaggagcatcagttattacttctgattcattaatggccagaattttgtgtttggtgtaatagttgtgtcaccattcttgttgctttttaaaaatcaggctaatcatgtggtccatgtctcttcaaagcttgacctgcacaaatgccatatttctatttggaccacatattctccattttgcattgagcagtagagtacagtggaaagggaataagaatactgattattctgaacagtttagtcccaagagaatagcgttttaaaaaagaaaaacaagatttggagtcattgtgggttatttttggtgggatggaggatcttaaaaatgcctaattgtgagagaatcaattgctgaaagtgttaaaatttctgaaaataaatgcttaattacatatacaggaattaaatagtttggaagagggttggattatcattacctttacaatactgtataatcagaagttctctgaacctcaattgtatatctagacataaaaattgttttctgtataggatgttgtttggtttgtttctgagtgtttaaattttgcaaaaacaaatgttaaatttgtgcttcagtacctagataaattggaaaggttaatgttctagtttctggaaggtaagcctgggagacacataagcaattcactgctataatttagttgatgtaaaatgacggaaactgactcaatatgtcaggtttaactctgcccaaaagcagcagacatgtaagcagatgtgcaataaaaaatgatcttgatccatttcact

SEQ ID NO: 5739 - protein, 240 aa, Homo sapiens; identical to SEQ ID NO: 5729

SEQ ID NO: 5740 - DNA, 3662 bp, Homo sapiens
ctgtgtcagatttttttcttcttaatctttttttccctttcctctcttcctctgttatttttttctttcaatttatgttgttattttggcagtggctcaggggcaaaaagccattagtagtactgaggaccaagaaagttgttttattttttatttttttgagatggagtctcactctgttgcccaggctggagtgcagtggcgtgatctcgtctcattgcaacctctgcctcccatgttcaagcaattctcgtgcctcagcctccccggtaactgggactacaggcatgtgccaccacgccctgctaatgtgtgtatttttagtagagatatgttcaccatgttggccaggctggtctcaaactcctggtcttaagtggtcggtctgcctccacctcccatagtgctgggattacaggcgtgagccaccacacctggcccaagaaagttgttttaaattaaggaagtccaatagttacaaaaaagcactcttagatgacaaattttgttttaaataagaaagcataagagcattatttccccaccctttatatattaagtgtgatgctgagatttgacttttccctctttgtattagcttgagaagtgtttttctaacaacatgggagattataaacaagtcaggcattctagtgggcttctagactgaaatgatcaatttaagttggccattttatggtcctagtgtgagatcaagacattttggtgtaattttgtcagctttctacctaaaaaatagaaatatattttgatgtatttactttttattatggttgccctttcaacatttagaaaataatcttaaatctcttttctagtgtactaattacttcaaattttttttttacttaaatctcttttctagtgtactaattacttcaaatttttttttctaggtataatgtatacaaagaaaaagtgatgcttgttttctttctttttttagaatctcaaaatgtagattttatttgtagtgttcttgtggtggctgatcaacttctcataacccggttgaaagagatttgtgaagtagcattaactgaaaaacttaccctgaagaatgctgctatgctactggaatttgcagcaatgtatagtgcaaaacagttgaaactgtcttgtttacagtttataggattgaatatggcagctttacttgaagcaaggtctcttgatgttttaagcgatggtgttttgaaggatctttctgagttttaccggaaaatgattccagcaatggatagaagagtcattacaccatatcaagatggaccagatattagctatttggaagtagaagatggagatatcttcttgaaagaagaaataaatatggaacaaaatcattcggaaactatgttcaagaaagcaaaaacaaaagctaaaaagaagccacgtaaacgttcagatagttctggaggttataacctttcagatattattcagagtccatcatctacaggattattaaagtctggtaagaccaattctgtggaatctcttccagaactgttgacatcagactctgaaggaagctatgcaggagtgggtagtcctagagatttacagtcccctgatttcacaacaggatttcattcagataagattgagggaagatttaaaaccatgggaaaagtcaccaatacttaaaatatctgctccacagcctattcccagtaacagaattgatactaccagctctgccagttgggttgctggttctttcagtcctgtcagccctcctgttgtggatctcagaactatcatggaaatagaagaaagtagacaaaaatgtggagctacaccaaagtcacatttaggcaaaacagtttctcatggagttaaactttctcagaagcaacgaaaaatgattgcattgactaccaaggaaaacaattcaggaatgaatagcatggaaacagttttattcactccttcaaaagcccccaaaccagtgaatgcatgggcatcttctctgcattcagtttcatccaagtcattccgggatttcttactagaagaaaaaaagtctgttactagccatagttcaggcgatcatgtcaaaaaagtttcttttaaaggaattgaaaattctcaggcaccaaaaattgtcagatgctctacccatggtaccccaggaccagaaggcaaccatatttcagatttaccacttctagacagtcccaatccctggctatcttcttcagtgactgctccatccatggtagccccagtcacttttgcatctattgtagaagaagaactacaacaagaagcagctcttattagaagtcgagaaaaaccgttggctctgattcagattgaggagcatgccatacaagatttattggttttctatgaggcatttggcaaccctgaagagtttgtcattgttgaaaggacaccgcagggaccactggcagtacctatgtggaataagcatggatgctagttcactgtggagttgagatgcattttacataattatgagtttgttcatataaagaaaagctgtggaaaagagtcttagagattttgtaatatcattctaaatagattaagaaaagatataatttctttactgcagttaaatcatataatgtttgtatgattaaaaataaatttctcagaattgtgattttagtaactttatataaaatgtgtgagacaaaaacttattaaggttaaatagaattgtttcttctgaataatctaacaaaggaaaatataagtgattgaatcataagatataaggggggtaaagtattaaaaataacttttttgtttgataacttgagaatttagaagattttgccaagtatgtgttgttgcttgacttcttaaatatggcattgatgaatttaaagtaggagcatcagttattacttctgattcattaatggccagaattttgtgtttggtgtaatagttgtgtcaccattcttgttgctttttaaaaatcaggctaatcatgtggtccatgtctcttcaaagcttgacctgcacaaatgccatatttctatttggaccacatattctccattttgcattgagcagtagagtacagtggaaagggaataagaatactgattattctgaacagtttagtcccaagagaatagcgttttaaaaaagaaaaacaagatttggagtcattgtgggttatttttggtgggatggaggatcttaaaaatgcctaattgtgagagaatcaattgctgaaagtgttaaaatttctgaaaataaatgcttaattacatatacaggaattaaatagtttggaagagggttggattatcattacctttacaatactgtataatcagaagttctctgaacctcaattgtatatctagacataaaaattgttttctgtataggatgttgtttggtttgtttctgagtgtttaaattttgcaaaaacaaatgttaaatttgtgcttcagtacctagataaattggaaaggttaatgttctagtttctggaaggtaagcctgggagacacataagcaattcactgctataatttagttgatgtaaaatgacggaaactgactcaatatgtcaggtttaactctgcccaaaagcagcagacatgtaagcagatgtgcaataaaaaatgatcttgatccatttcact

SEQ ID NO: 5741 - protein, 304 aa, Homo sapiens; identical to SEQ ID NO: 5731

SEQ ID NO: 5742 - DNA, 5801 bp, Homo sapiens
cttcctctacatccccgttcccgattcctgtagtagcggctgtattgcagccgcctgccgaactgacccgggtctggggactggcccctctggcgccgttcggtttctcttattgccttcactgaggatgagtccctttgtggctctatgtggaccctgcggaatccaccggcgcagtttcatctagcgactggtcacccttgcaattatggatatttaaaagggtcagacagtgtggagggggagttcccctcctcactcccccttggtgcttgactccaggaataatttataaactgtggaatttttttaaatgaagaacttgtatttgatatgaactttatagagctatttataatttttttgatttaagtgccaaaaaattgtataaagatatatagttttatactattgtcaggaggatttaaattatcctaaaaaggtaatttattctctgtaacttcctcaatagcacctttgtgtcctggctttttcattttttaaaattagttttcacgattctgaagtaagtggtataaaaacagttaggatgagttcacccatgcctgactgcacatcaaagtgtcgatccctgaagcatgctttggatgtcctttctgtggtaacaaaggggagcgaaaaccagattaaggcctttctctccagtcattgttacaatgctgcaactatcaaggatgtttttggcaggaatgccctccaccttgtttcctcctgtggaaagaaaggagtgttagattggcttattcagaaaggagtggatctgttggtgaaagacaaagagtctggatggacagcattgcacagaagcattttttatggacatattgattgtgtttggtctctattgaagcatggtgttagtctgtatattcaagataaagaaggcttgtcagctttggatcttgtaatgaaggatagaccaactcatgtagtattcaagaatactgatcctacagatgtttatacttggggcgataatacaaattttaccctgggtcatggaagccagaatagcaaacatcatccagagttggtggatctgttctccaggagtgggatttatatcaagcaggtggtgctttgtaaatttcactccgtgtttctgtctcagaaagggcaggtttatacctgtggtcatggtcctggagggcgattaggacatggagatgaacagacatgcttggtccctcggcttgtggaaggactgaatggtcataattgttcccaagtggcagctgctaaggatcatactgttgtattaactgaagatggatgtgtttatacatttggtctaaacatttttcatcaattaggaattattccaccgccttccagttgtaatgtacccagacagatacaggcaaaatatctgaaaggaaggacaatcattggcgttgcagcaggcaggtttcatacagtcctatggactagagaagctgtttacactatgggactaaatggtggacaactgggttgtttgctagatcccaatggagaaaagtgtgtaactgctcctcgtcaggtctctgcccttcaccataaagacattgctctgtctttggttgctgcaagtgatggagctacagtctgtgttaccacaaggggagatatttacttacttgcagactatcagtgcaagaagatggcttctaaacagttgaacttgaaaaaagttcttgtgtctgggggtcatatggaatacaaggttgatcctgaacatttgaaagaaaatgggggtcaaaaaatttgcattcttgcaatggatggagctggaagggtgttttgctggagatcagtcaacagttctctgaagcagtgtcgatgggcctatccacgtcaggtcttcatttctgatattgctttaaatagaaatgaaattctatttgttacgcaagatggagaaggatttagagggagatggtttgaagagaaaagaaagagttctgaaaagaaagagattttatcaaaccttcacaattcctcatcagatgtgtcttatgtctctgatataaatagtgtgtatgaaagaattcgacttgagaaacttacctttgcacatagagctgttagtgtcagcacagatccaagtggatgcaactttgcaatcctgcagtcagatcctaaaacaagcctttatgaaattccagctgtgtcctcatcatccttttttgaagagtttggcaaactgttgagggaagcagatgaaatggacagcattcatgatgtgacatttcaagttggcaatagactcttccctgcacataaatatattttggcagtgcattctgatttttttcagaaattgtttctttcagatggtaatacttcagaatttacagatatttaccagaaagatgaagattctgcagggtgccatctctttgtggtagagaaggttcatcctgacatgtttgaataccttttacaatttatatacacagatacttgtgactttttaactcatggcttcaaaccaagaatacacttaaacaaaaacccagaagaatatcagggaactctgaattctcatttgaataaagtgaatttccatgaagatgataaccagaagtctgcatttgaagtttacaaaagtaatcaagctcaaacagttagtgagaggcagaagagcaaacctaaatcttgtaaaaaaggaaaaaatattagggaagatgatcctgtaagaatgttgcaaactgttgcaaagaaattcgacttcagtaatttgagtagtaggttagatggagtcagatttgaaaatgaaaaaattaatgttattgccaagaacactggtaataaactgaagctaagtcagaaaaaatgttcatttctgtgtgacgtgaccatgaaatcagtggatggaaaggaatttccttgtcataaatgtgttctttgtgctagacttgaatattttcatagtatgctgagtagctcatggattgaggcttccagttgtgcagctctggaaatgccaatacattctgatatattaaaagttattttggactacctctatactgatgaagctgtggtgataaaagaatctcaaaatgtagattttatttgtagtgttcttgtggtggctgatcaacttctcataacccggttgaaagagatttgtgaagtagcattaactgaaaaacttaccctgaagaatgctgctatgctactggaatttgcagcaatgtatagtgcaaaacagttgaaactgtcttgtttacagtttataggattgaatatggcagctttacttgaagcaaggtctcttgatgttttaagcgatggtgttttgaaggatctttctgagttttaccggaaaatgattccagcaatggatagaagagtcattacaccatatcaagatggaccagatattagctatttggaagtagaagatggagatatcttcttgaaagaagaaataaatatggaacaaaatcattcggaaactatgttcaagaaagcaaaaacaaaagctaaaaagaagccacgtaaacgttcagatagttctggaggttataacctttcagatattattcagagtccatcatctacaggattattaaagtctggtaagaccaattctgtggaatctcttccagaactgttgacatcagactctgaaggaagctatgcaggagtgggtagtcctagagatttacagtcccctgatttcacaacaggatttcattcagataagattgaggcgaaagtcaaaccgtatgttaatggtacatctcctgtgtattctagggaagatttaaaaccatgggaaaagtcaccaatacttaaaatatctgctccacagcctattcccagtaacagaattgatactaccagctctgccagttgggttgctggttctttcagtcctgtcagccctcctgttgtggatctcagaactatcatggaaatagaagaaagtagacaaaaatgtggagctacaccaaagtcacatttaggcaaaacagtttctcatggagttaaactttctcagaagcaacgaaaaatgattgcattgactaccaaggaaaacaattcaggaatgaatagcatggaaacagttttattcactccttcaaaagcccccaaaccagtgaatgcatgggcatcttctctgcattcagtttcatccaagtcattccgggatttcttactagaagaaaaaaagtctgttactagccatagttcaggcgatcatgtcaaaaaagtttcttttaaaggaattgaaaattctcaggcaccaaaaattgtcagatgctctacccatggtaccccaggaccagaaggcaaccatatttcagatttaccacttctagacagtcccaatccctggctatcttcttcagtgactgctccatccatggtagccccagtcacttttgcatctattgtagaagaagaactacaacaagaagcagctcttattagaagtcgagaaaaaccgttggctctgattcagattgaggagcatgccatacaagatttattggttttctatgaggcatttggcaaccctgaagagtttgtcattgttgaaaggacaccgcagggaccactggcagtacctatgtggaataagcatggatgctagttcactgtggagttgagatgcattttacataattatgagtttgttcatataaagaaaagctgtggaaaagagtcttagagattttgtaatatcattctaaatagattaagaaaagatataatttctttactgcagttaaatcatataatgtttgtatgattaaaaataaatttctcagaattgtgattttagtaactttatataaaatgtgtgagacaaaaacttattaaggttaaatagaattgtttcttctgaataatctaacaaaggaaaatataagtgattgaatcataagatataaggggggtaaagtattaaaaataacttttttgtttgataacttgagaatttagaagattttgccaagtatgtgttgttgcttgacttcttaaatatggcattgatgaatttaaagtaggagcatcagttattacttctgattcattaatggccagaattttgtgtttggtgtaatagttgtgtcaccattcttgttgctttttaaaaatcaggctaatcatgtggtccatgtctcttcaaagcttgacctgcacaaatgccatatttctatttggaccacatattctccattttgcattgagcagtagagtacagtggaaagggaataagaatactgattattctgaacagtttagtcccaagagaatagcgttttaaaaaagaaaaacaagatttggagtcattgtgggttatttttggtgggatggaggatcttaaaaatgcctaattgtgagagaatcaattgctgaaagtgttaaaatttctgaaaataaatgcttaattacatatacaggaattaaatagtttggaagagggttggattatcattacctttacaatactgtataatcagaagttctctgaacctcaattgtatatctagacataaaaattgttttctgtataggatgttgtttggtttgtttctgagtgtttaaattttgcaaaaacaaatgttaaatttgtgcttcagtacctagataaattggaaaggttaatgttctagtttctggaaggtaagcctgggagacacataagcaattcactgctataatttagttgatgtaaaatgacggaaactgactcaatatgtcaggtttaactctgcccaaaagcagcagacatgtaagcagatgtgcaataaaaaatgatcttgatccatttcact

SEQ ID NO: 5743 - protein, 1353 aa, Homo sapiens; identical to SEQ ID NO: 745

SEQ ID NO: 5744 - DNA, 1723 bp, Homo sapiens
tcttaaatatgtgctaaagatagagttgagttgataatccagctcttgtagaatacagtattacatcccagaaacttgactctaaaatgatcattgtggactattggctacaaaagccaaagagttaaggcttgtgatgcaagttctttttgaaatttgtgatatgttggagggctcatatgtagctattacttgatcattgttagtataaactgatattttcattgttgaaacttgtgagcattttgatccaataatggtaaaataacatgaaataaatagaaaacattattattaccagtaacctttattaagcagaaattaatgttaattgatataatttctagcaaaatgatttctcatggaattaaactttgtcagaagaaaccactgaaactaattggtttaatttctagcaaaacagtttctcatggagttaaactttctcagaagcaacgaaaaatgattgcattgactaccaaggaaaacaattcaggaatgaatagcatggaaacagttttattcactccttcaaaagcccccaaaccagtgaatgcatgggcatcttctctgcattcagtttcatccaagtcattccgggatttcttactagaagaaaaaaagtctgttactagccatagttcaggcgatcatgtcaaaaaagtttcttttaaaggaattgaaaattctcaggcaccaaaaattgtcagatgctctacccatggtaccccaggaccagaaggcaaccatatttcagatttaccacttctagacagtcccaatccctggctatcttcttcagtgactgctccatccatggtagccccagtcacttttgcatctattgtagaagaagaactacaacaagaagcagctcttattagaagtcgagaaaaaccgttggctctgattcagattgaggagcatgccatacaagatttattggttttctatgaggcatttggcaaccctgaagagtttgtcattgttgaaaggacaccgcagggaccactggcagtacctatgtggaataagcatggatgctagttcactgtggagttgagatgcattttacataattatgagtttgttcatataaagaaaagctgtggaaaagagtcttagagattttgtaatatcattctaaatagattaagaaaagatataatttctttactgcagttaaatcatataatgtttgtatgattaaaaataaatttctcagaattgtgattttagtaactttatataaaatgtgtgagacaaaaacttattaaggttaaatagaattgtttcttctgaataatctaacaaaggaaaatataagtgattgaatcataagatataaggggggtaaagtattaaaaataacttttttgtttgataacttgagaatttagaagattttgccaagtatgtgttgttgcttgacttcttaaatatggcattgatgaatttaaagtaggagcatcagttattacttctgattcattaatggccagaattttgtgtttggtgtaatagttgtgtcaccattcttgttgctttttaaaaatcaggctaatcatgtggtccatgtctcttcaaagcttgacctgcacaaatgccatatttctatttggaccacatattctccattttgcattgagcagtagagtacagtggaaagggaataagaatactgattattctgaacagtttagtcccaagagaatagcgtttt

SEQ ID NO: 5745 - protein, 240 aa, Homo sapiens; identical to SEQ ID NO: 5729

SEQ ID NO: 5746 - DNA, 549 bp, Homo sapiens
aaaccatgggaaaagtcaccaatacttaaaatatctgctccacagcctattcccagtaacagaattgatactaccagctctgccagttgggttgctggttctttcagtcctgtcagccctcctgttgtggatctcagaactatcatggaaatagaagaaagtagacaaaaatgtggagctacaccaaagtcacatttaggcaaaacagtttctcatggagttaaactttctcagaagcaacgaaaaatgattgcattgactaccaaggaaaacaattcaggaatgaatagcatggaaacagttttattcactccttcaaaagcccccaaaccagtgaatgcatgggcatcttctctgcattcagtttcatccaagtcattccgggatttcttactagaagaaaaaaagtctgttactagccatagttcaggcgatcatgtcaaaaaagtttcttttaaaggaattgaaaattctcaggcaccaaaaattgtcagatggagtttcgttcttgttgcccaggctggagtgcaatggcttgatctcagctca

SEQ ID NO: 5747 - protein, 134 aa, Homo sapiens
MEIEESRQKCGATPKSHLGKTVSHGVKLSQKQRKMIALTTKENNSGMNSMETVLFTPSKAPKPVNAWASSLHSVSSKSFRDFLLEEKKSVTSHSSGDHVKKVSFKGIENSQAPKIVRWSFVLVAQAGVQWLDLS

SEQ ID NO: 5748 - DNA, 4679 bp, Homo sapiens
cttcctctacatccccgttcccgattcctgtagtagcggctgtattgcagccgcctgccgaactgacccgggtctggggactggcccctctggcgccgttcggtttctcttattgccttcactgaggatgagtccctttgtggctctatgtggaccctgcggaatccaccggcgcagtttcatctagcgactggtcacccttgcaattatggatatttaaaagggtcagacagtgtggagggggagttcccctcctcactcccccttggtgcttgactccaggaataatttataaactgtggaatttttttaaatgaagaacttgtatttgatatgaactttatagagctatttataatttttttgatttaagtgccaaaaaattgtataaagatatatagttttatactattgtcaggaggatttaaattatcctaaaaaggtaatttattctctgtaacttcctcaatagcacctttgtgtcctggctttttcattttttaaaattagttttcacgattctgaagtaagtggtataaaaacagttaggatgagttcacccatgcctgactgcacatcaaagtgtcgatccctgaagcatgctttggatgtcctttctgtggtaacaaaggggagcgaaaaccagattaaggcctttctctccagtcattgttacaatgctgcaactatcaaggatgtttttggcaggaatgccctccaccttgtttcctcctgtggaaagaaaggagtgttagattggcttattcagaaaggagtggatctgttggtgaaagacaaagagtctggatggacagcattgcacagaagcattttttatggacatattgattgtgtttggtctctattgaagcatggtgttagtctgtatattcaagataaagaaggcttgtcagctttggatcttgtaatgaaggatagaccaactcatgtagtattcaagaatactgatcctacagatgtttatacttggggcgataatacaaattttaccctgggtcatggaagccagaatagcaaacatcatccagagttggtggatctgttctccaggagtgggatttatatcaagcaggtggtgctttgtaaatttcactccgtgtttctgtctcagaaagggcaggtttatacctgtggtcatggtcctggagggcgattaggacatggagatgaacagacatgcttggtccctcggcttgtggaaggactgaatggtcataattgttcccaagtggcagctgctaaggatcatactgttgtattaactgaagatggatgtgtttatacatttggtctaaacatttttcatcaattaggaattattccaccgccttccagttgtaatgtacccagacagatacaggcaaaatatctgaaaggaaggacaatcattggcgttgcagcaggcaggtttcatacagtcctatggactagagaagctgtttacactatgggactaaatggtggacaactgggttgtttgctagatcccaatggagaaaagtgtgtaactgctcctcgtcaggtctctgcccttcaccataaagacattgctctgtctttggttgctgcaagtgatggagctacagtctgtgttaccacaaggggagatatttacttacttgcagactatcagtgcaagaagatggcttctaaacagttgaacttgaaaaaagttcttgtgtctgggggtcatatggaatacaaggttgatcctgaacatttgaaagaaaatgggggtcaaaaaatttgcattcttgcaatggatggagctggaagggtgttttgctggagatcagtcaacagttctctgaagcagtgtcgatgggcctatccacgtcaggtcttcatttctgatattgctttaaatagaaatgaaattctatttgttacgcaagatggagaaggatttagagggagatggtttgaagagaaaagaaagagttctgaaaagaaagagattttatcaaaccttcacaattcctcatcagatgtgtcttatgtctctgatataaatagtgtgtatgaaagaattcgacttgagaaacttacctttgcacatagagctgttagtgtcagcacagatccaagtggatgcaactttgcaatcctgcagtcagatcctaaaacaagcctttatgaaattccagctgtgtcctcatcatccttttttgaagagtttggcaaactgttgagggaagcagatgaaatggacagcattcatgatgtgacatttcaagttggcaatagactcttccctgcacataaatatattttggcagtgcattctgatttttttcagaaattgtttctttcagatggtaatacttcagaatttacagatatttaccagaaagatgaagattctgcagggtgccatctctttgtggtagagaaggttcatcctgacatgtttgaataccttttacaatttatatacacagatacttgtgactttttaactcatggcttcaaaccaagaatacacttaaacaaaaacccagaagaatatcagggaactctgaattctcatttgaataaagtgaatttccatgaagatgataaccagaagtctgcatttgaagtttacaaaagtaatcaagctcaaacagttagtgagaggcagaagagcaaacctaaatcttgtaaaaaaggaaaaaatattagggaagatgatcctgtaagaatgttgcaaactgttgcaaagaaattcgacttcagtaatttgagtagtaggttagatggagtcagatttgaaaatgaaaaaattaatgttattgccaagaacactggtaataaactgaagctaagtcagaaaaaatgttcatttctgtgtgacgtgaccatgaaatcagtggatggaaaggaatttccttgtcataaatgtgttctttgtgctagacttgaatattttcatagtatgctgagtagctcatggattgaggcttccagttgtgcagctctggaaatgccaatacattctgatatattaaaagttattttggactacctctatactgatgaagctgtggtgataaaagaatctcaaaatgtagattttatttgtagtgttcttgtggtggctgatcaacttctcataacccggttgaaagagatttgtgaagtagcattaactgaaaaacttaccctgaagaatgctgctatgctactggaatttgcagcaatgtatagtgcaaaacagttgaaactgtcttgtttacagtttataggattgaatatggcagctttacttgaagcaaggtctcttgatgttttaagcgatggtgttttgaaggatctttctgagttttaccggaaaatgattccagcaatggatagaagagtcattacaccatatcaagatggaccagatattagctatttggaagtagaagatggagatatcttcttgaaagaagaaataaatatggaacaaaatcattcggaaactatgttcaagaaagcaaaaacaaaagctaaaaagaagccacgtaaacgttcagatagttctggaggttataacctttcagatattattcagagtccatcatctacaggattattaaagtctggtaagaccaattctgtggaatctcttccagaactgttgacatcagactctgaaggaagctatgcaggagtgggtagtcctagagatttacagtcccctgatttcacaacaggatttcattcagataagattgaggcgaaagtcaaaccgtatgttaatggtacatctcctgtgtattctagggaagatttaaaaccatgggaaaagtcaccaatacttaaaatatctgctccacagcctattcccagtaacagaattgatactaccagctctgccagttgggttgctggttctttcagtcctgtcagccctcctgttgtggatctcagaactatcatggaaatagaagaaagtagacaaaaatgtggagctacaccaaagtcacatttagggtgggttgaaaacattacaaaagatcatttcatgttgtatttctgccctaagaattggacagacttactgcatctttcttattatttttctgcatttgatgttatagttaattatacatccttttctgggcaatttagcctccataatattatttcttaaatatgtgctaaagatagagttgagttgataatccagctcttgtagaatacagtattacatcccagaaacttgactctaaaatgatcattgtggactattggctacaaaagccaaagagttaaggcttgtgatgcaagttctttttgaaatttgtgatatgttggagggctcatatgtagctattacttgatcattgttagtataaactgatattttcattgttgaaacttgtgagcattttgatccaataatggtaaaataacatgaaataaatagaaaacattattattaccagtaacctttattaagcagaaattaatgttaattgatataatttctagcaaaatgatttctcatggaattaaactttgtcagaagaaaccactgaaactaattggtttaatttctagcaaaacagtttctcatggagttaaactttctcagaagcaacgaaaaatgattgcattgactaccaaggaaaacaattcaggaatgaatagcatggaaacagttttattcactccttcaaaagccccca

SEQ ID NO: 5749 - protein, 1196 aa, Homo sapiens
MSSPMPDCTSKCRSLKHALDVLSVVTKGSENQIKAFLSSHCYNAATIKDVFGRNALHLVSSCGKKGVLDWLIQKGVDLLVKDKESGWTALHRSIFYGHIDCVWSLLKHGVSLYIQDKEGLSALDLVMKDRPTHVVFKNTDPTDVYTWGDNTNFTLGHGSQNSKHHPELVDLFSRSGIYIKQVVLCKFHSVFLSQKGQVYTCGHGPGGRLGHGDEQTCLVPRLVEGLNGHNCSQVAAAKDHTVVLTEDGCVYTFGLNIFHQLGIIPPPSSCNVPRQIQAKYLKGRTIIGVAAGRFHTVLWTREAVYTMGLNGGQLGCLLDPNGEKCVTAPRQVSALHHKDIALSLVAASDGATVCVTTRGDIYLLADYQCKKMASKQLNLKKVLVSGGHMEYKVDPEHLKENGGQKICILAMDGAGRVFCWRSVNSSLKQCRWAYPRQVFISDIALNRNEILFVTQDGEGFRGRWFEEKRKSSEKKEILSNLHNSSSDVSYVSDINSVYERIRLEKLTFAHRAVSVSTDPSGCNFAILQSDPKTSLYEIPAVSSSSFFEEFGKLLREADEMDSIHDVTFQVGNRLFPAHKYILAVHSDFFQKLFLSDGNTSEFTDIYQKDEDSAGCHLFVVEKVHPDMFEYLLQFIYTDTCDFLTHGFKPRIHLNKNPEEYQGTLNSHLNKVNFHEDDNQKSAFEVYKSNQAQTVSERQKSKPKSCKKGKNIREDDPVRMLQTVAKKFDFSNLSSRLDGVRFENEKINVIAKNTGNKLKLSQKKCSFLCDVTMKSVDGKEFPCHKCVLCARLEYFHSMLSSSWIEASSCAALEMPIHSDILKVILDYLYTDEAVVIKESQNVDFICSVLVVADQLLITRLKEICEVALTEKLTLKNAAMLLEFAAMYSAKQLKLSCLQFIGLNMAALLEARSLDVLSDGVLKDLSEFYRKMIPAMDRRVITPYQDGPDISYLEVEDGDIFLKEEINMEQNHSETMFKKAKTKAKKKPRKRSDSSGGYNLSDIIQSPSSTGLLKSGKTNSVESLPELLTSDSEGSYAGVGSPRDLQSPDFTTGFHSDKIEAKVKPYVNGTSPVYSREDLKPWEKSPILKISAPQPIPSNRIDTTSSASWVAGSFSPVSPPVVDLRTIMEIEESRQKCGATPKSHLGWVENITKDHFMLYFCPKNWTDLLHLSYYFSAFDVIVNYTSFSGQFSLHNIIS

SEQ ID NO: 5750 - DNA, 1967 bp, Homo sapiens
cttcctctacatccccgttcccgattcctgtagtagcggctgtattgcagccgcctgccgaactgacccgggtctggggactggcccctctggcgccgttcggtttctcttattgccttcactgaggatgagtccctttgtggctctatgtggaccctgcggaatccaccggcgcagtttcatctagcgactggtcacccttgcaattatggatatttaaaagggtcagacagtgtggagggggagttcccctcctcactcccccttggtgcttgactccaggaataatttataaactgtggaatttttttaaatgaagaacttgtatttgatatgaactttatagagctatttataatttttttgatttaagtgccaaaaaattgtataaagatatatagttttatactattgtcaggaggatttaaattatcctaaaaaggtaatttattctctgtaacttcctcaatagcacctttgtgtcctggctttttcattttttaaaattagttttcacgattctgaagtaagtggtataaaaacagttaggatgagttcacccatgcctgactgcacatcaaagtgtcgatccctgaagcatgctttggatgtcctttctgtggtaacaaaggggagcgaaaaccagattaaggcctttctctccagtcattgttacaatgctgcaactatcaaggatgtttttggcaggaatgccctccaccttgtttcctcctgtggaaagaaaggagtgttagattggcttattcagaaaggagtggatctgttggtgaaagacaaagagtctggatggacagcattgcacagaagcattttttatggacatattgattgtgtttggtctctattgaagcatggtgttagtctgtatattcaagataaagaaggcttgtcagctttggatcttgtaatgaaggatagaccaactcatgtagtattcaagaatactgatcctacagatgtttatacttggggcgataatacaaattttaccctgggtcatggaagccagaatagcaaacatcatccagagttggtggatctgttctccaggagtgggatttatatcaagcaggtggtgctttgtaaatttcactccgtgtttctgtctcagaaagggcaggtttatacctgtggtcatggtcctggagggcgattaggacatggagatgaacagacatgcttggtccctcggcttgtggaaggactgaatggtcataattgttcccaagtggcagctgctaaggatcatactgttgtattaactgaagatggatgtgtttatacatttggtctaaacatttttcatcaattaggaattattccaccgccttccagttgtaatgtacccagacagatacaggcaaaatatctgaaaggaaggacaatcattggcgttgcagcaggcaggtttcatacagtcctatggactagagaagctgtttacactatgggactaaatggtggacaactgggttgtttgctagatcccaatggagaaaagtgtgtaactgctcctcgtcaggtctctgcccttcaccataaagacattgctctgtctttggttgctgcaagtgatggagctacagtctgtgttaccacaaggggagatatttacttacttgcagactatcagtgcaagaagatggcttctaaacagttgaacttgaaaaaagttcttgtgtctgggggtcatatggaatacaaggttgatcctgaacatttgaaagaaaatgggggtcaaaaaatttgcattcttgcaatggatggagctggaagggtgttttgctggagatcagtcaacagttctctgaagcagtgtcgatgggcctatccacgtcaggtcttcatttctgatattgctttaaatagaaatgaaattctatttgttacgcaagatggagaaggatttagagggagatggtttgaagagaaaagaaagagttctg

SEQ ID NO: 5751 - protein, 471 aa, Homo sapiens
MSSPMPDCTSKCRSLKHALDVLSVVTKGSENQIKAFLSSHCYNAATIKDVFGRNALHLVSSCGKKGVLDWLIQKGVDLLVKDKESGWTALHRSIFYGHIDCVWSLLKHGVSLYIQDKEGLSALDLVMKDRPTHVVFKNTDPTDVYTWGDNTNFTLGHGSQNSKHHPELVDLFSRSGIYIKQVVLCKFHSVFLSQKGQVYTCGHGPGGRLGHGDEQTCLVPRLVEGLNGHNCSQVAAAKDHTVVLTEDGCVYTFGLNIFHQLGIIPPPSSCNVPRQIQAKYLKGRTIIGVAAGRFHTVLWTREAVYTMGLNGGQLGCLLDPNGEKCVTAPRQVSALHHKDIALSLVAASDGATVCVTTRGDIYLLADYQCKKMASKQLNLKKVLVSGGHMEYKVDPEHLKENGGQKICILAMDGAGRVFCWRSVNSSLKQCRWAYPRQVFISDIALNRNEILFVTQDGEGFRGRWFEEKRKS

SEQ ID NO: 5752 - DNA, 4722 bp, Homo sapiens
actcgcgctcggcgccggcggctgcgctggtcggtctggtagctggggacttttccgcccgacctcctccggctgctcctccccgaggaccaccccaccccctccccgcccacctcacccctagctccaggctcgcgcggccggacattgtgggtgtgcgtgctggatttctcccggatgctctccgactaacatggatgtcccaccattccttgcagtggaaggttgttccttggcgcagtgagtgaagaacatgcagcgattgctaatgggtttgggaagcggagactccttcctctctctatgaccatgccgtgatcgtgtctgcggtcaccactcgacgcatcctcatttctacccgaacccaggagccgaacgctagatcggggaagtgggtgccgtgcgtgtgggcacagaaacaccatgaagattattttcccgattctaagtaatccagtcttcaggcgcaccgttaaactcctgctctgtttactgtggattggatattctcaaggaaccacacatgtattaagatttggtggtatttttgaatatgtggaatctggcccaatgggagctgaggaacttgcattcagatttgctgtgaacacaattaacagaaacagaacattgctacccaatactacccttacctatgatacccagaagataaacctttatgatagttttgaagcatccaagaaagcctgtgatcagctgtctcttggggtggctgccatcttcgggccttcacacagctcatcagcaaacgcagtgcagtccatctgcaatgctctgggagttccccacatacagacccgctggaagcaccaggtgtcagacaacaaagattccttctatgtcagtctctacccagacttctcttcactcagccgtgccattttagacctggtgcagtttttcaagtggaaaaccgtcacggttgtgtatgatgacagcactggtctcattcgtttgcaagagctcatcaaagctccatcaaggtataatcttcgactcaaaattcgtcagttacctgctgatacaaaggatgcaaaacccttactaaaagaaatgaaaagaggcaaggagtttcatgtaatctttgattgtagccatgaaatggcagcaggcattttaaaacaggcattagctatgggaatgatgacagaatactatcattatatctttaccactctggacctctttgctcttgatgttgagccctaccgatacagtggtgttaacatgacagggttcagaatattaaatacagaaaatacccaagtctcctccatcattgaaaagtggtcgatggaacgattgcaggcacctccgaaacccgattcaggtttgctggatggatttatgacgactgatgctgctctaatgtatgatgctgtgcatgtggtgtctgtggccgttcaacagtttccccagatgacagtcagttccttgcagtgtaatcgacataaaccctggcgcttcgggacccgctttatgagtctaattaaagaggcacattgggaaggcctcacaggcagaataactttcaacaaaaccaatggcttgagaacagattttgatttggatgtgatcagtctgaaggaagaaggtctagaaaagattggaacgtgggatccagccagtggcctgaatatgacagaaagtcaaaagggaaagccagcgaacatcacagattccttatccaatcgttctttgattgttaccaccattttggaagagccttatgtcctttttaagaagtctgacaaacctctctatggtaatgatcgatttgaaggctattgcattgatctcctcagagagttatctacaatccttggctttacatatgaaattagacttgtggaagatgggaaatatggagcccaggatgatgccaatggacaatggaatggaatggttcgtgaactaattgatcataaagctgaccttgcagttgctccactggctattacctatgttcgagagaaggtcatcgacttttccaagccctttatgacacttggaataagtattttgtaccgcaagcccaatggtacaaacccaggcgtcttctccttcctgaatcctctctcccctgatatctggatgtatattctgctggcttacttgggtgtcagttgtgtgctctttgtcatagccaggtttagtccttatgagtggtataatccacacccttgcaaccctgactcagacgtggtggaaaacaattttaccttgctaaatagtttctggtttggagttggagctctcatgcagcaaggttctgagctcatgcccaaagcactgtccaccaggatagtgggaggcatttggtggtttttcacacttatcatcatttcttcgtatactgctaacttagccgcctttctgacagtggaacgcatggaatcccctattgactctgctgatgatttagctaaacaaaccaagatagaatatggagcagtagaggatggtgcaaccatgacttttttcaagaaatcaaaaatctccacgtatgacaaaatgtgggcctttatgagtagcagaaggcagtcagtgctggtcaaaagtaatgaagaaggaatccagcgagtcctcacctctgattatgctttcctaatggagtcaacaaccatcgagtttgttacccagcggaactgtaacctgacacagattggcggccttatagactctaaaggttatggcgttggcactcccatgggttctccatatcgagacaaaattaccatagcaattcttcagctgcaagaggaaggcaaactgcatatgatgaaggagaaatggtggaggggcaatggttgcccagaagaggagagcaaagaggccagtgccctgggggttcagaatattggtggcatcttcattgttctggcagccggcttggtgctttcagtttttgtggcagtgggagaatttttatacaaatccaaaaaaaacgctcaattggaaaagaggtccttctgtagtgccatggtagaagaattgaggatgtccctgaagtgccagcgtcggttaaaacataagccacaggccccagttattgtgaaaacagaagaagttatcaacatgcacacatttaacgacagaaggttgccaggtaaagaaaccatggcataaagctgggaggccaaacacccaagcacaaactgtcgtctttttccaaacaatttagccagaatgtttcctgtggaaatatgcaacctgtgcaaaataaaatgagttacctcatgccgctgtgtctatgaactagagactctgtgatctaagcagttgcaatgatcagacttgatttacaagcatcatggatcaaccaagttacacggggttacactgttaatcatgggttcctcccttcttctgagtgaatgttaacatgcgcattttgtggctgatttcaaatgcagtccagtgagaaattacaggttccttttgaagctcaactgttgccaggagatggaatatcaatgcccaacagggcaaccaataaaagtgtcactaagaatataaatatttggaatcagcaaaaactgtagtgttacaggaaacagtacagtcttctgaacacccagatcatagaggtgatgatgttactagcccccaactactcagtataattattgtctgaatgcaaagtatgtgtttataggatgtgaaaaaatgtaatgcaaaacaaatttgaatcccatggcagttggaatataaagcagatgttcatcacttattttccttttttcttttcttatttttttttttgacagtctgtgtcactgattgagatagaaatgccaattatcaaggaaataatgttttcttaagttccctaaggcagaagatttaacatgcaattctaccagatcccttcctattcccccaacaccttttctctaacccccatatcccaaataataataataataataataataataataataataataataaaagcagttggttcagtgattctgaattaaaaggataatgttttgcaatgttcaagttgtaaaaactggccgagtattggctgtgtggaagactaaagctttcattctaacattcagacatagcaatccaaacccttgttcctgctgtaaatgaacttgatggagcatgggcagatttcagtgatacgagaaaggggactggtcatctatagaaaaatctgtgagagaacttggaagtggactgcgtttatcaatacagtcacaatgttaaatgaacaaaattcttgaacagttttttttcaaaaaatgttcaggtttatttgtggaaatgcaagatttctatgaaaatagtttttgtatggaaatttttgtaatactttttatcaacaaaacaagaacatgtgttcctgtcaggggtgtgatgtcaagcatgaatggtagtgcgtgtgcaccaccaacgtttggtgaaaactatttttatcaagaaaaaaggaatcatagaagagaaatattttcaagttagataatataaaagctaggtgcactaccaccactgcttaccatgccacacccctggtttccacgaggctgacaacatactgtaatgaacaattgtgtgtaaaatggtaaaagacacagacctcttgacaacattgtgataacagttgagtgcacacagtttgctgtttgaatccaatgcacaaaattaaaaaaaatcattaaaactatgttcattttactttca

SEQ ID NO: 5753 - protein, 908 aa, Homo sapiens; identical to SEQ ID NO: 747

SEQ ID NO: 5754 - DNA, 4809 bp, Homo sapiens
actcgcgctcggcgccggcggctgcgctggtcggtctggtagctggggacttttccgcccgacctcctccggctgctcctccccgaggaccaccccaccccctccccgcccacctcacccctagctccaggctcgcgcggccggacattgtgggtgtgcgtgctggatttctcccggatgctctccgactaacatggatgtcccaccattccttgcagtggaaggttgttccttggcgcagtgagtgaagaacatgcagcgattgctaatgggtttgggaagcggagactccttcctctctctatgaccatgccgtgatcgtgtctgcggtcaccactcgacgcatcctcatttctacccgaacccaggagccgaacgctagatcggggaagtgggtgccgtgcgtgtgggcacagaaacaccatgaagattattttcccgattctaagtaatccagtcttcaggcgcaccgttaaactcctgctctgtttactgtggattggatattctcaaggaaccacacatgtattaagatttggtggtatttttgaatatgtggaatctggcccaatgggagctgaggaacttgcattcagatttgctgtgaacacaattaacagaaacagaacattgctacccaatactacccttacctatgatacccagaagataaacctttatgatagttttgaagcatccaagaaagcctgtgatcagctgtctcttggggtggctgccatcttcgggccttcacacagctcatcagcaaacgcagtgcagtccatctgcaatgctctgggagttccccacatacagacccgctggaagcaccaggtgtcagacaacaaagattccttctatgtcagtctctacccagacttctcttcactcagccgtgccattttagacctggtgcagtttttcaagtggaaaaccgtcacggttgtgtatgatgacagcactggtctcattcgtttgcaagagctcatcaaagctccatcaaggtataatcttcgactcaaaattcgtcagttacctgctgatacaaaggatgcaaaacccttactaaaagaaatgaaaagaggcaaggagtttcatgtaatctttgattgtagccatgaaatggcagcaggcattttaaaacaggcattagctatgggaatgatgacagaatactatcattatatctttaccactctggacctctttgctcttgatgttgagccctaccgatacagtggtgttaacatgacagggttcagaatattaaatacagaaaatacccaagtctcctccatcattgaaaagtggtcgatggaacgattgcaggcacctccgaaacccgattcaggtttgctggatggatttatgacgactgatgctgctctaatgtatgatgctgtgcatgtggtgtctgtggccgttcaacagtttccccagatgacagtcagttccttgcagtgtaatcgacataaaccctggcgcttcgggacccgctttatgagtctaattaaagaggcacattgggaaggcctcacaggcagaataactttcaacaaaaccaatggcttgagaacagattttgatttggatgtgatcagtctgaaggaagaaggtctagaaaagattggaacgtgggatccagccagtggcctgaatatgacagaaagtcaaaagggaaagccagcgaacatcacagattccttatccaatcgttctttgattgttaccaccattttggaagagccttatgtcctttttaagaagtctgacaaacctctctatggtaatgatcgatttgaaggctattgcattgatctcctcagagagttatctacaatccttggctttacatatgaaattagacttgtggaagatgggaaatatggagcccaggatgatgccaatggacaatggaatggaatggttcgtgaactaattgatcataaagctgaccttgcagttgctccactggctattacctatgttcgagagaaggtcatcgacttttccaagccctttatgacacttggaataagtattttgtaccgcaagcccaatggtacaaacccaggcgtcttctccttcctgaatcctctctcccctgatatctggatgtatattctgctggcttacttgggtgtcagttgtgtgctctttgtcatagccaggtttagtccttatgagtggtataatccacacccttgcaaccctgactcagacgtggtggaaaacaattttaccttgctaaatagtttctggtttggagttggagctctcatgcagcaaggttctgagctcatgcccaaagcactgtccaccaggatagtgggaggcatttggtggtttttcacacttatcatcatttcttcgtatactgctaacttagccgcctttctgacagtggaacgcatggaatcccctattgactctgctgatgatttagctaaacaaaccaagatagaatatggagcagtagaggatggtgcaaccatgacttttttcaagaaatcaaaaatctccacgtatgacaaaatgtgggcctttatgagtagcagaaggcagtcagtgctggtcaaaagtaatgaagaaggaatccagcgagtcctcacctctgattatgctttcctaatggagtcaacaaccatcgagtttgttacccagcggaactgtaacctgacacagattggcggccttatagactctaaaggttatggcgttggcactcccatgggttctccatatcgagacaaaattaccatagcaattcttcagctgcaagaggaaggcaaactgcatatgatgaaggagaaatggtggaggggcaatggttgcccagaagaggagagcaaagaggccagtgccctgggggttcagaatattggtggcatcttcattgttctggcagccggcttggtgctttcagtttttgtggcagtgggagaatttttatacaaatccaaaaaaaacgctcaattggaaaaggaatcttctatttggttagtgccaccataccatccagacactgtttagtaatcttttgaaacttactaaaagaggtttttaataatgaggtccttctgtagtgccatggtagaagaattgaggatgtccctgaagtgccagcgtcggttaaaacataagccacaggccccagttattgtgaaaacagaagaagttatcaacatgcacacatttaacgacagaaggttgccaggtaaagaaaccatggcataaagctgggaggccaaacacccaagcacaaactgtcgtctttttccaaacaatttagccagaatgtttcctgtggaaatatgcaacctgtgcaaaataaaatgagttacctcatgccgctgtgtctatgaactagagactctgtgatctaagcagttgcaatgatcagacttgatttacaagcatcatggatcaaccaagttacacggggttacactgttaatcatgggttcctcccttcttctgagtgaatgttaacatgcgcattttgtggctgatttcaaatgcagtccagtgagaaattacaggttccttttgaagctcaactgttgccaggagatggaatatcaatgcccaacagggcaaccaataaaagtgtcactaagaatataaatatttggaatcagcaaaaactgtagtgttacaggaaacagtacagtcttctgaacacccagatcatagaggtgatgatgttactagcccccaactactcagtataattattgtctgaatgcaaagtatgtgtttataggatgtgaaaaaatgtaatgcaaaacaaatttgaatcccatggcagttggaatataaagcagatgttcatcacttattttccttttttcttttcttatttttttttttgacagtctgtgtcactgattgagatagaaatgccaattatcaaggaaataatgttttcttaagttccctaaggcagaagatttaacatgcaattctaccagatcccttcctattcccccaacaccttttctctaacccccatatcccaaataataataataataataataataataataataataataataaaagcagttggttcagtgattctgaattaaaaggataatgttttgcaatgttcaagttgtaaaaactggccgagtattggctgtgtggaagactaaagctttcattctaacattcagacatagcaatccaaacccttgttcctgctgtaaatgaacttgatggagcatgggcagatttcagtgatacgagaaaggggactggtcatctatagaaaaatctgtgagagaacttggaagtggactgcgtttatcaatacagtcacaatgttaaatgaacaaaattcttgaacagttttttttcaaaaaatgttcaggtttatttgtggaaatgcaagatttctatgaaaatagtttttgtatggaaatttttgtaatactttttatcaacaaaacaagaacatgtgttcctgtcaggggtgtgatgtcaagcatgaatggtagtgcgtgtgcaccaccaacgtttggtgaaaactatttttatcaagaaaaaaggaatcatagaagagaaatattttcaagttagataatataaaagctaggtgcactaccaccactgcttaccatgccacacccctggtttccacgaggctgacaacatactgtaatgaacaattgtgtgtaaaatggtaaaagacacagacctcttgacaacattgtgataacagttgagtgcacacagtttgctgtttgaatccaatgcacaaaattaaaaaaaatcattaaaactatgttcattttactttca

SEQ ID NO: 5755 - protein, 869 aa, Homo sapiens; identical to SEQ ID NO: 749

SEQ ID NO: 5756 - DNA, 2194 bp, Homo sapiens
gatttagctagtaatttaatgaaattcatcagttgattgtaagaagtccgcttacatacaccagtcattctctcagcaaatactcatggaaaataaaagcaatgttctccccataaataaatcctacttctttcttgcaactcaaggcgggctgtcagatcggttgcataatagatattggggagctcactggccgggagccttaagaggagagcagctatctcagtctttctcacttaatcttggcttcacgtcagaagctgtgcagcagtgcagtagaatagggcctggcaaaacctttgctagcaaagcgccttttgtgccgggctgtggctcgctatcgacatctcgtccgttaccaaggctgggtttcctactgatttccctcctcctctgctttcacaggctcgcgcggccggacattgtgggtgtgcgtgctggatttctcccggatgctctccgactaacatggatgtcccaccattccttgcagtggaaggttgttccttggcgcagtgagtgaagaacatgcagcgattgctaatgggtttgggaagcggagactccttcctctctctatgaccatgccgtgatcgtgtctgcggtcaccactcgacgcatcctcatttctacccgaacccaggagccgaacgctagatcggggaagtgggtgccgtgcgtgtgggcacagaaacaccatgaagattattttcccgattctaagtaatccagtcttcaggcgcaccgttaaactcctgctctgtttactgtggattggatattctcaaggaaccacacatgtattaagatttggtggtatttttgaatatgtggaatctggcccaatgggagctgaggaacttgcattcagatttgctgtgaacacaattaacagaaacagaacattgctacccaatactacccttacctatgatacccagaagataaacctttatgatagttttgaagcatccaagaaagcctgtgatcagctgtctcttggggtggctgccatcttcgggccttcacacagctcatcagcaaacgcagtgcagtccatctgcaatgctctgggagttccccacatacagacccgctggaagcaccaggtgtcagacaacaaagattccttctatgtcagtctctacccagacttctcttcactcagccgtgccattttagacctggtgcagtttttcaagtggaaaaccgtcacggttgtgtatgatgacagcactggtctcattcgtttgcaagagctcatcaaagctccatcaaggtataatcttcgactcaaaattcgtcagttacctgctgatacaaaggatgcaaaacccttactaaaagaaatgaaaagaggcaaggagtttcatgtaatctttgattgtagccatgaaatggcagcaggcattttaaaacaggcattagctatgggaatgatgacagaatactatcattatatctttaccactctggacctctttgctcttgatgttgagccctaccgatacagtggtgttaacatgacagggttcagaatattaaatacagaaaatacccaagtctcctccatcattgaaaagtggtcgatggaacgattgcaggcacctccgaaacccgattcaggtttgctggatggatttatgacgatggagtttcactcttgttgcccaggctggagtgcaatggcacgatctcagctcactgcaacctctgcctcctgggttcaagcgattcttctgcctcagcctcccgagtagctgagattacaggcacacaccactatgcctggctaatttttttgtatttttagtagagatggggtttctctatgttggtcaggatggtctcgaactcctgacctcaggtaatccgcccaccttggcctcccaaagtgctgggattacaggcaagagccactgcacctggcccacagtttcttaatccatttgttgattgatgggcatatgggctggttccatatgtttgcaactgcaaattgtgagcactgtttaattctaagcttccttgtaggtaaggcaaaaagcaagcaaagtattttaggcaattcccataactaaagggaaattatttattatatttgtccatttgaaaagatattttttcatgttgtaaaaaatttattaaatgaatgctaacataaggattaataaacaacatgatcttaacattc

SEQ ID NO: 5757 - protein, 353 aa, Homo sapiens
MKIIFPILSNPVFRRTVKLLLCLLWIGYSQGTTHVLRFGGIFEYVESGPMGAEELAFRFAVNTINRNRTLLPNTTLTYDTQKINLYDSFEASKKACDQLSLGVAAIFGPSHSSSANAVQSICNALGVPHIQTRWKHQVSDNKDSFYVSLYPDFSSLSRAILDLVQFFKWKTVTVVYDDSTGLIRLQELIKAPSRYNLRLKIRQLPADTKDAKPLLKEMKRGKEFHVIFDCSHEMAAGILKQALAMGMMTEYYHYIFTTLDLFALDVEPYRYSGVNMTGFRILNTENTQVSSIIEKWSMERLQAPPKPDSGLLDGFMTMEFHSCCPGWSAMARSQLTATSASWVQAILLPQPPE

SEQ ID NO: 5758 - DNA, 622 bp, Homo sapiens
aaaggaagaaggagcttaatgccaggaacagatttcgcagctggtgtggtctcaataaaagttattttccaataggcagtggctgtggtttctaccccgggtggccgggggcagtgctgagctgggactgttgtttgcccagcctgggctgcagaaagcagcagttaaagttcgtttctggtcactgctccaggaagccaccttactctgagggtcaagaattgccgcttccttttagttactgtaagttcctcctctgcccctggtttgtttcccgcggcacttctggatacccccaggtcccagacccttccagactcaaaccatgaactttcggcagctgctgttgcacttgccacgttatcttggagcctcgggttccccgcgtcgcctgtggtggtccccgtccctcgacaccatctcctcggtgggctcttggcgtggtcggtcctccaagtccccggcccactggaatcaggtagtgtcagaggcggagaagatcgtggggtaccccacgtccttcatgagccttcgctgcctgctgagcgacgagctcagcaacatcgctatgcaggtgcggaagctggtgggcactcagcaccctctgcttaccacagccagg

SEQ ID NO: 5759 - protein, 98 aa, Homo sapiens
MNFRQLLLHLPRYLGASGSPRRLWWSPSLDTISSVGSWRGRSSKSPAHWNQVVSEAEKIVGYPTSFMSLRCLLSDELSNIAMQVRKLVGTQHPLLTTA

SEQ ID NO: 5760 - DNA, 3061 bp, Homo sapiens
gaatgcattagtctaatgagatgtttgcagctggagcgcagggctgctggagactaactgtgagctactaacacgggtggaagatagcttttgcaatactcggtttgcatgtgctgaaagtcatctgtcttctgagtcaacactcccgacctggtaaacaacctgctcagggctctggtgaacaagctgtagatcaagtctcgggttctcatgactcccttagccctctcacctccgcggagtaccccagagcccgacctcagctccatccctcaggacgcagccacggtccccagcttggcggccccacaggctctcacagtctgcctctacatcaacaagcaggccaatgcggggccctatctggagaggaagaaggtgcagcagctcccggagcattttgggcccgagcggccatcggcggtgctgcagcaggccgtccaagcctgcatcgactgcgcccaccagcagaagctggtcttctccctggtcaagcagggctatggtggtgagatggtgtcagtctcggcttcctttgatggcaaacagcacctgcggagcctgcctgtggtgaacagcatcggctatgtcctccgcttcctcgccaagctgtgccgaagcctcctgtgcgatgacctcttcagccaccagcccttccccaggggctgcagtgcctctgagaaagtccaggagaaagaggaagggaggatggaatcagtcaagacagtcaccaccgaagagtacctggtgaaccctgtgggcatgaaccgctacagcgtggacacctccgcctccacctttaaccacaggggctccttgcacccctcctcctcgctgtactgcaagaggcagaactctggagacagccaccttgggggtggtcctgctgccaccgctggtggtccccgcactagccccatgtcttctggtggcccctcggcacctgggctgaggcctccagcctccagccccaagagaaacacgacctctcttgaaggaaacagatgtgcctcaagcccttctcaggatgcgcaggatgccaggcggccacggagcaggaacccctccgcctggactgtggaggacgtggtgtggtttgtgaaggacgccgacccacaggctctggggcctcacgtggagctcttcagaaagcacgagattgatggcaacgctctgctgttgctgaagagtgacatggtcatgaagtacctgggcctgaagctgggacctgcactgaaactctgctaccacattgacaaactgaagcaagccaagttctgacttttttaaaaagacagaagcgaaacccaaaacaacagatcccaagattatcttctgccttaccaatatcccgccaacatcacaaactagactctcctcttaaaattaacagccacagagacgtggtctttttataaaacttgtgaatctttgccttttgaagaatttaacatggaccttttcgagaggctcctctgtgttcataatttgccaaaaaattacaaaagcctgtgatttttaacatccctgttatgctggtttctcttaaagtgggtcctatttgcataacgagagagtggggaactgaatgcttatgcccaaggagagttctggagggttcaaaggatgaaagaaggacctttgtccctgcggtctctgcagggacaaccccctcagcaccatctgcctctaactctgacctggggacctatccatgtgagccttgtttgcctcagctctggaagctgacttctgaagatgactgcctcaccttgcactgtctggaaaacttgaattattttacgccgtgaaagaaaaaggaaaaaaaaaaaaatcttttctgttcctagaaaatctgaagtactgtgtttctccgctagagggcagactgctaatgaaatttcaggaccctcactgactgcagtagcaggattgttcagtactgagtggatgggttagggtgtctgtgaacaagatctagcccacacagaaacaggggatttattccacagttagcaccacagattgcgacttgggaagaaaccatcagctagaggggtctagttcgtatccaatcattattgactgactgactgatactcaactagcaaaggcaagaatttggaagcacgctctacccagatgggactttggagttccttcccttccagagtccttattgaggtgttgaagtgttggcatgccgaagaatcttagtgacatttagccatgggtgtttctttaaaaaaggaaaagaaaatgtctcaacgaagctttgaaatgggagagtgttgatttctagttacattgctgggttatgtagttgtatctgtggctaatttttctagtcctcaacaaatacacagacatgctattatggggtttaattcaatttacaaataggttttccttcctcacagtggagtaatagaaaaaattgattttctgctcctttgcagctgtgtccagagacggacaatgaatccacaatttattaggcagaggcacaacttctccaccattcgttttatccttctcttttctctgtttccctccacctctcttcttcttctttcacactgagcagaaaacatatcttcaaaatgaattcgcctttgccatgtgcatattctcttccttaaaaggacatcaacagtgttggagatgaggagatgaacattagattttggaatttctgggagggagagggttagggatgactcagggcctcccttcgcccaaaggtgaatcagaaaaggcacccctttctctgggatacaacctgagcaggggtctcagctggcaagtggagcagggtgggggctcaacctcctcaccgcttgatcagctgccgttgtacagagcatgacctgtataaccttgagggcagccctgggtagatctgcagagtgaccctctatatagttagaatccagatgaaggccataagaaatagtccatgccatgccgttaggcccactttcatgtgcagtacttgagaaagcacatcgtagcctccttttcagacacacaaatggcggctggactgagagcatggcag

SEQ ID NO: 5761 - protein, 356 aa, Homo sapiens
MTPLALSPPRSTPEPDLSSIPQDAATVPSLAAPQALTVCLYINKQANAGPYLERKKVQQLPEHFGPERPSAVLQQAVQACIDCAHQQKLVFSLVKQGYGGEMVSVSASFDGKQHLRSLPVVNSIGYVLRFLAKLCRSLLCDDLFSHQPFPRGCSASEKVQEKEEGRMESVKTVTTEEYLVNPVGMNRYSVDTSASTFNHRGSLHPSSSLYCKRQNSGDSHLGGGPAATAGGPRTSPMSSGGPSAPGLRPPASSPKRNTTSLEGNRCASSPSQDAQDARRPRSRNPSAWTVEDVVWFVKDADPQALGPHVELFRKHEIDGNALLLLKSDMVMKYLGLKLGPALKLCYHIDKLKQAKF

SEQ ID NO: 5762 - DNA, 4807 bp, Homo sapiens
cattagtctaatgagatgtttgcagctggagcgcagggctgctggagactaactgtgagctactaacacgggtggaagatagcttttgcaatactcggtttgcatgtgctgaaagtcatctgtcttctgagtcaacactcccgacctggtaaacaacctgctcagggctctggtgaacaagctgtagatcaagtctcgggttctcatgactcccttagccctctcacctccgcggagtaccccagagcccgacctcagctccatccctcaggacgcagccacggtccccagcttggcggccccacaggctctcacagtctgcctctacatcaacaagcaggccaatgcggggccctatctggagaggaagaaggtgcagcagctcccggagcattttgggcccgagcggccatcggcggtgctgcagcaggccgtccaagcctgcatcgactgcgcccaccagcagaagctggtcttctccctggtcaagcagggctatggtggtgagatggtgtcaggtaaggcctggggcaggttgcatgaggaggccatggatgtctctctgcagaggaagcagccatactcaggcctggagacagcaggtgtggccagggtctgtccttcatctgctgggctcctagggtctttatgagcctgtgagctaaaagcctctctcagggctcagggagaggatgattccatgcccgggtaagaagactggatttctgatcctcatcttgactcttctccttctcccacttcccacttccaactcaccggtttttgcttttttttctccacttcaaaatatatccagaatcctttcgctccacttcaaaatatacccggagtccaaccacctttcaccacccacagcaacctccctggttctttaaaaatctaagtcagatcatgcccctcctctgccctaaaccctcctccaatgtctcccatgtcactccaagtaaaagcccaagtccttacaaaatcccacaggccctgtgtgacctggccctggctacctctttaatttcttggttacttctctcttgttccccactctgttctagcagagatgacctcatggatgtcctttaggttctactcaaatgccactctatccaggaatccttttctgacttcttgtctaatatatagcccttgtcaccctccattcttttatttatttatttatttatttatttatttattttgagacaggatctcactctgtcgcctaggctagagtgcagtggcacaatcacggctcactgcagcctcgatcttccgggctcaagcgatcttccgacctcagccccacaagtggctgggactgcaggaacttgccgccaagcctggctaattttttacaattttttgtagagatgaatgcctcactatgttacccaggctggtctcaaactcctgagctcatgtgatccacctgcctcccaaatgctgggattacaggcatgagccatcacaccccgcctctctgtacttccttactctgctccattccttcttcatagcacttaccaccatgcagggcagtggggaaacatcatggcttcaaccccatctcagggcatgtcttgttactcaagatccttcagagtcagagaaatccctttttccatggtcacggcactcctccagttttatcccctgatgtgatgtgatagaaagggtacttcacctctgtggtcccaaagaacccataaccctagtctaatcatgagaaaaaaagacaaatccaaacggagggacattttaccctgagcagtactcttcaaagctattagagtgatgaaaaacaaggcaagactgagaaacagtcacagaccaaggagacgaaggagacgtgacaactaaatgtaatgtggtgtcctgggtgggatccccaccagaaacaggacattgtgaacaaacaggtgaaatccaaatatagtctgcttagcaacaaaacaaaaatgaacaaacgaaaaatcctcaccacggccgattgacttgcggttttctccagtgcccggctctaagctgacatctctctggttttccagtctcggcttcctttgatggcaaacagcacctgcggagcctgcctgtggtgaacagcatcggctatgtcctccgcttcctcgccaagctgtgccgaagcctcctgtgcgatgacctcttcagccaccagcccttccccaggggctgcagtgcctctgagaaagtccaggagaaagaggaagggaggatggaatcagtcaagacagtcaccaccgaagagtacctggtgaaccctgtgggcatgaaccgctacagcgtggacacctccgcctccacctttaaccacaggggctccttgcacccctcctcctcgctgtactgcaagaggcagaactctggagacagccaccttgggggtggtcctgctgccaccgctggtggtccccgcactagccccatgtcttctggtggcccctcggcacctgggctgaggcctccagcctccagccccaagagaaacacgacctctcttgaaggaaacagatgtggtaatgtaatgcatgcatcagcttcccactgacttaacatcccttgcccttgcgcggggagcacagcatctggggaagggggagtgtggctgtttaaacgtgggactgctgggagatcagaaatttccacaagtcctttcatggatcttgaggttctcaaaaacagccaaactcaacctttgataagcaaagaaaatcgtgtattagggcaggctaggccacaggatacgtagactccaaaatgtacacaggctcaaataccatagaaatttttgttcgagagccaaaggtgaatgttcctgattcatggatgcatctcaatatagggacataggctccatctattttgtggctctgccaccctctacagccttcatgccccatgcattagggaatagaaagggaaagaaggtgtggagaagacacaggtgcttccctgcaatctgaaagtgatgctcatcacttccactcacatctcattggcaaaagctggtcattttgccacacttaaccataagggactctggaagctgtaggttagctctgcccaggagaaaggagaaccagaccttggtaaagaattgtctcttgcataggaagtgtcaccttcaggatacaaatacatgagcagaggcagagttaggcaaaattcccccaatgctggttgtaatgccacttctgtctcatccactaaagaaagcttgttggaatgcagtctacaaaagcgctataagggctaaaggattatagtaatagcttgaaggcccttctgattgatgttttaaaaaatcattttcaagcttcagtattttgatagtgcctaaaggccatagagtatagtggataatcactgggactagagccagacagcctgggctgagatgctggatctgctgcttcctgcctaccttttgcaagtcttaacttacctgtgcttcagtttcctcacctataaaattgtgataataataatggcagcacctgcctcataggattgttgggaggattaaatgagttcatacatgcatttagtacaagacctaggaggtaacaagagctcaataaatgttagtagttacagcatagatctttttaacacatcccttaacagatcacagcccatcagctccacagctgagaactgctgaagaaagaaggccccaggccaaggagtctgggagtcttcatcttgccaccctgtagcccctcagtgggcaggctctgtcttctgtggcaagtcacatttctcccctgagcctaggatccttccaccagtgaccccagcaagccgcacacgtgagctattttgtatgattcaagaccctccacacattctcttccaagagcctcatccaacccagatgagcgtggccctgaccagcttcccctggccaaggatggagaggtgagaaggggccccttgccggagaggcgttctgaggggtagagcgcagattctccctccacagcagctcttaccaaatgtagagatgccctgcaggccactttccaacactgtcacacagggccatgagccaggcagattaagtgagcagagccctattttccaaaggagagcaacattgttccatttgattcctaagaacaagagaaagggacaagatctttcacgaaccaacactgtaaagtaaaccaggggcagccttgatttcataggtttgtccccagtgttagcttaatatctggcatgtggtaggtgttcaataaacatgcatcatgtctgtgccctcacggtgtccctttgtcttcttgtcaaaacactcatccttatgtccctcttgagtttaaatgtctttctctcatcctcttctcctcagccccattccccttttctcagggtggtgatcacaggacaccatgctgattgaattgactcataatcccagagtcccactttttaaaaaggagatatttactctctctcccactcacgttggtgcaatctcagccctatgtcttaaatgcaggatttccagcagtaagagggaggcatgatttggttggagagaacttctatcactcactcaacaacagtctgccctgttcagtccaactggtgacccagggccagggaatccagggctcttcagagggcttcagcatagctcctgtcccccagcccctcacacctccttccagttgagccctaggatgtcctcctgtccttcactttcatccccataccggccctttgttctcctgtgtatgagtctgttctgctaataaagacatacccg

SEQ ID NO: 5763 - protein, 148 aa, Homo sapiens
MTPLALSPPRSTPEPDLSSIPQDAATVPSLAAPQALTVCLYINKQANAGPYLERKKVQQLPEHFGPERPSAVLQQAVQACIDCAHQQKLVFSLVKQGYGGEMVSGKAWGRLHEEAMDVSLQRKQPYSGLETAGVARVCPSSAGLLGSL

SEQ ID NO: 5764 - DNA, 810 bp, Homo sapiens
gaatgcattagtctaatgagatgtttgcagctggagcgcagggctgctggagactaactgtgagctactaacacgggtggaagatagcttttgcaatactcggtttgcatgtgctgaaagtcatctgtcttctgagtcaacactcccgacctggtaaacaacctgctcagggctctggtgaacaagctgtagatcaagtctcgggttctcatgactcccttagccctctcacctccgcggagtaccccagagcccgacctcagctccatccctcaggacgcagccacggtccccagcttggcggccccacaggctctcacagtctgcctctacatcaacaagcaggccaatgcggggccctatctggagaggaagaaggtgcagcagctcccggagcattttgggcccgagcggccatcggcggtgctgcagcaggccgtccaagcctgcatcgactgcgcccaccagcagaagctggtcttctccctggtcaagcagggctatggtggtgagatggtgtcagtctcggcttcctttgatggcaaacagcacctgcggagcctgcctgtggtgaacagcatcggctatgtcctccgcttcctcgccaagctgtgccgaagcctcctgtgcgatgacctcttcagccaccagcccttccccaggggctgcagtgcctctgagaaagtccaggagaaagaggaagggaggatggaatcaggaggatgacagccttccttcctaaaagctgatgtccccatctgaaagctggttttcctcccagtcagctgggaggtttggaagtaatgaccc

SEQ ID NO: 5765 - protein, 171 aa, Homo sapiens
MTPLALSPPRSTPEPDLSSIPQDAATVPSLAAPQALTVCLYINKQANAGPYLERKKVQQLPEHFGPERPSAVLQQAVQACIDCAHQQKLVFSLVKQGYGGEMVSVSASFDGKQHLRSLPVVNSIGYVLRFLAKLCRSLLCDDLFSHQPFPRGCSASEKVQEKEEGRMESGG

SEQ ID NO: 5766 - DNA, 789 bp, Homo sapiens
tttgcagctggagcgcagggctgctggagactaactgtgagctactaacacgggtggaagatagcttttgcaatactcggtttgcatgtgctgaaagtcatctgtcttctgagtcaacactcccgacctggtaaacaacctgctcagggctctggtgaacaagctgtagaaacctaaggcaacaacaaagacaaatgccctgccagagaacagcttggataggttgcgacaggcagagaacccccccattccactggagagagatcaagtctcgggttctcatgactcccttagccctctcacctccgcggagtaccccagagcccgacctcagctccatccctcaggacgcagccacggtccccagcttggcggccccacaggctctcacagtctgcctctacatcaacaagcaggccaatgcggggccctatctggagaggaagaaggtgcagcagctcccggagcattttgggcccgagcggccatcggcggtgctgcagcaggccgtccaagcctgcatcgactgcgcccaccagcagaagctggtcttctccctggtcaagcagggctatggtggtgagatggtgtcagtctcggcttcctttgatggcaaacagcacctgcggagcctgcctgtggtgaacagcatcggctatgtcctccgcttcctcgccaagctgtgccgaagcctcctgtgcgatgacctcttcagccaccagcccttccccaggggctgcagtgcctctgagaaagtccaggagaaagaggaagggaggatggaatcag

SEQ ID NO: 5767 - protein, 197 aa, Homo sapiens
MPCQRTAWIGCDRQRTPPFHWREIKSRVLMTPLALSPPRSTPEPDLSSIPQDAATVPSLAAPQALTVCLYINKQANAGPYLERKKVQQLPEHFGPERPSAVLQQAVQACIDCAHQQKLVFSLVKQGYGGEMVSVSASFDGKQHLRSLPVVNSIGYVLRFLAKLCRSLLCDDLFSHQPFPRGCSASEKVQEKEEGRME

SEQ ID NO: 5768 - DNA, 550 bp, Homo sapiens
gcattagtctaatgagatgtttgcagctggagcgcagggctgctggagactaactgtgagctactaacacgggtggaagatagcttttgcaatactcggtttgcatgtgctgaaagtcatctgtcttctgagtcaacactcccgacctgatcaagtctcgggttctcatgactcccttagccctctcacctccgcggagtaccccagagcccgacctcagctccatccctcaggacgcagccacggtccccagcttggcggccccacaggctctcacagtctgcctctacatcaacaagcaggccaatgcggggccctatctggagaggaagaaggtgcagcagctcccggagcattttgggcccgagcggccatcggcggtgctgcagcaggccgtccaagcctgcatcgactgcgcccaccagcagaagctggtcttctccctggtcaagcagggctatggtggtgagatggtgtcagtctcggcttcctttgatggcaaacagcacctgcggagcctgcctgtggtgaacagcatcggctatgtcct

SEQ ID NO: 5769 - protein, 126 aa, Homo sapiens
MTPLALSPPRSTPEPDLSSIPQDAATVPSLAAPQALTVCLYINKQANAGPYLERKKVQQLPEHFGPERPSAVLQQAVQACIDCAHQQKLVFSLVKQGYGGEMVSVSASFDGKQHLRSLPVVNSIGY

SEQ ID NO: 5770 - DNA, 703 bp, Homo sapiens
cgcagggctgctggagactaactgtgagctactaacacgggtggaagatagcttttgcaatactcggtttgcatgtgctgaaagtcatctgtcttctgagtcaacactcccgacctggtaaacaacctgctcagggctctggtgaacaagctgtagcacctcttctgcctgtgagcgatttgtcacctcattctgtaagactggcaccagcagaaatgcagtctcaaaggatcccggggagaaagcgaggccgaccctcacttcactccacgcctatgaagatggcagttcataacctttattctgcttcagctggctctttaccagcagtgaagatcccaaagaaaagagggcggaaacccgggtacaagatcaagtctcgggttctcatgactcccttagccctctcacctccgcggagtaccccagagcccgacctcagctccatccctcaggacgcagccacggtccccagcttggcggccccacaggctctcacagtctgcctctacatcaacaagcaggccaatgcggggccctatctggagaggaagaaggtgcagcagctcccggagcattttgggcccgagcggccatcggcggtgctgcagcaggccgtccaagcctgcatcgactgcgcccaccagcagaagctggtcttctccctggtcaagcagggctatggtggtgagatggtgtcagg

SEQ ID NO: 5771 - protein, 161 aa, Homo sapiens
MQSQRIPGRKRGRPSLHSTPMKMAVHNLYSASAGSLPAVKIPKKRGRKPGYKIKSRVLMTPLALSPPRSTPEPDLSSIPQDAATVPSLAAPQALTVCLYINKQANAGPYLERKKVQQLPEHFGPERPSAVLQQAVQACIDCAHQQKLVFSLVKQGYGGEMV

SEQ ID NO: 5772 - DNA, 4361 bp, Homo sapiens
gattttttaaccatttcggacaattgagagtttagaatagtctagtactattttggttaaataaatatttagaacatcctagagtttattttgttttaagctgtaaaacatttttctttaaactgttttagaaagatacttccctacccaactcttaaaacaggtgttaataagcaggtgactaaatagtgaactgaggtgtgctgtaatagagcagttgttgctgaatgcacggaggtttcgtgctttcagacttcttggccttctaaaatatatatatacacacacacatatatgtatatgtatatatgtgtatatatatatatatacacacacatatatatatgttccttccactccaactttgtggcttttgcttattactaggtaagagtactaagattatttgctacatgctattgtaatagttgtatatatttagaataatgcttgttacttaaggttagtcagggtttttaatatgaaggccaatcaataggttttaaggagctattgaaatccccaaaattgcatacaaaatgcttttaggcaatggatctacaaatgttaagaacagcttattctttcagtaaatattcatttgaatacctattttgtaccaagcagtttgtcagtgcagaggatctctaagataagagaggccaaaattatattctttctagttctttctgattatttatacccctcttctttttttttttttttttttgtttccaggaaaaacaagaatggtggtggctttacattgcagataggaaggagcagacattaatatccatgccatatcatgtgtgtacgctgaaagatacagaggaggtagagctgaagtttcctgcaccaggcaagcctggaaattatcagtatactgtgtttctgagatcagactcctatatgggtttggatcagattaaaccattgaagttggaagttcatgaggctaagcctgtgccagaaaatcacccacagtgggatacagcaatagagggggatgaagaccaggaggacagtgagggctttgaagatagctttgaggaagaagaggaggaagaagaagatgatgactaagcagtactctgaatggaccacagtgtttgcacatatttgcaattttttgctgttttggaagtgtatcataaaccagaaacagtacagaactgatgttgagggaggtgtagtttttttactcttgaaatgggtgcataatataactaggcagtggcggtgccttggtacaacctgaaaaatgttaaggcttattgaaacctttcaagtaggggatggtacatttatttcatctgcaaatgataataaatcctttgttattataactgtccagaagtgtgggctatgtattatctgatcagtctatggtcccagtaaaagtaaagatgcaggaaacacagtctgtaaatgagcgacttttctttgttcagctttagttttagcaaacaccacaaatatgttttaagtaacatcgctcaagtttaagtaacatcgctcaagttgataatctcttgataagctctgttgttgacattttgcagtgatacaacagctccactcatagatttaaacttttatttttacttatcttggtcataagttggcattctctcacattccacatgatatagagggctacgttttggaattttccttttcttaattgcccagagttatcagacagattataaaaatggcttttaatggcttaaaccatttctaaacctctatcttagcagatcaatgcaggatctaattcttttgataagttctagctctaaaagtgatagtgggactgtatgttttctgatactggtggcttatgttattaaaccttttttaaaaaaggttcactctaaaagctgaactacatccttagttttcagtctacttgactctatcaggagctttttaaggaaagtaagtataacatgcaaaggaagctttttttgtattcattttggactcctgtcaataaaaatagaagtttgttgactcgttttatgtttcaatggtgtgtgtctttttactatcaggacataaatagggcaatccacttctttatttttcaactaaagattgaatagtattgtacattactgctaaagtgactgctatttctgtatactgtagaaaaacccaggagtgagagggatttcccctcatagtacaactggaaggatagtgcttgtaaagagtagagatgtgtacatgatgaatcattgagggagggtggatatttttattcctagatatggaggaaacataagtctgtagtattataaaactgattgtaataattctttcctatcaaaatctccataggtcaaaatattgttggaatactaaaatttgcaaccttgtttactttaaaaggttgccactttcagtgcagaatactaccggcatcttgttactgcaatagttggaaataaaatgtgaaaattagcaaaaccatgaatggtttttttggttctaaatttaagatgtaatatttcctataaaagggtgaaagcagtttctttctctataacctcaatcaccagtttagtgagagcctttcttggcaggcaggaggcagtgtcactgaggatttttttcatttacttcattgtacaagtaggagggtgggtttaattttcaaatcaggttctgctgtgaagcaccagtgtcttgaggcagctactgattacctaagtgtggtggcagggggtaagccagctggtgtcaagtgaaaggagggattagagaaaacaggtgtggcacgaaggcaaggaaactgagcagacaagacagaacaatgtgtagaatgcatatttcctagttttcttgaaagatttcaagaaaagttgtttttttttttctagtggctactttgccttaaagaggctttataagttcattcacacagctggcttctctggttttaagattctggagaggatgataacctagtaacaccacagtgcttaaaaaaaaaaaaaaaaaaaaaactaccatcaccagaaaattccaccagtttgttttccttttctctttgtgtgatgtgtatgtacttcccaactaagtaaaataaaatttcctctagtgagtgctttaggtaacctctttccatatggcagtagtgaaagaactgagccttcagttgatagttcttctctctccagcaagtcgctaaactccacatcccttcgtttttcctctggaatgagaataacaaactatcctagtttgcatttaatctaatggaaacttgagcaaagtttcaattttcttcctataaagaaactgacattttgtcaacaattgatgagcctatagatcatacagtgtataggaagtgaaattgaaacagttaaattatgtgatatttttctctaattggtaaagtacctattaaaatacagctgttcatgaggagacttaccacaattcaaagtgtagcagttgtgtattttagcattataatatttgattgaggccctgaggtgttaatatctcaatctcagagttagatgttcatgtcctttttgaattttttaaacatttttcataattttttttttaagttagggagcacattgagtgaagttctctgtgtagaacaataccttctgctctgcttctcccagctttcactgagggctggaaaaggacaggcctgtccagctgtactgtcccactgtgtatggggaagctcaggctctggtggaagcagggggcgtggatgtcaaacaactgatgtggaaacagggagggagagatataatgaggctctctaggcatgttatttttgaccacaagttttgttcagtttgcttcagccaatccaaaccatatactagagtgttctgtagtcacaattcttatttcaaatgtaattcagcaccttacataatttttgagaggttgtcattcatcacatatttactgagtttctatgtgccaggctctgtgactggatactggagctatcaaaatgaaaaaaatagtgttaagaactcactcgctggtgttagagcaggtagatgagtggcaatccatttaaatccatttgccttggctattatttggaatgcctttttttttttttagtctatctactgtaggcagaagaattatttctttaggggctagctgtttattttgctggcctttttttctctctttctctttttcttcttaagacggagtctcgctctgtcctccaggctggaggagtgcagtggcacgatctcagctcactgcaacctccgcctcccagcttcaagcgattcttctgcctcagcctcctgagtagctgggactgcaggtgcatgccaccacacccagctaat

SEQ ID NO: 5773 - protein, 95 aa, Homo sapiens
MPYHVCTLKDTEEVELKFPAPGKPGNYQYTVFLRSDSYMGLDQIKPLKLEVHEAKPVPENHPQWDTAIEGDEDQEDSEGFEDSFEEEEEEEEDDD

SEQ ID NO: 5774 - DNA, 5849 bp, Homo sapiens
gagttccaccgttgcgctcgccacgtctcccttagcgagctcgctggggacacgcagggggagggaaaactgagcggggcgggaactatctcctctcgcgagagctggcgacggcggcggcagcggcagaggtggcggcggcgtgtccgtgagagtggcgtgggggcggggaggagaggcggcggcggcagtgtccaagctacgccactcgggccggggcgttgggagcgggagtgcagagcgtggtcgtggcggcggcggtgagaagagcgaggcggaggagggggtgccatggccgggcagcagttccagtacgatgacagtgggaacaccttcttctacttcctcacctccttcgtggggctcatcgtgatcccggcgacatactacctctggccccgagatcagaatgccgagcaaattcgattaaagaatatcagaaaagtatatggaaggtgtatgtggtatcgtttacggttattaaaaccccagccaaatattattcctacagtaaagaaaatagttctgcttgcaggatgggcattgttcttattccttgcatataaagtttccaaaacagaccgagaataccaagaatacaatccttatgaagtattaaatttggatcctggagccacagtagcagaaattaaaaaacaatatcgtttgctgtcacttaaatatcatccagataaaggaggtgatgaggttatgttcatgaggatagcaaaagcttatgctgctttaacggatgaagagtcccggaaaaattgggaagaatttggaaatccagatgggcctcaagccacaagctttggaattgccctgccagcttggatagttgaccagaaaaactcaattctggttttacttgtatatggattggcatttatggttatccttccagttgttgtgggctcttggtggtatcgctcaatacgctatagtggagaccagattctaatacgcacaacacagatttatacatactttgtttataaaacccgaaatatggatatgaaacgtcttatcatggttttggctggagcttctgaatttgatcctcagtataataaagatgccacaagcagaccaacggataatattctaataccacagctaatcagagaaattggcagcattaatttaaagaagaatgagcctccacttacctgcccatatagcctgaaggccagagttcttttactgtctcatcttgctagaatgaaaattcctgagacccttgaagaagatcagcaattcatgctaaaaaagtgtcctgccctacttcaagaaatggttaatgtaatctgccaactaatagtaatggcccggaaccgtgaagaaagggagtttcgtgctccaactttggcatccctagaaaactgcatgaagctttctcagatggccgttcagggacttcagcaatttaagtctccccttctgcagctccctcatattgaagaggacaatcttagacgggtttctaatcataagaagtataaaattaaaactatccaggatttggtgagtttaaaagaatcagatcgtcacactctactgcacttccttgaagatgaaaaatatgaagaggttatggctgtccttgggagttttccatatgtgaccatggatataaaatcacaggtgttagatgatgaagatagcaacaacatcacagtaggatccttagttacagtgttggttaagttgacaaggcaaacaatggctgaagtatttgaaaaggagcagtccatctgtgctgcagaggaacagccagcagaagatgggcagggtgaaactaacaagaacaggacaaaaggaggatggcaacagaagagtaaaggacccaagaaaactgctaaatcaaaaaaaaagaaacctttaaaaaaaaaacctacacctgtgctattaccacagtcaaagcaacagaaacaaaagcaggcaaatggagtcgttgggaatgaagctgcagtaaaggaagatgaagaagaagtttcagataagggcagtgattctgaagaagaagaaaccaatagagattcccaaagtgagaaagatgatggtagtgacagagactctgatagagagcaagatgaaaaacaaaacaaagatgatgaagcagagtggcaagaattacaacaaagcatacagcgaaaagagagagctctattggaaaccaaatcaaaaataacacatcctgtgtatagcctttactttcctgaggaaaaacaagaatggtggtggctttacattgcagataggaaggagcagacattaatatccatgccatatcatgtgtgtacgctgaaagatacagaggaggtagagctgaagtttcctgcaccaggcaagcctggaaattatcagtatactgtgtttctgagatcagactcctatatgggtttggatcagattaaaccattgaagttggaagttcatgaggctaagcctgtgccagaaaatcacccacagtgggatacagcaatagagggggatgaagaccaggaggacagtgagggctttgaagatagctttgaggaagaagaggaggaagaagaagatgatgactaagcagtactctgaatggaccacagtgtttgcacatatttgcaattttttgctgttttggaagtgtatcataaaccagaaacagtacagaactgatgttgagggaggtgtagtttttttactcttgaaatgggtgcataatataactaggcagtggcggtgccttggtacaacctgaaaaatgttaaggcttattgaaacctttcaagtaggggatggtacatttatttcatctgcaaatgataataaatcctttgttattataactgtccagaagtgtgggctatgtattatctgatcagtctatggtcccagtaaaagtaaagatgcaggaaacacagtctgtaaatgagcgacttttctttgttcagctttagttttagcaaacaccacaaatatgttttaagtaacatcgctcaagtttaagtaacatcgctcaagttgataatctcttgataagctctgttgttgacattttgcagtgatacaacagctccactcatagatttaaacttttatttttacttatcttggtcataagttggcattctctcacattccacatgatatagagggctacgttttggaattttccttttcttaattgcccagagttatcagacagattataaaaatggcttttaatggcttaaaccatttctaaacctctatcttagcagatcaatgcaggatctaattcttttgataagttctagctctaaaagtgatagtgggactgtatgttttctgatactggtggcttatgttattaaaccttttttaaaaaaggttcactctaaaagctgaactacatccttagttttcagtctacttgactctatcaggagctttttaaggaaagtaagtataacatgcaaaggaagctttttttgtattcattttggactcctgtcaataaaaatagaagtttgttgactcgttttatgtttcaatggtgtgtgtctttttactatcaggacataaatagggcaatccacttctttatttttcaactaaagattgaatagtattgtacattactgctaaagtgactgctatttctgtatactgtagaaaaacccaggagtgagagggatttcccctcatagtacaactggaaggatagtgcttgtaaagagtagagatgtgtacatgatgaatcattgagggagggtggatatttttattcctagatatggaggaaacataagtctgtagtattataaaactgattgtaataattctttcctatcaaaatctccataggtcaaaatattgttggaatactaaaatttgcaaccttgtttactttaaaaggttgccactttcagtgcagaatactaccggcatcttgttactgcaatagttggaaataaaatgtgaaaattagcaaaaccatgaatggtttttttggttctaaatttaagatgtaatatttcctataaaagggtgaaagcagtttctttctctataacctcaatcaccagtttagtgagagcctttcttggcaggcaggaggcagtgtcactgaggatttttttcatttacttcattgtacaagtaggagggtgggtttaattttcaaatcaggttctgctgtgaagcaccagtgtcttgaggcagctactgattacctaagtgtggtggcagggggtaagccagctggtgtcaagtgaaaggagggattagagaaaacaggtgtggcacgaaggcaaggaaactgagcagacaagacagaacaatgtgtagaatgcatatttcctagttttcttgaaagatttcaagaaaagttgtttttttttttctagtggctactttgccttaaagaggctttataagttcattcacacagctggcttctctggttttaagattctggagaggatgataacctagtaacaccacagtgcttaaaaaaaaaaaaaaaaaaaaaactaccatcaccagaaaattccaccagtttgttttccttttctctttgtgtgatgtgtatgtacttcccaactaagtaaaataaaatttcctctagtgagtgctttaggtaacctctttccatatggcagtagtgaaagaactgagccttcagttgatagttcttctctctccagcaagtcgctaaactccacatcccttcgtttttcctctggaatgagaataacaaactatcctagtttgcatttaatctaatggaaacttgagcaaagtttcaattttcttcctataaagaaactgacattttgtcaacaattgatgagcctatagatcatacagtgtataggaagtgaaattgaaacagttaaattatgtgatatttttctctaattggtaaagtacctattaaaatacagctgttcatgaggagacttaccacaattcaaagtgtagcagttgtgtattttagcattataatatttgattgaggccctgaggtgttaatatctcaatctcagagttagatgttcatgtcctttttgaattttttaaacatttttcataattttttttttaagttagggagcacattgagtgaagttctctgtgtagaacaataccttctgctctgcttctcccagctttcactgagggctggaaaaggacaggcctgtccagctgtactgtcccactgtgtatggggaagctcaggctctggtggaagcagggggcgtggatgtcaaacaactgatgtggaaacagggagggagagatataatgaggctctctaggcatgttatttttgaccacaagttttgttcagtttgcttcagccaatccaaaccatatactagagtgttctgtagtcacaattcttatttcaaatgtaattcagcaccttacataatttttgagaggttgtcattcatcacatatttactgagtttctatgtgccaggctctgtgactggatactggagctatcaaaatgaaaaaaatagtgttaagaactcactcgctggtgttagagcaggtagatgagtggcaatccatttaaatccatttgccttggctattatttggaatgcctttttttttttttagtctatctactgtaggcagaagaattatttctttaggggctagctgtttattttgctggcctttttttctctctttctctttttcttcttaagacggagtctcgctctgtcctccaggctggaggagtgcagtggcacgatctcagctcactgcaacctccgcctcccagcttcaagcgattcttctgcctcagcctcctgagtagctgggactgcaggtgcatgccaccacacccagctaat

SEQ ID NO: 5775 - protein, 760 aa, Homo sapiens; identical to SEQ ID NO: 751

SEQ ID NO: 5776 - DNA, 2034 bp, Homo sapiens
gattttttaaccatttcggacaattgagagtttagaatagtctagtactattttggttaaataaatatttagaacatcctagagtttattttgttttaagctgtaaaacatttttctttaaactgttttagaaagatacttccctacccaactcttaaaacaggtgttaataagcaggtgactaaatagtgaactgaggtgtgctgtaatagagcagttgttgctgaatgcacggaggtttcgtgctttcagacttcttggccttctaaaatatatatatacacacacacatatatgtatatgtatatatgtgtatatatatatatatacacacacatatatatatgttccttccactccaactttgtggcttttgcttattactaggtaagagtactaagattatttgctacatgctattgtaatagttgtatatatttagaataatgcttgttacttaaggttagtcagggtttttaatatgaaggccaatcaataggttttaaggagctattgaaatccccaaaattgcatacaaaatgcttttaggcaatggatctacaaatgttaagaacagcttattctttcagtaaatattcatttgaatacctattttgtaccaagcagtttgtcagtgcagaggatctctaagataagagaggccaaaattatattctttctagttctttctgattatttatacccctcttctttttttttttttttttttgtttccaggaaaaacaagaatggtggtggctttacattgcagataggaaggagcagacattaatatccatgccatatcatgtgtgtacgctgaaagatacagaggaggtagagctgaagtttcctgcaccaggcaagcctggaaattatcagtatactgtgtttctgagatcagactcctatatgggtttggatcagattaaaccattgaagttggaagttcatgaggctaagcctgtgccagaaaatcacccacagtgggatacagcaatagagggggatgaagaccaggaggacagtgagggctttgaagatagctttgaggaagaagaggaggaagaagaagatgatgactaagcagtactctgaatggaccacagtgtttgcacatatttgcaattttttgctgttttggaagtgtatcataaaccagaaacagtacagaactgatgttgagggaggtgtagtttttttactcttgaaatgggtgcataatataactaggcagtggcggtgccttggtacaacctgaaaaatgttaaggcttattgaaacctttcaagtaggggatggtacatttatttcatctgcaaatgataataaatcctttgttattataactgtccagaagtgtgggctatgtattatctgatcagtctatggtcccagtaaaagtaaagatgcaggaaacacagtctgtaaatgagcgacttttctttgttcagctttagttttagcaaacaccacaaatatgttttaagtaacatcgctcaagtttaagtaacatcgctcaagttgataatctcttgataagctctgttgttgacattttgcagtgatacaacagctccactcatagatttaaacttttatttttacttatcttggtcataagttggcattctctcacattccacatgatatagagggctacgttttggaattttccttttcttaattgcccagagttatcagacagattataaaaatggcttttaatggcttaaaccatttctaaacctctatcttagcagatcaatgcaggatctaattcttttgataagttctagctctaaaagtgatagtgggactgtatgttttctgatactggtggcttatgttattaaaccttttttaaaaaaggttcactctaaaagctgaactacatccttagttttcagtctacttgactctatcaggagctttttaaggaaagtaagtataacatgcaaaggaagctttttttgtattcattttggactcctgtcaataaaaatagaagtttgttgactcgttttatgtttc

SEQ ID NO: 5777 - protein, 95 aa, Homo sapiens; identical to SEQ ID NO: 5773

SEQ ID NO: 5778 - DNA, 3522 bp, Homo sapiens
gagttccaccgttgcgctcgccacgtctcccttagcgagctcgctggggacacgcagggggagggaaaactgagcggggcgggaactatctcctctcgcgagagctggcgacggcggcggcagcggcagaggtggcggcggcgtgtccgtgagagtggcgtgggggcggggaggagaggcggcggcggcagtgtccaagctacgccactcgggccggggcgttgggagcgggagtgcagagcgtggtcgtggcggcggcggtgagaagagcgaggcggaggagggggtgccatggccgggcagcagttccagtacgatgacagtgggaacaccttcttctacttcctcacctccttcgtggggctcatcgtgatcccggcgacatactacctctggccccgagatcagaatgccgagcaaattcgattaaagaatatcagaaaagtatatggaaggtgtatgtggtatcgtttacggttattaaaaccccagccaaatattattcctacagtaaagaaaatagttctgcttgcaggatgggcattgttcttattccttgcatataaagtttccaaaacagaccgagaataccaagaatacaatccttatgaagtattaaatttggatcctggagccacagtagcagaaattaaaaaacaatatcgtttgctgtcacttaaatatcatccagataaaggaggtgatgaggttatgttcatgaggatagcaaaagcttatgctgctttaacggatgaagagtcccggaaaaattgggaagaatttggaaatccagatgggcctcaagccacaagctttggaattgccctgccagcttggatagttgaccagaaaaactcaattctggttttacttgtatatggattggcatttatggttatccttccagttgttgtgggctcttggtggtatcgctcaatacgctatagtggagaccagattctaatacgcacaacacagatttatacatactttgtttataaaacccgaaatatggatatgaaacgtcttatcatggttttggctggagcttctgaatttgatcctcagtataataaagatgccacaagcagaccaacggataatattctaataccacagctaatcagagaaattggcagcattaatttaaagaagaatgagcctccacttacctgcccatatagcctgaaggccagagttcttttactgtctcatcttgctagaatgaaaattcctgagacccttgaagaagatcagcaattcatgctaaaaaagtgtcctgccctacttcaagaaatggttaatgtaatctgccaactaatagtaatggcccggaaccgtgaagaaagggagtttcgtgctccaactttggcatccctagaaaactgcatgaagctttctcagatggccgttcagggacttcagcaatttaagtctccccttctgcagctccctcatattgaagaggacaatcttagacgggtttctaatcataagaagtataaaattaaaactatccaggatttggtgagtttaaaagaatcagatcgtcacactctactgcacttccttgaagatgaaaaatatgaagaggttatggctgtccttgggagttttccatatgtgaccatggatataaaatcacaggtgttagatgatgaagatagcaacaacatcacagtaggatccttagttacagtgttggttaagttgacaaggcaaacaatggctgaagtatttgaaaaggagcagtccatctgtgctgcagaggaacagccagcagaagatgggcagggtgaaactaacaagaacaggacaaaaggaggatggcaacagaagagtaaaggacccaagaaaactgctaaatcaaaaaaaaagaaacctttaaaaaaaaaacctacacctgtgctattaccacagtcaaagcaacagaaacaaaagcaggcaaatggagtcgttgggaatgaagctgcagtaaaggaagatgaagaagaagtttcagataagggcagtgattctgaagaagaagaaaccaatagagattcccaaagtgagaaagatgatggtagtgacagagactctgatagagagcaagatgaaaaacaaaacaaagatgatgaagcagagtggcaagaattacaacaaagcatacagcgaaaagagagagctctattggaaaccaaatcaaaaataacacatcctgtgtatagcctttactttcctgaggaaaaacaagaatggtggtggctttacattgcagataggaaggagcagacattaatatccatgccatatcatgtgtgtacgctgaaagatacagaggaggtagagctgaagtttcctgcaccaggcaagcctggaaattatcagtatactgtgtttctgagatcagactcctatatgggtttggatcagattaaaccattgaagttggaagttcatgaggctaagcctgtgccagaaaatcacccacagtgggatacagcaatagagggggatgaagaccaggaggacagtgagggctttgaagatagctttgaggaagaagaggaggaagaagaagatgatgactaagcagtactctgaatggaccacagtgtttgcacatatttgcaattttttgctgttttggaagtgtatcataaaccagaaacagtacagaactgatgttgagggaggtgtagtttttttactcttgaaatgggtgcataatataactaggcagtggcggtgccttggtacaacctgaaaaatgttaaggcttattgaaacctttcaagtaggggatggtacatttatttcatctgcaaatgataataaatcctttgttattataactgtccagaagtgtgggctatgtattatctgatcagtctatggtcccagtaaaagtaaagatgcaggaaacacagtctgtaaatgagcgacttttctttgttcagctttagttttagcaaacaccacaaatatgttttaagtaacatcgctcaagtttaagtaacatcgctcaagttgataatctcttgataagctctgttgttgacattttgcagtgatacaacagctccactcatagatttaaacttttatttttacttatcttggtcataagttggcattctctcacattccacatgatatagagggctacgttttggaattttccttttcttaattgcccagagttatcagacagattataaaaatggcttttaatggcttaaaccatttctaaacctctatcttagcagatcaatgcaggatctaattcttttgataagttctagctctaaaagtgatagtgggactgtatgttttctgatactggtggcttatgttattaaaccttttttaaaaaaggttcactctaaaagctgaactacatccttagttttcagtctacttgactctatcaggagctttttaaggaaagtaagtataacatgcaaaggaagctttttttgtattcattttggactcctgtcaataaaaatagaagtttgttgactcgttttatgtttc

SEQ ID NO: 5779 - protein, 760 aa, Homo sapiens; identical to SEQ ID NO: 751

SEQ ID NO: 5780 - DNA, 1868 bp, Homo sapiens
gagttccaccgttgcgctcgccacgtctcccttagcgagctcgctggggacacgcagggggagggaaaactgagcggggcgggaactatctcctctcgcgagagctggcgacggcggcggcagcggcagaggtggcggcggcgtgtccgtgagagtggcgtgggggcggggaggagaggcggcggcggcagtgtccaagctacgccactcgggccggggcgttgggagcgggagtgcagagcgtggtcgtggcggcggcggtgagaagagcgaggcggaggagggggtgccatggccgggcagcagttccagtacgatgacagtgggaacaccttcttctacttcctcacctccttcgtggggctcatcgtgatcccggcgacatactacctctggccccgagatcagaatgccgagcaaattcgattaaagaatatcagaaaagtatatggaaggtgtatgtggtatcgtttacggttattaaaaccccagccaaatattattcctacagtaaagaaaatagttctgcttgcaggatgggcattgttcttattccttgcatataaagtttccaaaacagaccgagaataccaagaatacaatccttatgaagtattaaatttggatcctggagccacagtagcagaaattaaaaaacaatatcgtttgctgtcacttaaatatcatccagataaaggaggtgatgaggttatgttcatgaggatagcaaaagcttatgctgctttaacggatgaagagtcccggaaaaattgggaagaatttggaaatccagatgggcctcaagccacaagctttggaattgccctgccagcttggatagttgaccagaaaaactcaattctggttttacttgtatatggattggcatttatggttatccttccagttgttgtgggctcttggtggtatcgctcaatacgctatagtggagaccagattctaatacgcacaacacagatttatacatactttgtttataaaacccgaaatatggatatgaaacgtcttatcatggttttggctggagcttctgaatttgatcctcagtataataaagatgccacaagcagaccaacggataatattctaataccacagctaatcagagaaattggcagcattaatttaaagaagaatgagcctccacttacctgcccatatagcctgaaggccagagttcttttactgtctcatcttgctagaatgaaaattcctgagacccttgaagaagatcagcaattcatgctaaaaaagtgtcctgccctacttcaagaaatggttaatgtaatctgccaactaatagtaatggcccggaaccgtgaagaaagggagtttcgtgctccaactttggcatccctagaaaactgcatgaagctttctcagatggccgttcagggacttcagcaatttaagtctccccttctgcagctccctcatattgaagaggacaatcttagacgggtttctaatcataagaagtataaaattaaaactatccaggatttggtgagtttaaaagaatcagatcgtcacactctactgcacttccttgaagatgaaaaatatgaagaggttatggctgtccttgggagttttccatatgtgaccatggatataaaatcacaggtgttagatgatgaagatagcaacaacatcacagtaggatccttagttacagtgttggttaagttgacaaggcaaacaatggctgaagtatttgaaaaggagcagtccatctgtgctgcagaggaacagccagcagaagatgggcagggtgaaactaacaagaacaggacaaaaggaggatggcaacagaagagtaaaggacccaagaaaactgctaaatc

SEQ ID NO: 5781 - protein, 524 aa, Homo sapiens
MAGQQFQYDDSGNTFFYFLTSFVGLIVIPATYYLWPRDQNAEQIRLKNIRKVYGRCMWYRLRLLKPQPNIIPTVKKIVLLAGWALFLFLAYKVSKTDREYQEYNPYEVLNLDPGATVAEIKKQYRLLSLKYHPDKGGDEVMFMRIAKAYAALTDEESRKNWEEFGNPDGPQATSFGIALPAWIVDQKNSILVLLVYGLAFMVILPVVVGSWWYRSIRYSGDQILIRTTQIYTYFVYKTRNMDMKRLIMVLAGASEFDPQYNKDATSRPTDNILIPQLIREIGSINLKKNEPPLTCPYSLKARVLLLSHLARMKIPETLEEDQQFMLKKCPALLQEMVNVICQLIVMARNREEREFRAPTLASLENCMKLSQMAVQGLQQFKSPLLQLPHIEEDNLRRVSNHKKYKIKTIQDLVSLKESDRHTLLHFLEDEKYEEVMAVLGSFPYVTMDIKSQVLDDEDSNNITVGSLVTVLVKLTRQTMAEVFEKEQSICAAEEQPAEDGQGETNKNRTKGGWQQKSKGPKKTA

SEQ ID NO: 5782 - DNA, 1007 bp, Homo sapiens
ttggaaaggagattgacatgttttggagtctccctataacattttaaatgtatgttagaatataacccattgatccttgaatttaagagtcttgccactgaaggtgaggtgggaggatcgcttgagcctaggtgtttgaggttgcggtgagccatgaccccacctctgcactccagcctgggccacagagtgagaccccaactgaaaaaaaaattatataactatacttttaatggtcttctaaatgtgacattacttgagcatgatgtgtatatcctcccaattcaaaaattacccacaacatgccctgctaatttttaaatttttttgtagagatggggtcttgccacgttgcccaggctggtcttaaactcctgggctcaaacgattatcctgcctcggcctctcaaagtactaggcttacaggtgtgaaccaccatgcctggctgacacagatatatttaaagtttcaaatgaaagtcttcccgcactaccaccctcaacttcatttatttaggaatcattgggaagttgggtgttttttctttaaaatctttttctatgaatttatgtacacacattcattttaaaaaaaacctttaatgagattttactgtatgtgtgcattattctgtttttttgcttaatataatggggatgcaacatatagaaaagcctcattttttaaaacagctgtataatactataatacggagataccatacaatttgatattcaccatttgttacttttgtgacttgtgtcctttctgatcctggagttccttttagtcacatagtgagtctaataattaagttgtttgttttgctttcttcaaaggattgttgcaagaatccaatcatattaagtaatatgaatgaaagtgtcatgtcaacttgtaaaattatgcctacatttgtttatcaagtatttattgaagacatgctgtgtgtcaagaaccagcttggtgcttatagcagtgggtagttttatccctttttggtctt

SEQ ID NO: 5783 - protein, 55 aa, Homo sapiens [sequence omitted]

SEQ ID NO: 5784 - DNA, 1093 bp, Homo sapiens
gagttccaccgttgcgctcgccacgtctcccttagcgagctcgctggggacacgcagggggagggaaaactgagcggggcgggaactatctcctctcgcgagagctggcgacggcggcggcagcggcagaggtggcggcggcgtgtccgtgagagtggcgtgggggcggggaggagaggcggcggcggcagtgtccaagctacgccactcgggccggggcgttgggagcgggagtgcagagcgtggtcgtggcggcggcggtgagaagagcgaggcggaggagggggtgccatggccgggcagcagttccagtacgatgacagtgggaacaccttcttctacttcctcacctccttcgtggggctcatcgtgatcccggcgacatactacctctggccccgagatcagaatgccgagcaaattcgattaaagaatatcagaaaagtatatggaaggtgtatgtggtatcgtttacggttattaaaaccccagccaaatattattcctacagtaaagaaaatagttctgcttgcaggatgggcattgttcttattccttgcatataaagtttccaaaacagaccgagaataccaagaatacaatccttatgaagtattaaatttggatcctggagccacagtagcagaaattaaaaaacaatatcgtttgctgtcacttaaatatcatccagataaaggaggtgatgaggttatgttcatgaggatagcaaaagcttatgctgctttaacggatgaagagtcccggaaaaattgggaagaatttggaaatccagatgggcctcaagccacaagctttggaattgccctgccagcttggatagttgaccagaaaaactcaattctggttttacttgtatatggattggcatttatggttatccttccagttgttgtggtaagttttagctttttaagttaatgttttttttggaaaggagattgacatgttttggagtctccctataacattttaaatgtatgttagaatataacccattgatccttgaatttaagagtcttgccactgaaggtgaggtgggaggatcgcttgagcctaggtgtttgaggttgcg

SEQ ID NO: 5785 - protein, 215 aa, Homo sapiens
MAGQQFQYDDSGNTFFYFLTSFVGLIVIPATYYLWPRDQNAEQIRLKNIRKVYGRCMWYRLRLLKPQPNIIPTVKKIVLLAGWALFLFLAYKVSKTDREYQEYNPYEVLNLDPGATVAEIKKQYRLLSLKYHPDKGGDEVMFMRIAKAYAALTDEESRKNWEEFGNPDGPQATSFGIALPAWIVDQKNSILVLLVYGLAFMVILPVVVVSFSFLS

SEQ ID NO: 5786 - DNA, 629 bp, Homo sapiens
gacggcggcggcagcggcagaggtggcggcggcgtgtccgtgagagtggcgtgggggcggggaggagaggcggcggcggcagtgtccaagctacgccactcgggccggggcgttgggagcgggagtgcagagcgtggtcgtggcggcggcggtgagaagagcgaggcggaggagggggtgccatggccgggcagcagttccagtacgatgacagtgggaacaccttcttctacttcctcacctccttcgtggggctcatcgtgatcccggcgacatactacctctggccccgagatcagaatgccgcggggagagtctcatttacccaggctggtcttgaacttgcttcaagtcatcctcccgcttcagccccccgagtagctggccttacagacttgagccactgtgtcaggatggatttttgaaatttgaaagtcatattttcatgcccagttgcagtatcttgaatatgaaagagaaatcttgaattactgcctcattcaaagctctgaataaggaacttttttcagaagtttgctgcaaaataatttgccgacttgtactgacaggaggctactgaataatctttatctcacttaataaatagttatgttctgtcttggaatatt

SEQ ID NO: 5787 - protein, 80 aa, Homo sapiens
MAGQQFQYDDSGNTFFYFLTSFVGLIVIPATYYLWPRDQNAAGRVSFTQAGLELASSHPPASAPRVAGLTDLSHCVRMDF

SEQ ID NO: 5788 - DNA, 735 bp, Homo sapiens
agtcacttcctccaccacttcatatctgctaggagcctgactcgccaagtccaccaagtcttctgaagaggattccatagaaagtgggcacatctaccttccctgttaacttgaataaactgttccatctgcatcagggttgggggatccagctatctgtaattgtgaagtgaagaggatgtgactgccaggtaatgctaaccccgaatccttggtgcctgtgttatgcaccatatgctgaatttcggttccagctgtgtgctaggctgggtctgatctggcaaagaggaactggctccacagctctgggcagaatccactgctgctcccacacagagaagaccaggggaaccgcagtcccactctgagcaattctgcaagagagcttcagcaaaattccaaaacaatcgcatcgagagtcggcacaacgcaggtctcccgactttgactggttccagacgaagtttcttttgtcgtttgctagcctccagggatgcaatctctacactctctgtgggatggagggggaaggtgatggtgtctatctgaagaatattttactttcaaaggaaagatgctgtctccaaatgataaaatgttaggaaaactggatccattttatcaaccttcagtgtccaagcagaagaccagtgcagaaatcataagtgaagcaagaaatgcattaagaacagttagaacccaaagaccatttacaccacaggaggctcaaagaaa

SEQ ID NO: 5789 - protein, 57 aa, Homo sapiens
MLTPNPWCLCYAPYAEFRFQLCARLGLIWQRGTGSTALGRIHCCSHTEKTRGTAVPL

SEQ ID NO: 5790 - DNA, 817 bp, Homo sapiens
gcaggcccagtggccgagcggcgtcgtggggttaccccgcccgcgccagcgctgcatccctggccgctacccggggagagccggaggatgaattgaacctcgcagccgctgctatctccagtgctcatcacagggtgtggtgtctatctgaagaatattttactttcaaaggaaagatgctgtctccaaatgataaaatgttaggaaaactggatccattttatcaaccttcagtgtccaagcagaagaccagtgcagaaatcataagtgaagcaagaaatgcattaagaacagttagaacccaaagaccatttacaccacaggaggctcaaagaaaactattcggacctgcatcctcaagaacatcagaaaatagacctccttcctccttcagcctccatgcatccagttttgagtcatctgattccaggcctatctctggcacacgtcttagtccactagagctgaaaccgaaagttccagcatctcccaccagagaggaggattcctgcttttcctttcctaagcccccagtggaccctgcgaagattagaagacaaagaagacagtggaatccaaagaaacagttatgatgggggactctatggtgaaaataaatgggatttatttaacaaaatcaaatgctatttgccacttaaagagtcacccacttcagctaactgatgatggaggcttcagtgaaataaaggagcaagaaatgttcaaaggaacaacatctttaccatctcatctcaagaatggagggtcagtattctttttatttaattttctggtcaggataatggtatcatttacc

SEQ ID NO: 5791 - protein, 138 aa, Homo sapiens
MLSPNDKMLGKLDPFYQPSVSKQKTSAEIISEARNALRTVRTQRPFTPQEAQRKLFGPASSRTSENRPPSSFSLHASSFESSDSRPISGTRLSPLELKPKVPASPTREEDSCFSFPKPPVDPAKIRRQRRQWNPKKQL

SEQ ID NO: 5792 - DNA, 3246 bp, Homo sapiens
agtggccgagcggcgtcgtggggttaccccgcccgcgccagcgctgcatccctggccgctacccggggagagccggaggatgaattgaacctcgcagccgctgctatctccagtgctcatcacagggtgtggtgtctatctgaagaatattttactttcaaaggaaagatgctgtctccaaatgataaaatgttaggaaaactggatccattttatcaaccttcagtgtccaagcagaagaccagtgcagaaatcataagtgaagcaagaaatgcattaagaacagttagaacccaaagaccatttacaccacaggaggctcaaagaaaactattcggacctgcatcctcaagaacatcagaaaatagacctccttcctccttcagcctccatgcatccagttttgagtcatctgattccaggcctatctctggcacacgtcttagtccactagagctgaaaccgaaagttccagcatctcccaccagagaggaggattcctgcttttcctttcctaagcccccagtggaccctgcgaagattagaagagtaagcaacgccagggctcgcttattcagggctgcctcccagcgggcccttctgccggacagatcccttcctccctccgactcaaagaagacagtggaatccaaagaaacagttatgatgggggactctatggtgaaaataaatgggatttatttaacaaaatcaaatgctatttgccacttaaagagtcacccacttcagctaactgatgatggaggcttcagtgaaataaaggagcaagaaatgttcaaaggaacaacatctttaccatctcatctcaagaatggaggggaccaggggaagagacatgcgagggcctcatcatgccccagtagctcagacctgagcaggctgcaaaccaaagcagtcccaaaagctgacctgcaagaagaggacgcagaaatagaagtagacgaagtcttttggaatacaaggattgtaccgattttgcgtgaattagaaaaggaagaaaacattgaaacggtttgtgctgcttgcacacaacttcatcatgctttagaggaaggaaacatgcttggaaataaatttaagggaagaagtattctcctgaagaccctgtgtaaactagttgatgttggttcagactcgctcagccttaaacttgcaaaaataattctagcacttaaagtgagtagaaagaatcttcttaatgtctgcaaacttatatttaaaattagcaggaatgagaagaatgattctttgattcaaaatgacagcattctggaatcattattggaggtactaagaagtgaagacctgcaaactaacatggaagcttttttatactgtatggggtctataaagttcatttctggaaatctgggatttcttaatgaaatgatcagcaaaggtgctgtggaaatactgataaatttgataaaacaaataaatgagaacatcaagaaatgtggtacatttttgcctaattcgggccacttgctagtccaggtgactgctacattgagaaacttggttgattcatcattagtaagaagtaagttcctaaacatcagtgcccttccccagctctgcacggcaatggaacagtacaagggtgacaaggacgtctgtaccaatattgccagaatattcagcaaacttacttcttaccgtgactgctgcacagccttggccagctattccagatgttatgccttatttctgaatctaattaacaaataccagaagaagcaggatttagtcgtccgtgttgtttttattcttggcaacctgacggcaaaaaataaccaggctcgtgaacaattttccaaagagaaagggagcatccaaactctgctgtcattattccagacgttccatcagctggatctgcattcccagaagccggtgggccaacgaggcgagcagcacagggcgcagaggccgccgtcagaggcagaggacgtgctcatcaagctgactcgtgtgctggccaacattgccatccacccgggcgtgggcccggtgctggccgccaacccggggatagtgggcctgctcctgaccacgctggaatacaagtcacttgatgattgtgaggagctggtgatcaatgctacagcgacaatcaacaatttatcttactaccaagtgaagaattccataattcaagacaaaaagctatatattgctgaattgctcttaaagcttcttgtcagtaacaacatggatggaatcctggaggctgtgcgtgttttcggaaatctctcccaggaccatgatgtctgcgatttcattgtgcagaacaatgtccacaggttcatgatggcgctgctggatgctcagcatcaggatatctgcttttctgcctgtggtgttctcctcaatctcactgtggataaagacaagcgtgtcatcttgaaagaaggaggtggcattaaaaagttagtggactgtttaagagatttgggtcctactgattggcagctggcctgcttggtttgtaaaactttatggaacttcagtgaaaacatcactaatgcttcgtcatgttttggaaatgaagacaccaacacactcttactcttgctctcatcatttttagatgaagaactagcactggatggcagttttgatccagacctaaaaaactatcacaaactccattgggaaacagaattcaaacctgtggcacagcagcttctaaaccgaattcagagacatcacaccttcctggaacccctgcccattccctctttctaacatgatgcagattaacagtagaaacgagaactcacgtctccctcattcttaagaactggtaacaaacgtgaacatttttttcagcattaacaaatgtggaaagtttttcaagaactggttttagtgagtagctgaagtattttttaaaattaagcatttcttcttgttaggtattatggaaaaatgaatatacacattatatttcctgttgagagaaatgtaagatgaaaatatgtgcattttcaagtaaatgactttttcttctattctctattaaacaatttagttctagtcttaaaatcttgatttaacaattttggaattgaagtgttcataagttaaatgaactgtgcaatgaaggctgttagattatatagaaagaagggtaggcaacatgagtggaacacgttacaacataggatctgtactaattcttactatgtcaaataataaatgctctcattaggtaccagt

SEQ ID NO: 5793 - protein, 867 aa, Homo sapiens; identical to SEQ ID NO: 756

SEQ ID NO: 5794 - DNA, 718 bp, Homo sapiens
gcggcgtcgtggggttaccccgcccgcgccagcgctgcatccctggccgctacccggggagagccggaggatgaattgaacctcgcagccgctgctatctccagtgctcatcacagggtgtggtgtctatctgaagaatattttactttcaaaggaaagatgctgtctccaaatgataaaatgttaggaaaactggatccattttatcaaccttcagtgtccaagcagaagaccagtgcagaaatcataagtgaagcaagaaatgcattaagaacagttagaacccaaagaccatttacaccacaggaggctcaaagaaaactattcggacctgcatcctcaagaacatcagaaaatagacctccttcctccttcagcctccatgcatccagttttgagtcatctgattccaggcctatctctggcacacgtcttagtccactagagctgaaaccgaaagttccagcatctcccaccagagaggaggattcctgcttttcctttcctaagcccccagtggaccctgcgaagattagaagagtaagcaacgccagggctcgcttattcagggctgcctcccagcgggcccttctgccggacagatcccttcctccctccgactgtaaggccatgtaacatcctgtaatctctggggacaggcatgcttcttgaatttgcacacaaaagctaattttatatgatttttcctaaccctgga

SEQ ID NO: 5795 - protein, 158 aa, Homo sapiens
MLSPNDKMLGKLDPFYQPSVSKQKTSAEIISEARNALRTVRTQRPFTPQEAQRKLFGPASSRTSENRPPSSFSLHASSFESSDSRPISGTRLSPLELKPKVPASPTREEDSCFSFPKPPVDPAKIRRVSNARARLFRAASQRALLPDRSLPPSDCKAM

SEQ ID NO: 5796 - DNA, 849 bp, Homo sapiens
actatcgagtgctcttagtattgttggaatcaaaaataagaaaagagggcttctggttaaaggcacaaaggcattctccagtaatccaatgaaagcagcaaagaatgaaaaacagagaagtaaatttcatcaatgaaacaacaacaaaaaaatggctacgaccctgaactacacaacatgaagcaaactttacactgcagtataggcttgatttttgttggtctgtctagcaaacaggccttctcacattgtgtaataaatgctgctcagtccgtatttggagaagggttagccctgtcttccctgtgtccctcccaggggtggttatgtggcccagggctggctaatcagagtttgccaaccccagctacagcagttgattcagagatgggcacatgatccaagccaggccagttgcattccttcatgggactttcaccaaggcctttggggaaagtgctctttctccaggttcacaaactataaagatgatgtggtcttggagctgacagtggccttttcacagccttatggagagagatgctgagagggaagtggtacataaacaaaaagagcaaggaacgaagataatgatcaagttcgaggatgacatataaacctctagatccagctgtgcctgaagccaccacatcaacattgtagaatactgttttgtgaaccaatgtgttcctttttctttctccttccttcctttctttttcttctctccttccttccttcccccttccctctccctctttccttccttccttccttccaacagggacggtttatggtactttagattaggttttgttacttggaacattgcattcataagaatctagt

SEQ ID NO: 5797 - protein, 40 aa, Homo sapiens
MCSFFFLLPSFLFLLSFLPSPFPLPLSFLPSFQQGRFMVL

SEQ ID NO: 5798 - DNA, 723 bp, Homo sapiens
acagaagcattgtcacttgtcttcaggcatcttctctcccatggcagcccataggaagaagaaaaaagagaagaaaatgacactgataatccacaaagaggactaatacaaatagacagggtcttgctctttcacccaggctggagtgcagtgatgccgccattacagctcactgcagccttgacctcgtgggctcaatcaactctcttgcctcagccgccagagcagctgggactataggcatgtgccaccatgcctggctaattttttcaacattttgtagagatgttgcccaggctggtcttgaactagcaggctcaaacaatcctcccacctcagcctcccacattttattaatgagttttcagttactttaaaaaaataatagaatctgtcaggcatatttgttaagtatttgttctgtgcttgatccacaagtatttactgggcacctgatgtgtaccaggcgctatgctgctcactgcagaagacaccaaaacggccatggtcagcccccagctggaggggcctggggaggggagcactgcctgtggggcagcttctgcataccctcctgcactaggccacttacaaaagttattctggaaatttggtgttgtcgttcacactttgcacttgaggagtgcgtgcctcagataggtcacagaaccatctcagcatcacctgggcatgtattaggaatgcagaatctcaggccccccc

SEQ ID NO: 5799 - protein, 88 aa, Homo sapiens
MCTRRYAAHCRRHQNGHGQPPAGGAWGGEHCLWGSFCIPSCTRPLTKVILEIWCCRSHFALEECVPQIGHRTISASPGHVLGMQNLRP

SEQ ID NO: 5800 - DNA, 968 bp, Homo sapiens
aataaaataagacaaatttgtgagatcttaatacttgtctcttgggagagaatgagactaaagatcttaaatattccttggccacatcattcattatctgatgctatttataaaagcatagaacaatcagacaagaatacctataaaattaaaaaaaaaaaagaaagaaaaacatagaacaagaagtttctaatctgcagaactgatgtggctatcacagggccagctgaagatcttaggagtgttagcaaacctagatgatggtttgtttaaccctgggtttggggtataccaattgcttactaagattaatatttcattctttacctttcaaccaaattaggctttctttgttttcatttgttgctacttgtgcctaggctcacattccctggtgggagatgcatagcgggagctttgcttagctactgatataaggaaatttatgaaatgaattgtactatgctgtttcgtgtggttatattttttcagttcaaaaaaaatggcacaagcatgcttttatcctaggtgactgctacattgagaaacttggttgattcatcattagtaagaagtaagttcctaaacatcagtgcccttccccagctctgcacggcaatggaacagtacaagggtgacaaggacgtctgtaccaatattgccagaatattcagcaaacttacttcttaccgtgactgctgcacagccttggccagctattccagatgttatgccttatttctgaatctaattaacaaataccagaagaagcaggatttagtcgtccgtgttgtttttattcttggcaacctgacggcaaaaaataaccaggctcgtgaacaattttccaaagagaaagggagcatccaaactctgctgtcattattccagacgttccatcagctggatctgcattcccagaagccggtgggccaacgaggcgagcagcacagggcgcagaggccgcc

SEQ ID NO: 5801 - protein, 115 aa, Homo sapiens
MEQYKGDKDVCTNIARIFSKLTSYRDCCTALASYSRCYALFLNLINKYQKKQDLVVRVVFILGNLTAKNNQAREQFSKEKGSIQTLLSLFQTFHQLDLHSQKPVGQRGEQHRAQR

SEQ ID NO: 5802 - DNA, 689 bp, Homo sapiens
ttcttgtcagtaacaacatggatggaatcctggaggctgtgcgtgttttcggaaatctctcccaggaccatgatgtctgcgatttcattgtgcagaacaatgtccacaggttcatgatggcgctgctggatgctcagcatcaggatatctgcttttctgcctgtggtgttctcctcaatctcactgtggataaagacaagcgtgtcatcttgaaagaaggaggtggcattaaaaaatgaagaactagcactggatggcagttttgatccagacctaaaaaactatcacaaactccattgggaaacagaattcaaacctgtggcacagcagcttctaaaccgaattcagagacatcacaccttcctggaacccctgcccattccctctttctaacatgatgcagattaacagtagaaacgagaactcacgtctccctcattcttaagaactggtaacaaacgtgaacatttttttcagcattaacaaatgtggaaagtttttcaagaactggttttagtgagtagctgaagtattttttaaaattaagcatttcttcttgttaggtattatggaaaaatgaatatacacattatatttcctgttgagagaaatgtaagatgaaaatatgtgcattttcaagtaaatgactttttcttctattctctattaaacaatttagttctagtctt

SEQ ID NO: 5803 - protein, 73 aa, Homo sapiens
MDGILEAVRVFGNLSQDHDVCDFIVQNNVHRFMMALLDAQHQDICFSACGVLLNLTVDKDKRVILKEGGGIKK

SEQ ID NO: 5804 - DNA, 867 bp, Homo sapiens
ttcttgtcagtaacaacatggatggaatcctggaggctgtgcgtgttttcggaaatctctcccaggaccatgatgtctgcgatttcattgtgcagaacaatgtccacaggttcatgatggcgctgctggatgctcagcatcaggatatctgcttttctgcctgtggtgttctcctcaatctcactgtggataaagacaagcgtgtcatcttgaaagaaggaggtggcattaaaaaatgaagaactagcactggatggcagttttgatccagacctaaaaaactatcacaaactccattgggaaacagaattcaaacctgtggcacagcagcttctaaaccgaattcagagacatcacaccttcctggaacccctgcccattccctctttctaacatgatgcagattaacagtagaaacgagaactcacgtctccctcattcttaagaactggtaacaaacgtgaacatttttttcagcattaacaaatgtggaaagtttttcaagaactggttttagtgagtagctgaagtattttttaaaattaagcatttcttcttgttaggtattatggaaaaatgaatatacacattatatttcctgttgagagaaatgtaagatgaaaatatgtgcattttcaagtaaatgactttttcttctattctctattaaacaatttagttctagtcttaaaatcttgatttaacaattttggaattgaagtgttcataagttaaatgaactgtgcaatgaaggctgttagattatatagaaagaagggtaggcaacatgagtggaacacgttacaacataggatctgtactaattcttactatgtcaaataataaatgctctcattaggtaccagt

SEQ ID NO: 5805 - protein, 73 aa, Homo sapiens; identical to SEQ ID NO: 5803

SEQ ID NO: 5806 - DNA, 1351 bp, Homo sapiens
ttcttgtcagtaacaacatggatggaatcctggaggctgtgcgtgttttcggaaatctctcccaggaccatgatgtctgcgatttcattgtgcagaacaatgtccacaggttcatgatggcgctgctggatgctcagcatcaggatatctgcttttctgcctgtggtgttctcctcaatctcactgtggataaagacaagcgtgtcatcttgaaagaaggaggtggcattaaaaaatgaagaactagcactggatggcagttttgatccagacctaaaaaactatcacaaactccattgggaaacagaattcaaacctgtggcacagcagcttctaaaccgaattcagagacatcacaccttcctggaacccctgcccattccctctttctaacatgatgcagattaacagtagaaacgagaactcacgtctccctcattcttaagaactggtaacaaacgtgaacatttttttcagcattaacaaatgtggaaagtttttcaagaactggttttagtgagtagctgaagtattttttaaaattaagcatttcttcttgttaggtattatggaaaaatgaatatacacattatatttcctgttgagagaaatgtaagatgaaaatatgtgcattttcaagtaaatgactttttcttctattctctattaaacaatttagttctagtcttaaaatcttgatttaacaattttggaattgaagtgttcataagttaaatgaactgtgcaatgaaggctgttagattatatagaaagaagggtaggcaacatgagtggaacacgttacaacataggatctgtactaattcttactatgtcaaataataaatgctctcattaggtaccagtatttttttggtctttatattaagagaaggagtaagcagaaaaacttaaagaaaactgctttgggccatctgttctttattaaataagtaaaatagataaaatgagagtatattttcatttgaaataaaatgactggactaagacagtccttctaattgtaactctctgtgtttgacaggtgaggtaatgtattagaaagaatgcaggcttaggtgaatggtatacctgaatctgaatccatgctctcccctgctagctttgtgggcctggagcaagtaacttaatttcttgagctgcaactgcaaaatgggaatcatatcaattttactgtagtgtagtttggaacaaaccattaaatgggcaaatggcccagtccagtgtatcatgtggagtgggtgttcaagaacattatgatggcaagcactttcttagcttgccatcctttgtaggatgagtttggcctttgaataaatgattaaagagc

SEQ ID NO: 5807 - protein, 73 aa, Homo sapiens; identical to SEQ ID NO: 5803

SEQ ID NO: 5808 - DNA, 2723 bp, Homo sapiens
tgaaacagcctgtggatatgccccctcgattgtcttgtcttgtgaaaacagattatttagccaccttcatcccctttgcctcctacttaaaagagagagaaagaaaaaaaacacatttgactcagggaagagatgatgttgcctggaataagtgtgtcctgcaagctctatgacgttatgcacagcgtttactcttgcgtattaagccatcccttttctgaattgtcctttagaaagaggaacttggcattagaattcctcgaccactaggacagggaccaagcagattcatcccagaaaaggagatcctccaagtggggagtgaagacgcacagatgcatgctttatttgcagattcttttgctgctttgggccgtttggataacattacgttagtgatggttttccacccacaatatttagaaagtttcttaaaaactcagcactatctactgcaaatggatgggccgttacccctacattatcgtcactacattggaataatggctgcggcaagacatcagtgctcctacttagtgaacctgcatgtaaatgatttccttcatgttggtggggaccccaagtggctcaatggtttagagaatgctcctcaaaaactacagaatttaggagaacttaacaaagtgttagcccatagaccttggcttattaccaaagaacacattgagggacttttaaaagctgaagagcacagctggtcccttgcggaattggtacatgcagtagttttactcacacactatcattctcttgcctcattcacattcggctgtggaatcagtccagaaattcattgtgatggtggccacacattcagacctccttctgttagcaactactgcatctgtgacattacaaatggcaatcacagtgtggatgagatgccggtcaactcagcagaaaatgtttctgtaagtgattctttctttgaggttgaagccctcatggaaaagatgaggcagttacaggaatgtcgagatgaagaagaggcaagtcaggaagagatggcttcacgttttgaaatagaaaaaagagagagtatgtttgtcttctcttcagatgatgaagaagttacaccagcaagagctgtatctcgtcattttgaggatactagttatggctataaagatttctctagacatgggatgcatgttccaacatttcgtgtccaggactattgctgggaagatcatggttattctttggtaaatcgcctttatccagatgtgggacagttgattgatgaaaaatttcacattgcttacaatcttacttataatacaatggcaatgcacaaagatgttgatacctcaatgcttagacgggcaatttggaactatattcactgcatgtttggaataagatatgatgattatgactatggtgaaattaaccagctattggatcgtagctttaaagtttatatcaaaactgttgtttgcactcctgaaaaggttaccaaaagaatgtatgatagcttctggaggcagttcaagcactctgagaaggttcatgttaatctgcttcttatagaagctaggatgcaagcagaactcctttatgctctgagagccattacccgctatatgacctgatgcctttccttcattaaagatgattctggaatgatcagcagatatagtctacaagggggaaggtactaagccccaggaccaatggtagacaaaataattcagaaatccattgtgccatgattcctttagtttctgctatttttctgtggaaaaccactgctggcacaagcagtgactgtttggcagcttcaagtttagagctgtgaagacaggctgccattcacagtattttgctttttgacagtacaagatgctgtgtaactgttttaatacagcaaatagtaactctccaaatcctgttgcttttatgttaaataagataacaagaattggagcatgcaaagaatgggacttggataatgacttaagctttatatgtaaagaattttagaagatcttggtgctgctattcctgctggaggaatgaatagatggctgtttcagttaagctattagtaataaaagtgaacattgctactatctgagcctacatacataacttgtgtgatttcaaattaaacttgcattatgtgttaattttcttgcatctaaaaaagcatagaattcctactcacacagctcagcaacaaccattttgatggtaacagttaatttctttcattagttttttaaattcagggttctggatattaaattaaaatggcattcttaaagattttcttcaaaaagcaatcctaaatgaaagtgtgtaaattataagaagctggcgatcttttgatatgctgtttcacaggatcctgacactggagggcagctgtcttgtgcattacttgtgtttccagcaccaaagttgtgggacatgttgctgtagactgctgcgcagtcctgggtgcattcagtctctctgcctctgcctgcctcctggtccccactttaaaggctgtgcagctccttaaataataaagctggaaaatatttttagtcgggttatcaaatttgatttacaaaaacgctaactttgtttgaaatgcaaacaggtttgaaaatatgtattaagtactttgtattctggaagcgtgaattgcttttgaagtctgtcagtattactggtatttttaaataaagaagaatttttctccaatttta

SEQ ID NO: 5809 - protein, 426 aa, Homo sapiens
MHALFADSFAALGRLDNITLVMVFHPQYLESFLKTQHYLLQMDGPLPLHYRHYIGIMAAARHQCSYLVNLHVNDFLHVGGDPKWLNGLENAPQKLQNLGELNKVLAHRPWLITKEHIEGLLKAEEHSWSLAELVHAVVLLTHYHSLASFTFGCGISPEIHCDGGHTFRPPSVSNYCICDITNGNHSVDEMPVNSAENVSVSDSFFEVEALMEKMRQLQECRDEEEASQEEMASRFEIEKRESMFVFSSDDEEVTPARAVSRHFEDTSYGYKDFSRHGMHVPTFRVQDYCWEDHGYSLVNRLYPDVGQLIDEKFHIAYNLTYNTMAMHKDVDTSMLRRAIWNYIHCMFGIRYDDYDYGEINQLLDRSFKVYIKTVVCTPEKVTKRMYDSFWRQFKHSEKVHVNLLLIEARMQAELLYALRAITRYMT

SEQ ID NO: 5810 - DNA, 2681 bp, Homo sapiens
gccgtccgtgctgactgaggcgctgcagccaggagccgcggccggctgcccagcgctcgccgcctccgcgcgtccgcagccgtccccgcgccgacatgcgcttggccgccgccgcgaacgaggcgtacacggcccctttggcggtctcggggctgctgggctgcaagcagtgcggcgggggccgcgaccaggacgaggaacttggcattagaattcctcgaccactaggacagggaccaagcagattcatcccagaaaaggagatcctccaagtggggagtgaagacgcacagatgcatgctttatttgcagattcttttgctgctttgggccgtttggataacattacgttagtgatggttttccacccacaatatttagaaagtttcttaaaaactcagcactatctactgcaaatggatgggccgttacccctacattatcgtcactacattggaataatggctgcggcaagacatcagtgctcctacttagtgaacctgcatgtaaatgatttccttcatgttggtggggaccccaagtggctcaatggtttagagaatgctcctcaaaaactacagaatttaggagaacttaacaaagtgttagcccatagaccttggcttattaccaaagaacacattgagggacttttaaaagctgaagagcacagctggtcccttgcggaattggtacatgcagtagttttactcacacactatcattctcttgcctcattcacattcggctgtggaatcagtccagaaattcattgtgatggtggccacacattcagacctccttctgttagcaactactgcatctgtgacattacaaatggcaatcacagtgtggatgagatgccggtcaactcagcagaaaatgtttctgtaagtgattctttctttgaggttgaagccctcatggaaaagatgaggcagttacaggaatgtcgagatgaagaagaggcaagtcaggaagagatggcttcacgttttgaaatagaaaaaagagagagtatgtttgtcttctcttcagatgatgaagaagttacaccagcaagagctgtatctcgtcattttgaggatactagttatggctataaagatttctctagacatgggatgcatgttccaacatttcgtgtccaggactattgctgggaagatcatggttattctttggtaaatcgcctttatccagatgtgggacagttgattgatgaaaaatttcacattgcttacaatcttacttataatacaatggcaatgcacaaagatgttgatacctcaatgcttagacgggcaatttggaactatattcactgcatgtttggaataagatatgatgattatgactatggtgaaattaaccagctattggatcgtagctttaaagtttatatcaaaactgttgtttgcactcctgaaaaggttaccaaaagaatgtatgatagcttctggaggcagttcaagcactctgagaaggttcatgttaatctgcttcttatagaagctaggatgcaagcagaactcctttatgctctgagagccattacccgctatatgacctgatgcctttccttcattaaagatgattctggaatgatcagcagatatagtctacaagggggaaggtactaagccccaggaccaatggtagacaaaataattcagaaatccattgtgccatgattcctttagtttctgctatttttctgtggaaaaccactgctggcacaagcagtgactgtttggcagcttcaagtttagagctgtgaagacaggctgccattcacagtattttgctttttgacagtacaagatgctgtgtaactgttttaatacagcaaatagtaactctccaaatcctgttgcttttatgttaaataagataacaagaattggagcatgcaaagaatgggacttggataatgacttaagctttatatgtaaagaattttagaagatcttggtgctgctattcctgctggaggaatgaatagatggctgtttcagttaagctattagtaataaaagtgaacattgctactatctgagcctacatacataacttgtgtgatttcaaattaaacttgcattatgtgttaattttcttgcatctaaaaaagcatagaattcctactcacacagctcagcaacaaccattttgatggtaacagttaatttctttcattagttttttaaattcagggttctggatattaaattaaaatggcattcttaaagattttcttcaaaaagcaatcctaaatgaaagtgtgtaaattataagaagctggcgatcttttgatatgctgtttcacaggatcctgacactggagggcagctgtcttgtgcattacttgtgtttccagcaccaaagttgtgggacatgttgctgtagactgctgcgcagtcctgggtgcattcagtctctctgcctctgcctgcctcctggtccccactttaaaggctgtgcagctccttaaataataaagctggaaaatatttttagtcgggttatcaaatttgatttacaaaaacgctaactttgtttgaaatgcaaacaggtttgaaaatatgtattaagtactttgtattctggaagcgtgaattgcttttgaagtctgtcagtattactggtatttttaaataaagaagaatttttctccaatttta

SEQ ID NO: 5811 - protein, 492 aa, Homo sapiens
MRLAAAANEAYTAPLAVSGLLGCKQCGGGRDQDEELGIRIPRPLGQGPSRFIPEKEILQVGSEDAQMHALFADSFAALGRLDNITLVMVFHPQYLESFLKTQHYLLQMDGPLPLHYRHYIGIMAAARHQCSYLVNLHVNDFLHVGGDPKWLNGLENAPQKLQNLGELNKVLAHRPWLITKEHIEGLLKAEEHSWSLAELVHAVVLLTHYHSLASFTFGCGISPEIHCDGGHTFRPPSVSNYCICDITNGNHSVDEMPVNSAENVSVSDSFFEVEALMEKMRQLQECRDEEEASQEEMASRFEIEKRESMFVFSSDDEEVTPARAVSRHFEDTSYGYKDFSRHGMHVPTFRVQDYCWEDHGYSLVNRLYPDVGQLIDEKFHIAYNLTYNTMAMHKDVDTSMLRRAIWNYIHCMFGIRYDDYDYGEINQLLDRSFKVYIKTVVCTPEKVTKRMYDSFWRQFKHSEKVHVNLLLIEARMQAELLYALRAITRYMT

SEQ ID NO: 5812 - DNA, 3520 bp, Homo sapiens
tggcgctcgaggattgccagggccgccctgtgccctctggctcggcggtggtgggcgagggctcagggatcggagaagtagcgtcttcccgggggtgccgaattggcggggctgggggacgctttttttcaccgccgcccgccgagactacggctgcccgagactgccgccctccgacagcgcccaagcctccggccgctgcggccagtgggccagggttcggcgagccttccctgccggcgccggccggctgctgaggcgctgggaggagctgcggagggcggggactggtgtcggagaaggggcggggtgggaacgccggagagaacccggtggctgcacagacaaaaaagccccgaatggctggagggcgttcagctgttaacagccttttggggcagagcacggatttgacagctccacaacgtgaggatatccactgaccccgcgagacggaggagaacgcttccccgaaattctctgcccaccaaagccagcgctgcaaggttgcaactttcaaactttgtttttccagaaagaagactgccctttcgtgtacaaggagagggtgagagggtgacctagcttgtagatcggctgaaggcaccagtggttccaaatgtcacccagatgtgtgttttcatgacgatttgatttctctgattttatttttacatttttcattttaaaaatacaaagcaatttttttggggcatgctgaaaggtaactgaagaccgcaaaggaaaaactattgtcatggctgaaggagagaatgaagtgagatgggatggactctgcagcagagattcaactactagggagacagcattggaaaacattaggcaaaccattttgaggaaaaccgagtatcttcgttcggtgaaagaaacacctcatcgtccatcagacgggctttcaaataccgagtcttcggatgggttgaataagctacttgctcatctgcttatgctttctaagaggtgtcccttcaaagatgtgagagagaaaagtgagtttattctgaagagcatccaggaacttggcattagaattcctcgaccactaggacagggaccaagcagattcatcccagaaaaggagatcctccaagtggggagtgaagacgcacagatgcatgctttatttgcagattcttttgctgctttgggccgtttggataacattacgttagtgatggttttccacccacaatatttagaaagtttcttaaaaactcagcactatctactgcaaatggatgggccgttacccctacattatcgtcactacattggaataatggctgcggcaagacatcagtgctcctacttagtgaacctgcatgtaaatgatttccttcatgttggtggggaccccaagtggctcaatggtttagagaatgctcctcaaaaactacagaatttaggagaacttaacaaagtgttagcccatagaccttggcttattaccaaagaacacattgagggacttttaaaagctgaagagcacagctggtcccttgcggaattggtacatgcagtagttttactcacacactatcattctcttgcctcattcacattcggctgtggaatcagtccagaaattcattgtgatggtggccacacattcagacctccttctgttagcaactactgcatctgtgacattacaaatggcaatcacagtgtggatgagatgccggtcaactcagcagaaaatgtttctgtaagtgattctttctttgaggttgaagccctcatggaaaagatgaggcagttacaggaatgtcgagatgaagaagaggcaagtcaggaagagatggcttcacgttttgaaatagaaaaaagagagagtatgtttgtcttctcttcagatgatgaagaagttacaccagcaagagctgtatctcgtcattttgaggatactagttatggctataaagatttctctagacatgggatgcatgttccaacatttcgtgtccaggactattgctgggaagatcatggttattctttggtaaatcgcctttatccagatgtgggacagttgattgatgaaaaatttcacattgcttacaatcttacttataatacaatggcaatgcacaaagatgttgatacctcaatgcttagacgggcaatttggaactatattcactgcatgtttggaataagatatgatgattatgactatggtgaaattaaccagctattggatcgtagctttaaagtttatatcaaaactgttgtttgcactcctgaaaaggttaccaaaagaatgtatgatagcttctggaggcagttcaagcactctgagaaggttcatgttaatctgcttcttatagaagctaggatgcaagcagaactcctttatgctctgagagccattacccgctatatgacctgatgcctttccttcattaaagatgattctggaatgatcagcagatatagtctacaagggggaaggtactaagccccaggaccaatggtagacaaaataattcagaaatccattgtgccatgattcctttagtttctgctatttttctgtggaaaaccactgctggcacaagcagtgactgtttggcagcttcaagtttagagctgtgaagacaggctgccattcacagtattttgctttttgacagtacaagatgctgtgtaactgttttaatacagcaaatagtaactctccaaatcctgttgcttttatgttaaataagataacaagaattggagcatgcaaagaatgggacttggataatgacttaagctttatatgtaaagaattttagaagatcttggtgctgctattcctgctggaggaatgaatagatggctgtttcagttaagctattagtaataaaagtgaacattgctactatctgagcctacatacataacttgtgtgatttcaaattaaacttgcattatgtgttaattttcttgcatctaaaaaagcatagaattcctactcacacagctcagcaacaaccattttgatggtaacagttaatttctttcattagttttttaaattcagggttctggatattaaattaaaatggcattcttaaagattttcttcaaaaagcaatcctaaatgaaagtgtgtaaattataagaagctggcgatcttttgatatgctgtttcacaggatcctgacactggagggcagctgtcttgtgcattacttgtgtttccagcaccaaagttgtgggacatgttgctgtagactgctgcgcagtcctgggtgcattcagtctctctgcctctgcctgcctcctggtccccactttaaaggctgtgcagctccttaaataataaagctggaaaatatttttagtcgggttatcaaatttgatttacaaaaacgctaactttgtttgaaatgcaaacaggtttgaaaatatgtattaagtactttgtattctggaagcgtgaattgcttttgaagtctgtcagtattactggtatttttaaataaagaagaatttttctccaatttta

SEQ ID NO: 5813 - protein, 551 aa, Homo sapiens; identical to SEQ ID NO: 758

SEQ ID NO: 5814 - DNA, 1524 bp, Homo sapiens
gcatagctgatttttgtagttatcttaaaaattatccaaaagtatgttcatactttgaataagtcgaacctaatacatataaattggaatgggaggagagagaaaggatctatgaaagaggcaataaaaggcatagagaattcaactatgagttttcattttataacagaaaatctccttttactacattctgtttactagcaagtaaactactttgtataattgtaagactactttggttgatattggtcactcagtatcagagaaagagttatgccatttttactcctttgggtaaaatcaattttaactagcatcctatttttaaaaacctttcaatggccttttttcccagatgatgaagaagttacaccagcaagagctgtatctcgtcattttgaggatactagttatggctataaagatttctctagacatgggatgcatgttccaacatttcgtgtccaggactattgctgggaagatcatggttattctttggtaaatcgcctttatccagatgtgggacagttgattgatgaaaaatttcacattgcttacaatcttacttataatacaatggcaatgcacaaagatgttgatacctcaatgcttagacgggcaatttggaactatattcactgcatgtttggaataagatatgatgattatgactatggtgaaattaaccagctattggatcgtagctttaaagtttatatcaaaactgttgtttgcactcctgaaaaggttaccaaaagaatgtatgatagcttctggaggcagttcaagcactctgagaaggtatgtgcctattgtggcttatttactttgtaacttagcaatgattcgtagtctccttcacctaacctaatggtgctgaaaccctttccatcacccctaccaacccaaagaaaaacattccaggacagctgtctcaggtaccccttcagaagggaacctgattatgttgatagagtaaaagaataaagacagggaacacaggtgggctggcccgtcttcagaagtgctggcatggctgtcagcacatagaagactgttttataaaagctgtgtataggtagaagtgtctgttctctttgaaacatctttatagaaattactgaataatgatttggcaggggaagttgctattctgataaaacagtgtctagattttctgacatgtaacaaacctccaagaaacatgataaaatataaatgaaagctcaatctatccaaaaagaatattaggccaggtatggtggctcacacctgtaatcccagcacttggggaggccaaggcaggctgatcacttaagatcaggagttcaagaccagactgtccaacatggtgatactaaaaataccaaaaaattagttggacatagtggcatgcacctgtattcccagctacatgggaagctgaggcatgagaatcgcttgaacccaggaggtggaggttgtagtgagccaagatcgtgccactgcacccgagcctgggaaagagtgaaagtgtgcatc

SEQ ID NO: 5815 - protein, 187 aa, Homo sapiens
MPFLLLWVKSILTSILFLKTFQWPFFPDDEEVTPARAVSRHFEDTSYGYKDFSRHGMHVPTFRVQDYCWEDHGYSLVNRLYPDVGQLIDEKFHIAYNLTYNTMAMHKDVDTSMLRRAIWNYIHCMFGIRYDDYDYGEINQLLDRSFKVYIKTVVCTPEKVTKRMYDSFWRQFKHSEKVCAYCGLFTL

SEQ ID NO: 5816 - DNA, 624 bp, Homo sapiens
caggatactgcagcaaatggagttttgctgaagatcaaagcaacataaatcatattatgcttatgtgcataaattatgtcacataggctcgtgtgattaaacagcacagtccctcgtttacctgaagtggaacgtgaaaacagcagagaagctacaggcagaacttgccttatgcgcagaagggtacccagaagtctgcaaagataatttataggacaactccccaaatcaccccacgtagtctttcctaaaatttccaacaatgcaatttcttagtacttttttaagagaggatgatggtggataggaggcaggactagcttgcagttcctgcccagatgcacagagcagcgcgtggagactcacatagtgaacttttgctccaagaactatcacaggaacatagcaggaaagccgagagaatccacagaccctttgaaggaacggaatcactgctgcaggctctccaagatgccaaaaaaactaaacaccactttactggccgaggactgcctttcctgtggaaggaaaagttatgctaagctgagtgctaaagtcaaagagctgcagagccactcctgctgttttcaattagcatgccagtcccaatggcatgtccggcag

SEQ ID NO: 5817 - protein, 67 aa, Homo sapiens
MHRAARGDSHSELLLQELSQEHSRKAERIHRPFEGTESLLQALQDAKKTKHHFTGRGLPFLWKEKLC

SEQ ID NO: 5818 - DNA, 264 bp, Homo sapiens
aggatgatgcaacagaaaagccgtcaccagataccagcaccttaatgttggacttctcagcctccagaactgagacctcaaggcacaaagcaaaagaagaatgaatttcatcatgggaatatacaaagcaaggcattaacatctatagttaaataagtcagcatcaaacttcttgctgtaccacccaccatttcacacagttcagctagctgactcgttcatactttaaggctaatcagaataaattaatgattcatcactaat

SEQ ID NO: 5819 - protein, 36 aa, Homo sapiens
CWTSQPPELRPQGTKQKKNEFHHGNIQSKALTSIVK

SEQ ID NO: 5820 - DNA, 1382 bp, Homo sapiens
agatgcccgagggcgcggcggcgctgccaggctgccgctgctgcccctgcgggccccgagcgcgcctccgcaggcggcactgcccgcggcgcggcgtgtgcaccgagcgagtgaaggtatgtgtggcgggcgcggctggagctgccgccgccgccgccgccgcgccagcaggtcctaatgcctgtcacttcccaggacgctggcagcagcagcagcccggagcccccgagccctcggcaggtttgcgtgtccttccccgcgatctgattggataaagtgggggctcgacggtggccgacgtgggacagtctggctgtggcaggggtctcggaaaccatgggttattgcagtggcaggtgcacgcttatctttatctgtggcatgcaactggtttgtgtgctggagaggcaaatatttgacttccttggatatcagtgggcacctatcctggcaaattttgtacatattattatcgtcattcttggtttgtttggaactattcaatatagacctcgttacataacaggatatgctgtctggctagtcctctgggttacgtggaatgtgtttgttatctgcttctatttggaggctggggacctctcaaaggaaacagaccttatcctgacttttaatatatcaatgcaccgatcttggtggatggagaatggaccaggatgtacggtgacgtcagtgacacctgccccagactgggccccagaagaccatcgctacatcacggtctcagggtgtttgctggagtaccagtacatagaagtggctcatagttccctccagattgtcctcgcagtaagtgttggcagccaaccgctccttctagtgcctctggggttgttttatttctgtgcgaactcagtgcacacaaatggaatctgtgggtaaagtgtggcctttttgctttttcctcattaatgcgacttttaacaggaaatcctcaggttaaactaaaccatcctctggacttagtgtgctgattttcttcgacaattagtaaataccctttgttatcatcagcattttacataggaaatccaatcagtcaagatgtgattacgtgacttttggtagacttttccaaggattctgaagggatgatcagagatttttttcataacgttctacagtactcaaaattataagatttccataagtgttttctcttttagtgcttcttttggctgtgctgctagccctgggatttctctttttcatttgccctatctccttcttccttcctagatttctcccaggcaccatccatcacctttaatctcccactttttttccagaaaaaatcacattttctatagattctaattctaagacattcatgcccccatttttcatagtactgtaacaat

SEQ ID NO: 5821 - protein, 188 aa, Homo sapiens
MGYCSGRCTLIFICGMQLVCVLERQIFDFLGYQWAPILANFVHIIIVILGLFGTIQYRPRYITGYAVWLVLWVTWNVFVICFYLEAGDLSKETDLILTFNISMHRSWWMENGPGCTVTSVTPAPDWAPEDHRYITVSGCLLEYQYIEVAHSSLQIVLAVSVGSQPLLLVPLGLFYFCANSVHTNGICG

SEQ ID NO: 5822 - DNA, 928 bp, Homo sapiens
agatgcccgagggcgcggcggcgctgccaggctgccgctgctgcccctgcgggccccgagcgcgcctccgcaggcggcactgcccgcggcgcggcgtgtgcaccgagcgagtgaaggtatgtgtggcgggcgcggctggagctgccgccgccgccgccgccgcgccagcaggtcctaatgcctgtcacttcccaggacgctggcagcagcagcagcccggagcccccgagccctcggcaggtttgcgtgtccttccccgcgatctgattggataaagtgggggctcgacggtggccgacgtgggacagtctggctgtggcaggggtctcggaaaccatgggttattgcagtggcaggtgcacgcttatctttatctgtggcatgcaactggtttgtgtgctggagaggcaaatatttgacttccttggatatcagtgggcacctatcctggcaaattttgtacatattattatcgtcattcttggtttgtttggaactattcaatatagacctcgttacataacaggatatgctgtctggctagtcctctgggttacgtggaatgtgtttgttatctgcttctatttggaggctggggacctctcaaaggaaacagaccttatcctgacttttaatatatcaatgcaccgatcttggtggatggagaatggaccaggatgtacggtgacgtcagtgacacctgccccagactgggccccagaagaccatcgctacatcacggtctcagggtgtttgctggagtaccagtacatagaagtggctcatagttccctccagattgtcctcgcactggcaggtttcatctacgcctgttatgttgtgaaatgtataactgaagaagaggacagctcacgtgtgaatgtgttaccaagcttaaaatattaaagatctgggggaggagccaaga

SEQ ID NO: 5823 - protein, 189 aa, Homo sapiens
MGYCSGRCTLIFICGMQLVCVLERQIFDFLGYQWAPILANFVHIIIVILGLFGTIQYRPRYITGYAVWLVLWVTWNVFVICFYLEAGDLSKETDLILTFNISMHRSWWMENGPGCTVTSVTPAPDWAPEDHRYITVSGCLLEYQYIEVAHSSLQIVLALAGFIYACYVVKCITEEEDSSRVNVLPSLKY

SEQ ID NO: 5824 - DNA, 3372 bp, Homo sapiens
agatgcccgagggcgcggcggcgctgccaggctgccgctgctgcccctgcgggccccgagcgcgcctccgcaggcggcactgcccgcggcgcggcgtgtgcaccgagcgagtgaaggtatgtgtggcgggcgcggctggagctgccgccgccgccgccgccgcgccagcaggtcctaatgcctgtcacttcccaggacgctggcagcagcagcagcccggagcccccgagccctcggcaggtttgcgtgtccttccccgcgatctgattggataaagtgggggctcgacggtggccgacgtgggacagtctggctgtggcaggggtctcggaaaccatgggttattgcagtggcaggtgcacgcttatctttatctgtggcatgcaactggtttgtgtgctggagaggcaaatatttgacttccttggatatcagtgggcacctatcctggcaaattttgtacatattattatcgtcattcttggtttgtttggaactattcaatatagacctcgttacataacaggatatgctgtctggctagtcctctgggttacgtggaatgtgtttgttatctgcttctatttggaggctggggacctctcaaaggaaacagaccttatcctgacttttaatatatcaatgcaccgatcttggtggatggagaatggaccaggatgtacggtgacgtcagtgacacctgccccagactgggccccagaagaccatcgctacatcacggtctcagggtgtttgctggagtaccagtacatagaagtggctcatagttccctccagattgtcctcgcactggcaggtttcatctacgcctgttatgttgtgaaatgtataactgaagaagaggacagctttgatttcataggtggctttgactcttatggctatcaagggcctcagaagacatctcatttacaactacagcctatgtacatgtcaaaataatacagatgacttcagtatgtcagcccatggacctttcaaagaacttttttcgcagtggcctcctgcatttcatgaagagcaagaagcaactgagtttaaatacatacacgtattaacaaaacaaatgcaaagcctctacatacaacactgacacacacacacacacacacgtgagcacgcacacaccaattccacttgacctcctctttctaactgaaacagacaaatatgcaggacacgcccatcttggatttcctgaaagcaggcccctttctcccaggccttcggaaagttcagaaggagatgtgttgatgcccaacggttgccggccattgctaactcctctgcagcccagcgggttggcctctgtgagctgggaagtcatccaaggcacattagtttgagagctctgtcttctgcactccatacatcttgacagcaccacggctacttaggcaatgtaattgcaaaaacaaacgaaacatgccatgatgaccttgtacccgaagtccgaaatggcagattgtttgccctaaaggctgtaccgtacatacttgccttaacccacctacattgtgtgcccaagaatcccagtgcagacagccccaagccacttcctttaggctaacacactgctattaattctaaatgagttcaagcctgtgtgtttcatgtcaaggaacaagactgaatagctcagcagctccagtgtgtctgtataagaaaagtgccagctgtcagcaaagtgctttaccatagagcctccatggtggcccaaaagagacaagtaacaataacaatatctgtcatctttataattctaaaatatggtcttctgatggggttgggggtgggacagagtaaaacattaatctactaaactcactaatctactggaagcagaaagcagaaatggcttaactcgctgattttatttattgcactctaggtgcttttataagtatctacaattgtcttttactaacacagaaacagctgtggatttctatcaacagaggccaactgaatatgtattagctatgtttactcttttatatctaattcaaattgaagactctacgtaggtgaacttttttttctaacttcagtgtacaagattatttttgggtgggtggggggagcaatagttaccttggtgaaatatttgagatctttttgtggtatttgggggatctgttgtgtgttagagtgtatttcaaccctcctgtattattgtggcagaaaaactgtgctgttaacgtagttggcaacaagatgcctttggaaacttaatagtaggtcaatgtgtttatggaatattctgaactcctaggaaattttgttctatattttaaagcattatttggttttcattagtggaaaacataattagctcaggcttatcaggaactcagatgagtcatattttttcttggatacacctgagacattaaactcaattttttaaaactaacacaccattctttagtgcagtgaaattcaaaagttataaattggcatggagcaagttttttctttgatttctatgaagtttcagttattggattaaactactttagaccttagcccattcggatctacatacaccagttccattactgtgtttgcatggatgtctgtaatatacacacacatatacatttgaaaatgatagaggaacaaagagttatcattggaacataaactataaaaaaagattccagcactcatgcttgaatttcctcagtgggttgtatgtttgtccatacatacatgtataaaataaacaattgcaaacatgtcagtgaaacctcatatgacgcttttatagtgacatgcatgtttaatgtatgagaaaaatatttaccaatgtattgtcctttgagtcctaaaatataaatactatacatgccagaaactattctaatgtgacttttaatgtgactattaaaaatgaggtttcactgtacattcatgctgtgatgcgatttcaccttatagtacatgtatatgggtacagaaaataaaccctcatattcctgctttaagttacagccaagttttcaccaaatcacaactatcatcaccaccaaaattttaaaaaacagtagttgactactaaaaagtaatcagtggacaggtcatttatgggatcagtaagcacagtagtgtgattatatctgggaaaacatctacagttgtacagctgtatcctcctcaaaatccggtgaagaatgctatttttctaggctgagcttttgttataaacttaatattcagaaggcaagggttatgatcctgatgtgtcctttttttttgcatttgttaattctgaatgtatttttaacagaatgatttttttgacttactagtgtaatttgcattttaaaaataaatggaaaaatactt

SEQ ID NO: 5825 - protein, 208 aa, Homo sapiens; identical to SEQ ID NO: 760

SEQ ID NO: 5826 - DNA, 3171 bp, Homo sapiens
agatgcccgagggcgcggcggcgctgccaggctgccgctgctgcccctgcgggccccgagcgcgcctccgcaggcggcactgcccgcggcgcggcgtgtgcaccgagcgagtgaaggtatgtgtggcgggcgcggctggagctgccgccgccgccgccgccgcgccagcaggtcctaatgcctgtcacttcccaggacgctggcagcagcagcagcccggagcccccgagccctcggcaggtttgcgtgtccttccccgcgatctgattggataaagtgggggctcgacggtggccgacgtgggacagtctggctgtggcaggggtctcggaaaccatgggttattgcagtggcaggtgcacgcttatctttatctgtggcatgcaactggtttgtgtgctggagaggcaaatatttgacttccttggatatcagtgggcacctatcctggcaaattttgtacatattattatcgtcattcttggtttgtttggaactattcaatatagacctcgttacataacaggatatgctgtctggctagtcctctgggttacgtggaatgtgtttgttatctgcttctatttggaggctggggacctctcaaagctggcaggtttcatctacgcctgttatgttgtgaaatgtataactgaagaagaggacagctttgatttcataggtggctttgactcttatggctatcaagggcctcagaagacatctcatttacaactacagcctatgtacatgtcaaaataatacagatgacttcagtatgtcagcccatggacctttcaaagaacttttttcgcagtggcctcctgcatttcatgaagagcaagaagcaactgagtttaaatacatacacgtattaacaaaacaaatgcaaagcctctacatacaacactgacacacacacacacacacacgtgagcacgcacacaccaattccacttgacctcctctttctaactgaaacagacaaatatgcaggacacgcccatcttggatttcctgaaagcaggcccctttctcccaggccttcggaaagttcagaaggagatgtgttgatgcccaacggttgccggccattgctaactcctctgcagcccagcgggttggcctctgtgagctgggaagtcatccaaggcacattagtttgagagctctgtcttctgcactccatacatcttgacagcaccacggctacttaggcaatgtaattgcaaaaacaaacgaaacatgccatgatgaccttgtacccgaagtccgaaatggcagattgtttgccctaaaggctgtaccgtacatacttgccttaacccacctacattgtgtgcccaagaatcccagtgcagacagccccaagccacttcctttaggctaacacactgctattaattctaaatgagttcaagcctgtgtgtttcatgtcaaggaacaagactgaatagctcagcagctccagtgtgtctgtataagaaaagtgccagctgtcagcaaagtgctttaccatagagcctccatggtggcccaaaagagacaagtaacaataacaatatctgtcatctttataattctaaaatatggtcttctgatggggttgggggtgggacagagtaaaacattaatctactaaactcactaatctactggaagcagaaagcagaaatggcttaactcgctgattttatttattgcactctaggtgcttttataagtatctacaattgtcttttactaacacagaaacagctgtggatttctatcaacagaggccaactgaatatgtattagctatgtttactcttttatatctaattcaaattgaagactctacgtaggtgaacttttttttctaacttcagtgtacaagattatttttgggtgggtggggggagcaatagttaccttggtgaaatatttgagatctttttgtggtatttgggggatctgttgtgtgttagagtgtatttcaaccctcctgtattattgtggcagaaaaactgtgctgttaacgtagttggcaacaagatgcctttggaaacttaatagtaggtcaatgtgtttatggaatattctgaactcctaggaaattttgttctatattttaaagcattatttggttttcattagtggaaaacataattagctcaggcttatcaggaactcagatgagtcatattttttcttggatacacctgagacattaaactcaattttttaaaactaacacaccattctttagtgcagtgaaattcaaaagttataaattggcatggagcaagttttttctttgatttctatgaagtttcagttattggattaaactactttagaccttagcccattcggatctacatacaccagttccattactgtgtttgcatggatgtctgtaatatacacacacatatacatttgaaaatgatagaggaacaaagagttatcattggaacataaactataaaaaaagattccagcactcatgcttgaatttcctcagtgggttgtatgtttgtccatacatacatgtataaaataaacaattgcaaacatgtcagtgaaacctcatatgacgcttttatagtgacatgcatgtttaatgtatgagaaaaatatttaccaatgtattgtcctttgagtcctaaaatataaatactatacatgccagaaactattctaatgtgacttttaatgtgactattaaaaatgaggtttcactgtacattcatgctgtgatgcgatttcaccttatagtacatgtatatgggtacagaaaataaaccctcatattcctgctttaagttacagccaagttttcaccaaatcacaactatcatcaccaccaaaattttaaaaaacagtagttgactactaaaaagtaatcagtggacaggtcatttatgggatcagtaagcacagtagtgtgattatatctgggaaaacatctacagttgtacagctgtatcctcctcaaaatccggtgaagaatgctatttttctaggctgagcttttgttataaacttaatattcagaaggcaagggttatgatcctgatgtgtcctttttttttgcatttgttaattctgaatgtatttttaacagaatgatttttttgacttactagtgtaatttgcattttaaaaataaatggaaaaatactt

SEQ ID NO: 5827 - protein, 141 aa, Homo sapiens
MGYCSGRCTLIFICGMQLVCVLERQIFDFLGYQWAPILANFVHIIIVILGLFGTIQYRPRYITGYAVWLVLWVTWNVFVICFYLEAGDLSKLAGFIYACYVVKCITEEEDSFDFIGGFDSYGYQGPQKTSHLQLQPMYMSK

SEQ ID NO: 5828 - DNA, 3264 bp, Homo sapiens
tcctaatgcctgtcacttcccaggacgctggcagcagcagcagcccggagcccccgagccctcggcaggtttgcgtgtccttccccgcgatctgattggataaagtgggggctcgacggtggccgacgtgggacagtctggctgtggcaggggtctcggaaaccatgggttattgcagtggcaggtgcacgcttatctttatctgtggcatgcaactggtactgaagatggatggggatcattaggtttctcttattatattgtcccacaaatatcttaaccgtttgtgtgctggagaggcaaatatttgacttccttggatatcagtgggcacctatcctggcaaattttgtacatattattatcgtcattcttggtttgtttggaactattcaatatagacctcgttacataacaggatatgctgtctggctagtcctctgggttacgtggaatgtgtttgttatctgcttctatttggaggctggggacctctcaaaggaaacagaccttatcctgacttttaatatatcaatgcaccgatcttggtggatggagaatggaccaggatgtacggtgacgtcagtgacacctgccccagactgggccccagaagaccatcgctacatcacggtctcagggtgtttgctggagtaccagtacatagaagtggctcatagttccctccagattgtcctcgcactggcaggtttcatctacgcctgttatgttgtgaaatgtataactgaagaagaggacagctttgatttcataggtggctttgactcttatggctatcaagggcctcagaagacatctcatttacaactacagcctatgtacatgtcaaaataatacagatgacttcagtatgtcagcccatggacctttcaaagaacttttttcgcagtggcctcctgcatttcatgaagagcaagaagcaactgagtttaaatacatacacgtattaacaaaacaaatgcaaagcctctacatacaacactgacacacacacacacacacacgtgagcacgcacacaccaattccacttgacctcctctttctaactgaaacagacaaatatgcaggacacgcccatcttggatttcctgaaagcaggcccctttctcccaggccttcggaaagttcagaaggagatgtgttgatgcccaacggttgccggccattgctaactcctctgcagcccagcgggttggcctctgtgagctgggaagtcatccaaggcacattagtttgagagctctgtcttctgcactccatacatcttgacagcaccacggctacttaggcaatgtaattgcaaaaacaaacgaaacatgccatgatgaccttgtacccgaagtccgaaatggcagattgtttgccctaaaggctgtaccgtacatacttgccttaacccacctacattgtgtgcccaagaatcccagtgcagacagccccaagccacttcctttaggctaacacactgctattaattctaaatgagttcaagcctgtgtgtttcatgtcaaggaacaagactgaatagctcagcagctccagtgtgtctgtataagaaaagtgccagctgtcagcaaagtgctttaccatagagcctccatggtggcccaaaagagacaagtaacaataacaatatctgtcatctttataattctaaaatatggtcttctgatggggttgggggtgggacagagtaaaacattaatctactaaactcactaatctactggaagcagaaagcagaaatggcttaactcgctgattttatttattgcactctaggtgcttttataagtatctacaattgtcttttactaacacagaaacagctgtggatttctatcaacagaggccaactgaatatgtattagctatgtttactcttttatatctaattcaaattgaagactctacgtaggtgaacttttttttctaacttcagtgtacaagattatttttgggtgggtggggggagcaatagttaccttggtgaaatatttgagatctttttgtggtatttgggggatctgttgtgtgttagagtgtatttcaaccctcctgtattattgtggcagaaaaactgtgctgttaacgtagttggcaacaagatgcctttggaaacttaatagtaggtcaatgtgtttatggaatattctgaactcctaggaaattttgttctatattttaaagcattatttggttttcattagtggaaaacataattagctcaggcttatcaggaactcagatgagtcatattttttcttggatacacctgagacattaaactcaattttttaaaactaacacaccattctttagtgcagtgaaattcaaaagttataaattggcatggagcaagttttttctttgatttctatgaagtttcagttattggattaaactactttagaccttagcccattcggatctacatacaccagttccattactgtgtttgcatggatgtctgtaatatacacacacatatacatttgaaaatgatagaggaacaaagagttatcattggaacataaactataaaaaaagattccagcactcatgcttgaatttcctcagtgggttgtatgtttgtccatacatacatgtataaaataaacaattgcaaacatgtcagtgaaacctcatatgacgcttttatagtgacatgcatgtttaatgtatgagaaaaatatttaccaatgtattgtcctttgagtcctaaaatataaatactatacatgccagaaactattctaatgtgacttttaatgtgactattaaaaatgaggtttcactgtacattcatgctgtgatgcgatttcaccttatagtacatgtatatgggtacagaaaataaaccctcatattcctgctttaagttacagccaagttttcaccaaatcacaactatcatcaccaccaaaattttaaaaaacagtagttgactactaaaaagtaatcagtggacaggtcatttatgggatcagtaagcacagtagtgtgattatatctgggaaaacatctacagttgtacagctgtatcctcctcaaaatccggtgaagaatgctatttttctaggctgagcttttgttataaacttaatattcagaaggcaagggttatgatcctgatgtgtcctttttttttgcatttgttaattctgaatgtatttttaacagaatgatttttttgacttactagtgtaatttgcattttaaaaataaatggaaaaatactt

SEQ ID NO: 5829 - protein, 207 aa, Homo sapiens
MGIIRFLLLYCPTNILTVCVLERQIFDFLGYQWAPILANFVHIIIVILGLFGTIQYRPRYITGYAVWLVLWVTWNVFVICFYLEAGDLSKETDLILTFNISMHRSWWMENGPGCTVTSVTPAPDWAPEDHRYITVSGCLLEYQYIEVAHSSLQIVLALAGFIYACYVVKCITEEEDSFDFIGGFDSYGYQGPQKTSHLQLQPMYMSK

SEQ ID NO: 5830 - DNA, 551 bp, Homo sapiens
cactccatgaacttgatgcacataatttaataaactgctgatgctgacctgtgcctcaagaggcttgcctgtttgggggagaagcctgatgtggagaccattggaagaggctaaggcaagctacctgttccttaaacagattgttcaacctattccagtttttggtcctctacctcacacattccttccacttccaaatcctgttgttagaggatgttacctgccaaatttgtactttggaatcctcctctgcatgttcataagtttttgggttttcctttctgctcacttgccaatcctctatctactttcaatcttctaaaaattgctgaaacttcttgtctcactgttaattctttaacatcaatttgttggtattttaggataaaatataagtaagtgtatatcttcaaccagctatcattaaatggaaaatttctggtattattttatactttcatctattttcctgtagacatttaaacaagaagtctctgtgtgtatgtgcacatattcaatgttttaactacaaaatataaatttcttcttgt

SEQ ID NO: 5831 - protein, 93 aa, Homo sapiens [sequence omitted]

SEQ ID NO: 5832 - DNA, 731 bp, Homo sapiens
tgaatctattttacgcacacatacacacataaactaattcaaaaaactctataaatagtcatatataaatatccatgcacataaactgtatcttcacttcatccttaaaacataggtggaaattttcccaaatcacagaaatatttcacttttctcatgtgataatgattacttgatttaaatggattttaaagaatgaaatggctacttccatcctgtcaagtctaacttatttttacttcaggataagcaaagtaagcacttttagatttaaaactattacagaagagtttgttaattggaaggagtgtctatggttgaacatattcaagggatattacttagtgttttagcaaagaacataattcaaatgttctggacatcatttatgctgatttccaaataaacagcccttcctctttactgtccattctgtgattgggtgggactgtgtgaccaattccgcacaatgaactgtgaacaatgagccttcctcccaagcagaagcatgtgtgtgcccatgtagaccctccacagctattattactttctggcacagtaacccatgatgatggagatactggctactcaactagccttgtttccttactgacagtgatcagtggagcctcctgctgacacacaagaagaaaccttcatgacttttatttacagagaatttggaagtgtttactaacatagcatacttagcttccttagtctatcacaac

SEQ ID NO: 5833 - protein, 33 aa, Homo sapiens
MHINCIFTSSLKHRWKFSQITEIFHFSHVIMIT

SEQ ID NO: 5834 - DNA, 6580 bp, Homo sapiens
tgcggctgttaaacatagagtcatttgctttgatagtcatctgacagtctcttttgaagtttgacaagcttttacatgacccaagcctaaagagaaagccatttctttcctctattcagaagtgaactgaatgagtgtgtgcaggttcaactaagatctcataaagaagtaatctggattctaccttaatacagactaatagatgatcaaagccttgcagttctattatatcacgtagggtattgtcatatttgttttaatctggatgagaaatattttaaaaatgtgtatcactttgagattttttaaaaatctcagtaatatctagccctcacaatgtaattgaccaaccaaaggaaacatcttttgactgacaagtgactgtttagggaacaagaataagttgacttactatctgagattgtcaagcatttagacagttaaatgttagtgtacaagtaggaccagacatttgaaaactatgactttaatgttaaattcttgcatctctctgaaagcaattatataatatggccagtaattgattcaggtcattctaattttgtgacagtgtttctgtatttatatacagatacagatttattttatttttgaatgattgattgctagtcaaaagaattagcatccatgtgttgccctactaaaagtagcctttatgtttcatcaaacttgttccagctaatccatattttagaggcactatttggaggccgaagcattaatacccaggaagtatattttaatatggcaaagagaactcaaagcggtttgcttagtatcaagaatattagcaaagtgaattaggggaaaagaagttttaattttgttttgtttttcttacagctttgccgggaagtaaagctttggaggaaaatcaatatcaatgaaagtgctaagatcattgatctttaccatgagaagaccattccagagaaagtgatagaatcttccccaaattaccccgatttaggacaaagtgaatttataaggacgaatcacaaagatggtctgagaaaagaaaataaaagagagcagagcttagtcagtggaggaaatcaaatgtgtaaggaacaaaaagcaacaaaaaaatcaaaagtagggtttttggatcctttggctacagacaaccaaaaggaatgtgaggcctggcctgacctgaggacttctgaggaagacagcaagagctgttctggcgccctcagtacagctcttgaagaacttgcgaaggtgagtgaagaattatgcagctttcaagaggaaattcgaaagcggtctaaccatagaaggatgaagtcagattcttttctccaggaaatgccaaatgtaactaatatacctcatggggaccccatgatcaacaatgaccagtgcattcttccaatcagtttagaaaaagaaaaacagaaaaacaggaagaatctgagctgtaccaatgtgctccagagcaattctacgaaaaaatgtggaattgatacaatcgatttaaaaagaaatgaaactccaccagttcctcctccaagaagcacctctcgaaattttcccagctcggattctgaacaagcctatgaaagatggaaggaaaggttagaccacaacagctgggtgccccatgagggtcgaagtaaaaggaattacaaccctcacttccctttgagacaacaagagatgtctatgttgtatccaaatgaagggaaaacttcgaaagatggtatcatcttttcctctttggtaccagaagtcaaaatagatagcaagcctccaagtaatgaagatgttggacttagcatgtggtcatgtgacattgggataggtgcaaaaaggagcccctctacttcgtggtttcagaaaacctgctctacccccagtaatccaaaatatgaaatggtgatcccagatcaccctgctaaatctcatcctgatcttcatgtaagtaatgactgtagctcctcagtagcagagagcagtagcccacttagaaatttcagttgtggctttgaaaggactacaaggaatgagaagctggcagcaaagactgatgaatttaacagaactgtatttagaacagatagaaattgtcaggcaatacagcaaaatcacagctgctcaaaatcatcggaggatctcaagccctgtgatacctcatctactcacacaggtagcatatcacaaagtaacgatgtgtccggtatttggaaaaccaatgcccacatgcctgtgcccatggaaaatgtgcctgataatcccaccaagaaatccacaacaggcctagtaagacaaatgcagggacacctaagtcctcgcagttatcgaaatatgctccacgagcatgactggagaccgagtaatttgtctggccgtccgaggtcagctgatcccaggtcaaattatggtgttgtggaaaagctgctgaaaacctatgagacagcaacagagtctgcattgcaaaattctaagtgcttccaggataattggaccaaatgtaattctgatgtcagtggtggtgccacattaagtcagcatttagaaatgctccaaatggaacaacagtttcagcaaaagacagctgtgtgggggggacaggaagtgaagcaaggaatagatccgaaaaagataacagaggaatccatgtcagtgaacgcctcacatggaaaaggattttcccgacctgctagaccagcaaatcgtcgtctcccctccagatgggcatccagatctccatctgcaccccctgccttgcggagaactacccacaactataccatttctctgcgatccgaagcattgatggtttaagtctttggcctggattgctatattacagaagttctagtcccacttgtcaaacagagcattctgagtgtttacaggcggacctgttctcttccgacaagcaatttgaatcttaactttccatcagtcttcagtgtttttaatctaaggaataattatcttcctgcattttgatttcttagatcagaattttttaatgccatcctcattagttttccaatacaatataagttgaaacaatgtacaatattgtatattctttgttgcaagtggcagaaagtaaggttatgtgcatggccatgtgtttgtaggtgcatgtgttgaaataggaagtatcctagtatgtatttagatatgaaaaacttatgtgctagtgttgactttgaaattataacatgtatacctatatattctttgtgtttatttaaaagttttgaaaatatgcagtactgtttatattttgtataccttttaataggtatccacttaaggcatttgcagtacaaatattaattgaccacttccttggcccccagctacaatgaaaaagaagaattatgcacacatctaacattggtagatttctaaagacaactcataaataatttcttaacccatataaggataaaataataccattgatattcttgtttattctttttaaataaaaatgtcacaagtttaatagatcagccttgtaaagcaagcataaaatgttcataaatgttttatatattatttggtagtctagtatggctttaactgaatatttgatcctcagagacagtatcatgagactgcattataaatgacatgattaaatgatgaatttattttgtcagcctcagcaacaaacatttcctaaatgggatgcaaaaagaaactgaatgatgttgaattttagtttttctttaagttgtggtaagcttttagtttagctgctttaacatggagtcatacatacttagaggtaagtcatttattatttttttcctttttctaatcttttccttaaaattaatagataacaaactaagttacttttttactaacaaggaagatcaggaataatatttctttgaaagctgaaattatacttctcacagtttgctaccgaaaaaaggcttaaactaaaccttgacatccacagtagcatcaggaatagaaatgtgtattttggctacagtttgcatacagtgaacacataaaatctatattgaaaactgacagaaatatgaatgtcgaggggcttggaattctaaatggaagattttagaaggaactttgctctctactgtcactatataaaaccaattatgttatgttattagatattaactctatttaagcttttcttttactaagaaattcttatgccaaatgtattccaagagccatctccttatgatgtatttgaaccatttagagaaattcacttcattgtaccccatgacctgaggtaaagaaaataattttcaaattgcagacttccttgaaaggctcaagactgtagcatggtgatgtctagattcatactttactgtaaggacagtttcggtagttaagtggaattaaaggtctagagtgatttgtattggatggtaactaaggtctatacatctactcttttaattcttatttccttcaggaagatccttttccacaggaagctatcaaagaaaagtaaactagacaccaagtaatatcactctcataatatgctttccagctagaggggagaaaacaccaggaaagaggaaccctgggtcataaaatgacggacctgttaggaaaatgctgttgtgtgacaatggagagcctgcccaaggactgtgcaacctatctgttcctctccaccagtgtatcccaagtagtctggtatgatctgtggttccttagaatattgaggatctctttaaaaaatgaaatttctgatctcaccccatattactaaagcaaaatttccaggggtagggactgggactccagaaccattaataaaacaaaacaaaacaaagcaaaatattgatgatcaggcagatttgaaaacagtgacattgcttgatctctgaatggatggatgcccttgggtggtcacttttcttcctaggacttgcctttgttatctgtaaattagaatggctatactttcagacttcacaattttaagccacttttttctattaacagttgaatgaaccagtgggacacattttaacgtcttcttatgttgactaaaattatagttagagctgagaaaaaaaaaatagcatctagtccaactccttgattgtaaaactgaaaaactaaggttatttgaatgttctgttttctctttttaaatattttataacttttaaatggaaaaacctattaggtaaatggaaataatccttgaaaatagtttttgatgttttgtgatttttaactggtaaatttctactttaggtgggcattttcttccctagaatatgccctttattatgctatcattgctagatttaaagggacttgtaagcatttctggaaatatttgatttaaaaacatatattaatagatgttttccctagcagacttttggagcaaaaatattattttagttcagcagaggattactgatattatgggctgatctcagaaaggaataaggatgaggcagagaggagtacttgagtttgtgtgtgtgtgtgtgtgtgtgtgtttgtgtcagtgtcacataagttctccatattgccttatgtcccaaagccaaatataaaaatataaatgatgctttgtataattcattttatcaaaaattacccataactttcatttgtttttatatcgacaatgaagatgatcatatttcattttgcagatgtggccataaaatattatttacttctatataggtgattttaccaggtttagttatcctgagaaaacatctggacttaagagtttctgcttccctacaaagatctttaaagttatttttaggcacatttgtgacaaacaactacttgatattgaaatctccttcagccattagaagctatcaaataaagtaggtgtaaaaacaactgtctgtggcatttgtatacatcgagaacatttttctttccctcattttctgcagtgaactccagtaaagctaagtgtcttatgaaatctaaactcatatatgtacacagttcactctagcttcttccaaaatatctctaggtagtacaactgaagccaaacctgcctgacttcctgctcctggccacccaaaactccatatggcttctcgtacactgacatcctctctctacccatttaactgctaattgagtctgataaaagtcttctttgaaaaaagtttttacttctaagatttgcatttacatcataaaattaaaccattttcaggaaaatcagatttttttattacagtactatttgctttaaattcggcatgtttttcttaagtagcaagtacatgtatcggaacttagaactggtgggcgcggtggctcttgcctgtaatcccagcactttgggaggccaaggtggggggatcacgaggtcaggagatggagaccatcctggtttcatcacggtgaaaccccctctctgctaaaaatacaaaaaattagccaggcattgtggtggtcacctgtagtcccagctgctcgggaggctgaggcaggagaatggcatgaacccgggaggcagagcttgcagtgagcagagatcgcgccactgcactccagcctgggtgacagagtgagactctgtctc

SEQ ID NO: 5835 - protein, 577 aa, Homo sapiens
MCKEQKATKKSKVGFLDPLATDNQKECEAWPDLRTSEEDSKSCSGALSTALEELAKVSEELCSFQEEIRKRSNHRRMKSDSFLQEMPNVTNIPHGDPMINNDQCILPISLEKEKQKNRKNLSCTNVLQSNSTKKCGIDTIDLKRNETPPVPPPRSTSRNFPSSDSEQAYERWKERLDHNSWVPHEGRSKRNYNPHFPLRQQEMSMLYPNEGKTSKDGIIFSSLVPEVKIDSKPPSNEDVGLSMWSCDIGIGAKRSPSTSWFQKTCSTPSNPKYEMVIPDHPAKSHPDLHVSNDCSSSVAESSSPLRNFSCGFERTTRNEKLAAKTDEFNRTVFRTDRNCQAIQQNHSCSKSSEDLKPCDTSSTHTGSISQSNDVSGIWKTNAHMPVPMENVPDNPTKKSTTGLVRQMQGHLSPRSYRNMLHEHDWRPSNLSGRPRSADPRSNYGVVEKLLKTYETATESALQNSKCFQDNWTKCNSDVSGGATLSQHLEMLQMEQQFQQKTAVWGGQEVKQGIDPKKITEESMSVNASHGKGFSRPARPANRRLPSRWASRSPSAPPALRRTTHNYTISLRSEALMV

SEQ ID NO: 5836 - DNA, 4393 bp, Homo sapiens
aaaaaatgtggaattgatacaatcgatttaaaaagaaatgaaactccaccagttcctcctccaagaagcacctctcgaaattttcccagctcggattctgaacaagcctatgaaagatggaaggaaaggttagaccacaacagctgggtgccccatgagggtcgaagtaaaaggaattacaaccctcacttccctttgagacaacaagagatgtctatgttgtatccaaatgaagggaaaacttcgaaagatggtatcatcttttcctctttggtaccagaagtcaaaatagatagcaagcctccaagtaatgaagatgttggacttagcatgtggtcatgtgacattgggataggtgcaaaaaggagcccctctacttcgtggtttcagaaaacctgctctacccccagtaatccaaaatatgaaatggtgatcccagatcaccctgctaaatctcatcctgatcttcatgtaagtaatgactgtagctcctcagtagcagagagcagtagcccacttagaaatttcagttgtggctttgaaaggactacaaggaatgagaagctggcagcaaagactgatgaatttaacagaactgtatttagaacagatagaaattgtcaggcaatacagcaaaatcacagctgctcaaaatcatcggaggatctcaagccctgtgatacctcatctactcacacaggaatccatgtcagtgaacgcctcacatggaaaaggattttcccgacctgctagaccagcaaatcgtcgtctcccctccagatgggcatccagatctccatctgcaccccctgccttgcggagaactacccacaactataccatttctctgcgatccgaagcattgatggtttaagtctttggcctggattgctatattacagaagttctagtcccacttgtcaaacagagcattctgagtgtttacaggcggacctgttctcttccgacaagcaatttgaatcttaactttccatcagtcttcagtgtttttaatctaaggaataattatcttcctgcattttgatttcttagatcagaattttttaatgccatcctcattagttttccaatacaatataagttgaaacaatgtacaatattgtatattctttgttgcaagtggcagaaagtaaggttatgtgcatggccatgtgtttgtaggtgcatgtgttgaaataggaagtatcctagtatgtatttagatatgaaaaacttatgtgctagtgttgactttgaaattataacatgtatacctatatattctttgtgtttatttaaaagttttgaaaatatgcagtactgtttatattttgtataccttttaataggtatccacttaaggcatttgcagtacaaatattaattgaccacttccttggcccccagctacaatgaaaaagaagaattatgcacacatctaacattggtagatttctaaagacaactcataaataatttcttaacccatataaggataaaataataccattgatattcttgtttattctttttaaataaaaatgtcacaagtttaatagatcagccttgtaaagcaagcataaaatgttcataaatgttttatatattatttggtagtctagtatggctttaactgaatatttgatcctcagagacagtatcatgagactgcattataaatgacatgattaaatgatgaatttattttgtcagcctcagcaacaaacatttcctaaatgggatgcaaaaagaaactgaatgatgttgaattttagtttttctttaagttgtggtaagcttttagtttagctgctttaacatggagtcatacatacttagaggtaagtcatttattatttttttcctttttctaatcttttccttaaaattaatagataacaaactaagttacttttttactaacaaggaagatcaggaataatatttctttgaaagctgaaattatacttctcacagtttgctaccgaaaaaaggcttaaactaaaccttgacatccacagtagcatcaggaatagaaatgtgtattttggctacagtttgcatacagtgaacacataaaatctatattgaaaactgacagaaatatgaatgtcgaggggcttggaattctaaatggaagattttagaaggaactttgctctctactgtcactatataaaaccaattatgttatgttattagatattaactctatttaagcttttcttttactaagaaattcttatgccaaatgtattccaagagccatctccttatgatgtatttgaaccatttagagaaattcacttcattgtaccccatgacctgaggtaaagaaaataattttcaaattgcagacttccttgaaaggctcaagactgtagcatggtgatgtctagattcatactttactgtaaggacagtttcggtagttaagtggaattaaaggtctagagtgatttgtattggatggtaactaaggtctatacatctactcttttaattcttatttccttcaggaagatccttttccacaggaagctatcaaagaaaagtaaactagacaccaagtaatatcactctcataatatgctttccagctagaggggagaaaacaccaggaaagaggaaccctgggtcataaaatgacggacctgttaggaaaatgctgttgtgtgacaatggagagcctgcccaaggactgtgcaacctatctgttcctctccaccagtgtatcccaagtagtctggtatgatctgtggttccttagaatattgaggatctctttaaaaaatgaaatttctgatctcaccccatattactaaagcaaaatttccaggggtagggactgggactccagaaccattaataaaacaaaacaaaacaaagcaaaatattgatgatcaggcagatttgaaaacagtgacattgcttgatctctgaatggatggatgcccttgggtggtcacttttcttcctaggacttgcctttgttatctgtaaattagaatggctatactttcagacttcacaattttaagccacttttttctattaacagttgaatgaaccagtgggacacattttaacgtcttcttatgttgactaaaattatagttagagctgagaaaaaaaaaatagcatctagtccaactccttgattgtaaaactgaaaaactaaggttatttgaatgttctgttttctctttttaaatattttataacttttaaatggaaaaacctattaggtaaatggaaataatccttgaaaatagtttttgatgttttgtgatttttaactggtaaatttctactttaggtgggcattttcttccctagaatatgccctttattatgctatcattgctagatttaaagggacttgtaagcatttctggaaatatttgatttaaaaacatatattaatagatgttttccctagcagacttttggagcaaaaatattattttagttcagcagaggattactgatattatgggctgatctcagaaaggaataaggatgaggcagagaggagtacttgagtttgtgtgtgtgtgtgtgtgtgtgtgtttgtgtcagtgtcacataagttctccatattgccttatgtcccaaagccaaatataaaaatataaatgatgctttgtataattcattttatcaaaaattacccataactttcatttgtttttatatcgacaatgaagatgatcatatttcattttgcagatgtggccataaaatattatttacttctatataggtgattttaccaggtttagttatcctgagaaaacatctggacttaagagtttctgcttccctacaaagatctttaaagttatttttaggcacatttgtgacaaacaactacttgatattgaaatctccttcagccattagaagctatcaaataaagtaggtgtaaaaacaactgtctgtggcatttgtatacatcgagaacatttttctttccctcattttctgcagtgaactccagtaaagctaagtgtcttatgaaatctaaactcatatatgtacacagttcactctagcttcttccaaaatatctctaggtagtacaactgaagccaaacctgcctgacttcctgctcctggccacccaaaactccatatggcttctcgtacactgacatcctctctctacccatttaactgctaattgagtctgataaaagtcttctttgaaaaaagtttttacttctaagatttgcatttacatcataaaattaaaccattttcaggaaaatcagatttttttattacagtactatttgctttaaattcggcatgtttttcttaagtagcaagtacatgtatcggaacttagaactggtgggcgcggtggctcttgcctgtaatcccagca

SEQ ID NO: 5837 - protein, 180 aa, Homo sapiens
MSMLYPNEGKTSKDGIIFSSLVPEVKIDSKPPSNEDVGLSMWSCDIGIGAKRSPSTSWFQKTCSTPSNPKYEMVIPDHPAKSHPDLHVSNDCSSSVAESSSPLRNFSCGFERTTRNEKLAAKTDEFNRTVFRTDRNCQAIQQNHSCSKSSEDLKPCDTSSTHTGIHVSERLTWKRIFPTC

SEQ ID NO: 5838 - DNA, 8702 bp, Homo sapiens
ctgaggctcgtctgcacccggagggcagcagcagaaagcagcagcgagctcagtcacccgctagaccgagggacagttcgctgcgacagacaatcgcggccacccggtccccagtgggggccggcactaaactcaattctgttcggcagcagcagctgcagcagcagcaacagcagggtaacaagaccgggagccgcacggggccgcccgccagcatccgaggaggcggaggtggggccgagaaggcgacgcccctggcgcccaaaggggccgctccgggagctgtccagcctgtggctggtgctgaagcggcccccgccgcgaccctggccgctttgggcggcaggaggcccggaccgcccgaggagccgcctcgggagctagagtccgtgccctcgaaactcggggaaccccctccgctcggagaagggggaggagggggcggggaaggaggaggagccggcggcggctccggggaaagggaggggggcgctccgcagccgccgccgcccaggggctggcgagggaaaggcgtacgcgctcagcagaggggcggcagcggcggggagggggcctccccttctccatcctcctcttctgcgggcaaaaccccaggaaccggcagcagaaactccggaagcggcgttgcggggggcggcagcggtggtggagggagctactggaaagaaggatgtctgcagtctgagctcatccagttccatctcaagaaggagcgggcggcagcggcggcggccgcggctcagatgcacgctaagaacggcggcggcagcagtagccgcagctccccggtgtctggcccccctgccgtttgcgagaccctggccgtcgcctccgcctccccaatggcggcggcggcggagggcccccagcagagcgcagagggcagcgcgagcggcgggggcatgcaggcggcagcgcccccttcgtcgcagccgcacccgcagcagctccaagagcaggaagaaatgcaagaggagatggagaagctgcgagaggaaaacgagactctcaagaacgagatcgatgagctgagaaccgagatggacgagatgagggacactttcttcgaggaggatgcctgtcaactgcaggaaatgcgccacgagttggagagagccaacaaaaactgccggatcctgcagtaccgcctccgcaaagccgagcgcaaaaggctccgctacgcccagaccggggaaatcgacggggagctgttgcgcagcctggagcaggacctcaaggttgcaaaggatgtatctgtgagacttcaccatgaattagaaaatgtggaagaaaagagaacaacaacagaagatgaaaatgagaaactgaggcaacagctcatagaagttgaaattgcaaagcaagctttacagaatgaactggaaaaaatgaaagagttatccttaaaaagaagaggaagcaaagatttgccaaaatctgaaaaaaaggctcaacagactcccacagaggaggacaatgaagatctgaagtgccagctgcagtttgttaaggaagaagccgctttgatgagaaagaaaatggccaagattgataaagaaaaggacagatttgaacacgagctccagaagtacagatccttttatggggatctggacagtcctttgcccaaaggagaagccggaggccctcccagcactagggaggccgagctcaagctacggctaaggctggtggaggaagaagccaacatcctgggcaggaaaatcgtcgaactggaggtggagaacagaggcctgaaggcggaactggacgaccttaggggcgatgacttcaacggctcggccaacccgctcatgagggagcagagcgaatccctgtcggagctgcggcagcacctgcagctggtggaagacgagacggagctgctgcggaggaacgtggccgacctggaggagcagaacaagcgcatcacggcggagctcaacaagtacaagtacaagtccggcggccacgacagcgcgcggcaccacgacaacgccaagaccgaggccctgcaggaggagctgaaggcggcgcgcctgcagatcaacgagctcagcggcaaggtcatgcagctgcagtacgagaaccgcgtgcttatgtccaacatgcagcgctacgacctggcctcgcacctgggcatccgcggcagcccccgcgacagcgacgccgagagcgacgcgggcaagaaggagagcgacgacgactcgcggcctccgcaccgcaagcgcgaagggcccatcggcggcgagagcgactcggaggaggtgcgcaacatccgctgcctcacgcccactcgctccttctacccggcgcccgggccctggcccaagagcttctccgatcggcagcagatgaaggacatccgctcggaggccgagcgcctgggcaagaccatcgaccggctcatcgccgacacgagcaccatcatcaccgaggcgcgcatctacgtggccaacggggacctgttcggactcatggacgaggaggacgacggcagccgcatccgggagcacgagctgctctaccgcatcaacgctcagatgaaggccttccgcaaggagctgcagaccttcatcgaccgcctcgaggtgcccaagtctgcggacgaccgcggcgccgaggagcccatttccgtgagtcagatgttccagcctatcattttacttattctcattcttgtattattttcatcactttcttacacaacaatatttaaacttgtcttcctttttacactgttttttgtactgtaaatctttcatcatttaccattcattgtagtattttcagtttgtttattttgttcacccttcaagacaagaagtaaaagaagtataatttctgtagtaaccaatgctataaaaacactgaagactgcttatttctttaaaaagatacaactcatcttaccaagaccaaattcaataagaagcccaaacactaaaatatttcaggctttattttaaaggcaagtgagactgcttcaaataaaacaacttcaagcttccaagaaacagttaagaggaggcagagaagagcagaaacacttctttgctgacacttacactgttgccatggacctacataagcagtgggagaacacagagactaactggcataaggaaaagatggaattactggaccagtttgacaatgaaagaaaggaatgggaaagtcaatggaagattatgcagaagaaaatagaagagctttgccgggaagtaaagctttggaggaaaatcaatatcaatgaaagtgctaagatcattgatctttaccatgagaagaccattccagagaaagtgatagaatcttccccaaattaccccgatttaggacaaagtgaatttataaggacgaatcacaaagatggtctgagaaaagaaaataaaagagagcagagcttagtcagtggaggaaatcaaatgtgtaaggaacaaaaagcaacaaaaaaatcaaaagtagggtttttggatcctttggctacagacaaccaaaaggaatgtgaggcctggcctgacctgaggacttctgaggaagacagcaagagctgttctggcgccctcagtacagctcttgaagaacttgcgaaggtgagtgaagaattatgcagctttcaagaggaaattcgaaagcggtctaaccatagaaggatgaagtcagattcttttctccaggaaatgccaaatgtaactaatatacctcatggggaccccatgatcaacaatgaccagtgcattcttccaatcagtttagaaaaagaaaaacagaaaaacaggaagaatctgagctgtaccaatgtgctccagagcaattctacgaaaaaatgtggaattgatacaatcgatttaaaaagaaatgaaactccaccagttcctcctccaagaagcacctctcgaaattttcccagctcggattctgaacaagcctatgaaagatggaaggaaaggttagaccacaacagctgggtgccccatgagggtcgaagtaaaaggaattacaaccctcacttccctttgagacaacaagagatgtctatgttgtatccaaatgaagggaaaacttcgaaagatggtatcatcttttcctctttggtaccagaagtcaaaatagatagcaagcctccaagtaatgaagatgttggacttagcatgtggtcatgtgacattgggataggtgcaaaaaggagcccctctacttcgtggtttcagaaaacctgctctacccccagtaatccaaaatatgaaatggtgatcccagatcaccctgctaaatctcatcctgatcttcatgtaagtaatgactgtagctcctcagtagcagagagcagtagcccacttagaaatttcagttgtggctttgaaaggactacaaggaatgagaagctggcagcaaagactgatgaatttaacagaactgtatttagaacagatagaaattgtcaggcaatacagcaaaatcacagctgctcaaaatcatcggaggatctcaagccctgtgatacctcatctactcacacaggtagcatatcacaaagtaacgatgtgtccggtatttggaaaaccaatgcccacatgcctgtgcccatggaaaatgtgcctgataatcccaccaagaaatccacaacaggcctagtaagacaaatgcagggacacctaagtcctcgcagttatcgaaatatgctccacgagcatgactggagaccgagtaatttgtctggccgtccgaggtcagctgatcccaggtcaaattatggtgttgtggaaaagctgctgaaaacctatgagacagcaacagagtctgcattgcaaaattctaagtgcttccaggataattggaccaaatgtaattctgatgtcagtggtggtgccacattaagtcagcatttagaaatgctccaaatggaacaacagtttcagcaaaagacagctgtgtgggggggacaggaagtgaagcaaggaatagatccgaaaaagataacagaggaatccatgtcagtgaacgcctcacatggaaaaggattttcccgacctgctagaccagcaaatcgtcgtctcccctccagatgggcatccagatctccatctgcaccccctgccttgcggagaactacccacaactataccatttctctgcgatccgaagcattgatggtttaagtctttggcctggattgctatattacagaagttctagtcccacttgtcaaacagagcattctgagtgtttacaggcggacctgttctcttccgacaagcaatttgaatcttaactttccatcagtcttcagtgtttttaatctaaggaataattatcttcctgcattttgatttcttagatcagaattttttaatgccatcctcattagttttccaatacaatataagttgaaacaatgtacaatattgtatattctttgttgcaagtggcagaaagtaaggttatgtgcatggccatgtgtttgtaggtgcatgtgttgaaataggaagtatcctagtatgtatttagatatgaaaaacttatgtgctagtgttgactttgaaattataacatgtatacctatatattctttgtgtttatttaaaagttttgaaaatatgcagtactgtttatattttgtataccttttaataggtatccacttaaggcatttgcagtacaaatattaattgaccacttccttggcccccagctacaatgaaaaagaagaattatgcacacatctaacattggtagatttctaaagacaactcataaataatttcttaacccatataaggataaaataataccattgatattcttgtttattctttttaaataaaaatgtcacaagtttaatagatcagccttgtaaagcaagcataaaatgttcataaatgttttatatattatttggtagtctagtatggctttaactgaatatttgatcctcagagacagtatcatgagactgcattataaatgacatgattaaatgatgaatttattttgtcagcctcagcaacaaacatttcctaaatgggatgcaaaaagaaactgaatgatgttgaattttagtttttctttaagttgtggtaagcttttagtttagctgctttaacatggagtcatacatacttagaggtaagtcatttattatttttttcctttttctaatcttttccttaaaattaatagataacaaactaagttacttttttactaacaaggaagatcaggaataatatttctttgaaagctgaaattatacttctcacagtttgctaccgaaaaaaggcttaaactaaaccttgacatccacagtagcatcaggaatagaaatgtgtattttggctacagtttgcatacagtgaacacataaaatctatattgaaaactgacagaaatatgaatgtcgaggggcttggaattctaaatggaagattttagaaggaactttgctctctactgtcactatataaaaccaattatgttatgttattagatattaactctatttaagcttttcttttactaagaaattcttatgccaaatgtattccaagagccatctccttatgatgtatttgaaccatttagagaaattcacttcattgtaccccatgacctgaggtaaagaaaataattttcaaattgcagacttccttgaaaggctcaagactgtagcatggtgatgtctagattcatactttactgtaaggacagtttcggtagttaagtggaattaaaggtctagagtgatttgtattggatggtaactaaggtctatacatctactcttttaattcttatttccttcaggaagatccttttccacaggaagctatcaaagaaaagtaaactagacaccaagtaatatcactctcataatatgctttccagctagaggggagaaaacaccaggaaagaggaaccctgggtcataaaatgacggacctgttaggaaaatgctgttgtgtgacaatggagagcctgcccaaggactgtgcaacctatctgttcctctccaccagtgtatcccaagtagtctggtatgatctgtggttccttagaatattgaggatctctttaaaaaatgaaatttctgatctcaccccatattactaaagcaaaatttccaggggtagggactgggactccagaaccattaataaaacaaaacaaaacaaagcaaaatattgatgatcaggcagatttgaaaacagtgacattgcttgatctctgaatggatggatgcccttgggtggtcacttttcttcctaggacttgcctttgttatctgtaaattagaatggctatactttcagacttcacaattttaagccacttttttctattaacagttgaatgaaccagtgggacacattttaacgtcttcttatgttgactaaaattatagttagagctgagaaaaaaaaaatagcatctagtccaactccttgattgtaaaactgaaaaactaaggttatttgaatgttctgttttctctttttaaatattttataacttttaaatggaaaaacctattaggtaaatggaaataatccttgaaaatagtttttgatgttttgtgatttttaactggtaaatttctactttaggtgggcattttcttccctagaatatgccctttattatgctatcattgctagatttaaagggacttgtaagcatttctggaaatatttgatttaaaaacatatattaatagatgttttccctagcagacttttggagcaaaaatattattttagttcagcagaggattactgatattatgggctgatctcagaaaggaataaggatgaggcagagaggagtacttgagtttgtgtgtgtgtgtgtgtgtgtgtgtttgtgtcagtgtcacataagttctccatattgccttatgtcccaaagccaaatataaaaatataaatgatgctttgtataattcattttatcaaaaattacccataactttcatttgtttttatatcgacaatgaagatgatcatatttcattttgcagatgtggccataaaatattatttacttctatataggtgattttaccaggtttagttatcctgagaaaacatctggacttaagagtttctgcttccctacaaagatctttaaagttatttttaggcacatttgtgacaaacaactacttgatattgaaatctccttcagccattagaagctatcaaataaagtaggtgtaaaaacaactgtctgtggcatttgtatacatcgagaacatttttctttccctcattttctgcagtgaactccagtaaagctaagtgtcttatgaaatctaaactcatatatgtacacagttcactctagcttcttccaaaatatctctaggtagtacaactgaagccaaacctgcctgacttcctgctcctggccacccaaaactccatatggcttctcgtacactgacatcctctctctacccatttaactgctaattgagtctgataaaagtcttctttgaaaaaagtttttacttctaagatttgcatttacatcataaaattaaaccattttcaggaaaatcagatttttttattacagtactatttgctttaaattcggcatgtttttcttaagtagcaagtacatgtatcggaacttagaactggtgggcgcggtggctcttgcctgtaatcccagca

SEQ ID NO: 5839 - protein, 694 aa, Homo sapiens; identical to SEQ ID NO: 762

SEQ ID NO: 5840 - DNA, 8931 bp, Homo sapiens
ataaagattatggatcccagcaattactcattttcacggtagaaaccggcactcagtagaaaacaggaaaacgtactgaaggcaaaccgttctgtaaaggatctctgtgggccgatatttatttcggtttgcactaaattagtcgtggcttcgcaagaaccctttgtctgtgggacggtgggtcccatcatggcaaccattatctattcgtggaaacgacatctgatgactccgcccgggctgggggtggggagggagcaccgcgtgtagagctcgactgagaattaaagtgagtgaacaaagagaactcccagcagccgccagccagctgcatcaggagatgttagtcacgcccggaaggctgttctagtccgcctccttggaaaagaagctcaagtaaataattgatggagaatgaccgaacccaggacaaagctttgcaggaaaccagtgcatccgtgttcgagcggttttgggatcctctgccaagtacgggataagagaatagagcaaggagtttgagcgctgctgccaatcttccatctcgggcgtggctctggcctttttgtctctttatcccgccactccccacccccgtcccccgtccccctccccgccttcttctctttcctcttgaaagtaacctctctttggttacttctaccctatcgtcccttgcaatcccgccttctctcctgcccagttcggtgaggtcagctcatgaacatctctgcacttcctggggagcgtctggcccagcttggtacctcgcgtgttagcctgctgagagctgcagctccagcccagccgcggaccgccgggaagtcacccgctctgggggcagctgaatcttgacgttaccgccattgtttggagaaatcgagtgggtgtggaactgcggcgagcgagcccaaagtcatgctcagccggaaagtcgcatacaataatatgaagttgaactttcctcggcgcagaaaggcacaataataaaccctgagatccccggaatatcagaaggaaagtgctgttgatttgttcagctacttggaaacctcgcctctgctgagaacttaggaaggaaggttggcggcggtgaagagggaagaggatgatctagtaatgggctcttccaaatcgcatctggtaggttcatagccatgagtcacgcccccttcgtcgcagccgcacccgcagcagctccaagagcaggaagaaatgcaagaggagatggagaagctgcgagaggaaaacgagactctcaagaacgagatcgatgagctgagaaccgagatggacgagatgagggacactttcttcgaggaggatgcctgtcaactgcaggaaatgcgccacgagttggagagagccaacaaaaactgccggatcctgcagtaccgcctccgcaaagccgagcgcaaaaggctccgctacgcccagaccggggaaatcgacggggagctgttgcgcagcctggagcaggacctcaaggttgcaaaggatgtatctgtgagacttcaccatgaattagaaaatgtggaagaaaagagaacaacaacagaagatgaaaatgagaaactgaggcaacagctcatagaagttgaaattgcaaagcaagctttacagaatgaactggaaaaaatgaaagagttatccttaaaaagaagaggaagcaaagatttgccaaaatctgaaaaaaaggctcaacagactcccacagaggaggacaatgaagatctgaagtgccagctgcagtttgttaaggaagaagccgctttgatgagaaagaaaatggccaagattgataaagaaaaggacagatttgaacacgagctccagaagtacagatccttttatggggatctggacagtcctttgcccaaaggagaagccggaggccctcccagcactagggaggccgagctcaagctacggctaaggctggtggaggaagaagccaacatcctgggcaggaaaatcgtcgaactggaggtggagaacagaggcctgaaggcggaactggacgaccttaggggcgatgacttcaacggctcggccaacccgctcatgagggagcagagcgaatccctgtcggagctgcggcagcacctgcagctggtggaagacgagacggagctgctgcggaggaacgtggccgacctggaggagcagaacaagcgcatcacggcggagctcaacaagtacaagtacaagtccggcggccacgacagcgcgcggcaccacgacaacgccaagaccgaggccctgcaggaggagctgaaggcggcgcgcctgcagatcaacgagctcagcggcaaggtcatgcagctgcagtacgagaaccgcgtgcttatgtccaacatgcagcgctacgacctggcctcgcacctgggcatccgcggcagcccccgcgacagcgacgccgagagcgacgcgggcaagaaggagagcgacgacgactcgcggcctccgcaccgcaagcgcgaagggcccatcggcggcgagagcgactcggaggaggtgcgcaacatccgctgcctcacgcccactcgctccttctacccggcgcccgggccctggcccaagagcttctccgatcggcagcagatgaaggacatccgctcggaggccgagcgcctgggcaagaccatcgaccggctcatcgccgacacgagcaccatcatcaccgaggcgcgcatctacgtggccaacggggacctgttcggactcatggacgaggaggacgacggcagccgcatccgggagcacgagctgctctaccgcatcaacgctcagatgaaggccttccgcaaggagctgcagaccttcatcgaccgcctcgaggtgcccaagtctgcggacgaccgcggcgccgaggagcccatttccgtgagtcagatgttccagcctatcattttacttattctcattcttgtattattttcatcactttcttacacaacaatatttaaacttgtcttcctttttacactgttttttgtactgtaaatctttcatcatttaccattcattgtagtattttcagtttgtttattttgttcacccttcaagacaagaagtaaaagaagtataatttctgtagtaaccaatgctataaaaacactgaagactgcttatttctttaaaaagatacaactcatcttaccaagaccaaattcaataagaagcccaaacactaaaatatttcaggctttattttaaaggcaagtgagactgcttcaaataaaacaacttcaagcttccaagaaacagttaagaggaggcagagaagagcagaaacacttctttgctgacacttacactgttgccatggacctacataagcagtgggagaacacagagactaactggcataaggaaaagatggaattactggaccagtttgacaatgaaagaaaggaatgggaaagtcaatggaagattatgcagaagaaaatagaagagctttgccgggaagtaaagctttggaggaaaatcaatatcaatgaaagtgctaagatcattgatctttaccatgagaagaccattccagagaaagtgatagaatcttccccaaattaccccgatttaggacaaagtgaatttataaggacgaatcacaaagatggtctgagaaaagaaaataaaagagagcagagcttagtcagtggaggaaatcaaatgtgtaaggaacaaaaagcaacaaaaaaatcaaaagtagggtttttggatcctttggctacagacaaccaaaaggaatgtgaggcctggcctgacctgaggacttctgaggaagacagcaagagctgttctggcgccctcagtacagctcttgaagaacttgcgaaggtgagtgaagaattatgcagctttcaagaggaaattcgaaagcggtctaaccatagaaggatgaagtcagattcttttctccaggaaatgccaaatgtaactaatatacctcatggggaccccatgatcaacaatgaccagtgcattcttccaatcagtttagaaaaagaaaaacagaaaaacaggaagaatctgagctgtaccaatgtgctccagagcaattctacgaaaaaatgtggaattgatacaatcgatttaaaaagaaatgaaactccaccagttcctcctccaagaagcacctctcgaaattttcccagctcggattctgaacaagcctatgaaagatggaaggaaaggttagaccacaacagctgggtgccccatgagggtcgaagtaaaaggaattacaaccctcacttccctttgagacaacaagagatgtctatgttgtatccaaatgaagggaaaacttcgaaagatggtatcatcttttcctctttggtaccagaagtcaaaatagatagcaagcctccaagtaatgaagatgttggacttagcatgtggtcatgtgacattgggataggtgcaaaaaggagcccctctacttcgtggtttcagaaaacctgctctacccccagtaatccaaaatatgaaatggtgatcccagatcaccctgctaaatctcatcctgatcttcatgtaagtaatgactgtagctcctcagtagcagagagcagtagcccacttagaaatttcagttgtggctttgaaaggactacaaggaatgagaagctggcagcaaagactgatgaatttaacagaactgtatttagaacagatagaaattgtcaggcaatacagcaaaatcacagctgctcaaaatcatcggaggatctcaagccctgtgatacctcatctactcacacaggtagcatatcacaaagtaacgatgtgtccggtatttggaaaaccaatgcccacatgcctgtgcccatggaaaatgtgcctgataatcccaccaagaaatccacaacaggcctagtaagacaaatgcagggacacctaagtcctcgcagttatcgaaatatgctccacgagcatgactggagaccgagtaatttgtctggccgtccgaggtcagctgatcccaggtcaaattatggtgttgtggaaaagctgctgaaaacctatgagacagcaacagagtctgcattgcaaaattctaagtgcttccaggataattggaccaaatgtaattctgatgtcagtggtggtgccacattaagtcagcatttagaaatgctccaaatggaacaacagtttcagcaaaagacagctgtgtgggggggacaggaagtgaagcaaggaatagatccgaaaaagataacagaggaatccatgtcagtgaacgcctcacatggaaaaggattttcccgacctgctagaccagcaaatcgtcgtctcccctccagatgggcatccagatctccatctgcaccccctgccttgcggagaactacccacaactataccatttctctgcgatccgaagcattgatggtttaagtctttggcctggattgctatattacagaagttctagtcccacttgtcaaacagagcattctgagtgtttacaggcggacctgttctcttccgacaagcaatttgaatcttaactttccatcagtcttcagtgtttttaatctaaggaataattatcttcctgcattttgatttcttagatcagaattttttaatgccatcctcattagttttccaatacaatataagttgaaacaatgtacaatattgtatattctttgttgcaagtggcagaaagtaaggttatgtgcatggccatgtgtttgtaggtgcatgtgttgaaataggaagtatcctagtatgtatttagatatgaaaaacttatgtgctagtgttgactttgaaattataacatgtatacctatatattctttgtgtttatttaaaagttttgaaaatatgcagtactgtttatattttgtataccttttaataggtatccacttaaggcatttgcagtacaaatattaattgaccacttccttggcccccagctacaatgaaaaagaagaattatgcacacatctaacattggtagatttctaaagacaactcataaataatttcttaacccatataaggataaaataataccattgatattcttgtttattctttttaaataaaaatgtcacaagtttaatagatcagccttgtaaagcaagcataaaatgttcataaatgttttatatattatttggtagtctagtatggctttaactgaatatttgatcctcagagacagtatcatgagactgcattataaatgacatgattaaatgatgaatttattttgtcagcctcagcaacaaacatttcctaaatgggatgcaaaaagaaactgaatgatgttgaattttagtttttctttaagttgtggtaagcttttagtttagctgctttaacatggagtcatacatacttagaggtaagtcatttattatttttttcctttttctaatcttttccttaaaattaatagataacaaactaagttacttttttactaacaaggaagatcaggaataatatttctttgaaagctgaaattatacttctcacagtttgctaccgaaaaaaggcttaaactaaaccttgacatccacagtagcatcaggaatagaaatgtgtattttggctacagtttgcatacagtgaacacataaaatctatattgaaaactgacagaaatatgaatgtcgaggggcttggaattctaaatggaagattttagaaggaactttgctctctactgtcactatataaaaccaattatgttatgttattagatattaactctatttaagcttttcttttactaagaaattcttatgccaaatgtattccaagagccatctccttatgatgtatttgaaccatttagagaaattcacttcattgtaccccatgacctgaggtaaagaaaataattttcaaattgcagacttccttgaaaggctcaagactgtagcatggtgatgtctagattcatactttactgtaaggacagtttcggtagttaagtggaattaaaggtctagagtgatttgtattggatggtaactaaggtctatacatctactcttttaattcttatttccttcaggaagatccttttccacaggaagctatcaaagaaaagtaaactagacaccaagtaatatcactctcataatatgctttccagctagaggggagaaaacaccaggaaagaggaaccctgggtcataaaatgacggacctgttaggaaaatgctgttgtgtgacaatggagagcctgcccaaggactgtgcaacctatctgttcctctccaccagtgtatcccaagtagtctggtatgatctgtggttccttagaatattgaggatctctttaaaaaatgaaatttctgatctcaccccatattactaaagcaaaatttccaggggtagggactgggactccagaaccattaataaaacaaaacaaaacaaagcaaaatattgatgatcaggcagatttgaaaacagtgacattgcttgatctctgaatggatggatgcccttgggtggtcacttttcttcctaggacttgcctttgttatctgtaaattagaatggctatactttcagacttcacaattttaagccacttttttctattaacagttgaatgaaccagtgggacacattttaacgtcttcttatgttgactaaaattatagttagagctgagaaaaaaaaaatagcatctagtccaactccttgattgtaaaactgaaaaactaaggttatttgaatgttctgttttctctttttaaatattttataacttttaaatggaaaaacctattaggtaaatggaaataatccttgaaaatagtttttgatgttttgtgatttttaactggtaaatttctactttaggtgggcattttcttccctagaatatgccctttattatgctatcattgctagatttaaagggacttgtaagcatttctggaaatatttgatttaaaaacatatattaatagatgttttccctagcagacttttggagcaaaaatattattttagttcagcagaggattactgatattatgggctgatctcagaaaggaataaggatgaggcagagaggagtacttgagtttgtgtgtgtgtgtgtgtgtgtgtgtttgtgtcagtgtcacataagttctccatattgccttatgtcccaaagccaaatataaaaatataaatgatgctttgtataattcattttatcaaaaattacccataactttcatttgtttttatatcgacaatgaagatgatcatatttcattttgcagatgtggccataaaatattatttacttctatataggtgattttaccaggtttagttatcctgagaaaacatctggacttaagagtttctgcttccctacaaagatctttaaagttatttttaggcacatttgtgacaaacaactacttgatattgaaatctccttcagccattagaagctatcaaataaagtaggtgtaaaaacaactgtctgtggcatttgtatacatcgagaacatttttctttccctcattttctgcagtgaactccagtaaagctaagtgtcttatgaaatctaaactcatatatgtacacagttcactctagcttcttccaaaatatctctaggtagtacaactgaagccaaacctgcctgacttcctgctcctggccacccaaaactccatatggcttctcgtacactgacatcctctctctacccatttaactgctaattgagtctgataaaagtcttctttgaaaaaagtttttacttctaagatttgcatttacatcataaaattaaaccattttcaggaaaatcagatttttttattacagtactatttgctttaaattcggcatgtttttcttaagtagcaagtacatgtatcggaacttagaactggtgggcgcggtggctcttgcctgtaatcccagca

SEQ ID NO: 5841 - protein, 694 aa, Homo sapiens; identical to SEQ ID NO: 762

SEQ ID NO: 5842 - DNA, 4921 bp, Homo sapiens
cttaggaaggaaggttggcggcggtgaagagggaagaggatgatctagtaatgggctcttccaaatcgcatctggtaggttcatagccatgagtcagccaccaatcgggggcgctgcccctgccacagcagcagcttctcccgccgctgcagccactgaggctcgtctgcacccggagggcagcagcagaaagcagcagcgagctcagtcacccgctagaccgagggacagttcgctgcgacagacaatcgcggccacccggtccccagtgggggccggcactaaactcaattctgttcggcagcagcagctgcagcagcagcaacagcagggtaacaagaccgggagccgcacggggccgcccgccagcatccgaggaggcggaggtggggccgagaaggcgacgcccctggcgcccaaaggggccgctccgggagctgtccagcctgtggctggtgctgaagcggcccccgccgcgaccctggccgctttgggcggcaggaggcccggaccgcccgaggagccgcctcgggagctagagtccgtgccctcgaaactcggggaaccccctccgctcggagaagggggaggagggggcggggaaggaggaggagccggcggcggctccggggaaagggaggggggcgctccgcagccgccgccgcccaggggctggcgagggaaaggcgtacgcgctcagcagaggggcggcagcggcggggagggggcctccccttctccatcctcctcttctgcgggcaaaaccccaggaaccggcagcagaaactccggaagcggcgttgcggggggcggcagcggtggtggagggagctactggaaagaaggatgtctgcagtctgagctcatccagttccatctcaagaaggagcgggcggcagcggcggcggccgcggctcagatgcacgctaagaacggcggcggcagcagtagccgcagctccccggtgtctggcccccctgccgtttgcgagaccctggccgtcgcctccgcctccccaatggcggcggcggcggagggcccccagcagagcgcagagggcagcgcgagcggcgggggcatgcaggcggcagcgcccccttcgtcgcagccgcacccgcagcagctccaagagcaggaagaaatgcaagaggagatggagaagctgcgagaggaaaacgagactctcaagaacgagatcgatgagctgagaaccgagatggacgagatgagggacactttcttcgaggaggatgcctgtcaactgcaggaaatgcgccacgagttggagagagccaacaaaaactgccggatcctgcagtaccgcctccgcaaagccgagcgcaaaaggctccgctacgcccagaccggggaaatcgacggggagctgttgcgcagcctggagcaggacctcaaggttgcaaaggatgtatctgtgagacttcaccatgaattagaaaatgtggaagaaaagagaacaacaacagaagatgaaaatgagaaactgaggcaacagctcatagaagttgaaattgcaaagcaagctttacagaatgaactggaaaaaatgaaagagttatccttaaaaagaagaggaagcaaagatttgccaaaatctgaaaaaaaggctcaacagactcccacagaggaggacaatgaagatctgaagtgccagctgcagtttgttaaggaagaagccgctttgatgagaaagaaaatggccaagattgataaagaaaaggacagatttgaacacgagctccagaagtacagatccttttatggggatctggacagtcctttgcccaaaggagaagccggaggccctcccagcactagggaggccgagctcaagctacggctaaggctggtggaggaagaagccaacatcctgggcaggaaaatcgtcgaactggaggtggagaacagaggcctgaaggcggaactggacgaccttaggggcgatgacttcaacggctcggccaacccgctcatgagggagcagagcgaatccctgtcggagctgcggcagcacctgcagctggtggaagacgagacggagctgctgcggaggaacgtggccgacctggaggagcagaacaagcgcatcacggcggagctcaacaagtacaagtacaagtccggcggccacgacagcgcgcggcaccacgacaacgccaagaccgaggccctgcaggaggagctgaaggcggcgcgcctgcagatcaacgagctcagcggcaaggtcatgcagctgcagtacgagaaccgcgtgcttatgtccaacatgcagcgctacgacctggcctcgcacctgggcatccgcggcagcccccgcgacagcgacgccgagagcgacgcgggcaagaaggagagcgacgacgactcgcggcctccgcaccgcaagcgcgaagggcccatcggcggcgagagcgactcggaggaggtgcgcaacatccgctgcctcacgcccactcgctccttctacccggcgcccgggccctggcccaagagcttctccgatcggcagcagatgaaggacatccgctcggaggccgagcgcctgggcaagaccatcgaccggctcatcgccgacacgagcaccatcatcaccgaggcgcgcatctacgtggccaacggggacctgttcggactcatggacgaggaggacgacggcagccgcatccgggagcacgagctgctctaccgcatcaacgctcagatgaaggccttccgcaaggagctgcagaccttcatcgaccgcctcgaggtgcccaagtctgcggacgaccgcggcgccgaggagcccatttccgtgagtcagatgttccagcctatcattttacttattctcattcttgtattattttcatcactttcttacacaacaatatttaaacttgtcttcctttttacactgttttttgtactgtaaatctttcatcatttaccattcattgtagtattttcagtttgtttattttgttcacccttcaagacaagaagtaaaagaagtataatttctgtagtaaccaatgctataaaaacactgaagactgcttatttctttaaaaagatacaactcatcttaccaagaccaaattcaataagaagcccaaacactaaaatatttcaggctttattttaaaggcaagtgagactgcttcaaataaaacaacttcaagcttccaagaaacagttaagaggaggcagagaagagcagaaacacttctttgctgacacttacactgttgccatggacctacataagcagtgggagaacacagagactaactggcataaggaaaagatggaattactggaccagtttgacaatgaaagaaaggaatgggaaagtcaatggaagattatgcagaagaaaatagaagagctttgccgggaagtaaagctttggaggaaaatcaatatcaatgaaagtgctaagatcattgatctttaccatgagaagaccattccagagaaagtgatagaatcttccccaaattaccccgatttaggacaaagtgaatttataaggacgaatcacaaagatggtctgagaaaagaaaataaaagagagcagagcttagtcagtggaggaaatcaaatgtgtaaggaacaaaaaatgtaactaatatacctcatggggaccccatgatcaacaatgaccagtgcattcttccaatcagtttagaaaaagaaaaacagaaaaacaggaagaatctgagctgtaccaatgtgctccagagcaattctacgaaaaaatgtggaattgatacaatcgatttaaaaagaaatgaaactccaccagttcctcctccaagaagcacctctcgaaattttcccagctcggattctgaacaagcctatgaaagatggaaggaaaggttagaccacaacagctgggtgccccatgagggtcgaagtaaaaggaattacaaccctcacttccctttgagacaacaagagatgtctatgttgtatccaaatgaagggaaaacttcgaaagatggtatcatcttttcctctttggtaccagaagtcaaaatagatagcaagcctccaagtaatgaagatgttggacttagcatgtggtcatgtgacattgggataggtgcaaaaaggagcccctctacttcgtggtttcagaaaacctgctctacccccagtaatccaaaatatgaaatggtgatcccagatcaccctgctaaatctcatcctgatcttcatgtaagtaatgactgtagctcctcagtagcagagagcagtagcccacttagaaatttcagttgtggctttgaaaggactacaaggaatgagaagctggcagcaaagactgatgaatttaacagaactgtatttagaacagatagaaattgtcaggcaatacagcaaaatcacagctgctcaaaatcatcggaggatctcaagccctgtgatacctcatctactcacacaggtagcatatcacaaagtaacgatgtgtccggtatttggaaaaccaatgcccacatgcctgtgcccatggaaaatgtgcctgataatcccaccaagaaatccacaacaggcctagtaagacaaatgcagggacacctaagtcctcgcagttatcgaaatatgctccacgagcatgactggagaccgagtaatttgtctggccgtccgaggtcagctgatcccaggtcaaattatggtgttgtggaaaagctgctgaaaacctatgagacagcaacagagtctgcattgcaaaattctaagtgcttccaggataattggaccaaatgtaattctgatgtcagtggtggtgccacattaagtcagcatttagaaatgctccaaatggaacaacagtttcagcaaaagacagctgtgtgggggggacaggaagtgaagcaaggaatagatccgaaaaagataacagagg

SEQ ID NO: 5843 - protein, 947 aa, Homo sapiens; identical to SEQ ID NO: 764

SEQ ID NO: 5844 - DNA, 773 bp, Homo sapiens
gtgtagatgtgagcatacatttgaattgtatacttacactcttattcatgaaaaaatctatttttagagtaagtggttaaagggatgattacatctcacatgcgcatttaatcatcttgtccactataattttgctgtctggtctcagaaagggaaaaaaactttggacaatacttattactttattgactgtgttagtttcttcttcttaagtagactgttgtcatctcttttcttttgagtccaattttcctatagtttgtttatgtcaatggctcgacaaaatgataaaatatatttccagaaagcacatggatttggaactctctcttgttatgtttatattaggctttattttaaaggcaagtgagactgcttcaaataaaacaacttcaagcttccaagaaacagttaagaggaggcagagaagagcagaaacacttctttgctgacacttacactgttgccatggacctacataagcagtgggagaacacagagactaactggcataaggaaaagatggaattactggaccagtttgacaatgaaagaaaggaatgggaaagtcaatggaagattatgcagaagaaaatagaagagctttgccgggaagtaaagctttggaggaaaatcaatatcaatgaaagtgctaagatcattgatctttaccatgagaagaccattccagagaaagtgatagaatcttccccaaattaccccgatttaggacaaagtgaatttataaggacgaatcacaaagatggtctgag

SEQ ID NO: 5845 - protein, 100 aa, Homo sapiens
MDLHKQWENTETNWHKEKMELLDQFDNERKEWESQWKIMQKKIEELCREVKLWRKININESAKIIDLYHEKTIPEKVIESSPNYPDLGQSEFIRTNHKDG

SEQ ID NO: 5846 - DNA, 1136 bp, Homo sapiens
agaacaagcgcatcacggcggagctcaacaagtacaagtacaagtccggcggccacgacagcgcgcggcaccacgacaacgccaagaccgaggccctgcaggaggagctgaaggcggcgcgcctgcagatcaacgagctcagcggcaaggtcatgcagctgcagtacgagaaccgcgtgcttatgtccaacatgcagcgctacgacctggcctcgcacctgggcatccgcggcagcccccgcgacagcgacgccgagagcgacgcgggcaagaaggagagcgacgacgactcgcggcctccgcaccgcaagcgcgaagggcccatcggcggcgagagcgactcggaggaggtgcgcaacatccgctgcctcacgcccactcgctccttctacccggcgcccgggccctggcccaagagcttctccgatcggcagcagatgaaggacatccgctcggaggccgagcgcctgggcaagaccatcgaccggctcatcgccgacacgagcaccatcatcaccgaggcgcgcatctacgtggccaacggggacctgttcggactcatggacgaggaggacgacggcagccgcatccgggagcacgagctgctctaccgcatcaacgctcagatgaaggccttccgcaaggagctgcagaccttcatcgaccgcctcgaggtgcccaagtctgcggacgaccgcggcgccgaggagcccatttccgtgagtcagatgttccagcctatcattttacttattctcattcttgtattattttcatcactttcttacacaacaatatttaaacttgtcttcctttttacactgttttttgtactgtaaatctttcatcatttaccattcattgtagtattttcagtttgtttattttgttcacccttcaagacaagaagtaaaagaagtataatttctgtagtaaccaatgctataaaaacactgaagactgcttatttctttaaaaagatacaactcatcttaccaagaccaaattcaataagaagcccaaacactaaaatatttcaggtaagaaagtgtgacatttttctgtatgaattgttttaatttttacttctttttttcatcctgtttgtctcctcttgataaataattggcatactg

SEQ ID NO: 5847 - protein, 228 aa, Homo sapiens
MQLQYENRVLMSNMQRYDLASHLGIRGSPRDSDAESDAGKKESDDDSRPPHRKREGPIGGESDSEEVRNIRCLTPTRSFYPAPGPWPKSFSDRQQMKDIRSEAERLGKTIDRLIADTSTIITEARIYVANGDLFGLMDEEDDGSRIREHELLYRINAQMKAFRKELQTFIDRLEVPKSADDRGAEEPISVSQMFQPIILLILILVLFSSLSYTTIFKLVFLFTLFFVL

SEQ ID NO: 5848 - DNA, 2091 bp, Homo sapiens
ctgaggctcgtctgcacccggagggcagcagcagaaagcagcagcgagctcagtcacccgctagaccgagggacagttcgctgcgacagacaatcgcggccacccggtccccagtgggggccggcactaaactcaattctgttcggcagcagcagctgcagcagcagcaacagcagggtaacaagaccgggagccgcacggggccgcccgccagcatccgaggaggcggaggtggggccgagaaggcgacgcccctggcgcccaaaggggccgctccgggagctgtccagcctgtggctggtgctgaagcggcccccgccgcgaccctggccgctttgggcggcaggaggcccggaccgcccgaggagccgcctcgggagctagagtccgtgccctcgaaactcggggaaccccctccgctcggagaagggggaggagggggcggggaaggaggaggagccggcggcggctccggggaaagggaggggggcgctccgcagccgccgccgcccaggggctggcgagggaaaggcgtacgcgctcagcagaggggcggcagcggcggggagggggcctccccttctccatcctcctcttctgcgggcaaaaccccaggaaccggcagcagaaactccggaagcggcgttgcggggggcggcagcggtggtggagggagctactggaaagaaggatgtctgcagtctgagctcatccagttccatctcaagaaggagcgggcggcagcggcggcggccgcggctcagatgcacgctaaagaacaacaacagaagatgaaaatgagaaactgaggcaacagctcatagaagttgaaattgcaaagcaagctttacagaatgaactggaaaaaatgaaagagttatccttaaaaagaagaggaagcaaagatttgccaaaatctgaaaaaaaggctcaacagactcccacagaggaggacaatgaagatctgaagtgccagctgcagtttgttaaggaagaagccgctttgatgagaaagaaaatggccaagattgataaagaaaaggacagatttgaacacgagctccagaagtacagatccttttatggggatctggacagtcctttgcccaaaggagaagccggaggccctcccagcactagggaggccgagctcaagctacggctaaggctggtggaggaagaagccaacatcctgggcaggaaaatcgtcgaactggaggtggagaacagaggcctgaaggcggaactggacgaccttaggggcgatgacttcaacggctcggccaacccgctcatgagggagcagagcgaatccctgtcggagctgcggcagcacctgcagctggtggaagacgagacggagctgctgcggaggaacgtggccgacctggaggagcagaacaagcgcatcacggcggagctcaacaagtacaagtacaagtccggcggccacgacagcgcgcggcaccacgacaacgccaagaccgaggccctgcaggaggagctgaaggcggcgcgcctgcagatcaacgagctcagcggcaaggtcatgcagctgcagtacgagaaccgcgtgcttatgtccaacatgcagcgctacgacctggcctcgcacctgggcatccgcggcagcccccgcgacagcgacgccgagagcgacgcgggcaagaaggagagcgacgacgactcgcggcctccgcaccgcaagcgcgaagggcccatcggcggcgagagcgactcggaggaggtgcgcaacatccgctgcctcacgcccactcgctccttctacccggcgcccgggccctggcccaagagcttctccgatcggcagcagatgaaggacatccgctcggaggccgagcgcctgggcaagaccatcgaccggctcatcgccgacacgagcaccatcatcaccgaggcgcgcatctacgtggccaacggggacctgttcggactcatggacgaggaggacgacggcagccgcatccgggagcacgagctgctctaccgcatcaacgctcagatgaaggccttccgcaaggagctgcagaccttcatcgaccgcctcgaggtgcccaagtctgcggacga

SEQ ID NO: 5849 - protein, 406 aa, Homo sapiens
MKELSLKRRGSKDLPKSEKKAQQTPTEEDNEDLKCQLQFVKEEAALMRKKMAKIDKEKDRFEHELQKYRSFYGDLDSPLPKGEAGGPPSTREAELKLRLRLVEEEANILGRKIVELEVENRGLKAELDDLRGDDFNGSANPLMREQSESLSELRQHLQLVEDETELLRRNVADLEEQNKRITAELNKYKYKSGGHDSARHHDNAKTEALQEELKAARLQINELSGKVMQLQYENRVLMSNMQRYDLASHLGIRGSPRDSDAESDAGKKESDDDSRPPHRKREGPIGGESDSEEVRNIRCLTPTRSFYPAPGPWPKSFSDRQQMKDIRSEAERLGKTIDRLIADTSTIITEARIYVANGDLFGLMDEEDDGSRIREHELLYRINAQMKAFRKELQTFIDRLEVPKSA

SEQ ID NO: 5850 - DNA, 1536 bp, Homo sapiens
ctgaggctcgtctgcacccggagggcagcagcagaaagcagcagcgagctcagtcacccgctagaccgagggacagttcgctgcgacagacaatcgcggccacccggtccccagtgggggccggcactaaactcaattctgttcggcagcagcagctgcagcagcagcaacagcagggtaacaagaccgggagccgcacggggccgcccgccagcatccgaggaggcggaggtggggccgagaaggcgacgcccctggcgcccaaaggggccgctccgggagctgtccagcctgtggctggtgctgaagcggcccccgccgcgaccctggccgctttgggcggcaggaggcccggaccgcccgaggagccgcctcgggagctagagtccgtgccctcgaaactcggggaaccccctccgctcggagaagggggaggagggggcggggaaggaggaggagccggcggcggctccggggaaagggaggggggcgctccgcagccgccgccgcccaggggctggcgagggaaaggcgtacgcgctcagcagaggggcggcagcggcggggagggggcctccccttctccatcctcctcttctgcgggcaaaaccccaggaaccggcagcagaaactccggaagcggcgttgcggggggcggcagcggtggtggagggagctactggaaagaaggatgtctgcagtctgagctcatccagttccatctcaagaaggagcgggcggcagcggcggcggccgcggctcagatgcacgctaagaacggcggcggcagcagtagccgcagctccccggtgtctggcccccctgccgtttgcgagaccctggccgtcgcctccgcctccccaatggcggcggcggcggagggcccccagcagagcgcagagggcagcgcgagcggcgggggcatgcaggcggcagcgcccccttcgtcgcagccgcacccgcagcagctccaagagcaggaagaaatgcaagaggagatggagaagctgcgagaggaaaacgagactctcaagaacgagatcgatgagctgagaaccgagatggacgagatgagggacactttcttcgaggaggatgcctgtcaactgcaggaaatgcgccacgagttggagagagccaacaaaaactgccggatcctgcagtaccgcctccgcaaagccgagcgcaaaaggctccgctacgcccagaccggggaaatcgacggggagctgttgcgcagcctggagcaggacctcaaggttgcaaaggatgtatctgtgagacttcaccatgaattagaaaatgtggaagaaaagagaacaacaacagaagatgaaaatgagaaactgaggcaacagctcatagaagttgaaattgcaaagcaagctttacagaatgaactggaaaaaatgaaaggctcggccaacccgctcatgagggagcagagcgaatccctgtcggagctgcggcagcacctgcagctggtggaagacgagacggagctgctgcggaggaacgtggccgacctggaggagc

SEQ ID NO: 5851 - protein, 256 aa, Homo sapiens
MHAKNGGGSSSRSSPVSGPPAVCETLAVASASPMAAAAEGPQQSAEGSASGGGMQAAAPPSSQPHPQQLQEQEEMQEEMEKLREENETLKNEIDELRTEMDEMRDTFFEEDACQLQEMRHELERANKNCRILQYRLRKAERKRLRYAQTGEIDGELLRSLEQDLKVAKDVSVRLHHELENVEEKRTTTEDENEKLRQQLIEVEIAKQALQNELEKMKGSANPLMREQSESLSELRQHLQLVEDETELLRRNVADLE

SEQ ID NO: 5852 - DNA, 719 bp, Homo sapiens
tcccagcagccgccagccagctgcatcaggagatgttagtcacgcccggaaggctgttctagtccgcctccttggaaaagaagctcaagtaaataattgatggagaatgaccgaacccaggacaaagctttgcaggaaaccagtgcatccgtgttcgagcggttttgggatcctctgccaagtacgggataagagaatagagcaaggagtttgagcgctgctgccaatcttccatctcgggcgtggctctggcctttttgtctctttatcccgccactccccttctccatcctcctcttctgcgggcaaaaccccaggaaccggcagcagaaactccggaagcggcgttgcggggggcggcagcggtggtggagggagctactggaaagaaggatgtctgcagtctgagctcatccagttccatctcaagaaggagcgggcggcagcggcggcggccgcggctcagatgcacgctaagaacggcggcggcagcagtagccgcagctccccggtgtctggcccccctgccgtttgcgagaccctggccgtcgcctccgcctccccaatggcggcggcggcggagggcccccagcagagcgcagagggcagcgcgagcggcgggggcatgcaggcggcagcgcccccttcgtcgcagccgcacccgcagcagctccaagagcaggaagaaatgcaagaggagatggagaagctgcgagagg

SEQ ID NO: 5853 - protein, 83 aa, Homo sapiens
MHAKNGGGSSSRSSPVSGPPAVCETLAVASASPMAAAAEGPQQSAEGSASGGGMQAAAPPSSQPHPQQLQEQEEMQEEMEKLR

SEQ ID NO: 5854 - DNA, 2152 bp, Homo sapiens
ataaagattatggatcccagcaattactcattttcacggtagaaaccggcactcagtagaaaacaggaaaacgtactgaaggcaaaccgttctgtaaaggatctctgtgggccgatatttatttcggtttgcactaaattagtcgtggcttcgcaagaaccctttgtctgtgggacggtgggtcccatcatggcaaccattatctattcgtggaaacgacatctgatgactccgcccgggctgggggtggggagggagcaccgcgtgtagagctcgactgagaattaaagtgagtgaacaaagagaactcccagcagccgccagccagctgcatcaggagatgttagtcacgcccggaaggctgttctagtccgcctccttggaaaagaagctcaagtaaataattgatggagaatgaccgaacccaggacaaagctttgcaggaaaccagtgcatccgtgttcgagcggttttgggatcctctgccaagtacgggataagagaatagagcaaggagtttgagcgctgctgccaatcttccatctcgggcgtggctctggcctttttgtctctttatcccgccactccccacccccgtcccccgtccccctccccgccttcttctctttcctcttgaaagtaacctctctttggttacttctaccctatcgtcccttgcaatcccgccttctctcctgcccagttcggtgaggtcagctcatgaacatctctgcacttcctggggagcgtctggcccagcttggtacctcgcgtgttagcctgctgagagctgcagctccagcccagccgcggaccgccgggaagtcacccgctctgggggcagctgaatcttgacgttaccgccattgtttggagaaatcgagtgggtgtggaactgcggcgagcgagcccaaagtcatgctcagccggaaagtcgcatacaataatatgaagttgaactttcctcggcgcagaaaggcacaataataaaccctgagatccccggaatatcagaaggaaagtgctgttgatttgttcagctacttggaaacctcgcctctgctgagaacttaggaaggaaggttggcggcggtgaagagggaagaggatgatctagtaatgggctcttccaaatcgcatctggtaggttcatagccatgagtcagccaccaatcgggggcgctgcccctgccacagcagcagcttctcccgccgctgcagccactgaggctcgtctgcacccggagggcagcagcagaaagcagcagcgagctcagtcacccgctagaccgagggacagttcgctgcgacagacaatcgcggccacccggtccccagtgggggccggcactaaactcaattctgttcggcagcagcagctgcagcagcagcaacagcagggtaacaagaccgggagccgcacggggccgcccgccagcatccgaggaggcggaggtggggccgagaaggcgacgcccctggcgcccaaaggggccgctccgggagctgtccagcctgtggctggtgctgaagcggcccccgccgcgaccctggccgctttgggcggcaggaggcccggaccgcccgaggagccgcctcgggagctagagtccgtgccctcgaaactcggggaaccccctccgctcggagaagggggaggagggggcggggaaggaggaggagccggcggcggctccggggaaagggaggggggcgctccgcagccgccgccgcccaggggctggcgagggaaaggcgtacgcgctcagcagaggggcggcagcggcggggagggggcctccccttctccatcctcctcttctgcgggcaaaaccccaggaaccggcagcagaaactccggaagcggcgttgcggggggcggcagcggtggtggagggagctactggaaagaaggatgtctgcagtctgagctcatccagttccatctcaagaaggagcgggcggcagcggcggcggccgcggctcagatgcacgctaagaacggcggcggcagcagtagccgcagctccccggtgtctggcccccctgccgtttgcgagaccctggccgtcgcctccgcctccccaatggcggcggcggcggagggcccccagcagagcgcagagggcagcgcgagcggcgggggcatgca

SEQ ID NO: 5855 - protein, 330 aa, Homo sapiens
MSQPPIGGAAPATAAASPAAAATEARLHPEGSSRKQQRAQSPARPRDSSLRQTIAATRSPVGAGTKLNSVRQQQLQQQQQQGNKTGSRTGPPASIRGGGGGAEKATPLAPKGAAPGAVQPVAGAEAAPAATLAALGGRRPGPPEEPPRELESVPSKLGEPPPLGEGGGGGGEGGGAGGGSGEREGGAPQPPPPRGWRGKGVRAQQRGGSGGEGASPSPSSSSAGKTPGTGSRNSGSGVAGGGSGGGGSYWKEGCLQSELIQFHLKKERAAAAAAAAQMHAKNGGGSSSRSSPVSGPPAVCETLAVASASPMAAAAEGPQQSAEGSASGGG

SEQ ID NO: 5856 - DNA, 1436 bp, Homo sapiens
ataaagattatggatcccagcaattactcattttcacggtagaaaccggcactcagtagaaaacaggaaaacgtactgaaggcaaaccgttctgtaaaggatctctgtgggccgatatttatttcggtttgcactaaattagtcgtggcttcgcaagaaccctttgtctgtgggacggtgggtcccatcatggcaaccattatctattcgtggaaacgacatctgatgactccgcccgggctgggggtggggagggagcaccgcgtgtagagctcgactgagaattaaagtgagtgaacaaagagaactcccagcagccgccagccagctgcatcaggagatgttagtcacgcccggaaggctgttctagtccgcctccttggaaaagaagctcaagtaaataattgatggagaatgaccgaacccaggacaaagctttgcaggaaaccagtgcatccgtgttcgagcggttttgggatcctctgccaagtacgggataagagaatagagcaaggagtttgagcgctgctgccaatcttccatctcgggcgtggctctggcctttttgtctctttatcccgccactccccacccccgtcccccgtccccctccccgccttcttctctttcctcttgaaagtaacctctctttggttacttctaccctatcgtcccttgcaatcccgccttctctcctgcccagttcggtgaggtcagctcatgaacatctctgcacttcctggggagcgtctggcccagcttggtacctcgcgtgttagcctgctgagagctgcagctccagcccagccgcggaccgccgggaagtcacccgctctgggggcagctgaatcttgacgttaccgccattgtttggagaaatcgagtgggtgtggaactgcggcgagcgagcccaaagtcatgctcagccggaaagtcgcatacaataatatgaagttgaactttcctcggcgcagaaaggcacaataataaaccctgagatccccggaatatcagaaggaaagtgctgttgatttgttcagctacttggaaacctcgcctctgctgagaaattaaagaagctagtgacggatttatcttggaaatacacatactggaaattgatcttaccaccatgagggaagatgcaccagccttctgggttctgtctcagaattgctatataggaggaaatgggcactttaaaaagtacaacttttgcctatgatatgcgatgtaagaagatggctaagaatgaaaatattttctatctagcaattacacttaaaactaaagtgattcataagactacaaaactggcttaggaaggaaggttggcggcggtgaagagggaagaggatgatctagtaatgggctcttccaaatcgcatctggtaggttcatagccatgagtcagccaccaatcgggggcgctgccc

SEQ ID NO: 5857 - protein, 43 aa, Homo sapiens
MGTLKSTTFAYDMRCKKMAKNENIFYLAITLKTKVIHKTTKLA

SEQ ID NO: 5858 - DNA, 331 bp, Homo sapiens
ccatgatgggacccaccgtcccacagacaaagggttcttgcgaagccacgactaatttagtgcaaaccgaaataaatatcggcccacagagatcctttacagaacggtttgccttcatttcttctttcagtggtgggcggggggcatgggagcctcccttctacctctaagaattcctttgtgagcttgagtatgagaataaaatcatgtctacattgttacatcgcatccagactcttcttcctagaccgcaattttctctgtactgaacacaaatcactaacttttatagagctctaaaactttttccagtatcgtcaaagtcatcagg

SEQ ID NO: 5859 - protein, 55 aa, Homo sapiens
MMGPTVPQTKGSCEATTNLVQTEINIGPQRSFTERFAFISSFSGGRGAWEPPFYL

SEQ ID NO: 5860 - DNA, 3365 bp, Homo sapiens
gcgccacgggaaataaatgagggctgccaaaggccgtcggaggccgcggggctcggcaggcaggcgaagacccagcgtcgcattgcagagtcgagacgacctgggctgccgtgacgccgcagtcgccggccctagtttcccccgccctgcccgagcgcgtccgcgcctctcgcccgaatccgggtaccaccggcgactcgggtcggccccttctggcttgttccggcgtccggcctggcatgcgggtgctgcggctgctgcggctgccgccgccgctgctgccgctgccgcgggggctgcggcttgggaagctccgcgcttccgcaggcctggcctccgccgcccgggcccccgcagcctgtcgctggaccccgcgccggcccagcgcaccgccctcaggccccgagccccgccctggcctccgcctcggcctcgcctccagccccgggacgcggcccgccaccgccgctgccgccagcccagacgcgccgcccgcatgcgccgcgaccatggagcgccccgaagcgggaggaattaattccaatgagtgtgaaaatgtatcaagaaaaaagaaaatgtcagaggaatttgaagccaatactatggattctctggtagacatgccatttgctactgtagatattcaggatgactgtggaatcactgatgaacctcaaataaatttgaagagaagtcaagaaaatgaatgggtcaagagtgatcaagtaaagaagaggaaaaaaaagagaaaagattatcaacccaactatttcctgtccattccaatcaccaacaaagagattataaaaggaattaagatcctgcagaatgcaataatacaacaagatgagcgactggccaaagcaatggtcagtgatggttcctttcatattaccctgctggtgatgcaattattaaatgaagatgaagtaaacattggtattgatgctcttttggaattgaaaccattcatagaagaactcctccagggaaaacatttgactttgccctttcaagggattggtacttttggaaatcaggttggatttgtgaagctggcagaaggagatcatgtaaactcacttttggagatagcagagactgcaaataggacatttcaagaaaaaggcatcctggtaggagagagcagaagttttaaacctcatttgaccttcatgaagttgtcaaaatcaccgtggctccgtaagaatggagtgaaaaaaatagatcctgatttatatgaaaagtttatcagtcacagatttggagaagaaatattatatcgcatagatctttgctccatgctgaagaaaaaacaaagtaatggttattatcactgtgaatcttccattgtgattggtgaaaagaacggaggggagcccgatgacgctgaactagtaaggctcagtaagaggctggtggagaacgcggtgctcaaggctgtccagcagtatctggaggaaacacagaataaaaacaagccgggggaggggagctctgtgaaaaccgaagcagctgatcagaatggcaatgacaatgagaacaacaggaaatgagcccggaacgcaggcccccatgtctctgtgcaaagcctccctgcttccctctgctgagtctagggactgacttgcagcgtgctgtttaagttaagtttctctggtgcaatctgtgaagattgcctaatacttttcatgatcgatgtgttcgcattgctgaaacacaacagaagaaaaatggagtgctgggactggcagaggaaattaattgatgaaagaagaatggcccaagtttcattcgccctcagccacgcacaagggaaagggaactttgggttatgcctcctggacgcaaattaaaggccgagaaagaggccttgccatcaatggaatactgccatttatattgcttagcagggcatttgactactttatctgaggccagaactctcacacacagctatcaagtgctaagtttaaaataatcactgttggaattgtcatctgtacaattagtccataatgtttcatgtttgtcctaagtgtgctgttgctatgcagtgtgatctttatttatagtaaattatgtttcatgtaaatgatatatttttggtgaaatgcaaccttttctataaaatgtgggcaacattttaaagtttttttaaaatcctattttgataagtcagtatgccatatttaatgaaatgttattatataatttttttttcttaggcaagaaacctattggaattcgagacttaattaatgaagctttgcatcgagaaacgatgggtctgaagtccaaagtgaaacagataaaggaacttttattaaagcctgagactcaggccagaattaggagggagctttttgaaggaagacttattaacaacagtaattcagcaaatgacgttgatttcagcacaactttgacataagctctacattgcgattgtgacaacatagcttatgaaatcttttcagcttattaagtagctctttggtaaacaccaaagaagtttctgatagtgtctgcacaacagcaaaccaacatttggtgaggaattagcaatttcttgccaaagaaaattgattctgcccaattattttttgagctacacttgtgttttagaatatctgtttctgtaatattgagagttattttatagaaatgatttcttaattagctgttgtgagatatttctcgggtccttgcagaaaaaaacatacagactgtgaacaaatcattcacaaacagaataaaacagagccaacaacagtattttaagggtcacttgcctcctgttgacacaattgttgctaaatcaaaagaagcgttgtccaggtgtgtctacatctagtgttacttttaatgagaatttgaatgtttattgaacaatagtacttgaatgaacatttataaatgtaattattgcgatcactggttaagaatgttttatatatccttataatatttttcactgatcaaaatgttgttctgctttttcatttcttaaggaatacatgtttgggatttttattttttacgtgtccgaagataagctccaggtcttatcgtatcccttgccatctgaacttgtttgcactgcttctgtttgaaagagcatcttgaaaaacttccccggtatgatgattgttggtaacaactttttctatagtcattgatggagtagatcatgatggaggggaaatcactggagatcaaatatgtaaaatcatttcaaatataaaatccagtttactcatggattttagctattttttcactgggtaaattatactacatttatttacaaatgagtttatgcattttcatggctcttaataaacatattgttttcccttgtt

SEQ ID NO: 5861 - protein, 438 aa, Homo sapiens
MRVLRLLRLPPPLLPLPRGLRLGKLRASAGLASAARAPAACRWTPRRPSAPPSGPEPRPGLRLGLASSPGTRPATAAAASPDAPPACAATMERPEAGGINSNECENVSRKKKMSEEFEANTMDSLVDMPFATVDIQDDCGITDEPQINLKRSQENEWVKSDQVKKRKKKRKDYQPNYFLSIPITNKEIIKGIKILQNAIIQQDERLAKAMVSDGSFHITLLVMQLLNEDEVNIGIDALLELKPFIEELLQGKHLTLPFQGIGTFGNQVGFVKLAEGDHVNSLLEIAETANRTFQEKGILVGESRSFKPHLTFMKLSKSPWLRKNGVKKIDPDLYEKFISHRFGEEILYRIDLCSMLKKKQSNGYYHCESSIVIGEKNGGEPDDAELVRLSKRLVENAVLKAVQQYLEETQNKNKPGEGSSVKTEAADQNGNDNENNRK

SEQ ID NO: 5862 - DNA, 3007 bp, Homo sapiens
ccaccgccgctgccgccagcccagacgcgccgcccgcatgcgccgcgaccatggagcgccccgaagcggagacggggtcttgccatgtcaccaaggcttgaactcctgggctcaagcagtccttctctgagtgctgggattacacgtgtgagccaacttgctcagctggggaggaattaattccaatgagtgtgaaaatgtatcaagaaaaaagaaaatgtcagaggaatttgaagccaatactatggattctctggtagacatgccatttgctactgtagatattcaggatgactgtggaatcactgatgaacctcaaataaatttgaagagaagtcaagaaaatgaatgggtcaagagtgatcaagtaaagaagaggaaaaaaaagagaaaagattatcaacccaactatttcctgtccattccaatcaccaacaaagagattataaaaggaattaagatcctgcagaatgcaataatacaacaagatgagcgactggccaaagcaatggtcagtgatggttcctttcatattaccctgctggtgatgcaattattaaatgaagatgaagtaaacattggtattgatgctcttttggaattgaaaccattcatagaagaactcctccagggaaaacatttgactttgccctttcaagggattggtacttttggaaatcaggttggatttgtgaagctggcagaaggagatcatgtaaactcacttttggagatagcagagactgcaaataggacatttcaagaaaaaggcatcctggtaggagagagcagaagttttaaacctcatttgaccttcatgaagttgtcaaaatcaccgtggctccgtaagaatggagtgaaaaaaatagatcctgatttatatgaaaagtttatcagtcacagatttggagaagaaatattatatcgcatagatctttgctccatgctgaagaaaaaacaaagtaatggttattatcactgtgaatcttccattgtgattggtgaaaagaacggaggggagcccgatgacgctgaactagtaaggctcagtaagaggctggtggagaacgcggtgctcaaggctgtccagcagtatctggaggaaacacagaataaaaacaagccgggggaggggagctctgtgaaaaccgaagcagctgatcagaatggcaatgacaatgagaacaacaggaaatgagcccggaacgcaggcccccatgtctctgtgcaaagcctccctgcttccctctgctgagtctagggactgacttgcagcgtgctgtttaagttaagtttctctggtgcaatctgtgaagattgcctaatacttttcatgatcgatgtgttcgcattgctgaaacacaacagaagaaaaatggagtgctgggactggcagaggaaattaattgatgaaagaagaatggcccaagtttcattcgccctcagccacgcacaagggaaagggaactttgggttatgcctcctggacgcaaattaaaggccgagaaagaggccttgccatcaatggaatactgccatttatattgcttagcagggcatttgactactttatctgaggccagaactctcacacacagctatcaagtgctaagtttaaaataatcactgttggaattgtcatctgtacaattagtccataatgtttcatgtttgtcctaagtgtgctgttgctatgcagtgtgatctttatttatagtaaattatgtttcatgtaaatgatatatttttggtgaaatgcaaccttttctataaaatgtgggcaacattttaaagtttttttaaaatcctattttgataagtcagtatgccatatttaatgaaatgttattatataatttttttttcttaggcaagaaacctattggaattcgagacttaattaatgaagctttgcatcgagaaacgatgggtctgaagtccaaagtgaaacagataaaggaacttttattaaagcctgagactcaggccagaattaggagggagctttttgaaggaagacttattaacaacagtaattcagcaaatgacgttgatttcagcacaactttgacataagctctacattgcgattgtgacaacatagcttatgaaatcttttcagcttattaagtagctctttggtaaacaccaaagaagtttctgatagtgtctgcacaacagcaaaccaacatttggtgaggaattagcaatttcttgccaaagaaaattgattctgcccaattattttttgagctacacttgtgttttagaatatctgtttctgtaatattgagagttattttatagaaatgatttcttaattagctgttgtgagatatttctcgggtccttgcagaaaaaaacatacagactgtgaacaaatcattcacaaacagaataaaacagagccaacaacagtattttaagggtcacttgcctcctgttgacacaattgttgctaaatcaaaagaagcgttgtccaggtgtgtctacatctagtgttacttttaatgagaatttgaatgtttattgaacaatagtacttgaatgaacatttataaatgtaattattgcgatcactggttaagaatgttttatatatccttataatatttttcactgatcaaaatgttgttctgctttttcatttcttaaggaatacatgtttgggatttttattttttacgtgtccgaagataagctccaggtcttatcgtatcccttgccatctgaacttgtttgcactgcttctgtttgaaagagcatcttgaaaaacttccccggtatgatgattgttggtaacaactttttctatagtcattgatggagtagatcatgatggaggggaaatcactggagatcaaatatgtaaaatcatttcaaatataaaatccagtttactcatggattttagctattttttcactgggtaaattatactacatttatttacaaatgagtttatgcattttcatggctcttaataaacatattgttttcccttgtt

SEQ ID NO: 5863 - protein, 326 aa, Homo sapiens; identical to SEQ ID NO: 768

SEQ ID NO: 5864 - DNA, 1732 bp, Homo sapiens
ctagaattgcatctaactggaagtggaggagggaagatgcatcattcctctccctgtttcagaggagcaggtgctgagagaggaagggagatggtggaccaggtctgtggggatttctcctggatgcagattctgtttttctaatgtgtgcatttggacttctttgcaactcttcatggtaatgcccctccccacagattataaaaggaattaagatcctgcagaatgcaataatacaacaagatgagcgactggccaaagcaatggtcagtgatggttcctttcatattaccctgctggtgatgcaattattaaatgaagatgaagtaaacatagactgcaaataggacatttcaagaaaaaggcatcctggtaggagagagcagaagttttaaacctcatttgaccttcatgaagttgtcaaaatcaccgtggctccgtaagaatggagtgaaaaaaatagatcctgatttatatgaaaagtttatcagtcacagatttggagaagaaatattatatcgcatagatctttgctccatgctgaagaaaaaacaaagtaatggttattatcactgtgaatcttccattgtgattggcaagaaacctattggaattcgagacttaattaatgaagctttgcatcgagaaacgatgggtctgaagtccaaagtgaaacagataaaggaacttttattaaagcctgagactcaggccagaattaggagggagctttttgaaggaagacttattaacaacagtaattcagcaaatgacgttgatttcagcacaactttgacataagctctacattgcgattgtgacaacatagcttatgaaatcttttcagcttattaagtagctctttggtaaacaccaaagaagtttctgatagtgtctgcacaacagcaaaccaacatttggtgaggaattagcaatttcttgccaaagaaaattgattctgcccaattattttttgagctacacttgtgttttagaatatctgtttctgtaatattgagagttattttatagaaatgatttcttaattagctgttgtgagatatttctcgggtccttgcagaaaaaaacatacagactgtgaacaaatcattcacaaacagaataaaacagagccaacaacagtattttaagggtcacttgcctcctgttgacacaattgttgctaaatcaaaagaagcgttgtccaggtgtgtctacatctagtgttacttttaatgagaatttgaatgtttattgaacaatagtacttgaatgaacatttataaatgtaattattgcgatcactggttaagaatgttttatatatccttataatatttttcactgatcaaaatgttgttctgctttttcatttcttaaggaatacatgtttgggatttttattttttacgtgtccgaagataagctccaggtcttatcgtatcccttgccatctgaacttgtttgcactgcttctgtttgaaagagcatcttgaaaaacttccccggtatgatgattgttggtaacaactttttctatagtcattgatggagtagatcatgatggaggggaaatcactggagatcaaatatgtaaaatcatttcaaatataaaatccagtttactcatggattttagctattttttcactgggtaaattatactacatttatttacaaatgagtttatgcattttcatggctcttaataaacatattgttttcccttgtt

SEQ ID NO: 5865 - protein, 129 aa, Homo sapiens [sequence omitted]

SEQ ID NO: 5866 - DNA, 1357 bp, Homo sapiens
cttcctgtcgctcttcaaggtttccaaaagaccatctttcagcagttgcctcaattaaggccttggaaccagggagtgaaaaaaatagatcctgatttatatgaaaagtttatcagtcacagatttggagaagaaatattatatcgcatagatctttgctccatgctgaagaaaaaacaaagtaatggttattatcactgtgaatcttccattgtgattggcaagaaacctattggaattcgagacttaattaatgaagctttgcatcgagaaacgatgggtctgaagtccaaagtgaaacagataaaggaacttttattaaagcctgagactcaggccagaattaggagggagctttttgaaggaagacttattaacaacagtaattcagcaaatgacgttgatttcagcacaactttgacataagctctacattgcgattgtgacaacatagcttatgaaatcttttcagcttattaagtagctctttggtaaacaccaaagaagtttctgatagtgtctgcacaacagcaaaccaacatttggtgaggaattagcaatttcttgccaaagaaaattgattctgcccaattattttttgagctacacttgtgttttagaatatctgtttctgtaatattgagagttattttatagaaatgatttcttaattagctgttgtgagatatttctcgggtccttgcagaaaaaaacatacagactgtgaacaaatcattcacaaacagaataaaacagagccaacaacagtattttaagggtcacttgcctcctgttgacacaattgttgctaaatcaaaagaagcgttgtccaggtgtgtctacatctagtgttacttttaatgagaatttgaatgtttattgaacaatagtacttgaatgaacatttataaatgtaattattgcgatcactggttaagaatgttttatatatccttataatatttttcactgatcaaaatgttgttctgctttttcatttcttaaggaatacatgtttgggatttttattttttacgtgtccgaagataagctccaggtcttatcgtatcccttgccatctgaacttgtttgcactgcttctgtttgaaagagcatcttgaaaaacttccccggtatgatgattgttggtaacaactttttctatagtcattgatggagtagatcatgatggaggggaaatcactggagatcaaatatgtaaaatcatttcaaatataaaatccagtttactcatggattttagctattttttcactgggtaaattatactacatttatttacaaatgagtttatgcattttcatggctcttaataaacatattgttttcccttgtt

SEQ ID NO: 5867 - protein, 87 aa, Homo sapiens
MLKKKQSNGYYHCESSIVIGKKPIGIRDLINEALHRETMGLKSKVKQIKELLLKPETQARIRRELFEGRLINNSNSANDVDFSTTLT

SEQ ID NO: 5868 - DNA, 2199 bp, Homo sapiens
aattactgcagttgtctgtaggagaaagggctcattgtggtttttctcgactacctttcttaaagacatatgcaaatagccagacagaacacatggcactgacctatggccagggactcacagttttgtgagaatacgggagcgtatagccacttccttcactgaatgccagtcccagagcagttgcattaggctggaggactggaggtggagccttttttgctcacggcagcaagttcccttctcctttctctcccccggcggcgtgtgcattggctcttcaagctgcctgtgctgctccgtggagtgaaaaaggcagggtgtgctcgcagactgtgctataaactgcaatttctatttggggtcctcacggagaagaacaccaggaaagacagacaggaccagtgccatgggccagctttgctgctttcctttctcaagagatgaaggaaaaatcagtgaaaagaacggaggggagcccgatgacgctgaactagtaaggctcagtaagaggctggtggagaacgcggtgctcaaggctgtccagcagtatctggaggaaacacagaataaaaacaagccgggggaggggagctctgtgaaaaccgaagcagctgatcagaatggcaatgacaatgagaacaacaggaaatgagcccggaacgcaggcccccatgtctctgtgcaaagcctccctgcttccctctgctgagtctagggactgacttgcagcgtgctgtttaagttaagtttctctggtgcaatctgtgaagattgcctaatacttttcatgatcgatgtgttcgcattgctgaaacacaacagaagaaaaatggagtgctgggactggcagaggaaattaattgatgaaagaagaatggcccaagtttcattcgccctcagccacgcacaagggaaagggaactttgggttatgcctcctggacgcaaattaaaggccgagaaagaggccttgccatcaatggaatactgccatttatattgcttagcagggcatttgactactttatctgaggccagaactctcacacacagctatcaagcaagaaacctattggaattcgagacttaattaatgaagctttgcatcgagaaacgatgggtctgaagtccaaagtgaaacagataaaggaacttttattaaagcctgagactcaggccagaattaggagggagctttttgaaggaagacttattaacaacagtaattcagcaaatgacgttgatttcagcacaactttgacataagctctacattgcgattgtgacaacatagcttatgaaatcttttcagcttattaagtagctctttggtaaacaccaaagaagtttctgatagtgtctgcacaacagcaaaccaacatttggtgaggaattagcaatttcttgccaaagaaaattgattctgcccaattattttttgagctacacttgtgttttagaatatctgtttctgtaatattgagagttattttatagaaatgatttcttaattagctgttgtgagatatttctcgggtccttgcagaaaaaaacatacagactgtgaacaaatcattcacaaacagaataaaacagagccaacaacagtattttaagggtcacttgcctcctgttgacacaattgttgctaaatcaaaagaagcgttgtccaggtgtgtctacatctagtgttacttttaatgagaatttgaatgtttattgaacaatagtacttgaatgaacatttataaatgtaattattgcgatcactggttaagaatgttttatatatccttataatatttttcactgatcaaaatgttgttctgctttttcatttcttaaggaatacatgtttgggatttttattttttacgtgtccgaagataagctccaggtcttatcgtatcccttgccatctgaacttgtttgcactgcttctgtttgaaagagcatcttgaaaaacttccccggtatgatgattgttggtaacaactttttctatagtcattgatggagtagatcatgatggaggggaaatcactggagatcaaatatgtaaaatcatttcaaatataaaatccagtttactcatggattttagctattttttcactgggtaaattatactacatttatttacaaatgagtttatgcattttcatggctcttaataaacatattgttttcccttgtt

SEQ ID NO: 5869 - protein, 81 aa, Homo sapiens; identical to SEQ ID NO: 766

SEQ ID NO: 5870 - DNA, 1857 bp, Homo sapiens
aggagaaagggctcattgtggtttttctcgactacctttcttaaagacatatgcaaatagccagacagaacacatggcactgacctatggccagggactcacagttttgtgagaatacgggagcgtatagccacttccttcactgaatgccagtcccagagcagttgcattaggctggaggactggaggtggagccttttttgctcacggcagcaagttcccttctcctttctctcccccggcggcgtgtgcattggctcttcaagctgcctgtgctgctccgtggagtgaaaaaggcagggtgtgctcgcagactgtgctataaactgcaatttctatttggggtcctcacggagaagaacaccaggaaagacagacaggaccagtgccatgggccagctttgctgctttcctttctcaagagatgaaggaaaaatcagtgaaaagaacggaggggagcccgatgacgctgaactagtaaggctcagtaagaggctggtggagaacgcggtgctcaaggctgtccagcagtatctggaggaaacacagaataaaaacaagccgggggaggggagctctgtgaaaaccgaagcagctgatcagaatggcaatgacaatgagaacaacaggaaatgagcccggaacgcaggcccccatgtctctgtgcaaagcctccctgcttccctctgctgagtctagggactgacttgcagcgtgctgtttaagttaagtttctctggtgcaatctgtgaagattgcctaatacttttcatgatcgatgtgttcgcattgctgaaacacaacagaagaaaaatggagtgctgggactggcagaggaaattaattgatgaaagaagaatggcccaagtttcattcgccctcagccacgcacaagggaaagggaactttgggttatgcctcctggacgcaaattaaaggccgagaaagaggccttgccatcaatggaatactgccatttatattgcttagcagggcatttgactactttatctgaggccagaactctcacacacagctatcaagtgctaagtttaaaataatcactgttggaattgtcatctgtacaattagtccataatgtttcatgtttgtcctaagtgtgctgttgctatgcagtgtgatctttatttatagtaaattatgtttcatgtaaatgatatatttttggtgaaatgcaaccttttctataaaatgtgggcaacattttaaagtttttttaaaatcctattttgataagtcagtatgccatatttaatgaaatgttattatataatttttttttcttaggcaagaaacctattggaattcgagacttaattaatgaagctttgcatcgagaaacgatgggtctgaagtccaaagtgaaacagataaaggaacttttattaaagcctgagactcaggccagaattaggagggagctttttgaaggaagacttattaacaacagtaattcagcaaatgacgttgatttcagcacaactttgacataagctctacattgcgattgtgacaacatagcttatgaaatcttttcagcttattaagtagctctttggtaaacaccaaagaagtttctgatagtgtctgcacaacagcaaaccaacatttggtgaggaattagcaatttcttgccaaagaaaattgattctgcccaattattttttgagctacacttgtgttttagaatatctgtttctgtaatattgagagttattttatagaaatgatttcttaattagctgttgtgagatatttctcgggtccttgcagaaaaaaacatacagactgtgaacaaatcattcacaaacagaataaaacagagccaacaacagt

SEQ ID NO: 5871 - protein, 81 aa, Homo sapiens; identical to SEQ ID NO: 766

SEQ ID NO: 5872 - DNA, 2329 bp, Homo sapiens
aggagaaagggctcattgtggtttttctcgactacctttcttaaagacatatgcaaatagccagacagaacacatggcactgacctatggccagggactcacagttttgtgagaatacgggagcgtatagccacttccttcactgaatgccagtcccagagcagttgcattaggctggaggactggaggtggagccttttttgctcacggcagcaagttcccttctcctttctctcccccggcggcgtgtgcattggctcttcaagctgcctgtgctgctccgtggagtgaaaaaggcagggtgtgctcgcagactgtgctataaactgcaatttctatttggggtcctcacggagaagaacaccaggaaagacagacaggaccagtgccatgggccagctttgctgctttcctttctcaagagatgaaggaaaaatcagtgaaaagaacggaggggagcccgatgacgctgaactagtaaggctcaaatggcaatgacaatgagaacaacaggaaatgagcccggaacgcaggcccccatgtctctgtgcaaagcctccctgcttccctctgctgagtctagggactgacttgcagcgtgctgtttaagttaagtttctctggtgcaatctgtgaagattgcctaatacttttcatgatcgatgtgttcgcattgctgaaacacaacagaagaaaaatggagtgctgggactggcagaggaaattaattgatgaaagaagaatggcccaagtttcattcgccctcagccacgcacaagggaaagggaactttgggttatgcctcctggacgcaaattaaaggccgagaaagaggccttgccatcaatggaatactgccatttatattgcttagcagggcatttgactactttatctgaggccagaactctcacacacagctatcaagtgctaagtttaaaataatcactgttggaattgtcatctgtacaattagtccataatgtttcatgtttgtcctaagtgtgctgttgctatgcagtgtgatctttatttatagtaaattatgtttcatgtaaatgatatatttttggtgaaatgcaaccttttctataaaatgtgggcaacattttaaagtttttttaaaatcctattttgataagtcagtatgccatatttaatgaaatgttattatataatttttttttcttaggcaagaaacctattggaattcgagacttaattaatgaagctttgcatcgagaaacgatgggtctgaagtccaaagtgaaacagataaaggaacttttattaaagcctgagactcaggccagaattaggagggagctttttgaaggaagacttattaacaacagtaattcagcaaatgacgttgatttcagcacaactttgacataagctctacattgcgattgtgacaacatagcttatgaaatcttttcagcttattaagtagctctttggtaaacaccaaagaagtttctgatagtgtctgcacaacagcaaaccaacatttggtgaggaattagcaatttcttgccaaagaaaattgattctgcccaattattttttgagctacacttgtgttttagaatatctgtttctgtaatattgagagttattttatagaaatgatttcttaattagctgttgtgagatatttctcgggtccttgcagaaaaaaacatacagactgtgaacaaatcattcacaaacagaataaaacagagccaacaacagtattttaagggtcacttgcctcctgttgacacaattgttgctaaatcaaaagaagcgttgtccaggtgtgtctacatctagtgttacttttaatgagaatttgaatgtttattgaacaatagtacttgaatgaacatttataaatgtaattattgcgatcactggttaagaatgttttatatatccttataatatttttcactgatcaaaatgttgttctgctttttcatttcttaaggaatacatgtttgggatttttattttttacgtgtccgaagataagctccaggtcttatcgtatcccttgccatctgaacttgtttgcactgcttctgtttgaaagagcatcttgaaaaacttccccggtatgatgattgttggtaacaactttttctatagtcattgatggagtagatcatgatggaggggaaatcactggagatcaaatatgtaaaatcatttcaaatataaaatccagtttactcatggattttagctattttttcactgggtaaattatactacatttatttacaaatgagtttatgcattttcatggctcttaataaacatattgttttcccttgtt

SEQ ID NO: 5873 - protein, 35 aa, Homo sapiens
MGQLCCFPFSRDEGKISEKNGGEPDDAELVRLKWQ

SEQ ID NO: 5874 - DNA, 2514 bp, Homo sapiens
aggagaaagggctcattgtggtttttctcgactacctttcttaaagacatatgcaaatagccagacagaacacatggcactgacctatggccagggactcacagttttgtgagaatacgggagcgtatagccacttccttcactgaatgccagtcccagagcagttgcattaggctggaggactggaggtggagccttttttgctcacggcagcaagttcccttctcctttctctcccccggcggcgtgtgcattggctcttcaagctgcctgtgctgctccgtggagtgaaaaaggcagggtgtgctcgcagactgtgctataaactgcaatttctatttggggtcctcacggagaagaacaccaggaaagacagacaggaccagtgccatgggccagctttgctgctttcctttctcaagagatgaaggaaaaatcagtgagttggaaagctcgtcctctgcagtcctacagagatacagcaaggatatacccagttggtcaagtggtgaaaagaacggaggggagcccgatgacgctgaactagtaaggctcagtaagaggctggtggagaacgcggtgctcaaggctgtccagcagtatctggaggaaacacagaataaaaacaagccgggggaggggagctctgtgaaaaccgaagcagctgatcagaatggcaatgacaatgagaacaacaggaaatgagcccggaacgcaggcccccatgtctctgtgcaaagcctccctgcttccctctgctgagtctagggactgacttgcagcgtgctgtttaagttaagtttctctggtgcaatctgtgaagattgcctaatacttttcatgatcgatgtgttcgcattgctgaaacacaacagaagaaaaatggagtgctgggactggcagaggaaattaattgatgaaagaagaatggcccaagtttcattcgccctcagccacgcacaagggaaagggaactttgggttatgcctcctggacgcaaattaaaggccgagaaagaggccttgccatcaatggaatactgccatttatattgcttagcagggcatttgactactttatctgaggccagaactctcacacacagctatcaagtgctaagtttaaaataatcactgttggaattgtcatctgtacaattagtccataatgtttcatgtttgtcctaagtgtgctgttgctatgcagtgtgatctttatttatagtaaattatgtttcatgtaaatgatatatttttggtgaaatgcaaccttttctataaaatgtgggcaacattttaaagtttttttaaaatcctattttgataagtcagtatgccatatttaatgaaatgttattatataatttttttttcttaggcaagaaacctattggaattcgagacttaattaatgaagctttgcatcgagaaacgatgggtctgaagtccaaagtgaaacagataaaggaacttttattaaagcctgagactcaggccagaattaggagggagctttttgaaggaagacttattaacaacagtaattcagcaaatgacgttgatttcagcacaactttgacataagctctacattgcgattgtgacaacatagcttatgaaatcttttcagcttattaagtagctctttggtaaacaccaaagaagtttctgatagtgtctgcacaacagcaaaccaacatttggtgaggaattagcaatttcttgccaaagaaaattgattctgcccaattattttttgagctacacttgtgttttagaatatctgtttctgtaatattgagagttattttatagaaatgatttcttaattagctgttgtgagatatttctcgggtccttgcagaaaaaaacatacagactgtgaacaaatcattcacaaacagaataaaacagagccaacaacagtattttaagggtcacttgcctcctgttgacacaattgttgctaaatcaaaagaagcgttgtccaggtgtgtctacatctagtgttacttttaatgagaatttgaatgtttattgaacaatagtacttgaatgaacatttataaatgtaattattgcgatcactggttaagaatgttttatatatccttataatatttttcactgatcaaaatgttgttctgctttttcatttcttaaggaatacatgtttgggatttttattttttacgtgtccgaagataagctccaggtcttatcgtatcccttgccatctgaacttgtttgcactgcttctgtttgaaagagcatcttgaaaaacttccccggtatgatgattgttggtaacaactttttctatagtcattgatggagtagatcatgatggaggggaaatcactggagatcaaatatgtaaaatcatttcaaatataaaatccagtttactcatggattttagctattttttcactgggtaaattatactacatttatttacaaatgagtttatgcattttcatggctcttaataaacatattgttttcccttgtt

SEQ ID NO: 5875 - protein, 104 aa, Homo sapiens; identical to SEQ ID NO: 770

SEQ ID NO: 5876 - DNA, 2445 bp, Homo sapiens
aggagaaagggctcattgtggtttttctcgactacctttcttaaagacatatgcaaatagccagacagaacacatggcactgacctatggccagggactcacagttttgtgagaatacgggagcgtatagccacttccttcactgaatgccagtcccagagcagttgcattaggctggaggactggaggtggagccttttttgctcacggcagcaagttcccttctcctttctctcccccggcggcgtgtgcattggctcttcaagctgcctgtgctgctccgtggagtgaaaaaggcagggtgtgctcgcagactgtgctataaactgcaatttctatttggggtcctcacggagaagaacaccaggaaagacagacaggaccagtgccatgggccagctttgctgctttcctttctcaagagatgaaggaaaaatcagtgaaaagaacggaggggagcccgatgacgctgaactagtaaggctcagtaagaggctggtggagaacgcggtgctcaaggctgtccagcagtatctggaggaaacacagaataaaaacaagccgggggaggggagctctgtgaaaaccgaagcagctgatcagaatggcaatgacaatgagaacaacaggaaatgagcccggaacgcaggcccccatgtctctgtgcaaagcctccctgcttccctctgctgagtctagggactgacttgcagcgtgctgtttaagttaagtttctctggtgcaatctgtgaagattgcctaatacttttcatgatcgatgtgttcgcattgctgaaacacaacagaagaaaaatggagtgctgggactggcagaggaaattaattgatgaaagaagaatggcccaagtttcattcgccctcagccacgcacaagggaaagggaactttgggttatgcctcctggacgcaaattaaaggccgagaaagaggccttgccatcaatggaatactgccatttatattgcttagcagggcatttgactactttatctgaggccagaactctcacacacagctatcaagtgctaagtttaaaataatcactgttggaattgtcatctgtacaattagtccataatgtttcatgtttgtcctaagtgtgctgttgctatgcagtgtgatctttatttatagtaaattatgtttcatgtaaatgatatatttttggtgaaatgcaaccttttctataaaatgtgggcaacattttaaagtttttttaaaatcctattttgataagtcagtatgccatatttaatgaaatgttattatataatttttttttcttaggcaagaaacctattggaattcgagacttaattaatgaagctttgcatcgagaaacgatgggtctgaagtccaaagtgaaacagataaaggaacttttattaaagcctgagactcaggccagaattaggagggagctttttgaaggaagacttattaacaacagtaattcagcaaatgacgttgatttcagcacaactttgacataagctctacattgcgattgtgacaacatagcttatgaaatcttttcagcttattaagtagctctttggtaaacaccaaagaagtttctgatagtgtctgcacaacagcaaaccaacatttggtgaggaattagcaatttcttgccaaagaaaattgattctgcccaattattttttgagctacacttgtgttttagaatatctgtttctgtaatattgagagttattttatagaaatgatttcttaattagctgttgtgagatatttctcgggtccttgcagaaaaaaacatacagactgtgaacaaatcattcacaaacagaataaaacagagccaacaacagtattttaagggtcacttgcctcctgttgacacaattgttgctaaatcaaaagaagcgttgtccaggtgtgtctacatctagtgttacttttaatgagaatttgaatgtttattgaacaatagtacttgaatgaacatttataaatgtaattattgcgatcactggttaagaatgttttatatatccttataatatttttcactgatcaaaatgttgttctgctttttcatttcttaaggaatacatgtttgggatttttattttttacgtgtccgaagataagctccaggtcttatcgtatcccttgccatctgaacttgtttgcactgcttctgtttgaaagagcatcttgaaaaacttccccggtatgatgattgttggtaacaactttttctatagtcattgatggagtagatcatgatggaggggaaatcactggagatcaaatatgtaaaatcatttcaaatataaaatccagtttactcatggattttagctattttttcactgggtaaattatactacatttatttacaaatgagtttatgcattttcatggctcttaataaacatattgttttcccttgtt

SEQ ID NO: 5877 - protein, 81 aa, Homo sapiens; identical to SEQ ID NO: 766

SEQ ID NO: 5878 - DNA, 1213 bp, Homo sapiens
ccaggaaagacagacaggaccagtgccatgggccagctttgctgctttcctttctcaagagatgaaggaaaaatcagcaagaaacctattggaattcgagacttaattaatgaagctttgcatcgagaaacgatgggtctgaagtccaaagtgaaacagataaaggaacttttattaaagcctgagactcaggccagaattaggagggagctttttgaaggaagacttattaacaacagtaattcagcaaatgacgttgatttcagcacaactttgacataagctctacattgcgattgtgacaacatagcttatgaaatcttttcagcttattaagtagctctttggtaaacaccaaagaagtttctgatagtgtctgcacaacagcaaaccaacatttggtgaggaattagcaatttcttgccaaagaaaattgattctgcccaattattttttgagctacacttgtgttttagaatatctgtttctgtaatattgagagttattttatagaaatgatttcttaattagctgttgtgagatatttctcgggtccttgcagaaaaaaacatacagactgtgaacaaatcattcacaaacagaataaaacagagccaacaacagtattttaagggtcacttgcctcctgttgacacaattgttgctaaatcaaaagaagcgttgtccaggtgtgtctacatctagtgttacttttaatgagaatttgaatgtttattgaacaatagtacttgaatgaacatttataaatgtaattattgcgatcactggttaagaatgttttatatatccttataatatttttcactgatcaaaatgttgttctgctttttcatttcttaaggaatacatgtttgggatttttattttttacgtgtccgaagataagctccaggtcttatcgtatcccttgccatctgaacttgtttgcactgcttctgtttgaaagagcatcttgaaaaacttccccggtatgatgattgttggtaacaactttttctatagtcattgatggagtagatcatgatggaggggaaatcactggagatcaaatatgtaaaatcatttcaaatataaaatccagtttactcatggattttagctattttttcactgggtaaattatactacatttatttacaaatgagtttatgcattttcatggctcttaataaacatattgttttcccttgtt

SEQ ID NO: 5879 - protein, 84 aa, Homo sapiens
MGQLCCFPFSRDEGKISKKPIGIRDLINEALHRETMGLKSKVKQIKELLLKPETQARIRRELFEGRLINNSNSANDVDFSTTLT

SEQ ID NO: 5880 - DNA, 564 bp, Homo sapiens
agcaagtgacaagactgaggcaggcagagtggccgagcggggtagaggggctggagacagcagtcatgtggatgttttggcacagggtctgaaggagcctgattgttgaagcaaaacttcccgtttacctactgattggagggtttttgagcatctggaagccagaacaaaaatgcttctttccatcctagaccatccatcctcccgctgaccttccagatgactgcaggtgcatgagcacgcccagcagggatcagctgagcaaaatcacctcgccgaatcatagaaggagggaaagctgctgagaaaacatggaaacacagaaagaggaaagtaaaaagtacccagggagcctctgagtttgtgtgtgcacgtgggtgaggtcgccaaaggggagcaaacctcctacttcctgcagctcagattacttatcaatcagaggccaggcctccttaactgccaacggcgagcacctgcactctcattctcagcagccctgagccaatgtatgaggagccttgtatataaataccccagctctttcacctcttggatgggaaaatt

SEQ ID NO: 5881 - protein, 46 aa, Homo sapiens
VCVCTWVRSPKGSKPPTSCSSDYLSIRGQASLTANGEHLHSHSQQP

SEQ ID NO: 5882 - DNA, 3493 bp, Homo sapiens
ggagcggccggggccacgatggagcgcgacggctgcgcggggggcgggagccgcggcggcgagggcgggcgcgctccccgggagggcccggcggggaacggccgcgatcggggccgcagccacgctgccgaggcgcccggggacccgcaggcggccgcgtccttgctggcccctatggacgtgggggaggagccgctggagaaggcggcgcgcgcccgcactgccaaggaccccaacacctataaagtactctcgctggtattgtcagtatgtgtgttaacaacaatacttggttgtatatttgggttgaaaccaagctgtgccaaagaagttaaaagttgcaaaggtcgctgtttcgagagaacatttgggaactgtcgctgtgatgctgcctgtgttgagcttggaaactgctgtttagattaccaggagacgtgcatagaaccagaacatatatggacttgcaacaaattcaggtgtggtgagaaaaggttgaccagaagcctctgtgcctgttcagatgactgcaaggacaagggcgactgctgcatcaactacagttctgtgtgtcaaggtgagaaaagttgggtagaagaaccatgtgagagcattaatgagccacagtgcccagcagggtttgaaacgcctcctaccctcttattttctttggatggattcagggcagaatatttacacacttggggtggacttcttcctgttattagcaaactaaaaaaatgtggaacatatactaaaaacatgagaccggtatatccaacaaaaactttccccaatcactacagcattgtcaccggattgtatccagaatctcatggcataatcgacaataaaatgtatgatcccaaaatgaatgcttccttttcacttaaaagtaaagagaaatttaatcctgagtggtacaaaggagaaccaatttgggtcacagctaagtatcaaggcctcaagtctggcacatttttctggccaggatcagatgtggaaattaacggaattttcccagacatctataaaatgtataatggttcagtaccatttgaagaaaggattttagctgttcttcagtggctacagcttcctaaagatgaaagaccacacttttacactctgtatttagaagaaccagattcttcaggtcattcatatggaccagtcagcagtgaagtcatcaaagccttgcagagggttgatggtatggttggtatgctgatggatggtctgaaagagctgaacttgcacagatgcctgaacctcatccttatttcagatcatggcatggaacaaggcagttgtaagaaatacatatatctgaataaatatttgggggatgttaaaaatattaaagttatctatggacctgcagctcgattgagaccctctgatgtcccagataaatactattcatttaactatgaaggcattgcccgaaatctttcttgccgggaaccaaaccagcacttcaaaccttacctgaaacatttcttacctaagcgtttgcactttgctaagagtgatagaattgagcccttgacattctatttggaccctcagtggcaacttgcattgaatccctcagaaaggaaatattgtggaagtggatttcatggctctgacaatgtattttcaaatatgcaagccctctttgttggctatggacctggattcaagcatggcattgaggctgacacctttgaaaacattgaagtctataacttaatgtgtgatttactgaatttgacaccggctcctaataacggaactcatggaagtcttaaccaccttctaaagaatcctgtttatacgccaaagcatcccaaagaagtgcaccccctggtacagtgccccttcacaagaaaccccagagataaccttggctgctcatgtaacccttcgattttgccgattgaggattttcaaacacagttcaatctgactgtggcagaagagaagattattaagcatgaaactttaccctatggaagacctagagttctccagaaggaaaacaccatctgtcttctttcccagcaccagtttatgagtggatacagccaagacatcttaatgcccctttggacatcctataccgtggacagaaatgcaatttctctacggaagacttctccaactgtctgtaccaggactttagaattcctcttagtcctgtccataaatgttcattttataaaaataacaccaaagtgagttacgggttcctctccccaccacaactaaataaaaattcaagtggaatatattctgaagctttgcttactacaaatatagtgccaatgtaccagagttttcaagttatatggcgctactttcatgacaccctactgcgaaagtatgctgaagaaagaaatggtgtcaatgtcgtcagtggtcctgtgtttgactttgattatgatggacgttgtgattccttagagaatctgaggcaaaaaagaagagtcatccgtaaccaagaaattttgattccaactcacttctttattgtgctaacaagctgtaaagatacatctcagacgcctttgcactgtgaaaacctagacaccttagctttcattttgcctcacaggactgataacagcgagagctgtgtgcatgggaagcatgactcctcatgggttgaagaattgttaatgttacacagagcacggatcacagatgttgagcacatcactggactcagcttctatcaacaaagaaaagagccagtttcagacattttaaagttgaaaacacatttgccaacctttagccaagaagactgatatgttttttatccccaaacaccatgaatctttttgagagaaccttatattttatatagtcctctagctacactattgcattgttcagaaactgtcgaccagagttagaacggagccctcggtgatgcggacatctcagggaaacttgcgtactcagcacagcagtggagagtgttcctgttgaatcttgcacatatttgaatgtgtaagcattgtatacattgatcaagttcgggggaataaagacagaccacacctaaaactgcctttctgcttctcttaaaggagaagtagctgtgaacattgtctggataccagatatttgaatctttcttactattggtaataaaccttgatggcattgggcaaacagtagacttatagtagggttggggtagcccatgttatgtgactatctttatgagaattttaaagtggttctggatatcttttaacttggagtttcatttcttttcattgtaatcaaaaaaaaaattaacagaagccaaaatacttctgagaccttgtttcaatctttgctgtatatcccctcaaaatccaagttattaatcttatgtgttttctttttaattttttgattggatttctttagatttaatggttcaaatgagttcaactttgagggacgatctttgaatatacttacctattataaaatcttactttgtatttgtatt

SEQ ID NO: 5883 - protein, 734 aa, Homo sapiens [sequence omitted]

SEQ ID NO: 5884 - DNA, 4429 bp, Homo sapiens
ggagcggccggggccacgatggagcgcgacggctgcgcggggggcgggagccgcggcggcgagggcgggcgcgctccccgggagggcccggcggggaacggccgcgatcggggccgcagccacgctgccgaggcgcccggggacccgcaggcggccgcgtccttgctggcccctatggacgtgggggaggagccgctggagaaggcggcgcgcgcccgcactgccaaggaccccaacacctataaagtactctcgctggtattgtcagtatgtgtgttaacaacaatacttggttgtatatttgggttgaaaccaagctgtgccaaagaagttaaaagttgcaaaggtcgctgtttcgagagaacatttgggaactgtcgctgtgatgctgcctgtgttgagcttggaaactgctgtttagattaccaggagacgtgcatagaaccagaacatatatggacttgcaacaaattcaggtgtggtgagaaaaggttgaccagaagcctctgtgcctgttcagatgactgcaaggacaagggcgactgctgcatcaactacagttctgtgtgtcaaggtgagaaaagttgggtagaagaaccatgtgagagcattaatgagccacagtgcccagcagggtttgaaacgcctcctaccctcttattttctttggatggattcagggcagaatatttacacacttggggtggacttcttcctgttattagcaaactaaaaaaatgtggaacatatactaaaaacatgagaccggtatatccaacaaaaactttccccaatcactacagcattgtcaccggattgtatccagaatctcatggcataatcgacaataaaatgtatgatcccaaaatgaatgcttccttttcacttaaaagtaaagagaaatttaatcctgagtggtacaaaggagaaccaatttgggtcacagctaagtatcaaggcctcaagtctggcacatttttctggccaggatcagatgtggaaattaacggaattttcccagacatctataaaatgtataatggttcagtaccatttgaagaaaggattttagctgttcttcagtggctacagcttcctaaagatgaaagaccacacttttacactctgtatttagaagaaccagattcttcaggtcattcatatggaccagtcagcagtgaagtcatcaaagccttgcagagggttgatggtatggttggtatgctgatggatggtctgaaagagctgaacttgcacagatgcctgaacctcatccttatttcagatcatggcatggaacaaggcagttgtaagaaatacatatatctgaataaatatttgggggatgttaaaaatattaaagttatctatggacctgcagctcgattgagaccctctgatgtcccagataaatactattcatttaactatgaaggcattgcccgaaatctttcttgccgggaaccaaaccagcacttcaaaccttacctgaaacatttcttacctaagcgtttgcactttgctaagagtgatagaattgagcccttgacattctatttggaccctcagtggcaacttgcattgaatccctcagaaaggaaatattgtggaagtggatttcatggctctgacaatgtattttcaaatatgcaagccctctttgttggctatggacctggattcaagcatggcattgaggctgacacctttgaaaacattgaagtctataacttaatgtgtgatttactgaatttgacaccggctcctaataacggaactcatggaagtcttaaccaccttctaaagaatcctgtttatacgccaaagcatcccaaagaagtgcaccccctggtacagtgccccttcacaagaaaccccagagataaccttggctgctcatgtaacccttcgattttgccgattgaggattttcaaacacagttcaatctgactgtggcagaagagaagattattaagcatgaaactttaccctatggaagacctagagttctccagaaggaaaacaccatctgtcttctttcccagcaccagtttatgagtggatacagccaagacatcttaatgcccctttggacatcctataccgtggacagaaatgcaatttctctacggaagacttctccaactgtctgtaccaggactttagaattcctcttagtcctgtccataaatgttcattttataaaaataacaccaaagtgagttacgggttcctctccccaccacaactaaataaaaattcaagtggaatatattctgaagctttgcttactacaaatatagtgccaatgtaccagagttttcaagttatatggcgctactttcatgacaccctactgcgaaagtatgctgaagaaagaaatggtgtcaatgtcgtcagtggtcctgtgtttgactttgattatgatggacgttgtgattccttagagaatctgaggcaaaaaagaagagtcatccgtaaccaagaaattttgattccaactcacttctttattgtgctaacaagctgtaaagatacatctcagacgcctttgcactgtgaaaacctagacaccttagctttcattttgcctcacaggactgataacagcgagagctgtgtgcatgggaagcatgactcctcatgggttgaagaattgttaatgttacacagagcacggatcacagatgttgagcacatcactggactcagcttctatcaacaaagaaaagagccagtttcagacattttaaagttgaaaacacatttgccaacctttagccaagaagactgatatgttttttatccccaaacaccatgaatctttttgagagaaccttatattttatatagtcctctagctacactattgcattgttcagaaactgtcgaccagagttagaacggagccctcggtgatgcggacatctcagggaaacttgcgtactcagcacagcagtggagagtgttcctgttgaatcttgcacatatttgaatgtgtaagcattgtatacattgatcaagttcgggggaataaagacagaccacacctaaaactgcctttctgcttctcttaaaggagaagtagctgtgaacattgtctggataccagatatttgaatctttcttactattggtaataaaccttgatggcattgggcaaacagtagacttatagtagggttggggtagcccatgttatgtgactatctttatgagaattttaaagtggttctggatatcttttaacttggagtttcatttcttttcattgtaatcaaaaaaaaaattaacagaagccaaaatacttctgagaccttgtttcaatctttgctgtatatcccctcaaaatccaagttattaatcttatgtgttttctttttaattttttgattggatttctttagatttaatggttcaaatgagttcaactttgagggacgatctttgaatatacttacctattataaaatcttactttgtatttgtatttaaaaaagaaaaatattcctatcctgctcactggtaattaacataggtttaaaatggcttcaaatgtggccctatagacggttaaaattgtaccttatcttggcaaaacttcagagcaccagtcagtgcatgcaaggtgccattttttattgagatgcttagaatgtttctttctgtgcacaagacttaccctaccagcagcagagccattctctgttgagtggttcattttgaagttccacagattgaagagaacatgccaccaatcacctcacatcttcttggtggacatgataaatgacacaatgaacttgatttctttactaccttgactgtagctttttatccctacctgtgaaccttcaaagactgcattaacttttaggctacataggtccaattgaggtataatatcagtacaccaaagatttttatatgtccttcgtgtgaccattcttcaacggcctaagggccagctgcaaagacttttggaaaatacaatttacaactcaaaattatttaataatttaggaagttgctttttttttttttttttttcagtcctgcagtttcctgaagctctgtatatgatatttttttcagcctgcttctctctgttgttcagattaggtaattttattcttctgtctcgaagctcactgattctttattctgtctaatctgttctgctgttgagcccatttattcctgatttttatattttagttattgtatgttttatttctaaaatttccattcagtttttctttatatcttctatttgctgagaatttctgtctctttgctgagactttctacgttttcatttgtttcaagtgcatttatacttgcttgttgaagaatttttatgatggctgctgtaaaatccttatcagataattccaacatctgtcacctcattgtttgcatctactg

SEQ ID NO: 5885 - protein, 734 aa, Homo sapiens [sequence omitted]

SEQ ID NO: 5886 - DNA, 727 bp, Homo sapiens
gcggccggggccacgatggagcgcgacggctgcgcggggggcgggagccgcggcggcgagggcgggcgcgctccccgggagggcccggcggggaacggccgcgatcggggccgcagccacgctgccgaggcgcccggggacccgcaggcggccgcgtccttgctggcccctatggacgtgggggaggagccgctggagaaggcggcgcgcgcccgcactgccaaggaccccaacacctataaagtactctcgctggtattgtcagtatgtgtgttaacaacaatacttggttgtatatttgggttgaaaccaagctgtgccaaagaagttaaaagttgcaaaggtcgctgtttcgagagaacatttgggaactgtcgctgtgatgctgcctgtgttgagcttggaaactgctgtttagattaccaggagacgtgcatagaaccagaacatatatggacttgcaacaaattcaggtgtggtgagaaaaggttgaccagaagcctctgtgcctgttcagatgactgcaaggacaagggcgactgctgcatcaactacagttctgtgtgtcaaggtcaggtgctcgttgggctctgcagcagcctggtatcttccagcgtcttagcggggctttacataggtgttatcttttatattaggagtcatggctattggccaactatattagctgaaaaaaataattttaaaactttttattaaagaaactttt

SEQ ID NO: 5887 - protein, 233 aa, Homo sapiens
MERDGCAGGGSRGGEGGRAPREGPAGNGRDRGRSHAAEAPGDPQAAASLLAPMDVGEEPLEKAARARTAKDPNTYKVLSLVLSVCVLTTILGCIFGLKPSCAKEVKSCKGRCFERTFGNCRCDAACVELGNCCLDYQETCIEPEHIWTCNKFRCGEKRLTRSLCACSDDCKDKGDCCINYSSVCQGQVLVGLCSSLVSSSVLAGLYIGVIFYIRSHGYWPTILAEKNNFKTFY

SEQ ID NO: 5888 - DNA, 258 bp, Homo sapiens
attgttttatttagtttagtctcataatttcaattctgaacttctgttaagaatttttggtaatataactttgaattaactggaatatttagcaatttcatatagtgtcctcatggtatcttgatattacattgatttcagaatctttataggcaaaaataacagtgaacctcacttgtcttcttaattgtttatgcttctaccctttgtaatcagtttttttaatagttaaaagtaaatcttcaatataattaagta

SEQ ID NO: 5889 - DNA, 1976 bp, Homo sapiens
gtacatgttctgctcctattaactatttttcacaggaaaaacagtggataggacccaacttagggctcttgccacgcttgttagtataagcccgttattcccaaaatctccaagcctatcaagtttgagctttctggctgcaccagcatgaagacataccgagctaaattctgtggagtatgtaccgacggccgatgctgcaccccccacagaaccaccaccctgccggtggagttcaagtgccctgacggcgaggtcatgaagaagaacatgatgttcatcaagacctgtgcctgccattacaactgtcccggagacaatgacatctttgaatcgctgtactacaggaagatgtacggagacatggcatgaagccagagagtgagagacattaactcattagactggaacttgaactgattcacatctcatttttccgtaaaaatgatttcagtagcacaagttatttaaatctgtttttctaactgggggaaaagattcccacccaattcaaaacattgtgccatgtcaaacaaatagtctatcaaccccagacactggtttgaagaatgttaagacttgacagtggaactacattagtacacagcaccagaatgtatattaaggtgtggctttaggagcagtgggagggtaccagcagaaaggttagtatcatcagatagcatcttatacgagtaatatgcctgctatttgaagtgtaattgagaaggaaaattttagcgtgctcactgacctgcctgtagccccagtgacagctaggatgtgcattctccagccatcaagagactgagtcaagttgttccttaagtcagaacagcagactcagctctgacattctgattcgaatgacactgttcaggaatcggaatcctgtcgattagactggacagcttgtggcaagtgaatttgcctgtaacaagccagattttttaaaatttatattgtaaatattgtgtgtgtgtgtgtgtgtgtatatatatatatatgtacagttatctaagttaatttaaagttgtttgtgcctttttatttttgtttttaatgctttgatatttcaatgttagcctcaatttctgaacaccataggtagaatgtaaagcttgtctgatcgttcaaagcatgaaatggatacttatatggaaattctgctcagatagaatgacagtccgtcaaaacagattgtttgcaaaggggaggcatcagtgtccttggcaggctgatttctaggtaggaaatgtggtagcctcacttttaatgaacaaatggcctttattaaaaactgagtgactctatatagctgatcagttttttcacctggaagcatttgtttctactttgatatgactgtttttcggacagtttatttgttgagagtgtgaccaaaagttacatgtttgcacctttctagttgaaaataaagtgtatattttttctataaagggcttggttattcatttatccttctaaacatttctgagttttcttgagcataaataggaagttcttattaatcataagataattcaccaataattttctaaatatctttaattattctatacattaataaattgattattccatagaatttttatgtaaacatacttcacactgaatcaagtatcacagacttgcaggcatacacaccacattgactatacagccattttttttgttatcttcacagaactttatagacactttaaattcaattctctctagattacttcagtctccattaaccctgttgtattacacttggtccttttggcatttgtacctctctggccgttataggttagtttccaacccttcacatcacaaactagtctatgtgccttgcacgtggaaaatgtttacattttttaaaaattttatgctctaggtctgtttctgaacttcattaccttactgttaaatctgaaaattatgaaatgaaatcctcatttaaatgg

SEQ ID NO: 5890 - protein, 74 aa, Homo sapiens [sequence omitted]

SEQ ID NO: 5891 - DNA, 2182 bp, Homo sapiens
ggaaatgctgcgaggagtgggtgtgtgacgagcccaaggaccaaaccgtggttgggcctgccctcgcggcttaccgactggaagacacgtttggcccagacccaactatgattagagccaactgcctggtccagaccacagagtggagcgcctgttccaagacctgtgggatgggcatctccacccgggttaccaatgacaacgcctcctgcaggctagagaagcagagccgcctgtgcatggtcaggccttgcgaagctgacctggaagagaacattaagaagggcaaaaagtgcatccgtactcccaaaatctccaagcctatcaagtttgagctttctggctgcaccagcatgaagacataccgagctaaattctgtggagtatgtaccgacggccgatgctgcaccccccacagaaccaccaccctgccggtggagttcaagtgccctgacggcgaggtcatgaagaagaacatgatgttcatcaagacctgtgcctgccattacaactgtcccggagacaatgacatctttgaatcgctgtactacaggaagatgtacggagacatggcatgaagccagagagtgagagacattaactcattagactggaacttgaactgattcacatctcatttttccgtaaaaatgatttcagtagcacaagttatttaaatctgtttttctaactgggggaaaagattcccacccaattcaaaacattgtgccatgtcaaacaaatagtctatcaaccccagacactggtttgaagaatgttaagacttgacagtggaactacattagtacacagcaccagaatgtatattaaggtgtggctttaggagcagtgggagggtaccagcagaaaggttagtatcatcagatagcatcttatacgagtaatatgcctgctatttgaagtgtaattgagaaggaaaattttagcgtgctcactgacctgcctgtagccccagtgacagctaggatgtgcattctccagccatcaagagactgagtcaagttgttccttaagtcagaacagcagactcagctctgacattctgattcgaatgacactgttcaggaatcggaatcctgtcgattagactggacagcttgtggcaagtgaatttgcctgtaacaagccagattttttaaaatttatattgtaaatattgtgtgtgtgtgtgtgtgtgtatatatatatatatgtacagttatctaagttaatttaaagttgtttgtgcctttttatttttgtttttaatgctttgatatttcaatgttagcctcaatttctgaacaccataggtagaatgtaaagcttgtctgatcgttcaaagcatgaaatggatacttatatggaaattctgctcagatagaatgacagtccgtcaaaacagattgtttgcaaaggggaggcatcagtgtccttggcaggctgatttctaggtaggaaatgtggtagcctcacttttaatgaacaaatggcctttattaaaaactgagtgactctatatagctgatcagttttttcacctggaagcatttgtttctactttgatatgactgtttttcggacagtttatttgttgagagtgtgaccaaaagttacatgtttgcacctttctagttgaaaataaagtgtatattttttctataaagggcttggttattcatttatccttctaaacatttctgagttttcttgagcataaataggaagttcttattaatcataagataattcaccaataattttctaaatatctttaattattctatacattaataaattgattattccatagaatttttatgtaaacatacttcacactgaatcaagtatcacagacttgcaggcatacacaccacattgactatacagccattttttttgttatcttcacagaactttatagacactttaaattcaattctctctagattacttcagtctccattaaccctgttgtattacacttggtccttttggcatttgtacctctctggccgttataggttagtttccaacccttcacatcacaaactagtctatgtgccttgcacgtggaaaatgtttacattttttaaaaattttatgctctaggtctgtttctgaacttcattaccttactgttaaatctgaaaattatgaaatgaaatcctcatttaaatgg

SEQ ID NO: 5892 - protein, 156 aa, Homo sapiens [sequence omitted]

SEQ ID NO: 5893 - DNA, 2724 bp, Homo sapiens
ccgcacaagggcctattctgtcacttcggctccccggccaaccgcaagatcggcgtgtgcaccgccaaagatggtgctccctgcatcttcggtggtacggtgtaccgcagcggagagtccttccagagcagctgcaagtaccagtgcacgtgcctggacggggcggtgggctgcatgcccctgtgcagcatggacgttcgtctgcccagccctgactgcccagcttaccgactggaagacacgtttggcccagacccaactatgattagagccaactgcctggtccagaccacagagtggagcgcctgttccaagacctgtgggatgggcatctccacccgggttaccaatgacaacgcctcctgcaggctagagaagcagagccgcctgtgcatggtcaggccttgcgaagctgacctggaagagaacattaaggtacatgttctgctcctattaactatttttcacaggaaaaacagtggataggacccaacttagggctcttgccacgcttgttagtataagcccgttatctccaaaactatctaaccattgagctgttttgctggaatgagagcttgtgtaatagcaaccaccagttttccactacgaaatcttccacagggttagttaattcaagacattccaagagaggctctggctatttttggacatagcaaatgagactcaaacttcctcccctcaaaatataaacagaagtcagacaacagaagactaaaacacagagggttgaagaaagccactcctcttgtagagtcgctgatttttttttttcctctctcttttcccttgtcttccttagaagggcaaaaagtgcatccgtactcccaaaatctccaagcctatcaagtttgagctttctggctgcaccagcatgaagacataccgagctaaattctgtggagtatgtaccgacggccgatgctgcaccccccacagaaccaccaccctgccggtggagttcaagtgccctgacggcgaggtcatgaagaagaacatgatgttcatcaagacctgtgcctgccattacaactgtcccggagacaatgacatctttgaatcgctgtactacaggaagatgtacggagacatggcatgaagccagagagtgagagacattaactcattagactggaacttgaactgattcacatctcatttttccgtaaaaatgatttcagtagcacaagttatttaaatctgtttttctaactgggggaaaagattcccacccaattcaaaacattgtgccatgtcaaacaaatagtctatcaaccccagacactggtttgaagaatgttaagacttgacagtggaactacattagtacacagcaccagaatgtatattaaggtgtggctttaggagcagtgggagggtaccagcagaaaggttagtatcatcagatagcatcttatacgagtaatatgcctgctatttgaagtgtaattgagaaggaaaattttagcgtgctcactgacctgcctgtagccccagtgacagctaggatgtgcattctccagccatcaagagactgagtcaagttgttccttaagtcagaacagcagactcagctctgacattctgattcgaatgacactgttcaggaatcggaatcctgtcgattagactggacagcttgtggcaagtgaatttgcctgtaacaagccagattttttaaaatttatattgtaaatattgtgtgtgtgtgtgtgtgtgtatatatatatatatgtacagttatctaagttaatttaaagttgtttgtgcctttttatttttgtttttaatgctttgatatttcaatgttagcctcaatttctgaacaccataggtagaatgtaaagcttgtctgatcgttcaaagcatgaaatggatacttatatggaaattctgctcagatagaatgacagtccgtcaaaacagattgtttgcaaaggggaggcatcagtgtccttggcaggctgatttctaggtaggaaatgtggtagcctcacttttaatgaacaaatggcctttattaaaaactgagtgactctatatagctgatcagttttttcacctggaagcatttgtttctactttgatatgactgtttttcggacagtttatttgttgagagtgtgaccaaaagttacatgtttgcacctttctagttgaaaataaagtgtatattttttctataaagggcttggttattcatttatccttctaaacatttctgagttttcttgagcataaataggaagttcttattaatcataagataattcaccaataattttctaaatatctttaattattctatacattaataaattgattattccatagaatttttatgtaaacatacttcacactgaatcaagtatcacagacttgcaggcatacacaccacattgactatacagccattttttttgttatcttcacagaactttatagacactttaaattcaattctctctagattacttcagtctccattaaccctgttgtattacacttggtccttttggcatttgtacctctctggccgttataggttagtttccaacccttcacatcacaaactagtctatgtgccttgcacgtggaaaatgtttacattttttaaaaattttatgctctaggtctgtttctgaacttcattaccttactgttaaatctgaaaattatgaaatgaaatcctcatttaaatgg

SEQ ID NO: 5894 - protein, 103 aa, Homo sapiens
MPLCSMDVRLPSPDCPAYRLEDTFGPDPTMIRANCLVQTTEWSACSKTCGMGISTRVTNDNASCRLEKQSRLCMVRPCEADLEENIKVHVLLLLTIFHRKNSG

SEQ ID NO: 5895 - DNA, 2478 bp, Homo sapiens
ctgcgccaagcagctgggcgagctgtgcaccgagcgcgacccatgcgacccgcacaagggcctattctgtcacttcggctccccggccaaccgcaagatcggcgtgtgcaccgccaaagatggtgctccctgcatcttcggtggtacggtgtaccgcagcggagagtccttccagagcagctgcaagtaccagtgcacgtgcctggacggggcggtgggctgcatgcccctgtgcagcatggacgttcgtctgcccagccctgactgccccttcccgaggagggtcaagctgcccgggaaatgctgcgaggagtgggtgtgtgacgagcccaaggaccaaaccgtggttgggcctgccctcgcggcttaccgactggaagacacgtttggcccagacccaactatgattagagccaactgcctggtccagaccacagagtggagcgcctgttccaagacctgtgggatgggcatctccacccgggttaccaatgacaacgcctcctgcaggctagagaagcagagccgcctgtgcatggtcaggccttgcgaagctgacctggaagagaacattaagaagggcaaaaagtgcatccgtactcccaaaatctccaagcctatcaagtttgagctttctggctgcaccagcatgaagacataccgagctaaattctgtggagtatgtaccgacggccgatgctgcaccccccacagaaccaccaccctgccggtggagttcaagtgccctgacggcgaggtcatgaagaagaacatgatgttcatcaagacctgtgcctgccattacaactgtcccggagacaatgacatctttgaatcgctgtactacaggaagatgtacggagacatggcatgaagccagagagtgagagacattaactcattagactggaacttgaactgattcacatctcatttttccgtaaaaatgatttcagtagcacaagttatttaaatctgtttttctaactgggggaaaagattcccacccaattcaaaacattgtgccatgtcaaacaaatagtctatcaaccccagacactggtttgaagaatgttaagacttgacagtggaactacattagtacacagcaccagaatgtatattaaggtgtggctttaggagcagtgggagggtaccagcagaaaggttagtatcatcagatagcatcttatacgagtaatatgcctgctatttgaagtgtaattgagaaggaaaattttagcgtgctcactgacctgcctgtagccccagtgacagctaggatgtgcattctccagccatcaagagactgagtcaagttgttccttaagtcagaacagcagactcagctctgacattctgattcgaatgacactgttcaggaatcggaatcctgtcgattagactggacagcttgtggcaagtgaatttgcctgtaacaagccagattttttaaaatttatattgtaaatattgtgtgtgtgtgtgtgtgtgtatatatatatatatgtacagttatctaagttaatttaaagttgtttgtgcctttttatttttgtttttaatgctttgatatttcaatgttagcctcaatttctgaacaccataggtagaatgtaaagcttgtctgatcgttcaaagcatgaaatggatacttatatggaaattctgctcagatagaatgacagtccgtcaaaacagattgtttgcaaaggggaggcatcagtgtccttggcaggctgatttctaggtaggaaatgtggtagcctcacttttaatgaacaaatggcctttattaaaaactgagtgactctatatagctgatcagttttttcacctggaagcatttgtttctactttgatatgactgtttttcggacagtttatttgttgagagtgtgaccaaaagttacatgtttgcacctttctagttgaaaataaagtgtatattttttctataaagggcttggttattcatttatccttctaaacatttctgagttttcttgagcataaataggaagttcttattaatcataagataattcaccaataattttctaaatatctttaattattctatacattaataaattgattattccatagaatttttatgtaaacatacttcacactgaatcaagtatcacagacttgcaggcatacacaccacattgactatacagccattttttttgttatcttcacagaactttatagacactttaaattcaattctctctagattacttcagtctccattaaccctgttgtattacacttggtccttttggcatttgtacctctctggccgttataggttagtttccaacccttcacatcacaaactagtctatgtgccttgcacgtggaaaatgtttacattttttaaaaattttatgctctaggtctgtttctgaacttcattaccttactgttaaatctgaaaattatgaaatgaaatcctcatttaaatgg

SEQ ID NO: 5896 - protein, 216 aa, Homo sapiens [sequence omitted]

SEQ ID NO: 5897 - DNA, 3329 bp, Homo sapiens
acacaacaactcttccccgctgagaggagacagccagtgcgactccaccctccagctcgacggcgggcgtgagcctcgtgctggacggctgcggctgctgccgcgtctgcgccaagcagctgggcgagctgtgcaccgagcgcgacccatgcgacccgcacaagggcctattctgtcacttcggctccccggccaaccgcaagatcggcgtgtgcaccggtaagacccgcagcccccaccgctaggtgtccggccgcctcctccctcacgcccacccgcccgctggaaaaagaaaccgctcggactgagtttctttctccagctgctgccagcccgccccctgcagcccagatcccaactcgcatccctgacgctctggatgtgagagtgccccaatgcctgacctctgcatcccccacccctctcttcccttcctcttctccagccaaagatggtgctccctgcatcttcggtggtacggtgtaccgcagcggagagtccttccagagcagctgcaagtaccagtgcacgtgcctggacggggcggtgggctgcatgcccctgtgcagcatggacgttcgtctgcccagccctgactgccccttcccgaggagggtcaagctgcccgggaaatgctgcgaggagtgggtgtgtgacgagcccaaggaccaaaccgtggttgggcctgccctcgcgggtgagtcgagtcttcctctaagtcagggtcgtgattctctcccagggagggagtcctaactgtgccgaccgaacgggggaaataccttatccaggcgttttacatggtgtttgtgtgctctgctctcgcagcttaccgactggaagacacgtttggcccagacccaactatgattagagccaactgcctggtccagaccacagagtggagcgcctgttccaagacctgtgggatgggcatctccacccgggttaccaatgacaacgcctcctgcaggctagagaagcagagccgcctgtgcatggtcaggccttgcgaagctgacctggaagagaacattaaggtacatgttctgctcctattaactatttttcacaggaaaaacagtggataggacccaacttagggctcttgccacgcttgttagtataagcccgttatctccaaaactatctaaccattgagctgttttgctggaatgagagcttgtgtaatagcaaccaccagttttccactacgaaatcttccacagggttagttaattcaagacattccaagagaggctctggctatttttggacatagcaaatgagactcaaacttcctcccctcaaaatataaacagaagtcagacaacagaagactaaaacacagagggttgaagaaagccactcctcttgtagagtcgctgatttttttttttcctctctcttttcccttgtcttccttagaagggcaaaaagtgcatccgtactcccaaaatctccaagcctatcaagtttgagctttctggctgcaccagcatgaagacataccgagctaaattctgtggagtatgtaccgacggccgatgctgcaccccccacagaaccaccaccctgccggtggagttcaagtgccctgacggcgaggtcatgaagaagaacatgatgttcatcaagacctgtgcctgccattacaactgtcccggagacaatgacatctttgaatcgctgtactacaggaagatgtacggagacatggcatgaagccagagagtgagagacattaactcattagactggaacttgaactgattcacatctcatttttccgtaaaaatgatttcagtagcacaagttatttaaatctgtttttctaactgggggaaaagattcccacccaattcaaaacattgtgccatgtcaaacaaatagtctatcaaccccagacactggtttgaagaatgttaagacttgacagtggaactacattagtacacagcaccagaatgtatattaaggtgtggctttaggagcagtgggagggtaccagcagaaaggttagtatcatcagatagcatcttatacgagtaatatgcctgctatttgaagtgtaattgagaaggaaaattttagcgtgctcactgacctgcctgtagccccagtgacagctaggatgtgcattctccagccatcaagagactgagtcaagttgttccttaagtcagaacagcagactcagctctgacattctgattcgaatgacactgttcaggaatcggaatcctgtcgattagactggacagcttgtggcaagtgaatttgcctgtaacaagccagattttttaaaatttatattgtaaatattgtgtgtgtgtgtgtgtgtgtatatatatatatatgtacagttatctaagttaatttaaagttgtttgtgcctttttatttttgtttttaatgctttgatatttcaatgttagcctcaatttctgaacaccataggtagaatgtaaagcttgtctgatcgttcaaagcatgaaatggatacttatatggaaattctgctcagatagaatgacagtccgtcaaaacagattgtttgcaaaggggaggcatcagtgtccttggcaggctgatttctaggtaggaaatgtggtagcctcacttttaatgaacaaatggcctttattaaaaactgagtgactctatatagctgatcagttttttcacctggaagcatttgtttctactttgatatgactgtttttcggacagtttatttgttgagagtgtgaccaaaagttacatgtttgcacctttctagttgaaaataaagtgtatattttttctataaagggcttggttattcatttatccttctaaacatttctgagttttcttgagcataaataggaagttcttattaatcataagataattcaccaataattttctaaatatctttaattattctatacattaataaattgattattccatagaatttttatgtaaacatacttcacactgaatcaagtatcacagacttgcaggcatacacaccacattgactatacagccattttttttgttatcttcacagaactttatagacactttaaattcaattctctctagattacttcagtctccattaaccctgttgtattacacttggtccttttggcatttgtacctctctggccgttataggttagtttccaacccttcacatcacaaactagtctatgtgccttgcacgtggaaaatgtttacattttttaaaaattttatgctctaggtctgtttctgaacttcattaccttactgttaaatctgaaaattatgaaatgaaatcctcatttaaatgg

SEQ ID NO: 5898 - protein, 96 aa, Homo sapiens
MVFVCSALAAYRLEDTFGPDPTMIRANCLVQTTEWSACSKTCGMGISTRVTNDNASCRLEKQSRLCMVRPCEADLEENIKVHVLLLLTIFHRKNSG

SEQ ID NO: 5899 - DNA, 3227 bp, Homo sapiens
acacaacaactcttccccgctgagaggagacagccagtcgcgacccatgcgacccgcacaagggcctattctgtcacttcggctccccggccaaccgcaagatcggcgtgtgcaccggtaagacccgcagcccccaccgctaggtgtccggccgcctcctccctcacgcccacccgcccgctggaaaaagaaaccgctcggactgagtttctttctccagctgctgccagcccgccccctgcagcccagatcccaactcgcatccctgacgctctggatgtgagagtgccccaatgcctgacctctgcatcccccacccctctcttcccttcctcttctccagccaaagatggtgctccctgcatcttcggtggtacggtgtaccgcagcggagagtccttccagagcagctgcaagtaccagtgcacgtgcctggacggggcggtgggctgcatgcccctgtgcagcatggacgttcgtctgcccagccctgactgccccttcccgaggagggtcaagctgcccgggaaatgctgcgaggagtgggtgtgtgacgagcccaaggaccaaaccgtggttgggcctgccctcgcgggtgagtcgagtcttcctctaagtcagggtcgtgattctctcccagggagggagtcctaactgtgccgaccgaacgggggaaataccttatccaggcgttttacatggtgtttgtgtgctctgctctcgcagcttaccgactggaagacacgtttggcccagacccaactatgattagagccaactgcctggtccagaccacagagtggagcgcctgttccaagacctgtgggatgggcatctccacccgggttaccaatgacaacgcctcctgcaggctagagaagcagagccgcctgtgcatggtcaggccttgcgaagctgacctggaagagaacattaaggtacatgttctgctcctattaactatttttcacaggaaaaacagtggataggacccaacttagggctcttgccacgcttgttagtataagcccgttatctccaaaactatctaaccattgagctgttttgctggaatgagagcttgtgtaatagcaaccaccagttttccactacgaaatcttccacagggttagttaattcaagacattccaagagaggctctggctatttttggacatagcaaatgagactcaaacttcctcccctcaaaatataaacagaagtcagacaacagaagactaaaacacagagggttgaagaaagccactcctcttgtagagtcgctgatttttttttttcctctctcttttcccttgtcttccttagaagggcaaaaagtgcatccgtactcccaaaatctccaagcctatcaagtttgagctttctggctgcaccagcatgaagacataccgagctaaattctgtggagtatgtaccgacggccgatgctgcaccccccacagaaccaccaccctgccggtggagttcaagtgccctgacggcgaggtcatgaagaagaacatgatgttcatcaagacctgtgcctgccattacaactgtcccggagacaatgacatctttgaatcgctgtactacaggaagatgtacggagacatggcatgaagccagagagtgagagacattaactcattagactggaacttgaactgattcacatctcatttttccgtaaaaatgatttcagtagcacaagttatttaaatctgtttttctaactgggggaaaagattcccacccaattcaaaacattgtgccatgtcaaacaaatagtctatcaaccccagacactggtttgaagaatgttaagacttgacagtggaactacattagtacacagcaccagaatgtatattaaggtgtggctttaggagcagtgggagggtaccagcagaaaggttagtatcatcagatagcatcttatacgagtaatatgcctgctatttgaagtgtaattgagaaggaaaattttagcgtgctcactgacctgcctgtagccccagtgacagctaggatgtgcattctccagccatcaagagactgagtcaagttgttccttaagtcagaacagcagactcagctctgacattctgattcgaatgacactgttcaggaatcggaatcctgtcgattagactggacagcttgtggcaagtgaatttgcctgtaacaagccagattttttaaaatttatattgtaaatattgtgtgtgtgtgtgtgtgtgtatatatatatatatgtacagttatctaagttaatttaaagttgtttgtgcctttttatttttgtttttaatgctttgatatttcaatgttagcctcaatttctgaacaccataggtagaatgtaaagcttgtctgatcgttcaaagcatgaaatggatacttatatggaaattctgctcagatagaatgacagtccgtcaaaacagattgtttgcaaaggggaggcatcagtgtccttggcaggctgatttctaggtaggaaatgtggtagcctcacttttaatgaacaaatggcctttattaaaaactgagtgactctatatagctgatcagttttttcacctggaagcatttgtttctactttgatatgactgtttttcggacagtttatttgttgagagtgtgaccaaaagttacatgtttgcacctttctagttgaaaataaagtgtatattttttctataaagggcttggttattcatttatccttctaaacatttctgagttttcttgagcataaataggaagttcttattaatcataagataattcaccaataattttctaaatatctttaattattctatacattaataaattgattattccatagaatttttatgtaaacatacttcacactgaatcaagtatcacagacttgcaggcatacacaccacattgactatacagccattttttttgttatcttcacagaactttatagacactttaaattcaattctctctagattacttcagtctccattaaccctgttgtattacacttggtccttttggcatttgtacctctctggccgttataggttagtttccaacccttcacatcacaaactagtctatgtgccttgcacgtggaaaatgtttacattttttaaaaattttatgctctaggtctgtttctgaacttcattaccttactgttaaatctgaaaattatgaaatgaaatcctcatttaaatgg

SEQ ID NO: 5900 - protein, 96 aa, Homo sapiens; identical to SEQ ID NO: 5898

SEQ ID NO: 5901 - DNA, 2623 bp, Homo sapiens
cacacaacaactcttccccgctgagaggagacagccagtgcgactccaccctccagctcgacggcagccgccccggccgacagccccgagacgacagcccggcgagtgccaaccatgaccgccgccagtatgggccccgtccgcgtcgcgccaagcagctgggcgagctgtgcaccgagcgcgacccatgcgacccgcacaagggcctattctgtcacttcggctccccggccaaccgcaagatcggcgtgtgcaccgccaaagatggtgctccctgcatcttcggtggtacggtgtaccgcagcggagagtccttccagagcagctgcaagtaccagtgcacgtgcctggacggggcggtgggctgcatgcccctgtgcagcatggacgttcgtctgcccagccctgactgccccttcccgaggagggtcaagctgcccgggaaatgctgcgaggagtgggtgtgtgacgagcccaaggaccaaaccgtggttgggcctgccctcgcggcttaccgactggaagacacgtttggcccagacccaactatgattagagccaactgcctggtccagaccacagagtggagcgcctgttccaagacctgtgggatgggcatctccacccgggttaccaatgacaacgcctcctgcaggctagagaagcagagccgcctgtgcatggtcaggccttgcgaagctgacctggaagagaacattaagaagggcaaaaagtgcatccgtactcccaaaatctccaagcctatcaagtttgagctttctggctgcaccagcatgaagacataccgagctaaattctgtggagtatgtaccgacggccgatgctgcaccccccacagaaccaccaccctgccggtggagttcaagtgccctgacggcgaggtcatgaagaagaacatgatgttcatcaagacctgtgcctgccattacaactgtcccggagacaatgacatctttgaatcgctgtactacaggaagatgtacggagacatggcatgaagccagagagtgagagacattaactcattagactggaacttgaactgattcacatctcatttttccgtaaaaatgatttcagtagcacaagttatttaaatctgtttttctaactgggggaaaagattcccacccaattcaaaacattgtgccatgtcaaacaaatagtctatcaaccccagacactggtttgaagaatgttaagacttgacagtggaactacattagtacacagcaccagaatgtatattaaggtgtggctttaggagcagtgggagggtaccagcagaaaggttagtatcatcagatagcatcttatacgagtaatatgcctgctatttgaagtgtaattgagaaggaaaattttagcgtgctcactgacctgcctgtagccccagtgacagctaggatgtgcattctccagccatcaagagactgagtcaagttgttccttaagtcagaacagcagactcagctctgacattctgattcgaatgacactgttcaggaatcggaatcctgtcgattagactggacagcttgtggcaagtgaatttgcctgtaacaagccagattttttaaaatttatattgtaaatattgtgtgtgtgtgtgtgtgtgtatatatatatatatgtacagttatctaagttaatttaaagttgtttgtgcctttttatttttgtttttaatgctttgatatttcaatgttagcctcaatttctgaacaccataggtagaatgtaaagcttgtctgatcgttcaaagcatgaaatggatacttatatggaaattctgctcagatagaatgacagtccgtcaaaacagattgtttgcaaaggggaggcatcagtgtccttggcaggctgatttctaggtaggaaatgtggtagcctcacttttaatgaacaaatggcctttattaaaaactgagtgactctatatagctgatcagttttttcacctggaagcatttgtttctactttgatatgactgtttttcggacagtttatttgttgagagtgtgaccaaaagttacatgtttgcacctttctagttgaaaataaagtgtatattttttctataaagggcttggttattcatttatccttctaaacatttctgagttttcttgagcataaataggaagttcttattaatcataagataattcaccaataattttctaaatatctttaattattctatacattaataaattgattattccatagaatttttatgtaaacatacttcacactgaatcaagtatcacagacttgcaggcatacacaccacattgactatacagccattttttttgttatcttcacagaactttatagacactttaaattcaattctctctagattacttcagtctccattaaccctgttgtattacacttggtccttttggcatttgtacctctctggccgttataggttagtttccaacccttcacatcacaaactagtctatgtgccttgcacgtggaaaatgtttacattttttaaaaattttatgctctaggtctgtttctgaacttcattaccttactgttaaatctgaaaattatgaaatgaaatcctcatttaaatgg

SEQ ID NO: 5902 - protein, 216 aa, Homo sapiens [sequence omitted]

SEQ ID NO: 5903 - DNA, 2419 bp, Homo sapiens
cacacaacaactcttccccgctgagaggagacagccagtgcgactccaccctccagctcgacggcagccgccccggccgacagccccgagacgacagcccggcgcgtcccggtccccacctccgaccaccgccagcgctccaggccccgccgctccccgctcgccgccaccgcgccctccgctccgcccgcagtgccaaccatgactgccccttcccgaggagggtcaagctgcccgggaaatgctgcgaggagtgggtgtgtgacgagcccaaggaccaaaccgtggttgggcctgccctcgcggcttaccgactggaagacacgtttggcccagacccaactatgattagagccaactgcctggtccagaccacagagtggagcgcctgttccaagacctgtgggatgggcatctccacccgggttaccaatgacaacgcctcctgcaggctagagaagcagagccgcctgtgcatggtcaggccttgcgaagctgacctggaagagaacattaagaagggcaaaaagtgcatccgtactcccaaaatctccaagcctatcaagtttgagctttctggctgcaccagcatgaagacataccgagctaaattctgtggagtatgtaccgacggccgatgctgcaccccccacagaaccaccaccctgccggtggagttcaagtgccctgacggcgaggtcatgaagaagaacatgatgttcatcaagacctgtgcctgccattacaactgtcccggagacaatgacatctttgaatcgctgtactacaggaagatgtacggagacatggcatgaagccagagagtgagagacattaactcattagactggaacttgaactgattcacatctcatttttccgtaaaaatgatttcagtagcacaagttatttaaatctgtttttctaactgggggaaaagattcccacccaattcaaaacattgtgccatgtcaaacaaatagtctatcaaccccagacactggtttgaagaatgttaagacttgacagtggaactacattagtacacagcaccagaatgtatattaaggtgtggctttaggagcagtgggagggtaccagcagaaaggttagtatcatcagatagcatcttatacgagtaatatgcctgctatttgaagtgtaattgagaaggaaaattttagcgtgctcactgacctgcctgtagccccagtgacagctaggatgtgcattctccagccatcaagagactgagtcaagttgttccttaagtcagaacagcagactcagctctgacattctgattcgaatgacactgttcaggaatcggaatcctgtcgattagactggacagcttgtggcaagtgaatttgcctgtaacaagccagattttttaaaatttatattgtaaatattgtgtgtgtgtgtgtgtgtgtatatatatatatatgtacagttatctaagttaatttaaagttgtttgtgcctttttatttttgtttttaatgctttgatatttcaatgttagcctcaatttctgaacaccataggtagaatgtaaagcttgtctgatcgttcaaagcatgaaatggatacttatatggaaattctgctcagatagaatgacagtccgtcaaaacagattgtttgcaaaggggaggcatcagtgtccttggcaggctgatttctaggtaggaaatgtggtagcctcacttttaatgaacaaatggcctttattaaaaactgagtgactctatatagctgatcagttttttcacctggaagcatttgtttctactttgatatgactgtttttcggacagtttatttgttgagagtgtgaccaaaagttacatgtttgcacctttctagttgaaaataaagtgtatattttttctataaagggcttggttattcatttatccttctaaacatttctgagttttcttgagcataaataggaagttcttattaatcataagataattcaccaataattttctaaatatctttaattattctatacattaataaattgattattccatagaatttttatgtaaacatacttcacactgaatcaagtatcacagacttgcaggcatacacaccacattgactatacagccattttttttgttatcttcacagaactttatagacactttaaattcaattctctctagattacttcagtctccattaaccctgttgtattacacttggtccttttggcatttgtacctctctggccgttataggttagtttccaacccttcacatcacaaactagtctatgtgccttgcacgtggaaaatgtttacattttttaaaaattttatgctctaggtctgtttctgaacttcattaccttactgttaaatctgaaaattatgaaatgaaatcctcatttaaatgg

SEQ ID NO: 5904 - protein, 156 aa, Homo sapiens [sequence omitted]

SEQ ID NO: 5905 - DNA, 2594 bp, Homo sapiens
cacacaacaactcttccccgctgagaggagacagccagtgcgactccaccctccagctcgacggcagccgccccggccgacagccccgagacgacagcccggcgctgctgccgcgtctgcgccaagcagctgggcgagctgtgcaccgagcgcgacccatgcgacccgcacaagggcctattctgtcacttcggctccccggccaaccgcaagatcggcgtgtgcaccgccaaagatggtgctccctgcatcttcggtggtacggtgtaccgcagcggagagtccttccagagcagctgcaagtaccagtgcacgtgcctggacggggcggtgggctgcatgcccctgtgcagcatggacgttcgtctgcccagccctgactgccccttcccgaggagggtcaagctgcccgggaaatgctgcgaggagtgggtgtgtgacgagcccaaggaccaaaccgtggttgggcctgccctcgcggcttaccgactggaagacacgtttggcccagacccaactatgattagagccaactgcctggtccagaccacagagtggagcgcctgttccaagacctgtgggatgggcatctccacccgggttaccaatgacaacgcctcctgcaggctagagaagcagagccgcctgtgcatggtcaggccttgcgaagctgacctggaagagaacattaagaagggcaaaaagtgcatccgtactcccaaaatctccaagcctatcaagtttgagctttctggctgcaccagcatgaagacataccgagctaaattctgtggagtatgtaccgacggccgatgctgcaccccccacagaaccaccaccctgccggtggagttcaagtgccctgacggcgaggtcatgaagaagaacatgatgttcatcaagacctgtgcctgccattacaactgtcccggagacaatgacatctttgaatcgctgtactacaggaagatgtacggagacatggcatgaagccagagagtgagagacattaactcattagactggaacttgaactgattcacatctcatttttccgtaaaaatgatttcagtagcacaagttatttaaatctgtttttctaactgggggaaaagattcccacccaattcaaaacattgtgccatgtcaaacaaatagtctatcaaccccagacactggtttgaagaatgttaagacttgacagtggaactacattagtacacagcaccagaatgtatattaaggtgtggctttaggagcagtgggagggtaccagcagaaaggttagtatcatcagatagcatcttatacgagtaatatgcctgctatttgaagtgtaattgagaaggaaaattttagcgtgctcactgacctgcctgtagccccagtgacagctaggatgtgcattctccagccatcaagagactgagtcaagttgttccttaagtcagaacagcagactcagctctgacattctgattcgaatgacactgttcaggaatcggaatcctgtcgattagactggacagcttgtggcaagtgaatttgcctgtaacaagccagattttttaaaatttatattgtaaatattgtgtgtgtgtgtgtgtgtgtatatatatatatatgtacagttatctaagttaatttaaagttgtttgtgcctttttatttttgtttttaatgctttgatatttcaatgttagcctcaatttctgaacaccataggtagaatgtaaagcttgtctgatcgttcaaagcatgaaatggatacttatatggaaattctgctcagatagaatgacagtccgtcaaaacagattgtttgcaaaggggaggcatcagtgtccttggcaggctgatttctaggtaggaaatgtggtagcctcacttttaatgaacaaatggcctttattaaaaactgagtgactctatatagctgatcagttttttcacctggaagcatttgtttctactttgatatgactgtttttcggacagtttatttgttgagagtgtgaccaaaagttacatgtttgcacctttctagttgaaaataaagtgtatattttttctataaagggcttggttattcatttatccttctaaacatttctgagttttcttgagcataaataggaagttcttattaatcataagataattcaccaataattttctaaatatctttaattattctatacattaataaattgattattccatagaatttttatgtaaacatacttcacactgaatcaagtatcacagacttgcaggcatacacaccacattgactatacagccattttttttgttatcttcacagaactttatagacactttaaattcaattctctctagattacttcagtctccattaaccctgttgtattacacttggtccttttggcatttgtacctctctggccgttataggttagtttccaacccttcacatcacaaactagtctatgtgccttgcacgtggaaaatgtttacattttttaaaaattttatgctctaggtctgtttctgaacttcattaccttactgttaaatctgaaaattatgaaatgaaatcctcatttaaatgg

SEQ ID NO: 5906 - protein, 216 aa, Homo sapiens [sequence omitted]

SEQ ID NO: 5907 - DNA, 3603 bp, Homo sapiens
actcacacaacaactcttccccgctgagaggagacagccagtgcgactccaccctccagctcgacggcagccgccccggccgacagccccgagacgacagcccggcgcgtcccggtccccacctccgaccaccgccagcgctccaggccccgccgctccccgctcgccgccaccgcgccctccgctccgcccgcagtgccaaccatgaccgccgccagtatgggccccgtccgcgtcgccttcgtggtcctcctcgccctctgcagccggccggccgtcggccagaactgcagcgggccgtgccggtgcccggacgagccggcgccgcgctgcccggcgggcgtgagcctcgtgctggacggctgcggctgctgccgcgtctgcgccaagcagctgggcgagctgtgcaccgagcgcgacccatgcgacccgcacaagggcctattctgtcacttcggctccccggccaaccgcaagatcggcgtgtgcaccggtaagacccgcagcccccaccgctaggtgtccggccgcctcctccctcacgcccacccgcccgctggaaaaagaaaccgctcggactgagtttctttctccagctgctgccagcccgccccctgcagcccagatcccaactcgcatccctgacgctctggatgtgagagtgccccaatgcctgacctctgcatcccccacccctctcttcccttcctcttctccagccaaagatggtgctccctgcatcttcggtggtacggtgtaccgcagcggagagtccttccagagcagctgcaagtaccagtgcacgtgcctggacggggcggtgggctgcatgcccctgtgcagcatggacgttcgtctgcccagccctgactgccccttcccgaggagggtcaagctgcccgggaaatgctgcgaggagtgggtgtgtgacgagcccaaggaccaaaccgtggttgggcctgccctcgcgggtgagtcgagtcttcctctaagtcagggtcgtgattctctcccagggagggagtcctaactgtgccgaccgaacgggggaaataccttatccaggcgttttacatggtgtttgtgtgctctgctctcgcagcttaccgactggaagacacgtttggcccagacccaactatgattagagccaactgcctggtccagaccacagagtggagcgcctgttccaagacctgtgggatgggcatctccacccgggttaccaatgacaacgcctcctgcaggctagagaagcagagccgcctgtgcatggtcaggccttgcgaagctgacctggaagagaacattaaggtacatgttctgctcctattaactatttttcacaggaaaaacagtggataggacccaacttagggctcttgccacgcttgttagtataagcccgttatctccaaaactatctaaccattgagctgttttgctggaatgagagcttgtgtaatagcaaccaccagttttccactacgaaatcttccacagggttagttaattcaagacattccaagagaggctctggctatttttggacatagcaaatgagactcaaacttcctcccctcaaaatataaacagaagtcagacaacagaagactaaaacacagagggttgaagaaagccactcctcttgtagagtcgctgatttttttttttcctctctcttttcccttgtcttccttagaagggcaaaaagtgcatccgtactcccaaaatctccaagcctatcaagtttgagctttctggctgcaccagcatgaagacataccgagctaaattctgtggagtatgtaccgacggccgatgctgcaccccccacagaaccaccaccctgccggtggagttcaagtgccctgacggcgaggtcatgaagaagaacatgatgttcatcaagacctgtgcctgccattacaactgtcccggagacaatgacatctttgaatcgctgtactacaggaagatgtacggagacatggcatgaagccagagagtgagagacattaactcattagactggaacttgaactgattcacatctcatttttccgtaaaaatgatttcagtagcacaagttatttaaatctgtttttctaactgggggaaaagattcccacccaattcaaaacattgtgccatgtcaaacaaatagtctatcaaccccagacactggtttgaagaatgttaagacttgacagtggaactacattagtacacagcaccagaatgtatattaaggtgtggctttaggagcagtgggagggtaccagcagaaaggttagtatcatcagatagcatcttatacgagtaatatgcctgctatttgaagtgtaattgagaaggaaaattttagcgtgctcactgacctgcctgtagccccagtgacagctaggatgtgcattctccagccatcaagagactgagtcaagttgttccttaagtcagaacagcagactcagctctgacattctgattcgaatgacactgttcaggaatcggaatcctgtcgattagactggacagcttgtggcaagtgaatttgcctgtaacaagccagattttttaaaatttatattgtaaatattgtgtgtgtgtgtgtgtgtgtatatatatatatatgtacagttatctaagttaatttaaagttgtttgtgcctttttatttttgtttttaatgctttgatatttcaatgttagcctcaatttctgaacaccataggtagaatgtaaagcttgtctgatcgttcaaagcatgaaatggatacttatatggaaattctgctcagatagaatgacagtccgtcaaaacagattgtttgcaaaggggaggcatcagtgtccttggcaggctgatttctaggtaggaaatgtggtagcctcacttttaatgaacaaatggcctttattaaaaactgagtgactctatatagctgatcagttttttcacctggaagcatttgtttctactttgatatgactgtttttcggacagtttatttgttgagagtgtgaccaaaagttacatgtttgcacctttctagttgaaaataaagtgtatattttttctataaagggcttggttattcatttatccttctaaacatttctgagttttcttgagcataaataggaagttcttattaatcataagataattcaccaataattttctaaatatctttaattattctatacattaataaattgattattccatagaatttttatgtaaacatacttcacactgaatcaagtatcacagacttgcaggcatacacaccacattgactatacagccattttttttgttatcttcacagaactttatagacactttaaattcaattctctctagattacttcagtctccattaaccctgttgtattacacttggtccttttggcatttgtacctctctggccgttataggttagtttccaacccttcacatcacaaactagtctatgtgccttgcacgtggaaaatgtttacattttttaaaaattttatgctctaggtctgtttctgaacttcattaccttactgttaaatctgaaaattatgaaatgaaatcctcatttaaatgg

SEQ ID NO: 5908 - protein, 104 aa, Homo sapiens
MTAASMGPVRVAFVVLLALCSRPAVGQNCSGPCRCPDEPAPRCPAGVSLVLDGCGCCRVCAKQLGELCTERDPCDPHKGLFCHFGSPANRKIGVCTGKTRSPHR

SEQ ID NO: 5909 - DNA, 3491 bp, Homo sapiens
actcacacaacaactcttccccgctgagaggagacagccagtgcgactccaccctccagctcgacggcagccgccccggccgacagccccgagacgacagcccggcgcgtcccggtccccacctccgaccaccgccagcgctccaggccccgccgctccccgctcgccgccaccgcgccctccgctccgcccgcagtgccaaccatgaccgccgccagtatgggccccgtccgcgtcgccttcgtggtcctcctcgccctctgcagccgggtaagcgccgggagcccccgctgcggccggcggctgccagggagggactcggggccggccggggagggcgtgcgcgccgaccgagcgccgctgaccgccctgtcctccctgcagccggccgtcggccagaactgcagcgggccgtgccggtgcccggacgagccggcgccgcgctgcccggcgggcgtgagcctcgtgctggacggctgcggctgctgccgcgtctgcgccaagcagctgggcgagctgtgcaccgagcgcgacccatgcgacccgcacaagggcctattctgtcacttcggctccccggccaaccgcaagatcggcgtgtgcaccgccaaagatggtgctccctgcatcttcggtggtacggtgtaccgcagcggagagtccttccagagcagctgcaagtaccagtgcacgtgcctggacggggcggtgggctgcatgcccctgtgcagcatggacgttcgtctgcccagccctgactgccccttcccgaggagggtcaagctgcccgggaaatgctgcgaggagtgggtgtgtgacgagcccaaggaccaaaccgtggttgggcctgccctcgcgggtgagtcgagtcttcctctaagtcagggtcgtgattctctcccagggagggagtcctaactgtgccgaccgaacgggggaaataccttatccaggcgttttacatggtgtttgtgtgctctgctctcgcagcttaccgactggaagacacgtttggcccagacccaactatgattagagccaactgcctggtccagaccacagagtggagcgcctgttccaagacctgtgggatgggcatctccacccgggttaccaatgacaacgcctcctgcaggctagagaagcagagccgcctgtgcatggtcaggccttgcgaagctgacctggaagagaacattaaggtacatgttctgctcctattaactatttttcacaggaaaaacagtggataggacccaacttagggctcttgccacgcttgttagtataagcccgttatctccaaaactatctaaccattgagctgttttgctggaatgagagcttgtgtaatagcaaccaccagttttccactacgaaatcttccacagggttagttaattcaagacattccaagagaggctctggctatttttggacatagcaaatgagactcaaacttcctcccctcaaaatataaacagaagtcagacaacagaagactaaaacacagagggttgaagaaagccactcctcttgtagagtcgctgatttttttttttcctctctcttttcccttgtcttccttagaagggcaaaaagtgcatccgtactcccaaaatctccaagcctatcaagtttgagctttctggctgcaccagcatgaagacataccgagctaaattctgtggagtatgtaccgacggccgatgctgcaccccccacagaaccaccaccctgccggtggagttcaagtgccctgacggcgaggtcatgaagaagaacatgatgttcatcaagacctgtgcctgccattacaactgtcccggagacaatgacatctttgaatcgctgtactacaggaagatgtacggagacatggcatgaagccagagagtgagagacattaactcattagactggaacttgaactgattcacatctcatttttccgtaaaaatgatttcagtagcacaagttatttaaatctgtttttctaactgggggaaaagattcccacccaattcaaaacattgtgccatgtcaaacaaatagtctatcaaccccagacactggtttgaagaatgttaagacttgacagtggaactacattagtacacagcaccagaatgtatattaaggtgtggctttaggagcagtgggagggtaccagcagaaaggttagtatcatcagatagcatcttatacgagtaatatgcctgctatttgaagtgtaattgagaaggaaaattttagcgtgctcactgacctgcctgtagccccagtgacagctaggatgtgcattctccagccatcaagagactgagtcaagttgttccttaagtcagaacagcagactcagctctgacattctgattcgaatgacactgttcaggaatcggaatcctgtcgattagactggacagcttgtggcaagtgaatttgcctgtaacaagccagattttttaaaatttatattgtaaatattgtgtgtgtgtgtgtgtgtgtatatatatatatatgtacagttatctaagttaatttaaagttgtttgtgcctttttatttttgtttttaatgctttgatatttcaatgttagcctcaatttctgaacaccataggtagaatgtaaagcttgtctgatcgttcaaagcatgaaatggatacttatatggaaattctgctcagatagaatgacagtccgtcaaaacagattgtttgcaaaggggaggcatcagtgtccttggcaggctgatttctaggtaggaaatgtggtagcctcacttttaatgaacaaatggcctttattaaaaactgagtgactctatatagctgatcagttttttcacctggaagcatttgtttctactttgatatgactgtttttcggacagtttatttgttgagagtgtgaccaaaagttacatgtttgcacctttctagttgaaaataaagtgtatattttttctataaagggcttggttattcatttatccttctaaacatttctgagttttcttgagcataaataggaagttcttattaatcataagataattcaccaataattttctaaatatctttaattattctatacattaataaattgattattccatagaatttttatgtaaacatacttcacactgaatcaagtatcacagacttgcaggcatacacaccacattgactatacagccattttttttgttatcttcacagaactttatagacactttaaattcaattctctctagattacttcagtctccattaaccctgttgtattacacttggtccttttggcatttgtacctctctggccgttataggttagtttccaacccttcacatcacaaactagtctatgtgccttgcacgtggaaaatgtttacattttttaaaaattttatgctctaggtctgtttctgaacttcattaccttactgttaaatctgaaaattatgaaatgaaatcctcatttaaatgg

SEQ ID NO: 5910 - protein, 237 aa, Homo sapiens
MTAASMGPVRVAFVVLLALCSRVSAGSPRCGRRLPGRDSGPAGEGVRADRAPLTALSSLQPAVGQNCSGPCRCPDEPAPRCPAGVSLVLDGCGCCRVCAKQLGELCTERDPCDPHKGLFCHFGSPANRKIGVCTAKDGAPCIFGGTVYRSGESFQSSCKYQCTCLDGAVGCMPLCSMDVRLPSPDCPFPRRVKLPGKCCEEWVCDEPKDQTVVGPALAGESSLPLSQGRDSLPGRES

SEQ ID NO: 5911 - DNA, 3441 bp, Homo sapiens
attcagctcattggcgagccgcggccgcccggagcgtataaaagcctcgggccgcccgccccaaactcacacaacaactcttccccgctgagaggagacagccagtgcgactccaccctccagctcgacggcagccgccccggccgacagccccgagacgacagcccggcgcgtcccggtccccacctccgaccaccgccagcgctccaggccccgccgctccccgctcgccgccaccgcgccctccgctccgcccgcagtgccaaccatgaccgccgccagtatgggccccgtccgcgtcgccttcgtggtcctcctcgccctctgcagccggccggccgtcggccagaactgcagcgggccgtgccggtgcccggacgagccggcgccgcgctgcccggcgggcgtgagcctcgtgctggacggctgcggctgctgccgcgtctgcgccaagcagctgggcgagctgtgcaccgagcgcgacccatgcgacccgcacaagggcctattctgtcacttcggctccccggccaaccgcaagatcggcgtgtgcaccgccaaagatggtgctccctgcatcttcggtggtacggtgtaccgcagcggagagtccttccagagcagctgcaagtaccagtgcacgtgcctggacggggcggtgggctgcatgcccctgtgcagcatggacgttcgtctgcccagccctgactgccccttcccgaggagggtcaagctgcccgggaaatgctgcgaggagtgggtgtgtgacgagcccaaggaccaaaccgtggttgggcctgccctcgcgggtgagtcgagtcttcctctaagtcagggtcgtgattctctcccagggagggagtcctaactgtgccgaccgaacgggggaaataccttatccaggcgttttacatggtgtttgtgtgctctgctctcgcagcttaccgactggaagacacgtttggcccagacccaactatgattagagccaactgcctggtccagaccacagagtggagcgcctgttccaagacctgtgggatgggcatctccacccgggttaccaatgacaacgcctcctgcaggctagagaagcagagccgcctgtgcatggtcaggccttgcgaagctgacctggaagagaacattaaggtacatgttctgctcctattaactatttttcacaggaaaaacagtggataggacccaacttagggctcttgccacgcttgttagtataagcccgttatctccaaaactatctaaccattgagctgttttgctggaatgagagcttgtgtaatagcaaccaccagttttccactacgaaatcttccacagggttagttaattcaagacattccaagagaggctctggctatttttggacatagcaaatgagactcaaacttcctcccctcaaaatataaacagaagtcagacaacagaagactaaaacacagagggttgaagaaagccactcctcttgtagagtcgctgatttttttttttcctctctcttttcccttgtcttccttagaagggcaaaaagtgcatccgtactcccaaaatctccaagcctatcaagtttgagctttctggctgcaccagcatgaagacataccgagctaaattctgtggagtatgtaccgacggccgatgctgcaccccccacagaaccaccaccctgccggtggagttcaagtgccctgacggcgaggtcatgaagaagaacatgatgttcatcaagacctgtgcctgccattacaactgtcccggagacaatgacatctttgaatcgctgtactacaggaagatgtacggagacatggcatgaagccagagagtgagagacattaactcattagactggaacttgaactgattcacatctcatttttccgtaaaaatgatttcagtagcacaagttatttaaatctgtttttctaactgggggaaaagattcccacccaattcaaaacattgtgccatgtcaaacaaatagtctatcaaccccagacactggtttgaagaatgttaagacttgacagtggaactacattagtacacagcaccagaatgtatattaaggtgtggctttaggagcagtgggagggtaccagcagaaaggttagtatcatcagatagcatcttatacgagtaatatgcctgctatttgaagtgtaattgagaaggaaaattttagcgtgctcactgacctgcctgtagccccagtgacagctaggatgtgcattctccagccatcaagagactgagtcaagttgttccttaagtcagaacagcagactcagctctgacattctgattcgaatgacactgttcaggaatcggaatcctgtcgattagactggacagcttgtggcaagtgaatttgcctgtaacaagccagattttttaaaatttatattgtaaatattgtgtgtgtgtgtgtgtgtgtatatatatatatatgtacagttatctaagttaatttaaagttgtttgtgcctttttatttttgtttttaatgctttgatatttcaatgttagcctcaatttctgaacaccataggtagaatgtaaagcttgtctgatcgttcaaagcatgaaatggatacttatatggaaattctgctcagatagaatgacagtccgtcaaaacagattgtttgcaaaggggaggcatcagtgtccttggcaggctgatttctaggtaggaaatgtggtagcctcacttttaatgaacaaatggcctttattaaaaactgagtgactctatatagctgatcagttttttcacctggaagcatttgtttctactttgatatgactgtttttcggacagtttatttgttgagagtgtgaccaaaagttacatgtttgcacctttctagttgaaaataaagtgtatattttttctataaagggcttggttattcatttatccttctaaacatttctgagttttcttgagcataaataggaagttcttattaatcataagataattcaccaataattttctaaatatctttaattattctatacattaataaattgattattccatagaatttttatgtaaacatacttcacactgaatcaagtatcacagacttgcaggcatacacaccacattgactatacagccattttttttgttatcttcacagaactttatagacactttaaattcaattctctctagattacttcagtctccattaaccctgttgtattacacttggtccttttggcatttgtacctctctggccgttataggttagtttccaacccttcacatcacaaactagtctatgtgccttgcacgtggaaaatgtttacattttttaaaaattttatgctctaggtctgtttctgaacttcattaccttactgttaaatctgaaaattatgaaatgaaatcctcatttaaatgg

SEQ ID NO: 5912 - protein, 199 aa, Homo sapiens
MTAASMGPVRVAFVVLLALCSRPAVGQNCSGPCRCPDEPAPRCPAGVSLVLDGCGCCRVCAKQLGELCTERDPCDPHKGLFCHFGSPANRKIGVCTAKDGAPCIFGGTVYRSGESFQSSCKYQCTCLDGAVGCMPLCSMDVRLPSPDCPFPRRVKLPGKCCEEWVCDEPKDQTVVGPALAGESSLPLSQGRDSLPGRES

SEQ ID NO: 5913 - DNA, 2922 bp, Homo sapiens
attcagctcattggcgagccgcggccgcccggagcgtataaaagcctcgggccgcccgccccaaactcacacaacaactcttccccgctgagaggagacagccagtgcgactccaccctccagctcgacggcagccgccccggccgacagccccgagacgacagcccggcgcgtcccggtccccacctccgaccaccgccagcgctccaggccccgccgctccccgctcgccgccaccgcgccctccgctccgcccgcagtgccaaccatgaccgccgccagtatgggccccgtccgcgtcgccttcgtggtcctcctcgccctctgcagccggccggccgtcggccagaactgcagcgggccgtgccggtgcccggacgagccggcgccgcgctgcccggcgggcgtgagcctcgtgctggacggctgcggctgctgccgcgtctgcgccaagcagctgggcgagctgtgcaccgagcgcgacccatgcgacccgcacaagggcctattctgtcacttcggctccccggccaaccgcaagatcggcgtgtgcaccgccaaagatggtgctccctgcatcttcggtggtacggtgtaccgcagcggagagtccttccagagcagctgcaagtaccagtgcacgtgcctggacggggcggtgggctgcatgcccctgtgcagcatggacgttcgtctgcccagccctgactgccccttcccgaggagggtcaagctgcccgggaaatgctgcgaggagtgggtgtgtgacgagcccaaggaccaaaccgtggttgggcctgccctcgcggcttaccgactggaagacacgtttggcccagacccaactatgattagagccaactgcctggtccagaccacagagtggagcgcctgttccaagacctgtgggatgggcatctccacccgggttaccaatgacaacgcctcctgcaggctagagaagcagagccgcctgtgcatggtcaggccttgcgaagctgacctggaagagaacattaagaagggcaaaaagtgcatccgtactcccaaaatctccaagcctatcaagtttgagctttctggctgcaccagcatgaagacataccgagctaaattctgtggagtatgtaccgacggccgatgctgcaccccccacagaaccaccaccctgccggtggagttcaagtgccctgacggcgaggtcatgaagaagaacatgatgttcatcaagacctgtgcctgccattacaactgtcccggagacaatgacatctttgaatcgctgtactacaggaagatgtacggagacatggcatgaagccagagagtgagagacattaactcattagactggaacttgaactgattcacatctcatttttccgtaaaaatgatttcagtagcacaagttatttaaatctgtttttctaactgggggaaaagattcccacccaattcaaaacattgtgccatgtcaaacaaatagtctatcaaccccagacactggtttgaagaatgttaagacttgacagtggaactacattagtacacagcaccagaatgtatattaaggtgtggctttaggagcagtgggagggtaccagcagaaaggttagtatcatcagatagcatcttatacgagtaatatgcctgctatttgaagtgtaattgagaaggaaaattttagcgtgctcactgacctgcctgtagccccagtgacagctaggatgtgcattctccagccatcaagagactgagtcaagttgttccttaagtcagaacagcagactcagctctgacattctgattcgaatgacactgttcaggaatcggaatcctgtcgattagactggacagcttgtggcaagtgaatttgcctgtaacaagccagattttttaaaatttatattgtaaatattgtgtgtgtgtgtgtgtgtgtatatatatatatatgtacagttatctaagttaatttaaagttgtttgtgcctttttatttttgtttttaatgctttgatatttcaatgttagcctcaatttctgaacaccataggtagaatgtaaagcttgtctgatcgttcaaagcatgaaatggatacttatatggaaattctgctcagatagaatgacagtccgtcaaaacagattgtttgcaaaggggaggcatcagtgtccttggcaggctgatttctaggtaggaaatgtggtagcctcacttttaatgaacaaatggcctttattaaaaactgagtgactctatatagctgatcagttttttcacctggaagcatttgtttctactttgatatgactgtttttcggacagtttatttgttgagagtgtgaccaaaagttacatgtttgcacctttctagttgaaaataaagtgtatattttttctataaagggcttggttattcatttatccttctaaacatttctgagttttcttgagcataaataggaagttcttattaatcataagataattcaccaataattttctaaatatctttaattattctatacattaataaattgattattccatagaatttttatgtaaacatacttcacactgaatcaagtatcacagacttgcaggcatacacaccacattgactatacagccattttttttgttatcttcacagaactttatagacactttaaattcaattctctctagattacttcagtctccattaaccctgttgtattacacttggtccttttggcatttgtacctctctggccgttataggttagtttccaacccttcacatcacaaactagtctatgtgccttgcacgtggaaaatgtttacattttttaaaaattttatgctctaggtctgtttctgaacttcattaccttactgttaaatctgaaaattatgaaatgaaatcctcatttaaatgg

SEQ ID NO: 5914 - protein, 349 aa, Homo sapiens
MTAASMGPVRVAFVVLLALCSRPAVGQNCSGPCRCPDEPAPRCPAGVSLVLDGCGCCRVCAKQLGELCTERDPCDPHKGLFCHFGSPANRKIGVCTAKDGAPCIFGGTVYRSGESFQSSCKYQCTCLDGAVGCMPLCSMDVRLPSPDCPFPRRVKLPGKCCEEWVCDEPKDQTVVGPALAAYRLEDTFGPDPTMIRANCLVQTTEWSACSKTCGMGISTRVTNDNASCRLEKQSRLCMVRPCEADLEENIKKGKKCIRTPKISKPIKFELSGCTSMKTYRAKFCGVCTDGRCCTPHRTTTLPVEFKCPDGEVMKKNMMFIKTCACHYNCPGDNDIFESLYYRKMYGDMA

SEQ ID NO: 5915 - DNA, 1463 bp, Homo sapiens
gtacatgttctgctcctattaactatttttcacaggaaaaacagtggataggacccaacttagggctcttgccacgcttgttagtataagcccgttattcccaaaatctccaagcctatcaagtttgagctttctggctgcaccagcatgaagacataccgagctaaattctgtggagtatgtaccgacggccgatgctgcaccccccacagaaccaccaccctgccggtggagttcaagtgccctgacggcgaggtcatgaagaagaacatgatgttcatcaagacctgtgcctgccattacaactgtcccggagacaatgacatctttgaatcgctgtactacaggaagatgtacggagacatggcatgaagccagagagtgagagacattaactcattagactggaacttgaactgattcacatctcatttttccgtaaaaatgatttcagtagcacaagttatttaaatctgtttttctaactgggggaaaagattcccacccaattcaaaacattgtgccatgtcaaacaaatagtctatcaaccccagacactggtttgaagaatgttaagacttgacagtggaactacattagtacacagcaccagaatgtatattaaggtgtggctttaggagcagtgggagggtaccagcagaaaggttagtatcatcagatagcatcttatacgagtaatatgcctgctatttgaagtgtaattgagaaggaaaattttagcgtgctcactgacctgcctgtagccccagtgacagctaggatgtgcattctccagccatcaagagactgagtcaagttgttccttaagtcagaacagcagactcagctctgacattctgattcgaatgacactgttcaggaatcggaatcctgtcgattagactggacagcttgtggcaagtgaatttgcctgtaacaagccagattttttaaaatttatattgtaaatattgtgtgtgtgtgtgtgtgtgtatatatatatatatgtacagttatctaagttaatttaaagttgtttgtgcctttttatttttgtttttaatgctttgatatttcaatgttagcctcaatttctgaacaccataggtagaatgtaaagcttgtctgatcgttcaaagcatgaaatggatacttatatggaaattctgctcagatagaatgacagtccgtcaaaacagattgtttgcaaaggggaggcatcagtgtccttggcaggctgatttctaggtaggaaatgtggtagcctcacttttaatgaacaaatggcctttattaaaaactgagtgactctatatagctgatcagttttttcacctggaagcatttgtttctactttgatatgactgtttttcggacagtttatttgttgagagtgtgaccaaaagttacatgtttgcacctttctagttgaaaataaagtgtatattttttctataaaggg

SEQ ID NO: 5916 - protein, 74 aa, Homo sapiens [sequence omitted]

SEQ ID NO: 5917 - DNA, 1669 bp, Homo sapiens
ggaaatgctgcgaggagtgggtgtgtgacgagcccaaggaccaaaccgtggttgggcctgccctcgcggcttaccgactggaagacacgtttggcccagacccaactatgattagagccaactgcctggtccagaccacagagtggagcgcctgttccaagacctgtgggatgggcatctccacccgggttaccaatgacaacgcctcctgcaggctagagaagcagagccgcctgtgcatggtcaggccttgcgaagctgacctggaagagaacattaagaagggcaaaaagtgcatccgtactcccaaaatctccaagcctatcaagtttgagctttctggctgcaccagcatgaagacataccgagctaaattctgtggagtatgtaccgacggccgatgctgcaccccccacagaaccaccaccctgccggtggagttcaagtgccctgacggcgaggtcatgaagaagaacatgatgttcatcaagacctgtgcctgccattacaactgtcccggagacaatgacatctttgaatcgctgtactacaggaagatgtacggagacatggcatgaagccagagagtgagagacattaactcattagactggaacttgaactgattcacatctcatttttccgtaaaaatgatttcagtagcacaagttatttaaatctgtttttctaactgggggaaaagattcccacccaattcaaaacattgtgccatgtcaaacaaatagtctatcaaccccagacactggtttgaagaatgttaagacttgacagtggaactacattagtacacagcaccagaatgtatattaaggtgtggctttaggagcagtgggagggtaccagcagaaaggttagtatcatcagatagcatcttatacgagtaatatgcctgctatttgaagtgtaattgagaaggaaaattttagcgtgctcactgacctgcctgtagccccagtgacagctaggatgtgcattctccagccatcaagagactgagtcaagttgttccttaagtcagaacagcagactcagctctgacattctgattcgaatgacactgttcaggaatcggaatcctgtcgattagactggacagcttgtggcaagtgaatttgcctgtaacaagccagattttttaaaatttatattgtaaatattgtgtgtgtgtgtgtgtgtgtatatatatatatatgtacagttatctaagttaatttaaagttgtttgtgcctttttatttttgtttttaatgctttgatatttcaatgttagcctcaatttctgaacaccataggtagaatgtaaagcttgtctgatcgttcaaagcatgaaatggatacttatatggaaattctgctcagatagaatgacagtccgtcaaaacagattgtttgcaaaggggaggcatcagtgtccttggcaggctgatttctaggtaggaaatgtggtagcctcacttttaatgaacaaatggcctttattaaaaactgagtgactctatatagctgatcagttttttcacctggaagcatttgtttctactttgatatgactgtttttcggacagtttatttgttgagagtgtgaccaaaagttacatgtttgcacctttctagttgaaaataaagtgtatattttttctataaaggg

SEQ ID NO: 5918 - protein, 156 aa, Homo sapiens [sequence omitted]

SEQ ID NO: 5919 - DNA, 2211 bp, Homo sapiens
ccgcacaagggcctattctgtcacttcggctccccggccaaccgcaagatcggcgtgtgcaccgccaaagatggtgctccctgcatcttcggtggtacggtgtaccgcagcggagagtccttccagagcagctgcaagtaccagtgcacgtgcctggacggggcggtgggctgcatgcccctgtgcagcatggacgttcgtctgcccagccctgactgcccagcttaccgactggaagacacgtttggcccagacccaactatgattagagccaactgcctggtccagaccacagagtggagcgcctgttccaagacctgtgggatgggcatctccacccgggttaccaatgacaacgcctcctgcaggctagagaagcagagccgcctgtgcatggtcaggccttgcgaagctgacctggaagagaacattaaggtacatgttctgctcctattaactatttttcacaggaaaaacagtggataggacccaacttagggctcttgccacgcttgttagtataagcccgttatctccaaaactatctaaccattgagctgttttgctggaatgagagcttgtgtaatagcaaccaccagttttccactacgaaatcttccacagggttagttaattcaagacattccaagagaggctctggctatttttggacatagcaaatgagactcaaacttcctcccctcaaaatataaacagaagtcagacaacagaagactaaaacacagagggttgaagaaagccactcctcttgtagagtcgctgatttttttttttcctctctcttttcccttgtcttccttagaagggcaaaaagtgcatccgtactcccaaaatctccaagcctatcaagtttgagctttctggctgcaccagcatgaagacataccgagctaaattctgtggagtatgtaccgacggccgatgctgcaccccccacagaaccaccaccctgccggtggagttcaagtgccctgacggcgaggtcatgaagaagaacatgatgttcatcaagacctgtgcctgccattacaactgtcccggagacaatgacatctttgaatcgctgtactacaggaagatgtacggagacatggcatgaagccagagagtgagagacattaactcattagactggaacttgaactgattcacatctcatttttccgtaaaaatgatttcagtagcacaagttatttaaatctgtttttctaactgggggaaaagattcccacccaattcaaaacattgtgccatgtcaaacaaatagtctatcaaccccagacactggtttgaagaatgttaagacttgacagtggaactacattagtacacagcaccagaatgtatattaaggtgtggctttaggagcagtgggagggtaccagcagaaaggttagtatcatcagatagcatcttatacgagtaatatgcctgctatttgaagtgtaattgagaaggaaaattttagcgtgctcactgacctgcctgtagccccagtgacagctaggatgtgcattctccagccatcaagagactgagtcaagttgttccttaagtcagaacagcagactcagctctgacattctgattcgaatgacactgttcaggaatcggaatcctgtcgattagactggacagcttgtggcaagtgaatttgcctgtaacaagccagattttttaaaatttatattgtaaatattgtgtgtgtgtgtgtgtgtgtatatatatatatatgtacagttatctaagttaatttaaagttgtttgtgcctttttatttttgtttttaatgctttgatatttcaatgttagcctcaatttctgaacaccataggtagaatgtaaagcttgtctgatcgttcaaagcatgaaatggatacttatatggaaattctgctcagatagaatgacagtccgtcaaaacagattgtttgcaaaggggaggcatcagtgtccttggcaggctgatttctaggtaggaaatgtggtagcctcacttttaatgaacaaatggcctttattaaaaactgagtgactctatatagctgatcagttttttcacctggaagcatttgtttctactttgatatgactgtttttcggacagtttatttgttgagagtgtgaccaaaagttacatgtttgcacctttctagttgaaaataaagtgtatattttttctataaaggg

SEQ ID NO: 5920 - protein, 103 aa, Homo sapiens; identical to SEQ ID NO: 5894

SEQ ID NO: 5921 - DNA, 1965 bp, Homo sapiens
ctgcgccaagcagctgggcgagctgtgcaccgagcgcgacccatgcgacccgcacaagggcctattctgtcacttcggctccccggccaaccgcaagatcggcgtgtgcaccgccaaagatggtgctccctgcatcttcggtggtacggtgtaccgcagcggagagtccttccagagcagctgcaagtaccagtgcacgtgcctggacggggcggtgggctgcatgcccctgtgcagcatggacgttcgtctgcccagccctgactgccccttcccgaggagggtcaagctgcccgggaaatgctgcgaggagtgggtgtgtgacgagcccaaggaccaaaccgtggttgggcctgccctcgcggcttaccgactggaagacacgtttggcccagacccaactatgattagagccaactgcctggtccagaccacagagtggagcgcctgttccaagacctgtgggatgggcatctccacccgggttaccaatgacaacgcctcctgcaggctagagaagcagagccgcctgtgcatggtcaggccttgcgaagctgacctggaagagaacattaagaagggcaaaaagtgcatccgtactcccaaaatctccaagcctatcaagtttgagctttctggctgcaccagcatgaagacataccgagctaaattctgtggagtatgtaccgacggccgatgctgcaccccccacagaaccaccaccctgccggtggagttcaagtgccctgacggcgaggtcatgaagaagaacatgatgttcatcaagacctgtgcctgccattacaactgtcccggagacaatgacatctttgaatcgctgtactacaggaagatgtacggagacatggcatgaagccagagagtgagagacattaactcattagactggaacttgaactgattcacatctcatttttccgtaaaaatgatttcagtagcacaagttatttaaatctgtttttctaactgggggaaaagattcccacccaattcaaaacattgtgccatgtcaaacaaatagtctatcaaccccagacactggtttgaagaatgttaagacttgacagtggaactacattagtacacagcaccagaatgtatattaaggtgtggctttaggagcagtgggagggtaccagcagaaaggttagtatcatcagatagcatcttatacgagtaatatgcctgctatttgaagtgtaattgagaaggaaaattttagcgtgctcactgacctgcctgtagccccagtgacagctaggatgtgcattctccagccatcaagagactgagtcaagttgttccttaagtcagaacagcagactcagctctgacattctgattcgaatgacactgttcaggaatcggaatcctgtcgattagactggacagcttgtggcaagtgaatttgcctgtaacaagccagattttttaaaatttatattgtaaatattgtgtgtgtgtgtgtgtgtgtatatatatatatatgtacagttatctaagttaatttaaagttgtttgtgcctttttatttttgtttttaatgctttgatatttcaatgttagcctcaatttctgaacaccataggtagaatgtaaagcttgtctgatcgttcaaagcatgaaatggatacttatatggaaattctgctcagatagaatgacagtccgtcaaaacagattgtttgcaaaggggaggcatcagtgtccttggcaggctgatttctaggtaggaaatgtggtagcctcacttttaatgaacaaatggcctttattaaaaactgagtgactctatatagctgatcagttttttcacctggaagcatttgtttctactttgatatgactgtttttcggacagtttatttgttgagagtgtgaccaaaagttacatgtttgcacctttctagttgaaaataaagtgtatattttttctataaaggg

SEQ ID NO: 5922 - protein, 216 aa, Homo sapiens [sequence omitted]

SEQ ID NO: 5923 - DNA, 2816 bp, Homo sapiens
acacaacaactcttccccgctgagaggagacagccagtgcgactccaccctccagctcgacggcgggcgtgagcctcgtgctggacggctgcggctgctgccgcgtctgcgccaagcagctgggcgagctgtgcaccgagcgcgacccatgcgacccgcacaagggcctattctgtcacttcggctccccggccaaccgcaagatcggcgtgtgcaccggtaagacccgcagcccccaccgctaggtgtccggccgcctcctccctcacgcccacccgcccgctggaaaaagaaaccgctcggactgagtttctttctccagctgctgccagcccgccccctgcagcccagatcccaactcgcatccctgacgctctggatgtgagagtgccccaatgcctgacctctgcatcccccacccctctcttcccttcctcttctccagccaaagatggtgctccctgcatcttcggtggtacggtgtaccgcagcggagagtccttccagagcagctgcaagtaccagtgcacgtgcctggacggggcggtgggctgcatgcccctgtgcagcatggacgttcgtctgcccagccctgactgccccttcccgaggagggtcaagctgcccgggaaatgctgcgaggagtgggtgtgtgacgagcccaaggaccaaaccgtggttgggcctgccctcgcgggtgagtcgagtcttcctctaagtcagggtcgtgattctctcccagggagggagtcctaactgtgccgaccgaacgggggaaataccttatccaggcgttttacatggtgtttgtgtgctctgctctcgcagcttaccgactggaagacacgtttggcccagacccaactatgattagagccaactgcctggtccagaccacagagtggagcgcctgttccaagacctgtgggatgggcatctccacccgggttaccaatgacaacgcctcctgcaggctagagaagcagagccgcctgtgcatggtcaggccttgcgaagctgacctggaagagaacattaaggtacatgttctgctcctattaactatttttcacaggaaaaacagtggataggacccaacttagggctcttgccacgcttgttagtataagcccgttatctccaaaactatctaaccattgagctgttttgctggaatgagagcttgtgtaatagcaaccaccagttttccactacgaaatcttccacagggttagttaattcaagacattccaagagaggctctggctatttttggacatagcaaatgagactcaaacttcctcccctcaaaatataaacagaagtcagacaacagaagactaaaacacagagggttgaagaaagccactcctcttgtagagtcgctgatttttttttttcctctctcttttcccttgtcttccttagaagggcaaaaagtgcatccgtactcccaaaatctccaagcctatcaagtttgagctttctggctgcaccagcatgaagacataccgagctaaattctgtggagtatgtaccgacggccgatgctgcaccccccacagaaccaccaccctgccggtggagttcaagtgccctgacggcgaggtcatgaagaagaacatgatgttcatcaagacctgtgcctgccattacaactgtcccggagacaatgacatctttgaatcgctgtactacaggaagatgtacggagacatggcatgaagccagagagtgagagacattaactcattagactggaacttgaactgattcacatctcatttttccgtaaaaatgatttcagtagcacaagttatttaaatctgtttttctaactgggggaaaagattcccacccaattcaaaacattgtgccatgtcaaacaaatagtctatcaaccccagacactggtttgaagaatgttaagacttgacagtggaactacattagtacacagcaccagaatgtatattaaggtgtggctttaggagcagtgggagggtaccagcagaaaggttagtatcatcagatagcatcttatacgagtaatatgcctgctatttgaagtgtaattgagaaggaaaattttagcgtgctcactgacctgcctgtagccccagtgacagctaggatgtgcattctccagccatcaagagactgagtcaagttgttccttaagtcagaacagcagactcagctctgacattctgattcgaatgacactgttcaggaatcggaatcctgtcgattagactggacagcttgtggcaagtgaatttgcctgtaacaagccagattttttaaaatttatattgtaaatattgtgtgtgtgtgtgtgtgtgtatatatatatatatgtacagttatctaagttaatttaaagttgtttgtgcctttttatttttgtttttaatgctttgatatttcaatgttagcctcaatttctgaacaccataggtagaatgtaaagcttgtctgatcgttcaaagcatgaaatggatacttatatggaaattctgctcagatagaatgacagtccgtcaaaacagattgtttgcaaaggggaggcatcagtgtccttggcaggctgatttctaggtaggaaatgtggtagcctcacttttaatgaacaaatggcctttattaaaaactgagtgactctatatagctgatcagttttttcacctggaagcatttgtttctactttgatatgactgtttttcggacagtttatttgttgagagtgtgaccaaaagttacatgtttgcacctttctagttgaaaataaagtgtatattttttctataaaggg

SEQ ID NO: 5924 - protein, 96 aa, Homo sapiens; identical to SEQ ID NO: 5898

SEQ ID NO: 5925 - DNA, 2714 bp, Homo sapiens
acacaacaactcttccccgctgagaggagacagccagtcgcgacccatgcgacccgcacaagggcctattctgtcacttcggctccccggccaaccgcaagatcggcgtgtgcaccggtaagacccgcagcccccaccgctaggtgtccggccgcctcctccctcacgcccacccgcccgctggaaaaagaaaccgctcggactgagtttctttctccagctgctgccagcccgccccctgcagcccagatcccaactcgcatccctgacgctctggatgtgagagtgccccaatgcctgacctctgcatcccccacccctctcttcccttcctcttctccagccaaagatggtgctccctgcatcttcggtggtacggtgtaccgcagcggagagtccttccagagcagctgcaagtaccagtgcacgtgcctggacggggcggtgggctgcatgcccctgtgcagcatggacgttcgtctgcccagccctgactgccccttcccgaggagggtcaagctgcccgggaaatgctgcgaggagtgggtgtgtgacgagcccaaggaccaaaccgtggttgggcctgccctcgcgggtgagtcgagtcttcctctaagtcagggtcgtgattctctcccagggagggagtcctaactgtgccgaccgaacgggggaaataccttatccaggcgttttacatggtgtttgtgtgctctgctctcgcagcttaccgactggaagacacgtttggcccagacccaactatgattagagccaactgcctggtccagaccacagagtggagcgcctgttccaagacctgtgggatgggcatctccacccgggttaccaatgacaacgcctcctgcaggctagagaagcagagccgcctgtgcatggtcaggccttgcgaagctgacctggaagagaacattaaggtacatgttctgctcctattaactatttttcacaggaaaaacagtggataggacccaacttagggctcttgccacgcttgttagtataagcccgttatctccaaaactatctaaccattgagctgttttgctggaatgagagcttgtgtaatagcaaccaccagttttccactacgaaatcttccacagggttagttaattcaagacattccaagagaggctctggctatttttggacatagcaaatgagactcaaacttcctcccctcaaaatataaacagaagtcagacaacagaagactaaaacacagagggttgaagaaagccactcctcttgtagagtcgctgatttttttttttcctctctcttttcccttgtcttccttagaagggcaaaaagtgcatccgtactcccaaaatctccaagcctatcaagtttgagctttctggctgcaccagcatgaagacataccgagctaaattctgtggagtatgtaccgacggccgatgctgcaccccccacagaaccaccaccctgccggtggagttcaagtgccctgacggcgaggtcatgaagaagaacatgatgttcatcaagacctgtgcctgccattacaactgtcccggagacaatgacatctttgaatcgctgtactacaggaagatgtacggagacatggcatgaagccagagagtgagagacattaactcattagactggaacttgaactgattcacatctcatttttccgtaaaaatgatttcagtagcacaagttatttaaatctgtttttctaactgggggaaaagattcccacccaattcaaaacattgtgccatgtcaaacaaatagtctatcaaccccagacactggtttgaagaatgttaagacttgacagtggaactacattagtacacagcaccagaatgtatattaaggtgtggctttaggagcagtgggagggtaccagcagaaaggttagtatcatcagatagcatcttatacgagtaatatgcctgctatttgaagtgtaattgagaaggaaaattttagcgtgctcactgacctgcctgtagccccagtgacagctaggatgtgcattctccagccatcaagagactgagtcaagttgttccttaagtcagaacagcagactcagctctgacattctgattcgaatgacactgttcaggaatcggaatcctgtcgattagactggacagcttgtggcaagtgaatttgcctgtaacaagccagattttttaaaatttatattgtaaatattgtgtgtgtgtgtgtgtgtgtatatatatatatatgtacagttatctaagttaatttaaagttgtttgtgcctttttatttttgtttttaatgctttgatatttcaatgttagcctcaatttctgaacaccataggtagaatgtaaagcttgtctgatcgttcaaagcatgaaatggatacttatatggaaattctgctcagatagaatgacagtccgtcaaaacagattgtttgcaaaggggaggcatcagtgtccttggcaggctgatttctaggtaggaaatgtggtagcctcacttttaatgaacaaatggcctttattaaaaactgagtgactctatatagctgatcagttttttcacctggaagcatttgtttctactttgatatgactgtttttcggacagtttatttgttgagagtgtgaccaaaagttacatgtttgcacctttctagttgaaaataaagtgtatattttttctataaaggg

SEQ ID NO: 5926 - protein, 96 aa, Homo sapiens; identical to SEQ ID NO: 5898

SEQ ID NO: 5927 - DNA, 2110 bp, Homo sapiens
cacacaacaactcttccccgctgagaggagacagccagtgcgactccaccctccagctcgacggcagccgccccggccgacagccccgagacgacagcccggcgagtgccaaccatgaccgccgccagtatgggccccgtccgcgtcgcgccaagcagctgggcgagctgtgcaccgagcgcgacccatgcgacccgcacaagggcctattctgtcacttcggctccccggccaaccgcaagatcggcgtgtgcaccgccaaagatggtgctccctgcatcttcggtggtacggtgtaccgcagcggagagtccttccagagcagctgcaagtaccagtgcacgtgcctggacggggcggtgggctgcatgcccctgtgcagcatggacgttcgtctgcccagccctgactgccccttcccgaggagggtcaagctgcccgggaaatgctgcgaggagtgggtgtgtgacgagcccaaggaccaaaccgtggttgggcctgccctcgcggcttaccgactggaagacacgtttggcccagacccaactatgattagagccaactgcctggtccagaccacagagtggagcgcctgttccaagacctgtgggatgggcatctccacccgggttaccaatgacaacgcctcctgcaggctagagaagcagagccgcctgtgcatggtcaggccttgcgaagctgacctggaagagaacattaagaagggcaaaaagtgcatccgtactcccaaaatctccaagcctatcaagtttgagctttctggctgcaccagcatgaagacataccgagctaaattctgtggagtatgtaccgacggccgatgctgcaccccccacagaaccaccaccctgccggtggagttcaagtgccctgacggcgaggtcatgaagaagaacatgatgttcatcaagacctgtgcctgccattacaactgtcccggagacaatgacatctttgaatcgctgtactacaggaagatgtacggagacatggcatgaagccagagagtgagagacattaactcattagactggaacttgaactgattcacatctcatttttccgtaaaaatgatttcagtagcacaagttatttaaatctgtttttctaactgggggaaaagattcccacccaattcaaaacattgtgccatgtcaaacaaatagtctatcaaccccagacactggtttgaagaatgttaagacttgacagtggaactacattagtacacagcaccagaatgtatattaaggtgtggctttaggagcagtgggagggtaccagcagaaaggttagtatcatcagatagcatcttatacgagtaatatgcctgctatttgaagtgtaattgagaaggaaaattttagcgtgctcactgacctgcctgtagccccagtgacagctaggatgtgcattctccagccatcaagagactgagtcaagttgttccttaagtcagaacagcagactcagctctgacattctgattcgaatgacactgttcaggaatcggaatcctgtcgattagactggacagcttgtggcaagtgaatttgcctgtaacaagccagattttttaaaatttatattgtaaatattgtgtgtgtgtgtgtgtgtgtatatatatatatatgtacagttatctaagttaatttaaagttgtttgtgcctttttatttttgtttttaatgctttgatatttcaatgttagcctcaatttctgaacaccataggtagaatgtaaagcttgtctgatcgttcaaagcatgaaatggatacttatatggaaattctgctcagatagaatgacagtccgtcaaaacagattgtttgcaaaggggaggcatcagtgtccttggcaggctgatttctaggtaggaaatgtggtagcctcacttttaatgaacaaatggcctttattaaaaactgagtgactctatatagctgatcagttttttcacctggaagcatttgtttctactttgatatgactgtttttcggacagtttatttgttgagagtgtgaccaaaagttacatgtttgcacctttctagttgaaaataaagtgtatattttttctataaaggg

SEQ ID NO: 5928 - protein, 216 aa, Homo sapiens [sequence omitted]

SEQ ID NO: 5929 - DNA, 1906 bp, Homo sapiens
cacacaacaactcttccccgctgagaggagacagccagtgcgactccaccctccagctcgacggcagccgccccggccgacagccccgagacgacagcccggcgcgtcccggtccccacctccgaccaccgccagcgctccaggccccgccgctccccgctcgccgccaccgcgccctccgctccgcccgcagtgccaaccatgactgccccttcccgaggagggtcaagctgcccgggaaatgctgcgaggagtgggtgtgtgacgagcccaaggaccaaaccgtggttgggcctgccctcgcggcttaccgactggaagacacgtttggcccagacccaactatgattagagccaactgcctggtccagaccacagagtggagcgcctgttccaagacctgtgggatgggcatctccacccgggttaccaatgacaacgcctcctgcaggctagagaagcagagccgcctgtgcatggtcaggccttgcgaagctgacctggaagagaacattaagaagggcaaaaagtgcatccgtactcccaaaatctccaagcctatcaagtttgagctttctggctgcaccagcatgaagacataccgagctaaattctgtggagtatgtaccgacggccgatgctgcaccccccacagaaccaccaccctgccggtggagttcaagtgccctgacggcgaggtcatgaagaagaacatgatgttcatcaagacctgtgcctgccattacaactgtcccggagacaatgacatctttgaatcgctgtactacaggaagatgtacggagacatggcatgaagccagagagtgagagacattaactcattagactggaacttgaactgattcacatctcatttttccgtaaaaatgatttcagtagcacaagttatttaaatctgtttttctaactgggggaaaagattcccacccaattcaaaacattgtgccatgtcaaacaaatagtctatcaaccccagacactggtttgaagaatgttaagacttgacagtggaactacattagtacacagcaccagaatgtatattaaggtgtggctttaggagcagtgggagggtaccagcagaaaggttagtatcatcagatagcatcttatacgagtaatatgcctgctatttgaagtgtaattgagaaggaaaattttagcgtgctcactgacctgcctgtagccccagtgacagctaggatgtgcattctccagccatcaagagactgagtcaagttgttccttaagtcagaacagcagactcagctctgacattctgattcgaatgacactgttcaggaatcggaatcctgtcgattagactggacagcttgtggcaagtgaatttgcctgtaacaagccagattttttaaaatttatattgtaaatattgtgtgtgtgtgtgtgtgtgtatatatatatatatgtacagttatctaagttaatttaaagttgtttgtgcctttttatttttgtttttaatgctttgatatttcaatgttagcctcaatttctgaacaccataggtagaatgtaaagcttgtctgatcgttcaaagcatgaaatggatacttatatggaaattctgctcagatagaatgacagtccgtcaaaacagattgtttgcaaaggggaggcatcagtgtccttggcaggctgatttctaggtaggaaatgtggtagcctcacttttaatgaacaaatggcctttattaaaaactgagtgactctatatagctgatcagttttttcacctggaagcatttgtttctactttgatatgactgtttttcggacagtttatttgttgagagtgtgaccaaaagttacatgtttgcacctttctagttgaaaataaagtgtatattttttctataaaggg

SEQ ID NO: 5930 - protein, 156 aa, Homo sapiens [sequence omitted]

SEQ ID NO: 5931 - DNA, 2081 bp, Homo sapiens
cacacaacaactcttccccgctgagaggagacagccagtgcgactccaccctccagctcgacggcagccgccccggccgacagccccgagacgacagcccggcgctgctgccgcgtctgcgccaagcagctgggcgagctgtgcaccgagcgcgacccatgcgacccgcacaagggcctattctgtcacttcggctccccggccaaccgcaagatcggcgtgtgcaccgccaaagatggtgctccctgcatcttcggtggtacggtgtaccgcagcggagagtccttccagagcagctgcaagtaccagtgcacgtgcctggacggggcggtgggctgcatgcccctgtgcagcatggacgttcgtctgcccagccctgactgccccttcccgaggagggtcaagctgcccgggaaatgctgcgaggagtgggtgtgtgacgagcccaaggaccaaaccgtggttgggcctgccctcgcggcttaccgactggaagacacgtttggcccagacccaactatgattagagccaactgcctggtccagaccacagagtggagcgcctgttccaagacctgtgggatgggcatctccacccgggttaccaatgacaacgcctcctgcaggctagagaagcagagccgcctgtgcatggtcaggccttgcgaagctgacctggaagagaacattaagaagggcaaaaagtgcatccgtactcccaaaatctccaagcctatcaagtttgagctttctggctgcaccagcatgaagacataccgagctaaattctgtggagtatgtaccgacggccgatgctgcaccccccacagaaccaccaccctgccggtggagttcaagtgccctgacggcgaggtcatgaagaagaacatgatgttcatcaagacctgtgcctgccattacaactgtcccggagacaatgacatctttgaatcgctgtactacaggaagatgtacggagacatggcatgaagccagagagtgagagacattaactcattagactggaacttgaactgattcacatctcatttttccgtaaaaatgatttcagtagcacaagttatttaaatctgtttttctaactgggggaaaagattcccacccaattcaaaacattgtgccatgtcaaacaaatagtctatcaaccccagacactggtttgaagaatgttaagacttgacagtggaactacattagtacacagcaccagaatgtatattaaggtgtggctttaggagcagtgggagggtaccagcagaaaggttagtatcatcagatagcatcttatacgagtaatatgcctgctatttgaagtgtaattgagaaggaaaattttagcgtgctcactgacctgcctgtagccccagtgacagctaggatgtgcattctccagccatcaagagactgagtcaagttgttccttaagtcagaacagcagactcagctctgacattctgattcgaatgacactgttcaggaatcggaatcctgtcgattagactggacagcttgtggcaagtgaatttgcctgtaacaagccagattttttaaaatttatattgtaaatattgtgtgtgtgtgtgtgtgtgtatatatatatatatgtacagttatctaagttaatttaaagttgtttgtgcctttttatttttgtttttaatgctttgatatttcaatgttagcctcaatttctgaacaccataggtagaatgtaaagcttgtctgatcgttcaaagcatgaaatggatacttatatggaaattctgctcagatagaatgacagtccgtcaaaacagattgtttgcaaaggggaggcatcagtgtccttggcaggctgatttctaggtaggaaatgtggtagcctcacttttaatgaacaaatggcctttattaaaaactgagtgactctatatagctgatcagttttttcacctggaagcatttgtttctactttgatatgactgtttttcggacagtttatttgttgagagtgtgaccaaaagttacatgtttgcacctttctagttgaaaataaagtgtatattttttctataaaggg

SEQ ID NO: 5932 - protein, 216 aa, Homo sapiens [sequence omitted]

SEQ ID NO: 5933 - DNA, 2978 bp, Homo sapiens
actcacacaacaactcttccccgctgagaggagacagccagtgcgactccaccctccagctcgacggcagccgccccggccgacagccccgagacgacagcccggcgcgtcccggtccccacctccgaccaccgccagcgctccaggccccgccgctccccgctcgccgccaccgcgccctccgctccgcccgcagtgccaaccatgaccgccgccagtatgggccccgtccgcgtcgccttcgtggtcctcctcgccctctgcagccgggtaagcgccgggagcccccgctgcggccggcggctgccagggagggactcggggccggccggggagggcgtgcgcgccgaccgagcgccgctgaccgccctgtcctccctgcagccggccgtcggccagaactgcagcgggccgtgccggtgcccggacgagccggcgccgcgctgcccggcgggcgtgagcctcgtgctggacggctgcggctgctgccgcgtctgcgccaagcagctgggcgagctgtgcaccgagcgcgacccatgcgacccgcacaagggcctattctgtcacttcggctccccggccaaccgcaagatcggcgtgtgcaccgccaaagatggtgctccctgcatcttcggtggtacggtgtaccgcagcggagagtccttccagagcagctgcaagtaccagtgcacgtgcctggacggggcggtgggctgcatgcccctgtgcagcatggacgttcgtctgcccagccctgactgccccttcccgaggagggtcaagctgcccgggaaatgctgcgaggagtgggtgtgtgacgagcccaaggaccaaaccgtggttgggcctgccctcgcgggtgagtcgagtcttcctctaagtcagggtcgtgattctctcccagggagggagtcctaactgtgccgaccgaacgggggaaataccttatccaggcgttttacatggtgtttgtgtgctctgctctcgcagcttaccgactggaagacacgtttggcccagacccaactatgattagagccaactgcctggtccagaccacagagtggagcgcctgttccaagacctgtgggatgggcatctccacccgggttaccaatgacaacgcctcctgcaggctagagaagcagagccgcctgtgcatggtcaggccttgcgaagctgacctggaagagaacattaaggtacatgttctgctcctattaactatttttcacaggaaaaacagtggataggacccaacttagggctcttgccacgcttgttagtataagcccgttatctccaaaactatctaaccattgagctgttttgctggaatgagagcttgtgtaatagcaaccaccagttttccactacgaaatcttccacagggttagttaattcaagacattccaagagaggctctggctatttttggacatagcaaatgagactcaaacttcctcccctcaaaatataaacagaagtcagacaacagaagactaaaacacagagggttgaagaaagccactcctcttgtagagtcgctgatttttttttttcctctctcttttcccttgtcttccttagaagggcaaaaagtgcatccgtactcccaaaatctccaagcctatcaagtttgagctttctggctgcaccagcatgaagacataccgagctaaattctgtggagtatgtaccgacggccgatgctgcaccccccacagaaccaccaccctgccggtggagttcaagtgccctgacggcgaggtcatgaagaagaacatgatgttcatcaagacctgtgcctgccattacaactgtcccggagacaatgacatctttgaatcgctgtactacaggaagatgtacggagacatggcatgaagccagagagtgagagacattaactcattagactggaacttgaactgattcacatctcatttttccgtaaaaatgatttcagtagcacaagttatttaaatctgtttttctaactgggggaaaagattcccacccaattcaaaacattgtgccatgtcaaacaaatagtctatcaaccccagacactggtttgaagaatgttaagacttgacagtggaactacattagtacacagcaccagaatgtatattaaggtgtggctttaggagcagtgggagggtaccagcagaaaggttagtatcatcagatagcatcttatacgagtaatatgcctgctatttgaagtgtaattgagaaggaaaattttagcgtgctcactgacctgcctgtagccccagtgacagctaggatgtgcattctccagccatcaagagactgagtcaagttgttccttaagtcagaacagcagactcagctctgacattctgattcgaatgacactgttcaggaatcggaatcctgtcgattagactggacagcttgtggcaagtgaatttgcctgtaacaagccagattttttaaaatttatattgtaaatattgtgtgtgtgtgtgtgtgtgtatatatatatatatgtacagttatctaagttaatttaaagttgtttgtgcctttttatttttgtttttaatgctttgatatttcaatgttagcctcaatttctgaacaccataggtagaatgtaaagcttgtctgatcgttcaaagcatgaaatggatacttatatggaaattctgctcagatagaatgacagtccgtcaaaacagattgtttgcaaaggggaggcatcagtgtccttggcaggctgatttctaggtaggaaatgtggtagcctcacttttaatgaacaaatggcctttattaaaaactgagtgactctatatagctgatcagttttttcacctggaagcatttgtttctactttgatatgactgtttttcggacagtttatttgttgagagtgtgaccaaaagttacatgtttgcacctttctagttgaaaataaagtgtatattttttctataaaggg

SEQ ID NO: 5934 - protein, 237 aa, Homo sapiens; identical to SEQ ID NO: 5910

SEQ ID NO: 5935 - DNA, 3090 bp, Homo sapiens
actcacacaacaactcttccccgctgagaggagacagccagtgcgactccaccctccagctcgacggcagccgccccggccgacagccccgagacgacagcccggcgcgtcccggtccccacctccgaccaccgccagcgctccaggccccgccgctccccgctcgccgccaccgcgccctccgctccgcccgcagtgccaaccatgaccgccgccagtatgggccccgtccgcgtcgccttcgtggtcctcctcgccctctgcagccggccggccgtcggccagaactgcagcgggccgtgccggtgcccggacgagccggcgccgcgctgcccggcgggcgtgagcctcgtgctggacggctgcggctgctgccgcgtctgcgccaagcagctgggcgagctgtgcaccgagcgcgacccatgcgacccgcacaagggcctattctgtcacttcggctccccggccaaccgcaagatcggcgtgtgcaccggtaagacccgcagcccccaccgctaggtgtccggccgcctcctccctcacgcccacccgcccgctggaaaaagaaaccgctcggactgagtttctttctccagctgctgccagcccgccccctgcagcccagatcccaactcgcatccctgacgctctggatgtgagagtgccccaatgcctgacctctgcatcccccacccctctcttcccttcctcttctccagccaaagatggtgctccctgcatcttcggtggtacggtgtaccgcagcggagagtccttccagagcagctgcaagtaccagtgcacgtgcctggacggggcggtgggctgcatgcccctgtgcagcatggacgttcgtctgcccagccctgactgccccttcccgaggagggtcaagctgcccgggaaatgctgcgaggagtgggtgtgtgacgagcccaaggaccaaaccgtggttgggcctgccctcgcgggtgagtcgagtcttcctctaagtcagggtcgtgattctctcccagggagggagtcctaactgtgccgaccgaacgggggaaataccttatccaggcgttttacatggtgtttgtgtgctctgctctcgcagcttaccgactggaagacacgtttggcccagacccaactatgattagagccaactgcctggtccagaccacagagtggagcgcctgttccaagacctgtgggatgggcatctccacccgggttaccaatgacaacgcctcctgcaggctagagaagcagagccgcctgtgcatggtcaggccttgcgaagctgacctggaagagaacattaaggtacatgttctgctcctattaactatttttcacaggaaaaacagtggataggacccaacttagggctcttgccacgcttgttagtataagcccgttatctccaaaactatctaaccattgagctgttttgctggaatgagagcttgtgtaatagcaaccaccagttttccactacgaaatcttccacagggttagttaattcaagacattccaagagaggctctggctatttttggacatagcaaatgagactcaaacttcctcccctcaaaatataaacagaagtcagacaacagaagactaaaacacagagggttgaagaaagccactcctcttgtagagtcgctgatttttttttttcctctctcttttcccttgtcttccttagaagggcaaaaagtgcatccgtactcccaaaatctccaagcctatcaagtttgagctttctggctgcaccagcatgaagacataccgagctaaattctgtggagtatgtaccgacggccgatgctgcaccccccacagaaccaccaccctgccggtggagttcaagtgccctgacggcgaggtcatgaagaagaacatgatgttcatcaagacctgtgcctgccattacaactgtcccggagacaatgacatctttgaatcgctgtactacaggaagatgtacggagacatggcatgaagccagagagtgagagacattaactcattagactggaacttgaactgattcacatctcatttttccgtaaaaatgatttcagtagcacaagttatttaaatctgtttttctaactgggggaaaagattcccacccaattcaaaacattgtgccatgtcaaacaaatagtctatcaaccccagacactggtttgaagaatgttaagacttgacagtggaactacattagtacacagcaccagaatgtatattaaggtgtggctttaggagcagtgggagggtaccagcagaaaggttagtatcatcagatagcatcttatacgagtaatatgcctgctatttgaagtgtaattgagaaggaaaattttagcgtgctcactgacctgcctgtagccccagtgacagctaggatgtgcattctccagccatcaagagactgagtcaagttgttccttaagtcagaacagcagactcagctctgacattctgattcgaatgacactgttcaggaatcggaatcctgtcgattagactggacagcttgtggcaagtgaatttgcctgtaacaagccagattttttaaaatttatattgtaaatattgtgtgtgtgtgtgtgtgtgtatatatatatatatgtacagttatctaagttaatttaaagttgtttgtgcctttttatttttgtttttaatgctttgatatttcaatgttagcctcaatttctgaacaccataggtagaatgtaaagcttgtctgatcgttcaaagcatgaaatggatacttatatggaaattctgctcagatagaatgacagtccgtcaaaacagattgtttgcaaaggggaggcatcagtgtccttggcaggctgatttctaggtaggaaatgtggtagcctcacttttaatgaacaaatggcctttattaaaaactgagtgactctatatagctgatcagttttttcacctggaagcatttgtttctactttgatatgactgtttttcggacagtttatttgttgagagtgtgaccaaaagttacatgtttgcacctttctagttgaaaataaagtgtatattttttctataaaggg

SEQ ID NO: 5936 - protein, 104 aa, Homo sapiens; identical to SEQ ID NO: 5908

SEQ ID NO: 5937 - DNA, 2928 bp, Homo sapiens
attcagctcattggcgagccgcggccgcccggagcgtataaaagcctcgggccgcccgccccaaactcacacaacaactcttccccgctgagaggagacagccagtgcgactccaccctccagctcgacggcagccgccccggccgacagccccgagacgacagcccggcgcgtcccggtccccacctccgaccaccgccagcgctccaggccccgccgctccccgctcgccgccaccgcgccctccgctccgcccgcagtgccaaccatgaccgccgccagtatgggccccgtccgcgtcgccttcgtggtcctcctcgccctctgcagccggccggccgtcggccagaactgcagcgggccgtgccggtgcccggacgagccggcgccgcgctgcccggcgggcgtgagcctcgtgctggacggctgcggctgctgccgcgtctgcgccaagcagctgggcgagctgtgcaccgagcgcgacccatgcgacccgcacaagggcctattctgtcacttcggctccccggccaaccgcaagatcggcgtgtgcaccgccaaagatggtgctccctgcatcttcggtggtacggtgtaccgcagcggagagtccttccagagcagctgcaagtaccagtgcacgtgcctggacggggcggtgggctgcatgcccctgtgcagcatggacgttcgtctgcccagccctgactgccccttcccgaggagggtcaagctgcccgggaaatgctgcgaggagtgggtgtgtgacgagcccaaggaccaaaccgtggttgggcctgccctcgcgggtgagtcgagtcttcctctaagtcagggtcgtgattctctcccagggagggagtcctaactgtgccgaccgaacgggggaaataccttatccaggcgttttacatggtgtttgtgtgctctgctctcgcagcttaccgactggaagacacgtttggcccagacccaactatgattagagccaactgcctggtccagaccacagagtggagcgcctgttccaagacctgtgggatgggcatctccacccgggttaccaatgacaacgcctcctgcaggctagagaagcagagccgcctgtgcatggtcaggccttgcgaagctgacctggaagagaacattaaggtacatgttctgctcctattaactatttttcacaggaaaaacagtggataggacccaacttagggctcttgccacgcttgttagtataagcccgttatctccaaaactatctaaccattgagctgttttgctggaatgagagcttgtgtaatagcaaccaccagttttccactacgaaatcttccacagggttagttaattcaagacattccaagagaggctctggctatttttggacatagcaaatgagactcaaacttcctcccctcaaaatataaacagaagtcagacaacagaagactaaaacacagagggttgaagaaagccactcctcttgtagagtcgctgatttttttttttcctctctcttttcccttgtcttccttagaagggcaaaaagtgcatccgtactcccaaaatctccaagcctatcaagtttgagctttctggctgcaccagcatgaagacataccgagctaaattctgtggagtatgtaccgacggccgatgctgcaccccccacagaaccaccaccctgccggtggagttcaagtgccctgacggcgaggtcatgaagaagaacatgatgttcatcaagacctgtgcctgccattacaactgtcccggagacaatgacatctttgaatcgctgtactacaggaagatgtacggagacatggcatgaagccagagagtgagagacattaactcattagactggaacttgaactgattcacatctcatttttccgtaaaaatgatttcagtagcacaagttatttaaatctgtttttctaactgggggaaaagattcccacccaattcaaaacattgtgccatgtcaaacaaatagtctatcaaccccagacactggtttgaagaatgttaagacttgacagtggaactacattagtacacagcaccagaatgtatattaaggtgtggctttaggagcagtgggagggtaccagcagaaaggttagtatcatcagatagcatcttatacgagtaatatgcctgctatttgaagtgtaattgagaaggaaaattttagcgtgctcactgacctgcctgtagccccagtgacagctaggatgtgcattctccagccatcaagagactgagtcaagttgttccttaagtcagaacagcagactcagctctgacattctgattcgaatgacactgttcaggaatcggaatcctgtcgattagactggacagcttgtggcaagtgaatttgcctgtaacaagccagattttttaaaatttatattgtaaatattgtgtgtgtgtgtgtgtgtgtatatatatatatatgtacagttatctaagttaatttaaagttgtttgtgcctttttatttttgtttttaatgctttgatatttcaatgttagcctcaatttctgaacaccataggtagaatgtaaagcttgtctgatcgttcaaagcatgaaatggatacttatatggaaattctgctcagatagaatgacagtccgtcaaaacagattgtttgcaaaggggaggcatcagtgtccttggcaggctgatttctaggtaggaaatgtggtagcctcacttttaatgaacaaatggcctttattaaaaactgagtgactctatatagctgatcagttttttcacctggaagcatttgtttctactttgatatgactgtttttcggacagtttatttgttgagagtgtgaccaaaagttacatgtttgcacctttctagttgaaaataaagtgtatattttttctataaaggg

SEQ ID NO: 5938 - protein, 199 aa, Homo sapiens; identical to SEQ ID NO: 5912

SEQ ID NO: 5939 - DNA, 2409 bp, Homo sapiens
attcagctcattggcgagccgcggccgcccggagcgtataaaagcctcgggccgcccgccccaaactcacacaacaactcttccccgctgagaggagacagccagtgcgactccaccctccagctcgacggcagccgccccggccgacagccccgagacgacagcccggcgcgtcccggtccccacctccgaccaccgccagcgctccaggccccgccgctccccgctcgccgccaccgcgccctccgctccgcccgcagtgccaaccatgaccgccgccagtatgggccccgtccgcgtcgccttcgtggtcctcctcgccctctgcagccggccggccgtcggccagaactgcagcgggccgtgccggtgcccggacgagccggcgccgcgctgcccggcgggcgtgagcctcgtgctggacggctgcggctgctgccgcgtctgcgccaagcagctgggcgagctgtgcaccgagcgcgacccatgcgacccgcacaagggcctattctgtcacttcggctccccggccaaccgcaagatcggcgtgtgcaccgccaaagatggtgctccctgcatcttcggtggtacggtgtaccgcagcggagagtccttccagagcagctgcaagtaccagtgcacgtgcctggacggggcggtgggctgcatgcccctgtgcagcatggacgttcgtctgcccagccctgactgccccttcccgaggagggtcaagctgcccgggaaatgctgcgaggagtgggtgtgtgacgagcccaaggaccaaaccgtggttgggcctgccctcgcggcttaccgactggaagacacgtttggcccagacccaactatgattagagccaactgcctggtccagaccacagagtggagcgcctgttccaagacctgtgggatgggcatctccacccgggttaccaatgacaacgcctcctgcaggctagagaagcagagccgcctgtgcatggtcaggccttgcgaagctgacctggaagagaacattaagaagggcaaaaagtgcatccgtactcccaaaatctccaagcctatcaagtttgagctttctggctgcaccagcatgaagacataccgagctaaattctgtggagtatgtaccgacggccgatgctgcaccccccacagaaccaccaccctgccggtggagttcaagtgccctgacggcgaggtcatgaagaagaacatgatgttcatcaagacctgtgcctgccattacaactgtcccggagacaatgacatctttgaatcgctgtactacaggaagatgtacggagacatggcatgaagccagagagtgagagacattaactcattagactggaacttgaactgattcacatctcatttttccgtaaaaatgatttcagtagcacaagttatttaaatctgtttttctaactgggggaaaagattcccacccaattcaaaacattgtgccatgtcaaacaaatagtctatcaaccccagacactggtttgaagaatgttaagacttgacagtggaactacattagtacacagcaccagaatgtatattaaggtgtggctttaggagcagtgggagggtaccagcagaaaggttagtatcatcagatagcatcttatacgagtaatatgcctgctatttgaagtgtaattgagaaggaaaattttagcgtgctcactgacctgcctgtagccccagtgacagctaggatgtgcattctccagccatcaagagactgagtcaagttgttccttaagtcagaacagcagactcagctctgacattctgattcgaatgacactgttcaggaatcggaatcctgtcgattagactggacagcttgtggcaagtgaatttgcctgtaacaagccagattttttaaaatttatattgtaaatattgtgtgtgtgtgtgtgtgtgtatatatatatatatgtacagttatctaagttaatttaaagttgtttgtgcctttttatttttgtttttaatgctttgatatttcaatgttagcctcaatttctgaacaccataggtagaatgtaaagcttgtctgatcgttcaaagcatgaaatggatacttatatggaaattctgctcagatagaatgacagtccgtcaaaacagattgtttgcaaaggggaggcatcagtgtccttggcaggctgatttctaggtaggaaatgtggtagcctcacttttaatgaacaaatggcctttattaaaaactgagtgactctatatagctgatcagttttttcacctggaagcatttgtttctactttgatatgactgtttttcggacagtttatttgttgagagtgtgaccaaaagttacatgtttgcacctttctagttgaaaataaagtgtatattttttctataaaggg

SEQ ID NO: 5940 - protein, 349 aa, Homo sapiens; identical to SEQ ID NO: 5914

SEQ ID NO: 5941 - DNA, 1456 bp, Homo sapiens
gggactcggactcgctcctgggcgagctgaaagtcggctgcagcagaagctcctgccttgggagtttgccgcgagcgcgtctccttcattcgcaggctgggcgcgttcgcagtcggctggcggcgaaggaaggcgctctcgggacctcgcgggcgcgcgtcttttggctcttgcccctgtccctgcggcttggggaaggcgtaacccggcggctaggcgcgggagaagtgcggaggagccatgggcgccgggagctccaccgagcagcgcagcccggagcagccgcccgaggggagctccacgccggctgagcccgagcccagcggcggcggcccctcggccgaggcggcgccagacaccaccgcggaccccgccatcgctgcctcggaccccgccaccaagctcctacagaagaatggtcagctgtccaccatcaatggcgtagctgagcaagatgagctcagcctccaggagggtgacctaaatggccagaaaggagccctgaacggtcaaggagccctaaacagccaggaggaagaagaagtcattgtcacagaggttggacagagagactctgaagatgtgagcaaaagagactccgataaagagatggctactaagtcagcggttgttcacgacatcacagatgatgggcaggaggagacacccgaaataatcgaacagattccttcttcagaaagcaatttagaagagctaacacaacccactgagtcccaggctaatgatattggatttaagaaggtgtttaagtttgttggctttaaattcactgtgaaaaaggataagacagagaagcctgacactgtccagctactcactgtgaagaaagatgaaggggagggagcagcaggggctggcgaccacaaggaccccagccttggggctggagaagcagcatccaaagaaagcgaacccaaacaatctacagagaaacccgaagagaccctgaagcgtgagcaaagccacgcagaaatttctcccccagccgaatctggccaagcagtggaggaatgcaaagaggaaggagaagagaaacaagaaaaagaacctagcaagtctgcagaatctccgactagtcccgtgaccagtgaaacaggatcaaccttcaaaaaattcttcactcaaggttgggccggctggcgcaaaaagaccagtttcaggaagccgaaggaggatgaagtggaagcttcagagaagaaaaaggaacaagagccagaaaaagtagacacagaagaagacggaaaggcagaggttgcctccgagaaactgaccgcctccgagcaagcccacccacaggagccggcagaaagtgcccacgagccccggttatcagctgaatatgagaaagttgagctgccctcagaggagcaagtcagtggctcgcagggaccttctgaagagaaacctgctccgttggcgacagaagtgtttgatg

SEQ ID NO: 5942 - protein, 404 aa, Homo sapiens
MGAGSSTEQRSPEQPPEGSSTPAEPEPSGGGPSAEAAPDTTADPAIAASDPATKLLQKNGQLSTINGVAEQDELSLQEGDLNGQKGALNGQGALNSQEEEEVIVTEVGQRDSEDVSKRDSDKEMATKSAVVHDITDDGQEETPEIIEQIPSSESNLEELTQPTESQANDIGFKKVFKFVGFKFTVKKDKTEKPDTVQLLTVKKDEGEGAAGAGDHKDPSLGAGEAASKESEPKQSTEKPEETLKREQSHAEISPPAESGQAVEECKEEGEEKQEKEPSKSAESPTSPVTSETGSTFKKFFTQGWAGWRKKTSFRKPKEDEVEASEKKKEQEPEKVDTEEDGKAEVASEKLTASEQAHPQEPAESAHEPRLSAEYEKVELPSEEQVSGSQGPSEEKPAPLATEVF

SEQ ID NO: 5943 - DNA, 6650 bp, Homo sapiens
gggactcggactcgctcctgggcgagctgaaagtcggctgcagcagaagctcctgccttgggagtttgccgcgagcgcgtctccttcattcgcaggctgggcgcgttcgcagtcggctggcggcgaaggaaggcgctctcgggacctcgcgggcgcgcgtcttttggctcttgcccctgtccctgcggcttggggaaggcgtaacccggcggctaggcgcgggagaagtgcggaggagccatgggcgccgggagctccaccgagcagcgcagcccggagcagccgcccgaggggagctccacgccggctgagcccgagcccagcggcggcggcccctcggccgaggcggcgccagacaccaccgcggaccccgccatcgctgcctcggaccccgccaccaagctcctacagaagaatggtcagctgtccaccatcaatggcgtagctgagcaagatgagctcagcctccaggagggtgacctaaatggccagaaaggagccctgaacggtcaaggagccctaaacagccaggaggaagaagaagtcattgtcacagaggttggacagagagactctgaagatgtgagcaaaagagactccgataaagagatggctactaagtcagcggttgttcacgacatcacagatgatgggcaggaggagacacccgaaataatcgaacagattccttcttcagaaagcaatttagaagagctaacacaacccactgagtcccaggctaatgatattggatttaagaaggtgtttaagtttgttggctttaaattcactgtgaaaaaggataagacagagaagcctgacactgtccagctactcactgtgaagaaagatgaaggggagggagcagcaggggctggcgaccacaaggaccccagccttggggctggagaagcagcatccaaagaaagcgaacccaaacaatctacagagaaacccgaagagaccctgaagcgtgagcaaagccacgcagaaatttctcccccagccgaatctggccaagcagtggaggaatgcaaagaggaaggagaagagaaacaagaaaaagaacctagcaagtctgcagaatctccgactagtcccgtgaccagtgaaacaggatcaaccttcaaaaaattcttcactcaaggttgggccggctggcgcaaaaagaccagtttcaggaagccgaaggaggatgaagtggaagcttcagagaagaaaaaggaacaagagccagaaaaagtagacacagaagaagacggaaaggcagaggttgcctccgagaaactgaccgcctccgagcaagcccacccacaggagccggcagaaagtgcccacgagccccggttatcagctgaatatgagaaagttgagctgccctcagaggagcaagtcagtggctcgcagggaccttctgaagagaaacctgctccgttggcgacagaagtgtttgatgagaaaatagaagtccaccaagaagaggttgtggccgaagtccacgtcagcaccgtggaggagagaaccgaagagcagaaaacggaggtggaagaaacagcagggtctgtgccagctgaagaattggttgaaatggatgcagaacctcaggaagctgaacctgccaaggagctggtgaagctcaaagaaacgtgtgtttccggagaggaccctacacagggagctgacctcagtcctgatgagaaggtgctgtccaaaccccccgaaggcgttgtgagtgaggtggaaatgctgtcatcacaggagagaatgaaggtgcagggaagtccactaaagaagctttttaccagcactggcttaaaaaagctttctggaaagaaacagaaagggaaaagaggaggaggagacgaggaatcaggggagcacactcaggttccagccgattctccggacagccaggaggagcaaaagggcgagagctctgcctcatcccctgaggagcccgaggagatcacgtgtctggaaaagggcttagccgaggtgcagcaggatggggaagctgaagaaggagctacttccgatggagagaaaaaaagagaaggtgtcactccctgggcatcattcaaaaagatggtgacgcccaagaagcgtgttagacggccttcggaaagtgataaagaagatgagctggacaaggtcaagagcgctaccttgtcttccaccgagagcacagcctctgaaatgcaagaagaaatgaaagggagcgtggaagagccaaagccggaagaaccaaagcgcaaggtggatacctcagtatcttgggaagctttaatttgtgtgggatcatccaagaaaagagcaaggagagggtcctcttctgatgaggaagggggaccaaaagcaatgggaggagaccaccagaaagctgatgaggccggaaaagacaaagagacggggacagacgggatccttgctggttcccaagaacatgatccagggcagggaagttcctccccggagcaagctggaagccctaccgaaggggagggcgtttccacctgggagtcatttaaaaggttagtcacgccaagaaaaaaatcaaagtccaagctggaagagaaaagcgaagactccatagctgggtctggtgtagaacattccactccagacactgaacccggtaaagaagaatcctgggtctcaatcaagaagtttattcctggacgaaggaagaaaaggccagatgggaaacaagaacaagcccctgttgaagacgcagggccaacaggggccaacgaagatgactctgatgtcccggccgtggtccctctgtctgagtatgatgctgtagaaagggagaaaatggaggcacagcaagcccaaaaaagcgcagagcagcccgagcagaaggcagccactgaggtgtccaaggagctcagcgagagtcaggttcatatgatggcagcagctgtcgctgacgggacgagggcagctaccattattgaagaaaggtctccttcttggatatctgcttcagtgacagaacctcttgaacaagtagaagctgaagccgcactgttaactgaggaggtattggaaagagaagtaattgcagaagaagaaccccccacggttactgaacctctgccagagaacagagaggcccggggcgacacggtcgttagtgaggcggaattgacccccgaagctgtgacagctgcagaaactgcagggccattgggtgccgaagaaggaaccgaagcatctgctgctgaagagaccacagaaatggtgtcagcagtctcccagttaaccgactccccagacaccacagaggaggccactccggtgcaggaggtggaaggtggcgtacctgacatagaagagcaagagaggcggactcaagaggtcctccaggcagtggcagaaaaagtgaaagaggaatcccagctgcctggcaccggtgggccagaagatgtgcttcagcctgtgcagagagcagaggcagaaagaccagaagagcaggctgaagcgtcgggtctgaagaaagagacggatgtagtgttgaaagtagatgctcaggaggcaaaaactgagccttttacacaagggaaggtggtggggcagaccaccccagaaagctttgaaaaagctcctcaagtcacagagagcatagagtccagtgagcttgtaaccacttgtcaagccgaaaccttagctggggtaaaatcacaggagatggtgatggaacaggctatcccccctgactcggtggaaacccctacagacagtgagactgatggaagcacccccgtagccgactttgacgcaccaggcacaacccagaaagacgagattgtggaaatccatgaggagaatgaggtcgcatctggtacccagtcagggggcacagaagcagaggcagttcctgcacagaaagagaggcctccagcaccttccagttttgtgttccaggaagaaactaaagaacaatcaaagatggaagacactctagagcatacagataaagaggtgtcagtggaaactgtatccattctgtcaaagactgaggggactcaagaggctgaccagtatgctgatgagaaaaccaaagacgtaccatttttcgaaggacttgaggggtctatagacacaggcataacagtcagtcgggaaaaggtcactgaagttgcccttaaaggtgaagggacagaagaagctgaatgtaaaaaggatgatgctcttgaactgcagagtcacgctaagtctcctccatcccccgtggagagagagatggtagttcaagtcgaaagggagaaaacagaagcagagccaacccatgtgaatgaagagaagcttgagcacgaaacagctgttaccgtatctgaagaggtcagtaagcagctcctccagacagtgaatgtgcccatcatagatggggcaaaggaagtcagcagtttggaaggaagccctcctccctgcctaggtcaagaggaggcagtatgcaccaaaattcaagttcagagctctgaggcatcattcactctaacagcggctgcagaggaggaaaaggtcttaggagaaactgccaacattttagaaacaggtgaaacgttggagcctgcaggtgcacatttagttctggaagagaaatcctctgaaaaaaatgaagactttgccgctcatccaggggaagatgctgtgcccacagggcccgactgtcaggcaaaatcgacaccagtgatagtatctgctactaccaagaaaggcttaagttccgacctggaaggagagaaaaccacatcactgaagtggaagtcagatgaagtcgatgagcaggttgcttgccaggaggtcaaagtgagtgtagcaattgaggatttagagcctgaaaatgggattttggaacttgagaccaaaagcagtaaacttgtccaaaacatcatccagacagccgttgaccagtttgtacgtacagaagaaacagccaccgaaatgttgacgtctgagttacagacacaagctcacgtgataaaagctgacagccaggacgctggacaggaaacggagaaagaaggagaggaacctcaggcctctgcacaggatgaaacaccaattacttcagccaaagaggagtcagagtcaaccgcagtgggacaagcacattctgatatttccaaagacatgagtgaagcctcagaaaagaccatgactgttgaggtagaaggttccactgtaaatgatcagcagctggaagaggtcgtcctcccatctgaggaagagggaggtggagctggaacaaagtctgtgccagaagatgatggtcatgccttgttagcagaaagaatagagaagtcactagttgaaccgaaagaagatgaaaaaggtgatgatgttgatgaccctgaaaaccagaactcagccctggctgatactgatgcctcaggaggcttaaccaaagagtccccagatacaaatggaccaaaacaaaaagagaaggaggatgcccaggaagtagaattgcaggaaggaaaagtgcacagtgaatcagataaagcgatcacaccccaagcacaggaggagttacagaaacaagagagagaatctgcaaagtcagaacttacagaatcttaaaacatcatgcagttaaactcattgtctgtttggaagaccagaatgtgaagacaagtagtagaagaaaatgaatgctgctgctgagactgaagaccagtatttcagaactttgagaattggagagcaggcacatcaactgatctcatttctagagagcccctgacaatcctgaggcttcatcaggagctagagccatttaacatttcctctttccaagaccaacctacaattttcccttgataaccatataaattctgatttaaggtcctaaattcttaacctggaactggagttggcaatacctagttctgcttctgaaactggagtatcattctttacatatttatatgtatgttttaagtagtcctcctgtatctattgtatatttttttcttaatgtttaaggaaatgtgcaggatactacatgctttttgtatcacacagtatatgatggggcatgtgccatagtgcaggcttggggagctttaagcctcagttatataacccacgaaaaacagagcctcctagatgtaacattcctgatcaaggtacaattctttaaaattcactaatgattgaggtccatatttagtggtactctgaaattggtcactttcctattacacggagtgtgctaaaactaaaaagcattttgaaacatacagaatgttctattgtcattgggaaatttttctttctaacccagtggaggttagaaagaagttatattctggtagcaaattaactttacatcctttttcctacttgttatggttgtttggaccgataagtgtgcttaatcctgaggcaaagtagtgaatatgttttatatgttatgaagaaaagaattgttgtaagtttttgattctactcttatatgctggactgcattcacacatggcatgaaataagtcaggttctttacaaatggtattttgatagatactggattgtgtttgtgccatatttgtgccattcttttaagaacaatgttgcaacacattcatttggataagttgtgatttgacgactgatttaaataaaatatttgcttcacttag

SEQ ID NO: 5944 - protein, 1782 aa, Homo sapiens; identical to SEQ ID NO: 777

SEQ ID NO: 5945 - DNA, 1537 bp, Homo sapiens
cgagcgcgtctccttcattcgcaggctgggcgcgttcgcagtcggctggcggcgaaggaaggcgctctcgggacctcgcgggcgcgcgtcttttggctcttgcccctgtccctgcggcttggggaaggcgtaacccggcggctaggcgcgggagaagtgcggaggagccatgggcgccgggagctccaccgagcagcgcagcccggagcagccgcccgaggggagctccacgccggctgagcccgagcccagcggcggcggcccctcggccgaggcggcgccagacaccaccgcggaccccgccatcgctgcctcggaccccgccaccaagctcctacagaagaatggtcagctgtccaccatcaatggcgtagctgagcaagatgagctcagcctccaggagggtgacctaaatggccagaaaggagccctgaacggtcaaggagccctaaacagccaggaggaagaagaagtcattgtcacagaggttaaactcattgtctgtttggaagaccagaatgtgaagacaagtagtagaagaaaatgaatgctgctgctgagactgaagaccagtatttcagaactttgagaattggagagcaggcacatcaactgatctcatttctagagagcccctgacaatcctgaggcttcatcaggagctagagccatttaacatttcctctttccaagaccaacctacaattttcccttgataaccatataaattctgatttaaggtcctaaattcttaacctggaactggagttggcaatacctagttctgcttctgaaactggagtatcattctttacatatttatatgtatgttttaagtagtcctcctgtatctattgtatatttttttcttaatgtttaaggaaatgtgcaggatactacatgctttttgtatcacacagtatatgatggggcatgtgccatagtgcaggcttggggagctttaagcctcagttatataacccacgaaaaacagagcctcctagatgtaacattcctgatcaaggtacaattctttaaaattcactaatgattgaggtccatatttagtggtactctgaaattggtcactttcctattacacggagtgtgctaaaactaaaaagcattttgaaacatacagaatgttctattgtcattgggaaatttttctttctaacccagtggaggttagaaagaagttatattctggtagcaaattaactttacatcctttttcctacttgttatggttgtttggaccgataagtgtgcttaatcctgaggcaaagtagtgaatatgttttatatgttatgaagaaaagaattgttgtaagtttttgattctactcttatatgctggactgcattcacacatggcatgaaataagtcaggttctttacaaatggtattttgatagatactggattgtgtttgtgccatatttgtgccattcttttaagaacaatgttgcaacacattcatttggataagttgtgatttgacgactgatttaaataaaatatttgcttcacttag

SEQ ID NO: 5946 - protein, 125 aa, Homo sapiens
MGAGSSTEQRSPEQPPEGSSTPAEPEPSGGGPSAEAAPDTTADPAIAASDPATKLLQKNGQLSTINGVAEQDELSLQEGDLNGQKGALNGQGALNSQEEEEVIVTEVKLIVCLEDQNVKTSSRRK

SEQ ID NO: 5947 - DNA, 3321 bp, Homo sapiens
cgagcgcgtctccttcattcgcaggctgggcgcgttcgcagtcggctggcggcgaaggaaggcgctctcgggacctcgcgggcgcgcgtcttttggctcttgcccctgtccctgcggcttggggaaggcgtaacccggcggctaggcgcgggagaagtgcggaggagccatgggcgccgggagctccaccgagcagcgcagcccggagcagccgcccgaggggagctccacgccggctgagcccgagcccagcggcggcggcccctcggccgaggcggcgccagacaccaccgcggaccccgccatcgctgcctcggaccccgccaccaagctcctacagaagaatggtcagctgtccaccatcaatggcgtagctgagcaagatgagctcagcctccaggagggtgacctaaatggccagaaaggagccctgaacggtcaaggagccctaaacagccaggaggaagaagaagtcattgtcacagaggttaaactcattgtctgtttggaagaccagaatgtgaagacaagtagtagaagaaaatgaatgctgctgctgagactgaagaccagtatttcagaactttgagaattggagagcaggcacatcaactgatctcatttctagagagcccctgacaatcctgaggcttcatcaggagctagagccatttaacatttcctctttccaagaccaacctacaattttcccttgataaccatataaattctgatttaaggtcctaaattcttaacctggaactggagttggcaatacctagttctgcttctgaaactggagtatcattctttacatatttatatgtatgttttaagtagtcctcctgtatctattgtatatttttttcttaatgtttaaggaaatgtgcaggatactacatgctttttgtatcacacagtatatgatggggcatgtgccatagtgcaggcttggggagctttaagcctcagttatataacccacgaaaaacagagcctcctagatgtaacattcctgatcaaggtacaattctttaaaattcactaatgattgaggtccatatttagtggtactctgaaattggtcactttcctattacacggagtgtgctaaaactaaaaagcattttgaaacatacagaatgttctattgtcattgggaaatttttctttctaacccagtggaggttagaaagaagttatattctggtagcaaattaactttacatcctttttcctacttgttatggttgtttggaccgataagtgtgcttaatcctgaggcaaagtagtgaatatgttttatatgttatgaagaaaagaattgttgtaagtttttgattctactcttatatgctggactgcattcacacatggcatgaaataagtcaggttctttacaaatggtattttgatagatactggattgtgtttgtgccatatttgtgccattcttttaagaacaatgttgcaacacattcatttggataagttgtgatttgacgactgatttaaataaaatatttgcttcacttagatttgctggttttattagataccaggaagcctgggacatatgtgtaccacattagaattctaaagataatgattgataagctagaactttctgatgtagtcattacatgaaaccccttgtcactggtttgtgtgttcagaggaagccatggccgagatagctttcctgaaataaaccagtagcttttcagattgacgttcttgctacaattgtaccatctggtaattcctgaaaatgtcaatttttttgtgttaatatttttggtttcaaacaataacaaatgtctctagaaagaaattttaagaaagcttaattaatagtaaaaatgcctttcctgaaataatcttggaaaattttttaaatgtcaaaatgatgagtcatgctaatacattgagggtttgtttttttgtttgtttgtttgtttgtttttgagacagagtttcgctcttgttgcccaggctggagtgcaatggcacgatctcagctcaccgcaacctccacctcccggattccagcgattctcctgcctcagcctacattaagggttttgtcagacaattgtcacacgaagaatagtgtcacttatctactcttgacacacagaactggcctggcatatagctttccagattttactcaaacttggtactccagtttgaaaatttaaattttgactgctgattagctggaaagcctagttttaatggaaagaaagtttgcttttaaaactgaaagtagtttctttttgctaacaaatctaacttcatacataattggccatattagtaaaacacctcatgatagcagtgtatatatagtcttgtttgtagttggaagtcatcttttaggagttattctcaaatatatataatagctacccatgcatcattattaaaatccccaaattcaaaaaacctctgatatatatatataatttttttttttttttttttttggccaactgagattgaaatccaagtgctggtttctagttctgaacatcaactaaagagttttggaaatgacagcaatttataacaagttcatattgacttcctctctatggcaggaagacattctgtgctgttttgaacagattaaagatttgtgtagtttgtgggaaattgacgtttttgtttaaattccacccgcgtttgtcttttcctaccacctgtggccaggtgctcgctggccatcacagttgcgattccatgagtagctgctttatgactgctttttgtactatctggatgtgcccagagttacttctgtacaagctctgtatctatgtccgttgagaacattattttaacaagaagaacaccaacagtagcatgaaatataatactgttttataattctaaagctgctgttaatttatgaagtacataataatctaatgtaaactgcagaagtcagagcaagtgcctacattttgttatttttggcattactacagagccatgtacaatagaaagcaatgcaagacttgtaaactctcaccacttcttgtaatatcaaatgttccccctcaggttattttgcttatggtacccatgagttgcctctctctgtacatagataaattgttccaatattttcctttgatgtttggaactacagatagtcaagggctggaaattttagttttcaatataagcttccagcttagcaattacctctagtcgaagacaatatttgattcctagttctgtttggggcaaattttcatttatctaaataaaatgcaatctaattaaatgccatggattttctttctgtaa

SEQ ID NO: 5948 - protein, 125 aa, Homo sapiens; identical to SEQ ID NO: 5946

SEQ ID NO: 5949 - DNA, 1925 bp, Homo sapiens
gtctccttcattcgcaggctgggcgcgttcgcagtcggctggcggcgaaggaaggcgctctcgggacctcgcgggcgcgcgtcttttggctcttgcccctgtccctgcggcttggggaaggcgtaacccggcggctaggcgcgggagaagtgcggaggagccatgggcgccgggagctccaccgagcagcgcagcccggagcagccgcccgaggggagctccacgccggctgagcccgagcccagcggcggcggcccctcggccgaggcggcgccagacaccaccgcggaccccgccatcgctgcctcggaccccgccaccaagctcctacagaagaatggtcagctgtccaccatcaatggcgtagctgagcaagatgagctcagcctccaggagggtgacctaaatggccagaaaggagccctgaacggtcaaggagccctaaacagccaggaggaagaagaagtcattgtcacagagggtaagccgcccctccaggaactggaaggcacacagcacttgcaacaaactttggactcagcagaaaatactctgtcatactgcctggtggtggattggtgttaacagcaaaaacaatcaattggttacaaaaggaagtatttatctgaccatttggataccccctatacttagaccttgaagttatgtttcctttttcttatctggaacttgatgctttttaaattattgttgctttgtcccaactgcttgtctggagttgaatgtgaattcttgttggaaacagaagtcatggttgctttaaaagagtcattatctctccctctagagaggagcctgctatacttgtacaactctttctgataggcgcattgcaagctcagtggaatagctgttgcttgtcccagtgttagaatttggactgatagaaaggagaggagctggagattcattctgctctgcaagggcagactcgatttcagaagtggcaccagatgatagccttgtgttgtccccaaccactggtgctgagaaatgatgcagaaccaagccctcagatcccagatcacccacggctcctgggacatctctggggaagggacttattaatgtagaccctgatgcaacatcccaagtcgtctttatccatgatttgcacagccaggacactctggggctgggattgggaggagaggaatggccaagttgccctgcccccttggctctgtggactccagaaggatggtcagtaccagcagcatttcacacacaccagcctcattattaaaattggagcaatttgtgaaatagagttgagacttctctagagaaaaaaggttgggaagcagctcagtggctgggtctgggagtcagcttccaggcaatatctcactgagtcaggacaaggcccatcattccctgttcccgccaggccgggtatttgccaggatgtgaaacggaagccaggcttttggagaggctgaagctgatttttgtaacaaggtctggttaccagcaaggaagcggttttcacgttgctcactctgggcccgagtgtggtgcatcgcgccccctggtgcccaaaaagtgcaactacgtgccatgccagccagctctcctggacttccatttttccctgattctcctgttcctcgcccacccttctctttgctgtgcccactgtggtctacgccgaggctcccctccctcctccctgccccaagcaataatgaacaagatcttcattctctgaagagaagtgcaatagtaaaactttcctttttgtttgtgtaggggaagagctggtgttaatgggtcaggcaggcaaggcatgaagtgataaatagggaaaggatgaaagaagggaacaaacccaggggacctaacggacccaccctaacaaaaaattggagtacaaaaaaagtgtattaaaattgtgagaccac

SEQ ID NO: 5950 - protein, 140 aa, Homo sapiens
MGAGSSTEQRSPEQPPEGSSTPAEPEPSGGGPSAEAAPDTTADPAIAASDPATKLLQKNGQLSTINGVAEQDELSLQEGDLNGQKGALNGQGALNSQEEEEVIVTEGKPPLQELEGTQHLQQTLDSAENTLSYCLVVDWC

SEQ ID NO: 5951 - DNA, 10730 bp, Homo sapiens
tgttctcacgagggggcagcttgggcttgaccgagcaggagcttcatggtcccacacgtagtatgacatgtgacctctgcacattgtttacagttcctaaactgtgatttctttttctgtgaaatagttataatagtaagtggctaccaagtagaaagtggtcatggggggtgaaggttaaacacaataacggacacacagaacttacacagggcattttatgccaagctatattgaatatctatatccctctacctgcccgtcaatgtcatgaatattgacaattcactctagaccctgctagaagaatccaaagaaattgacagtgagctggaagcaatgactgagaaattacagtacctcactagcgtgtactgtacagaaaaaatgtctcagcaagtggcagaactgggacgggagactgaggagttgcgacagatgatcaaaattcgtttgcagaacctccaagatgcagctaaggatatgaaaaaatttgaagcagagttgaaaaagttacaagctgccttggagcaagcccaggcaacactgacttctccagaagttggacgtctcagtctcaaggagcagctctctcatcggcagcatttgttgtctgagatggagtcactgaagccgaaggtgcaagcagtgcagctctgccagagtgccctccggatccccgaggatgtggttgccagcttacctctctgtcatgctgctctgcggctgcaggaagaggccagccggctgcagcacaccgccatccagcagtgtaacatcatgcaggcagctgtggtacaatatgaacaatatgagcaagaaatgaaacatctccagcaactgatagaaggagctcacagagagattgaggataaacctgttgccaccagtaacatacaggagctgcaggctcagatttctcggcatgaggagctggcgcagaaaattaagggctaccaggagcagatcgcttctttgaattccaagtgcaagatgctgacgatgaaagccaagcacgccaccatgctgctgacggtgaccgaggtcgaggggctggcggaagggacagaggacctggatggggagctcctccccacgccttcggcccacccctctgtggtcatgatgactgcaggtcgctgtcacactttgctgtcaccggtcactgaggagtctggggaggagggaaccaacagtgagatttcctctccacctgcctgtcgctccccttcacctgtggctaatacagatgcttctgttaaccaggacattgcatattaccaagccttgtctgctgagaggttgcagacagatgctgcaaaaattcaccccagcacatccgcatcccaggagttctatgaaccgggattggagccatccgctactgccaaactgggtgatttgcagcgttcttgggaaaccttaaagaatgtgatcagtgagaagcagcgcacactctatgaagctttggaacgccagcagaagtaccaggactccctccagtccatctctacgaagatggaggccattgagctgaaactcagtgagagcccagagcctggcaggagtccagaaagccagatggctgaacatcaggcattgatggatgagattctcatgctccaggatgaaatcaatgagctccagtcctctctcgcagaggagctggtatccgagtcttgtgaggccgaccctgcggagcagctggccttgcagtccacgctcactgtcttagccgagcgaatgtccaccatcaggatgaaagcctcggggaaacggcagcttttggaggagaagttgaatgatcagctggaggaacaaaggcaggaacaggccctgcagaggtatcgctgtgaagccgatgagctggacagctggctcttgagtaccaaggccactctggacactgcgctgagtccacccaaggagcccatggacatggaggcccagcttatggactgccagaatatgctggtggaaatagagcagaaggtggtggctttatcagaactgtcagtccacaatgagaacctgctgctggagggcaaagctcacaccaaggacgaggccgagcagctggctggaaagctgagaaggctcaaggggagcctgctggagctgcagagagccctgcatgataagcagctcaacatgcagggaacagcacaggagaaggaggagagcgatgttgacctaacagccacgcagagccccggcgtccaggaatggctggcccaagctcgcaccacatggacccagcagcggcagagcagtctccagcaacaaaaagagttagaacaggaattagccgagcagaagagtctccttcgctcagtagccagtcgtggagaggagattctaattcaacattcggcggcagagacctctggtgatgctggcgaaaaacctgatgtgttatcccaggagttggggatggaaggggagaaatcatccgctgaagaccagatgagaatgaaatgggaaagcctacatcaagaatttagtaccaagcagaaactactacagaatgttctggaacaggaacaagagcaagtgctttatagcaggccaaatcgactcttgtctggtgtgccactgtacaaaggggacgtgccaacccaagataaatctgcagttacatctttgctggatggactgaaccaagccttcgaggaggtttcatcccagagtggaggggcaaagaggcagagtatacacttggagcagaagttgtatgatggagtctcagccacctctacttggttggatgacgttgaagaacgtttatttgttgccacagcacttttaccagaagaaacagagacttgtctcttcaaccaagagattcttgccaaagacattaaggaaatgtctgaagaaatggataagaacaaaaacttgttttcccaagcttttccagagaatggtgataatcgagatgttattgaagatactttgggttgtcttttgggcaggttatccttgctagactcagtagtgaatcaacgatgtcatcagatgaaagaaagacttcagcaaatactaaatttccagaatgatctgaaagtgctgtttacatcactggctgacaacaaatacatcattctgcaaaaactggcaaatgtgtttgaacagcccgtagcagaacaaatagaggcaatacaacaggctgaagatggactcaaagaatttgatgcaggaatcattgaattaaagaggcgtggtgacaagctacaggtcgagcagccgtccatgcaagaactctccaagctccaggacatgtatgatgagctgatgatgatcattggctcccggaggagtggtctgaatcagaaccttacactcaagagtcagtatgagagggccctacaagatctggctgacctgctagaaactggtcaggagaagatggcaggagaccagaaaatcatcgtgtcttccaaagaggaaatccagcaactacttgacaaacataaggaatactttcagggcctggaatctcatatgatcttgactgaaacactcttcagaaagataatcagctttgcagtccaaaaggaaacccagttccatacagagctgatggctcaggcttctgctgtactgaaacgggctcacaagaggggtgtggagctggagtacattctagagacgtggtcccatctggatgaggaccagcaggagctcagcagacagctggaggtggtggaaagcagcatcccaagcgtgggtctggtggaggagaacgaggacaggcttattgaccgcataacactctaccagcatttaaaatctagccttaatgaataccagcccaaattatatcaagtattagatgatgggaaacgacttctgatatccatcagctgctcagatctagaaagccaactaaatcaacttggagagtgctggctaagtaacaccaataaaatgtctaaggaacttcacagactggaaacaatattgaaacactggaccagatatcaaagtgaatctgcagatctaattcactggttacaatctgcaaaagaccggctagaattttggactcagcaatctgtgacagtcccacaagagctggaaatggtccgtgatcatctaaatgctttcctggagttttctaaagaagtggatgcccaatcttccctgaaatcatctgttctgagtactggaaatcagctccttcgactaaaaaaggtggacacagccacgctgcgctctgagctgtcgcgcattgatagccagtggactgacctgctaaccaatatcccagccgtccaggagaagctccaccagctccagatggataaactgccttcccgccatgccatttctgaagtcatgagttggatttctctaatggaaaatgttattcagaaggatgaagataatattaaaaattccataggttacaaggcaattcatgaataccttcagaaatataagggttttaagatagacattaactgtaaacagctgacagtggattttgtgaaccagtccgtgctacaaatcagcagtcaggatgtggaaagtaagcgtagtgataagactgattttgctgagcaacttggagcaatgaataaaagttggcaaattctgcaaggtctagtaactgagaagatccagctgttggaaggcttattggaatcttggtcagaatatgaaaataatgtacaatgtctgaaaacatggtttgaaacccaggaaaagagactaaaacaacagcatcgaattggagatcaggcttctgttcaaaatgcactgaaagactgtcaggatctggaagatttgattaaagcaaaagaaaaagaagtagagaaaattgagcagaatggacttgctttgattcagaacaagaaagaagacgtctctagcattgtcatgagcacactgcgagagctcggccaaacctgggcaaatttagatcacatggttggacaattaaagatactgctgaaatcagtgcttgaccaatggagtagtcacaaagtggcctttgacaagataaacagttacctcatggaggccagatactctctttcccgattccgtctgctgactggctccttagaagctgtgcaagttcaggtggacaatcttcagaatctccaagatgatctggaaaaacaggaaaggagcttacagaaatttggctctatcaccaaccaattattaaaagagtgtcacccacccgtgacagaaactcttaccaatacactgaaagaagtcaacatgagatggaataacttgctggaagagattgctgagcagctacagtccagcaaggccctacttcagctttggcaaagatacaaggactactccaaacagtgtgcttcgacagttcagcagcaggaggatcgaaccaatgagctgttgaaggcagccacaaacaaggacattgccgatgatgaggttgccacatggattcaagattgcaacgacctcctcaaaggactgggcacagttaaagattccctcttttttctccatgagctgggagagcaactgaagcaacaagtggatgcttccgcagcatcagctattcaatcggatcaactctctttgagtcaacacttgtgtgccctggagcaagctctctgcaaacagcagacttcattacaggctggagttcttgattatgaaacctttgccaagagtttagaagctttggaggcctggatagtggaagctgaagaaatactacaagggcaggaccctagccactcatctgacctctccacaatccaggaaaggatggaagaacttaagggacagatgttaaaattcagcagcatggctccagatttagaccgtctaaatgagcttggatataggttacccttgaatgataaggaaatcaaaagaatgcagaatctgaaccgccattggtctctgatctcctctcagactacagaaagattcagcaagttgcagtcatttttgctacaacatcagactttcttggaaaaatgtgaaacatggatggaattcctagttcagacagaacaaaagttagcagtagagatttcaggaaattatcagcaccttttggaacagcagagagcacacgagttgtttcaagccgagatgttcagtcgtcagcagattttgcactcaatcattattgatgggcaacgtcttctagaacaaggtcaagttgatgacagggatgaattcaacctgaaattgacactcctcagtaatcaatggcagggagtgattcgcagggcccagcagaggcgggggatcattgacagccagattcgccagtggcagcgctatagggagatggcagaaaagcttcgtaaatggttggttgaagtgtcctacctccccatgagtggtctcggaagtgttcctataccactgcaacaagcaaggaccctctttgatgaagtgcagttcaaagaaaaagtgtttctgcggcaacaaggcagctacatcctgactgtggaggctggcaagcaactccttctctcggcggacagtggcgctgaggccgccttgcaggccgaactcgctgaaatccaagagaaatggaaatcagccagcatgcggctggaagaacagaagaaaaaactagccttcttgttgaaagactgggaaaaatgtgagaaaggaatagcagattccctggagaaactacgaactttcaaaaagaagctttcgcagtctctcccggatcaccatgaagagctccatgcagaacaaatgcgttgcaaggaattagaaaatgcagttgggagctggacagatgacttgacccagttgagcctgctgaaggacaccctctctgcctatatcagtgctgatgatatctccattcttaatgaacgcgtagagcttctgcaaaggcagtgggaagaactatgccaccagctctccttaaggcggcagcaaataggtgaaagattgaatgaatgggcagtcttcagtgaaaagaacaaggaactctgtgagtggttgactcaaatggaaagcaaagtttctcagaatggagacattctcattgaagaaatgatagagaagctcaagaaggattatcaagaggaaattgctattgctcaagagaacaaaatacagctccaacaaatgggagaacgacttgctaaagccagccatgaaagcaaagcatctgagattgaatacaagctgggaaaggtcaacgaccggtggcagcatctcctggacctcattgcagccagggtgaagaagctgaaggagaccctggtagccgtgcagcagcttgataagaacatgagcagcctgaggacctggctcgctcacatcgagtcagagctggccaagccaatagtctacgattcctgtaactcggaagaaatacagagaaagcttaatgagcagcaggagcttcagagagacatagagaagcacagtacaggtgttgcatctgtcctcaacctgtgtgaagtcctgctgcacgactgtgacgcctgtgccactgatgccgagtgtgactctatacagcaggctacgagaaacctggaccggcggtggagaaacatttgtgctatgtccatggaaaggaggctgaaaatcgaagagacgtggcgattgtggcagaaatttctggatgactattcacgttttgaagattggctgaagtcttcagaaaggacagctgcttttcccagctcttctggggtgatctatacagttgccaaggaagaactaaagaaatttgaggctttccagcgacaggtccacgagtgcctgacgcagctggaactgatcaacaagcagtaccgccgcctggccagggagaaccgcactgattcagcatgtagcctcaaacagatggttcacgaaggcaaccagagatgggacaacctgcaaaagcgtgtcacctccatcttgcgcagactcaagcattttattggccagcgtgaggagtttgagactgcgcgggacagcattctggtctggctcacagagatggatctgcagctcactaatattgaacatttttctgagtgtgatgttcaagctaaaataaagcaactcaaggccttccagcaggaaatttcactgaaccacaataagattgagcagataattgcccaaggagaacagctgatagaaaagagtgagcccttggatgcagcgatcatcgaggaggaactagatgagctccgacggtactgccaggaggtcttcgggcgtgtggaaagataccataagaaactgatccgcctgcctctcccagacgatgagcacgacctctcagacagggagctggagctggaagactctgcagctctgtcggacctgcactggcacgaccgctctgcagacagcctgctttctccacagccttcctccaatctctccctctcgctcgctcagcccctccggagcgagcggtcaggacgagacaccccggctagtgtggactccatccccctggagtgggatcacgactatgacctcagtcgggacctggagtctgcaatgtccagagctctgccctctgaggatgaagaaggtcaggatgacaaagatttctacctccggggagctgttggcttatcaggggaccacagtgccctagagtcacagatccgacaactgggcaaagccctggatgatagccgttttcagatacagcaaaccgaaaatatcattcgcagcaaaactcccacggggccggagctagacaccagctacaaaggctacatgaaactgctgggcgaatgcagtagcagtatagactccgtgaagagactggagcacaaactgaaggaggaagaggagagccttcctggctttgttaacctgcatagtaccgaaacccaaacggctggtgtgattgaccgatgggagcttctccaggcccaggcattgagcaaggagttgaggatgaagcagaacctccagaagtggcagcagtttaactcagacttgaacagcatctgggcctggctgggggacacggaggaggagttggaacagctccagcgtctggaactcagcactgacatccagaccatcgagctccagatcaaaaagctcaaggagctccagaaagctgtggaccaccgcaaagccatcatcctctccatcaatctctgcagccctgagttcacccaggctgacagcaaggagagccgggacctgcaggatcgcttgtcgcagatgaatgggcgctgggaccgagtgtgctctctgctggaggagtggcggggcctgctgcaggatgccctgatgcagtgccagggtttccatgaaatgagccatggtttgcttcttatgctggagaacattgacagaaggaaaaatgaaattgtccctattgattctaaccttgatgcagagatacttcaggaccatcacaaacagcttatgcaaataaagcatgagctgttggaatcccaactcagagtagcctctttgcaagacatgtcttgccaactactggtgaatgctgaaggaacagactgtttagaagccaaagaaaaagtccatgttattggaaatcggctcaaacttctcttgaaggaggtcagtcgtcatatcaaggaactggagaagttattagacgtgtcaagtagtcagcaggatttgtcttcctggtcttctgctgatgaactggacacctcagggtctgtgagtcccacatcaggaaggagcaccccaaacagacagaaaacgccacgaggcaagtgtagtctctcacagcctggaccctctgtcagcagtccacatagcaggtccacaaaaggtggctccgattcctccctttctgagccagggccaggtcggtccggccgcggcttcctgttcagagtcctccgagcagctcttccccttcagcttctcctgctcctcctcatcgggcttgcctgccttgtaccaatgtcagaggaagactacagctgtgccctctccaacaactttgcccggtcattccaccccatgctcagatacacgaatggccctcctccactctgaactaagcagatgccatctgcagaagtgctggtagcataaggaggatcgggtcataagcaatcccaaactaccaacaagaggaccttgatcttggcgaaagccctcggtgtggcagctttagccctcctccagatcacatgtgtgcaaattatggcttcagaggtggaagataaacagtgacgggggaacaaacagacaacaagaaggtttggaagaaatctggtttgagactctgaaccttagcactaaggagattgagtaaggacctccaaagttccccggactcatgaattctgggcccttggcccattctgtgcacagccaaggacttcagtagaccatctgggcagctttcccatggtgctgctccaaccatcagataaatgaccctcccaagcaccatgtcagtgtcgtacaatctaccaaccaaccagtgctgaagagattttagaaccttgtaacatacaatttttaagagcttatatggcagcttcctttttaccttgttttcctttggggcatgatgttttaacctttgctttagaagcacaagctgtaaatctaaaaggcacttttttttagaggtataaagaaaaactagatgtaataaataagatcatggaaggctttatgtgaaaaaagttgaatgttatagtaaaaaaaaaaagatatttatgtatgtacagtttgctaaagccaagttttgtttgtattgatttctttgcatttattatagatattataaaatagtt

SEQ ID NO: 5952 - protein, 3212 aa, Homo sapiens
MTEKLQYLTSVYCTEKMSQQVAELGRETEELRQMIKIRLQNLQDAAKDMKKFEAELKKLQAALEQAQATLTSPEVGRLSLKEQLSHRQHLLSEMESLKPKVQAVQLCQSALRIPEDVVASLPLCHAALRLQEEASRLQHTAIQQCNIMQAAVVQYEQYEQEMKHLQQLIEGAHREIEDKPVATSNIQELQAQISRHEELAQKIKGYQEQIASLNSKCKMLTMKAKHATMLLTVTEVEGLAEGTEDLDGELLPTPSAHPSVVMMTAGRCHTLLSPVTEESGEEGTNSEISSPPACRSPSPVANTDASVNQDIAYYQALSAERLQTDAAKIHPSTSASQEFYEPGLEPSATAKLGDLQRSWETLKNVISEKQRTLYEALERQQKYQDSLQSISTKMEAIELKLSESPEPGRSPESQMAEHQALMDEILMLQDEINELQSSLAEELVSESCEADPAEQLALQSTLTVLAERMSTIRMKASGKRQLLEEKLNDQLEEQRQEQALQRYRCEADELDSWLLSTKATLDTALSPPKEPMDMEAQLMDCQNMLVEIEQKVVALSELSVHNENLLLEGKAHTKDEAEQLAGKLRRLKGSLLELQRALHDKQLNMQGTAQEKEESDVDLTATQSPGVQEWLAQARTTWTQQRQSSLQQQKELEQELAEQKSLLRSVASRGEEILIQHSAAETSGDAGEKPDVLSQELGMEGEKSSAEDQMRMKWESLHQEFSTKQKLLQNVLEQEQEQVLYSRPNRLLSGVPLYKGDVPTQDKSAVTSLLDGLNQAFEEVSSQSGGAKRQSIHLEQKLYDGVSATSTWLDDVEERLFVATALLPEETETCLFNQEILAKDIKEMSEEMDKNKNLFSQAFPENGDNRDVIEDTLGCLLGRLSLLDSVVNQRCHQMKERLQQILNFQNDLKVLFTSLADNKYIILQKLANVFEQPVAEQIEAIQQAEDGLKEFDAGIIELKRRGDKLQVEQPSMQELSKLQDMYDELMMIIGSRRSGLNQNLTLKSQYERALQDLADLLETGQEKMAGDQKIIVSSKEEIQQLLDKHKEYFQGLESHMILTETLFRKIISFAVQKETQFHTELMAQASAVLKRAHKRGVELEYILETWSHLDEDQQELSRQLEVVESSIPSVGLVEENEDRLIDRITLYQHLKSSLNEYQPKLYQVLDDGKRLLISISCSDLESQLNQLGECWLSNTNKMSKELHRLETILKHWTRYQSESADLIHWLQSAKDRLEFWTQQSVTVPQELEMVRDHLNAFLEFSKEVDAQSSLKSSVLSTGNQLLRLKKVDTATLRSELSRIDSQWTDLLTNIPAVQEKLHQLQMDKLPSRHAISEVMSWISLMENVIQKDEDNIKNSIGYKAIHEYLQKYKGFKIDINCKQLTVDFVNQSVLQISSQDVESKRSDKTDFAEQLGAMNKSWQILQGLVTEKIQLLEGLLESWSEYENNVQCLKTWFETQEKRLKQQHRIGDQASVQNALKDCQDLEDLIKAKEKEVEKIEQNGLALIQNKKEDVSSIVMSTLRELGQTWANLDHMVGQLKILLKSVLDQWSSHKVAFDKINSYLMEARYSLSRFRLLTGSLEAVQVQVDNLQNLQDDLEKQERSLQKFGSITNQLLKECHPPVTETLTNTLKEVNMRWNNLLEEIAEQLQSSKALLQLWQRYKDYSKQCASTVQQQEDRTNELLKAATNKDIADDEVATWIQDCNDLLKGLGTVKDSLFFLHELGEQLKQQVDASAASAIQSDQLSLSQHLCALEQALCKQQTSLQAGVLDYETFAKSLEALEAWIVEAEEILQGQDPSHSSDLSTIQERMEELKGQMLKFSSMAPDLDRLNELGYRLPLNDKEIKRMQNLNRHWSLISSQTTERFSKLQSFLLQHQTFLEKCETWMEFLVQTEQKLAVEISGNYQHLLEQQRAHELFQAEMFSRQQILHSIIIDGQRLLEQGQVDDRDEFNLKLTLLSNQWQGVIRRAQQRRGIIDSQIRQWQRYREMAEKLRKWLVEVSYLPMSGLGSVPIPLQQARTLFDEVQFKEKVFLRQQGSYILTVEAGKQLLLSADSGAEAALQAELAEIQEKWKSASMRLEEQKKKLAFLLKDWEKCEKGIADSLEKLRTFKKKLSQSLPDHHEELHAEQMRCKELENAVGSWTDDLTQLSLLKDTLSAYISADDISILNERVELLQRQWEELCHQLSLRRQQIGERLNEWAVFSEKNKELCEWLTQMESKVSQNGDILIEEMIEKLKKDYQEEIAIAQENKIQLQQMGERLAKASHESKASEIEYKLGKVNDRWQHLLDLIAARVKKLKETLVAVQQLDKNMSSLRTWLAHIESELAKPIVYDSCNSEEIQRKLNEQQELQRDIEKHSTGVASVLNLCEVLLHDCDACATDAECDSIQQATRNLDRRWRNICAMSMERRLKIEETWRLWQKFLDDYSRFEDWLKSSERTAAFPSSSGVIYTVAKEELKKFEAFQRQVHECLTQLELINKQYRRLARENRTDSACSLKQMVHEGNQRWDNLQKRVTSILRRLKHFIGQREEFETARDSILVWLTEMDLQLTNIEHFSECDVQAKIKQLKAFQQEISLNHNKIEQIIAQGEQLIEKSEPLDAAIIEEELDELRRYCQEVFGRVERYHKKLIRLPLPDDEHDLSDRELELEDSAALSDLHWHDRSADSLLSPQPSSNLSLSLAQPLRSERSGRDTPASVDSIPLEWDHDYDLSRDLESAMSRALPSEDEEGQDDKDFYLRGAVGLSGDHSALESQIRQLGKALDDSRFQIQQTENIIRSKTPTGPELDTSYKGYMKLLGECSSSIDSVKRLEHKLKEEEESLPGFVNLHSTETQTAGVIDRWELLQAQALSKELRMKQNLQKWQQFNSDLNSIWAWLGDTEEELEQLQRLELSTDIQTIELQIKKLKELQKAVDHRKAIILSINLCSPEFTQADSKESRDLQDRLSQMNGRWDRVCSLLEEWRGLLQDALMQCQGFHEMSHGLLLMLENIDRRKNEIVPIDSNLDAEILQDHHKQLMQIKHELLESQLRVASLQDMSCQLLVNAEGTDCLEAKEKVHVIGNRLKLLLKEVSRHIKELEKLLDVSSSQQDLSSWSSADELDTSGSVSPTSGRSTPNRQKTPRGKCSLSQPGPSVSSPHSRSTKGGSDSSLSEPGPGRSGRGFLFRVLRAALPLQLLLLLLIGLACLVPMSEEDYSCALSNNFARSFHPMLRYTNGPPPL

SEQ ID NO: 5953 - DNA, 10838 bp, Homo sapiens
caaaaatcagtctgatctcgggaaacctggagaaatttattttctgtactctaatgttctttcattttggtgaccatcaaggtgctgggagaggaattagatggctgtaattcaaagttaatggaattagatgcagcagtacagaaattcttggaacagaatggccaactgggtaagccactggccaagaagataggaaaactgactgaacttcaccagcagaccattagacaagctgagaatcggctctccaagctcaatcaggcagcatcacatttagaagaatacaatgaaatgcttgaattaattttgaagtggattgaaaaagctaaagtcttggctcatggaactattgcatggaattctgcaagccagcttcgggaacaatatattttgcatcagaccctgctagaagaatccaaagaaattgacagtgagctggaagcaatgactgagaaattacagtacctcactagcgtgtactgtacagaaaaaatgtctcagcaagtggcagaactgggacgggagactgaggagttgcgacagatgatcaaaattcgtttgcagaacctccaagatgcagctaaggatatgaaaaaatttgaagcagagttgaaaaagttacaagctgccttggagcaagcccaggcaacactgacttctccagaagttggacgtctcagtctcaaggagcagctctctcatcggcagcatttgttgtctgagatggagtcactgaagccgaaggtgcaagcagtgcagctctgccagagtgccctccggatccccgaggatgtggttgccagcttacctctctgtcatgctgctctgcggctgcaggaagaggccagccggctgcagcacaccgccatccagcagtgtaacatcatgcaggcagctgtggtacaatatgaacaatatgagcaagaaatgaaacatctccagcaactgatagaaggagctcacagagagattgaggataaacctgttgccaccagtaacatacaggagctgcaggctcagatttctcggcatgaggagctggcgcagaaaattaagggctaccaggagcagatcgcttctttgaattccaagtgcaagatgctgacgatgaaagccaagcacgccaccatgctgctgacggtgaccgaggtcgaggggctggcggaagggacagaggacctggatggggagctcctccccacgccttcggcccacccctctgtggtcatgatgactgcaggtcgctgtcacactttgctgtcaccggtcactgaggagtctggggaggagggaaccaacagtgagatttcctctccacctgcctgtcgctccccttcacctgtggctaatacagatgcttctgttaaccaggacattgcatattaccaagccttgtctgctgagaggttgcagacagatgctgcaaaaattcaccccagcacatccgcatcccaggagttctatgaaccgggattggagccatccgctactgccaaactgggtgatttgcagcgttcttgggaaaccttaaagaatgtgatcagtgagaagcagcgcacactctatgaagctttggaacgccagcagaagtaccaggactccctccagtccatctctacgaagatggaggccattgagctgaaactcagtgagagcccagagcctggcaggagtccagaaagccagatggctgaacatcaggcattgatggatgagattctcatgctccaggatgaaatcaatgagctccagtcctctctcgcagaggagctggtatccgagtcttgtgaggccgaccctgcggagcagctggccttgcagtccacgctcactgtcttagccgagcgaatgtccaccatcaggatgaaagcctcggggaaacggcagcttttggaggagaagttgaatgatcagctggaggaacaaaggcaggaacaggccctgcagaggtatcgctgtgaagccgatgagctggacagctggctcttgagtaccaaggccactctggacactgcgctgagtccacccaaggagcccatggacatggaggcccagcttatggactgccagaatatgctggtggaaatagagcagaaggtggtggctttatcagaactgtcagtccacaatgagaacctgctgctggagggcaaagctcacaccaaggacgaggccgagcagctggctggaaagctgagaaggctcaaggggagcctgctggagctgcagagagccctgcatgataagcagctcaacatgcagggaacagcacaggagaaggaggagagcgatgttgacctaacagccacgcagagccccggcgtccaggaatggctggcccaagctcgcaccacatggacccagcagcggcagagcagtctccagcaacaaaaagagttagaacaggaattagccgagcagaagagtctccttcgctcagtagccagtcgtggagaggagattctaattcaacattcggcggcagagacctctggtgatgctggcgaaaaacctgatgtgttatcccaggagttggggatggaaggggagaaatcatccgctgaagaccagatgagaatgaaatgggaaagcctacatcaagaatttagtaccaagcagaaactactacagaatgttctggaacaggaacaagagcaagtgctttatagcaggccaaatcgactcttgtctggtgtgccactgtacaaaggggacgtgccaacccaagataaatctgcagttacatctttgctggatggactgaaccaagccttcgaggaggtttcatcccagagtggaggggcaaagaggcagagtatacacttggagcagaagttgtatgatggagtctcagccacctctacttggttggatgacgttgaagaacgtttatttgttgccacagcacttttaccagaagaaacagagacttgtctcttcaaccaagagattcttgccaaagacattaaggaaatgtctgaagaaatggataagaacaaaaacttgttttcccaagcttttccagagaatggtgataatcgagatgttattgaagatactttgggttgtcttttgggcaggttatccttgctagactcagtagtgaatcaacgatgtcatcagatgaaagaaagacttcagcaaatactaaatttccagaatgatctgaaagtgctgtttacatcactggctgacaacaaatacatcattctgcaaaaactggcaaatgtgtttgaacagcccgtagcagaacaaatagaggcaatacaacaggctgaagatggactcaaagaatttgatgcaggaatcattgaattaaagaggcgtggtgacaagctacaggtcgagcagccgtccatgcaagaactctccaagctccaggacatgtatgatgagctgatgatgatcattggctcccggaggagtggtctgaatcagaaccttacactcaagagtcagtatgagagggccctacaagatctggctgacctgctagaaactggtcaggagaagatggcaggagaccagaaaatcatcgtgtcttccaaagaggaaatccagcaactacttgacaaacataaggaatactttcagggcctggaatctcatatgatcttgactgaaacactcttcagaaagataatcagctttgcagtccaaaaggaaacccagttccatacagagctgatggctcaggcttctgctgtactgaaacgggctcacaagaggggtgtggagctggagtacattctagagacgtggtcccatctggatgaggaccagcaggagctcagcagacagctggaggtggtggaaagcagcatcccaagcgtgggtctggtggaggagaacgaggacaggcttattgaccgcataacactctaccagcatttaaaatctagccttaatgaataccagcccaaattatatcaagtattagatgatgggaaacgacttctgatatccatcagctgctcagatctagaaagccaactaaatcaacttggagagtgctggctaagtaacaccaataaaatgtctaaggaacttcacagactggaaacaatattgaaacactggaccagatatcaaagtgaatctgcagatctaattcactggttacaatctgcaaaagaccggctagaattttggactcagcaatctgtgacagtcccacaagagctggaaatggtccgtgatcatctaaatgctttcctggagttttctaaagaagtggatgcccaatcttccctgaaatcatctgttctgagtactggaaatcagctccttcgactaaaaaaggtggacacagccacgctgcgctctgagctgtcgcgcattgatagccagtggactgacctgctaaccaatatcccagccgtccaggagaagctccaccagctccagatggataaactgccttcccgccatgccatttctgaagtcatgagttggatttctctaatggaaaatgttattcagaaggatgaagataatattaaaaattccataggttacaaggcaattcatgaataccttcagaaatataagggttttaagatagacattaactgtaaacagctgacagtggattttgtgaaccagtccgtgctacaaatcagcagtcaggatgtggaaagtaagcgtagtgataagactgattttgctgagcaacttggagcaatgaataaaagttggcaaattctgcaaggtctagtaactgagaagatccagctgttggaaggcttattggaatcttggtcagaatatgaaaataatgtacaatgtctgaaaacatggtttgaaacccaggaaaagagactaaaacaacagcatcgaattggagatcaggcttctgttcaaaatgcactgaaagactgtcaggatctggaagatttgattaaagcaaaagaaaaagaagtagagaaaattgagcagaatggacttgctttgattcagaacaagaaagaagacgtctctagcattgtcatgagcacactgcgagagctcggccaaacctgggcaaatttagatcacatggttggacaattaaagatactgctgaaatcagtgcttgaccaatggagtagtcacaaagtggcctttgacaagataaacagttacctcatggaggccagatactctctttcccgattccgtctgctgactggctccttagaagctgtgcaagttcaggtggacaatcttcagaatctccaagatgatctggaaaaacaggaaaggagcttacagaaatttggctctatcaccaaccaattattaaaagagtgtcacccacccgtgacagaaactcttaccaatacactgaaagaagtcaacatgagatggaataacttgctggaagagattgctgagcagctacagtccagcaaggccctacttcagctttggcaaagatacaaggactactccaaacagtgtgcttcgacagttcagcagcaggaggatcgaaccaatgagctgttgaaggcagccacaaacaaggacattgccgatgatgaggttgccacatggattcaagattgcaacgacctcctcaaaggactgggcacagttaaagattccctcttttttctccatgagctgggagagcaactgaagcaacaagtggatgcttccgcagcatcagctattcaatcggatcaactctctttgagtcaacacttgtgtgccctggagcaagctctctgcaaacagcagacttcattacaggctggagttcttgattatgaaacctttgccaagagtttagaagctttggaggcctggatagtggaagctgaagaaatactacaagggcaggaccctagccactcatctgacctctccacaatccaggaaaggatggaagaacttaagggacagatgttaaaattcagcagcatggctccagatttagaccgtctaaatgagcttggatataggttacccttgaatgataaggaaatcaaaagaatgcagaatctgaaccgccattggtctctgatctcctctcagactacagaaagattcagcaagttgcagtcatttttgctacaacatcagactttcttggaaaaatgtgaaacatggatggaattcctagttcagacagaacaaaagttagcagtagagatttcaggaaattatcagcaccttttggaacagcagagagcacacgagttgtttcaagccgagatgttcagtcgtcagcagattttgcactcaatcattattgatgggcaacgtcttctagaacaaggtcaagttgatgacagggatgaattcaacctgaaattgacactcctcagtaatcaatggcagggagtgattcgcagggcccagcagaggcgggggatcattgacagccagattcgccagtggcagcgctatagggagatggcagaaaagcttcgtaaatggttggttgaagtgtcctacctccccatgagtggtctcggaagtgttcctataccactgcaacaagcaaggaccctctttgatgaagtgcagttcaaagaaaaagtgtttctgcggcaacaaggcagctacatcctgactgtggaggctggcaagcaactccttctctcggcggacagtggcgctgaggccgccttgcaggccgaactcgctgaaatccaagagaaatggaaatcagccagcatgcggctggaagaacagaagaaaaaactagccttcttgttgaaagactgggaaaaatgtgagaaaggaatagcagattccctggagaaactacgaactttcaaaaagaagctttcgcagtctctcccggatcaccatgaagagctccatgcagaacaaatgcgttgcaaggaattagaaaatgcagttgggagctggacagatgacttgacccagttgagcctgctgaaggacaccctctctgcctatatcagtgctgatgatatctccattcttaatgaacgcgtagagcttctgcaaaggcagtgggaagaactatgccaccagctctccttaaggcggcagcaaataggtgaaagattgaatgaatgggcagtcttcagtgaaaagaacaaggaactctgtgagtggttgactcaaatggaaagcaaagtttctcagaatggagacattctcattgaagaaatgatagagaagctcaagaaggattatcaagaggaaattgctattgctcaagagaacaaaatacagctccaacaaatgggagaacgacttgctaaagccagccatgaaagcaaagcatctgagattgaatacaagctgggaaaggtcaacgaccggtggcagcatctcctggacctcattgcagccagggtgaagaagctgaaggagaccctggtagccgtgcagcagcttgataagaacatgagcagcctgaggacctggctcgctcacatcgagtcagagctggccaagccaatagtctacgattcctgtaactcggaagaaatacagagaaagcttaatgagcagcaggagcttcagagagacatagagaagcacagtacaggtgttgcatctgtcctcaacctgtgtgaagtcctgctgcacgactgtgacgcctgtgccactgatgccgagtgtgactctatacagcaggctacgagaaacctggaccggcggtggagaaacatttgtgctatgtccatggaaaggaggctgaaaatcgaagagacgtggcgattgtggcagaaatttctggatgactattcacgttttgaagattggctgaagtcttcagaaaggacagctgcttttcccagctcttctggggtgatctatacagttgccaaggaagaactaaagaaatttgaggctttccagcgacaggtccacgagtgcctgacgcagctggaactgatcaacaagcagtaccgccgcctggccagggagaaccgcactgattcagcatgtagcctcaaacagatggttcacgaaggcaaccagagatgggacaacctgcaaaagcgtgtcacctccatcttgcgcagactcaagcattttattggccagcgtgaggagtttgagactgcgcgggacagcattctggtctggctcacagagatggatctgcagctcactaatattgaacatttttctgagtgtgatgttcaagctaaaataaagcaactcaaggccttccagcaggaaatttcactgaaccacaataagattgagcagataattgcccaaggagaacagctgatagaaaagagtgagcccttggatgcagcgatcatcgaggaggaactagatgagctccgacggtactgccaggaggtcttcgggcgtgtggaaagataccataagaaactgatccgcctgcctctcccagacgatgagcacgacctctcagacagggagctggagctggaagactctgcagctctgtcggacctgcactggcacgaccgctctgcagacagcctgctttctccacagccttcctccaatctctccctctcgctcgctcagcccctccggagcgagcggtcaggacgagacaccccggctagtgtggactccatccccctggagtgggatcacgactatgacctcagtcgggacctggagtctgcaatgtccagagctctgccctctgaggatgaagaaggtcaggatgacaaagatttctacctccggggagctgttggcttatcaggggaccacagtgccctagagtcacagatccgacaactgggcaaagccctggatgatagccgttttcagatacagcaaaccgaaaatatcattcgcagcaaaactcccacggggccggagctagacaccagctacaaaggctacatgaaactgctgggcgaatgcagtagcagtatagactccgtgaagagactggagcacaaactgaaggaggaagaggagagccttcctggctttgttaacctgcatagtaccgaaacccaaacggctggtgtgattgaccgatgggagcttctccaggcccaggcattgagcaaggagttgaggatgaagcagaacctccagaagtggcagcagtttaactcagacttgaacagcatctgggcctggctgggggacacggaggaggagttggaacagctccagcgtctggaactcagcactgacatccagaccatcgagctccagatcaaaaagctcaaggagctccagaaagctgtggaccaccgcaaagccatcatcctctccatcaatctctgcagccctgagttcacccaggctgacagcaaggagagccgggacctgcaggatcgcttgtcgcagatgaatgggcgctgggaccgagtgtgctctctgctggaggagtggcggggcctgctgcaggatgccctgatgcagtgccagggtttccatgaaatgagccatggtttgcttcttatgctggagaacattgacagaaggaaaaatgaaattgtccctattgattctaaccttgatgcagagatacttcaggaccatcacaaacagcttatgcaaataaagcatgagctgttggaatcccaactcagagtagcctctttgcaagacatgtcttgccaactactggtgaatgctgaaggaacagactgtttagaagccaaagaaaaagtccatgttattggaaatcggctcaaacttctcttgaaggaggtcagtcgtcatatcaaggaactggagaagttattagacgtgtcaagtagtcagcaggatttgtcttcctggtcttctgctgatgaactggacacctcagggtctgtgagtcccacatcaggaaggagcaccccaaacagacagaaaacgccacgaggcaagtgtagtctctcacagcctggaccctctgtcagcagtccacatagcaggtccacaaaaggtggctccgattcctccctttctgagccagggccaggtcggtccggccgcggcttcctgttcagagtcctccgagcagctcttccccttcagcttctcctgctcctcctcatcgggcttgcctgccttgtaccaatgtcagaggaagactacagctgtgccctctccaacaactttgcccggtcattccaccccatgctcagatacacgaatggccctcctccactctgaactaagcagatgccatctgcagaagtgctggtagcataaggaggatcgggtcataagcaatcccaaactaccaacaagaggaccttgatcttggcgaaagccctcggtgtggcagctttagccctcctccagatcacatgtgtgcaaattatggcttcagaggtggaagataaacagtgacgggggaacaaacagacaacaagaaggtttggaagaaatctggtttgagactctgaaccttagcactaaggagattgagtaaggacctccaaagttccccggactcatgaattctgggcccttggcccattctgtgcacagccaaggacttcagtagaccatctgggcagctttcccatggtgctgctccaaccatcagataaatgaccctcccaagcaccatgtcagtgtcgtacaatctaccaaccaaccagtgctgaagagattttagaaccttgtaacatacaatttttaagagcttatatggcagcttcctttttaccttgttttcctttggggcatgatgttttaacctttgctttagaagcacaagctgtaaatctaaaaggcacttttttttagaggtataaagaaaaactagatgtaataaataagatcatggaaggctttatgtgaaaaaagttgaatgttatagtaaaaaaaaaaagatatttatgtatgtacagtttgctaaagccaagttttgtttgtattgatttctttgcatttattatagatattataaaatagtt

SEQ ID NO: 5954 - protein, 3321 aa, Homo sapiens; identical to SEQ ID NO: 781

SEQ ID NO: 5955 - DNA, 1838 bp, Homo sapiens
atagtagaattattcattataatatttggctttgacaaaaatcagtctgatctcgggaaacctggagaaatttattttctgtactctaatgttctttcattttggtgaccatcaaggtgctgggagaggaattagatggctgtaattcaaagttaatggaattagatgcagcagtacagaaattcttggaacagaatggccaactgggtaagccactggccaagaagataggaaaactgactgaacttcaccagcagaccattagacaagctgagaatcggctctccaagctcaatcaggcagcatcacatttagaagaatacaatgaaatgcttgaattaattttgaagtggattgaaaaagctaaagtcttggctcatggaactattgcatggaattctgcaagccagcttcgggaacaatatattttgcatcagaccctgctagaagaatccaaagaaattgacagtgagctggaagcaatgactgagaaattacagtacctcactagcgtgtactgtacagaaaaaatgtctcagcaagtggcagaactgggacgggagactgaggagttgcgacagatgatcaaaattcgtttgcagaacctccaagatgcagctaaggatatgaaaaaatttgaagcagagttgaaaaagttacaagctgccttggagcaagcccaggcaacactgacttctccagaagttggacgtctcagtctcaaggagcagctctctcatcggcagcatttgttgtctgagatggagtcactgaagccgaaggtgcaagcagtgcagctctgccagagtgccctccggatccccgaggatgtggttgccagcttacctctctgtcatgctgctctgcggctgcaggaagaggccagccggctgcagcacaccgccatccagcagtgtaacatcatgcaggcagctgtggtacaatatgaacaatatgagcaagaaatgaaacatctccagcaactgatagaaggagctcacagagagattgaggataaacctgttgccaccagtaacatacaggagctgcaggctcagatacacgaatggccctcctccactctgaactaagcagatgccatctgcagaagtgctggtagcataaggaggatcgggtcataagcaatcccaaactaccaacaagaggaccttgatcttggcgaaagccctcggtgtggcagctttagccctcctccagatcacatgtgtgcaaattatggcttcagaggtggaagataaacagtgacgggggaacaaacagacaacaagaaggtttggaagaaatctggtttgagactctgaaccttagcactaaggagattgagtaaggacctccaaagttccccggactcatgaattctgggcccttggcccattctgtgcacagccaaggacttcagtagaccatctgggcagctttcccatggtgctgctccaaccatcagataaatgaccctcccaagcaccatgtcagtgtcgtacaatctaccaaccaaccagtgctgaagagattttagaaccttgtaacatacaatttttaagagcttatatggcagcttcctttttaccttgttttcctttggggcatgatgttttaacctttgctttagaagcacaagctgtaaatctaaaaggcacttttttttagaggtataaagaaaaactagatgtaataaataagatcatggaaggctttatgtgaaaaaagttgaatgttatagtaaaaaaaaaaagatatttatgtatgtacagtttgctaaagccaagttttgtttgtattgatttctttgcatttattatagatattataaaatagtt

SEQ ID NO: 5956 - protein, 311 aa, Homo sapiens
MELDAAVQKFLEQNGQLGKPLAKKIGKLTELHQQTIRQAENRLSKLNQAASHLEEYNEMLELILKWIEKAKVLAHGTIAWNSASQLREQYILHQTLLEESKEIDSELEAMTEKLQYLTSVYCTEKMSQQVAELGRETEELRQMIKIRLQNLQDAAKDMKKFEAELKKLQAALEQAQATLTSPEVGRLSLKEQLSHRQHLLSEMESLKPKVQAVQLCQSALRIPEDVVASLPLCHAALRLQEEASRLQHTAIQQCNIMQAAVVQYEQYEQEMKHLQQLIEGAHREIEDKPVATSNIQELQAQIHEWPSSTLN

SEQ ID NO: 5957 - DNA, 27481 bp, Homo sapiens
agtgtgggcgagccagccagggtgagcgcgggcgccgggccgcggccgccggccgcagcgggctgagattgttgtcctctgtcaccagggcggctgggctcccgcagtcctgcagaccgcgcccgatcccggcgacagggcgggcggacagccgcgcatccccggggtcccgccgagcctgggcgcagagagccgggaggaagcgttcgctcgcttcgccttgctgctgggaaactgaacgaggccgagagagaaggttcttgagttcatgtaagaggacagtcttaaaacggaagaagaaaaagaagcagttcagtctttgggagagctgcctccttgttgagtgctgcaaaggcctggaattcatttatgacagaatagatctagaaaagtccaagcatgttttctagagtggtgtagccctgtgctgcctccagtgaagagtctcttggtgttggcttcgtgcttccggagggaccatggcaacctccagaggggcctcccggtgtcctcgggatatcgccaatgtgatgcagaggctgcaagatgagcaagagatagtacaaaaacgaactttcacaaaatggatcaactctcatctggccaagcggaaacctccaatggtggtggacgatctttttgaagacatgaaagatggtgttaaactgcttgcccttctggaggtcctgtctgggcagaaactgccttgtgaacaaggacgccggatgaagcgaatccatgctgtggctaacattggcacggcactcaagttcctcgaaggaagaaagtccatgcacagaggatcaccgattaaattagtcaacattaactccaccgatatagctgatggccgaccctcaatagttcttggattgatgtggaccattattctatatttccagattgaagagttgaccagcaacctgccccagctccagtctttgtccagcagcgcatcctccgtggacagcatagttagctctgagactcccagcccaccaagtaaacggaaggtgaccaccaagatccaaggaaatgctaagaaggctttattaaagtgggttcagtacacagctggcaagcagactggaatagaagtaaaagattttgggaagagttggagaagcggggttgcctttcattcagttattcatgccattcgaccggaattggtggacttggagacagtgaaaggcagatccaaccgagaaaatttggaggatgctttcactatcgccgaaacagaactggggatcccaagactgctagatcctgaagacgttgatgtggataaaccagatgagaaatctattatgacctatgtagcccagtttctgaaacattatcctgacatccacaatgcaagcactgatgggcaagaggatgatgaaatacttccaggtttcccatcttttgcaaattctgtacaaaattttaagagagaagacagagtaatttttaaggaaatgaaagtttggatagaacaatttgagagagatttgacaagagcacagatggtggaatcaaatttacaggataaatatcagtcatttaagcacttcagagttcaatatgaaatgaagaggaaacagattgaacatttaatacaaccattacacagagacggtaaattgtcacttgaccaagcattggtaaaacaatcttgggatagagtgacctccaggctctttgactggcatatacagcttgataaatctcttcctgcacctctgggcaccataggtgcctggctgtacagagcggaggtggccctgagagaggaaataaccgttcaacaggtccacgaggaaacagcaaacacgatacaacggaaacttgagcaacataaggatctgcttcaaaacacggatgcccacaaaagagcattccatgaaatctaccggaccaggtctgttaacgggattccagtgccacctgatcaattagaggacatggccgagaggtttcattttgtttcctccacatcagagctacacctaatgaaaatggaatttttagaattaaagtaccgtctgctctcactgctggttcttgcagagtcaaagctgaagtcttggatcattaagtacgggaggagagagtcagtggagcagcttctacaaaactacgtgtcttttatagaaaatagcaagttctttgaacaatatgaggtgacataccagatcttgaaacagacagctgagatgtatgtcaaagcagatggttcagtggaagaagctgagaatgtgatgaaattcatgaatgaaaccaccgctcagtggaggaatctctcagtagaagtgaggagtgtgaggagcatgctggaagaagtgatctctaactgggatcgctatggcaatacagtggctagtctgcaagcctggctagaggatgctgaaaaaatgctcaatcaatcagaaaatgccaaaaaggatttttttcgaaatttacctcattggattcagcagcatactgccatgaacgatgctggcaattttctaattgaaacctgtgatgagatggtttcccgtgacctgaagcagcaattactgttgctaaatgggcggtggagggagttgtttatggaagtcaagcaatatgctcaagctgatgagatggacagaatgaagaaggaatacacagactgtgttgttaccctgtctgcttttgcaacggaagcccataagaaactttctgaacccttagaagtctcttttatgaatgtcaagctattaattcaagacttggaggatattgagcagagggtgcctgtgatggatgcccaatacaagataattacaaagacagcacacctcattaccaaagaaagcccccaagaagaaggaaaagaaatgtttgcgaccatgtcaaagctcaaagagcagctaaccaaggtcaaagaatgttactccccactcctttatgagtctcagcagctgttgattccgttggaggaattagaaaagcagatgacgtccttttatgactcacttgggaaaatcaatgaaattatcacagttcttgagcgtgaggcacaatcgagtgccctttttaaacaaaaacatcaggaactgttagcttgtcaagaaaactgtaagaaaaccttgacacttattgagaaaggcagtcaaagtgttcaaaagtttgtgaccttgagcaacgtgttaaagcattttgatcagacgaggctacaaagacagattgcagatattcatgttgcttttcagagtatggtaaagaaaactggagattggaagaagcatgtggaaaccaacagtcgcttgatgaagaagtttgaggagtctcgagcagagttggagaaggtactgcggattgctcaggagggcctggaggaaaagggggatccagaggagctcctgcggagacacactgagtttttcagtcagctggatcagagggtgctcaatgctttcctgaaagcttgtgatgaactcaccgacatccttccagagcaggagcagcaggggctgcaggaagctgttcgaaagctccacaaacaatggaaggatcttcaaggagaagccccttatcatttgcttcatctgaagattgatgtggagaagaataggttcttagcctctgtagaagaatgcagaactgagctggatcgagagaccaagctgatgccccaggaaggcagtgaaaagataattaaagagcacagggttttcttcagtgacaaaggtcctcatcatctctgtgagaaaaggttacagctcatcgaggaactctgtgtgaaactcccagtgcgggacccagtaagggacacacctggaacctgtcacgtgactctcaaagagctcagagctgccattgacagcacctacaggaagctcatggaagacccagacaagtggaaggactacactagcagattctctgagttctcatcttggatatctacaaatgagacacaattaaaggggatcaagggtgaggccatcgatactgccaaccacggagaggttaaacgtgccgttgaagagatcagaaatggtgttaccaaaaggggtgagaccctcagctggctgaaatccaggctgaaagttttgacagaagtttcttctgagaatgaagcccaaaagcagggagatgagctggcaaaattatccagctctttcaaggctcttgtgacgctgctgtcagaggttgaaaagatgctaagcaattttggggactgtgtccagtacaaagaaatagtcaaaaattctctcgaagaattaatttctggctctaaagaagtccaggaacaagctgagaagatcttggatactgaaaatctgtttgaagcacagcagttacttcttcatcaccagcaaaagacaaagcggatctcagcaaagaagagagatgtgcagcagcagatcgcgcaggcgcagcagggagaaggggggctgcctgaccgaggccacgaggagctgcggaagctggagagcacactggatggcctggagcgcagccgggagaggcaggaacgccgcatccaggtcacattaagaaaatgggagcgatttgaaacaaacaaagaaacagtagtaagatacctttttcaaacaggttccagtcatgaacgcttcttgagttttagcagtttggaaagtttatcttcagaactggaacaaacaaaggagttttctaaacggacagaaagtattgcagtccaggctgagaaccttgtaaaggaagcttcagagataccgcttgggccccaaaataagcagctgcttcaacagcaggccaagtcaatcaaagaacaagtcaaaaaattagaagacacgcttgaagaagatattaaaaccatggaaatggtgaaaaccaagtgggatcattttggcagtaattttgagactctgtccgtctggataactgagaaagaaaaagaactcaatgccttggaaacttcgtcatctgccatggacatgcaaatcagccaaattaaggtcacaattcaggaaatagaaagtaagctcagcagcattgtaggattagaagaagaagcccagtcttttgctcagtttgttaccactggagaatctgctcgaattaaagccaagttgacacaaataagaagatacggggaagagcttcgagagcatgcacagtgtctggaaggaacaatcctgggacatttatctcagcagcaaaagtttgaagagaaccttagaaagatccagcaatctgtgtctgaatttgaagataaacttgctgttccaattaaaatatgttcttcagctacagaaacatacaaagttcttcaagaacatatggatctctgccaggccctggagtcactgagcagcgcgatcactgccttctcagccagtgccaggaaggttgtgaacagagattcctgtgttcaggaggctgcggctctacagcagcaatacgaggacatcctaaggagggcgaaggagagacagacggcgctggagaatctgctggcccactggcagaggctagagaaagaactatcatcctttttgacctggttagagcggggtgaagctaaagccagttccccagaaatggacatttctgcagacagagtcaaagtggaaggtgaacttcagttaatacaggcactgcaaaatgaagttgtatcccaggcctcattctatagcaaacttttgcaattgaaggaatcattgttctcagtagcctccaaagatgatgtgaaaatgatgaaactacatttggagcagttggatgagagatggagagatttaccacagatcattaacaaaaggattaattttcttcagtctgtggttgctgaacaccagcaatttgatgagctgctgctttccttttctgtctggattaaactgtttctcagtgaattacaaactacctctgagattagcataatggaccatcaagtagcccttactcggcataaggaccacgcagcagaagtagagagcaaaaagggcgaattgcagagtctgcagggtcacttagcaaagttgggttctctgggccgtgctgaggacctccacctcctgcagggaaaggctgaggactgcttccagctgtttgaggaggccagccaggttgtggagaggcggcagcttgccctgtcccatttggcagaattcctccagagccatgcctctctgtccggcattctccgccagctgaggcaaacagtggaagcaaccaacagtatgaataagaacgagtctgatttgatagaaaaggacctcaatgatgctcttcaaaatgctaaagcattagaatctgctgccgtcagtctggatggcattctttccaaagcccaataccatctgaaaatcgggagctctgagcaaaggacttcctgcagagccacggctgatcagctctgtggagaggtagagaggatccagaaccttctgggaaccaagcagagtgaggcagatgctctggcagtgttgaaaaaagcattccaagaccagaaagaggagcttctgaaaagcattgaggacattgaagaaaggactgacaaagagcgattgaaagaacctacccgccaagctcttcagcagaggttaagagtgtttaatcagctagaagatgaattgaattctcacgagcatgaactatgttggttgaaagacaaagccaagcaaattgcccagaaagatgtagcttttgcacctgaagttgacagggagataaaccgcttagaggtcacctgggatgataccaaaagactaattcatgaaaatcagggtcagtgctgtggacttattgacttaatgagagaatatcagaacctgaaatcagctgtatctaaagtcttagaaaatgccagcagtgtgattgtaaccagaactaccataaaagatcaggaggatcttaaatgggctttttccaagcatgaaactgccaagaacaaaatgaattacaaacagaaagacttggataactttaccagcaaaggaaaacacttgttatctgagctgaagaaaattcacagtagtgatttcagcttggtgaaaacagacatggagagcaccgtggacaaatggctggatgtatcagagaaacttgaagaaaacatggataggctgagagtaagcctgtccatttgggatgatgtactgtcaactagagatgagattgagggatggtcaaacaactgcgttccacagatggcagaaaacatcagcaacctggataaccacctcagagctgaagaactgcttaaagaatttgagtctgaagttaaaaacaaagcattgagattggaagaactgcattccaaagttaatgatctgaaagaattaactaaaaatctagaaacaccgccagaccttcagtttatagaagcagacttaatgcagaaactggagcatgccaaagaaataactgaagtagcaaaaggaaccctgaaggatttcacggctcaaagtacacaagtggagaagtttattaatgacataacaacatggttcacaaaagtggaagaatcgttgatgaactgtgcccaaaatgagacttgtgaagcattgaaaaaagtcaaggatatacaaaaagaacttcaaagtcaacaaagcaacatcagctctacccaagaaaatctcaatagcttgtgccgcaagtaccactcagctgagttggagagcctgggccgtgcaatgactggtctgataaagaaacatgaagccgtgagccagttgtgctccaaaacccaggccagcctgcaggaatctctggaaaaacacttcagtgagtctatgcaggaattccaagaatggtttttgggagcaaaggcagcagcaaaagaatcatcagatcgcaccggtgacagcaaagttctagaagcaaagctccatgatcttcagaacattttggactcagtcagtgatgggcagagcaaacttgatgcagtgactcaagaaggacaaactttgtatgcacatttgtctaaacaaattgtcagtagcattcaagaacaaatcacaaaggccaatgaagagtttcaagcatttctgaaacaatgccttaaagataagcaggctcttcaagactgtgcttcagaacttggaagctttgaagatcagcacagaaaactgaacttatggatccatgaaatggaagaaaggttcaatacggaaaacttgggagagagtaaacagcacattcctgagaagaaaaatgaagttcataaagttgaaatgtttttgggagaactgctggctgcaagagagtctcttgataagctttcccagagagggcagcttctgagtgaagaaggccacggtgctgggcaggagggccgcctgtgttcccagctcctcacaagccaccagaacctacttagaatgaccaaagagaaactccggagctgccaggtggcccttcaggagcacgaagccctggaggaagcactgcaaagcatgtggttctgggtgaaggccattcaggacagactggcctgtgcagagagcactcttgggagcaaagacaccctggagaaacggctgtcacaaatacaggatattctcctgatgaaaggtgaaggggaagttaagttgaatatggccattggcaagggggaacaggccttgagaagtagcaacaaagaaggtcagagggtgattcagactcagttagagacccttaaagaagtgtgggctgacatcatgagctcctccgtccacgctcaaagcactttagagtctgtgattagccaatggaatgactatgtagagaggaaaaaccagttggagcagtggatggaatcagtggatcaaaaaatagaacatcccttacaaccacagccaggtctgaaagagaagttcgtcctgcttgaccacctccagtccatcctgtctgaggcagaagatcacacgagagcccttcaccgtctaattgcgaagtccagggagctctacgaaaagacagaggatgagtctttcaaggacacagctcaagaggagctgaaaacacagtttaatgatataatgactgttgccaaggaaaaaatgaggaaagtggaagagattgtgaaagatcatctaatgtatttagatgcggtccacgagttcacagattggctccattcagcaaaggaagaacttcaccggtggtcagatatgtctggagattcatcagccacccagaaaaagttatcaaaaattaaggagctgatagattccagagagattggtgcaagccgtctcagcagagtggagtcgctggctcccgaagtgaaacagaacacaactgccagtgggtgtgagctcatgcacacggagatgcaggccctgcgtgccgactggaagcagtgggaagacagtgtattccaaacgcagagctgtttggagaacctggtcagccagatggccctttcggagcaggaattctcaggccaagtggctcaactggagcaggccctggaacagttcagtgcccttctgaaaacctgggctcagcagttaaccctcctggaaggcaagaacacggatgaggagatagtggaatgctggcacaaaggacaagagatactggatgctttgcaaaaagcagagcctagaacagaggatctcaagtctcagctgaatgaactttgtcgattttccagagacctgagtacctacagtggaaaagtttctggcttgattaaagagtataattgtctttgtttgcaagcatccaagggctgccagaataaagaacagattttacagcaaagatttcgaaaggccttcagggatttccagcagtggttggttaatgcaaaaatcactaccgccaagtgttttgatatacctcaaaatataagtgaagtttcaactagtcttcagaaaatacaggagtttttgtcagaaagtgaaaatggacagcacaagctaaacatgatgctgtctaaaggggaacttctgagtaccctgctgaccaaagagaaagcgaaagggatccaggccaaagttacagctgcaaaagaagattggaaaaattttcattcaaatctccaccaaaaagaatctgctctagagaatctaaagatccaaatgaaggactttgaagtaagtgctgagcctatccaggactggctgagtaaaactgagaagatggtccatgaaagcagcaatcgcctctatgatctgccagcaaagaggagggagcagcagaagctccagtctgtccttgaggaaatacactgctacgagcctcagctcaacaggctgaaagagaaagctcagcagctgtgggaaggacaagctgccagcaagagctttaggcacagagtgtcgcagctgtcttctcagtatctagcgctaagcaatttaacaaaggagaaagtgtcaagactggatagaatcgttgcagaacacaatcagttctctcttgggattaaagaattacaagactggatgacggatgcgattcacatgctggattcatactgccacccgacatccgacaaaagtgtgctggacagcaggacgctcaagctcgaggctctattatcagtcaaacaggaaaaagagattcagatgaaaatgatagtgaccaggggagaatctgtccttcagaatacttctccagaaggcattcccactattcagcagcagctgcagagtgtgaaggatatgtgggcatcccttttgtctgcagggattcgttgtaaaagccaactcgaaggagctctctccaagtggacaagttatcaggatggcgttcgacagttctccggttggatggatagtatggaagccaacctgaatgaatcagaaaggcagcatgcggagctgcgggataaaacaacgatgctcggaaaagccaagttattaaatgaagaagtgctgagttacagcagcttgctggagaccatcgaagtcaaaggggctggcatgacagaacactatgtcacccagctagaactccaggatctacaggaacgatacagagccatccaagagagggccaaggaagccgtaaccaagtctgaaaaacttgtccgcctgcaccaagagtatcagagagacctaaaggcatttgaagtttggttggggcaagaacaagaaaagctcgaccagtattcagttcttgaaggtgatgcccacactcatgagacaacattgcgtgatcttcaggagctacaggtacactgtgcagaggggcaggccctgttgaactcagtgctgcacaccagagaggatgtgatcccatcaggtatcccacaggcagaggaccgggctttagagtctctccggcaagactggcaggcttaccagcacaggctgtccgagactcgaactcagttcaataacgtggtgaacaaattgaggctaatggagcaaaagtttcagcaagtagatgaatggctcaaaacagcagaggagaaaaagtggcacgaagaagtgactgcatacagagatgaagttgaggaagtgggagctagagctcaggagatactggacgagagccacgtgaacagcagaatgggttgccaggccacccagctgacttccagataccaggccctgcttctccaagtgctggaacaaataaaattcctggaggaggagattcagagtttggaggaatcagaatcatccctcagttcctattctgattggtatggctctactcataaaaacttcaagaatgtggctaccaagattgacaaagtagatacagtaatgatggggaagaaattgaagacgttggaggttttgctcaaagacatggagaaaggtcacagtttgctgaaatcagcccgggagaaaggagagagggctgttaaatacttggaggaaggcgaggcagagaggttaagaaaggagattcatgatcacatggagcagttgaaggaactgaccagcactgtccggaaagaacacatgacgctggaaaaaggtcttcatttagcaaaggaattctcagataaatgcaaagcactgacacagtggatagcagaataccaggaaattctacatgttcctgaagaacccaaaatggaattatatgagaaaaaagctcagttatctaaatacaagtcacttcaacaaacggtgctgtcccatgaaccatcagtaaagtcagtgagagagaagggtgaagctcttttggaactggtgcaggacgtcactttaaaggacaaaatagatcaacttcaaagtgattaccaggacctgtgcagcataggaaaggcaatgatggaagaaattgctggttttgaagaccgtttgaacaatcttcaaatgaaaggtgatactttgattggccaatgtgcagaccacctgcaagcgaaacttaaacaaaacgtgcatgctcatctgcagggcacaaaggacagctactcagcgatctgcagcacagctcagaggatgtaccagagtttggaacacgaacttcagaagcacgtcagccgacaagacaccctgcagcagtgccaggcctggctttctgcagtccagccggatttagagccaagtcctcaaccacctcttagtagggcagaagccattaagcaggtcaaacacttcagagctttgcaagagcaggcaaggacctacctagatctcctttgctccatgtgtgacctgtcaaatgcttcggtgaaaaccacagcaaaagacattcaacaaacagagcaaacgattgaacaaaagcttgtccaggcccagaacttaactcagggctgggaagagatcaagcacctgaagtctgagctctggatttacctgcaagatgctgatcagcaactgcagaacatgaagaggaggcactctgagctggagctgaacattgcacagaacatggtttcacaagttaaggattttgttaagaaactacagagcaaacaggcatccgtgaacaccataatagaaaaggtgaataagttaacaaagaaggaggaatcgcctgaacacaaggaaataaatcatttaaatgatcagtggctcgatttgtgccgtcagtctaacaacctgtgcttgcaaagggaagaggatcttcagagaacaagagattaccatgactgtatgaatgttgttgaagtgttcctagaaaaatttactacagaatgggataacttggccagatctgatgcagagagtacagctgtccacctggaagctttgaaaaagttagcattggcattgcaggagagaaagtatgctattgaagatctgaaagatcaaaagcagaaaatgatagagcatctgaatttagatgacaaggagttagtcaaagaacagacgagtcatttagagcaacgttggtttcagcttgaggacctcattaaaaggaaaatccaagtgtcagtcaccaacttggaggagttaaatgtggtgcagtccagatttcaggagctaatggagtgggcagaagagcaacaacccaacatcgccgaggcccttaagcagagccctcctccagatatggctcagaaccttctcatggatcacctggccatctgcagtgaactggaggccaagcagatgctcctgaaatcgcttataaaggacgcagacagggtcatggcagatcttggtctcaatgagcgacaggtcatccagaaggctctctctgatgcacaaagccacgtgaattgtctcagtgacttagtgggccagcgaagaaagtacttaaacaaagccttgtccgagaaaacccagtttctcatggcagtgttccaggccaccagccaaattcagcaacatgagcgaaagataatgttccgtgaacacatctgtctgttaccagatgatgtgagcaaacaagtcaaaacatgtaagagtgcacaagccagcctcaagacttaccaaaatgaagtcactggactttgggcccagggtcgcgaactaatgaaggaagtcacagagcaggaaaagagtgaagtgctggggaagcttcaggaattgcagagtgtctatgacagtgttttacaaaagtgcagtcaccggttacaagaactagagaagaatttggtttctaggaagcattttaaggaagattttgataaagcttgccactggctaaaacaagcagatattgttacatttcctgaaatcaacctaatgaatgagagttctgagcttcatacacaactggctaaataccaaaacattcttgaacaatctccagaatatgaaaatcttctacttacgctgcagagaactgggcagaccatattaccatcgctgaatgaagtcgatcattcctacctcagtgaaaagctaaatgctttgcctcgacaatttaatgtaattgttgccttggctaaagacaagttctataaagtccaggaagcaattcttgctcggaaggaatatgcttccttgattgagttgacaacccagtctctgagtgaacttgaagcccaattcttgaggatgagcaaagttcccaccgacctggccgttgaggaggctctttctctgcaagatggttgcagagccattctggacgaggtggcgggccttggggaggcggtggatgaactgaaccagaaaaaagaaggttttcgcagcacaggtcagccttggcagccagacaagatgctgcaccttgtcaccttatatcacaggctgaagcgacaaacagaacagagggttagcttattagaagacaccaccagtgcttaccaagaacacgagaagatgtgccaacagctggagagacaactgaagtctgtaaaagaggagcagtccaaagtgaatgaggaaacgctgcctgcagaggagaagctcaaaatgtatcactccctggcaggaagtctccaggactcagggattgtactgaaacgagtaaccatacatcttgaagatcttgccccacaccttgaccccttggcttatgagaaagccaggcatcagatccagtcctggcaaggggagttaaaactgttgacttctgccattggtgagacggtgacagaatgtgagagccgaatggtgcagagtatagacttccagactgagatgagtcgctccctggactggctgaggagagtgaaggcagagctcagtgggccggtgtacctagacctcaacctgcaggacatccaagaggaaatcagaaaaatccaaattcatcaggaagaggtccagtccagcttgagaatcatgaatgcgctgagtcacaaggaaaaggagaagttcacaaaggccaaggagctgatttctgcggatttagaacacagcctcgctgagctctcagagctggatggagacatccaggaagccttacgcaccagacaggctaccttgactgaaatatatagccagtgtcaaaggtattatcaggtatttcaagcagccaatgactggcttgaggatgcccaagaattgttacagctggcaggcaatggcctagacgtggagagcgcagaggaaaatctcaaaagccacatggaatttttcagtacagaggatcagttccatagtaacctggaggagctccacagcctggtagccaccctggacccactcatcaagccaaccggcaaagaagacctagaacagaaagtggcttctctggaactcaggagccagaggatgagccgggactctggtgcccaagtggatctcttgcagagatgcacagctcaatggcacgattaccagaaagcaagggaagaggttattgaattgatgaatgatacagaaaagaaattgtctgagttttctttgttgaagacttcgtctagtcatgaagcggaagaaaaattgtcagaacacaaggctttagtgtcagtggttaactctttccatgagaaaattgtggcccttgaggaaaaagcttcacaactggagaaaaccggaaatgatgccagcaaagccaccctgagcaggtcaatgaccaccgtctggcagcgctggacacgccttcgagctgtggcccaggaccaggagaagatcctggaagatgcagtggatgagtggacgggctttaacaacaaggttaaaaaggccactgaaatgattgatcagctgcaagataagttacctggaagttcagcagagaaagcatcgaaagcagagctcttaactcttcttgaataccacgacacgttcgttctggagctggagcagcagcagtcggccttgggcatgctgcggcagcaaaccctgagcatgctccaggatggagccgccccaacccctggggaagagcctccgctcatgcaggaaatcaccgccatgcaagatcggtgcctgaacatgcaggagaaagtgaagactaatggaaagttggtgaagcaagagctgaaggaccgagaaatggtggagactcagatcaattctgtgaaatgttgggttcaggaaacgaaagaatatttagggaatccaacaatagaaatagatgctcaacttgaagaacttcagattctcctaacagaagccacaaatcaccgacagaacattgaaaaaatggcagaagaacagaaggagaagtacttaggtctttataccatattaccttctgaactctcccttcagttggctgaagtggcgttagatctaaagatccgagatcagatccaagacaaaataaaagaagttgagcagagcaaggccacgagccaggaactcagccggcaaattcagaagttagctaaagacctcacaactattctaactaagctgaaagcgaagacagataatgtagttcaagctaaaactgaccaaaaggtgctgggagaggaattagatggctgtaattcaaagttaatggaattagatgcagcagtacagaaattcttggaacagaatggccaactgggtaagccactggccaagaagataggaaaactgactgaacttcaccagcagaccattagacaagctgagaatcggctctccaagctcaatcaggcagcatcacatttagaagaatacaatgaaatgcttgaattaattttgaagtggattgaaaaagctaaagtcttggctcatggaactattgcatggaattctgcaagccagcttcgggaacaatatattttgcatcagaccctgctagaagaatccaaagaaattgacagtgagctggaagcaatgactgagaaattacagtacctcactagcgtgtactgtacagaaaaaatgtctcagcaagtggcagaactgggacgggagactgaggagttgcgacagatgatcaaaattcgtttgcagaacctccaagatgcagctaaggatatgaaaaaatttgaagcagagttgaaaaagttacaagctgccttggagcaagcccaggcaacactgacttctccagaagttggacgtctcagtctcaaggagcagctctctcatcggcagcatttgttgtctgagatggagtcactgaagccgaaggtgcaagcagtgcagctctgccagagtgccctccggatccccgaggatgtggttgccagcttacctctctgtcatgctgctctgcggctgcaggaagaggccagccggctgcagcacaccgccatccagcagtgtaacatcatgcaggcagctgtggtacaatatgaacaatatgagcaagaaatgaaacatctccagcaactgatagaaggagctcacagagagattgaggataaacctgttgccaccagtaacatacaggagctgcaggctcagatttctcggcatgaggagctggcgcagaaaattaagggctaccaggagcagatcgcttctttgaattccaagtgcaagatgctgacgatgaaagccaagcacgccaccatgctgctgacggtgaccgaggtcgaggggctggcggaagggacagaggacctggatggggagctcctccccacgccttcggcccacccctctgtggtcatgatgactgcaggtcgctgtcacactttgctgtcaccggtcactgaggagtctggggaggagggaaccaacagtgagatttcctctccacctgcctgtcgctccccttcacctgtggctaatacagatgcttctgttaaccaggacattgcatattaccaagccttgtctgctgagaggttgcagacagatgctgcaaaaattcaccccagcacatccgcatcccaggagttctatgaaccgggattggagccatccgctactgccaaactgggtgatttgcagcgttcttgggaaaccttaaagaatgtgatcagtgagaagcagcgcacactctatgaagctttggaacgccagcagaagtaccaggactccctccagtccatctctacgaagatggaggccattgagctgaaactcagtgagagcccagagcctggcaggagtccagaaagccagatggctgaacatcaggcattgatggatgagattctcatgctccaggatgaaatcaatgagctccagtcctctctcgcagaggagctggtatccgagtcttgtgaggccgaccctgcggagcagctggccttgcagtccacgctcactgtcttagccgagcgaatgtccaccatcaggatgaaagcctcggggaaacggcagcttttggaggagaagttgaatgatcagctggaggaacaaaggcaggaacaggccctgcagaggtatcgctgtgaagccgatgagctggacagctggctcttgagtaccaaggccactctggacactgcgctgagtccacccaaggagcccatggacatggaggcccagcttatggactgccagaatatgctggtggaaatagagcagaaggtggtggctttatcagaactgtcagtccacaatgagaacctgctgctggagggcaaagctcacaccaaggacgaggccgagcagctggctggaaagctgagaaggctcaaggggagcctgctggagctgcagagagccctgcatgataagcagctcaacatgcagggaacagcacaggagaaggaggagagcgatgttgacctaacagccacgcagagccccggcgtccaggaatggctggcccaagctcgcaccacatggacccagcagcggcagagcagtctccagcaacaaaaagagttagaacaggaattagccgagcagaagagtctccttcgctcagtagccagtcgtggagaggagattctaattcaacattcggcggcagagacctctggtgatgctggcgaaaaacctgatgtgttatcccaggagttggggatggaaggggagaaatcatccgctgaagaccagatgagaatgaaatgggaaagcctacatcaagaatttagtaccaagcagaaactactacagaatgttctggaacaggaacaagagcaagtgctttatagcaggccaaatcgactcttgtctggtgtgccactgtacaaaggggacgtgccaacccaagataaatctgcagttacatctttgctggatggactgaaccaagccttcgaggaggtttcatcccagagtggaggggcaaagaggcagagtatacacttggagcagaagttgtatgatggagtctcagccacctctacttggttggatgacgttgaagaacgtttatttgttgccacagcacttttaccagaagaaacagagacttgtctcttcaaccaagagattcttgccaaagacattaaggaaatgtctgaagaaatggataagaacaaaaacttgttttcccaagcttttccagagaatggtgataatcgagatgttattgaagatactttgggttgtcttttgggcaggttatccttgctagactcagtagtgaatcaacgatgtcatcagatgaaagaaagacttcagcaaatactaaatttccagaatgatctgaaagtgctgtttacatcactggctgacaacaaatacatcattctgcaaaaactggcaaatgtgtttgaacagcccgtagcagaacaaatagaggcaatacaacaggctgaagatggactcaaagaatttgatgcaggaatcattgaattaaagaggcgtggtgacaagctacaggtcgagcagccgtccatgcaagaactctccaagctccaggacatgtatgatgagctgatgatgatcattggctcccggaggagtggtctgaatcagaaccttacactcaagagtcagtatgagagggccctacaagatctggctgacctgctagaaactggtcaggagaagatggcaggagaccagaaaatcatcgtgtcttccaaagaggaaatccagcaactacttgacaaacataaggaatactttcagggcctggaatctcatatgatcttgactgaaacactcttcagaaagataatcagctttgcagtccaaaaggaaacccagttccatacagagctgatggctcaggcttctgctgtactgaaacgggctcacaagaggggtgtggagctggagtacattctagagacgtggtcccatctggatgaggaccagcaggagctcagcagacagctggaggtggtggaaagcagcatcccaagcgtgggtctggtggaggagaacgaggacaggcttattgaccgcataacactctaccagcatttaaaatctagccttaatgaataccagcccaaattatatcaagtattagatgatgggaaacgacttctgatatccatcagctgctcagatctagaaagccaactaaatcaacttggagagtgctggctaagtaacaccaataaaatgtctaaggaacttcacagactggaaacaatattgaaacactggaccagatatcaaagtgaatctgcagatctaattcactggttacaatctgcaaaagaccggctagaattttggactcagcaatctgtgacagtcccacaagagctggaaatggtccgtgatcatctaaatgctttcctggagttttctaaagaagtggatgcccaatcttccctgaaatcatctgttctgagtactggaaatcagctccttcgactaaaaaaggtggacacagccacgctgcgctctgagctgtcgcgcattgatagccagtggactgacctgctaaccaatatcccagccgtccaggagaagctccaccagctccagatggataaactgccttcccgccatgccatttctgaagtcatgagttggatttctctaatggaaaatgttattcagaaggatgaagataatattaaaaattccataggttacaaggcaattcatgaataccttcagaaatataagggttttaagatagacattaactgtaaacagctgacagtggattttgtgaaccagtccgtgctacaaatcagcagtcaggatgtggaaagtaagcgtagtgataagactgattttgctgagcaacttggagcaatgaataaaagttggcaaattctgcaaggtctagtaactgagaagatccagctgttggaaggcttattggaatcttggtcagaatatgaaaataatgtacaatgtctgaaaacatggtttgaaacccaggaaaagagactaaaacaacagcatcgaattggagatcaggcttctgttcaaaatgcactgaaagactgtcaggatctggaagatttgattaaagcaaaagaaaaagaagtagagaaaattgagcagaatggacttgctttgattcagaacaagaaagaagacgtctctagcattgtcatgagcacactgcgagagctcggccaaacctgggcaaatttagatcacatggttggacaattaaagatactgctgaaatcagtgcttgaccaatggagtagtcacaaagtggcctttgacaagataaacagttacctcatggaggccagatactctctttcccgattccgtctgctgactggctccttagaagctgtgcaagttcaggtggacaatcttcagaatctccaagatgatctggaaaaacaggaaaggagcttacagaaatttggctctatcaccaaccaattattaaaagagtgtcacccacccgtgacagaaactcttaccaatacactgaaagaagtcaacatgagatggaataacttgctggaagagattgctgagcagctacagtccagcaaggccctacttcagctttggcaaagatacaaggactactccaaacagtgtgcttcgacagttcagcagcaggaggatcgaaccaatgagctgttgaaggcagccacaaacaaggacattgccgatgatgaggttgccacatggattcaagattgcaacgacctcctcaaaggactgggcacagttaaagattccctcttttttctccatgagctgggagagcaactgaagcaacaagtggatgcttccgcagcatcagctattcaatcggatcaactctctttgagtcaacacttgtgtgccctggagcaagctctctgcaaacagcagacttcattacaggctggagttcttgattatgaaacctttgccaagagtttagaagctttggaggcctggatagtggaagctgaagaaatactacaagggcaggaccctagccactcatctgacctctccacaatccaggaaaggatggaagaacttaagggacagatgttaaaattcagcagcatggctccagatttagaccgtctaaatgagcttggatataggttacccttgaatgataaggaaatcaaaagaatgcagaatctgaaccgccattggtctctgatctcctctcagactacagaaagattcagcaagttgcagtcatttttgctacaacatcagactttcttggaaaaatgtgaaacatggatggaattcctagttcagacagaacaaaagttagcagtagagatttcaggaaattatcagcaccttttggaacagcagagagcacacgagttgtttcaagccgagatgttcagtcgtcagcagattttgcactcaatcattattgatgggcaacgtcttctagaacaaggtcaagttgatgacagggatgaattcaacctgaaattgacactcctcagtaatcaatggcagggagtgattcgcagggcccagcagaggcgggggatcattgacagccagattcgccagtggcagcgctatagggagatggcagaaaagcttcgtaaatggttggttgaagtgtcctacctccccatgagtggtctcggaagtgttcctataccactgcaacaagcaaggaccctctttgatgaagtgcagttcaaagaaaaagtgtttctgcggcaacaaggcagctacatcctgactgtggaggctggcaagcaactccttctctcggcggacagtggcgctgaggccgccttgcaggccgaactcgctgaaatccaagagaaatggaaatcagccagcatgcggctggaagaacagaagaaaaaactagccttcttgttgaaagactgggaaaaatgtgagaaaggaatagcagattccctggagaaactacgaactttcaaaaagaagctttcgcagtctctcccggatcaccatgaagagctccatgcagaacaaatgcgttgcaaggaattagaaaatgcagttgggagctggacagatgacttgacccagttgagcctgctgaaggacaccctctctgcctatatcagtgctgatgatatctccattcttaatgaacgcgtagagcttctgcaaaggcagtgggaagaactatgccaccagctctccttaaggcggcagcaaataggtgaaagattgaatgaatgggcagtcttcagtgaaaagaacaaggaactctgtgagtggttgactcaaatggaaagcaaagtttctcagaatggagacattctcattgaagaaatgatagagaagctcaagaaggattatcaagaggaaattgctattgctcaagagaacaaaatacagctccaacaaatgggagaacgacttgctaaagccagccatgaaagcaaagcatctgagattgaatacaagctgggaaaggtcaacgaccggtggcagcatctcctggacctcattgcagccagggtgaagaagctgaaggagaccctggtagccgtgcagcagcttgataagaacatgagcagcctgaggacctggctcgctcacatcgagtcagagctggccaagccaatagtctacgattcctgtaactcggaagaaatacagagaaagcttaatgagcagcaggagcttcagagagacatagagaagcacagtacaggtgttgcatctgtcctcaacctgtgtgaagtcctgctgcacgactgtgacgcctgtgccactgatgccgagtgtgactctatacagcaggctacgagaaacctggaccggcggtggagaaacatttgtgctatgtccatggaaaggaggctgaaaatcgaagagacgtggcgattgtggcagaaatttctggatgactattcacgttttgaagattggctgaagtcttcagaaaggacagctgcttttcccagctcttctggggtgatctatacagttgccaaggaagaactaaagaaatttgaggctttccagcgacaggtccacgagtgcctgacgcagctggaactgatcaacaagcagtaccgccgcctggccagggagaaccgcactgattcagcatgtagcctcaaacagatggttcacgaaggcaaccagagatgggacaacctgcaaaagcgtgtcacctccatcttgcgcagactcaagcattttattggccagcgtgaggagtttgagactgcgcgggacagcattctggtctggctcacagagatggatctgcagctcactaatattgaacatttttctgagtgtgatgttcaagctaaaataaagcaactcaaggccttccagcaggaaatttcactgaaccacaataagattgagcagataattgcccaaggagaacagctgatagaaaagagtgagcccttggatgcagcgatcatcgaggaggaactagatgagctccgacggtactgccaggaggtcttcgggcgtgtggaaagataccataagaaactgatccgcctgcctctcccagacgatgagcacgacctctcagacagggagctggagctggaagactctgcagctctgtcggacctgcactggcacgaccgctctgcagacagcctgctttctccacagccttcctccaatctctccctctcgctcgctcagcccctccggagcgagcggtcaggacgagacaccccggctagtgtggactccatccccctggagtgggatcacgactatgacctcagtcgggacctggagtctgcaatgtccagagctctgccctctgaggatgaagaaggtcaggatgacaaagatttctacctccggggagctgttggcttatcagatgtaatgatccccgaaagccctgaggcctatgtaaaactcacagaaaatgcaatcaaaaatacctccggggaccacagtgccctagagtcacagatccgacaactgggcaaagccctggatgatagccgttttcagatacagcaaaccgaaaatatcattcgcagcaaaactcccacggggccggagctagacaccagctacaaaggctacatgaaactgctgggcgaatgcagtagcagtatagactccgtgaagagactggagcacaaactgaaggaggaagaggagagccttcctggctttgttaacctgcatagtaccgaaacccaaacggctggtgtgattgaccgatgggagcttctccaggcccaggcattgagcaaggagttgaggatgaagcagaacctccagaagtggcagcagtttaactcagacttgaacagcatctgggcctggctgggggacacggaggaggagttggaacagctccagcgtctggaactcagcactgacatccagaccatcgagctccagatcaaaaagctcaaggagctccagaaagctgtggaccaccgcaaagccatcatcctctccatcaatctctgcagccctgagttcacccaggctgacagcaaggagagccgggacctgcaggatcgcttgtcgcagatgaatgggcgctgggaccgagtgtgctctctgctggaggagtggcggggcctgctgcaggatgccctgatgcagtgccagggtttccatgaaatgagccatggtttgcttcttatgctggagaacattgacagaaggaaaaatgaaattgtccctattgattctaaccttgatgcagagatacttcaggaccatcacaaacagcttatgcaaataaagcatgagctgttggaatcccaactcagagtagcctctttgcaagacatgtcttgccaactactggtgaatgctgaaggaacagactgtttagaagccaaagaaaaagtccatgttattggaaatcggctcaaacttctcttgaaggaggtcagtcgtcatatcaaggaactggagaagttattagacgtgtcaagtagtcagcaggatttgtcttcctggtcttctgctgatgaactggacacctcagggtctgtgagtcccacatcaggaaggagcaccccaaacagacagaaaacgccacgaggcaagtgtagtctctcacagcctggaccctctgtcagcagtccacatagcaggtccacaaaaggtggctccgattcctccctttctgagccagggccaggtcggtccggccgcggcttcctgttcagagtcctccgagcagctcttccccttcagcttctcctgctcctcctcatcgggcttgcctgccttgtaccaatgtcagaggaagactacagctgtgccctctccaacaactttgcccggtcattccaccccatgctcagatacacgaatggccctcctccactctgaactaagcagatgccatctgcagaagtgctggtagcataaggaggatcgggtcataagcaatcccaaactaccaacaagaggaccttgatcttggcgaaagccctcggtgtggcagctttagccctcctccagatcacatgtgtgcaaattatggcttcagaggtggaagataaacagtgacgggggaacaaacagacaacaagaaggtttggaagaaatctggtttgagactctgaaccttagcactaaggagattgagtaaggacctccaaagttccccggactcatgaattctgggcccttggcccattctgtgcacagccaaggacttcagtagaccatctgggcagctttcccatggtgctgctccaaccatcagataaatgaccctcccaagcaccatgtcagtgtcgtacaatctaccaaccaaccagtgctgaagagattttagaaccttgtaacatacaatttttaagagcttatatggcagcttcctttttaccttgttttcctttggggcatgatgttttaacctttgctttagaagcacaagctgtaaatctaaaaggcacttttttttagaggtataaagaaaaactagatgtaataaataagatcatggaaggctttatgtgaaaaaagttgaatgttatagtaaaaaaaaaaagatatttatgtatgtacagtttgctaaagccaagttttgtttgtattgatttctttgcatttattatagatattataaaatagtt

SEQ ID NO: 5958 - protein, 8749 aa, Homo sapiens; identical to SEQ ID NO: 783

SEQ ID NO: 5959 - DNA, 27748 bp, Homo sapiens
cccgggcagtggaaaccgtgggcaaaagttagctggcaggacagcgcagctcctccaggcagcggaggcagcgcgtcccggctctcagggacatttccttcccacctcgacccccgggaggtggtcccggtataaaggctcgctgagcgggtgggtcacagcacagctttgcagctgcggagaaacgcccaaggccgtgcatctccaggagggcggctgggctcccgcagtcctgcagaccgcgcccgatcccggcgacagggcgggcggacagccgcgcatccccggggtcccgccgagcctgggcgcagagagccgggaggaagcgttcgctcgcttcgccttgctgctgggaaactgaacgaggccgagagagaaggttcttgagttcatgtaagaggacagtcttaaaacggaagaagaaaaagaagcagttcagtctttgggagagctgcctccttgttgagtgctgcaaaggcctggaattcatttatgacagaatagatctagaaaagtccaagcatgttttctagagtggtgtagccctgtgctgcctccagtgaagagtctcttggtgttggcttcgtgcttccggagggaccatggcaacctccagaggggcctcccggtgtcctcgggatatcgccaatgtgatgcagaggctgcaagatgagcaagagatagtacaaaaacgaactttcacaaaatggatcaactctcatctggccaagcggaaacctccaatggtggtggacgatctttttgaagacatgaaagatggtgttaaactgcttgcccttctggaggtcctgtctgggcagaaactgccttgtgaacaaggacgccggatgaagcgaatccatgctgtggctaacattggcacggcactcaagttcctcgaaggaagaaagattaaattagtcaacattaactccaccgatatagctgatggccgaccctcaatagttcttggattgatgtggaccattattctatatttccagattgaagagttgaccagcaacctgccccagctccagtctttgtccagcagcgcatcctccgtggacagcatagttagctctgagactcccagcccaccaagtaaacggaaggtgaccaccaagatccaaggaaatgctaagaaggctttattaaagtgggttcagtacacagctggcaagcagactggaatagaagtaaaagattttgggaagagttggagaagcggggttgcctttcattcagttattcatgccattcgaccggaattggtggacttggagacagtgaaaggcagatccaaccgagaaaatttggaggatgctttcactatcgccgaaacagaactggggatcccaagactgctagatcctgaagacgttgatgtggataaaccagatgagaaatctattatgacctatgtagcccagtttctgaaacattatcctgacatccacaatgcaagcactgatgggcaagaggatgatgaaatacttccaggtttcccatcttttgcaaattctgtacaaaattttaagagagaagacagagtaatttttaaggaaatgaaagtttggatagaacaatttgagagagatttgacaagagcacagatggtggaatcaaatttacaggataaatatcagtcatttaagcacttcagagttcaatatgaaatgaagaggaaacagattgaacatttaatacaaccattacacagagacggtaaattgtcacttgaccaagcattggtaaaacaatcttgggatagagtgacctccaggctctttgactggcatatacagcttgataaatctcttcctgcacctctgggcaccataggtgcctggctgtacagagcggaggtggccctgagagaggaaataaccgttcaacaggtccacgaggaaacagcaaacacgatacaacggaaacttgagcaacataaggatctgcttcaaaacacggatgcccacaaaagagcattccatgaaatctaccggaccaggtctgttaacgggattccagtgccacctgatcaattagaggacatggccgagaggtttcattttgtttcctccacatcagagctacacctaatgaaaatggaatttttagaattaaagtaccgtctgctctcactgctggttcttgcagagtcaaagctgaagtcttggatcattaagtacgggaggagagagtcagtggagcagcttctacaaaactacgtgtcttttatagaaaatagcaagttctttgaacaatatgaggtgacataccagatcttgaaacagacagctgagatgtatgtcaaagcagatggttcagtggaagaagctgagaatgtgatgaaattcatgaatgaaaccaccgctcagtggaggaatctctcagtagaagtgaggagtgtgaggagcatgctggaagaagtgatctctaactgggatcgctatggcaatacagtggctagtctgcaagcctggctagaggatgctgaaaaaatgctcaatcaatcagaaaatgccaaaaaggatttttttcgaaatttacctcattggattcagcagcatactgccatgaacgatgctggcaattttctaattgaaacctgtgatgagatggtttcccgtgacctgaagcagcaattactgttgctaaatgggcggtggagggagttgtttatggaagtcaagcaatatgctcaagctgatgagatggacagaatgaagaaggaatacacagactgtgttgttaccctgtctgcttttgcaacggaagcccataagaaactttctgaacccttagaagtctcttttatgaatgtcaagctattaattcaagacttggaggatattgagcagagggtgcctgtgatggatgcccaatacaagataattacaaagacagcacacctcattaccaaagaaagcccccaagaagaaggaaaagaaatgtttgcgaccatgtcaaagctcaaagagcagctaaccaaggtcaaagaatgttactccccactcctttatgagtctcagcagctgttgattccgttggaggaattagaaaagcagatgacgtccttttatgactcacttgggaaaatcaatgaaattatcacagttcttgagcgtgaggcacaatcgagtgccctttttaaacaaaaacatcaggaactgttagcttgtcaagaaaactgtaagaaaaccttgacacttattgagaaaggcagtcaaagtgttcaaaagtttgtgaccttgagcaacgtgttaaagcattttgatcagacgaggctacaaagacagattgcagatattcatgttgcttttcagagtatggtaaagaaaactggagattggaagaagcatgtggaaaccaacagtcgcttgatgaagaagtttgaggagtctcgagcagagttggagaaggtactgcggattgctcaggagggcctggaggaaaagggggatccagaggagctcctgcggagacacactgagtttttcagtcagctggatcagagggtgctcaatgctttcctgaaagcttgtgatgaactcaccgacatccttccagagcaggagcagcaggggctgcaggaagctgttcgaaagctccacaaacaatggaaggatcttcaaggagaagccccttatcatttgcttcatctgaagattgatgtggagaagaataggttcttagcctctgtagaagaatgcagaactgagctggatcgagagaccaagctgatgccccaggaaggcagtgaaaagataattaaagagcacagggttttcttcagtgacaaaggtcctcatcatctctgtgagaaaaggttacagctcatcgaggaactctgtgtgaaactcccagtgcgggacccagtaagggacacacctggaacctgtcacgtgactctcaaagagctcagagctgccattgacagcacctacaggaagctcatggaagacccagacaagtggaaggactacactagcagattctctgagttctcatcttggatatctacaaatgagacacaattaaaggggatcaagggtgaggccatcgatactgccaaccacggagaggttaaacgtgccgttgaagagatcagaaatggtgttaccaaaaggggtgagaccctcagctggctgaaatccaggctgaaagttttgacagaagtttcttctgagaatgaagcccaaaagcagggagatgagctggcaaaattatccagctctttcaaggctcttgtgacgctgctgtcagaggttgaaaagatgctaagcaattttggggactgtgtccagtacaaagaaatagtcaaaaattctctcgaagaattaatttctggctctaaagaagtccaggaacaagctgagaagatcttggatactgaaaatctgtttgaagcacagcagttacttcttcatcaccagcaaaagacaaagcggatctcagcaaagaagagagatgtgcagcagcagatcgcgcaggcgcagcagggagaaggggggctgcctgaccgaggccacgaggagctgcggaagctggagagcacactggatggcctggagcgcagccgggagaggcaggaacgccgcatccaggtcacattaagaaaatgggagcgatttgaaacaaacaaagaaacagtagtaagatacctttttcaaacaggttccagtcatgaacgcttcttgagttttagcagtttggaaagtttatcttcagaactggaacaaacaaaggagttttctaaacggacagaaagtattgcagtccaggctgagaaccttgtaaaggaagcttcagagataccgcttgggccccaaaataagcagctgcttcaacagcaggccaagtcaatcaaagaacaagtcaaaaaattagaagacacgcttgaagaagatattaaaaccatggaaatggtgaaaaccaagtgggatcattttggcagtaattttgagactctgtccgtctggataactgagaaagaaaaagaactcaatgccttggaaacttcgtcatctgccatggacatgcaaatcagccaaattaaggtcacaattcaggaaatagaaagtaagctcagcagcattgtaggattagaagaagaagcccagtcttttgctcagtttgttaccactggagaatctgctcgaattaaagccaagttgacacaaataagaagatacggggaagagcttcgagagcatgcacagtgtctggaaggaacaatcctgggacatttatctcagcagcaaaagtttgaagagaaccttagaaagatccagcaatctgtgtctgaatttgaagataaacttgctgttccaattaaaatatgttcttcagctacagaaacatacaaagttcttcaagaacatatggatctctgccaggccctggagtcactgagcagcgcgatcactgccttctcagccagtgccaggaaggttgtgaacagagattcctgtgttcaggaggctgcggctctacagcagcaatacgaggacatcctaaggagggcgaaggagagacagacggcgctggagaatctgctggcccactggcagaggctagagaaagaactatcatcctttttgacctggttagagcggggtgaagctaaagccagttccccagaaatggacatttctgcagacagagtcaaagtggaaggtgaacttcagttaatacaggcactgcaaaatgaagttgtatcccaggcctcattctatagcaaacttttgcaattgaaggaatcattgttctcagtagcctccaaagatgatgtgaaaatgatgaaactacatttggagcagttggatgagagatggagagatttaccacagatcattaacaaaaggattaattttcttcagtctgtggttgctgaacaccagcaatttgatgagctgctgctttccttttctgtctggattaaactgtttctcagtgaattacaaactacctctgagattagcataatggaccatcaagtagcccttactcggcataaggaccacgcagcagaagtagagagcaaaaagggcgaattgcagagtctgcagggtcacttagcaaagttgggttctctgggccgtgctgaggacctccacctcctgcagggaaaggctgaggactgcttccagctgtttgaggaggccagccaggttgtggagaggcggcagcttgccctgtcccatttggcagaattcctccagagccatgcctctctgtccggcattctccgccagctgaggcaaacagtggaagcaaccaacagtatgaataagaacgagtctgatttgatagaaaaggacctcaatgatgctcttcaaaatgctaaagcattagaatctgctgccgtcagtctggatggcattctttccaaagcccaataccatctgaaaatcgggagctctgagcaaaggacttcctgcagagccacggctgatcagctctgtggagaggtagagaggatccagaaccttctgggaaccaagcagagtgaggcagatgctctggcagtgttgaaaaaagcattccaagaccagaaagaggagcttctgaaaagcattgaggacattgaagaaaggactgacaaagagcgattgaaagaacctacccgccaagctcttcagcagaggttaagagtgtttaatcagctagaagatgaattgaattctcacgagcatgaactatgttggttgaaagacaaagccaagcaaattgcccagaaagatgtagcttttgcacctgaagttgacagggagataaaccgcttagaggtcacctgggatgataccaaaagactaattcatgaaaatcagggtcagtgctgtggacttattgacttaatgagagaatatcagaacctgaaatcagctgtatctaaagtcttagaaaatgccagcagtgtgattgtaaccagaactaccataaaagatcaggaggatcttaaatgggctttttccaagcatgaaactgccaagaacaaaatgaattacaaacagaaagacttggataactttaccagcaaaggaaaacacttgttatctgagctgaagaaaattcacagtagtgatttcagcttggtgaaaacagacatggagagcaccgtggacaaatggctggatgtatcagagaaacttgaagaaaacatggataggctgagagtaagcctgtccatttgggatgatgtactgtcaactagagatgagattgagggatggtcaaacaactgcgttccacagatggcagaaaacatcagcaacctggataaccacctcagagctgaagaactgcttaaagaatttgagtctgaagttaaaaacaaagcattgagattggaagaactgcattccaaagttaatgatctgaaagaattaactaaaaatctagaaacaccgccagaccttcagtttatagaagcagacttaatgcagaaactggagcatgccaaagaaataactgaagtagcaaaaggaaccctgaaggatttcacggctcaaagtacacaagtggagaagtttattaatgacataacaacatggttcacaaaagtggaagaatcgttgatgaactgtgcccaaaatgagacttgtgaagcattgaaaaaagtcaaggatatacaaaaagaacttcaaagtcaacaaagcaacatcagctctacccaagaaaatctcaatagcttgtgccgcaagtaccactcagctgagttggagagcctgggccgtgcaatgactggtctgataaagaaacatgaagccgtgagccagttgtgctccaaaacccaggccagcctgcaggaatctctggaaaaacacttcagtgagtctatgcaggaattccaagaatggtttttgggagcaaaggcagcagcaaaagaatcatcagatcgcaccggtgacagcaaagttctagaagcaaagctccatgatcttcagaacattttggactcagtcagtgatgggcagagcaaacttgatgcagtgactcaagaaggacaaactttgtatgcacatttgtctaaacaaattgtcagtagcattcaagaacaaatcacaaaggccaatgaagagtttcaagcatttctgaaacaatgccttaaagataagcaggctcttcaagactgtgcttcagaacttggaagctttgaagatcagcacagaaaactgaacttatggatccatgaaatggaagaaaggttcaatacggaaaacttgggagagagtaaacagcacattcctgagaagaaaaatgaagttcataaagttgaaatgtttttgggagaactgctggctgcaagagagtctcttgataagctttcccagagagggcagcttctgagtgaagaaggccacggtgctgggcaggagggccgcctgtgttcccagctcctcacaagccaccagaacctacttagaatgaccaaagagaaactccggagctgccaggtggcccttcaggagcacgaagccctggaggaagcactgcaaagcatgtggttctgggtgaaggccattcaggacagactggcctgtgcagagagcactcttgggagcaaagacaccctggagaaacggctgtcacaaatacaggatattctcctgatgaaaggtgaaggggaagttaagttgaatatggccattggcaagggggaacaggccttgagaagtagcaacaaagaaggtcagagggtgattcagactcagttagagacccttaaagaagtgtgggctgacatcatgagctcctccgtccacgctcaaagcactttagagtctgtgattagccaatggaatgactatgtagagaggaaaaaccagttggagcagtggatggaatcagtggatcaaaaaatagaacatcccttacaaccacagccaggtctgaaagagaagttcgtcctgcttgaccacctccagtccatcctgtctgaggcagaagatcacacgagagcccttcaccgtctaattgcgaagtccagggagctctacgaaaagacagaggatgagtctttcaaggacacagctcaagaggagctgaaaacacagtttaatgatataatgactgttgccaaggaaaaaatgaggaaagtggaagagattgtgaaagatcatctaatgtatttagatgcggtccacgagttcacagattggctccattcagcaaaggaagaacttcaccggtggtcagatatgtctggagattcatcagccacccagaaaaagttatcaaaaattaaggagctgatagattccagagagattggtgcaagccgtctcagcagagtggagtcgctggctcccgaagtgaaacagaacacaactgccagtgggtgtgagctcatgcacacggagatgcaggccctgcgtgccgactggaagcagtgggaagacagtgtattccaaacgcagagctgtttggagaacctggtcagccagatggccctttcggagcaggaattctcaggccaagtggctcaactggagcaggccctggaacagttcagtgcccttctgaaaacctgggctcagcagttaaccctcctggaaggcaagaacacggatgaggagatagtggaatgctggcacaaaggacaagagatactggatgctttgcaaaaagcagagcctagaacagaggatctcaagtctcagctgaatgaactttgtcgattttccagagacctgagtacctacagtggaaaagtttctggcttgattaaagagtataattgtctttgtttgcaagcatccaagggctgccagaataaagaacagattttacagcaaagatttcgaaaggccttcagggatttccagcagtggttggttaatgcaaaaatcactaccgccaagtgttttgatatacctcaaaatataagtgaagtttcaactagtcttcagaaaatacaggagtttttgtcagaaagtgaaaatggacagcacaagctaaacatgatgctgtctaaaggggaacttctgagtaccctgctgaccaaagagaaagcgaaagggatccaggccaaagttacagctgcaaaagaagattggaaaaattttcattcaaatctccaccaaaaagaatctgctctagagaatctaaagatccaaatgaaggactttgaagtaagtgctgagcctatccaggactggctgagtaaaactgagaagatggtccatgaaagcagcaatcgcctctatgatctgccagcaaagaggagggagcagcagaagctccagtctgtccttgaggaaatacactgctacgagcctcagctcaacaggctgaaagagaaagctcagcagctgtgggaaggacaagctgccagcaagagctttaggcacagagtgtcgcagctgtcttctcagtatctagcgctaagcaatttaacaaaggagaaagtgtcaagactggatagaatcgttgcagaacacaatcagttctctcttgggattaaagaattacaagactggatgacggatgcgattcacatgctggattcatactgccacccgacatccgacaaaagtgtgctggacagcaggacgctcaagctcgaggctctattatcagtcaaacaggaaaaagagattcagatgaaaatgatagtgaccaggggagaatctgtccttcagaatacttctccagaaggcattcccactattcagcagcagctgcagagtgtgaaggatatgtgggcatcccttttgtctgcagggattcgttgtaaaagccaactcgaaggagctctctccaagtggacaagttatcaggatggcgttcgacagttctccggttggatggatagtatggaagccaacctgaatgaatcagaaaggcagcatgcggagctgcgggataaaacaacgatgctcggaaaagccaagttattaaatgaagaagtgctgagttacagcagcttgctggagaccatcgaagtcaaaggggctggcatgacagaacactatgtcacccagctagaactccaggatctacaggaacgatacagagccatccaagagagggccaaggaagccgtaaccaagtctgaaaaacttgtccgcctgcaccaagagtatcagagagacctaaaggcatttgaagtttggttggggcaagaacaagaaaagctcgaccagtattcagttcttgaaggtgatgcccacactcatgagacaacattgcgtgatcttcaggagctacaggtacactgtgcagaggggcaggccctgttgaactcagtgctgcacaccagagaggatgtgatcccatcaggtatcccacaggcagaggaccgggctttagagtctctccggcaagactggcaggcttaccagcacaggctgtccgagactcgaactcagttcaataacgtggtgaacaaattgaggctaatggagcaaaagtttcagcaagtagatgaatggctcaaaacagcagaggagaaagttagtcccaggaccagacgtcagtctaacagggcaaccaaggagatacaattacatcagatgaagaagtggcacgaagaagtgactgcatacagagatgaagttgaggaagtgggagctagagctcaggagatactggacgagagccacgtgaacagcagaatgggttgccaggccacccagctgacttccagataccaggccctgcttctccaagtgctggaacaaataaaattcctggaggaggagattcagagtttggaggaatcagaatcatccctcagttcctattctgattggtatggctctactcataaaaacttcaagaatgtggctaccaagattgacaaagtagatacagtaatgatggggaagaaattgaagacgttggaggttttgctcaaagacatggagaaaggtcacagtttgctgaaatcagcccgggagaaaggagagagggctgttaaatacttggaggaaggcgaggcagagaggttaagaaaggagattcatgatcacatggagcagttgaaggaactgaccagcactgtccggaaagaacacatgacgctggaaaaaggtcttcatttagcaaaggaattctcagataaatgcaaagcactgacacagtggatagcagaataccaggaaattctacatgttcctgaagaacccaaaatggaattatatgagaaaaaagctcagttatctaaatacaagtcacttcaacaaacggtgctgtcccatgaaccatcagtaaagtcagtgagagagaagggtgaagctcttttggaactggtgcaggacgtcactttaaaggacaaaatagatcaacttcaaagtgattaccaggacctgtgcagcataggaaaggagcatgtcttcagtctggaggcgaaagtcaaagaccatgaagactacaacagtgagctccaagaggtcgaaaagtggctgctgcagatgtctggcagactggtggcacctgacctcctggagacaagcagcctggagacaatcacccagcaattggcccaccacaaggcaatgatggaagaaattgctggttttgaagaccgtttgaacaatcttcaaatgaaaggtgatactttgattggccaatgtgcagaccacctgcaagcgaaacttaaacaaaacgtgcatgctcatctgcagggcacaaaggacagctactcagcgatctgcagcacagctcagaggatgtaccagagtttggaacacgaacttcagaagcacgtcagccgacaagacaccctgcagcagtgccaggcctggctttctgcagtccagccggatttagagccaagtcctcaaccacctcttagtagggcagaagccattaagcaggtcaaacacttcagagctttgcaagagcaggcaaggacctacctagatctcctttgctccatgtgtgacctgtcaaatgcttcggtgaaaaccacagcaaaagacattcaacaaacagagcaaacgattgaacaaaagcttgtccaggcccagaacttaactcagggctgggaagagatcaagcacctgaagtctgagctctggatttacctgcaagatgctgatcagcaactgcagaacatgaagaggaggcactctgagctggagctgaacattgcacagaacatggtttcacaagttaaggattttgttaagaaactacagagcaaacaggcatccgtgaacaccataatagaaaaggtgaataagttaacaaagaaggaggaatcgcctgaacacaaggaaataaatcatttaaatgatcagtggctcgatttgtgccgtcagtctaacaacctgtgcttgcaaagggaagaggatcttcagagaacaagagattaccatgactgtatgaatgttgttgaagtgttcctagaaaaatttactacagaatgggataacttggccagatctgatgcagagagtacagctgtccacctggaagctttgaaaaagttagcattggcattgcaggagagaaagtatgctattgaagatctgaaagatcaaaagcagaaaatgatagagcatctgaatttagatgacaaggagttagtcaaagaacagacgagtcatttagagcaacgttggtttcagcttgaggacctcattaaaaggaaaatccaagtgtcagtcaccaacttggaggagttaaatgtggtgcagtccagatttcaggagctaatggagtgggcagaagagcaacaacccaacatcgccgaggcccttaagcagagccctcctccagatatggctcagaaccttctcatggatcacctggccatctgcagtgaactggaggccaagcagatgctcctgaaatcgcttataaaggacgcagacagggtcatggcagatcttggtctcaatgagcgacaggtcatccagaaggctctctctgatgcacaaagccacgtgaattgtctcagtgacttagtgggccagcgaagaaagtacttaaacaaagccttgtccgagaaaacccagtttctcatggcagtgttccaggccaccagccaaattcagcaacatgagcgaaagataatgttccgtgaacacatctgtctgttaccagatgatgtgagcaaacaagtcaaaacatgtaagagtgcacaagccagcctcaagacttaccaaaatgaagtcactggactttgggcccagggtcgcgaactaatgaaggaagtcacagagcaggaaaagagtgaagtgctggggaagcttcaggaattgcagagtgtctatgacagtgttttacaaaagtgcagtcaccggttacaagaactagagaagaatttggtttctaggaagcattttaaggaagattttgataaagcttgccactggctaaaacaagcagatattgttacatttcctgaaatcaacctaatgaatgagagttctgagcttcatacacaactggctaaataccaaaacattcttgaacaatctccagaatatgaaaatcttctacttacgctgcagagaactgggcagaccatattaccatcgctgaatgaagtcgatcattcctacctcagtgaaaagctaaatgctttgcctcgacaatttaatgtaattgttgccttggctaaagacaagttctataaagtccaggaagcaattcttgctcggaaggaatatgcttccttgattgagttgacaacccagtctctgagtgaacttgaagcccaattcttgaggatgagcaaagttcccaccgacctggccgttgaggaggctctttctctgcaagatggttgcagagccattctggacgaggtggcgggccttggggaggcggtggatgaactgaaccagaaaaaagaaggttttcgcagcacaggtcagccttggcagccagacaagatgctgcaccttgtcaccttatatcacaggctgaagcgacaaacagaacagagggttagcttattagaagacaccaccagtgcttaccaagaacacgagaagatgtgccaacagctggagagacaactgaagtctgtaaaagaggagcagtccaaagtgaatgaggaaacgctgcctgcagaggagaagctcaaaatgtatcactccctggcaggaagtctccaggactcagggattgtactgaaacgagtaaccatacatcttgaagatcttgccccacaccttgaccccttggcttatgagaaagccaggcatcagatccagtcctggcaaggggagttaaaactgttgacttctgccattggtgagacggtgacagaatgtgagagccgaatggtgcagagtatagacttccagactgagatgagtcgctccctggactggctgaggagagtgaaggcagagctcagtgggccggtgtacctagacctcaacctgcaggacatccaagaggaaatcagaaaaatccaaattcatcaggaagaggtccagtccagcttgagaatcatgaatgcgctgagtcacaaggaaaaggagaagttcacaaaggccaaggagctgatttctgcggatttagaacacagcctcgctgagctctcagagctggatggagacatccaggaagccttacgcaccagacaggctaccttgactgaaatatatagccagtgtcaaaggtattatcaggtatttcaagcagccaatgactggcttgaggatgcccaagaattgttacagctggcaggcaatggcctagacgtggagagcgcagaggaaaatctcaaaagccacatggaatttttcagtacagaggatcagttccatagtaacctggaggagctccacagcctggtagccaccctggacccactcatcaagccaaccggcaaagaagacctagaacagaaagtggcttctctggaactcaggagccagaggatgagccgggactctggtgcccaagtggatctcttgcagagatgcacagctcaatggcacgattaccagaaagcaagggaagaggttattgaattgatgaatgatacagaaaagaaattgtctgagttttctttgttgaagacttcgtctagtcatgaagcggaagaaaaattgtcagaacacaaggctttagtgtcagtggttaactctttccatgagaaaattgtggcccttgaggaaaaagcttcacaactggagaaaaccggaaatgatgccagcaaagccaccctgagcaggtcaatgaccaccgtctggcagcgctggacacgccttcgagctgtggcccaggaccaggagaagatcctggaagatgcagtggatgagtggacgggctttaacaacaaggttaaaaaggccactgaaatgattgatcagctgcaagataagttacctggaagttcagcagagaaagcatcgaaagcagagctcttaactcttcttgaataccacgacacgttcgttctggagctggagcagcagcagtcggccttgggcatgctgcggcagcaaaccctgagcatgctccaggatggagccgccccaacccctggggaagagcctccgctcatgcaggaaatcaccgccatgcaagatcggtgcctgaacatgcaggagaaagtgaagactaatggaaagttggtgaagcaagagctgaaggaccgagaaatggtggagactcagatcaattctgtgaaatgttgggttcaggaaacgaaagaatatttagggaatccaacaatagaaatagatgctcaacttgaagaacttcagattctcctaacagaagccacaaatcaccgacagaacattgaaaaaatggcagaagaacagaaggagaagtacttaggtctttataccatattaccttctgaactctcccttcagttggctgaagtggcgttagatctaaagatccgagatcagatccaagacaaaataaaagaagttgagcagagcaaggccacgagccaggaactcagccggcaaattcagaagttagctaaagacctcacaactattctaactaagctgaaagcgaagacagataatgtagttcaagctaaaactgaccaaaaggtgctgggagaggaattagatggctgtaattcaaagttaatggaattagatgcagcagtacagaaattcttggaacagaatggccaactgggtaagccactggccaagaagataggaaaactgactgaacttcaccagcagaccattagacaagctgagaatcggctctccaagctcaatcaggcagcatcacatttagaagaatacaatgaaatgcttgaattaattttgaagtggattgaaaaagctaaagtcttggctcatggaactattgcatggaattctgcaagccagcttcgggaacaatatattttgcatcagaccctgctagaagaatccaaagaaattgacagtgagctggaagcaatgactgagaaattacagtacctcactagcgtgtactgtacagaaaaaatgtctcagcaagtggcagaactgggacgggagactgaggagttgcgacagatgatcaaaattcgtttgcagaacctccaagatgcagctaaggatatgaaaaaatttgaagcagagttgaaaaagttacaagctgccttggagcaagcccaggcaacactgacttctccagaagttggacgtctcagtctcaaggagcagctctctcatcggcagcatttgttgtctgagatggagtcactgaagccgaaggtgcaagcagtgcagctctgccagagtgccctccggatccccgaggatgtggttgccagcttacctctctgtcatgctgctctgcggctgcaggaagaggccagccggctgcagcacaccgccatccagcagtgtaacatcatgcaggcagctgtggtacaatatgaacaatatgagcaagaaatgaaacatctccagcaactgatagaaggagctcacagagagattgaggataaacctgttgccaccagtaacatacaggagctgcaggctcagatttctcggcatgaggagctggcgcagaaaattaagggctaccaggagcagatcgcttctttgaattccaagtgcaagatgctgacgatgaaagccaagcacgccaccatgctgctgacggtgaccgaggtcgaggggctggcggaagggacagaggacctggatggggagctcctccccacgccttcggcccacccctctgtggtcatgatgactgcaggtcgctgtcacactttgctgtcaccggtcactgaggagtctggggaggagggaaccaacagtgagatttcctctccacctgcctgtcgctccccttcacctgtggctaatacagatgcttctgttaaccaggacattgcatattaccaagccttgtctgctgagaggttgcagacagatgctgcaaaaattcaccccagcacatccgcatcccaggagttctatgaaccgggattggagccatccgctactgccaaactgggtgatttgcagcgttcttgggaaaccttaaagaatgtgatcagtgagaagcagcgcacactctatgaagctttggaacgccagcagaagtaccaggactccctccagtccatctctacgaagatggaggccattgagctgaaactcagtgagagcccagagcctggcaggagtccagaaagccagatggctgaacatcaggcattgatggatgagattctcatgctccaggatgaaatcaatgagctccagtcctctctcgcagaggagctggtatccgagtcttgtgaggccgaccctgcggagcagctggccttgcagtccacgctcactgtcttagccgagcgaatgtccaccatcaggatgaaagcctcggggaaacggcagcttttggaggagaagttgaatgatcagctggaggaacaaaggcaggaacaggccctgcagaggtatcgctgtgaagccgatgagctggacagctggctcttgagtaccaaggccactctggacactgcgctgagtccacccaaggagcccatggacatggaggcccagcttatggactgccagaatatgctggtggaaatagagcagaaggtggtggctttatcagaactgtcagtccacaatgagaacctgctgctggagggcaaagctcacaccaaggacgaggccgagcagctggctggaaagctgagaaggctcaaggggagcctgctggagctgcagagagccctgcatgataagcagctcaacatgcagggaacagcacaggagaaggaggagagcgatgttgacctaacagccacgcagagccccggcgtccaggaatggctggcccaagctcgcaccacatggacccagcagcggcagagcagtctccagcaacaaaaagagttagaacaggaattagccgagcagaagagtctccttcgctcagtagccagtcgtggagaggagattctaattcaacattcggcggcagagacctctggtgatgctggcgaaaaacctgatgtgttatcccaggagttggggatggaaggggagaaatcatccgctgaagaccagatgagaatgaaatgggaaagcctacatcaagaatttagtaccaagcagaaactactacagaatgttctggaacaggaacaagagcaagtgctttatagcaggccaaatcgactcttgtctggtgtgccactgtacaaaggggacgtgccaacccaagataaatctgcagttacatctttgctggatggactgaaccaagccttcgaggaggtttcatcccagagtggaggggcaaagaggcagagtatacacttggagcagaagttgtatgatggagtctcagccacctctacttggttggatgacgttgaagaacgtttatttgttgccacagcacttttaccagaagaaacagagacttgtctcttcaaccaagagattcttgccaaagacattaaggaaatgtctgaagaaatggataagaacaaaaacttgttttcccaagcttttccagagaatggtgataatcgagatgttattgaagatactttgggttgtcttttgggcaggttatccttgctagactcagtagtgaatcaacgatgtcatcagatgaaagaaagacttcagcaaatactaaatttccagaatgatctgaaagtgctgtttacatcactggctgacaacaaatacatcattctgcaaaaactggcaaatgtgtttgaacagcccgtagcagaacaaatagaggcaatacaacaggctgaagatggactcaaagaatttgatgcaggaatcattgaattaaagaggcgtggtgacaagctacaggtcgagcagccgtccatgcaagaactctccaagctccaggacatgtatgatgagctgatgatgatcattggctcccggaggagtggtctgaatcagaaccttacactcaagagtcagtatgagagggccctacaagatctggctgacctgctagaaactggtcaggagaagatggcaggagaccagaaaatcatcgtgtcttccaaagaggaaatccagcaactacttgacaaacataaggaatactttcagggcctggaatctcatatgatcttgactgaaacactcttcagaaagataatcagctttgcagtccaaaaggaaacccagttccatacagagctgatggctcaggcttctgctgtactgaaacgggctcacaagaggggtgtggagctggagtacattctagagacgtggtcccatctggatgaggaccagcaggagctcagcagacagctggaggtggtggaaagcagcatcccaagcgtgggtctggtggaggagaacgaggacaggcttattgaccgcataacactctaccagcatttaaaatctagccttaatgaataccagcccaaattatatcaagtattagatgatgggaaacgacttctgatatccatcagctgctcagatctagaaagccaactaaatcaacttggagagtgctggctaagtaacaccaataaaatgtctaaggaacttcacagactggaaacaatattgaaacactggaccagatatcaaagtgaatctgcagatctaattcactggttacaatctgcaaaagaccggctagaattttggactcagcaatctgtgacagtcccacaagagctggaaatggtccgtgatcatctaaatgctttcctggagttttctaaagaagtggatgcccaatcttccctgaaatcatctgttctgagtactggaaatcagctccttcgactaaaaaaggtggacacagccacgctgcgctctgagctgtcgcgcattgatagccagtggactgacctgctaaccaatatcccagccgtccaggagaagctccaccagctccagatggataaactgccttcccgccatgccatttctgaagtcatgagttggatttctctaatggaaaatgttattcagaaggatgaagataatattaaaaattccataggttacaaggcaattcatgaataccttcagaaatataagggttttaagatagacattaactgtaaacagctgacagtggattttgtgaaccagtccgtgctacaaatcagcagtcaggatgtggaaagtaagcgtagtgataagactgattttgctgagcaacttggagcaatgaataaaagttggcaaattctgcaaggtctagtaactgagaagatccagctgttggaaggcttattggaatcttggtcagaatatgaaaataatgtacaatgtctgaaaacatggtttgaaacccaggaaaagagactaaaacaacagcatcgaattggagatcaggcttctgttcaaaatgcactgaaagactgtcaggatctggaagatttgattaaagcaaaagaaaaagaagtagagaaaattgagcagaatggacttgctttgattcagaacaagaaagaagacgtctctagcattgtcatgagcacactgcgagagctcggccaaacctgggcaaatttagatcacatggttggacaattaaagatactgctgaaatcagtgcttgaccaatggagtagtcacaaagtggcctttgacaagataaacagttacctcatggaggccagatactctctttcccgattccgtctgctgactggctccttagaagctgtgcaagttcaggtggacaatcttcagaatctccaagatgatctggaaaaacaggaaaggagcttacagaaatttggctctatcaccaaccaattattaaaagagtgtcacccacccgtgacagaaactcttaccaatacactgaaagaagtcaacatgagatggaataacttgctggaagagattgctgagcagctacagtccagcaaggccctacttcagctttggcaaagatacaaggactactccaaacagtgtgcttcgacagttcagcagcaggaggatcgaaccaatgagctgttgaaggcagccacaaacaaggacattgccgatgatgaggttgccacatggattcaagattgcaacgacctcctcaaaggactgggcacagttaaagattccctcttttttctccatgagctgggagagcaactgaagcaacaagtggatgcttccgcagcatcagctattcaatcggatcaactctctttgagtcaacacttgtgtgccctggagcaagctctctgcaaacagcagacttcattacaggctggagttcttgattatgaaacctttgccaagagtttagaagctttggaggcctggatagtggaagctgaagaaatactacaagggcaggaccctagccactcatctgacctctccacaatccaggaaaggatggaagaacttaagggacagatgttaaaattcagcagcatggctccagatttagaccgtctaaatgagcttggatataggttacccttgaatgataaggaaatcaaaagaatgcagaatctgaaccgccattggtctctgatctcctctcagactacagaaagattcagcaagttgcagtcatttttgctacaacatcagactttcttggaaaaatgtgaaacatggatggaattcctagttcagacagaacaaaagttagcagtagagatttcaggaaattatcagcaccttttggaacagcagagagcacacgagttgtttcaagccgagatgttcagtcgtcagcagattttgcactcaatcattattgatgggcaacgtcttctagaacaaggtcaagttgatgacagggatgaattcaacctgaaattgacactcctcagtaatcaatggcagggagtgattcgcagggcccagcagaggcgggggatcattgacagccagattcgccagtggcagcgctatagggagatggcagaaaagcttcgtaaatggttggttgaagtgtcctacctccccatgagtggtctcggaagtgttcctataccactgcaacaagcaaggaccctctttgatgaagtgcagttcaaagaaaaagtgtttctgcggcaacaaggcagctacatcctgactgtggaggctggcaagcaactccttctctcggcggacagtggcgctgaggccgccttgcaggccgaactcgctgaaatccaagagaaatggaaatcagccagcatgcggctggaagaacagaagaaaaaactagccttcttgttgaaagactgggaaaaatgtgagaaaggaatagcagattccctggagaaactacgaactttcaaaaagaagctttcgcagtctctcccggatcaccatgaagagctccatgcagaacaaatgcgttgcaaggaattagaaaatgcagttgggagctggacagatgacttgacccagttgagcctgctgaaggacaccctctctgcctatatcagtgctgatgatatctccattcttaatgaacgcgtagagcttctgcaaaggcagtgggaagaactatgccaccagctctccttaaggcggcagcaaataggtgaaagattgaatgaatgggcagtcttcagtgaaaagaacaaggaactctgtgagtggttgactcaaatggaaagcaaagtttctcagaatggagacattctcattgaagaaatgatagagaagctcaagaaggattatcaagaggaaattgctattgctcaagagaacaaaatacagctccaacaaatgggagaacgacttgctaaagccagccatgaaagcaaagcatctgagattgaatacaagctgggaaaggtcaacgaccggtggcagcatctcctggacctcattgcagccagggtgaagaagctgaaggagaccctggtagccgtgcagcagcttgataagaacatgagcagcctgaggacctggctcgctcacatcgagtcagagctggccaagccaatagtctacgattcctgtaactcggaagaaatacagagaaagcttaatgagcagcaggagcttcagagagacatagagaagcacagtacaggtgttgcatctgtcctcaacctgtgtgaagtcctgctgcacgactgtgacgcctgtgccactgatgccgagtgtgactctatacagcaggctacgagaaacctggaccggcggtggagaaacatttgtgctatgtccatggaaaggaggctgaaaatcgaagagacgtggcgattgtggcagaaatttctggatgactattcacgttttgaagattggctgaagtcttcagaaaggacagctgcttttcccagctcttctggggtgatctatacagttgccaaggaagaactaaagaaatttgaggctttccagcgacaggtccacgagtgcctgacgcagctggaactgatcaacaagcagtaccgccgcctggccagggagaaccgcactgattcagcatgtagcctcaaacagatggttcacgaaggcaaccagagatgggacaacctgcaaaagcgtgtcacctccatcttgcgcagactcaagcattttattggccagcgtgaggagtttgagactgcgcgggacagcattctggtctggctcacagagatggatctgcagctcactaatattgaacatttttctgagtgtgatgttcaagctaaaataaagcaactcaaggccttccagcaggaaatttcactgaaccacaataagattgagcagataattgcccaaggagaacagctgatagaaaagagtgagcccttggatgcagcgatcatcgaggaggaactagatgagctccgacggtactgccaggaggtcttcgggcgtgtggaaagataccataagaaactgatccgcctgcctctcccagacgatgagcacgacctctcagacagggagctggagctggaagactctgcagctctgtcggacctgcactggcacgaccgctctgcagacagcctgctttctccacagccttcctccaatctctccctctcgctcgctcagcccctccggagcgagcggtcaggacgagacaccccggctagtgtggactccatccccctggagtgggatcacgactatgacctcagtcgggacctggagtctgcaatgtccagagctctgccctctgaggatgaagaaggtcaggatgacaaagatttctacctccggggagctgttggcttatcaggggaccacagtgccctagagtcacagatccgacaactgggcaaagccctggatgatagccgttttcagatacagcaaaccgaaaatatcattcgcagcaaaactcccacggggccggagctagacaccagctacaaaggctacatgaaactgctgggcgaatgcagtagcagtatagactccgtgaagagactggagcacaaactgaaggaggaagaggagagccttcctggctttgttaacctgcatagtaccgaaacccaaacggctggtgtgattgaccgatgggagcttctccaggcccaggcattgagcaaggagttgaggatgaagcagaacctccagaagtggcagcagtttaactcagacttgaacagcatctgggcctggctgggggacacggaggaggagttggaacagctccagcgtctggaactcagcactgacatccagaccatcgagctccagatcaaaaagctcaaggagctccagaaagctgtggaccaccgcaaagccatcatcctctccatcaatctctgcagccctgagttcacccaggctgacagcaaggagagccgggacctgcaggatcgcttgtcgcagatgaatgggcgctgggaccgagtgtgctctctgctggaggagtggcggggcctgctgcaggatgccctgatgcagtgccagggtttccatgaaatgagccatggtttgcttcttatgctggagaacattgacagaaggaaaaatgaaattgtccctattgattctaaccttgatgcagagatacttcaggaccatcacaaacagcttatgcaaataaagcatgagctgttggaatcccaactcagagtagcctctttgcaagacatgtcttgccaactactggtgaatgctgaaggaacagactgtttagaagccaaagaaaaagtccatgttattggaaatcggctcaaacttctcttgaaggaggtcagtcgtcatatcaaggaactggagaagttattagacgtgtcaagtagtcagcaggatttgtcttcctggtcttctgctgatgaactggacacctcagggtctgtgagtcccacatcaggaaggagcaccccaaacagacagaaaacgccacgaggcaagtgtagtctctcacagcctggaccctctgtcagcagtccacatagcaggtccacaaaaggtggctccgattcctccctttctgagccagggccaggtcggtccggccgcggcttcctgttcagagtcctccgagcagctcttccccttcagcttctcctgctcctcctcatcgggcttgcctgccttgtaccaatgtcagaggaagactacagctgtgccctctccaacaactttgcccggtcattccaccccatgctcagatacacgaatggccctcctccactctgaactaagcagatgccatctgcagaagtgctggtagcataaggaggatcgggtcataagcaatcccaaactaccaacaagaggaccttgatcttggcgaaagccctcggtgtggcagctttagccctcctccagatcacatgtgtgcaaattatggcttcagaggtggaagataaacagtgacgggggaacaaacagacaacaagaaggtttggaagaaatctggtttgagactctgaaccttagcactaaggagattgagtaaggacctccaaagttccccggactcatgaattctgggcccttggcccattctgtgcacagccaaggacttcagtagaccatctgggcagctttcccatggtgctgctccaaccatcagataaatgaccctcccaagcaccatgtcagtgtcgtacaatctaccaaccaaccagtgctgaagagattttagaaccttgtaacatacaatttttaagagcttatatggcagcttcctttttaccttgttttcctttggggcatgatgttttaacctttgctttagaagcacaagctgtaaatctaaaaggcacttttttttagaggtataaagaaaaactagatgtaataaataagatcatggaaggctttatgtgaaaaaagttgaatgttatagtaaaaaaaaaaagatatttatgtatgtacagtttgctaaagccaagttttgtttgtattgatttctttgcatttattatagatattataaaatagtt

SEQ ID NO: 5960 - protein, 8797 aa, Homo sapiens; identical to SEQ ID NO: 787

SEQ ID NO: 5961 - DNA, 10656 bp, Homo sapiens
tgttctcacgagggggcagcttgggcttgaccgagcaggagcttcatggtcccacacgtagtatgacatgtgacctctgcacattgtttacagttcctaaactgtgatttctttttctgtgaaatagttataatagtaagtggctaccaagtagaaagtggtcatggggggtgaaggttaaacacaataacggacacacagaacttacacagggcattttatgccaagctatattgaatatctatatccctctacctgcccgtcaatgtcatgaatattgacaattcactctagaccctgctagaagaatccaaagaaattgacagtgagctggaagcaatgactgagaaattacagtacctcactagcgtgtactgtacagaaaaaatgtctcagcaagtggcagaactgggacgggagactgaggagttgcgacagatgatcaaaattcgtttgcagaacctccaagatgcagctaaggatatgaaaaaatttgaagcagagttgaaaaagttacaagctgccttggagcaagcccaggcaacactgacttctccagaagttggacgtctcagtctcaaggagcagctctctcatcggcagcatttgttgtctgagatggagtcactgaagccgaaggtgcaagcagtgcagctctgccagagtgccctccggatccccgaggatgtggttgccagcttacctctctgtcatgctgctctgcggctgcaggaagaggccagccggctgcagcacaccgccatccagcagtgtaacatcatgcaggcagctgtggtacaatatgaacaatatgagcaagaaatgaaacatctccagcaactgatagaaggagctcacagagagattgaggataaacctgttgccaccagtaacatacaggagctgcaggctcagatttctcggcatgaggagctggcgcagaaaattaagggctaccaggagcagatcgcttctttgaattccaagtgcaagatgctgacgatgaaagccaagcacgccaccatgctgctgacggtgaccgaggtcgaggggctggcggaagggacagaggacctggatggggagctcctccccacgccttcggcccacccctctgtggtcatgatgactgcaggtcgctgtcacactttgctgtcaccggtcactgaggagtctggggaggagggaaccaacagtgagatttcctctccacctgcctgtcgctccccttcacctgtggctaatacagatgcttctgttaaccaggacattgcatattaccaagccttgtctgctgagaggttgcagacagatgctgcaaaaattcaccccagcacatccgcatcccaggagttctatgaaccgggattggagccatccgctactgccaaactgggtgatttgcagcgttcttgggaaaccttaaagaatgtgatcagtgagaagcagcgcacactctatgaagctttggaacgccagcagaagtaccaggactccctccagtccatctctacgaagatggaggccattgagctgaaactcagtgagagcccagagcctggcaggagtccagaaagccagatggctgaacatcaggcattgatggatgagattctcatgctccaggatgaaatcaatgagctccagtcctctctcgcagaggagctggtatccgagtcttgtgaggccgaccctgcggagcagctggccttgcagtccacgctcactgtcttagccgagcgaatgtccaccatcaggatgaaagcctcggggaaacggcagcttttggaggagaagttgaatgatcagctggaggaacaaaggcaggaacaggccctgcagaggtatcgctgtgaagccgatgagctggacagctggctcttgagtaccaaggccactctggacactgcgctgagtccacccaaggagcccatggacatggaggcccagcttatggactgccagaatatgctggtggaaatagagcagaaggtggtggctttatcagaactgtcagtccacaatgagaacctgctgctggagggcaaagctcacaccaaggacgaggccgagcagctggctggaaagctgagaaggctcaaggggagcctgctggagctgcagagagccctgcatgataagcagctcaacatgcagggaacagcacaggagaaggaggagagcgatgttgacctaacagccacgcagagccccggcgtccaggaatggctggcccaagctcgcaccacatggacccagcagcggcagagcagtctccagcaacaaaaagagttagaacaggaattagccgagcagaagagtctccttcgctcagtagccagtcgtggagaggagattctaattcaacattcggcggcagagacctctggtgatgctggcgaaaaacctgatgtgttatcccaggagttggggatggaaggggagaaatcatccgctgaagaccagatgagaatgaaatgggaaagcctacatcaagaatttagtaccaagcagaaactactacagaatgttctggaacaggaacaagagcaagtgctttatagcaggccaaatcgactcttgtctggtgtgccactgtacaaaggggacgtgccaacccaagataaatctgcagttacatctttgctggatggactgaaccaagccttcgaggaggtttcatcccagagtggaggggcaaagaggcagagtatacacttggagcagaagttgtatgatggagtctcagccacctctacttggttggatgacgttgaagaacgtttatttgttgccacagcacttttaccagaagaaacagagacttgtctcttcaaccaagagattcttgccaaagacattaaggaaatgtctgaagaaatggataagaacaaaaacttgttttcccaagcttttccagagaatggtgataatcgagatgttattgaagatactttgggttgtcttttgggcaggttatccttgctagactcagtagtgaatcaacgatgtcatcagatgaaagaaagacttcagcaaatactaaatttccagaatgatctgaaagtgctgtttacatcactggctgacaacaaatacatcattctgcaaaaactggcaaatgtgtttgaacagcccgtagcagaacaaatagaggcaatacaacaggctgaagatggactcaaagaatttgatgcaggaatcattgaattaaagaggcgtggtgacaagctacaggtcgagcagccgtccatgcaagaactctccaagctccaggacatgtatgatgagctgatgatgatcattggctcccggaggagtggtctgaatcagaaccttacactcaagagtcagtatgagagggccctacaagatctggctgacctgctagaaactggtcaggagaagatggcaggagaccagaaaatcatcgtgtcttccaaagaggaaatccagcaactacttgacaaacataaggaatactttcagggcctggaatctcatatgatcttgactgaaacactcttcagaaagataatcagctttgcagtccaaaaggaaacccagttccatacagagctgatggctcaggcttctgctgtactgaaacgggctcacaagaggggtgtggagctggagtacattctagagacgtggtcccatctggatgaggaccagcaggagctcagcagacagctggaggtggtggaaagcagcatcccaagcgtgggtctggtggaggagaacgaggacaggcttattgaccgcataacactctaccagcatttaaaatctagccttaatgaataccagcccaaattatatcaagtattagatgatgggaaacgacttctgatatccatcagctgctcagatctagaaagccaactaaatcaacttggagagtgctggctaagtaacaccaataaaatgtctaaggaacttcacagactggaaacaatattgaaacactggaccagatatcaaagtgaatctgcagatctaattcactggttacaatctgcaaaagaccggctagaattttggactcagcaatctgtgacagtcccacaagagctggaaatggtccgtgatcatctaaatgctttcctggagttttctaaagaagtggatgcccaatcttccctgaaatcatctgttctgagtactggaaatcagctccttcgactaaaaaaggtggacacagccacgctgcgctctgagctgtcgcgcattgatagccagtggactgacctgctaaccaatatcccagccgtccaggagaagctccaccagctccagatggataaactgccttcccgccatgccatttctgaagtcatgagttggatttctctaatggaaaatgttattcagaaggatgaagataatattaaaaattccataggttacaaggcaattcatgaataccttcagaaatataagggttttaagatagacattaactgtaaacagctgacagtggattttgtgaaccagtccgtgctacaaatcagcagtcaggatgtggaaagtaagcgtagtgataagactgattttgctgagcaacttggagcaatgaataaaagttggcaaattctgcaaggtctagtaactgagaagatccagctgttggaaggcttattggaatcttggtcagaatatgaaaataatgtacaatgtctgaaaacatggtttgaaacccaggaaaagagactaaaacaacagcatcgaattggagatcaggcttctgttcaaaatgcactgaaagactgtcaggatctggaagatttgattaaagcaaaagaaaaagaagtagagaaaattgagcagaatggacttgctttgattcagaacaagaaagaagacgtctctagcattgtcatgagcacactgcgagagctcggccaaacctgggcaaatttagatcacatggttggacaattaaagatactgctgaaatcagtgcttgaccaatggagtagtcacaaagtggcctttgacaagataaacagttacctcatggaggccagatactctctttcccgattccgtctgctgactggctccttagaagctgtgcaagttcaggtggacaatcttcagaatctccaagatgatctggaaaaacaggaaaggagcttacagaaatttggctctatcaccaaccaattattaaaagagtgtcacccacccgtgacagaaactcttaccaatacactgaaagaagtcaacatgagatggaataacttgctggaagagattgctgagcagctacagtccagcaaggccctacttcagctttggcaaagatacaaggactactccaaacagtgtgcttcgacagttcagcagcaggaggatcgaaccaatgagctgttgaaggcagccacaaacaaggacattgccgatgatgaggttgccacatggattcaagattgcaacgacctcctcaaaggactgggcacagttaaagattccctcttttttctccatgagctgggagagcaactgaagcaacaagtggatgcttccgcagcatcagctattcaatcggatcaactctctttgagtcaacacttgtgtgccctggagcaagctctctgcaaacagcagacttcattacaggctggagttcttgattatgaaacctttgccaagagtttagaagctttggaggcctggatagtggaagctgaagaaatactacaagggcaggaccctagccactcatctgacctctccacaatccaggaaaggatggaagaacttaagggacagatgttaaaattcagcagcatggctccagatttagaccgtctaaatgagcttggatataggttacccttgaatgataaggaaatcaaaagaatgcagaatctgaaccgccattggtctctgatctcctctcagactacagaaagattcagcaagttgcagtcatttttgctacaacatcagactttcttggaaaaatgtgaaacatggatggaattcctagttcagacagaacaaaagttagcagtagagatttcaggaaattatcagcaccttttggaacagcagagagcacacgagttgtttcaagccgagatgttcagtcgtcagcagattttgcactcaatcattattgatgggcaacgtcttctagaacaaggtcaagttgatgacagggatgaattcaacctgaaattgacactcctcagtaatcaatggcagggagtgattcgcagggcccagcagaggcgggggatcattgacagccagattcgccagtggcagcgctatagggagatggcagaaaagcttcgtaaatggttggttgaagtgtcctacctccccatgagtggtctcggaagtgttcctataccactgcaacaagcaaggaccctctttgatgaagtgcagttcaaagaaaaagtgtttctgcggcaacaaggcagctacatcctgactgtggaggctggcaagcaactccttctctcggcggacagtggcgctgaggccgccttgcaggccgaactcgctgaaatccaagagaaatggaaatcagccagcatgcggctggaagaacagaagaaaaaactagccttcttgttgaaagactgggaaaaatgtgagaaaggaatagcagattccctggagaaactacgaactttcaaaaagaagctttcgcagtctctcccggatcaccatgaagagctccatgcagaacaaatgcgttgcaaggaattagaaaatgcagttgggagctggacagatgacttgacccagttgagcctgctgaaggacaccctctctgcctatatcagtgctgatgatatctccattcttaatgaacgcgtagagcttctgcaaaggcagtgggaagaactatgccaccagctctccttaaggcggcagcaaataggtgaaagattgaatgaatgggcagtcttcagtgaaaagaacaaggaactctgtgagtggttgactcaaatggaaagcaaagtttctcagaatggagacattctcattgaagaaatgatagagaagctcaagaaggattatcaagaggaaattgctattgctcaagagaacaaaatacagctccaacaaatgggagaacgacttgctaaagccagccatgaaagcaaagcatctgagattgaatacaagctgggaaaggtcaacgaccggtggcagcatctcctggacctcattgcagccagggtgaagaagctgaaggagaccctggtagccgtgcagcagcttgataagaacatgagcagcctgaggacctggctcgctcacatcgagtcagagctggccaagccaatagtctacgattcctgtaactcggaagaaatacagagaaagcttaatgagcagcaggagcttcagagagacatagagaagcacagtacaggtgttgcatctgtcctcaacctgtgtgaagtcctgctgcacgactgtgacgcctgtgccactgatgccgagtgtgactctatacagcaggctacgagaaacctggaccggcggtggagaaacatttgtgctatgtccatggaaaggaggctgaaaatcgaagagacgtggcgattgtggcagaaatttctggatgactattcacgttttgaagattggctgaagtcttcagaaaggacagctgcttttcccagctcttctggggtgatctatacagttgccaaggaagaactaaagaaatttgaggctttccagcgacaggtccacgagtgcctgacgcagctggaactgatcaacaagcagtaccgccgcctggccagggagaaccgcactgattcagcatgtagcctcaaacagatggttcacgaaggcaaccagagatgggacaacctgcaaaagcgtgtcacctccatcttgcgcagactcaagcattttattggccagcgtgaggagtttgagactgcgcgggacagcattctggtctggctcacagagatggatctgcagctcactaatattgaacatttttctgagtgtgatgttcaagctaaaataaagcaactcaaggccttccagcaggaaatttcactgaaccacaataagattgagcagataattgcccaaggagaacagctgatagaaaagagtgagcccttggatgcagcgatcatcgaggaggaactagatgagctccgacggtactgccaggaggtcttcgggcgtgtggaaagataccataagaaactgatccgcctgcctctcccagacgatgagcacgacctctcagacagggagctggagctggaagactctgcagctctgtcggacctgcactggcacgaccgctctgcagacagcctgctttctccacagccttcctccaatctctccctctcgctcgctcagcccctccggagcgagcggtcaggacgagacaccccggctagtgtggactccatccccctggagtgggatcacgactatgacctcagtcgggacctggagtctgcaatgtccagagctctgccctctgaggatgaagaaggtcaggatgacaaagatttctacctccggggagctgttggcttatcaggggaccacagtgccctagagtcacagatccgacaactgggcaaagccctggatgatagccgttttcagatacagcaaaccgaaaatatcattcgcagcaaaactcccacggggccggagctagacaccagctacaaaggctacatgaaactgctgggcgaatgcagtagcagtatagactccgtgaagagactggagcacaaactgaaggaggaagaggagagccttcctggctttgttaacctgcatagtaccgaaacccaaacggctggtgtgattgaccgatgggagcttctccaggcccaggcattgagcaaggagttgaggatgaagcagaacctccagaagtggcagcagtttaactcagacttgaacagcatctgggcctggctgggggacacggaggaggagttggaacagctccagcgtctggaactcagcactgacatccagaccatcgagctccagatcaaaaagctcaaggagctccagaaagctgtggaccaccgcaaagccatcatcctctccatcaatctctgcagccctgagttcacccaggctgacagcaaggagagccgggacctgcaggatcgcttgtcgcagatgaatgggcgctgggaccgagtgtgctctctgctggaggagtggcggggcctgctgcaggatgccctgatgcagtgccagggtttccatgaaatgagccatggtttgcttcttatgctggagaacattgacagaaggaaaaatgaaattgtccctattgattctaaccttgatgcagagatacttcaggaccatcacaaacagcttatgcaaataaagcatgagctgttggaatcccaactcagagtagcctctttgcaagacatgtcttgccaactactggtgaatgctgaaggaacagactgtttagaagccaaagaaaaagtccatgttattggaaatcggctcaaacttctcttgaaggaggtcagtcgtcatatcaaggaactggagaagttattagacgtgtcaagtagtcagcaggatttgtcttcctggtcttctgctgatgaactggacacctcagggtctgtgagtcccacatcaggaaggagcaccccaaacagacagaaaacgccacgaggcaagtgtagtctctcacagcctggaccctctgtcagcagtccacatagcaggtccacaaaaggtggctccgattcctccctttctgagccagggccaggtcggtccggccgcggcttcctgttcagagtcctccgagcagctcttccccttcagcttctcctgctcctcctcatcgggcttgcctgccttgtaccaatgtcagaggaagactacagctgtgccctctccaacaactttgcccggtcattccaccccatgctcagatacacgaatggccctcctccactctgaactaagcagatgccatctgcagaagtgctggtagcataaggaggatcgggtcataagcaatcccaaactaccaacaagaggaccttgatcttggcgaaagccctcggtgtggcagctttagccctcctccagatcacatgtgtgcaaattatggcttcagaggtggaagataaacagtgacgggggaacaaacagacaacaagaaggtttggaagaaatctggtttgagactctgaaccttagcactaaggagattgagtaaggacctccaaagttccccggactcatgaattctgggcccttggcccattctgtgcacagccaaggacttcagtagaccatctgggcagctttcccatggtgctgctccaaccatcagataaatgaccctcccaagcaccatgtcagtgtcgtacaatctaccaaccaaccagtgctgaagagattttagaaccttgtaacatacaatttttaagagcttatatggcagcttcctttttaccttgttttcctttggggcatgatgttttaacctttgctttagaagcacaagctgtaaatctaaaaggcacttttttttagaggtataaagaaaaactagatgtaataaataagatcatggaaggctttatgtgaaaaaagttgaatgttatagtaaaaaaaaaaagatatttatgt

SEQ ID NO: 5962 - protein, 3212 aa, Homo sapiens; identical to SEQ ID NO: 5952

SEQ ID NO: 5963 - DNA, 10764 bp, Homo sapiens
caaaaatcagtctgatctcgggaaacctggagaaatttattttctgtactctaatgttctttcattttggtgaccatcaaggtgctgggagaggaattagatggctgtaattcaaagttaatggaattagatgcagcagtacagaaattcttggaacagaatggccaactgggtaagccactggccaagaagataggaaaactgactgaacttcaccagcagaccattagacaagctgagaatcggctctccaagctcaatcaggcagcatcacatttagaagaatacaatgaaatgcttgaattaattttgaagtggattgaaaaagctaaagtcttggctcatggaactattgcatggaattctgcaagccagcttcgggaacaatatattttgcatcagaccctgctagaagaatccaaagaaattgacagtgagctggaagcaatgactgagaaattacagtacctcactagcgtgtactgtacagaaaaaatgtctcagcaagtggcagaactgggacgggagactgaggagttgcgacagatgatcaaaattcgtttgcagaacctccaagatgcagctaaggatatgaaaaaatttgaagcagagttgaaaaagttacaagctgccttggagcaagcccaggcaacactgacttctccagaagttggacgtctcagtctcaaggagcagctctctcatcggcagcatttgttgtctgagatggagtcactgaagccgaaggtgcaagcagtgcagctctgccagagtgccctccggatccccgaggatgtggttgccagcttacctctctgtcatgctgctctgcggctgcaggaagaggccagccggctgcagcacaccgccatccagcagtgtaacatcatgcaggcagctgtggtacaatatgaacaatatgagcaagaaatgaaacatctccagcaactgatagaaggagctcacagagagattgaggataaacctgttgccaccagtaacatacaggagctgcaggctcagatttctcggcatgaggagctggcgcagaaaattaagggctaccaggagcagatcgcttctttgaattccaagtgcaagatgctgacgatgaaagccaagcacgccaccatgctgctgacggtgaccgaggtcgaggggctggcggaagggacagaggacctggatggggagctcctccccacgccttcggcccacccctctgtggtcatgatgactgcaggtcgctgtcacactttgctgtcaccggtcactgaggagtctggggaggagggaaccaacagtgagatttcctctccacctgcctgtcgctccccttcacctgtggctaatacagatgcttctgttaaccaggacattgcatattaccaagccttgtctgctgagaggttgcagacagatgctgcaaaaattcaccccagcacatccgcatcccaggagttctatgaaccgggattggagccatccgctactgccaaactgggtgatttgcagcgttcttgggaaaccttaaagaatgtgatcagtgagaagcagcgcacactctatgaagctttggaacgccagcagaagtaccaggactccctccagtccatctctacgaagatggaggccattgagctgaaactcagtgagagcccagagcctggcaggagtccagaaagccagatggctgaacatcaggcattgatggatgagattctcatgctccaggatgaaatcaatgagctccagtcctctctcgcagaggagctggtatccgagtcttgtgaggccgaccctgcggagcagctggccttgcagtccacgctcactgtcttagccgagcgaatgtccaccatcaggatgaaagcctcggggaaacggcagcttttggaggagaagttgaatgatcagctggaggaacaaaggcaggaacaggccctgcagaggtatcgctgtgaagccgatgagctggacagctggctcttgagtaccaaggccactctggacactgcgctgagtccacccaaggagcccatggacatggaggcccagcttatggactgccagaatatgctggtggaaatagagcagaaggtggtggctttatcagaactgtcagtccacaatgagaacctgctgctggagggcaaagctcacaccaaggacgaggccgagcagctggctggaaagctgagaaggctcaaggggagcctgctggagctgcagagagccctgcatgataagcagctcaacatgcagggaacagcacaggagaaggaggagagcgatgttgacctaacagccacgcagagccccggcgtccaggaatggctggcccaagctcgcaccacatggacccagcagcggcagagcagtctccagcaacaaaaagagttagaacaggaattagccgagcagaagagtctccttcgctcagtagccagtcgtggagaggagattctaattcaacattcggcggcagagacctctggtgatgctggcgaaaaacctgatgtgttatcccaggagttggggatggaaggggagaaatcatccgctgaagaccagatgagaatgaaatgggaaagcctacatcaagaatttagtaccaagcagaaactactacagaatgttctggaacaggaacaagagcaagtgctttatagcaggccaaatcgactcttgtctggtgtgccactgtacaaaggggacgtgccaacccaagataaatctgcagttacatctttgctggatggactgaaccaagccttcgaggaggtttcatcccagagtggaggggcaaagaggcagagtatacacttggagcagaagttgtatgatggagtctcagccacctctacttggttggatgacgttgaagaacgtttatttgttgccacagcacttttaccagaagaaacagagacttgtctcttcaaccaagagattcttgccaaagacattaaggaaatgtctgaagaaatggataagaacaaaaacttgttttcccaagcttttccagagaatggtgataatcgagatgttattgaagatactttgggttgtcttttgggcaggttatccttgctagactcagtagtgaatcaacgatgtcatcagatgaaagaaagacttcagcaaatactaaatttccagaatgatctgaaagtgctgtttacatcactggctgacaacaaatacatcattctgcaaaaactggcaaatgtgtttgaacagcccgtagcagaacaaatagaggcaatacaacaggctgaagatggactcaaagaatttgatgcaggaatcattgaattaaagaggcgtggtgacaagctacaggtcgagcagccgtccatgcaagaactctccaagctccaggacatgtatgatgagctgatgatgatcattggctcccggaggagtggtctgaatcagaaccttacactcaagagtcagtatgagagggccctacaagatctggctgacctgctagaaactggtcaggagaagatggcaggagaccagaaaatcatcgtgtcttccaaagaggaaatccagcaactacttgacaaacataaggaatactttcagggcctggaatctcatatgatcttgactgaaacactcttcagaaagataatcagctttgcagtccaaaaggaaacccagttccatacagagctgatggctcaggcttctgctgtactgaaacgggctcacaagaggggtgtggagctggagtacattctagagacgtggtcccatctggatgaggaccagcaggagctcagcagacagctggaggtggtggaaagcagcatcccaagcgtgggtctggtggaggagaacgaggacaggcttattgaccgcataacactctaccagcatttaaaatctagccttaatgaataccagcccaaattatatcaagtattagatgatgggaaacgacttctgatatccatcagctgctcagatctagaaagccaactaaatcaacttggagagtgctggctaagtaacaccaataaaatgtctaaggaacttcacagactggaaacaatattgaaacactggaccagatatcaaagtgaatctgcagatctaattcactggttacaatctgcaaaagaccggctagaattttggactcagcaatctgtgacagtcccacaagagctggaaatggtccgtgatcatctaaatgctttcctggagttttctaaagaagtggatgcccaatcttccctgaaatcatctgttctgagtactggaaatcagctccttcgactaaaaaaggtggacacagccacgctgcgctctgagctgtcgcgcattgatagccagtggactgacctgctaaccaatatcccagccgtccaggagaagctccaccagctccagatggataaactgccttcccgccatgccatttctgaagtcatgagttggatttctctaatggaaaatgttattcagaaggatgaagataatattaaaaattccataggttacaaggcaattcatgaataccttcagaaatataagggttttaagatagacattaactgtaaacagctgacagtggattttgtgaaccagtccgtgctacaaatcagcagtcaggatgtggaaagtaagcgtagtgataagactgattttgctgagcaacttggagcaatgaataaaagttggcaaattctgcaaggtctagtaactgagaagatccagctgttggaaggcttattggaatcttggtcagaatatgaaaataatgtacaatgtctgaaaacatggtttgaaacccaggaaaagagactaaaacaacagcatcgaattggagatcaggcttctgttcaaaatgcactgaaagactgtcaggatctggaagatttgattaaagcaaaagaaaaagaagtagagaaaattgagcagaatggacttgctttgattcagaacaagaaagaagacgtctctagcattgtcatgagcacactgcgagagctcggccaaacctgggcaaatttagatcacatggttggacaattaaagatactgctgaaatcagtgcttgaccaatggagtagtcacaaagtggcctttgacaagataaacagttacctcatggaggccagatactctctttcccgattccgtctgctgactggctccttagaagctgtgcaagttcaggtggacaatcttcagaatctccaagatgatctggaaaaacaggaaaggagcttacagaaatttggctctatcaccaaccaattattaaaagagtgtcacccacccgtgacagaaactcttaccaatacactgaaagaagtcaacatgagatggaataacttgctggaagagattgctgagcagctacagtccagcaaggccctacttcagctttggcaaagatacaaggactactccaaacagtgtgcttcgacagttcagcagcaggaggatcgaaccaatgagctgttgaaggcagccacaaacaaggacattgccgatgatgaggttgccacatggattcaagattgcaacgacctcctcaaaggactgggcacagttaaagattccctcttttttctccatgagctgggagagcaactgaagcaacaagtggatgcttccgcagcatcagctattcaatcggatcaactctctttgagtcaacacttgtgtgccctggagcaagctctctgcaaacagcagacttcattacaggctggagttcttgattatgaaacctttgccaagagtttagaagctttggaggcctggatagtggaagctgaagaaatactacaagggcaggaccctagccactcatctgacctctccacaatccaggaaaggatggaagaacttaagggacagatgttaaaattcagcagcatggctccagatttagaccgtctaaatgagcttggatataggttacccttgaatgataaggaaatcaaaagaatgcagaatctgaaccgccattggtctctgatctcctctcagactacagaaagattcagcaagttgcagtcatttttgctacaacatcagactttcttggaaaaatgtgaaacatggatggaattcctagttcagacagaacaaaagttagcagtagagatttcaggaaattatcagcaccttttggaacagcagagagcacacgagttgtttcaagccgagatgttcagtcgtcagcagattttgcactcaatcattattgatgggcaacgtcttctagaacaaggtcaagttgatgacagggatgaattcaacctgaaattgacactcctcagtaatcaatggcagggagtgattcgcagggcccagcagaggcgggggatcattgacagccagattcgccagtggcagcgctatagggagatggcagaaaagcttcgtaaatggttggttgaagtgtcctacctccccatgagtggtctcggaagtgttcctataccactgcaacaagcaaggaccctctttgatgaagtgcagttcaaagaaaaagtgtttctgcggcaacaaggcagctacatcctgactgtggaggctggcaagcaactccttctctcggcggacagtggcgctgaggccgccttgcaggccgaactcgctgaaatccaagagaaatggaaatcagccagcatgcggctggaagaacagaagaaaaaactagccttcttgttgaaagactgggaaaaatgtgagaaaggaatagcagattccctggagaaactacgaactttcaaaaagaagctttcgcagtctctcccggatcaccatgaagagctccatgcagaacaaatgcgttgcaaggaattagaaaatgcagttgggagctggacagatgacttgacccagttgagcctgctgaaggacaccctctctgcctatatcagtgctgatgatatctccattcttaatgaacgcgtagagcttctgcaaaggcagtgggaagaactatgccaccagctctccttaaggcggcagcaaataggtgaaagattgaatgaatgggcagtcttcagtgaaaagaacaaggaactctgtgagtggttgactcaaatggaaagcaaagtttctcagaatggagacattctcattgaagaaatgatagagaagctcaagaaggattatcaagaggaaattgctattgctcaagagaacaaaatacagctccaacaaatgggagaacgacttgctaaagccagccatgaaagcaaagcatctgagattgaatacaagctgggaaaggtcaacgaccggtggcagcatctcctggacctcattgcagccagggtgaagaagctgaaggagaccctggtagccgtgcagcagcttgataagaacatgagcagcctgaggacctggctcgctcacatcgagtcagagctggccaagccaatagtctacgattcctgtaactcggaagaaatacagagaaagcttaatgagcagcaggagcttcagagagacatagagaagcacagtacaggtgttgcatctgtcctcaacctgtgtgaagtcctgctgcacgactgtgacgcctgtgccactgatgccgagtgtgactctatacagcaggctacgagaaacctggaccggcggtggagaaacatttgtgctatgtccatggaaaggaggctgaaaatcgaagagacgtggcgattgtggcagaaatttctggatgactattcacgttttgaagattggctgaagtcttcagaaaggacagctgcttttcccagctcttctggggtgatctatacagttgccaaggaagaactaaagaaatttgaggctttccagcgacaggtccacgagtgcctgacgcagctggaactgatcaacaagcagtaccgccgcctggccagggagaaccgcactgattcagcatgtagcctcaaacagatggttcacgaaggcaaccagagatgggacaacctgcaaaagcgtgtcacctccatcttgcgcagactcaagcattttattggccagcgtgaggagtttgagactgcgcgggacagcattctggtctggctcacagagatggatctgcagctcactaatattgaacatttttctgagtgtgatgttcaagctaaaataaagcaactcaaggccttccagcaggaaatttcactgaaccacaataagattgagcagataattgcccaaggagaacagctgatagaaaagagtgagcccttggatgcagcgatcatcgaggaggaactagatgagctccgacggtactgccaggaggtcttcgggcgtgtggaaagataccataagaaactgatccgcctgcctctcccagacgatgagcacgacctctcagacagggagctggagctggaagactctgcagctctgtcggacctgcactggcacgaccgctctgcagacagcctgctttctccacagccttcctccaatctctccctctcgctcgctcagcccctccggagcgagcggtcaggacgagacaccccggctagtgtggactccatccccctggagtgggatcacgactatgacctcagtcgggacctggagtctgcaatgtccagagctctgccctctgaggatgaagaaggtcaggatgacaaagatttctacctccggggagctgttggcttatcaggggaccacagtgccctagagtcacagatccgacaactgggcaaagccctggatgatagccgttttcagatacagcaaaccgaaaatatcattcgcagcaaaactcccacggggccggagctagacaccagctacaaaggctacatgaaactgctgggcgaatgcagtagcagtatagactccgtgaagagactggagcacaaactgaaggaggaagaggagagccttcctggctttgttaacctgcatagtaccgaaacccaaacggctggtgtgattgaccgatgggagcttctccaggcccaggcattgagcaaggagttgaggatgaagcagaacctccagaagtggcagcagtttaactcagacttgaacagcatctgggcctggctgggggacacggaggaggagttggaacagctccagcgtctggaactcagcactgacatccagaccatcgagctccagatcaaaaagctcaaggagctccagaaagctgtggaccaccgcaaagccatcatcctctccatcaatctctgcagccctgagttcacccaggctgacagcaaggagagccgggacctgcaggatcgcttgtcgcagatgaatgggcgctgggaccgagtgtgctctctgctggaggagtggcggggcctgctgcaggatgccctgatgcagtgccagggtttccatgaaatgagccatggtttgcttcttatgctggagaacattgacagaaggaaaaatgaaattgtccctattgattctaaccttgatgcagagatacttcaggaccatcacaaacagcttatgcaaataaagcatgagctgttggaatcccaactcagagtagcctctttgcaagacatgtcttgccaactactggtgaatgctgaaggaacagactgtttagaagccaaagaaaaagtccatgttattggaaatcggctcaaacttctcttgaaggaggtcagtcgtcatatcaaggaactggagaagttattagacgtgtcaagtagtcagcaggatttgtcttcctggtcttctgctgatgaactggacacctcagggtctgtgagtcccacatcaggaaggagcaccccaaacagacagaaaacgccacgaggcaagtgtagtctctcacagcctggaccctctgtcagcagtccacatagcaggtccacaaaaggtggctccgattcctccctttctgagccagggccaggtcggtccggccgcggcttcctgttcagagtcctccgagcagctcttccccttcagcttctcctgctcctcctcatcgggcttgcctgccttgtaccaatgtcagaggaagactacagctgtgccctctccaacaactttgcccggtcattccaccccatgctcagatacacgaatggccctcctccactctgaactaagcagatgccatctgcagaagtgctggtagcataaggaggatcgggtcataagcaatcccaaactaccaacaagaggaccttgatcttggcgaaagccctcggtgtggcagctttagccctcctccagatcacatgtgtgcaaattatggcttcagaggtggaagataaacagtgacgggggaacaaacagacaacaagaaggtttggaagaaatctggtttgagactctgaaccttagcactaaggagattgagtaaggacctccaaagttccccggactcatgaattctgggcccttggcccattctgtgcacagccaaggacttcagtagaccatctgggcagctttcccatggtgctgctccaaccatcagataaatgaccctcccaagcaccatgtcagtgtcgtacaatctaccaaccaaccagtgctgaagagattttagaaccttgtaacatacaatttttaagagcttatatggcagcttcctttttaccttgttttcctttggggcatgatgttttaacctttgctttagaagcacaagctgtaaatctaaaaggcacttttttttagaggtataaagaaaaactagatgtaataaataagatcatggaaggctttatgtgaaaaaagttgaatgttatagtaaaaaaaaaaagatatttatgt

SEQ ID NO: 5964 - protein, 3321 aa, Homo sapiens; identical to SEQ ID NO: 781

SEQ ID NO: 5965 - DNA, 27674 bp, Homo sapiens
cccgggcagtggaaaccgtgggcaaaagttagctggcaggacagcgcagctcctccaggcagcggaggcagcgcgtcccggctctcagggacatttccttcccacctcgacccccgggaggtggtcccggtataaaggctcgctgagcgggtgggtcacagcacagctttgcagctgcggagaaacgcccaaggccgtgcatctccaggagggcggctgggctcccgcagtcctgcagaccgcgcccgatcccggcgacagggcgggcggacagccgcgcatccccggggtcccgccgagcctgggcgcagagagccgggaggaagcgttcgctcgcttcgccttgctgctgggaaactgaacgaggccgagagagaaggttcttgagttcatgtaagaggacagtcttaaaacggaagaagaaaaagaagcagttcagtctttgggagagctgcctccttgttgagtgctgcaaaggcctggaattcatttatgacagaatagatctagaaaagtccaagcatgttttctagagtggtgtagccctgtgctgcctccagtgaagagtctcttggtgttggcttcgtgcttccggagggaccatggcaacctccagaggggcctcccggtgtcctcgggatatcgccaatgtgatgcagaggctgcaagatgagcaagagatagtacaaaaacgaactttcacaaaatggatcaactctcatctggccaagcggaaacctccaatggtggtggacgatctttttgaagacatgaaagatggtgttaaactgcttgcccttctggaggtcctgtctgggcagaaactgccttgtgaacaaggacgccggatgaagcgaatccatgctgtggctaacattggcacggcactcaagttcctcgaaggaagaaagattaaattagtcaacattaactccaccgatatagctgatggccgaccctcaatagttcttggattgatgtggaccattattctatatttccagattgaagagttgaccagcaacctgccccagctccagtctttgtccagcagcgcatcctccgtggacagcatagttagctctgagactcccagcccaccaagtaaacggaaggtgaccaccaagatccaaggaaatgctaagaaggctttattaaagtgggttcagtacacagctggcaagcagactggaatagaagtaaaagattttgggaagagttggagaagcggggttgcctttcattcagttattcatgccattcgaccggaattggtggacttggagacagtgaaaggcagatccaaccgagaaaatttggaggatgctttcactatcgccgaaacagaactggggatcccaagactgctagatcctgaagacgttgatgtggataaaccagatgagaaatctattatgacctatgtagcccagtttctgaaacattatcctgacatccacaatgcaagcactgatgggcaagaggatgatgaaatacttccaggtttcccatcttttgcaaattctgtacaaaattttaagagagaagacagagtaatttttaaggaaatgaaagtttggatagaacaatttgagagagatttgacaagagcacagatggtggaatcaaatttacaggataaatatcagtcatttaagcacttcagagttcaatatgaaatgaagaggaaacagattgaacatttaatacaaccattacacagagacggtaaattgtcacttgaccaagcattggtaaaacaatcttgggatagagtgacctccaggctctttgactggcatatacagcttgataaatctcttcctgcacctctgggcaccataggtgcctggctgtacagagcggaggtggccctgagagaggaaataaccgttcaacaggtccacgaggaaacagcaaacacgatacaacggaaacttgagcaacataaggatctgcttcaaaacacggatgcccacaaaagagcattccatgaaatctaccggaccaggtctgttaacgggattccagtgccacctgatcaattagaggacatggccgagaggtttcattttgtttcctccacatcagagctacacctaatgaaaatggaatttttagaattaaagtaccgtctgctctcactgctggttcttgcagagtcaaagctgaagtcttggatcattaagtacgggaggagagagtcagtggagcagcttctacaaaactacgtgtcttttatagaaaatagcaagttctttgaacaatatgaggtgacataccagatcttgaaacagacagctgagatgtatgtcaaagcagatggttcagtggaagaagctgagaatgtgatgaaattcatgaatgaaaccaccgctcagtggaggaatctctcagtagaagtgaggagtgtgaggagcatgctggaagaagtgatctctaactgggatcgctatggcaatacagtggctagtctgcaagcctggctagaggatgctgaaaaaatgctcaatcaatcagaaaatgccaaaaaggatttttttcgaaatttacctcattggattcagcagcatactgccatgaacgatgctggcaattttctaattgaaacctgtgatgagatggtttcccgtgacctgaagcagcaattactgttgctaaatgggcggtggagggagttgtttatggaagtcaagcaatatgctcaagctgatgagatggacagaatgaagaaggaatacacagactgtgttgttaccctgtctgcttttgcaacggaagcccataagaaactttctgaacccttagaagtctcttttatgaatgtcaagctattaattcaagacttggaggatattgagcagagggtgcctgtgatggatgcccaatacaagataattacaaagacagcacacctcattaccaaagaaagcccccaagaagaaggaaaagaaatgtttgcgaccatgtcaaagctcaaagagcagctaaccaaggtcaaagaatgttactccccactcctttatgagtctcagcagctgttgattccgttggaggaattagaaaagcagatgacgtccttttatgactcacttgggaaaatcaatgaaattatcacagttcttgagcgtgaggcacaatcgagtgccctttttaaacaaaaacatcaggaactgttagcttgtcaagaaaactgtaagaaaaccttgacacttattgagaaaggcagtcaaagtgttcaaaagtttgtgaccttgagcaacgtgttaaagcattttgatcagacgaggctacaaagacagattgcagatattcatgttgcttttcagagtatggtaaagaaaactggagattggaagaagcatgtggaaaccaacagtcgcttgatgaagaagtttgaggagtctcgagcagagttggagaaggtactgcggattgctcaggagggcctggaggaaaagggggatccagaggagctcctgcggagacacactgagtttttcagtcagctggatcagagggtgctcaatgctttcctgaaagcttgtgatgaactcaccgacatccttccagagcaggagcagcaggggctgcaggaagctgttcgaaagctccacaaacaatggaaggatcttcaaggagaagccccttatcatttgcttcatctgaagattgatgtggagaagaataggttcttagcctctgtagaagaatgcagaactgagctggatcgagagaccaagctgatgccccaggaaggcagtgaaaagataattaaagagcacagggttttcttcagtgacaaaggtcctcatcatctctgtgagaaaaggttacagctcatcgaggaactctgtgtgaaactcccagtgcgggacccagtaagggacacacctggaacctgtcacgtgactctcaaagagctcagagctgccattgacagcacctacaggaagctcatggaagacccagacaagtggaaggactacactagcagattctctgagttctcatcttggatatctacaaatgagacacaattaaaggggatcaagggtgaggccatcgatactgccaaccacggagaggttaaacgtgccgttgaagagatcagaaatggtgttaccaaaaggggtgagaccctcagctggctgaaatccaggctgaaagttttgacagaagtttcttctgagaatgaagcccaaaagcagggagatgagctggcaaaattatccagctctttcaaggctcttgtgacgctgctgtcagaggttgaaaagatgctaagcaattttggggactgtgtccagtacaaagaaatagtcaaaaattctctcgaagaattaatttctggctctaaagaagtccaggaacaagctgagaagatcttggatactgaaaatctgtttgaagcacagcagttacttcttcatcaccagcaaaagacaaagcggatctcagcaaagaagagagatgtgcagcagcagatcgcgcaggcgcagcagggagaaggggggctgcctgaccgaggccacgaggagctgcggaagctggagagcacactggatggcctggagcgcagccgggagaggcaggaacgccgcatccaggtcacattaagaaaatgggagcgatttgaaacaaacaaagaaacagtagtaagatacctttttcaaacaggttccagtcatgaacgcttcttgagttttagcagtttggaaagtttatcttcagaactggaacaaacaaaggagttttctaaacggacagaaagtattgcagtccaggctgagaaccttgtaaaggaagcttcagagataccgcttgggccccaaaataagcagctgcttcaacagcaggccaagtcaatcaaagaacaagtcaaaaaattagaagacacgcttgaagaagatattaaaaccatggaaatggtgaaaaccaagtgggatcattttggcagtaattttgagactctgtccgtctggataactgagaaagaaaaagaactcaatgccttggaaacttcgtcatctgccatggacatgcaaatcagccaaattaaggtcacaattcaggaaatagaaagtaagctcagcagcattgtaggattagaagaagaagcccagtcttttgctcagtttgttaccactggagaatctgctcgaattaaagccaagttgacacaaataagaagatacggggaagagcttcgagagcatgcacagtgtctggaaggaacaatcctgggacatttatctcagcagcaaaagtttgaagagaaccttagaaagatccagcaatctgtgtctgaatttgaagataaacttgctgttccaattaaaatatgttcttcagctacagaaacatacaaagttcttcaagaacatatggatctctgccaggccctggagtcactgagcagcgcgatcactgccttctcagccagtgccaggaaggttgtgaacagagattcctgtgttcaggaggctgcggctctacagcagcaatacgaggacatcctaaggagggcgaaggagagacagacggcgctggagaatctgctggcccactggcagaggctagagaaagaactatcatcctttttgacctggttagagcggggtgaagctaaagccagttccccagaaatggacatttctgcagacagagtcaaagtggaaggtgaacttcagttaatacaggcactgcaaaatgaagttgtatcccaggcctcattctatagcaaacttttgcaattgaaggaatcattgttctcagtagcctccaaagatgatgtgaaaatgatgaaactacatttggagcagttggatgagagatggagagatttaccacagatcattaacaaaaggattaattttcttcagtctgtggttgctgaacaccagcaatttgatgagctgctgctttccttttctgtctggattaaactgtttctcagtgaattacaaactacctctgagattagcataatggaccatcaagtagcccttactcggcataaggaccacgcagcagaagtagagagcaaaaagggcgaattgcagagtctgcagggtcacttagcaaagttgggttctctgggccgtgctgaggacctccacctcctgcagggaaaggctgaggactgcttccagctgtttgaggaggccagccaggttgtggagaggcggcagcttgccctgtcccatttggcagaattcctccagagccatgcctctctgtccggcattctccgccagctgaggcaaacagtggaagcaaccaacagtatgaataagaacgagtctgatttgatagaaaaggacctcaatgatgctcttcaaaatgctaaagcattagaatctgctgccgtcagtctggatggcattctttccaaagcccaataccatctgaaaatcgggagctctgagcaaaggacttcctgcagagccacggctgatcagctctgtggagaggtagagaggatccagaaccttctgggaaccaagcagagtgaggcagatgctctggcagtgttgaaaaaagcattccaagaccagaaagaggagcttctgaaaagcattgaggacattgaagaaaggactgacaaagagcgattgaaagaacctacccgccaagctcttcagcagaggttaagagtgtttaatcagctagaagatgaattgaattctcacgagcatgaactatgttggttgaaagacaaagccaagcaaattgcccagaaagatgtagcttttgcacctgaagttgacagggagataaaccgcttagaggtcacctgggatgataccaaaagactaattcatgaaaatcagggtcagtgctgtggacttattgacttaatgagagaatatcagaacctgaaatcagctgtatctaaagtcttagaaaatgccagcagtgtgattgtaaccagaactaccataaaagatcaggaggatcttaaatgggctttttccaagcatgaaactgccaagaacaaaatgaattacaaacagaaagacttggataactttaccagcaaaggaaaacacttgttatctgagctgaagaaaattcacagtagtgatttcagcttggtgaaaacagacatggagagcaccgtggacaaatggctggatgtatcagagaaacttgaagaaaacatggataggctgagagtaagcctgtccatttgggatgatgtactgtcaactagagatgagattgagggatggtcaaacaactgcgttccacagatggcagaaaacatcagcaacctggataaccacctcagagctgaagaactgcttaaagaatttgagtctgaagttaaaaacaaagcattgagattggaagaactgcattccaaagttaatgatctgaaagaattaactaaaaatctagaaacaccgccagaccttcagtttatagaagcagacttaatgcagaaactggagcatgccaaagaaataactgaagtagcaaaaggaaccctgaaggatttcacggctcaaagtacacaagtggagaagtttattaatgacataacaacatggttcacaaaagtggaagaatcgttgatgaactgtgcccaaaatgagacttgtgaagcattgaaaaaagtcaaggatatacaaaaagaacttcaaagtcaacaaagcaacatcagctctacccaagaaaatctcaatagcttgtgccgcaagtaccactcagctgagttggagagcctgggccgtgcaatgactggtctgataaagaaacatgaagccgtgagccagttgtgctccaaaacccaggccagcctgcaggaatctctggaaaaacacttcagtgagtctatgcaggaattccaagaatggtttttgggagcaaaggcagcagcaaaagaatcatcagatcgcaccggtgacagcaaagttctagaagcaaagctccatgatcttcagaacattttggactcagtcagtgatgggcagagcaaacttgatgcagtgactcaagaaggacaaactttgtatgcacatttgtctaaacaaattgtcagtagcattcaagaacaaatcacaaaggccaatgaagagtttcaagcatttctgaaacaatgccttaaagataagcaggctcttcaagactgtgcttcagaacttggaagctttgaagatcagcacagaaaactgaacttatggatccatgaaatggaagaaaggttcaatacggaaaacttgggagagagtaaacagcacattcctgagaagaaaaatgaagttcataaagttgaaatgtttttgggagaactgctggctgcaagagagtctcttgataagctttcccagagagggcagcttctgagtgaagaaggccacggtgctgggcaggagggccgcctgtgttcccagctcctcacaagccaccagaacctacttagaatgaccaaagagaaactccggagctgccaggtggcccttcaggagcacgaagccctggaggaagcactgcaaagcatgtggttctgggtgaaggccattcaggacagactggcctgtgcagagagcactcttgggagcaaagacaccctggagaaacggctgtcacaaatacaggatattctcctgatgaaaggtgaaggggaagttaagttgaatatggccattggcaagggggaacaggccttgagaagtagcaacaaagaaggtcagagggtgattcagactcagttagagacccttaaagaagtgtgggctgacatcatgagctcctccgtccacgctcaaagcactttagagtctgtgattagccaatggaatgactatgtagagaggaaaaaccagttggagcagtggatggaatcagtggatcaaaaaatagaacatcccttacaaccacagccaggtctgaaagagaagttcgtcctgcttgaccacctccagtccatcctgtctgaggcagaagatcacacgagagcccttcaccgtctaattgcgaagtccagggagctctacgaaaagacagaggatgagtctttcaaggacacagctcaagaggagctgaaaacacagtttaatgatataatgactgttgccaaggaaaaaatgaggaaagtggaagagattgtgaaagatcatctaatgtatttagatgcggtccacgagttcacagattggctccattcagcaaaggaagaacttcaccggtggtcagatatgtctggagattcatcagccacccagaaaaagttatcaaaaattaaggagctgatagattccagagagattggtgcaagccgtctcagcagagtggagtcgctggctcccgaagtgaaacagaacacaactgccagtgggtgtgagctcatgcacacggagatgcaggccctgcgtgccgactggaagcagtgggaagacagtgtattccaaacgcagagctgtttggagaacctggtcagccagatggccctttcggagcaggaattctcaggccaagtggctcaactggagcaggccctggaacagttcagtgcccttctgaaaacctgggctcagcagttaaccctcctggaaggcaagaacacggatgaggagatagtggaatgctggcacaaaggacaagagatactggatgctttgcaaaaagcagagcctagaacagaggatctcaagtctcagctgaatgaactttgtcgattttccagagacctgagtacctacagtggaaaagtttctggcttgattaaagagtataattgtctttgtttgcaagcatccaagggctgccagaataaagaacagattttacagcaaagatttcgaaaggccttcagggatttccagcagtggttggttaatgcaaaaatcactaccgccaagtgttttgatatacctcaaaatataagtgaagtttcaactagtcttcagaaaatacaggagtttttgtcagaaagtgaaaatggacagcacaagctaaacatgatgctgtctaaaggggaacttctgagtaccctgctgaccaaagagaaagcgaaagggatccaggccaaagttacagctgcaaaagaagattggaaaaattttcattcaaatctccaccaaaaagaatctgctctagagaatctaaagatccaaatgaaggactttgaagtaagtgctgagcctatccaggactggctgagtaaaactgagaagatggtccatgaaagcagcaatcgcctctatgatctgccagcaaagaggagggagcagcagaagctccagtctgtccttgaggaaatacactgctacgagcctcagctcaacaggctgaaagagaaagctcagcagctgtgggaaggacaagctgccagcaagagctttaggcacagagtgtcgcagctgtcttctcagtatctagcgctaagcaatttaacaaaggagaaagtgtcaagactggatagaatcgttgcagaacacaatcagttctctcttgggattaaagaattacaagactggatgacggatgcgattcacatgctggattcatactgccacccgacatccgacaaaagtgtgctggacagcaggacgctcaagctcgaggctctattatcagtcaaacaggaaaaagagattcagatgaaaatgatagtgaccaggggagaatctgtccttcagaatacttctccagaaggcattcccactattcagcagcagctgcagagtgtgaaggatatgtgggcatcccttttgtctgcagggattcgttgtaaaagccaactcgaaggagctctctccaagtggacaagttatcaggatggcgttcgacagttctccggttggatggatagtatggaagccaacctgaatgaatcagaaaggcagcatgcggagctgcgggataaaacaacgatgctcggaaaagccaagttattaaatgaagaagtgctgagttacagcagcttgctggagaccatcgaagtcaaaggggctggcatgacagaacactatgtcacccagctagaactccaggatctacaggaacgatacagagccatccaagagagggccaaggaagccgtaaccaagtctgaaaaacttgtccgcctgcaccaagagtatcagagagacctaaaggcatttgaagtttggttggggcaagaacaagaaaagctcgaccagtattcagttcttgaaggtgatgcccacactcatgagacaacattgcgtgatcttcaggagctacaggtacactgtgcagaggggcaggccctgttgaactcagtgctgcacaccagagaggatgtgatcccatcaggtatcccacaggcagaggaccgggctttagagtctctccggcaagactggcaggcttaccagcacaggctgtccgagactcgaactcagttcaataacgtggtgaacaaattgaggctaatggagcaaaagtttcagcaagtagatgaatggctcaaaacagcagaggagaaagttagtcccaggaccagacgtcagtctaacagggcaaccaaggagatacaattacatcagatgaagaagtggcacgaagaagtgactgcatacagagatgaagttgaggaagtgggagctagagctcaggagatactggacgagagccacgtgaacagcagaatgggttgccaggccacccagctgacttccagataccaggccctgcttctccaagtgctggaacaaataaaattcctggaggaggagattcagagtttggaggaatcagaatcatccctcagttcctattctgattggtatggctctactcataaaaacttcaagaatgtggctaccaagattgacaaagtagatacagtaatgatggggaagaaattgaagacgttggaggttttgctcaaagacatggagaaaggtcacagtttgctgaaatcagcccgggagaaaggagagagggctgttaaatacttggaggaaggcgaggcagagaggttaagaaaggagattcatgatcacatggagcagttgaaggaactgaccagcactgtccggaaagaacacatgacgctggaaaaaggtcttcatttagcaaaggaattctcagataaatgcaaagcactgacacagtggatagcagaataccaggaaattctacatgttcctgaagaacccaaaatggaattatatgagaaaaaagctcagttatctaaatacaagtcacttcaacaaacggtgctgtcccatgaaccatcagtaaagtcagtgagagagaagggtgaagctcttttggaactggtgcaggacgtcactttaaaggacaaaatagatcaacttcaaagtgattaccaggacctgtgcagcataggaaaggagcatgtcttcagtctggaggcgaaagtcaaagaccatgaagactacaacagtgagctccaagaggtcgaaaagtggctgctgcagatgtctggcagactggtggcacctgacctcctggagacaagcagcctggagacaatcacccagcaattggcccaccacaaggcaatgatggaagaaattgctggttttgaagaccgtttgaacaatcttcaaatgaaaggtgatactttgattggccaatgtgcagaccacctgcaagcgaaacttaaacaaaacgtgcatgctcatctgcagggcacaaaggacagctactcagcgatctgcagcacagctcagaggatgtaccagagtttggaacacgaacttcagaagcacgtcagccgacaagacaccctgcagcagtgccaggcctggctttctgcagtccagccggatttagagccaagtcctcaaccacctcttagtagggcagaagccattaagcaggtcaaacacttcagagctttgcaagagcaggcaaggacctacctagatctcctttgctccatgtgtgacctgtcaaatgcttcggtgaaaaccacagcaaaagacattcaacaaacagagcaaacgattgaacaaaagcttgtccaggcccagaacttaactcagggctgggaagagatcaagcacctgaagtctgagctctggatttacctgcaagatgctgatcagcaactgcagaacatgaagaggaggcactctgagctggagctgaacattgcacagaacatggtttcacaagttaaggattttgttaagaaactacagagcaaacaggcatccgtgaacaccataatagaaaaggtgaataagttaacaaagaaggaggaatcgcctgaacacaaggaaataaatcatttaaatgatcagtggctcgatttgtgccgtcagtctaacaacctgtgcttgcaaagggaagaggatcttcagagaacaagagattaccatgactgtatgaatgttgttgaagtgttcctagaaaaatttactacagaatgggataacttggccagatctgatgcagagagtacagctgtccacctggaagctttgaaaaagttagcattggcattgcaggagagaaagtatgctattgaagatctgaaagatcaaaagcagaaaatgatagagcatctgaatttagatgacaaggagttagtcaaagaacagacgagtcatttagagcaacgttggtttcagcttgaggacctcattaaaaggaaaatccaagtgtcagtcaccaacttggaggagttaaatgtggtgcagtccagatttcaggagctaatggagtgggcagaagagcaacaacccaacatcgccgaggcccttaagcagagccctcctccagatatggctcagaaccttctcatggatcacctggccatctgcagtgaactggaggccaagcagatgctcctgaaatcgcttataaaggacgcagacagggtcatggcagatcttggtctcaatgagcgacaggtcatccagaaggctctctctgatgcacaaagccacgtgaattgtctcagtgacttagtgggccagcgaagaaagtacttaaacaaagccttgtccgagaaaacccagtttctcatggcagtgttccaggccaccagccaaattcagcaacatgagcgaaagataatgttccgtgaacacatctgtctgttaccagatgatgtgagcaaacaagtcaaaacatgtaagagtgcacaagccagcctcaagacttaccaaaatgaagtcactggactttgggcccagggtcgcgaactaatgaaggaagtcacagagcaggaaaagagtgaagtgctggggaagcttcaggaattgcagagtgtctatgacagtgttttacaaaagtgcagtcaccggttacaagaactagagaagaatttggtttctaggaagcattttaaggaagattttgataaagcttgccactggctaaaacaagcagatattgttacatttcctgaaatcaacctaatgaatgagagttctgagcttcatacacaactggctaaataccaaaacattcttgaacaatctccagaatatgaaaatcttctacttacgctgcagagaactgggcagaccatattaccatcgctgaatgaagtcgatcattcctacctcagtgaaaagctaaatgctttgcctcgacaatttaatgtaattgttgccttggctaaagacaagttctataaagtccaggaagcaattcttgctcggaaggaatatgcttccttgattgagttgacaacccagtctctgagtgaacttgaagcccaattcttgaggatgagcaaagttcccaccgacctggccgttgaggaggctctttctctgcaagatggttgcagagccattctggacgaggtggcgggccttggggaggcggtggatgaactgaaccagaaaaaagaaggttttcgcagcacaggtcagccttggcagccagacaagatgctgcaccttgtcaccttatatcacaggctgaagcgacaaacagaacagagggttagcttattagaagacaccaccagtgcttaccaagaacacgagaagatgtgccaacagctggagagacaactgaagtctgtaaaagaggagcagtccaaagtgaatgaggaaacgctgcctgcagaggagaagctcaaaatgtatcactccctggcaggaagtctccaggactcagggattgtactgaaacgagtaaccatacatcttgaagatcttgccccacaccttgaccccttggcttatgagaaagccaggcatcagatccagtcctggcaaggggagttaaaactgttgacttctgccattggtgagacggtgacagaatgtgagagccgaatggtgcagagtatagacttccagactgagatgagtcgctccctggactggctgaggagagtgaaggcagagctcagtgggccggtgtacctagacctcaacctgcaggacatccaagaggaaatcagaaaaatccaaattcatcaggaagaggtccagtccagcttgagaatcatgaatgcgctgagtcacaaggaaaaggagaagttcacaaaggccaaggagctgatttctgcggatttagaacacagcctcgctgagctctcagagctggatggagacatccaggaagccttacgcaccagacaggctaccttgactgaaatatatagccagtgtcaaaggtattatcaggtatttcaagcagccaatgactggcttgaggatgcccaagaattgttacagctggcaggcaatggcctagacgtggagagcgcagaggaaaatctcaaaagccacatggaatttttcagtacagaggatcagttccatagtaacctggaggagctccacagcctggtagccaccctggacccactcatcaagccaaccggcaaagaagacctagaacagaaagtggcttctctggaactcaggagccagaggatgagccgggactctggtgcccaagtggatctcttgcagagatgcacagctcaatggcacgattaccagaaagcaagggaagaggttattgaattgatgaatgatacagaaaagaaattgtctgagttttctttgttgaagacttcgtctagtcatgaagcggaagaaaaattgtcagaacacaaggctttagtgtcagtggttaactctttccatgagaaaattgtggcccttgaggaaaaagcttcacaactggagaaaaccggaaatgatgccagcaaagccaccctgagcaggtcaatgaccaccgtctggcagcgctggacacgccttcgagctgtggcccaggaccaggagaagatcctggaagatgcagtggatgagtggacgggctttaacaacaaggttaaaaaggccactgaaatgattgatcagctgcaagataagttacctggaagttcagcagagaaagcatcgaaagcagagctcttaactcttcttgaataccacgacacgttcgttctggagctggagcagcagcagtcggccttgggcatgctgcggcagcaaaccctgagcatgctccaggatggagccgccccaacccctggggaagagcctccgctcatgcaggaaatcaccgccatgcaagatcggtgcctgaacatgcaggagaaagtgaagactaatggaaagttggtgaagcaagagctgaaggaccgagaaatggtggagactcagatcaattctgtgaaatgttgggttcaggaaacgaaagaatatttagggaatccaacaatagaaatagatgctcaacttgaagaacttcagattctcctaacagaagccacaaatcaccgacagaacattgaaaaaatggcagaagaacagaaggagaagtacttaggtctttataccatattaccttctgaactctcccttcagttggctgaagtggcgttagatctaaagatccgagatcagatccaagacaaaataaaagaagttgagcagagcaaggccacgagccaggaactcagccggcaaattcagaagttagctaaagacctcacaactattctaactaagctgaaagcgaagacagataatgtagttcaagctaaaactgaccaaaaggtgctgggagaggaattagatggctgtaattcaaagttaatggaattagatgcagcagtacagaaattcttggaacagaatggccaactgggtaagccactggccaagaagataggaaaactgactgaacttcaccagcagaccattagacaagctgagaatcggctctccaagctcaatcaggcagcatcacatttagaagaatacaatgaaatgcttgaattaattttgaagtggattgaaaaagctaaagtcttggctcatggaactattgcatggaattctgcaagccagcttcgggaacaatatattttgcatcagaccctgctagaagaatccaaagaaattgacagtgagctggaagcaatgactgagaaattacagtacctcactagcgtgtactgtacagaaaaaatgtctcagcaagtggcagaactgggacgggagactgaggagttgcgacagatgatcaaaattcgtttgcagaacctccaagatgcagctaaggatatgaaaaaatttgaagcagagttgaaaaagttacaagctgccttggagcaagcccaggcaacactgacttctccagaagttggacgtctcagtctcaaggagcagctctctcatcggcagcatttgttgtctgagatggagtcactgaagccgaaggtgcaagcagtgcagctctgccagagtgccctccggatccccgaggatgtggttgccagcttacctctctgtcatgctgctctgcggctgcaggaagaggccagccggctgcagcacaccgccatccagcagtgtaacatcatgcaggcagctgtggtacaatatgaacaatatgagcaagaaatgaaacatctccagcaactgatagaaggagctcacagagagattgaggataaacctgttgccaccagtaacatacaggagctgcaggctcagatttctcggcatgaggagctggcgcagaaaattaagggctaccaggagcagatcgcttctttgaattccaagtgcaagatgctgacgatgaaagccaagcacgccaccatgctgctgacggtgaccgaggtcgaggggctggcggaagggacagaggacctggatggggagctcctccccacgccttcggcccacccctctgtggtcatgatgactgcaggtcgctgtcacactttgctgtcaccggtcactgaggagtctggggaggagggaaccaacagtgagatttcctctccacctgcctgtcgctccccttcacctgtggctaatacagatgcttctgttaaccaggacattgcatattaccaagccttgtctgctgagaggttgcagacagatgctgcaaaaattcaccccagcacatccgcatcccaggagttctatgaaccgggattggagccatccgctactgccaaactgggtgatttgcagcgttcttgggaaaccttaaagaatgtgatcagtgagaagcagcgcacactctatgaagctttggaacgccagcagaagtaccaggactccctccagtccatctctacgaagatggaggccattgagctgaaactcagtgagagcccagagcctggcaggagtccagaaagccagatggctgaacatcaggcattgatggatgagattctcatgctccaggatgaaatcaatgagctccagtcctctctcgcagaggagctggtatccgagtcttgtgaggccgaccctgcggagcagctggccttgcagtccacgctcactgtcttagccgagcgaatgtccaccatcaggatgaaagcctcggggaaacggcagcttttggaggagaagttgaatgatcagctggaggaacaaaggcaggaacaggccctgcagaggtatcgctgtgaagccgatgagctggacagctggctcttgagtaccaaggccactctggacactgcgctgagtccacccaaggagcccatggacatggaggcccagcttatggactgccagaatatgctggtggaaatagagcagaaggtggtggctttatcagaactgtcagtccacaatgagaacctgctgctggagggcaaagctcacaccaaggacgaggccgagcagctggctggaaagctgagaaggctcaaggggagcctgctggagctgcagagagccctgcatgataagcagctcaacatgcagggaacagcacaggagaaggaggagagcgatgttgacctaacagccacgcagagccccggcgtccaggaatggctggcccaagctcgcaccacatggacccagcagcggcagagcagtctccagcaacaaaaagagttagaacaggaattagccgagcagaagagtctccttcgctcagtagccagtcgtggagaggagattctaattcaacattcggcggcagagacctctggtgatgctggcgaaaaacctgatgtgttatcccaggagttggggatggaaggggagaaatcatccgctgaagaccagatgagaatgaaatgggaaagcctacatcaagaatttagtaccaagcagaaactactacagaatgttctggaacaggaacaagagcaagtgctttatagcaggccaaatcgactcttgtctggtgtgccactgtacaaaggggacgtgccaacccaagataaatctgcagttacatctttgctggatggactgaaccaagccttcgaggaggtttcatcccagagtggaggggcaaagaggcagagtatacacttggagcagaagttgtatgatggagtctcagccacctctacttggttggatgacgttgaagaacgtttatttgttgccacagcacttttaccagaagaaacagagacttgtctcttcaaccaagagattcttgccaaagacattaaggaaatgtctgaagaaatggataagaacaaaaacttgttttcccaagcttttccagagaatggtgataatcgagatgttattgaagatactttgggttgtcttttgggcaggttatccttgctagactcagtagtgaatcaacgatgtcatcagatgaaagaaagacttcagcaaatactaaatttccagaatgatctgaaagtgctgtttacatcactggctgacaacaaatacatcattctgcaaaaactggcaaatgtgtttgaacagcccgtagcagaacaaatagaggcaatacaacaggctgaagatggactcaaagaatttgatgcaggaatcattgaattaaagaggcgtggtgacaagctacaggtcgagcagccgtccatgcaagaactctccaagctccaggacatgtatgatgagctgatgatgatcattggctcccggaggagtggtctgaatcagaaccttacactcaagagtcagtatgagagggccctacaagatctggctgacctgctagaaactggtcaggagaagatggcaggagaccagaaaatcatcgtgtcttccaaagaggaaatccagcaactacttgacaaacataaggaatactttcagggcctggaatctcatatgatcttgactgaaacactcttcagaaagataatcagctttgcagtccaaaaggaaacccagttccatacagagctgatggctcaggcttctgctgtactgaaacgggctcacaagaggggtgtggagctggagtacattctagagacgtggtcccatctggatgaggaccagcaggagctcagcagacagctggaggtggtggaaagcagcatcccaagcgtgggtctggtggaggagaacgaggacaggcttattgaccgcataacactctaccagcatttaaaatctagccttaatgaataccagcccaaattatatcaagtattagatgatgggaaacgacttctgatatccatcagctgctcagatctagaaagccaactaaatcaacttggagagtgctggctaagtaacaccaataaaatgtctaaggaacttcacagactggaaacaatattgaaacactggaccagatatcaaagtgaatctgcagatctaattcactggttacaatctgcaaaagaccggctagaattttggactcagcaatctgtgacagtcccacaagagctggaaatggtccgtgatcatctaaatgctttcctggagttttctaaagaagtggatgcccaatcttccctgaaatcatctgttctgagtactggaaatcagctccttcgactaaaaaaggtggacacagccacgctgcgctctgagctgtcgcgcattgatagccagtggactgacctgctaaccaatatcccagccgtccaggagaagctccaccagctccagatggataaactgccttcccgccatgccatttctgaagtcatgagttggatttctctaatggaaaatgttattcagaaggatgaagataatattaaaaattccataggttacaaggcaattcatgaataccttcagaaatataagggttttaagatagacattaactgtaaacagctgacagtggattttgtgaaccagtccgtgctacaaatcagcagtcaggatgtggaaagtaagcgtagtgataagactgattttgctgagcaacttggagcaatgaataaaagttggcaaattctgcaaggtctagtaactgagaagatccagctgttggaaggcttattggaatcttggtcagaatatgaaaataatgtacaatgtctgaaaacatggtttgaaacccaggaaaagagactaaaacaacagcatcgaattggagatcaggcttctgttcaaaatgcactgaaagactgtcaggatctggaagatttgattaaagcaaaagaaaaagaagtagagaaaattgagcagaatggacttgctttgattcagaacaagaaagaagacgtctctagcattgtcatgagcacactgcgagagctcggccaaacctgggcaaatttagatcacatggttggacaattaaagatactgctgaaatcagtgcttgaccaatggagtagtcacaaagtggcctttgacaagataaacagttacctcatggaggccagatactctctttcccgattccgtctgctgactggctccttagaagctgtgcaagttcaggtggacaatcttcagaatctccaagatgatctggaaaaacaggaaaggagcttacagaaatttggctctatcaccaaccaattattaaaagagtgtcacccacccgtgacagaaactcttaccaatacactgaaagaagtcaacatgagatggaataacttgctggaagagattgctgagcagctacagtccagcaaggccctacttcagctttggcaaagatacaaggactactccaaacagtgtgcttcgacagttcagcagcaggaggatcgaaccaatgagctgttgaaggcagccacaaacaaggacattgccgatgatgaggttgccacatggattcaagattgcaacgacctcctcaaaggactgggcacagttaaagattccctcttttttctccatgagctgggagagcaactgaagcaacaagtggatgcttccgcagcatcagctattcaatcggatcaactctctttgagtcaacacttgtgtgccctggagcaagctctctgcaaacagcagacttcattacaggctggagttcttgattatgaaacctttgccaagagtttagaagctttggaggcctggatagtggaagctgaagaaatactacaagggcaggaccctagccactcatctgacctctccacaatccaggaaaggatggaagaacttaagggacagatgttaaaattcagcagcatggctccagatttagaccgtctaaatgagcttggatataggttacccttgaatgataaggaaatcaaaagaatgcagaatctgaaccgccattggtctctgatctcctctcagactacagaaagattcagcaagttgcagtcatttttgctacaacatcagactttcttggaaaaatgtgaaacatggatggaattcctagttcagacagaacaaaagttagcagtagagatttcaggaaattatcagcaccttttggaacagcagagagcacacgagttgtttcaagccgagatgttcagtcgtcagcagattttgcactcaatcattattgatgggcaacgtcttctagaacaaggtcaagttgatgacagggatgaattcaacctgaaattgacactcctcagtaatcaatggcagggagtgattcgcagggcccagcagaggcgggggatcattgacagccagattcgccagtggcagcgctatagggagatggcagaaaagcttcgtaaatggttggttgaagtgtcctacctccccatgagtggtctcggaagtgttcctataccactgcaacaagcaaggaccctctttgatgaagtgcagttcaaagaaaaagtgtttctgcggcaacaaggcagctacatcctgactgtggaggctggcaagcaactccttctctcggcggacagtggcgctgaggccgccttgcaggccgaactcgctgaaatccaagagaaatggaaatcagccagcatgcggctggaagaacagaagaaaaaactagccttcttgttgaaagactgggaaaaatgtgagaaaggaatagcagattccctggagaaactacgaactttcaaaaagaagctttcgcagtctctcccggatcaccatgaagagctccatgcagaacaaatgcgttgcaaggaattagaaaatgcagttgggagctggacagatgacttgacccagttgagcctgctgaaggacaccctctctgcctatatcagtgctgatgatatctccattcttaatgaacgcgtagagcttctgcaaaggcagtgggaagaactatgccaccagctctccttaaggcggcagcaaataggtgaaagattgaatgaatgggcagtcttcagtgaaaagaacaaggaactctgtgagtggttgactcaaatggaaagcaaagtttctcagaatggagacattctcattgaagaaatgatagagaagctcaagaaggattatcaagaggaaattgctattgctcaagagaacaaaatacagctccaacaaatgggagaacgacttgctaaagccagccatgaaagcaaagcatctgagattgaatacaagctgggaaaggtcaacgaccggtggcagcatctcctggacctcattgcagccagggtgaagaagctgaaggagaccctggtagccgtgcagcagcttgataagaacatgagcagcctgaggacctggctcgctcacatcgagtcagagctggccaagccaatagtctacgattcctgtaactcggaagaaatacagagaaagcttaatgagcagcaggagcttcagagagacatagagaagcacagtacaggtgttgcatctgtcctcaacctgtgtgaagtcctgctgcacgactgtgacgcctgtgccactgatgccgagtgtgactctatacagcaggctacgagaaacctggaccggcggtggagaaacatttgtgctatgtccatggaaaggaggctgaaaatcgaagagacgtggcgattgtggcagaaatttctggatgactattcacgttttgaagattggctgaagtcttcagaaaggacagctgcttttcccagctcttctggggtgatctatacagttgccaaggaagaactaaagaaatttgaggctttccagcgacaggtccacgagtgcctgacgcagctggaactgatcaacaagcagtaccgccgcctggccagggagaaccgcactgattcagcatgtagcctcaaacagatggttcacgaaggcaaccagagatgggacaacctgcaaaagcgtgtcacctccatcttgcgcagactcaagcattttattggccagcgtgaggagtttgagactgcgcgggacagcattctggtctggctcacagagatggatctgcagctcactaatattgaacatttttctgagtgtgatgttcaagctaaaataaagcaactcaaggccttccagcaggaaatttcactgaaccacaataagattgagcagataattgcccaaggagaacagctgatagaaaagagtgagcccttggatgcagcgatcatcgaggaggaactagatgagctccgacggtactgccaggaggtcttcgggcgtgtggaaagataccataagaaactgatccgcctgcctctcccagacgatgagcacgacctctcagacagggagctggagctggaagactctgcagctctgtcggacctgcactggcacgaccgctctgcagacagcctgctttctccacagccttcctccaatctctccctctcgctcgctcagcccctccggagcgagcggtcaggacgagacaccccggctagtgtggactccatccccctggagtgggatcacgactatgacctcagtcgggacctggagtctgcaatgtccagagctctgccctctgaggatgaagaaggtcaggatgacaaagatttctacctccggggagctgttggcttatcaggggaccacagtgccctagagtcacagatccgacaactgggcaaagccctggatgatagccgttttcagatacagcaaaccgaaaatatcattcgcagcaaaactcccacggggccggagctagacaccagctacaaaggctacatgaaactgctgggcgaatgcagtagcagtatagactccgtgaagagactggagcacaaactgaaggaggaagaggagagccttcctggctttgttaacctgcatagtaccgaaacccaaacggctggtgtgattgaccgatgggagcttctccaggcccaggcattgagcaaggagttgaggatgaagcagaacctccagaagtggcagcagtttaactcagacttgaacagcatctgggcctggctgggggacacggaggaggagttggaacagctccagcgtctggaactcagcactgacatccagaccatcgagctccagatcaaaaagctcaaggagctccagaaagctgtggaccaccgcaaagccatcatcctctccatcaatctctgcagccctgagttcacccaggctgacagcaaggagagccgggacctgcaggatcgcttgtcgcagatgaatgggcgctgggaccgagtgtgctctctgctggaggagtggcggggcctgctgcaggatgccctgatgcagtgccagggtttccatgaaatgagccatggtttgcttcttatgctggagaacattgacagaaggaaaaatgaaattgtccctattgattctaaccttgatgcagagatacttcaggaccatcacaaacagcttatgcaaataaagcatgagctgttggaatcccaactcagagtagcctctttgcaagacatgtcttgccaactactggtgaatgctgaaggaacagactgtttagaagccaaagaaaaagtccatgttattggaaatcggctcaaacttctcttgaaggaggtcagtcgtcatatcaaggaactggagaagttattagacgtgtcaagtagtcagcaggatttgtcttcctggtcttctgctgatgaactggacacctcagggtctgtgagtcccacatcaggaaggagcaccccaaacagacagaaaacgccacgaggcaagtgtagtctctcacagcctggaccctctgtcagcagtccacatagcaggtccacaaaaggtggctccgattcctccctttctgagccagggccaggtcggtccggccgcggcttcctgttcagagtcctccgagcagctcttccccttcagcttctcctgctcctcctcatcgggcttgcctgccttgtaccaatgtcagaggaagactacagctgtgccctctccaacaactttgcccggtcattccaccccatgctcagatacacgaatggccctcctccactctgaactaagcagatgccatctgcagaagtgctggtagcataaggaggatcgggtcataagcaatcccaaactaccaacaagaggaccttgatcttggcgaaagccctcggtgtggcagctttagccctcctccagatcacatgtgtgcaaattatggcttcagaggtggaagataaacagtgacgggggaacaaacagacaacaagaaggtttggaagaaatctggtttgagactctgaaccttagcactaaggagattgagtaaggacctccaaagttccccggactcatgaattctgggcccttggcccattctgtgcacagccaaggacttcagtagaccatctgggcagctttcccatggtgctgctccaaccatcagataaatgaccctcccaagcaccatgtcagtgtcgtacaatctaccaaccaaccagtgctgaagagattttagaaccttgtaacatacaatttttaagagcttatatggcagcttcctttttaccttgttttcctttggggcatgatgttttaacctttgctttagaagcacaagctgtaaatctaaaaggcacttttttttagaggtataaagaaaaactagatgtaataaataagatcatggaaggctttatgtgaaaaaagttgaatgttatagtaaaaaaaaaaagatatttatgt

SEQ ID NO: 5966 - protein, 8797 aa, Homo sapiens; identical to SEQ ID NO: 787

SEQ ID NO: 5967 - DNA, 442 bp, Homo sapiens
tgtcatataagcaaattatgtggcacagaagtttggtgtatggattatttcatcacccagaaacacataaaacagtggtcttctcctctgatgtgattttactaagtattccttcactcttcagtttagaaagagctgaattactcaaagaaataaacaacaaaacattctgtacttcatcaggtcagaaaagctgacttttgagaagataaaatttgaagtaagaagatatggaataatttttcattattcatttcaaactttcaaatgtaattgtctttcaagtttcttacacttaacctgaggcactttttctgcatttttgtaattgattatgagactcgctacttgtatcttcctttctgatttgtttattctaggatacttttacaagaaaaattaatcttcagtgtttaaaaataaaatatctcaacatttgcaa

SEQ ID NO: 5968 - protein, 59 aa, Homo sapiens
MWHRSLVYGLFHHPETHKTVVFSSDVILLSIPSLFSLERAELLKEINNKTFCTSSGQKS

SEQ ID NO: 5969 - DNA, 1638 bp, Homo sapiens
cccttccagcctccgaatcccgcatggcccacgctcccctcctgcagcggtgcggggcaggtgatgagcctctgtgaactactaaggtgggagggggctatacgcagaggagaatgtcagatgctcagctcggtcccctccgcctgacgctcctctctgtctcagccaggactggtttctgtaagaaacagcaggagctgtggcagcggcgaaaggaagcggctgaggcgcttggaacccgaaaagtctcggtgctcctggctacctcgcacagcggtgcccgcccggccgtcagtaccatggacagcagcgctgcccccacgaacgccagcaattgcactgatgccttggcgtactcaagttgctccccagcacccagccccggttcctgggtcaacttgtcccacttagatggcaacctgtccgacccatgcggtccgaaccgcaccgacctgggcgggagagacagcctgtgccctccgaccggcagtccctccatgatcacggccatcacgatcatggccctctactccatcgtgtgcgtggtggggctcttcggaaacttcctggtcatgtatgtgattgtcagatacaccaagatgaagactgccaccaacatctacattttcaaccttgctctggcagatgccttagccaccagtaccctgcccttccagagtgtgaattacctaatgggaacatggccatttggaaccatcctttgcaagatagtgatctccatagattactataacatgttcaccagcatattcaccctctgcaccatgagtgttgatcgatacattgcagtctgccaccctgtcaaggccttagatttccgtactccccgaaatgccaaaattatcaatgtctgcaactggatcctctcttcagccattggtcttcctgtaatgttcatggctacaacaaaatacaggcaaggttccatagattgtacactaacattctctcatccaacctggtactgggaaaacctgctgaagatctgtgttttcatcttcgccttcattatgccagtgctcatcattaccgtgtgctatggactgatgatcttgcgcctcaagagtgtccgcatgctctctggctccaaagaaaaggacaggaatcttcgaaggatcaccaggatggtgctggtggtggtggctgtgttcatcgtctgctggactcccattcacatttacgtcatcattaaagccttggttacaatcccagaaactacgttccagactgtttcttggcacttctgcattgctctaggttacacaaacagctgcctcaacccagtcctttatgcatttctggatgaaaacttcaaacgatgcttcagagagttctgtatcccaacctcttccaacattgagcaacaaaactccactcgaattcgtcagaacactagagaccacccctccacggccaatacagtggatagaactaatcatcagccacccttggcagtcagcatggcccagatctttacacgatatcctcctccgactcatcgtgagaaaacctgcaatgattacatgaagaggtagataatgtattaccctgatttggtaggtaaagtattatcctgatttatgtgacagagtgaaaggcaacttttaattgttaacc

SEQ ID NO: 5970 - protein, 480 aa, Homo sapiens
MSDAQLGPLRLTLLSVSARTGFCKKQQELWQRRKEAAEALGTRKVSVLLATSHSGARPAVSTMDSSAAPTNASNCTDALAYSSCSPAPSPGSWVNLSHLDGNLSDPCGPNRTDLGGRDSLCPPTGSPSMITAITIMALYSIVCVVGLFGNFLVMYVIVRYTKMKTATNIYIFNLALADALATSTLPFQSVNYLMGTWPFGTILCKIVISIDYYNMFTSIFTLCTMSVDRYIAVCHPVKALDFRTPRNAKIINVCNWILSSAIGLPVMFMATTKYRQGSIDCTLTFSHPTWYWENLLKICVFIFAFIMPVLIITVCYGLMILRLKSVRMLSGSKEKDRNLRRITRMVLVVVAVFIVCWTPIHIYVIIKALVTIPETTFQTVSWHFCIALGYTNSCLNPVLYAFLDENFKRCFREFCIPTSSNIEQQNSTRIRQNTRDHPSTANTVDRTNHQPPLAVSMAQIFTRYPPPTHREKTCNDYMKR

SEQ ID NO: 5971 - DNA, 6686 bp, Homo sapiens
ccttctagcttcgttttctgccatatcttgtaggggtctccacatacttggcccagcctgctccctcagccagagactccccttcacaagttgtgcaccactgatagtttagtgatcctgccagtttcaattcattaggattcctacaatcaaaattaatcaccactgattttgtgttctcttggtattatgactcacacctcttttgaggaattattttattttccccaagctacgatttgtcttcttcctgcatattggatgctctttgaggtcaggagccccgaattggccatttgtttctgcctcttatgtaattcctttgcaccaggtagttaccaggtagttcattagatatgaactttctgaattggattgaaattgcaatagccagatggagataaacctctgctcatgcattatggaataagcgatgacagcgttaaaacattaagcattttcatttttgttatagaatgttacagtgaaagtgaacaggaagatccagaaatagctgcggagacaccaccccctcctcacgcttcccagactcagtctttgactgcacagcaggcatcttcatcctcacccagcctgagtggaacgtcgtattctttctcttccctggaaaatacagtgaagacacccagcagttttccttcctccttatctaaagagagacaatccttgcctgacacagttaacagtttgtctgctgctgaagatgagggacaaccaataacgtttgctgtgcaagttcattcacctgtaccctcagaggcaggcatccacaaggccctggaaaacagttttgtcacatcagaaagtggatttttgaactctttatctagtgatgatacttcttcattgagtagcaatcatgaccatcttactgtcccagataagcctgctggatcaaagatcatggacaaagaagagacaaaagtgtctgaagatgatgaaatggagaagctgtacaaatcattagagcaagctagtctatctcctcttggggaccgacgaccttcgactaaaaaggagttgagaaaatcctttgttaagcggtgtaaaaatccatctataaacgagaaactccacaaaatccgaacattgaatagcacattaaagtgtaaagaacatgatctggccatgattaaccagttgctggatgacccgaagctgacagccaggaaatacagagagtggaaagtcatgaacaccctgctgatccaggacatctatcagcagcagcgggcttcgcctgcccctgatgacactgatgacaccccccaggaactcaagaaatcaccttcttctccctctgttgaaaattccatttgagacaaagtcagggttttctcctcttatattttatcacaagcaactcttcaagatgttgcaaaagcttacatttttccttaaaaggaaaactgaaacccagtccttcaagcatcagcttcccatctaaagatgcacgttagatgaagataatcaccgaatacaccagggctcctcatttcagtcgtaacgcatccattgagattggaatgattgagttcagttgaaaggcgttttttgtgttcctactgggagctcacggtgatgtggggctctaggggggatgtgagaaatgtctcttctgttcattgctctccagagaatgctatggacaagaatcaaattttaccaggagtaattgcccatggaaacattctgtttttcaaaagaagaatgtacatattccacttgactgggaagctgtgtggcccaaatcactgtttgagtggaggaatgttttctagagcagtgactggaaggacaaacgtggtgttgcagaacaaaaattccttgcctttggtatggaatggtggtgccttttccatgtgatgagaaatgcttcatagacagtggcatgtgggagagctgaaggaggaggcgtgttccatattccactcattcaaaggacagcttggtgttttcacactttatgcaggttaggggatctgattaatgtttcctttccttacaacagctagagaaaacatctcatcacaattggagacctctacttcctttgagctttcctactcaatggtaggagataggaatatgttccgcaaagaatgtctactgctcttgtccttggctgtgatccctatacatagtgtgaatttatatccaggtttcccaggatcaatattgacaagacgactttggcatctgaattgttttaatatctttactcaaaaaaacaaaaaaacaaaaacccatggaagcaacaaaagagttaaacatgagggatttatttttgtatgtttatatgtcacttgtgtgctatgtgaatagctatgtttgttatttaaatatatttatagaagttcaaattactagtgtttaaaagatgatatactattatatattgtgcttagtatatatttgatgagtctatactttttgcttgagaaaaatagaaatactattgattcactggtgttatgatgttgcactgtgtctgaggaatgctcaggaaatcttgtgggaaaaaaatggggcatgcattcataatttttcattttcttccccaccccaacccccatgagctcttaaatttagatttctatctcttgtaagtcactcttttaaccagcaaaggactttcatcttagattatcctttctattaaataaactttaagctttgtgccatttatgcctgcaaaccttagaccaaaggcaacacaactaatgtcatcttttcattaaagactaatagaaatttagaaatcattgtgttaaagagagctatagagaaacaatatgaaagtcttcccttactaatcaccatgaatatttctcaccataggaataaccacaacccaccaagtacccatgttggccctgcctacccgtaacaaattgttcacacaacctattttgttttatagcttcaaagtgtggcttgacattcaaatggaaggaaccacctgaattatatctgcaaacaaaatggaaatagttgttgaatagttccccaagctttactaagaagccttaatactctgtaaacaaacaaacaaacaaaaaacaaccttagcattaagaaataaaaacaaaaaacaagaagcaagttgtactgctagaaacttctctaagataagaggccaggccagtcagtttggcccagcaaacatgtgggtacttctccacctagggaagccactgaagatgagtttgacctgtggtgacctgacagagagaacattcagatcctcagattgcaccctgatgccctggtttaggaaagcagtgctttaaccttttgcccctggaaattactgattctttctgtgattagcagataccagaagggaaattatttaggattggcaatgtaaagagtattgaaggaacaacaaataacaatagcagaaataacagtgtgacataaagtgcccttccacctatttttctttggtttgcaacaccagcctgtagacttccagtttttcttaaattgaagagctccagacacttttgagcagggtttgtgaatagctttgaatgctttcctttggcttttcgtgaagacatatttccccagcctttcaactgtaaactcctttagtaccattgaaacttaaggcaaaaaagatccctgggattacttagccaaggcttaaatttatttttcaaagtcaagaacattagcctagaagtttttgctttgctagttaaagcttactttgcagagcttcccaaagtgaaagggaaactgaacttcacaattttgcacctggctttctggagccccattgcctgctcattcgtgtttttccccctgtaaattattttgcttttgaccaggttgtgctagaaagtagggctgcttctgtgagttctcagcctaggctgtggccactaagacgtgggtggggggatagacaggagtgagagggagagtgggtgacactttccgtgacacttaatgtaggaagacatgggcttctctctcttggcctcaagccacttttctggtccaaagaatattgggaaaactggattactttcagtatatttcttgagaccgggtcatctctgaaatgcatttggggtagtttcctggggtccaagggccaattcctatacccagtcctgcagtgtctgtgagctgtggaatgagagagaaaaccatggctgctcaggaaggaagtggagaatctctcagcacacgtagatccaaatctgtggcacctgctaaagattaggatttggagaggactcctctttggggttgtgaagaggaccttttccctctgttgttagcctgtagatccagaacggagcctgatgtgatgccttcactggttgatatattgcaaatagacactctgagccctgcattgcaagggcgtcttttgctttaaagaattcttagttttgccacaacagctcaaatctcagaataggatcaaaggcctagaaagactcctaaagtataggattacaaagactccaggaagcgtaagaaagagattgtgtttggagtcagatttcaatgtgaaacccatgccttacatttacacagcactttgtagtttgcaaattggtgtgttttcagccccctcccgctgccccatgctctgagatgattgtggattattacagtgaagtgcctggcccggagcccccagtgatgaagcaggaacttgagtctcaggactcccagcggctctctgcccatttcctcctctccgccccccacctcgcttcacctgttaccttgtgaagttgctgttggcacatagcccactaggaaaccaagaagtttgactgggagcgtgtgtttcattgcactgggcttagcatacggctggccctggtggctgtttggctaaattctccatttgaaacctaaagggccctctctgtgcttgagcacagtctcctcctagtggtcctgcctcaacctgctggcgggctgtctatggattggggtttcacctaatcatgctgtgtttcctttcttttctttctgtacattagactacttgggaggtgctgtgtgatccttggatgaaaaacatatatttaaagaaatggagagtgtttattttgtttgctttttgaggcatgtgctgtcaaatgttagagaccaaacttagtgattagaggttggtcctttgaccttcttctcttaattgcttttcatgtaatcatgataatttactcaggtagcactccagtcacaaacaatgtcacagagatgaaacagattcaaagaaaaaatatttttaagtcttttgaaaagaagtgctattcaaatttaagacatgtttaaattcataggtacattatctcttagtaagaaatacttttttttttctttttttagacagagtcttgctctgttgcccaggctggagtgcagtggcacgattttagctcactgcaacctctgcctccctggttgaagtgattctcctgcctcagcctcccgagtagctgggactacgcccggctaatttttatatttttagtagagaccggggtttaccatgttgcccaggctggtttcaaactcctgacctcaggtgatctgcctgcctctgcctcccagagtgctgggattacaggtgtgagccaccacacctggccgaaagacagtattttgatatagccacatacatgatttaatgagtaatgttaagtacagaaaagctgccatatccacatagttttagggggcatttcttcttcagtctaacaagaatatgatatccaattgtggttttccaatttatttctcttccaatttcttttgtatacctcacaggagaaattgaatcctagaactgggagatgactgccctgcccagggttttgtaatacataattgaaaataaaagtccctgaaactaaatgtttgcagcctgtatgaaatggactgtggaagggggataatttctctcctcacagaaagccactcgtctccttgaatgaggcattgagcagacacacgtttctctgtgtcgtggggcaggaagcaattcccttgcctcttcagcacatctcagttctttcccacatgaccccagaaccacatagaaaacattgaaaataatggattcttcattgtatttgaattttttttttttaacctttagcccaaaagggaagtgtgcctcgtggaaagagcaaatgccgtaaaatagaaaccaggagttttaatcgccatatattttaatgtgcttgcatgatgggaatgtgacttttagcactgcatggtgtttgggggcaagatattaatgtggaaatcttagcttaagttttactgtgctctcatcctgtgtcagctacccctctaaactgaaaaagaggcatggctcatttctctcctgctttatgtttttgaggttgacttgtaagataaaaataaaaataagaaaaaaatatatctaggcaaatgacatgaaaaaaaagttgaaatatactactggtgttcatttttgtcctgcagtgttgctttctcaaagaaataaacatgtggctggaagtgtttaatggctgcgttttgatcgtctacaacaaggttacagtgccctctggtggcagtcatcaaaatcgcttctagacttgtttttatttttaaataaaagatctaattatattggaaatctgtttcaacaa

SEQ ID NO: 5972 - protein, 308 aa, Homo sapiens
MHYGISDDSVKTLSIFIFVIECYSESEQEDPEIAAETPPPPHASQTQSLTAQQASSSSPSLSGTSYSFSSLENTVKTPSSFPSSLSKERQSLPDTVNSLSAAEDEGQPITFAVQVHSPVPSEAGIHKALENSFVTSESGFLNSLSSDDTSSLSSNHDHLTVPDKPAGSKIMDKEETKVSEDDEMEKLYKSLEQASLSPLGDRRPSTKKELRKSFVKRCKNPSINEKLHKIRTLNSTLKCKEHDLAMINQLLDDPKLTARKYREWKVMNTLLIQDIYQQQRASPAPDDTDDTPQELKKSPSSPSVENSI

SEQ ID NO: 5973 - DNA, 6855 bp, Homo sapiens
acatgtagtcttctcactttcttcttgccatgagactgagagagtgctccttgggacggagtttcagagtcatcaactgggctcatgagaaccacaagaaacctacgaaggcactgggacagagcctggctgctggtcaaaggcaacagaactggaccaagaaaattcataactttttgcttttgtttctactaagatgacatcatacatggctattgatggcagtgctcttgttcccttgcgtcagaagcccaggaggaaaactcaaggttttctcacgatgagtcggaggaggatatcgtgtaaagatctgggccatgctgactgccaagggtggctgtataagaaaaaggaaaagggaagtttcctaagcaacaaatggaaaaagttctgggtgatactgaaggggtcgtcactgtactggtatagcaatcaaatggcagagaaagctgatggatttgtcaacctgcctgatttcactgtggaaagagcatctgaatgcaagaaaaagcatgcttttaagatcagccatccacagatcaagaccttttattttgcagctgagaatgtgcaggaaatgaacgtgtggttaaataaacttggatcggctgtaatccatcaggaatccactacaaaggatgaagaatgttacagtgaaagtgaacaggaagatccagaaatagctgcggagacaccaccccctcctcacgcttcccagactcagtctttgactgcacagcaggcatcttcatcctcacccagcctgagtggaacgtcgtattctttctcttccctggaaaatacagtgaagacacccagcagttttccttcctccttatctaaagagagacaatccttgcctgacacagttaacagtttgtctgctgctgaagatgagggacaaccaataacgtttgctgtgcaagttcattcacctgtaccctcagaggcaggcatccacaaggccctggaaaacagttttgtcacatcagaaagtggatttttgaactctttatctagtgatgatacttcttcattgagtagcaatcatgaccatcttactgtcccagataagcctgctggatcaaagatcatggacaaagaagagacaaaagtgtctgaagatgatgaaatggagaagctgtacaaatcattagagcaagctagtctatctcctcttggggaccgacgaccttcgactaaaaaggagttgagaaaatcctttgttaagcggtgtaaaaatccatctataaacgagaaactccacaaaatccgaacattgaatagcacattaaagtgtaaagaacatgatctggccatgattaaccagttgctggatgacccgaagctgacagccaggaaatacagagagtggaaagtcatgaacaccctgctgatccaggacatctatcagcagcagcgggcttcgcctgcccctgatgacactgatgacaccccccaggaactcaagaaatcaccttcttctccctctgttgaaaattccatttgagacaaagtcagggttttctcctcttatattttatcacaagcaactcttcaagatgttgcaaaagcttacatttttccttaaaaggaaaactgaaacccagtccttcaagcatcagcttcccatctaaagatgcacgttagatgaagataatcaccgaatacaccagggctcctcatttcagtcgtaacgcatccattgagattggaatgattgagttcagttgaaaggcgttttttgtgttcctactgggagctcacggtgatgtggggctctaggggggatgtgagaaatgtctcttctgttcattgctctccagagaatgctatggacaagaatcaaattttaccaggagtaattgcccatggaaacattctgtttttcaaaagaagaatgtacatattccacttgactgggaagctgtgtggcccaaatcactgtttgagtggaggaatgttttctagagcagtgactggaaggacaaacgtggtgttgcagaacaaaaattccttgcctttggtatggaatggtggtgccttttccatgtgatgagaaatgcttcatagacagtggcatgtgggagagctgaaggaggaggcgtgttccatattccactcattcaaaggacagcttggtgttttcacactttatgcaggttaggggatctgattaatgtttcctttccttacaacagctagagaaaacatctcatcacaattggagacctctacttcctttgagctttcctactcaatggtaggagataggaatatgttccgcaaagaatgtctactgctcttgtccttggctgtgatccctatacatagtgtgaatttatatccaggtttcccaggatcaatattgacaagacgactttggcatctgaattgttttaatatctttactcaaaaaaacaaaaaaacaaaaacccatggaagcaacaaaagagttaaacatgagggatttatttttgtatgtttatatgtcacttgtgtgctatgtgaatagctatgtttgttatttaaatatatttatagaagttcaaattactagtgtttaaaagatgatatactattatatattgtgcttagtatatatttgatgagtctatactttttgcttgagaaaaatagaaatactattgattcactggtgttatgatgttgcactgtgtctgaggaatgctcaggaaatcttgtgggaaaaaaatggggcatgcattcataatttttcattttcttccccaccccaacccccatgagctcttaaatttagatttctatctcttgtaagtcactcttttaaccagcaaaggactttcatcttagattatcctttctattaaataaactttaagctttgtgccatttatgcctgcaaaccttagaccaaaggcaacacaactaatgtcatcttttcattaaagactaatagaaatttagaaatcattgtgttaaagagagctatagagaaacaatatgaaagtcttcccttactaatcaccatgaatatttctcaccataggaataaccacaacccaccaagtacccatgttggccctgcctacccgtaacaaattgttcacacaacctattttgttttatagcttcaaagtgtggcttgacattcaaatggaaggaaccacctgaattatatctgcaaacaaaatggaaatagttgttgaatagttccccaagctttactaagaagccttaatactctgtaaacaaacaaacaaacaaaaaacaaccttagcattaagaaataaaaacaaaaaacaagaagcaagttgtactgctagaaacttctctaagataagaggccaggccagtcagtttggcccagcaaacatgtgggtacttctccacctagggaagccactgaagatgagtttgacctgtggtgacctgacagagagaacattcagatcctcagattgcaccctgatgccctggtttaggaaagcagtgctttaaccttttgcccctggaaattactgattctttctgtgattagcagataccagaagggaaattatttaggattggcaatgtaaagagtattgaaggaacaacaaataacaatagcagaaataacagtgtgacataaagtgcccttccacctatttttctttggtttgcaacaccagcctgtagacttccagtttttcttaaattgaagagctccagacacttttgagcagggtttgtgaatagctttgaatgctttcctttggcttttcgtgaagacatatttccccagcctttcaactgtaaactcctttagtaccattgaaacttaaggcaaaaaagatccctgggattacttagccaaggcttaaatttatttttcaaagtcaagaacattagcctagaagtttttgctttgctagttaaagcttactttgcagagcttcccaaagtgaaagggaaactgaacttcacaattttgcacctggctttctggagccccattgcctgctcattcgtgtttttccccctgtaaattattttgcttttgaccaggttgtgctagaaagtagggctgcttctgtgagttctcagcctaggctgtggccactaagacgtgggtggggggatagacaggagtgagagggagagtgggtgacactttccgtgacacttaatgtaggaagacatgggcttctctctcttggcctcaagccacttttctggtccaaagaatattgggaaaactggattactttcagtatatttcttgagaccgggtcatctctgaaatgcatttggggtagtttcctggggtccaagggccaattcctatacccagtcctgcagtgtctgtgagctgtggaatgagagagaaaaccatggctgctcaggaaggaagtggagaatctctcagcacacgtagatccaaatctgtggcacctgctaaagattaggatttggagaggactcctctttggggttgtgaagaggaccttttccctctgttgttagcctgtagatccagaacggagcctgatgtgatgccttcactggttgatatattgcaaatagacactctgagccctgcattgcaagggcgtcttttgctttaaagaattcttagttttgccacaacagctcaaatctcagaataggatcaaaggcctagaaagactcctaaagtataggattacaaagactccaggaagcgtaagaaagagattgtgtttggagtcagatttcaatgtgaaacccatgccttacatttacacagcactttgtagtttgcaaattggtgtgttttcagccccctcccgctgccccatgctctgagatgattgtggattattacagtgaagtgcctggcccggagcccccagtgatgaagcaggaacttgagtctcaggactcccagcggctctctgcccatttcctcctctccgccccccacctcgcttcacctgttaccttgtgaagttgctgttggcacatagcccactaggaaaccaagaagtttgactgggagcgtgtgtttcattgcactgggcttagcatacggctggccctggtggctgtttggctaaattctccatttgaaacctaaagggccctctctgtgcttgagcacagtctcctcctagtggtcctgcctcaacctgctggcgggctgtctatggattggggtttcacctaatcatgctgtgtttcctttcttttctttctgtacattagactacttgggaggtgctgtgtgatccttggatgaaaaacatatatttaaagaaatggagagtgtttattttgtttgctttttgaggcatgtgctgtcaaatgttagagaccaaacttagtgattagaggttggtcctttgaccttcttctcttaattgcttttcatgtaatcatgataatttactcaggtagcactccagtcacaaacaatgtcacagagatgaaacagattcaaagaaaaaatatttttaagtcttttgaaaagaagtgctattcaaatttaagacatgtttaaattcataggtacattatctcttagtaagaaatacttttttttttctttttttagacagagtcttgctctgttgcccaggctggagtgcagtggcacgattttagctcactgcaacctctgcctccctggttgaagtgattctcctgcctcagcctcccgagtagctgggactacgcccggctaatttttatatttttagtagagaccggggtttaccatgttgcccaggctggtttcaaactcctgacctcaggtgatctgcctgcctctgcctcccagagtgctgggattacaggtgtgagccaccacacctggccgaaagacagtattttgatatagccacatacatgatttaatgagtaatgttaagtacagaaaagctgccatatccacatagttttagggggcatttcttcttcagtctaacaagaatatgatatccaattgtggttttccaatttatttctcttccaatttcttttgtatacctcacaggagaaattgaatcctagaactgggagatgactgccctgcccagggttttgtaatacataattgaaaataaaagtccctgaaactaaatgtttgcagcctgtatgaaatggactgtggaagggggataatttctctcctcacagaaagccactcgtctccttgaatgaggcattgagcagacacacgtttctctgtgtcgtggggcaggaagcaattcccttgcctcttcagcacatctcagttctttcccacatgaccccagaaccacatagaaaacattgaaaataatggattcttcattgtatttgaattttttttttttaacctttagcccaaaagggaagtgtgcctcgtggaaagagcaaatgccgtaaaatagaaaccaggagttttaatcgccatatattttaatgtgcttgcatgatgggaatgtgacttttagcactgcatggtgtttgggggcaagatattaatgtggaaatcttagcttaagttttactgtgctctcatcctgtgtcagctacccctctaaactgaaaaagaggcatggctcatttctctcctgctttatgtttttgaggttgacttgtaagataaaaataaaaataagaaaaaaatatatctaggcaaatgacatgaaaaaaaagttgaaatatactactggtgttcatttttgtcctgcagtgttgctttctcaaagaaataaacatgtggctggaagtgtttaatggctgcgttttgatcgtctacaacaaggttacagtgccctctggtggcagtcatcaaaatcgcttctagacttgtttttatttttaaataaaagatctaattatattggaaatctgtttcaacaa

SEQ ID NO: 5974 - protein, 437 aa, Homo sapiens; identical to SEQ ID NO: 797

SEQ ID NO: 5975 - DNA, 6488 bp, Homo sapiens
tttaagtagaatcctcaagcttggcctcagagtactatgaggcttctgaatccaggaataagactgctcttggatttactctctttgtattgcatgttttgtttctactaagatgacatcatacatggctattgatggcagtgctcttgttcccttgcgtcagaagcccaggaggaaaactcaaggttttctcacgatgagtcggaggaggatatcgtgtaaagatctgggccatgctgactgccaagggtggctgtataagaaaaaggaaaagggaagtttcctaagcaacaaatggaaaaagttctgggtgatactgaaggggtcgtcactgtactggtatagcaatcaaatggcagagaaagctgatggatttgtcaacctgcctgatttcactgtggaaagagcatctgaatgcaagaaaaagcatgcttttaagatcagccatccacagatcaagaccttttattttgcagctgagaatgtgcaggaaatgaacgtgtggttaaataaacttggatcggctgtaatccatcaggaatccactacaaaggatgaagaatgttacagtgaaagtgaacaggaagatccagaaatagctgcggagacaccaccccctcctcacgcttcccagactcagtctttgactgcacagcaggcatcttcatcctcacccagcctgagtggaacgtcgtattctttctcttccctggaaaatacagtgaagacacccagcagttttccttcctccttatctaaagagagacaatccttgcctgacacagttaacagtttgtctgctgctgaagatgagggacaaccaataacgtttgctgtgcaagttcattcacctgtaccctcagaggcaggcatccacaaggccctggaaaacagttttgtcacatcagaaagtggatttttgaactctttatctagtgatgatacttcttcattgagtagcaatcatgaccatcttactgtcccagataagcctgctggatcaaagatcatggacaaagaagagacaaaagtgtctgaagatgatgaaatggagaagctgtacaaatcattagagcaagctagtctatctcctcttggggaccgacgaccttcgactaaaaaggagttgagaaaatcctttgttaagcggtgtaaaaatccatctataaacgagaaactccacaaaatccgaacattgaatagcacattaaagtgtaaagaacatgatctggccatgattaaccagttgctggatgacccgaagctgacagccaggaaatacagagagtggaaagtcatgaacaccctgctgatccaggacatctatcagcagcagcgggcttcgcctgcccctgatgacactgatgacaccccccaggaactcaagaaatcaccttcttctccctctgttgaaaattccatttgagacaaagtcagggttttctcctcttatattttatcacaagcaactcttcaagatgttgcaaaagcttacatttttccttaaaaggaaaactgaaacccagtccttcaagcatcagcttcccatctaaagatgcacgttagatgaagataatcaccgaatacaccagggctcctcatttcagtcgtaacgcatccattgagattggaatgattgagttcagttgaaaggcgttttttgtgttcctactgggagctcacggtgatgtggggctctaggggggatgtgagaaatgtctcttctgttcattgctctccagagaatgctatggacaagaatcaaattttaccaggagtaattgcccatggaaacattctgtttttcaaaagaagaatgtacatattccacttgactgggaagctgtgtggcccaaatcactgtttgagtggaggaatgttttctagagcagtgactggaaggacaaacgtggtgttgcagaacaaaaattccttgcctttggtatggaatggtggtgccttttccatgtgatgagaaatgcttcatagacagtggcatgtgggagagctgaaggaggaggcgtgttccatattccactcattcaaaggacagcttggtgttttcacactttatgcaggttaggggatctgattaatgtttcctttccttacaacagctagagaaaacatctcatcacaattggagacctctacttcctttgagctttcctactcaatggtaggagataggaatatgttccgcaaagaatgtctactgctcttgtccttggctgtgatccctatacatagtgtgaatttatatccaggtttcccaggatcaatattgacaagacgactttggcatctgaattgttttaatatctttactcaaaaaaacaaaaaaacaaaaacccatggaagcaacaaaagagttaaacatgagggatttatttttgtatgtttatatgtcacttgtgtgctatgtgaatagctatgtttgttatttaaatatatttatagaagttcaaattactagtgtttaaaagatgatatactattatatattgtgcttagtatatatttgatgagtctatactttttgcttgagaaaaatagaaatactattgattcactggtgttatgatgttgcactgtgtctgaggaatgctcaggaaatcttgtgggaaaaaaatggggcatgcattcataatttttcattttcttccccaccccaacccccatgagctcttaaatttagatttctatctcttgtaagtcactcttttaaccagcaaaggactttcatcttagattatcctttctattaaataaactttaagctttgtgccatttatgcctgcaaaccttagaccaaaggcaacacaactaatgtcatcttttcattaaagactaatagaaatttagaaatcattgtgttaaagagagctatagagaaacaatatgaaagtcttcccttactaatcaccatgaatatttctcaccataggaataaccacaacccaccaagtacccatgttggccctgcctacccgtaacaaattgttcacacaacctattttgttttatagcttcaaagtgtggcttgacattcaaatggaaggaaccacctgaattatatctgcaaacaaaatggaaatagttgttgaatagttccccaagctttactaagaagccttaatactctgtaaacaaacaaacaaacaaaaaacaaccttagcattaagaaataaaaacaaaaaacaagaagcaagttgtactgctagaaacttctctaagataagaggccaggccagtcagtttggcccagcaaacatgtgggtacttctccacctagggaagccactgaagatgagtttgacctgtggtgacctgacagagagaacattcagatcctcagattgcaccctgatgccctggtttaggaaagcagtgctttaaccttttgcccctggaaattactgattctttctgtgattagcagataccagaagggaaattatttaggattggcaatgtaaagagtattgaaggaacaacaaataacaatagcagaaataacagtgtgacataaagtgcccttccacctatttttctttggtttgcaacaccagcctgtagacttccagtttttcttaaattgaagagctccagacacttttgagcagggtttgtgaatagctttgaatgctttcctttggcttttcgtgaagacatatttccccagcctttcaactgtaaactcctttagtaccattgaaacttaaggcaaaaaagatccctgggattacttagccaaggcttaaatttatttttcaaagtcaagaacattagcctagaagtttttgctttgctagttaaagcttactttgcagagcttcccaaagtgaaagggaaactgaacttcacaattttgcacctggctttctggagccccattgcctgctcattcgtgtttttccccctgtaaattattttgcttttgaccaggttgtgctagaaagtagggctgcttctgtgagttctcagcctaggctgtggccactaagacgtgggtggggggatagacaggagtgagagggagagtgggtgacactttccgtgacacttaatgtaggaagacatgggcttctctctcttggcctcaagccacttttctggtccaaagaatattgggaaaactggattactttcagtatatttcttgagaccgggtcatctctgaaatgcatttggggtagtttcctggggtccaagggccaattcctatacccagtcctgcagtgtctgtgagctgtggaatgagagagaaaaccatggctgctcaggaaggaagtggagaatctctcagcacacgtagatccaaatctgtggcacctgctaaagattaggatttggagaggactcctctttggggttgtgaagaggaccttttccctctgttgttagcctgtagatccagaacggagcctgatgtgatgccttcactggttgatatattgcaaatagacactctgagccctgcattgcaagggcgtcttttgctttaaagaattcttagttttgccacaacagctcaaatctcagaataggatcaaaggcctagaaagactcctaaagtataggattacaaagactccaggaagcgtaagaaagagattgtgtttggagtcagatttcaatgtgaaacccatgccttacatttacacagcactttgtagtttgcaaattggtgtgttttcagccccctcccgctgccccatgctctgagatgattgtggattattacagtgaagtgcctggcccggagcccccagtgatgaagcaggaacttgagtctcaggactcccagcggctctctgcccatttcctcctctccgccccccacctcgcttcacctgttaccttgtgaagttgctgttggcacatagcccactaggaaaccaagaagtttgactgggagcgtgtgtttcattgcactgggcttagcatacggctggccctggtggctgtttggctaaattctccatttgaaacctaaagggccctctctgtgcttgagcacagtctcctcctagtggtcctgcctcaacctgctggcgggctgtctatggattggggtttcacctaatcatgctgtgtttcctttcttttctttctgtacattagactacttgggaggtgctgtgtgatccttggatgaaaaacatatatttaaagaaatggagagtgtttattttgtttgctttttgaggcatgtgctgtcaaatgttagagaccaaacttagtgattagaggttggtcctttgaccttcttctcttaattgcttttcatgtaatcatgataatttactcaggtagcactccagtcacaaacaatgtcacagagatgaaacagattcaaagaaaaaatatttttaagtcttttgaaaagaagtgctattcaaatttaagacatgtttaaattcataggtacattatctcttagtaagaaatacgaaagacagtattttgatatagccacatacatgatttaatgagtaatgttaagtacagaaaagctgccatatccacatagttttagggggcatttcttcttcagtctaacaagaatatgatatccaattgtggttttccaatttatttctcttccaatttcttttgtatacctcacaggagaaattgaatcctagaactgggagatgactgccctgcccagggttttgtaatacataattgaaaataaaagtccctgaaactaaatgtttgcagcctgtatgaaatggactgtggaagggggataatttctctcctcacagaaagccactcgtctccttgaatgaggcattgagcagacacacgtttctctgtgtcgtggggcaggaagcaattcccttgcctcttcagcacatctcagttctttcccacatgaccccagaaccacatagaaaacattgaaaataatggattcttcattgtatttgaattttttttttttaacctttagcccaaaagggaagtgtgcctcgtggaaagagcaaatgccgtaaaatagaaaccaggagttttaatcgccatatattttaatgtgcttgcatgatgggaatgtgacttttagcactgcatggtgtttgggggcaagatattaatgtggaaatcttagcttaagttttactgtgctctcatcctgtgtcagctacccctctaaactgaaaaagaggcatggctcatttctctcctgctttatgtttttgaggttgacttgtaagataaaaataaaaataagaaaaaaatatatctaggcaaatgacatgaaaaaaaagttgaaatatactactggtgttcatttttgtcctgcagtgttgctttctcaaagaaataaacatgtggctggaagtgtttaatggctgcgttttgatcgtctacaacaaggttacagtgccctctggtggcagtcatcaaaatcgcttctagacttgtttttatttttaaataaaagatctaattatattggaaatctgtttcaacaa

SEQ ID NO: 5976 - protein, 437 aa, Homo sapiens; identical to SEQ ID NO: 797

SEQ ID NO: 5977 - DNA, 495 bp, Homo sapiens
tccagagaatgctatggacaagaatcaaattttaccaggagtaattgcccatggaaacattctgtttttcaaaagaagaatgtacatattccacttgactgggaagctgtgtggcccaaatcactgtttgagtggaggaatgttttctagagcagtgactggaaggacaaacgtggtgttgcagaacaaaaattccttgcctttggtatggaatggtggtgccttttccatgtgatgagaaatgcttcatagacagtggcatgtgggagagctgaaggaggaggcgtgttccatattccactcattcaaaggacagcttggtgttttcacactttatgcagtgttgctttctcaaagaaataaacatgtggctggaagtgtttaatggctgcgttttgatcgtctacaacaaggttacagtgccctctggtggcagtcatcaaaatcgcttctagacttgtttttatttttaaataaaagatctaattatattgg

SEQ ID NO: 5978 - protein, 47 aa, Homo sapiens
MLHRQWHVGELKEEACSIFHSFKGQLGVFTLYAVLLSQRNKHVAGSV

SEQ ID NO: 5979 - DNA, 826 bp, Homo sapiens
ctctttggtcaacatttgctttctatttgaattttaggtggttaaataaacttggatcggctgtaatccatcaggaatccactacaaaggatgaagaatgttacagtgaaagtgaacaggaagatccagaaatagctgcggagacaccaccccctcctcacgcttcccagactcagtctttgactgcacagcaggcatcttcatcctcacccagcctgagtggaacgtcgtattctttctcttccctggaaaatacagtgaagacacccagcagttttccttcctccttatctaaagagagacaatccttgcctgacacagttaacagtttgtctgctgctgaagatgagggacaaccaataacgtttgctgtgcaagttcattcacctgtaccctcagaggcaggcatccacaaggccctggaaaacagttttgtcacatcagaaagtggatttttgaactctttatctagtgatgatacttcttcattgagtagcaatcatgaccatcttactgtcccagataagcctgctggatcaaagatcatggacaaaggtaaaccaataaattatttattcttcgttagagagtgaatatttgtttgtatatggaactgtaatattaatttgtaacaagaatggttaaactcatgaatgatgattcaataattagtcaagtggggctatgcccagaggttgctttgtagaggagtttgcatgtggacaactccagctactaggccactaattacttgctataagtgtcactaaccaattgcttcagaactccaagacatgtgatcataaaataatgatacttttccacc

SEQ ID NO: 5980 - protein, 59 aa, Homo sapiens
TGRSRNSCGDTTPSSRFPDSVFDCTAGIFILTQPEWNVVFFLFPGKYSEDTQQFSFLLI

SEQ ID NO: 5981 - DNA, 933 bp, Homo sapiens
atgtttatctgaatccgttgtatttcatgcacgtttgctctgtaaatcccagatccccctcctcaccgccccagtgtttatttacatttccagtttatttatcttccaattttatgttctccctttgcagaaacctatctaatggtggttaaataaacttggatcggctgtaatccatcaggaatccactacaaaggatgaagaatgttacagtgaaagtgaacaggaagatccagaaatagctgcggagacaccaccccctcctcacgcttcccagactcagtctttgactgcacagcaggcatcttcatcctcacccagcctgagtggaacgtcgtattctttctcttccctggaaaatacagtgaagacacccagcagttttccttcctccttatctaaagagagacaatccttgcctgacacagttaacagtttgtctgctgctgaagatgagggacaaccaataacgtttgctgtgcaagttcattcacctgtaccctcagaggcaggcatccacaaggccctggaaaacagttttgtcacatcagaaagtggatttttgaactctttatctagtgatgatacttcttcattgagtagcaatcatgaccatcttactgtcccagataagcctgctggatcaaagatcatggacaaaggtaaaccaataaattatttattcttcgttagagagtgaatatttgtttgtatatggaactgtaatattaatttgtaacaagaatggttaaactcatgaatgatgattcaataattagtcaagtggggctatgcccagaggttgctttgtagaggagtttgcatgtggacaactccagctactaggccactaattacttgctataagtgtcactaaccaattgcttcagaactccaagacatgtgatcataaaataatgatacttttccacc

SEQ ID NO: 5982 - protein, 41 aa, Homo sapiens
MHVCSVNPRSPSSPPQCLFTFPVYLSSNFMFSLCRNLSNGG

SEQ ID NO: 5983 - DNA, 585 bp, Homo sapiens
ataaacactgccacctcctccctccttctctctttacaaatgttacaacacaatcagaaatttcctcttttctttccttcctgcattttcagcaggttcccttgcgtcagaagcccaggaggaaaactcaaggttttctcacgatgagtcggaggaggatatcgtgtaaagatctgggccatgctgactgccaagggtggctgtataagaaaaaggaaaagggaagtttcctaagcaacaaatggaaaaagttctgggtgatactgaaggggtcgtcactgtactggtatagcaatcaaatggcagagaaagctgatggatttgtcaacctgcctgatttcactgtggaaagagcatctgaatgcaagaaaaagcagtaagttgtctctcatcttccacaaaactctgagccaggatactatctcttcataatgttcaccaagggatatggtgatttagaagtgagtgaaggtaacatcggaatgtctgagaatttgaagcattatgggttggcaccctacatagaaatagaagcatttaacctctcattttctggaatttcgttttgtggagcagatggatttt

SEQ ID NO: 5984 - protein, 78 aa, Homo sapiens
MSRRRISCKDLGHADCQGWLYKKKEKGSFLSNKWKKFWVILKGSSLYWYSNQMAEKADGFVNLPDFTVERASECKKKQ

SEQ ID NO: 5985 - DNA, 1619 bp, Homo sapiens
agatctatctggaggagtttctgtggagccagccaccctcaccaggtgccttccattagagtttaatgctttgctgcggtttcctgaaagagccccacagagagtgggtctcgatgggtcctgaaccgcaccacaaccggccagtgagacctcctgctcacatccgtaaagcccactgattcttttactacactttttatgagaacaagacattttctaggaagatggtggcagaaaaagagaccctgagcttaaacaaatgcccagacaagatgccgaagaggaccaagctgctggcacaacagccgctcccggtgcaccagcctcactctctggtttctgagggtttcacagtcaaagccatgatgaaaaactcagtcgtgagaggccctccagctgcaggggcatttaaagaaagaccaaccaagcccacagcatttcgaaaattctatgagcgaggtgacttcccaattgcccttgagcatgattcgaaaggaaacaaaatcgcctggaaggtagaaattgagaagctggattaccatcattatctgcctctgttttttgatgggctttgtgaaatgacatttccctatgagttttttgctcggcaaggaatccacgacatgctggaacacggtgggaacaagatcctacctgtccttccacagctcattatcccgataaaaaatgccttgaacctccgaaaccgacaggtcatctgtgtcactctcaaggtcctccagcatctggttgtgtcagctgagatggtgggcaaggccttggtgccttattaccgtcaaatcctccctgtcctgaacatctttaagaatatgaatgggtcttactctttgcccaggctggagtgcagtggcgcgatcatggctcgttgcaacctcgaccacctgggctcaagtgatcctcccacctcagcctctcaagtagctgagattatagtgaactccggagacggcattgactacagccagcagaagagggagaacattggggacttgatccaggagacactggaggccttcgagcgctacggaggagaaaatgcctttatcaacattaagtacgtggtcccaacctacgagtcttgcttgctaaactaacagtggcagcagctgggacttgaaacctcccgttggtgttgggatcatctgtctctgttgcttttagcatctcattccttgtgacttccacagctttcttttctacagctgctaaaatagtggcttatgggccattggactgttagccctattgagagcaaggctttccaatacataaatagtgtctgtttcttagattacaatagtgtactgtgcttatttgttctaagagaagaattgcttctttatacagctccgacagaagcaggagtccgagttaaaccttcagttgtatagacaataaactataattttcatatgcaattcagcaattgctgttctgtgtgtgcctgccctgggggtgatgtcagaggttgtaagggaagagtttatgctgactgcttactaggtgtttgtcatggaagagaagcatgggttcagcagtgcctctctagcagctgtgcggaataatgtgctttgacattcaataaaactgttgaatct

SEQ ID NO: 5986 - protein, 296 aa, Homo sapiens; identical to SEQ ID NO: 799

SEQ ID NO: 5987 - DNA, 1502 bp, Homo sapiens
agatctatctggaggagtttctgtggagccagccaccctcaccaggtgccttccattagagtttaatgctttgctgcggtttcctgaaagagccccacagagagtgggtctcgatgggtcctgaaccgcaccacaaccggccagtgagacctcctgctcacatccgtaaagcccactgattcttttactacactttttatgagaacaagacattttctaggaagatggtggcagaaaaagagaccctgagcttaaacaaatgcccagacaagatgccgaagaggaccaagctgctggcacaacagccgctcccggtgcaccagcctcactctctggtttctgagggtttcacagtcaaagccatgatgaaaaactcagtcgtgagaggccctccagctgcaggggcatttaaagaaagaccaaccaagcccacagcatttcgaaaattctatgagcgaggtgacttcccaattgcccttgagcatgattcgaaaggaaacaaaatcgcctggaaggtagaaattgagaagctggattaccatcattatctgcctctgttttttgatgggctttgtgaaatgacatttccctatgagttttttgctcggcaaggaatccacgacatgctggaacacggtgggaacaagatcctacctgtccttccacagctcattatcccgataaaaaatgccttgaacctccgaaaccgacaggtcatctgtgtcactctcaaggtcctccagcatctggttgtgtcagctgagatggtgggcaaggccttggtgccttattaccgtcaaatcctccctgtcctgaacatctttaagaatatgaatgtgaactccggagacggcattgactacagccagcagaagagggagaacattggggacttgatccaggagacactggaggccttcgagcgctacggaggagaaaatgcctttatcaacattaagtacgtggtcccaacctacgagtcttgcttgctaaactaacagtggcagcagctgggacttgaaacctcccgttggtgttgggatcatctgtctctgttgcttttagcatctcattccttgtgacttccacagctttcttttctacagctgctaaaatagtggcttatgggccattggactgttagccctattgagagcaaggctttccaatacataaatagtgtctgtttcttagattacaatagtgtactgtgcttatttgttctaagagaagaattgcttctttatacagctccgacagaagcaggagtccgagttaaaccttcagttgtatagacaataaactataattttcatatgcaattcagcaattgctgttctgtgtgtgcctgccctgggggtgatgtcagaggttgtaagggaagagtttatgctgactgcttactaggtgtttgtcatggaagagaagcatgggttcagcagtgcctctctagcagctgtgcggaataatgtgctttgacattcaataaaactgttgaatct

SEQ ID NO: 5988 - protein, 257 aa, Homo sapiens
MVAEKETLSLNKCPDKMPKRTKLLAQQPLPVHQPHSLVSEGFTVKAMMKNSVVRGPPAAGAFKERPTKPTAFRKFYERGDFPIALEHDSKGNKIAWKVEIEKLDYHHYLPLFFDGLCEMTFPYEFFARQGIHDMLEHGGNKILPVLPQLIIPIKNALNLRNRQVICVTLKVLQHLVVSAEMVGKALVPYYRQILPVLNIFKNMNVNSGDGIDYSQQKRENIGDLIQETLEAFERYGGENAFINIKYVVPTYESCLLN

SEQ ID NO: 5989 - DNA, 1616 bp, Homo sapiens
gcggggcgtggcgccataccggggcgtggggcggcgcagagaggctgtacctggcaggtacccacgtacctatcatggtcactgggtaggtggcggctgcgggccaggaacaggcccatgcgcgcagcggcgccagccgcgcctcccaccagcggctctcctgggttaaatcctccaggcctccccgcccccgcgcccggccctaggaatgcgcacgcgcggagggcgcggcccagggcctgctgggagtcgtagttctaacgcgtagtttctcctcacgcctcctgcccccagccccccaccgccgccctttccggcttcaggcccagcaatcttacgtcaccggggggcggggctatgcgcccgccgtgttgaccagtcgcttagcaaccgggaggcttacctttggaagcttgttgcagctctagccaaggtcctgccctcttcccgccccgcccctagggtccagctcccttcacctaggagctgccaaacatctggatcaacctgggcactacgaggggttgaatttctaccattatcgcgccttttgatatttttttccagacctcctgctcacatccgtaaagcccactgattcttttactacactttttatgagaacaagacattttctaggaagatggtggcagaaaaagagaccctgagcttaaacaaatgcccagacaagatgccgaagaggaccaagctgctggcacaacagccgctcccggtgcaccagcctcactctctggtttctgagggtttcacagtcaaagccatgatgaaaaactcagtcgtgagaggccctccagctgcaggggcatttaaagaaagaccaaccaagcccacagcatttcgaaaattctatgagcgaggtgacttcccaattgcccttgagcatgattcgaaaggaaacaaaatcgcctggaaggtagaaattgagaagctggattaccatcattatctgcctctgttttttgatgggctttgtgaaatgacatttccctatgagttttttgctcggcaaggaatccacgacatgctggaacacggtgggaacaagatcctacctgtccttccacagctcattatcccgataaaaaatgccttgaacctccgaaaccgacaggtcatctgtgtcactctcaaggtcctccagcatctggttgtgtcagctgagatggtgggcaaggccttggtgccttattaccgtcaaatcctccctgtcctgaacatctttaagaatatgaatgtgaactccggagacggcattgactacagccagcagaagagggagaacattggggacttgatccaggagacactggaggccttcgagcgctacggaggagaaaatgcctttatcaacattaagtacgtggtcccaacctacgagtcttgcttgctaaactaacagtggcagcagctgggacttgaaacctcccgttggtgttgggatcatctgtctctgttgcttttagcatctcattccttgtgacttccacagctttcttttctacagctgctaaaatagtggcttatgggccattggactgttagccctattgagagcaaggctttccaatacataaatagtgtctgtttcttagatt

SEQ ID NO: 5990 - protein, 257 aa, Homo sapiens; identical to SEQ ID NO: 5988

SEQ ID NO: 5991 - DNA, 1744 bp, Homo sapiens
gcggggcgtggcgccataccggggcgtggggcggcgcagagaggctgtacctggcaggtacccacgtacctatcatggtcactgggtaggtggcggctgcgggccaggaacaggcccatgcgcgcagcggcgccagccgcgcctcccaccagcggctctcctgggttaaatcctccaggcctccccgcccccgcgcccggccctaggaatgcgcacgcgcggagggcgcggcccagggcctgctgggagtcgtagttctaacgcgtagtttctcctcacgcctcctgcccccagccccccaccgccgccctttccggcttcaggcccagcaatcttacgtcaccggggggcggggctatgcgcccgccgtgttgaccagtcgcttagcaaccgggaggcttacctttggaagcttgttgcagctctagccaaggtcctgccctcttcccgccccgcccctagggtccagctcccttcacctaggagctgccaaacatctggatcaacctgggcactacgaggggttgaatttctaccattatcgcgccttttgatatttttttccagacctcctgctcacatccgtaaagcccactgattcttttactacactttttatgagaacaagacattttctaggaagatggtggcagaaaaagagaccctgagcttaaacaaatgcccagacaagatgccgaagaggaccaagctgctggcacaacagccgctcccggtgcaccagcctcactctctggtttctgagggtttcacagtcaaagccatgatgaaaaactcagtcgtgagaggccctccagctgcaggggcatttaaagaaagaccaaccaagcccacagcatttcgaaaattctatgagcgaggtgacttcccaattgcccttgagcatgattcgaaaggaaacaaaatcgcctggaaggtagaaattgagaagctggattaccatcattatctgcctctgttttttgatgggctttgtgaaatgacatttccctatgagttttttgctcggcaaggaatccacgacatgctggaacacggtgggaacaagatcctacctgtccttccacagctcattatcccgataaaaaatgccttgaacctccgaaaccgacaggtcatctgtgtcactctcaaggtcctccagcatctggttgtgtcagctgagatggtgggcaaggccttggtgccttattaccgtcaaatcctccctgtcctgaacatctttaagaatatgaatgtgaactccggagacggcattgactacagccagcagaagagggagaacattggggacttgatccaggagacactggaggccttcgagcgctacggaggagaaaatgcctttatcaacattaagtacgtggtcccaacctacgagtcttgcttgctaaactaacagtggcagcagctgggacttgaaacctcccgttggtgttgggatcatctgtctctgttgcttttagcatctcattccttgtgacttccacagctttcttttctacagctgctaaaatagtggcttatgggccattggactgttagccctattgagagcaaggctttccaatacataaatagtgtctgtttcttagattacaatagtgtactgtgcttatttgttctaagagaagaattgcttctttatacagctccgacagaagcaggagtccgagttaaaccttcagttgtatagacaataaactataattttcatatgcaattc

SEQ ID NO: 5992 - protein, 257 aa, Homo sapiens; identical to SEQ ID NO: 5988

SEQ ID NO: 5993 - DNA, 1921 bp, Homo sapiens
gcggggcgtggcgccataccggggcgtggggcggcgcagagaggctgtacctggcaggtacccacgtacctatcatggtcactgggtaggtggcggctgcgggccaggaacaggcccatgcgcgcagcggcgccagccgcgcctcccaccagcggctctcctgggttaaatcctccaggcctccccgcccccgcgcccggccctaggaatgcgcacgcgcggagggcgcggcccagggcctgctgggagtcgtagttctaacgcgtagtttctcctcacgcctcctgcccccagccccccaccgccgccctttccggcttcaggcccagcaatcttacgtcaccggggggcggggctatgcgcccgccgtgttgaccagtcgcttagcaaccgggaggcttacctttggaagcttgttgcagctctagccaaggtcctgccctcttcccgccccgcccctagggtccagctcccttcacctaggagctgccaaacatctggatcaacctgggcactacgaggggttgaatttctaccattatcgcgccttttgatatttttttccagacctcctgctcacatccgtaaagcccactgattcttttactacactttttatgagaacaagacattttctaggaagatggtggcagaaaaagagaccctgagcttaaacaaatgcccagacaagatgccgaagaggaccaagctgctggcacaacagccgctcccggtgcaccagcctcactctctggtttctgagggtttcacagtcaaagccatgatgaaaaactcagtcgtgagaggccctccagctgcaggggcatttaaagaaagaccaaccaagcccacagcatttcgaaaattctatgagcgaggtgacttcccaattgcccttgagcatgattcgaaaggaaacaaaatcgcctggaaggtagaaattgagaagctggattaccatcattatctgcctctgttttttgatgggctttgtgaaatgacatttccctatgagttttttgctcggcaaggaatccacgacatgctggaacacggtgggaacaagatcctacctgtccttccacagctcattatcccgataaaaaatgccttgaacctccgaaaccgacaggtcatctgtgtcactctcaaggtcctccagcatctggttgtgtcagctgagatggtgggcaaggccttggtgccttattaccgtcaaatcctccctgtcctgaacatctttaagaatatgaatgtgaactccggagacggcattgactacagccagcagaagagggagaacattggggacttgatccaggagacactggaggccttcgagcgctacggaggagaaaatgcctttatcaacattaagtacgtggtcccaacctacgagtcttgcttgctaaactaacagtggcagcagctgggacttgaaacctcccgttggtgttgggatcatctgtctctgttgcttttagcatctcattccttgtgacttccacagctttcttttctacagctgctaaaatagtggcttatgggccattggactgttagccctattgagagcaaggctttccaatacataaatagtgtctgtttcttagattacaatagtgtactgtgcttatttgttctaagagaagaattgcttctttatacagctccgacagaagcaggagtccgagttaaaccttcagttgtatagacaataaactataattttcatatgcaattcagcaattgctgttctgtgtgtgcctgccctgggggtgatgtcagaggttgtaagggaagagtttatgctgactgcttactaggtgtttgtcatggaagagaagcatgggttcagcagtgcctctctagcagctgtgcggaataatgtgctttgacattcaataaaactgttgaatct

SEQ ID NO: 5994 - protein, 257 aa, Homo sapiens; identical to SEQ ID NO: 5988

SEQ ID NO: 5995 - DNA, 624 bp, Homo sapiens
aataacacttcagggtaagcctgctaaagtggggaagacgcgagtgagcacaatggaaataattcacgaaggtcagaaaaggcttcctggacagtcggatgtaaatgtacagacagagcgtggctctgtgcacacatccagcacatctaatgcagtgcagctgccacgccctgaacgatgcacccctggcgcatgctttgctacacaaggtggatctggctggtgtgcaatgtagccttgcccacgtgcagccacagtcagatgaaagcgatgtgtagttttagggtatctcggaagatgatttcagaaccttgactgcatgccaccatctacctcagatattcaaaacactacaaggaactcattcttctgcagtatattttgtgataggccctgttttgttgttgttgttcctttgctctttctataataagcagaaatacatgctagagttgcaatacatctaacaaaggtcctaagtgaatctatcaaaaaccaatgccacgtaagtgatcattctctcatgtagattccagtgaggggcctggcaacatcatccacaaattcccaagtaagcaacagtcttttatgtgacagatgttaaataaatgtttgccatactgt

SEQ ID NO: 5996 - protein, 60 aa, Homo sapiens
MEIIHEGQKRLPGQSDVNVQTERGSVHTSSTSNAVQLPRPERCTPGACFATQGGSGWCAM

SEQ ID NO: 5997 - DNA, 1690 bp, Homo sapiens
gaggaagtgtttgcgtgcacaaaggcgccattttacatagggtgttaagggacaccttctaaagataaataggggcaggggtcgccgatgtatggggaaaagctttccgaggagagcaaacaccaagggcagagtcctggggagggtaagcatgcttggaatatttaaggatccagacggattccacgggggtgcagccaagtgggctgtgggaggagaaggacataaggtcagtgatgcaccaggggcacacctgtcgtcttgcaggacttggtactgaaacagccttcattacttagagaccatagcttttttgcaagttactattccctgcatttagaaagttcatctttaaacaggcaattcagtaagtaaatattctatggctctaaaacagatacggctgttggagactttaaaacatctgacagttacatttttaatgttgtctaccaaggctattacatttcctctgtcaaagtaacttaattttaaaaacgaactctgtgcttgttaaacgaaaaggccagaaggctactggctactcagcgttcatttgaaattcttatagtgccttcagtacaattcaaacttagaggtgattctcacaattcatgtgaagcaacattttacaaaaaaaatcacctacgttcactgttaagtcagaagacagaatgattaacaaaatctcagccgcgaattactctcacgatggccaactggatattaaataactctgcattattttaatggaatgttataaaggatttgcaacaaaatgcagacgtagatttagggactgccgacttctatagatcaaggacttcattggtgcagctgaggaaattcttccaaacaagtctaaatgttggaaatccaccaaactgcagagaaagacctcttgcctccgtattctttcttcatctgtaaaaatgttgacttctgcttttcagactacgcgcacagcctctttatttcctactgcggcttcattccctcacggaacactgacgccatcgcgaaggaagcatttcgagcacgactgacgctccccttattatttgctaagccgctgcgctcgggtctggctacgatttgctttcagaataacgggaaggtgcaacaagatcgcttccctagaggcgcgtcgcccgcgtggcccggaccccccacgcccgcccgccgccccgtgggtgcgcacgcgtgtccgcgcaggcttcccgcctggcgagtgcaaggctcctctccgccgtgctgctttccagcctctcagcaaatcacgaacaccgaaagaagccacggcggcgacgggaggggcgtcgcgcgtgcttccctcggcgacaaagcgggagccgggcgcgccggccgagggcgcccggcgcagagtcccgcagaggcggacgccgcggcacgcgcctcgaaaagcctcaaactcttatcctcggctctcccgccccacctccgccccgcagccaagacccgcgccgtggcgggcccgacggccaaggaaagcccaccagccctccgcaccgtgggcgacgggccaagacccggccctaaacggccagacccagcccctagggcgtggcgaccgggctcgacgcgcgcacgcgctctggagccccacggctacgtgtcgggccacgtgatgcccaccccgaaagtcccccgtgaagcaacaggacgttaa

SEQ ID NO: 5998 - protein, 274 aa, Homo sapiens
MLEIHQTAEKDLLPPYSFFICKNVDFCFSDYAHSLFISYCGFIPSRNTDAIAKEAFRARLTLPLLFAKPLRSGLATICFQNNGKVQQDRFPRGASPAWPGPPTPARRPVGAHACPRRLPAWRVQGSSPPCCFPASQQITNTERSHGGDGRGVARASLGDKAGAGRAGRGRPAQSPAEADAAARASKSLKLLSSALPPHLRPAAKTRAVAGPTAKESPPALRTVGDGPRPGPKRPDPAPRAWRPGSTRARALEPHGYVSGHVMPTPKVPREATGR

SEQ ID NO: 5999 - DNA, 2005 bp, Homo sapiens
gaggaagtgtttgcgtgcacaaaggcgccattttacatagggtgttaagggacaccttctaaagataaataggggcaggggtcgccgatgtatggggaaaagctttccgaggagagcaaacaccaagggcagagtcctggggagggtaagcatgcttggaatatttaaggatccagacggattccacgggggtgcagccaagtgggctgtgggaggagaaggacataaggtcagtgatgcaccaggggcacacctgtcgtcttgcaggacttggtactgaaacagccttcattacttagagaccatagcttttttgcaagttactattccctgcatttagaaagttcatctttaaacaggcaattcagtaagtaaatattctatggctctaaaacagatacggctgttggagactttaaaacatctgacagttacatttttaatgttgtctaccaaggctattacatttcctctgtcaaagtaacttaattttaaaaacgaactctgtgcttgttaaacgaaaaggccagaaggctactggctactcagcgttcatttgaaattcttatagtgccttcagtacaattcaaacttagaggtgattctcacaattcatgtgaagcaacattttacaaaaaaaatcacctacgttcactgttaagtcagaagacagaatgattaacaaaatctcagccgcgaattactctcacgatggccaactggatattaaataactctgcattattttaatggaatgttataaaggatttgcaacaaaatgcagacgtagatttagggactgccgacttctatagatcaaggacttcattggtgcagctgaggaaattcttccaaacaagtctaaatgttggaaatccaccaaactgcagagaaagacctcttgcctccgtattctttcttcatctgtaaaaatgttgacttctgcttttcagactacgcgcacagcctctttatttcctactgcggcttcattccctcacggaacactgacgccatcgcgaaggaagcatttcgagcacgactgacgctccccttattatttgctaagccgctgcgctcgggtctggctacgatttgctttcagaataacgggaaggtgcaacaagatcgcttccctagaggcgcgtcgcccgcgtggcccggaccccccacgcccgcccgccgccccgtgggtgcgcacgcgtgtccgcgcaggcttcccgcctggcgagtgcaaggctcctctccgccgtgctgctttccagcctctcagcaaatcacgaacaccgaaagaagccacggcggcgacgggaggggcgtcgcgcgtgcttccctcggcgacaaagcgggagccgggcgcgccggccgagggcgcccggcgcagagtcccgcagaggcggacgccgcggcacgcgcctcgaaaagcctcaaactcttatcctcggctctcccgccccacctccgccccgcagccaagacccgcgccgtggcgggcccgacggccaaggaaagcccaccagccctccgcaccgtgggcgacgggccaagacccggccctaaacggccagacccagcccctaaggtcggcgggggctgcgcggactcggtggtcctcgccgagccctcccgagagcaggcccacgccgcgccgccggcctggaggacgcgtgtgcccggcgcgggccccgctcctccgctcggcctcccgagcctgctctgcgcggacccccaccgccccgcgttcgggagctctcccctcccgtgaggactaaagcggggtttcgtggttggggagttggtgcagctgttcaatactaagtggaagtcagtgtggggctcgttagtttaaagaaattccgtaggagaccgaaattatgctggcgtagccgacaaggaggactaagtgacggcgaaaagcacttttttcccttttgtttggggaagcgagaactgttagggagttgaacttcacttttcgggggtggggggggggggggtggagtgc

SEQ ID NO: 6000 - protein, 299 aa, Homo sapiens [sequence omitted]

SEQ ID NO: 6001 - DNA, 5682 bp, Homo sapiens
tgaactgaggcgaactccgccgccaagtgagtgaggaggaggaggaggagaaggaggaggaggaagaggaggagcgcagtcggagcgcggcggcagcggcagaggcgccgcggcggggaccagcccagagagaccccccgagcccgcggcacaggcggcggcggcgctgagcgggctcgaccagccgagcgagcggcggccccggctcctcctcgtccggcgccagcagcccgcgccccgcgcccgcactcggccagccgagacccgcctcccgcccgcccgccggcctcgtgagggacgcgccgagccgggcggccgagagcggcggcggctgggagcgcgtcgggcccgggcggaaagtgcctgcggggggcgggcgagcgcgcggtgccggccgccccggggctcggcgcgggagccagagcgggagccggcgcggagcgggacgccgggtcccgagcggcccgcggccggggctcgcccccgcccctccctcctctccggcggcggcggcggcggcggcgggcggagtgagctgcggagcctggaatatggtcggggaaatggaaacgaaggagaagccgaagcccaccccagattacctgatgcagctgatgaacgacaagaagctcatgagcagcctgcccaacttctgcgggatcttcaaccacctcgagcggctgctggacgaagaaattagcagagtacggaaagacatgtacaatgacacattaaatggcagtacagagaaaaggagtgcagaattgcctgatgctgtgggacctattgttcagttacaagagaaactttatgtgcctgtaaaagaatacccagattttaattttgttgggagaatccttggacctagaggacttacagccaaacaacttgaagcagaaaccggatgtaaaatcatggtccgaggcaaaggctcaatgagggataaaaaaaaggaggagcaaaatagaggcaagcccaattgggagcatctaaatgaagatttacatgtactaatcactgtggaagatgctcagaacagagcagaaatcaaattgaagagagcagttgaagaagtgaagaaattattggtacctgcagcagaaggagaagacagcctgaagaagatgcagctgatggagcttgcgattctgaatggcacctacagagatgccaacattaaatcaccagcccttgccttttctcttgcagcaacagcccaggctgctccaaggatcattactgggcctgcgccggttctcccaccagctgccctgcgtactcctacgccagctggccctaccataatgcctttgatcagacaaatacagaccgctgtcatgccaaacggaactcctcacccaactgctgcaatagttcctccagggcccgaagctggtttaatctatacaccctatgagtacccctacacattggcaccagctacatcaatccttgagtatcctattgaacctagtggtgtattaggtatggctttcccaacgaaaggctaagaattcaagaacggtcttaactgaaccctcatcagatctgaatttaacaaatgcttagtctcagcagcctccgggggaaaaaagcttagcctagcagtcagtgacttacttgcactttttgcacatagatataaagtaaaattatgttattaatttggtttagtctgtaatattacacagtaatggtaatttataaaggagtgtatagtagtatactgactgctaagtgtactatactgtttgctttactaatcacctaattcattgcagttcatacttattgactcagagtttaaaaccacaatctgtaggctttaagaattgcttttaaacctttttaagtgataaactcttgaagtggtcttaaggttagcaaataattgtctgtattaaacatggcgttatttaagtagtcctgctgcaagaaaggcacttcagtgaatatgtgactagtaaagcttaaatatgtttggatctaatagagctcatgaaatactgtaacttggggattgtaaatgaatggatacaataggttaaggcccaagatgtttgaaatgaatgcaatattaatagatgcatatatacatgacatattgtggttaattttaaaactactgtgccttaacgtgtttcttaaacttttgtagtaaatgaacatttgaaatccattttgataaacctgctgttaatgttttttccccccttgtgaatgttttctaactttgtcttggtaattgcaatttaactaggtgcggtggctactaaagttcgaaggcacgatatgcgtgtccatccttaccaaaggattgtgaccgcagaccgaggttagtttagttctgcagttcttgtctataagaaatgcgttgggtgtccataaaatttgcaacaccacacctgatggaaaaatgtaattgcttacctgcacacagttttttttccttttctaaatttgtttgtgatcattgacagatttaagggttgggttttttgttttggtttggttttttctcccttcatattttaacttattaaatcttctattattatgtactatgatttattcctactaaaacataaattagtcaatttggggagctattaaattttgatgttgcctcagttattttcattaataacttttgctaaaatttaccttttaaaagttctgaaatttggggttggtattgcaaaatgaattgaacggatggtgctttaatgagagaagtaaaggaatatatgcctcctgtgtacttttggagaaaactgaagatttagtttccatttttctttataataaaatatttgagccactgtataaacatgagggtgcacatgtcaagtacttagctaaaatcaacaaagtgaggactgtgaagataactttcatgtagttggatttttttatataaattagagcgtcaattcccttttattcttacattctcttgccaaaatggatcctttgatttttgtcatttgctgctaaaatatattatctgaaggtaaactgtctcttgaagttctgtggtggtatgagatccagctgtgtgaatataatttttgactaacctgtgactggaaaataagtcttcatttttctcctttacaacttttataatttgtgtcctgtatatgcccttggacccttttataaattatttttgcttattgaggaatggtattttcggtttattgacattgaattgttttctaagtttttccatcacaagataggaatatcaagcatggtagtaaaaaaggattttttacaagtttctattatggcacatttgtttcctacaaattaaattgatcaaagtctcaaatattagtggaggaaaaagtgctggatttgtacttcaattgtacatcttctatgaatttatgaaggacctacctgctttatgtgattaccttgagtactgatgataaatactagacacagctgttgtccacatcagaaataacatgcctttcccaaagacattgttaatatttgtttagcataatccataaagaacgttgaagacttttaaactaatgtattcatcactaacagtgattgttcagtgaacaaaatagaccccagctccgtggtcgtctatgaggatggtattccttgtaagtgttctgtatgagcacgtctcatagggatggggaagttttttggaaagtcacttgagttttaaagaaactggacaattccatgaataatttgaggttttattcatattgctaatgtctacaattgttctaaagagtattttaaagtagtttttttcccccagctaatctttccctatgtatgcccccttttaggagatttctcaccattttgctttaacacaataattattggcctacttaatactccagtgccttgagatagttggacatattttaggaagattttattgtatttggaaaattacgacacattccatgcatggatcttttgtagttacgtgttttgattagtcctgtcactgtttttatttaaaatgcagtgtcagcaaaccgaaatgctcatttcttttttagtaacagagtactcgtatacttatcactgtatgcactcattgggtctaagggagatgtctgaagtccttcacttaaattattttatgatactactgttttctctatttttgaggttaaaattattttaaaaaaatattttgaagagaagtttattagtataagcattcatttaatgcaaaaaaactcagcccttggacatataaccatgtaattctatatgaacgtttagagtactacatggttgaccaatatctagttctttactaaaagtaaactcacctctttatatatatttcaaaactgaatttgaagcctattagagaccaactgaccttttagttgtaatgaactgtatggtcttgcatggtgacacacctgtgtaggaggccaagacttggcagaggatgtagtctaggtgtcctggtatatataaatggtcactcacttcgtttatatattccacactcagaaaagaagtcagagttttttctgagtaatacaaaaaccatcacttacataatttgtataagaaactttaaacagttttaatcaaaactatgagtaacatcaaaaatgctttaagattctatattttggaatacctgtgaagtagtatgactacatcatgttaaatatttattttcttctatgattttggagcagcaatttttattttaaataaaattccacttttaagaaattcagggaagatttggtcacattgaagatacagtatttttgtagtatttataaactgttctaaatgatagactatagaaaacatttttgtcatatgaaggtaaatcagtccattattttggatcatttaaactgaacattacaccttctgggctttgatttatgaagtggcacagaatctaactttgcactgaatatcttttcattcacatctcctctgccttagtcacaatggcaacagtacagaaaattctatcaaacctcagaatatagtagaaataattaagctgttgaatgagtcttaaaaattatactactgttaagtggaccaagtttggtgaagcagaatgtgacaaaggttgattaaggaaggaacaactcaaggacattgggaatgataacttttccacttgagaactactttatgttttactgtaatttttaaagtttttttgtcctttttgttattttgcaaaagaaaatagtatttacaggtggcttcttttaaaatataaaaatataaagcaggaatgtatatgaaatgtcagattttattgtatttgcagagtattagctttgaaattgaataaagaaagctgtttgtagttttaaaatgccttattggtatcaattagaaatttcttctattttttgatgtacttagagctttttgagtgtagaattttaaatggcaggattttacagtgtttacatgcaagtgcattttataagtgttctatatgtgtaaaatagtattttcaactggaaagtgttggctagtgcaaaaggcctggccattttctggttcccatgatgttgcctacactgctagactacagtttagtatcgctttgtatcatgaggccaagaaattccatgttgtttgtaaatagaataattgaaaaagcaataaacatttattgaacaaaag

SEQ ID NO: 6002 - protein, 319 aa, Homo sapiens; identical to SEQ ID NO: 803

SEQ ID NO: 6003 - DNA, 6961 bp, Homo sapiens
tgaactgaggcgaactccgccgccaagtgagtgaggaggaggaggaggagaaggaggaggaggaagaggaggagcgcagtcggagcgcggcggcagcggcagaggcgccgcggcggggaccagcccagagagaccccccgagcccgcggcacaggcggcggcggcgctgagcgggctcgaccagccgagcgagcggcggccccggctcctcctcgtccggcgccagcagcccgcgccccgcgcccgcactcggccagccgagacccgcctcccgcccgcccgccggcctcgtgagggacgcgccgagccgggcggccgagagcggcggcggctgggagcgcgtcgggcccgggcggaaagtgcctgcggggggcgggcgagcgcgcggtgccggccgccccggggctcggcgcgggagccagagcgggagccggcgcggagcgggacgccgggtcccgagcggcccgcggccggggctcgcccccgcccctccctcctctccggcggcggcggcggcggcggcgggcggagtgagctgcggagcctggaatatggtcggggaaatggaaacgaaggagaagccgaagcccaccccagattacctgatgcagctgatgaacgacaagaagctcatgagcagcctgcccaacttctgcgggatcttcaaccacctcgagcggctgctggacgaagaaattagcagagtacggaaagacatgtacaatgacacattaaatggcagtacagagaaaaggagtgcagaattgcctgatgctgtgggacctattgttcagttacaagagaaactttatgtgcctgtaaaagaatacccagattttaattttgttgggagaatccttggacctagaggacttacagccaaacaacttgaagcagaaaccggatgtaaaatcatggtccgaggcaaaggctcaatgagggataaaaaaaaggaggagcaaaatagaggcaagcccaattgggagcatctaaatgaagatttacatgtactaatcactgtggaagatgctcagaacagagcagaaatcaaattgaagagagcagttgaagaagtgaagaaattattggtacctgcagcagaaggagaagacagcctgaagaagatgcagctgatggagcttgcgattctgaatggcacctacagagatgccaacattaaatcaccagcccttgccttttctcttgcagcaacagcccaggctgctccaaggatcattactgggcctgcgccggttctcccaccagctgccctgcgtactcctacgccagctggccctaccataatgcctttgatcagacaaatacagaccgctgtcatgccaaacggaactcctcacccaactgctgcaatagttcctccagggcccgaagctggtttaatctatacaccctatgagtacccctacacattggcaccagctacatcaatccttgagtatcctattgaacctagtggtgtattagagtggattgaaatgccagtcatgcctgatatttcagcccattgacttgctggatgaaggactagaatacagcagctgttataacacgaccagtcaatgtggaacaaactgtttctgtgcaacccctttgttttaccagacaaaatttgaatactttttttcctgaattgtatatgaccttggtgctgcatgcatgctgttgacttttaggactttgatcttttaaggttttttttccccagcattaatattgatttataaagatttgaaaatctttaatgaactggagaacactaagatttaaactcgaaaattcgttgttcaagtaaagaaagccatgatgctctgtatgttatctgtgtgtgtgcatgcactcaggtgccctttgtttcatgaacaaatacatttcattgtacatgttttctgtttaaatcattgtataaagtaattgcaggtcagaattataccacagaactgtttatgagaggcttgtgtctgttgcacatttcttgaagcatttttaaaataacatgtaacctgtaaccttgttgtttaagttttcttttctattaatactctgtcctgtggtcccgtgcatgctccttttcccagaactcctctctgctgcacccacagcatctgttcccgaggagttatgactcttgacttcctgcagggctggggctcttagccaccagctgctgttccagcactttcagcgcaagatctccctgattttgccacgtggaattgtacttgtatatgattaccttatctaaaatgaataagaggtgatggaccagtttactgcttagaaatagcaagaggcactgcagtaaaacttgtttctcattgtaaagcttcatgtcttttgtttgttggaaaatttttacttatagaaacttaattattagactggtaaaataaagaccaaaatatgcagatttctaattggcattcataaggtgaataataataagtgcccaatgaaaaaatctattatggttaatttcatttcttgctttgccacctaagcagtaaaacatgatattgaccacttggagaactcagaaaattattttaaatttctaagttataataaatttgcacacagataacatgcatgctatttatgtcacatctcacattaaattattttaaaataagcagtgcccttcaaaacagatgcagacatgtgtgttggtagtagtgaggagattggtattagcatcaagtcttcattgatgactaatttttaattcccttccttttatctttaggtatggctttcccaacgaaaggctaagaattcaagaacggtcttaactgaaccctcatcagatctgaatttaacaaatgcttagtctcagcagcctccgggggaaaaaagcttagcctagcagtcagtgacttacttgcactttttgcacatagatataaagtaaaattatgttattaatttggtttagtctgtaatattacacagtaatggtaatttataaaggagtgtatagtagtatactgactgctaagtgtactatactgtttgctttactaatcacctaattcattgcagttcatacttattgactcagagtttaaaaccacaatctgtaggctttaagaattgcttttaaacctttttaagtgataaactcttgaagtggtcttaaggttagcaaataattgtctgtattaaacatggcgttatttaagtagtcctgctgcaagaaaggcacttcagtgaatatgtgactagtaaagcttaaatatgtttggatctaatagagctcatgaaatactgtaacttggggattgtaaatgaatggatacaataggttaaggcccaagatgtttgaaatgaatgcaatattaatagatgcatatatacatgacatattgtggttaattttaaaactactgtgccttaacgtgtttcttaaacttttgtagtaaatgaacatttgaaatccattttgataaacctgctgttaatgttttttccccccttgtgaatgttttctaactttgtcttggtaattgcaatttaactaggtgcggtggctactaaagttcgaaggcacgatatgcgtgtccatccttaccaaaggattgtgaccgcagaccgaggttagtttagttctgcagttcttgtctataagaaatgcgttgggtgtccataaaatttgcaacaccacacctgatggaaaaatgtaattgcttacctgcacacagttttttttccttttctaaatttgtttgtgatcattgacagatttaagggttgggttttttgttttggtttggttttttctcccttcatattttaacttattaaatcttctattattatgtactatgatttattcctactaaaacataaattagtcaatttggggagctattaaattttgatgttgcctcagttattttcattaataacttttgctaaaatttaccttttaaaagttctgaaatttggggttggtattgcaaaatgaattgaacggatggtgctttaatgagagaagtaaaggaatatatgcctcctgtgtacttttggagaaaactgaagatttagtttccatttttctttataataaaatatttgagccactgtataaacatgagggtgcacatgtcaagtacttagctaaaatcaacaaagtgaggactgtgaagataactttcatgtagttggatttttttatataaattagagcgtcaattcccttttattcttacattctcttgccaaaatggatcctttgatttttgtcatttgctgctaaaatatattatctgaaggtaaactgtctcttgaagttctgtggtggtatgagatccagctgtgtgaatataatttttgactaacctgtgactggaaaataagtcttcatttttctcctttacaacttttataatttgtgtcctgtatatgcccttggacccttttataaattatttttgcttattgaggaatggtattttcggtttattgacattgaattgttttctaagtttttccatcacaagataggaatatcaagcatggtagtaaaaaaggattttttacaagtttctattatggcacatttgtttcctacaaattaaattgatcaaagtctcaaatattagtggaggaaaaagtgctggatttgtacttcaattgtacatcttctatgaatttatgaaggacctacctgctttatgtgattaccttgagtactgatgataaatactagacacagctgttgtccacatcagaaataacatgcctttcccaaagacattgttaatatttgtttagcataatccataaagaacgttgaagacttttaaactaatgtattcatcactaacagtgattgttcagtgaacaaaatagaccccagctccgtggtcgtctatgaggatggtattccttgtaagtgttctgtatgagcacgtctcatagggatggggaagttttttggaaagtcacttgagttttaaagaaactggacaattccatgaataatttgaggttttattcatattgctaatgtctacaattgttctaaagagtattttaaagtagtttttttcccccagctaatctttccctatgtatgcccccttttaggagatttctcaccattttgctttaacacaataattattggcctacttaatactccagtgccttgagatagttggacatattttaggaagattttattgtatttggaaaattacgacacattccatgcatggatcttttgtagttacgtgttttgattagtcctgtcactgtttttatttaaaatgcagtgtcagcaaaccgaaatgctcatttcttttttagtaacagagtactcgtatacttatcactgtatgcactcattgggtctaagggagatgtctgaagtccttcacttaaattattttatgatactactgttttctctatttttgaggttaaaattattttaaaaaaatattttgaagagaagtttattagtataagcattcatttaatgcaaaaaaactcagcccttggacatataaccatgtaattctatatgaacgtttagagtactacatggttgaccaatatctagttctttactaaaagtaaactcacctctttatatatatttcaaaactgaatttgaagcctattagagaccaactgaccttttagttgtaatgaactgtatggtcttgcatggtgacacacctgtgtaggaggccaagacttggcagaggatgtagtctaggtgtcctggtatatataaatggtcactcacttcgtttatatattccacactcagaaaagaagtcagagttttttctgagtaatacaaaaaccatcacttacataatttgtataagaaactttaaacagttttaatcaaaactatgagtaacatcaaaaatgctttaagattctatattttggaatacctgtgaagtagtatgactacatcatgttaaatatttattttcttctatgattttggagcagcaatttttattttaaataaaattccacttttaagaaattcagggaagatttggtcacattgaagatacagtatttttgtagtatttataaactgttctaaatgatagactatagaaaacatttttgtcatatgaaggtaaatcagtccattattttggatcatttaaactgaacattacaccttctgggctttgatttatgaagtggcacagaatctaactttgcactgaatatcttttcattcacatctcctctgccttagtcacaatggcaacagtacagaaaattctatcaaacctcagaatatagtagaaataattaagctgttgaatgagtcttaaaaattatactactgttaagtggaccaagtttggtgaagcagaatgtgacaaaggttgattaaggaaggaacaactcaaggacattgggaatgataacttttccacttgagaactactttatgttttactgtaatttttaaagtttttttgtcctttttgttattttgcaaaagaaaatagtatttacaggtggcttcttttaaaatataaaaatataaagcaggaatgtatatgaaatgtcagattttattgtatttgcagagtattagctttgaaattgaataaagaaagctgtttgtagttttaaaatgccttattggtatcaattagaaatttcttctattttttgatgtacttagagctttttgagtgtagaattttaaatggcaggattttacagtgtttacatgcaagtgcattttataagtgttctatatgtgtaaaatagtattttcaactggaaagtgttggctagtgcaaaaggcctggccattttctggttcccatgatgttgcctacactgctagactacagtttagtatcgctttgtatcatgaggccaagaaattccatgttgtttgtaaatagaataattgaaaaagcaataaacatttattgaacaaaag

SEQ ID NO: 6004 - protein, 325 aa, Homo sapiens; identical to SEQ ID NO: 805

SEQ ID NO: 6005 - DNA, 7908 bp, Homo sapiens
tgaactgaggcgaactccgccgccaagtgagtgaggaggaggaggaggagaaggaggaggaggaagaggaggagcgcagtcggagcgcggcggcagcggcagaggcgccgcggcggggaccagcccagagagaccccccgagcccgcggcacaggcggcggcggcgctgagcgggctcgaccagccgagcgagcggcggccccggctcctcctcgtccggcgccagcagcccgcgccccgcgcccgcactcggccagccgagacccgcctcccgcccgcccgccggcctcgtgagggacgcgccgagccgggcggccgagagcggcggcggctgggagcgcgtcgggcccgggcggaaagtgcctgcggggggcgggcgagcgcgcggtgccggccgccccggggctcggcgcgggagccagagcgggagccggcgcggagcgggacgccgggtcccgagcggcccgcggccggggctcgcccccgcccctccctcctctccggcggcggcggcggcggcggcgggcggagtgagctgcggagcctggaatatggtcggggaaatggaaacgaaggagaagccgaagcccaccccagattacctgatgcagctgatgaacgacaagaagctcatgagcagcctgcccaacttctgcgggatcttcaaccacctcgagcggctgctggacgaagaaattagcagagtacggaaagacatgtacaatgacacattaaatggcagtacagagaaaaggagtgcagaattgcctgatgctgtgggacctattgttcagttacaagagaaactttatgtgcctgtaaaagaatacccagattttaattttgttgggagaatccttggacctagaggacttacagccaaacaacttgaagcagaaaccggatgtaaaatcatggtccgaggcaaaggctcaatgagggataaaaaaaaggaggagcaaaatagaggcaagcccaattgggagcatctaaatgaagatttacatgtactaatcactgtggaagatgctcagaacagagcagaaatcaaattgaagagagcagttgaagaagtgaagaaattattggtacctgcagcagaaggagaagacagcctgaagaagatgcagctgatggagcttgcgattctgaatggcacctacagagatgccaacattaaatcaccagcccttgccttttctcttgcagcaacagcccaggctgctccaaggatcattactgggcctgcgccggttctcccaccagctgccctgcgtactcctacgccagctggccctaccataatgcctttgatcagacaaatacagaccgctgtcatgccaaacggaactcctcacccaactgctgcaatagttcctccagggcccgaagctggtttaatctatacaccctatgagtacccctacacattggcaccagctacatcaatccttgagtatcctattgaacctagtggtgtattaggtaagttcttctccccatggggttaacaacattctctttataaatatttttgctccctcagattttgaaatgattttatcagttttagagaggcaagacaagtttgcattagggaagaccgaaaactaaattttgttttatttcagcctctcataagggttcccctttgaaataattgcaccttaaatttattcagatccactttggtaactgaggttcagtttggttgggtaaatctgttgtgtacatttcaacaaatacttttacatttgacattactgaggtcattctgagttttaggtcccaccccattggcccgtcacctccatcagctccacttctcaaactttatttgagatttattttatctcacaggtttgtgtaattgttggaaaatttttaaacttctaagtgaaagtagtctgagcgctttataaaattcatattattgtgtgtgttttgtaatatttgcgatcacttaaaatatcagataaatacagtcatgcatcgcttaacaacggggatacagtctaagaattgccttgtctggcagtttcatcatttggtgtacatcatagagtgtacttacacagacatagatgatatcgtttactacacacctaggctgtgtggtatagccattataatcttatgggaccacatagtataagtggtccgttgttgaccaaaatgttgttatgcaggcatgactgtagttgtattcttaagatttttcagttcttgtgttttggagtcctagtcatattaaacatgagagatactcttaatttcagtagtacagtatggaatagttaaataaatagcaaatcactgaattcagaatctcacttaaggcagaaattaaaatcataatataaacgcttggttttacatgaacaaaaagtggtgtgctcgaaaaagacattactgatgccttttttttatagagtggattgaaatgccagtcatgcctgatatttcagcccattgacttgctggatgaaggactagaatacagcagctgttataacacgaccagtcaatgtggaacaaactgtttctgtgcaacccctttgttttaccagacaaaatttgaatactttttttcctgaattgtatatgaccttggtgctgcatgcatgctgttgacttttaggactttgatcttttaaggttttttttccccagcattaatattgatttataaagatttgaaaatctttaatgaactggagaacactaagatttaaactcgaaaattcgttgttcaagtaaagaaagccatgatgctctgtatgttatctgtgtgtgtgcatgcactcaggtgccctttgtttcatgaacaaatacatttcattgtacatgttttctgtttaaatcattgtataaagtaattgcaggtcagaattataccacagaactgtttatgagaggcttgtgtctgttgcacatttcttgaagcatttttaaaataacatgtaacctgtaaccttgttgtttaagttttcttttctattaatactctgtcctgtggtcccgtgcatgctccttttcccagaactcctctctgctgcacccacagcatctgttcccgaggagttatgactcttgacttcctgcagggctggggctcttagccaccagctgctgttccagcactttcagcgcaagatctccctgattttgccacgtggaattgtacttgtatatgattaccttatctaaaatgaataagaggtgatggaccagtttactgcttagaaatagcaagaggcactgcagtaaaacttgtttctcattgtaaagcttcatgtcttttgtttgttggaaaatttttacttatagaaacttaattattagactggtaaaataaagaccaaaatatgcagatttctaattggcattcataaggtgaataataataagtgcccaatgaaaaaatctattatggttaatttcatttcttgctttgccacctaagcagtaaaacatgatattgaccacttggagaactcagaaaattattttaaatttctaagttataataaatttgcacacagataacatgcatgctatttatgtcacatctcacattaaattattttaaaataagcagtgcccttcaaaacagatgcagacatgtgtgttggtagtagtgaggagattggtattagcatcaagtcttcattgatgactaatttttaattcccttccttttatctttaggtatggctttcccaacgaaaggctaagaattcaagaacggtcttaactgaaccctcatcagatctgaatttaacaaatgcttagtctcagcagcctccgggggaaaaaagcttagcctagcagtcagtgacttacttgcactttttgcacatagatataaagtaaaattatgttattaatttggtttagtctgtaatattacacagtaatggtaatttataaaggagtgtatagtagtatactgactgctaagtgtactatactgtttgctttactaatcacctaattcattgcagttcatacttattgactcagagtttaaaaccacaatctgtaggctttaagaattgcttttaaacctttttaagtgataaactcttgaagtggtcttaaggttagcaaataattgtctgtattaaacatggcgttatttaagtagtcctgctgcaagaaaggcacttcagtgaatatgtgactagtaaagcttaaatatgtttggatctaatagagctcatgaaatactgtaacttggggattgtaaatgaatggatacaataggttaaggcccaagatgtttgaaatgaatgcaatattaatagatgcatatatacatgacatattgtggttaattttaaaactactgtgccttaacgtgtttcttaaacttttgtagtaaatgaacatttgaaatccattttgataaacctgctgttaatgttttttccccccttgtgaatgttttctaactttgtcttggtaattgcaatttaactaggtgcggtggctactaaagttcgaaggcacgatatgcgtgtccatccttaccaaaggattgtgaccgcagaccgaggttagtttagttctgcagttcttgtctataagaaatgcgttgggtgtccataaaatttgcaacaccacacctgatggaaaaatgtaattgcttacctgcacacagttttttttccttttctaaatttgtttgtgatcattgacagatttaagggttgggttttttgttttggtttggttttttctcccttcatattttaacttattaaatcttctattattatgtactatgatttattcctactaaaacataaattagtcaatttggggagctattaaattttgatgttgcctcagttattttcattaataacttttgctaaaatttaccttttaaaagttctgaaatttggggttggtattgcaaaatgaattgaacggatggtgctttaatgagagaagtaaaggaatatatgcctcctgtgtacttttggagaaaactgaagatttagtttccatttttctttataataaaatatttgagccactgtataaacatgagggtgcacatgtcaagtacttagctaaaatcaacaaagtgaggactgtgaagataactttcatgtagttggatttttttatataaattagagcgtcaattcccttttattcttacattctcttgccaaaatggatcctttgatttttgtcatttgctgctaaaatatattatctgaaggtaaactgtctcttgaagttctgtggtggtatgagatccagctgtgtgaatataatttttgactaacctgtgactggaaaataagtcttcatttttctcctttacaacttttataatttgtgtcctgtatatgcccttggacccttttataaattatttttgcttattgaggaatggtattttcggtttattgacattgaattgttttctaagtttttccatcacaagataggaatatcaagcatggtagtaaaaaaggattttttacaagtttctattatggcacatttgtttcctacaaattaaattgatcaaagtctcaaatattagtggaggaaaaagtgctggatttgtacttcaattgtacatcttctatgaatttatgaaggacctacctgctttatgtgattaccttgagtactgatgataaatactagacacagctgttgtccacatcagaaataacatgcctttcccaaagacattgttaatatttgtttagcataatccataaagaacgttgaagacttttaaactaatgtattcatcactaacagtgattgttcagtgaacaaaatagaccccagctccgtggtcgtctatgaggatggtattccttgtaagtgttctgtatgagcacgtctcatagggatggggaagttttttggaaagtcacttgagttttaaagaaactggacaattccatgaataatttgaggttttattcatattgctaatgtctacaattgttctaaagagtattttaaagtagtttttttcccccagctaatctttccctatgtatgcccccttttaggagatttctcaccattttgctttaacacaataattattggcctacttaatactccagtgccttgagatagttggacatattttaggaagattttattgtatttggaaaattacgacacattccatgcatggatcttttgtagttacgtgttttgattagtcctgtcactgtttttatttaaaatgcagtgtcagcaaaccgaaatgctcatttcttttttagtaacagagtactcgtatacttatcactgtatgcactcattgggtctaagggagatgtctgaagtccttcacttaaattattttatgatactactgttttctctatttttgaggttaaaattattttaaaaaaatattttgaagagaagtttattagtataagcattcatttaatgcaaaaaaactcagcccttggacatataaccatgtaattctatatgaacgtttagagtactacatggttgaccaatatctagttctttactaaaagtaaactcacctctttatatatatttcaaaactgaatttgaagcctattagagaccaactgaccttttagttgtaatgaactgtatggtcttgcatggtgacacacctgtgtaggaggccaagacttggcagaggatgtagtctaggtgtcctggtatatataaatggtcactcacttcgtttatatattccacactcagaaaagaagtcagagttttttctgagtaatacaaaaaccatcacttacataatttgtataagaaactttaaacagttttaatcaaaactatgagtaacatcaaaaatgctttaagattctatattttggaatacctgtgaagtagtatgactacatcatgttaaatatttattttcttctatgattttggagcagcaatttttattttaaataaaattccacttttaagaaattcagggaagatttggtcacattgaagatacagtatttttgtagtatttataaactgttctaaatgatagactatagaaaacatttttgtcatatgaaggtaaatcagtccattattttggatcatttaaactgaacattacaccttctgggctttgatttatgaagtggcacagaatctaactttgcactgaatatcttttcattcacatctcctctgccttagtcacaatggcaacagtacagaaaattctatcaaacctcagaatatagtagaaataattaagctgttgaatgagtcttaaaaattatactactgttaagtggaccaagtttggtgaagcagaatgtgacaaaggttgattaaggaaggaacaactcaaggacattgggaatgataacttttccacttgagaactactttatgttttactgtaatttttaaagtttttttgtcctttttgttattttgcaaaagaaaatagtatttacaggtggcttcttttaaaatataaaaatataaagcaggaatgtatatgaaatgtcagattttattgtatttgcagagtattagctttgaaattgaataaagaaagctgtttgtagttttaaaatgccttattggtatcaattagaaatttcttctattttttgatgtacttagagctttttgagtgtagaattttaaatggcaggattttacagtgtttacatgcaagtgcattttataagtgttctatatgtgtaaaatagtattttcaactggaaagtgttggctagtgcaaaaggcctggccattttctggttcccatgatgttgcctacactgctagactacagtttagtatcgctttgtatcatgaggccaagaaattccatgttgtttgtaaatagaataattgaaaaagcaataaacatttattgaacaaaag

SEQ ID NO: 6006 - protein, 319 aa, Homo sapiens; identical to SEQ ID NO: 807

SEQ ID NO: 6007 - DNA, 9338 bp, Homo sapiens
tgaactgaggcgaactccgccgccaagtgagtgaggaggaggaggaggagaaggaggaggaggaagaggaggagcgcagtcggagcgcggcggcagcggcagaggcgccgcggcggggaccagcccagagagaccccccgagcccgcggcacaggcggcggcggcgctgagcgggctcgaccagccgagcgagcggcggccccggctcctcctcgtccggcgccagcagcccgcgccccgcgcccgcactcggccagccgagacccgcctcccgcccgcccgccggcctcgtgagggacgcgccgagccgggcggccgagagcggcggcggctgggagcgcgtcgggcccgggcggaaagtgcctgcggggggcgggcgagcgcgcggtgccggccgccccggggctcggcgcgggagccagagcgggagccggcgcggagcgggacgccgggtcccgagcggcccgcggccggggctcgcccccgcccctccctcctctccggcggcggcggcggcggcggcgggcggagtgagctgcggagcctggaatatggtcggggaaatggaaacgaaggagaagccgaagcccaccccagattacctgatgcagctgatgaacgacaagaagctcatgagcagcctgcccaacttctgcgggatcttcaaccacctcgagcggctgctggacgaagaaattagcagagtacggaaagacatgtacaatgacacattaaatggcagtacagagaaaaggagtgcagaattgcctgatgctgtgggacctattgttcagttacaagagaaactttatgtgcctgtaaaagaatacccagattttaattttgttgggagaatccttggacctagaggacttacagccaaacaacttgaagcagaaaccggatgtaaaatcatggtccgaggcaaaggctcaatgagggataaaaaaaaggaggagcaaaatagaggcaagcccaattgggagcatctaaatgaagatttacatgtactaatcactgtggaagatgctcagaacagagcagaaatcaaattgaagagagcagttgaagaagtgaagaaattattggtacctgcagcagaaggagaagacagcctgaagaagatgcagctgatggagcttgcgattctgaatggcacctacagagatgccaacattaaatcaccagcccttgccttttctcttgcagcaacagcccaggctgctccaaggatcattactgggcctgcgccggttctcccaccagctgccctgcgtactcctacgccagctggccctaccataatgcctttgatcagacaaatacagaccgctgtcatgccaaacggaactcctcacccaactgctgcaatagttcctccagggcccgaagctggtttaatctatacaccctatgagtacccctacacattggcaccagctacatcaatccttgagtatcctattgaacctagtggtgtattaggtatggctttcccaacgaaaggctaagaattcaagaacggtcttaactgaaccctcatcagatctgaatttaacaaatgcttagtctcagcagcctccgggggaaaaaagcttagcctagcagtcagtgacttacttgcactttttgcacatagatataaagtaaaattatgttattaatttggtttagtctgtaatattacacagtaatggtaatttataaaggagtgtatagtagtatactgactgctaagtgtactatactgtttgctttactaatcacctaattcattgcagttcatacttattgactcagagtttaaaaccacaatctgtaggctttaagaattgcttttaaacctttttaagtgataaactcttgaagtggtcttaaggttagcaaataattgtctgtattaaacatggcgttatttaagtagtcctgctgcaagaaaggcacttcagtgaatatgtgactagtaaagcttaaatatgtttggatctaatagagctcatgaaatactgtaacttggggattgtaaatgaatggatacaataggttaaggcccaagatgtttgaaatgaatgcaatattaatagatgcatatatacatgacatattgtggttaattttaaaactactgtgccttaacgtgtttcttaaacttttgtagtaaatgaacatttgaaatccattttgataaacctgctgttaatgttttttccccccttgtgaatgttttctaactttgtcttggtaattgcaatttaactaggtgcggtggctactaaagttcgaaggcacgatatgcgtgtccatccttaccaaaggattgtgaccgcagaccgaggttagtttagttctgcagttcttgtctataagaaatgcgttgggtgtccataaaatttgcaacaccacacctgatggaaaaatgtaattgcttacctgcacacagttttttttccttttctaaatttgtttgtgatcattgacagatttaagggttgggttttttgttttggtttggttttttctcccttcatattttaacttattaaatcttctattattatgtactatgatttattcctactaaaacataaattagtcaatttggggagctattaaattttgatgttgcctcagttattttcattaataacttttgctaaaatttaccttttaaaagttctgaaatttggggttggtattgcaaaatgaattgaacggatggtgctttaatgagagaagtaaaggaatatatgcctcctgtgtacttttggagaaaactgaagatttagtttccatttttctttataataaaatatttgagccactgtataaacatgagggtgcacatgtcaagtacttagctaaaatcaacaaagtgaggactgtgaagataactttcatgtagttggatttttttatataaattagagcgtcaattcccttttattcttacattctcttgccaaaatggatcctttgatttttgtcatttgctgctaaaatatattatctgaaggtaaactgtctcttgaagttctgtggtggtatgagatccagctgtgtgaatataatttttgactaacctgtgactggaaaataagtcttcatttttctcctttacaacttttataatttgtgtcctgtatatgcccttggacccttttataaattatttttgcttattgaggaatggtattttcggtttattgacattgaattgttttctaagtttttccatcacaagataggaatatcaagcatggtagtaaaaaaggattttttacaagtttctattatggcacatttgtttcctacaaattaaattgatcaaagtctcaaatattagtggaggaaaaagtgctggatttgtacttcaattgtacatcttctatgaatttatgaaggacctacctgctttatgtgattaccttgagtactgatgataaatactagacacagctgttgtccacatcagaaataacatgcctttcccaaagacattgttaatatttgtttagcataatccataaagaacgttgaagacttttaaactaatgtattcatcactaacagtgattgttcagtgaacaaaatagaccccagctccgtggtcgtctatgaggatggtattccttgtaagtgttctgtatgagcacgtctcatagggatggggaagttttttggaaagtcacttgagttttaaagaaactggacaattccatgaataatttgaggttttattcatattgctaatgtctacaattgttctaaagagtattttaaagtagtttttttcccccagctaatctttccctatgtatgcccccttttaggagatttctcaccattttgctttaacacaataattattggcctacttaatactccagtgccttgagatagttggacatattttaggaagattttattgtatttggaaaattacgacacattccatgcatggatcttttgtagttacgtgttttgattagtcctgtcactgtttttatttaaaatgcagtgtcagcaaaccgaaatgctcatttcttttttagtaacagagtactcgtatacttatcactgtatgcactcattgggtctaagggagatgtctgaagtccttcacttaaattattttatgatactactgttttctctatttttgaggttaaaattattttaaaaaaatattttgaagagaagtttattagtataagcattcatttaatgcaaaaaaactcagcccttggacatataaccatgtaattctatatgaacgtttagagtactacatggttgaccaatatctagttctttactaaaagtaaactcacctctttatatatatttcaaaactgaatttgaagcctattagagaccaactgaccttttagttgtaatgaactgtatggtcttgcatggtgacacacctgtgtaggaggccaagacttggcagaggatgtagtctaggtgtcctggtatatataaatggtcactcacttcgtttatatattccacactcagaaaagaagtcagagttttttctgagtaatacaaaaaccatcacttacataatttgtataagaaactttaaacagttttaatcaaaactatgagtaacatcaaaaatgctttaagattctatattttggaatacctgtgaagtagtatgactacatcatgttaaatatttattttcttctatgattttggagcagcaatttttattttaaataaaattccacttttaagaaattcagggaagatttggtcacattgaagatacagtatttttgtagtatttataaactgttctaaatgatagactatagaaaacatttttgtcatatgaaggtaaatcagtccattattttggatcatttaaactgaacattacaccttctgggctttgatttatgaagtggcacagaatctaactttgcactgaatatcttttcattcacatctcctctgccttagtcacaatggcaacagtacagaaaattctatcaaacctcagaatatagtagaaataattaagctgttgaatgagtcttaaaaattatactactgttaagtggaccaagtttggtgaagcagaatgtgacaaaggttgattaaggaaggaacaactcaaggacattgggaatgataacttttccacttgagaactactttatgttttactgtaatttttaaagtttttttgtcctttttgttattttgcaaaagaaaatagtatttacaggtggcttcttttaaaatataaaaatataaagcaggaatgtatatgaaatgtcagattttattgtatttgcagagtattagctttgaaattgaataaagaaagctgtttgtagttttaaaatgccttattggtatcaattagaaatttcttctattttttgatgtacttagagctttttgagtgtagaattttaaatggcaggattttacagtgtttacatgcaagtgcattttataagtgttctatatgtgtaaaatagtattttcaactggaaagtgttggctagtgcaaaaggcctggccattttctggttcccatgatgttgcctacactgctagactacagtttagtatcgctttgtatcatgaggccaagaaattccatgttgtttgtaaatagaataattgaaaaagcaataaacatttattgaacaaaagaaaccttgtttggcccagagtttatgttgaaccaaatggttcatagaattttgaatttctttagattcatttctgttaatcatcagttattaataatcacatccatcattaatagttgctttaatgcttgcatcttagagaatactaatgcttaatagcagtcagatactgataactgcactgactgtttaaaaattctgtataccaaacctattcattgttgtttttcaatttccttcattgactgctactaactattagttgttagttgtattttatttctattttttcttgttaaccagttttttttttttttttgtgggagtgggctcttcttcatttgttcaaatcatgatacgaaattgtcatgattttaattgtattctgtagatggtgtcaatcagtttgtcagaattaaacatgcttttttttttattagttgtgattagtttttcatgttgtcattaagccgtcactagctgaaactaatctcttctctatcttttcttttcttttttttgttttgtttttttttgtttctaaccacccagccgccaccggcaactaacctatgaccttctgacctctgaactcttcacccaatgatgacctgaccatgcctgcctgctgatcagttaactggtaatcgcctttgcttgcctgtcgtcagtgcagcgagctgaggcacttgtccgttcgtcttaccatctaaccaaacaaaagacaaagaaattgttgtcctccaactcagctttttttttttttttttcctgtttgggtgaaagtggttctagaaactgcactgaatagtagtaaagcaataaggcccaattcatcccacagcactgatcatcttttaatatcccaccctaagcgaacggtaagaaggcctctcttaagaaggggagacagatggtccttaactactcaatgacagaggcagttactgtgagagacttctaggaatctttttcttctcatagcgaagtcaaagctctctctgaatgtactgtgtgatgatgcatcatgcatgaaccttcggtcagggatatcattggtgaagtgatttcaaaaagtattcaaaatttgatatgctgtttagtcactacagtgccctcaaagggcagaagttgcagccttttttatattgcctgccaaaatttgaagtattagaagaaagtgtgccatgagagaaaaacttaaggagttttgaaaagtaatgcaaataacaaaactgcaacactatttttaaaaagataaatatctgagttaaaattactgaatctttattttacacctaaaaaaatatgagaacaaggtacatgcattatgtgtcacattactgggcaaactgttcaagtatttttttttaaacctccctgtatagaaaaaaatcattaaggatgtaaaagccatgcttgcctatttgctgtatacatgtaatgaaattgtagataaagtgtagtgcattgaaacaaatgaacaaaaagtagatacttttactatacaagggtgctggtgcagaaaaaaatatatatatttttggaaatgtagcattttatactttcaagtgttataaaaaaaaagaaaaagaacaaagaaaccctttatttcattaaatgattttttctggtggttgtcaagaaacaaaagaccaaaagagcctttttgtctttcttttttattttttaagtattggaataagtctaaagaaaagaaagtgccttattttccttcatggtcattcagtcaagtgtctcataaagatcagctcctccctcagaatacaagttaatgcatgttactcagtcgcccagtatgtgaaagaagatatgagggagacaaatgagttgatagtttgaattataggatttttgccacgttaccttgatgcaaatttgccaaatctgatactgtgaaaagatttgataacttttctaatgcctgactagtaagttttaaaacatcattctttaaaagaatagtttaatacttttggttattccaatcttcaatgttaacccaaaggattctgagataaaaattatgtgtcatctaaacttcagtttacagacaaaattagagctttgttttatttggagaagggggatgcattcatttgattttgttttttgtttttaattaattgaatataataggatacctagcaaatgttttcacaaaagtgaatctttgtgattttcattctagaaaacaatgttttaaatcacccaaatttaatcacatgtctttatatcataccagataactggtgtagtgtatccttttactgtttcaataacctctgcctcccccaccccttaactttaaaagaatgtgaaaaactagcatcatagtgcatataaatactcaaccacatttcagcttaagcttctaatttctcaagaagttgaaacagttagttatgtagttgaagcaatttgtgtgcaaagcctacatctaaacacttgagtgaataatcattaactgctcagtaccagacgtggcaaatctcaagtgacagtggacccccccccccgcccagcttatcaactcgtcccctcttccacaccttcccagcatcacagtcagaggtcagcaggaagctgagtcattaccttcttggtgacctcccccaccatcttgtctcacttggaaaccgttgtcagtttatttactatgcaatagacattcattgttttgtatccagctagctttggtttaatatgccactgctttgtctttctgttacacatacagttttgatttatttacaatatatgctgtgccattttgatttttatattgtttggttggttgaataaatttgcgacactcaaacacttgaggtgatagttgttaaaaacaataccagtatttgatccagtttcatctcaactatgttatacctggacattttagatgtttatcaaaggtcttttatggggaagaaagtaaatgtatgaaataataaatgtgtgacatttatagggaatgttggctctgaacaaacttttgaaaacttggttgacaaaattttggatcaactgaaaaaagcatgacttttgaaatctctgaatgccttggttctcagtattatcattctttattgaatttatttcttattaaaatatgtagtttttaagactttttttctgacagtattatgtaattttttagcgtgggtagatgggagtgtcgcttgtatgttatcgtacagctgacatgtatttttgtctattctttattatcttagtttcatgctatgtatgtaccataaccaacctattgcctatgagaaacatgtaagataatgtatttacagccattgttacaagtttataatgtatttttctatcttgttttatatgtatgttatataacattcaaaaagaatttttttcttgattgagaaaaggatacaaaatgcaaaatccacaattttgataactgaaaattgccaattgttttgcagtactttattatattgggtgtcttgtcttttttgggcttttagttagctaatgaatgaatacattagacacttttgggttttagttgggattttacatagcttgcattttaattctttggttctttgctgtttctattaacccacagcattattttaataaatgttataataccaacctact

SEQ ID NO: 6008 - protein, 319 aa, Homo sapiens; identical to SEQ ID NO: 803

SEQ ID NO: 6009 - DNA, 10617 bp, Homo sapiens
tgaactgaggcgaactccgccgccaagtgagtgaggaggaggaggaggagaaggaggaggaggaagaggaggagcgcagtcggagcgcggcggcagcggcagaggcgccgcggcggggaccagcccagagagaccccccgagcccgcggcacaggcggcggcggcgctgagcgggctcgaccagccgagcgagcggcggccccggctcctcctcgtccggcgccagcagcccgcgccccgcgcccgcactcggccagccgagacccgcctcccgcccgcccgccggcctcgtgagggacgcgccgagccgggcggccgagagcggcggcggctgggagcgcgtcgggcccgggcggaaagtgcctgcggggggcgggcgagcgcgcggtgccggccgccccggggctcggcgcgggagccagagcgggagccggcgcggagcgggacgccgggtcccgagcggcccgcggccggggctcgcccccgcccctccctcctctccggcggcggcggcggcggcggcgggcggagtgagctgcggagcctggaatatggtcggggaaatggaaacgaaggagaagccgaagcccaccccagattacctgatgcagctgatgaacgacaagaagctcatgagcagcctgcccaacttctgcgggatcttcaaccacctcgagcggctgctggacgaagaaattagcagagtacggaaagacatgtacaatgacacattaaatggcagtacagagaaaaggagtgcagaattgcctgatgctgtgggacctattgttcagttacaagagaaactttatgtgcctgtaaaagaatacccagattttaattttgttgggagaatccttggacctagaggacttacagccaaacaacttgaagcagaaaccggatgtaaaatcatggtccgaggcaaaggctcaatgagggataaaaaaaaggaggagcaaaatagaggcaagcccaattgggagcatctaaatgaagatttacatgtactaatcactgtggaagatgctcagaacagagcagaaatcaaattgaagagagcagttgaagaagtgaagaaattattggtacctgcagcagaaggagaagacagcctgaagaagatgcagctgatggagcttgcgattctgaatggcacctacagagatgccaacattaaatcaccagcccttgccttttctcttgcagcaacagcccaggctgctccaaggatcattactgggcctgcgccggttctcccaccagctgccctgcgtactcctacgccagctggccctaccataatgcctttgatcagacaaatacagaccgctgtcatgccaaacggaactcctcacccaactgctgcaatagttcctccagggcccgaagctggtttaatctatacaccctatgagtacccctacacattggcaccagctacatcaatccttgagtatcctattgaacctagtggtgtattagagtggattgaaatgccagtcatgcctgatatttcagcccattgacttgctggatgaaggactagaatacagcagctgttataacacgaccagtcaatgtggaacaaactgtttctgtgcaacccctttgttttaccagacaaaatttgaatactttttttcctgaattgtatatgaccttggtgctgcatgcatgctgttgacttttaggactttgatcttttaaggttttttttccccagcattaatattgatttataaagatttgaaaatctttaatgaactggagaacactaagatttaaactcgaaaattcgttgttcaagtaaagaaagccatgatgctctgtatgttatctgtgtgtgtgcatgcactcaggtgccctttgtttcatgaacaaatacatttcattgtacatgttttctgtttaaatcattgtataaagtaattgcaggtcagaattataccacagaactgtttatgagaggcttgtgtctgttgcacatttcttgaagcatttttaaaataacatgtaacctgtaaccttgttgtttaagttttcttttctattaatactctgtcctgtggtcccgtgcatgctccttttcccagaactcctctctgctgcacccacagcatctgttcccgaggagttatgactcttgacttcctgcagggctggggctcttagccaccagctgctgttccagcactttcagcgcaagatctccctgattttgccacgtggaattgtacttgtatatgattaccttatctaaaatgaataagaggtgatggaccagtttactgcttagaaatagcaagaggcactgcagtaaaacttgtttctcattgtaaagcttcatgtcttttgtttgttggaaaatttttacttatagaaacttaattattagactggtaaaataaagaccaaaatatgcagatttctaattggcattcataaggtgaataataataagtgcccaatgaaaaaatctattatggttaatttcatttcttgctttgccacctaagcagtaaaacatgatattgaccacttggagaactcagaaaattattttaaatttctaagttataataaatttgcacacagataacatgcatgctatttatgtcacatctcacattaaattattttaaaataagcagtgcccttcaaaacagatgcagacatgtgtgttggtagtagtgaggagattggtattagcatcaagtcttcattgatgactaatttttaattcccttccttttatctttaggtatggctttcccaacgaaaggctaagaattcaagaacggtcttaactgaaccctcatcagatctgaatttaacaaatgcttagtctcagcagcctccgggggaaaaaagcttagcctagcagtcagtgacttacttgcactttttgcacatagatataaagtaaaattatgttattaatttggtttagtctgtaatattacacagtaatggtaatttataaaggagtgtatagtagtatactgactgctaagtgtactatactgtttgctttactaatcacctaattcattgcagttcatacttattgactcagagtttaaaaccacaatctgtaggctttaagaattgcttttaaacctttttaagtgataaactcttgaagtggtcttaaggttagcaaataattgtctgtattaaacatggcgttatttaagtagtcctgctgcaagaaaggcacttcagtgaatatgtgactagtaaagcttaaatatgtttggatctaatagagctcatgaaatactgtaacttggggattgtaaatgaatggatacaataggttaaggcccaagatgtttgaaatgaatgcaatattaatagatgcatatatacatgacatattgtggttaattttaaaactactgtgccttaacgtgtttcttaaacttttgtagtaaatgaacatttgaaatccattttgataaacctgctgttaatgttttttccccccttgtgaatgttttctaactttgtcttggtaattgcaatttaactaggtgcggtggctactaaagttcgaaggcacgatatgcgtgtccatccttaccaaaggattgtgaccgcagaccgaggttagtttagttctgcagttcttgtctataagaaatgcgttgggtgtccataaaatttgcaacaccacacctgatggaaaaatgtaattgcttacctgcacacagttttttttccttttctaaatttgtttgtgatcattgacagatttaagggttgggttttttgttttggtttggttttttctcccttcatattttaacttattaaatcttctattattatgtactatgatttattcctactaaaacataaattagtcaatttggggagctattaaattttgatgttgcctcagttattttcattaataacttttgctaaaatttaccttttaaaagttctgaaatttggggttggtattgcaaaatgaattgaacggatggtgctttaatgagagaagtaaaggaatatatgcctcctgtgtacttttggagaaaactgaagatttagtttccatttttctttataataaaatatttgagccactgtataaacatgagggtgcacatgtcaagtacttagctaaaatcaacaaagtgaggactgtgaagataactttcatgtagttggatttttttatataaattagagcgtcaattcccttttattcttacattctcttgccaaaatggatcctttgatttttgtcatttgctgctaaaatatattatctgaaggtaaactgtctcttgaagttctgtggtggtatgagatccagctgtgtgaatataatttttgactaacctgtgactggaaaataagtcttcatttttctcctttacaacttttataatttgtgtcctgtatatgcccttggacccttttataaattatttttgcttattgaggaatggtattttcggtttattgacattgaattgttttctaagtttttccatcacaagataggaatatcaagcatggtagtaaaaaaggattttttacaagtttctattatggcacatttgtttcctacaaattaaattgatcaaagtctcaaatattagtggaggaaaaagtgctggatttgtacttcaattgtacatcttctatgaatttatgaaggacctacctgctttatgtgattaccttgagtactgatgataaatactagacacagctgttgtccacatcagaaataacatgcctttcccaaagacattgttaatatttgtttagcataatccataaagaacgttgaagacttttaaactaatgtattcatcactaacagtgattgttcagtgaacaaaatagaccccagctccgtggtcgtctatgaggatggtattccttgtaagtgttctgtatgagcacgtctcatagggatggggaagttttttggaaagtcacttgagttttaaagaaactggacaattccatgaataatttgaggttttattcatattgctaatgtctacaattgttctaaagagtattttaaagtagtttttttcccccagctaatctttccctatgtatgcccccttttaggagatttctcaccattttgctttaacacaataattattggcctacttaatactccagtgccttgagatagttggacatattttaggaagattttattgtatttggaaaattacgacacattccatgcatggatcttttgtagttacgtgttttgattagtcctgtcactgtttttatttaaaatgcagtgtcagcaaaccgaaatgctcatttcttttttagtaacagagtactcgtatacttatcactgtatgcactcattgggtctaagggagatgtctgaagtccttcacttaaattattttatgatactactgttttctctatttttgaggttaaaattattttaaaaaaatattttgaagagaagtttattagtataagcattcatttaatgcaaaaaaactcagcccttggacatataaccatgtaattctatatgaacgtttagagtactacatggttgaccaatatctagttctttactaaaagtaaactcacctctttatatatatttcaaaactgaatttgaagcctattagagaccaactgaccttttagttgtaatgaactgtatggtcttgcatggtgacacacctgtgtaggaggccaagacttggcagaggatgtagtctaggtgtcctggtatatataaatggtcactcacttcgtttatatattccacactcagaaaagaagtcagagttttttctgagtaatacaaaaaccatcacttacataatttgtataagaaactttaaacagttttaatcaaaactatgagtaacatcaaaaatgctttaagattctatattttggaatacctgtgaagtagtatgactacatcatgttaaatatttattttcttctatgattttggagcagcaatttttattttaaataaaattccacttttaagaaattcagggaagatttggtcacattgaagatacagtatttttgtagtatttataaactgttctaaatgatagactatagaaaacatttttgtcatatgaaggtaaatcagtccattattttggatcatttaaactgaacattacaccttctgggctttgatttatgaagtggcacagaatctaactttgcactgaatatcttttcattcacatctcctctgccttagtcacaatggcaacagtacagaaaattctatcaaacctcagaatatagtagaaataattaagctgttgaatgagtcttaaaaattatactactgttaagtggaccaagtttggtgaagcagaatgtgacaaaggttgattaaggaaggaacaactcaaggacattgggaatgataacttttccacttgagaactactttatgttttactgtaatttttaaagtttttttgtcctttttgttattttgcaaaagaaaatagtatttacaggtggcttcttttaaaatataaaaatataaagcaggaatgtatatgaaatgtcagattttattgtatttgcagagtattagctttgaaattgaataaagaaagctgtttgtagttttaaaatgccttattggtatcaattagaaatttcttctattttttgatgtacttagagctttttgagtgtagaattttaaatggcaggattttacagtgtttacatgcaagtgcattttataagtgttctatatgtgtaaaatagtattttcaactggaaagtgttggctagtgcaaaaggcctggccattttctggttcccatgatgttgcctacactgctagactacagtttagtatcgctttgtatcatgaggccaagaaattccatgttgtttgtaaatagaataattgaaaaagcaataaacatttattgaacaaaagaaaccttgtttggcccagagtttatgttgaaccaaatggttcatagaattttgaatttctttagattcatttctgttaatcatcagttattaataatcacatccatcattaatagttgctttaatgcttgcatcttagagaatactaatgcttaatagcagtcagatactgataactgcactgactgtttaaaaattctgtataccaaacctattcattgttgtttttcaatttccttcattgactgctactaactattagttgttagttgtattttatttctattttttcttgttaaccagttttttttttttttttgtgggagtgggctcttcttcatttgttcaaatcatgatacgaaattgtcatgattttaattgtattctgtagatggtgtcaatcagtttgtcagaattaaacatgcttttttttttattagttgtgattagtttttcatgttgtcattaagccgtcactagctgaaactaatctcttctctatcttttcttttcttttttttgttttgtttttttttgtttctaaccacccagccgccaccggcaactaacctatgaccttctgacctctgaactcttcacccaatgatgacctgaccatgcctgcctgctgatcagttaactggtaatcgcctttgcttgcctgtcgtcagtgcagcgagctgaggcacttgtccgttcgtcttaccatctaaccaaacaaaagacaaagaaattgttgtcctccaactcagctttttttttttttttttcctgtttgggtgaaagtggttctagaaactgcactgaatagtagtaaagcaataaggcccaattcatcccacagcactgatcatcttttaatatcccaccctaagcgaacggtaagaaggcctctcttaagaaggggagacagatggtccttaactactcaatgacagaggcagttactgtgagagacttctaggaatctttttcttctcatagcgaagtcaaagctctctctgaatgtactgtgtgatgatgcatcatgcatgaaccttcggtcagggatatcattggtgaagtgatttcaaaaagtattcaaaatttgatatgctgtttagtcactacagtgccctcaaagggcagaagttgcagccttttttatattgcctgccaaaatttgaagtattagaagaaagtgtgccatgagagaaaaacttaaggagttttgaaaagtaatgcaaataacaaaactgcaacactatttttaaaaagataaatatctgagttaaaattactgaatctttattttacacctaaaaaaatatgagaacaaggtacatgcattatgtgtcacattactgggcaaactgttcaagtatttttttttaaacctccctgtatagaaaaaaatcattaaggatgtaaaagccatgcttgcctatttgctgtatacatgtaatgaaattgtagataaagtgtagtgcattgaaacaaatgaacaaaaagtagatacttttactatacaagggtgctggtgcagaaaaaaatatatatatttttggaaatgtagcattttatactttcaagtgttataaaaaaaaagaaaaagaacaaagaaaccctttatttcattaaatgattttttctggtggttgtcaagaaacaaaagaccaaaagagcctttttgtctttcttttttattttttaagtattggaataagtctaaagaaaagaaagtgccttattttccttcatggtcattcagtcaagtgtctcataaagatcagctcctccctcagaatacaagttaatgcatgttactcagtcgcccagtatgtgaaagaagatatgagggagacaaatgagttgatagtttgaattataggatttttgccacgttaccttgatgcaaatttgccaaatctgatactgtgaaaagatttgataacttttctaatgcctgactagtaagttttaaaacatcattctttaaaagaatagtttaatacttttggttattccaatcttcaatgttaacccaaaggattctgagataaaaattatgtgtcatctaaacttcagtttacagacaaaattagagctttgttttatttggagaagggggatgcattcatttgattttgttttttgtttttaattaattgaatataataggatacctagcaaatgttttcacaaaagtgaatctttgtgattttcattctagaaaacaatgttttaaatcacccaaatttaatcacatgtctttatatcataccagataactggtgtagtgtatccttttactgtttcaataacctctgcctcccccaccccttaactttaaaagaatgtgaaaaactagcatcatagtgcatataaatactcaaccacatttcagcttaagcttctaatttctcaagaagttgaaacagttagttatgtagttgaagcaatttgtgtgcaaagcctacatctaaacacttgagtgaataatcattaactgctcagtaccagacgtggcaaatctcaagtgacagtggacccccccccccgcccagcttatcaactcgtcccctcttccacaccttcccagcatcacagtcagaggtcagcaggaagctgagtcattaccttcttggtgacctcccccaccatcttgtctcacttggaaaccgttgtcagtttatttactatgcaatagacattcattgttttgtatccagctagctttggtttaatatgccactgctttgtctttctgttacacatacagttttgatttatttacaatatatgctgtgccattttgatttttatattgtttggttggttgaataaatttgcgacactcaaacacttgaggtgatagttgttaaaaacaataccagtatttgatccagtttcatctcaactatgttatacctggacattttagatgtttatcaaaggtcttttatggggaagaaagtaaatgtatgaaataataaatgtgtgacatttatagggaatgttggctctgaacaaacttttgaaaacttggttgacaaaattttggatcaactgaaaaaagcatgacttttgaaatctctgaatgccttggttctcagtattatcattctttattgaatttatttcttattaaaatatgtagtttttaagactttttttctgacagtattatgtaattttttagcgtgggtagatgggagtgtcgcttgtatgttatcgtacagctgacatgtatttttgtctattctttattatcttagtttcatgctatgtatgtaccataaccaacctattgcctatgagaaacatgtaagataatgtatttacagccattgttacaagtttataatgtatttttctatcttgttttatatgtatgttatataacattcaaaaagaatttttttcttgattgagaaaaggatacaaaatgcaaaatccacaattttgataactgaaaattgccaattgttttgcagtactttattatattgggtgtcttgtcttttttgggcttttagttagctaatgaatgaatacattagacacttttgggttttagttgggattttacatagcttgcattttaattctttggttctttgctgtttctattaacccacagcattattttaataaatgttataataccaacctact

SEQ ID NO: 6010 - protein, 325 aa, Homo sapiens; identical to SEQ ID NO: 805

SEQ ID NO: 6011 - DNA, 4665 bp, Homo sapiens
tgaactgaggcgaactccgccgccaagtgagtgaggaggaggaggaggagaaggaggaggaggaagaggaggagcgcagtcggagcgcggcggcagcggcagaggcgccgcggcggggaccagcccagagagaccccccgagcccgcggcacaggcggcggcggcgctgagcgggctcgaccagccgagcgagcggcggccccggctcctcctcgtccggcgccagcagcccgcgccccgcgcccgcactcggccagccgagacccgcctcccgcccgcccgccggcctcgtgagggacgcgccgagccgggcggccgagagcggcggcggctgggagcgcgtcgggcccgggcggaaagtgcctgcggggggcgggcgagcgcgcggtgccggccgccccggggctcggcgcgggagccagagcgggagccggcgcggagcgggacgccgggtcccgagcggcccgcggccggggctcgcccccgcccctccctcctctccggcggcggcggcggcggcggcgggcggagtgagctgcggagcctggaatatggtcggggaaatggaaacgaaggagaagccgaagcccaccccagattacctgatgcagctgatgaacgacaagaagctcatgagcagcctgcccaacttctgcgggatcttcaaccacctcgagcggctgctggacgaagaaattagcagagtacggaaagacatgtacaatgacacattaaatggcagtacagagaaaaggagtgcagaattgcctgatgctgtgggacctattgttcagttacaagagaaactttatgtgcctgtaaaagaatacccagattttaattttgttgggagaatccttggacctagaggacttacagccaaacaacttgaagcagaaaccggatgtaaaatcatggtccgaggcaaaggctcaatgagggataaaaaaaaggaggagcaaaatagaggcaagcccaattgggagcatctaaatgaagatttacatgtactaatcactgtggaagatgctcagaacagagcagaaatcaaattgaagagagcagttgaagaagtgaagaaattattggtacctgcagcagaaggagaagacagcctgaagaagatgcagctgatggagcttgcgattctgaatggcacctacagagatgccaacattaaatcaccagcccttgccttttctcttgcagcaacagcccaggctgctccaaggatcattactgggcctgcgccggttctcccaccagctgccctgcgtactcctacgccagctggccctaccataatgcctttgatcagacaaatacagaccgctgtcatgccaaacggaactcctcacccaactgctgcaatagttcctccagggcccgaagctggtttaatctatacaccctatgagtacccctacacattggcaccagctacatcaatccttgagtatcctattgaacctagtggtgtattaggtgcggtggctactaaagttcgaaggcacgatatgcgtgtccatccttaccaaaggattgtgaccgcagaccgagccgccaccggcaactaacctatgaccttctgacctctgaactcttcacccaatgatgacctgaccatgcctgcctgctgatcagttaactggtaatcgcctttgcttgcctgtcgtcagtgcagcgagctgaggcacttgtccgttcgtcttaccatctaaccaaacaaaagacaaagaaattgttgtcctccaactcagctttttttttttttttttcctgtttgggtgaaagtggttctagaaactgcactgaatagtagtaaagcaataaggcccaattcatcccacagcactgatcatcttttaatatcccaccctaagcgaacggtaagaaggcctctcttaagaaggggagacagatggtccttaactactcaatgacagaggcagttactgtgagagacttctaggaatctttttcttctcatagcgaagtcaaagctctctctgaatgtactgtgtgatgatgcatcatgcatgaaccttcggtcagggatatcattggtgaagtgatttcaaaaagtattcaaaatttgatatgctgtttagtcactacagtgccctcaaagggcagaagttgcagccttttttatattgcctgccaaaatttgaagtattagaagaaagtgtgccatgagagaaaaacttaaggagttttgaaaagtaatgcaaataacaaaactgcaacactatttttaaaaagataaatatctgagttaaaattactgaatctttattttacacctaaaaaaatatgagaacaaggtacatgcattatgtgtcacattactgggcaaactgttcaagtatttttttttaaacctccctgtatagaaaaaaatcattaaggatgtaaaagccatgcttgcctatttgctgtatacatgtaatgaaattgtagataaagtgtagtgcattgaaacaaatgaacaaaaagtagatacttttactatacaagggtgctggtgcagaaaaaaatatatatatttttggaaatgtagcattttatactttcaagtgttataaaaaaaaagaaaaagaacaaagaaaccctttatttcattaaatgattttttctggtggttgtcaagaaacaaaagaccaaaagagcctttttgtctttcttttttattttttaagtattggaataagtctaaagaaaagaaagtgccttattttccttcatggtcattcagtcaagtgtctcataaagatcagctcctccctcagaatacaagttaatgcatgttactcagtcgcccagtatgtgaaagaagatatgagggagacaaatgagttgatagtttgaattataggatttttgccacgttaccttgatgcaaatttgccaaatctgatactgtgaaaagatttgataacttttctaatgcctgactagtaagttttaaaacatcattctttaaaagaatagtttaatacttttggttattccaatcttcaatgttaacccaaaggattctgagataaaaattatgtgtcatctaaacttcagtttacagacaaaattagagctttgttttatttggagaagggggatgcattcatttgattttgttttttgtttttaattaattgaatataataggatacctagcaaatgttttcacaaaagtgaatctttgtgattttcattctagaaaacaatgttttaaatcacccaaatttaatcacatgtctttatatcataccagataactggtgtagtgtatccttttactgtttcaataacctctgcctcccccaccccttaactttaaaagaatgtgaaaaactagcatcatagtgcatataaatactcaaccacatttcagcttaagcttctaatttctcaagaagttgaaacagttagttatgtagttgaagcaatttgtgtgcaaagcctacatctaaacacttgagtgaataatcattaactgctcagtaccagacgtggcaaatctcaagtgacagtggacccccccccccgcccagcttatcaactcgtcccctcttccacaccttcccagcatcacagtcagaggtcagcaggaagctgagtcattaccttcttggtgacctcccccaccatcttgtctcacttggaaaccgttgtcagtttatttactatgcaatagacattcattgttttgtatccagctagctttggtttaatatgccactgctttgtctttctgttacacatacagttttgatttatttacaatatatgctgtgccattttgatttttatattgtttggttggttgaataaatttgcgacactcaaacacttgaggtgatagttgttaaaaacaataccagtatttgatccagtttcatctcaactatgttatacctggacattttagatgtttatcaaaggtcttttatggggaagaaagtaaatgtatgaaataataaatgtgtgacatttatagggaatgttggctctgaacaaacttttgaaaacttggttgacaaaattttggatcaactgaaaaaagcatgacttttgaaatctctgaatgccttggttctcagtattatcattctttattgaatttatttcttattaaaatatgtagtttttaagactttttttctgacagtattatgtaattttttagcgtgggtagatgggagtgtcgcttgtatgttatcgtacagctgacatgtatttttgtctattctttattatcttagtttcatgctatgtatgtaccataaccaacctattgcctatgagaaacatgtaagataatgtatttacagccattgttacaagtttataatgtatttttctatcttgttttatatgtatgttatataacattcaaaaagaatttttttcttgattgagaaaaggatacaaaatgcaaaatccacaattttgataactgaaaattgccaattgttttgcagtactttattatattgggtgtcttgtcttttttgggcttttagttagctaatgaatgaatacattagacacttttgggttttagttgggattttacatagcttgcattttaattctttggttctttgctgtttctattaacccacagcattattttaataaatgttataataccaacctact

SEQ ID NO: 6012 - protein, 341 aa, Homo sapiens; identical to SEQ ID NO: 801

SEQ ID NO: 6013 - DNA, 11564 bp, Homo sapiens
tgaactgaggcgaactccgccgccaagtgagtgaggaggaggaggaggagaaggaggaggaggaagaggaggagcgcagtcggagcgcggcggcagcggcagaggcgccgcggcggggaccagcccagagagaccccccgagcccgcggcacaggcggcggcggcgctgagcgggctcgaccagccgagcgagcggcggccccggctcctcctcgtccggcgccagcagcccgcgccccgcgcccgcactcggccagccgagacccgcctcccgcccgcccgccggcctcgtgagggacgcgccgagccgggcggccgagagcggcggcggctgggagcgcgtcgggcccgggcggaaagtgcctgcggggggcgggcgagcgcgcggtgccggccgccccggggctcggcgcgggagccagagcgggagccggcgcggagcgggacgccgggtcccgagcggcccgcggccggggctcgcccccgcccctccctcctctccggcggcggcggcggcggcggcgggcggagtgagctgcggagcctggaatatggtcggggaaatggaaacgaaggagaagccgaagcccaccccagattacctgatgcagctgatgaacgacaagaagctcatgagcagcctgcccaacttctgcgggatcttcaaccacctcgagcggctgctggacgaagaaattagcagagtacggaaagacatgtacaatgacacattaaatggcagtacagagaaaaggagtgcagaattgcctgatgctgtgggacctattgttcagttacaagagaaactttatgtgcctgtaaaagaatacccagattttaattttgttgggagaatccttggacctagaggacttacagccaaacaacttgaagcagaaaccggatgtaaaatcatggtccgaggcaaaggctcaatgagggataaaaaaaaggaggagcaaaatagaggcaagcccaattgggagcatctaaatgaagatttacatgtactaatcactgtggaagatgctcagaacagagcagaaatcaaattgaagagagcagttgaagaagtgaagaaattattggtacctgcagcagaaggagaagacagcctgaagaagatgcagctgatggagcttgcgattctgaatggcacctacagagatgccaacattaaatcaccagcccttgccttttctcttgcagcaacagcccaggctgctccaaggatcattactgggcctgcgccggttctcccaccagctgccctgcgtactcctacgccagctggccctaccataatgcctttgatcagacaaatacagaccgctgtcatgccaaacggaactcctcacccaactgctgcaatagttcctccagggcccgaagctggtttaatctatacaccctatgagtacccctacacattggcaccagctacatcaatccttgagtatcctattgaacctagtggtgtattaggtaagttcttctccccatggggttaacaacattctctttataaatatttttgctccctcagattttgaaatgattttatcagttttagagaggcaagacaagtttgcattagggaagaccgaaaactaaattttgttttatttcagcctctcataagggttcccctttgaaataattgcaccttaaatttattcagatccactttggtaactgaggttcagtttggttgggtaaatctgttgtgtacatttcaacaaatacttttacatttgacattactgaggtcattctgagttttaggtcccaccccattggcccgtcacctccatcagctccacttctcaaactttatttgagatttattttatctcacaggtttgtgtaattgttggaaaatttttaaacttctaagtgaaagtagtctgagcgctttataaaattcatattattgtgtgtgttttgtaatatttgcgatcacttaaaatatcagataaatacagtcatgcatcgcttaacaacggggatacagtctaagaattgccttgtctggcagtttcatcatttggtgtacatcatagagtgtacttacacagacatagatgatatcgtttactacacacctaggctgtgtggtatagccattataatcttatgggaccacatagtataagtggtccgttgttgaccaaaatgttgttatgcaggcatgactgtagttgtattcttaagatttttcagttcttgtgttttggagtcctagtcatattaaacatgagagatactcttaatttcagtagtacagtatggaatagttaaataaatagcaaatcactgaattcagaatctcacttaaggcagaaattaaaatcataatataaacgcttggttttacatgaacaaaaagtggtgtgctcgaaaaagacattactgatgccttttttttatagagtggattgaaatgccagtcatgcctgatatttcagcccattgacttgctggatgaaggactagaatacagcagctgttataacacgaccagtcaatgtggaacaaactgtttctgtgcaacccctttgttttaccagacaaaatttgaatactttttttcctgaattgtatatgaccttggtgctgcatgcatgctgttgacttttaggactttgatcttttaaggttttttttccccagcattaatattgatttataaagatttgaaaatctttaatgaactggagaacactaagatttaaactcgaaaattcgttgttcaagtaaagaaagccatgatgctctgtatgttatctgtgtgtgtgcatgcactcaggtgccctttgtttcatgaacaaatacatttcattgtacatgttttctgtttaaatcattgtataaagtaattgcaggtcagaattataccacagaactgtttatgagaggcttgtgtctgttgcacatttcttgaagcatttttaaaataacatgtaacctgtaaccttgttgtttaagttttcttttctattaatactctgtcctgtggtcccgtgcatgctccttttcccagaactcctctctgctgcacccacagcatctgttcccgaggagttatgactcttgacttcctgcagggctggggctcttagccaccagctgctgttccagcactttcagcgcaagatctccctgattttgccacgtggaattgtacttgtatatgattaccttatctaaaatgaataagaggtgatggaccagtttactgcttagaaatagcaagaggcactgcagtaaaacttgtttctcattgtaaagcttcatgtcttttgtttgttggaaaatttttacttatagaaacttaattattagactggtaaaataaagaccaaaatatgcagatttctaattggcattcataaggtgaataataataagtgcccaatgaaaaaatctattatggttaatttcatttcttgctttgccacctaagcagtaaaacatgatattgaccacttggagaactcagaaaattattttaaatttctaagttataataaatttgcacacagataacatgcatgctatttatgtcacatctcacattaaattattttaaaataagcagtgcccttcaaaacagatgcagacatgtgtgttggtagtagtgaggagattggtattagcatcaagtcttcattgatgactaatttttaattcccttccttttatctttaggtatggctttcccaacgaaaggctaagaattcaagaacggtcttaactgaaccctcatcagatctgaatttaacaaatgcttagtctcagcagcctccgggggaaaaaagcttagcctagcagtcagtgacttacttgcactttttgcacatagatataaagtaaaattatgttattaatttggtttagtctgtaatattacacagtaatggtaatttataaaggagtgtatagtagtatactgactgctaagtgtactatactgtttgctttactaatcacctaattcattgcagttcatacttattgactcagagtttaaaaccacaatctgtaggctttaagaattgcttttaaacctttttaagtgataaactcttgaagtggtcttaaggttagcaaataattgtctgtattaaacatggcgttatttaagtagtcctgctgcaagaaaggcacttcagtgaatatgtgactagtaaagcttaaatatgtttggatctaatagagctcatgaaatactgtaacttggggattgtaaatgaatggatacaataggttaaggcccaagatgtttgaaatgaatgcaatattaatagatgcatatatacatgacatattgtggttaattttaaaactactgtgccttaacgtgtttcttaaacttttgtagtaaatgaacatttgaaatccattttgataaacctgctgttaatgttttttccccccttgtgaatgttttctaactttgtcttggtaattgcaatttaactaggtgcggtggctactaaagttcgaaggcacgatatgcgtgtccatccttaccaaaggattgtgaccgcagaccgaggttagtttagttctgcagttcttgtctataagaaatgcgttgggtgtccataaaatttgcaacaccacacctgatggaaaaatgtaattgcttacctgcacacagttttttttccttttctaaatttgtttgtgatcattgacagatttaagggttgggttttttgttttggtttggttttttctcccttcatattttaacttattaaatcttctattattatgtactatgatttattcctactaaaacataaattagtcaatttggggagctattaaattttgatgttgcctcagttattttcattaataacttttgctaaaatttaccttttaaaagttctgaaatttggggttggtattgcaaaatgaattgaacggatggtgctttaatgagagaagtaaaggaatatatgcctcctgtgtacttttggagaaaactgaagatttagtttccatttttctttataataaaatatttgagccactgtataaacatgagggtgcacatgtcaagtacttagctaaaatcaacaaagtgaggactgtgaagataactttcatgtagttggatttttttatataaattagagcgtcaattcccttttattcttacattctcttgccaaaatggatcctttgatttttgtcatttgctgctaaaatatattatctgaaggtaaactgtctcttgaagttctgtggtggtatgagatccagctgtgtgaatataatttttgactaacctgtgactggaaaataagtcttcatttttctcctttacaacttttataatttgtgtcctgtatatgcccttggacccttttataaattatttttgcttattgaggaatggtattttcggtttattgacattgaattgttttctaagtttttccatcacaagataggaatatcaagcatggtagtaaaaaaggattttttacaagtttctattatggcacatttgtttcctacaaattaaattgatcaaagtctcaaatattagtggaggaaaaagtgctggatttgtacttcaattgtacatcttctatgaatttatgaaggacctacctgctttatgtgattaccttgagtactgatgataaatactagacacagctgttgtccacatcagaaataacatgcctttcccaaagacattgttaatatttgtttagcataatccataaagaacgttgaagacttttaaactaatgtattcatcactaacagtgattgttcagtgaacaaaatagaccccagctccgtggtcgtctatgaggatggtattccttgtaagtgttctgtatgagcacgtctcatagggatggggaagttttttggaaagtcacttgagttttaaagaaactggacaattccatgaataatttgaggttttattcatattgctaatgtctacaattgttctaaagagtattttaaagtagtttttttcccccagctaatctttccctatgtatgcccccttttaggagatttctcaccattttgctttaacacaataattattggcctacttaatactccagtgccttgagatagttggacatattttaggaagattttattgtatttggaaaattacgacacattccatgcatggatcttttgtagttacgtgttttgattagtcctgtcactgtttttatttaaaatgcagtgtcagcaaaccgaaatgctcatttcttttttagtaacagagtactcgtatacttatcactgtatgcactcattgggtctaagggagatgtctgaagtccttcacttaaattattttatgatactactgttttctctatttttgaggttaaaattattttaaaaaaatattttgaagagaagtttattagtataagcattcatttaatgcaaaaaaactcagcccttggacatataaccatgtaattctatatgaacgtttagagtactacatggttgaccaatatctagttctttactaaaagtaaactcacctctttatatatatttcaaaactgaatttgaagcctattagagaccaactgaccttttagttgtaatgaactgtatggtcttgcatggtgacacacctgtgtaggaggccaagacttggcagaggatgtagtctaggtgtcctggtatatataaatggtcactcacttcgtttatatattccacactcagaaaagaagtcagagttttttctgagtaatacaaaaaccatcacttacataatttgtataagaaactttaaacagttttaatcaaaactatgagtaacatcaaaaatgctttaagattctatattttggaatacctgtgaagtagtatgactacatcatgttaaatatttattttcttctatgattttggagcagcaatttttattttaaataaaattccacttttaagaaattcagggaagatttggtcacattgaagatacagtatttttgtagtatttataaactgttctaaatgatagactatagaaaacatttttgtcatatgaaggtaaatcagtccattattttggatcatttaaactgaacattacaccttctgggctttgatttatgaagtggcacagaatctaactttgcactgaatatcttttcattcacatctcctctgccttagtcacaatggcaacagtacagaaaattctatcaaacctcagaatatagtagaaataattaagctgttgaatgagtcttaaaaattatactactgttaagtggaccaagtttggtgaagcagaatgtgacaaaggttgattaaggaaggaacaactcaaggacattgggaatgataacttttccacttgagaactactttatgttttactgtaatttttaaagtttttttgtcctttttgttattttgcaaaagaaaatagtatttacaggtggcttcttttaaaatataaaaatataaagcaggaatgtatatgaaatgtcagattttattgtatttgcagagtattagctttgaaattgaataaagaaagctgtttgtagttttaaaatgccttattggtatcaattagaaatttcttctattttttgatgtacttagagctttttgagtgtagaattttaaatggcaggattttacagtgtttacatgcaagtgcattttataagtgttctatatgtgtaaaatagtattttcaactggaaagtgttggctagtgcaaaaggcctggccattttctggttcccatgatgttgcctacactgctagactacagtttagtatcgctttgtatcatgaggccaagaaattccatgttgtttgtaaatagaataattgaaaaagcaataaacatttattgaacaaaagaaaccttgtttggcccagagtttatgttgaaccaaatggttcatagaattttgaatttctttagattcatttctgttaatcatcagttattaataatcacatccatcattaatagttgctttaatgcttgcatcttagagaatactaatgcttaatagcagtcagatactgataactgcactgactgtttaaaaattctgtataccaaacctattcattgttgtttttcaatttccttcattgactgctactaactattagttgttagttgtattttatttctattttttcttgttaaccagttttttttttttttttgtgggagtgggctcttcttcatttgttcaaatcatgatacgaaattgtcatgattttaattgtattctgtagatggtgtcaatcagtttgtcagaattaaacatgcttttttttttattagttgtgattagtttttcatgttgtcattaagccgtcactagctgaaactaatctcttctctatcttttcttttcttttttttgttttgtttttttttgtttctaaccacccagccgccaccggcaactaacctatgaccttctgacctctgaactcttcacccaatgatgacctgaccatgcctgcctgctgatcagttaactggtaatcgcctttgcttgcctgtcgtcagtgcagcgagctgaggcacttgtccgttcgtcttaccatctaaccaaacaaaagacaaagaaattgttgtcctccaactcagctttttttttttttttttcctgtttgggtgaaagtggttctagaaactgcactgaatagtagtaaagcaataaggcccaattcatcccacagcactgatcatcttttaatatcccaccctaagcgaacggtaagaaggcctctcttaagaaggggagacagatggtccttaactactcaatgacagaggcagttactgtgagagacttctaggaatctttttcttctcatagcgaagtcaaagctctctctgaatgtactgtgtgatgatgcatcatgcatgaaccttcggtcagggatatcattggtgaagtgatttcaaaaagtattcaaaatttgatatgctgtttagtcactacagtgccctcaaagggcagaagttgcagccttttttatattgcctgccaaaatttgaagtattagaagaaagtgtgccatgagagaaaaacttaaggagttttgaaaagtaatgcaaataacaaaactgcaacactatttttaaaaagataaatatctgagttaaaattactgaatctttattttacacctaaaaaaatatgagaacaaggtacatgcattatgtgtcacattactgggcaaactgttcaagtatttttttttaaacctccctgtatagaaaaaaatcattaaggatgtaaaagccatgcttgcctatttgctgtatacatgtaatgaaattgtagataaagtgtagtgcattgaaacaaatgaacaaaaagtagatacttttactatacaagggtgctggtgcagaaaaaaatatatatatttttggaaatgtagcattttatactttcaagtgttataaaaaaaaagaaaaagaacaaagaaaccctttatttcattaaatgattttttctggtggttgtcaagaaacaaaagaccaaaagagcctttttgtctttcttttttattttttaagtattggaataagtctaaagaaaagaaagtgccttattttccttcatggtcattcagtcaagtgtctcataaagatcagctcctccctcagaatacaagttaatgcatgttactcagtcgcccagtatgtgaaagaagatatgagggagacaaatgagttgatagtttgaattataggatttttgccacgttaccttgatgcaaatttgccaaatctgatactgtgaaaagatttgataacttttctaatgcctgactagtaagttttaaaacatcattctttaaaagaatagtttaatacttttggttattccaatcttcaatgttaacccaaaggattctgagataaaaattatgtgtcatctaaacttcagtttacagacaaaattagagctttgttttatttggagaagggggatgcattcatttgattttgttttttgtttttaattaattgaatataataggatacctagcaaatgttttcacaaaagtgaatctttgtgattttcattctagaaaacaatgttttaaatcacccaaatttaatcacatgtctttatatcataccagataactggtgtagtgtatccttttactgtttcaataacctctgcctcccccaccccttaactttaaaagaatgtgaaaaactagcatcatagtgcatataaatactcaaccacatttcagcttaagcttctaatttctcaagaagttgaaacagttagttatgtagttgaagcaatttgtgtgcaaagcctacatctaaacacttgagtgaataatcattaactgctcagtaccagacgtggcaaatctcaagtgacagtggacccccccccccgcccagcttatcaactcgtcccctcttccacaccttcccagcatcacagtcagaggtcagcaggaagctgagtcattaccttcttggtgacctcccccaccatcttgtctcacttggaaaccgttgtcagtttatttactatgcaatagacattcattgttttgtatccagctagctttggtttaatatgccactgctttgtctttctgttacacatacagttttgatttatttacaatatatgctgtgccattttgatttttatattgtttggttggttgaataaatttgcgacactcaaacacttgaggtgatagttgttaaaaacaataccagtatttgatccagtttcatctcaactatgttatacctggacattttagatgtttatcaaaggtcttttatggggaagaaagtaaatgtatgaaataataaatgtgtgacatttatagggaatgttggctctgaacaaacttttgaaaacttggttgacaaaattttggatcaactgaaaaaagcatgacttttgaaatctctgaatgccttggttctcagtattatcattctttattgaatttatttcttattaaaatatgtagtttttaagactttttttctgacagtattatgtaattttttagcgtgggtagatgggagtgtcgcttgtatgttatcgtacagctgacatgtatttttgtctattctttattatcttagtttcatgctatgtatgtaccataaccaacctattgcctatgagaaacatgtaagataatgtatttacagccattgttacaagtttataatgtatttttctatcttgttttatatgtatgttatataacattcaaaaagaatttttttcttgattgagaaaaggatacaaaatgcaaaatccacaattttgataactgaaaattgccaattgttttgcagtactttattatattgggtgtcttgtcttttttgggcttttagttagctaatgaatgaatacattagacacttttgggttttagttgggattttacatagcttgcattttaattctttggttctttgctgtttctattaacccacagcattattttaataaatgttataataccaacctact

SEQ ID NO: 6014 - protein, 319 aa, Homo sapiens; identical to SEQ ID NO: 807

SEQ ID NO: 6015 - DNA, 15414 bp, Homo sapiens
tgaactgaggcgaactccgccgccaagtgagtgaggaggaggaggaggagaaggaggaggaggaagaggaggagcgcagtcggagcgcggcggcagcggcagaggcgccgcggcggggaccagcccagagagaccccccgagcccgcggcacaggcggcggcggcgctgagcgggctcgaccagccgagcgagcggcggccccggctcctcctcgtccggcgccagcagcccgcgccccgcgcccgcactcggccagccgagacccgcctcccgcccgcccgccggcctcgtgagggacgcgccgagccgggcggccgagagcggcggcggctgggagcgcgtcgggcccgggcggaaagtgcctgcggggggcgggcgagcgcgcggtgccggccgccccggggctcggcgcgggagccagagcgggagccggcgcggagcgggacgccgggtcccgagcggcccgcggccggggctcgcccccgcccctccctcctctccggcggcggcggcggcggcggcgggcggagtgagctgcggagcctggaatatggtcggggaaatggaaacgaaggagaagccgaagcccaccccagattacctgatgcagctgatgaacgacaagaagctcatgagcagcctgcccaacttctgcgggatcttcaaccacctcgagcggctgctggacgaagaaattagcagagtacggaaagacatgtacaatgacacattaaatggcagtacagagaaaaggagtgcagaattgcctgatgctgtgggacctattgttcagttacaagagaaactttatgtgcctgtaaaagaatacccagattttaattttgttgggagaatccttggacctagaggacttacagccaaacaacttgaagcagaaaccggatgtaaaatcatggtccgaggcaaaggctcaatgagggataaaaaaaaggaggagcaaaatagaggcaagcccaattgggagcatctaaatgaagatttacatgtactaatcactgtggaagatgctcagaacagagcagaaatcaaattgaagagagcagttgaagaagtgaagaaattattggtacctgcagcagaaggagaagacagcctgaagaagatgcagctgatggagcttgcgattctgaatggcacctacagagatgccaacattaaatcaccagcccttgccttttctcttgcagcaacagcccaggctgctccaaggatcattactgggcctgcgccggttctcccaccagctgccctgcgtactcctacgccagctggccctaccataatgcctttgatcagacaaatacagaccgctgtcatgccaaacggaactcctcacccaactgctgcaatagttcctccagggcccgaagctggtttaatctatacaccctatgagtacccctacacattggcaccagctacatcaatccttgagtatcctattgaacctagtggtgtattagagtggattgaaatgccagtcatgcctgatatttcagcccattgacttgctggatgaaggactagaatacagcagctgttataacacgaccagtcaatgtggaacaaactgtttctgtgcaacccctttgttttaccagacaaaatttgaatactttttttcctgaattgtatatgaccttggtgctgcatgcatgctgttgacttttaggactttgatcttttaaggttttttttccccagcattaatattgatttataaagatttgaaaatctttaatgaactggagaacactaagatttaaactcgaaaattcgttgttcaagtaaagaaagccatgatgctctgtatgttatctgtgtgtgtgcatgcactcaggtgccctttgtttcatgaacaaatacatttcattgtacatgttttctgtttaaatcattgtataaagtaattgcaggtcagaattataccacagaactgtttatgagaggcttgtgtctgttgcacatttcttgaagcatttttaaaataacatgtaacctgtaaccttgttgtttaagttttcttttctattaatactctgtcctgtggtcccgtgcatgctccttttcccagaactcctctctgctgcacccacagcatctgttcccgaggagttatgactcttgacttcctgcagggctggggctcttagccaccagctgctgttccagcactttcagcgcaagatctccctgattttgccacgtggaattgtacttgtatatgattaccttatctaaaatgaataagaggtgatggaccagtttactgcttagaaatagcaagaggcactgcagtaaaacttgtttctcattgtaaagcttcatgtcttttgtttgttggaaaatttttacttatagaaacttaattattagactggtaaaataaagaccaaaatatgcagatttctaattggcattcataaggtgaataataataagtgcccaatgaaaaaatctattatggttaatttcatttcttgctttgccacctaagcagtaaaacatgatattgaccacttggagaactcagaaaattattttaaatttctaagttataataaatttgcacacagataacatgcatgctatttatgtcacatctcacattaaattattttaaaataagcagtgcccttcaaaacagatgcagacatgtgtgttggtagtagtgaggagattggtattagcatcaagtcttcattgatgactaatttttaattcccttccttttatctttaggtatggctttcccaacgaaaggctaagaattcaagaacggtcttaactgaaccctcatcagatctgaatttaacaaatgcttagtctcagcagcctccgggggaaaaaagcttagcctagcagtcagtgacttacttgcactttttgcacatagatataaagtaaaattatgttattaatttggtttagtctgtaatattacacagtaatggtaatttataaaggagtgtatagtagtatactgactgctaagtgtactatactgtttgctttactaatcacctaattcattgcagttcatacttattgactcagagtttaaaaccacaatctgtaggctttaagaattgcttttaaacctttttaagtgataaactcttgaagtggtcttaaggttagcaaataattgtctgtattaaacatggcgttatttaagtagtcctgctgcaagaaaggcacttcagtgaatatgtgactagtaaagcttaaatatgtttggatctaatagagctcatgaaatactgtaacttggggattgtaaatgaatggatacaataggttaaggcccaagatgtttgaaatgaatgcaatattaatagatgcatatatacatgacatattgtggttaattttaaaactactgtgccttaacgtgtttcttaaacttttgtagtaaatgaacatttgaaatccattttgataaacctgctgttaatgttttttccccccttgtgaatgttttctaactttgtcttggtaattgcaatttaactaggtgcggtggctactaaagttcgaaggcacgatatgcgtgtccatccttaccaaaggattgtgaccgcagaccgaggttagtttagttctgcagttcttgtctataagaaatgcgttgggtgtccataaaatttgcaacaccacacctgatggaaaaatgtaattgcttacctgcacacagttttttttccttttctaaatttgtttgtgatcattgacagatttaagggttgggttttttgttttggtttggttttttctcccttcatattttaacttattaaatcttctattattatgtactatgatttattcctactaaaacataaattagtcaatttggggagctattaaattttgatgttgcctcagttattttcattaataacttttgctaaaatttaccttttaaaagttctgaaatttggggttggtattgcaaaatgaattgaacggatggtgctttaatgagagaagtaaaggaatatatgcctcctgtgtacttttggagaaaactgaagatttagtttccatttttctttataataaaatatttgagccactgtataaacatgagggtgcacatgtcaagtacttagctaaaatcaacaaagtgaggactgtgaagataactttcatgtagttggatttttttatataaattagagcgtcaattcccttttattcttacattctcttgccaaaatggatcctttgatttttgtcatttgctgctaaaatatattatctgaaggtaaactgtctcttgaagttctgtggtggtatgagatccagctgtgtgaatataatttttgactaacctgtgactggaaaataagtcttcatttttctcctttacaacttttataatttgtgtcctgtatatgcccttggacccttttataaattatttttgcttattgaggaatggtattttcggtttattgacattgaattgttttctaagtttttccatcacaagataggaatatcaagcatggtagtaaaaaaggattttttacaagtttctattatggcacatttgtttcctacaaattaaattgatcaaagtctcaaatattagtggaggaaaaagtgctggatttgtacttcaattgtacatcttctatgaatttatgaaggacctacctgctttatgtgattaccttgagtactgatgataaatactagacacagctgttgtccacatcagaaataacatgcctttcccaaagacattgttaatatttgtttagcataatccataaagaacgttgaagacttttaaactaatgtattcatcactaacagtgattgttcagtgaacaaaatagaccccagctccgtggtcgtctatgaggatggtattccttgtaagtgttctgtatgagcacgtctcatagggatggggaagttttttggaaagtcacttgagttttaaagaaactggacaattccatgaataatttgaggttttattcatattgctaatgtctacaattgttctaaagagtattttaaagtagtttttttcccccagctaatctttccctatgtatgcccccttttaggagatttctcaccattttgctttaacacaataattattggcctacttaatactccagtgccttgagatagttggacatattttaggaagattttattgtatttggaaaattacgacacattccatgcatggatcttttgtagttacgtgttttgattagtcctgtcactgtttttatttaaaatgcagtgtcagcaaaccgaaatgctcatttcttttttagtaacagagtactcgtatacttatcactgtatgcactcattgggtctaagggagatgtctgaagtccttcacttaaattattttatgatactactgttttctctatttttgaggttaaaattattttaaaaaaatattttgaagagaagtttattagtataagcattcatttaatgcaaaaaaactcagcccttggacatataaccatgtaattctatatgaacgtttagagtactacatggttgaccaatatctagttctttactaaaagtaaactcacctctttatatatatttcaaaactgaatttgaagcctattagagaccaactgaccttttagttgtaatgaactgtatggtcttgcatggtgacacacctgtgtaggaggccaagacttggcagaggatgtagtctaggtgtcctggtatatataaatggtcactcacttcgtttatatattccacactcagaaaagaagtcagagttttttctgagtaatacaaaaaccatcacttacataatttgtataagaaactttaaacagttttaatcaaaactatgagtaacatcaaaaatgctttaagattctatattttggaatacctgtgaagtagtatgactacatcatgttaaatatttattttcttctatgattttggagcagcaatttttattttaaataaaattccacttttaagaaattcagggaagatttggtcacattgaagatacagtatttttgtagtatttataaactgttctaaatgatagactatagaaaacatttttgtcatatgaaggtaaatcagtccattattttggatcatttaaactgaacattacaccttctgggctttgatttatgaagtggcacagaatctaactttgcactgaatatcttttcattcacatctcctctgccttagtcacaatggcaacagtacagaaaattctatcaaacctcagaatatagtagaaataattaagctgttgaatgagtcttaaaaattatactactgttaagtggaccaagtttggtgaagcagaatgtgacaaaggttgattaaggaaggaacaactcaaggacattgggaatgataacttttccacttgagaactactttatgttttactgtaatttttaaagtttttttgtcctttttgttattttgcaaaagaaaatagtatttacaggtggcttcttttaaaatataaaaatataaagcaggaatgtatatgaaatgtcagattttattgtatttgcagagtattagctttgaaattgaataaagaaagctgtttgtagttttaaaatgccttattggtatcaattagaaatttcttctattttttgatgtacttagagctttttgagtgtagaattttaaatggcaggattttacagtgtttacatgcaagtgcattttataagtgttctatatgtgtaaaatagtattttcaactggaaagtgttggctagtgcaaaaggcctggccattttctggttcccatgatgttgcctacactgctagactacagtttagtatcgctttgtatcatgaggccaagaaattccatgttgtttgtaaatagaataattgaaaaagcaataaacatttattgaacaaaagaaaccttgtttggcccagagtttatgttgaaccaaatggttcatagaattttgaatttctttagattcatttctgttaatcatcagttattaataatcacatccatcattaatagttgctttaatgcttgcatcttagagaatactaatgcttaatagcagtcagatactgataactgcactgactgtttaaaaattctgtataccaaacctattcattgttgtttttcaatttccttcattgactgctactaactattagttgttagttgtattttatttctattttttcttgttaaccagttttttttttttttttgtgggagtgggctcttcttcatttgttcaaatcatgatacgaaattgtcatgattttaattgtattctgtagatggtgtcaatcagtttgtcagaattaaacatgcttttttttttattagttgtgattagtttttcatgttgtcattaagccgtcactagctgaaactaatctcttctctatcttttcttttcttttttttgttttgtttttttttgtttctaaccacccagccgccaccggcaactaacctatgaccttctgacctctgaactcttcacccaatgatgacctgaccatgcctgcctgctgatcagttaactggtaatcgcctttgcttgcctgtcgtcagtgcagcgagctgaggcacttgtccgttcgtcttaccatctaaccaaacaaaagacaaagaaattgttgtcctccaactcagctttttttttttttttttcctgtttgggtgaaagtggttctagaaactgcactgaatagtagtaaagcaataaggcccaattcatcccacagcactgatcatcttttaatatcccaccctaagcgaacggtaagaaggcctctcttaagaaggggagacagatggtccttaactactcaatgacagaggcagttactgtgagagacttctaggaatctttttcttctcatagcgaagtcaaagctctctctgaatgtactgtgtgatgatgcatcatgcatgaaccttcggtcagggatatcattggtgaagtgatttcaaaaagtattcaaaatttgatatgctgtttagtcactacagtgccctcaaagggcagaagttgcagccttttttatattgcctgccaaaatttgaagtattagaagaaagtgtgccatgagagaaaaacttaaggagttttgaaaagtaatgcaaataacaaaactgcaacactatttttaaaaagataaatatctgagttaaaattactgaatctttattttacacctaaaaaaatatgagaacaaggtacatgcattatgtgtcacattactgggcaaactgttcaagtatttttttttaaacctccctgtatagaaaaaaatcattaaggatgtaaaagccatgcttgcctatttgctgtatacatgtaatgaaattgtagataaagtgtagtgcattgaaacaaatgaacaaaaagtagatacttttactatacaagggtgctggtgcagaaaaaaatatatatatttttggaaatgtagcattttatactttcaagtgttataaaaaaaaagaaaaagaacaaagaaaccctttatttcattaaatgattttttctggtggttgtcaagaaacaaaagaccaaaagagcctttttgtctttcttttttattttttaagtattggaataagtctaaagaaaagaaagtgccttattttccttcatggtcattcagtcaagtgtctcataaagatcagctcctccctcagaatacaagttaatgcatgttactcagtcgcccagtatgtgaaagaagatatgagggagacaaatgagttgatagtttgaattataggatttttgccacgttaccttgatgcaaatttgccaaatctgatactgtgaaaagatttgataacttttctaatgcctgactagtaagttttaaaacatcattctttaaaagaatagtttaatacttttggttattccaatcttcaatgttaacccaaaggattctgagataaaaattatgtgtcatctaaacttcagtttacagacaaaattagagctttgttttatttggagaagggggatgcattcatttgattttgttttttgtttttaattaattgaatataataggatacctagcaaatgttttcacaaaagtgaatctttgtgattttcattctagaaaacaatgttttaaatcacccaaatttaatcacatgtctttatatcataccagataactggtgtagtgtatccttttactgtttcaataacctctgcctcccccaccccttaactttaaaagaatgtgaaaaactagcatcatagtgcatataaatactcaaccacatttcagcttaagcttctaatttctcaagaagttgaaacagttagttatgtagttgaagcaatttgtgtgcaaagcctacatctaaacacttgagtgaataatcattaactgctcagtaccagacgtggcaaatctcaagtgacagtggacccccccccccgcccagcttatcaactcgtcccctcttccacaccttcccagcatcacagtcagaggtcagcaggaagctgagtcattaccttcttggtgacctcccccaccatcttgtctcacttggaaaccgttgtcagtttatttactatgcaatagacattcattgttttgtatccagctagctttggtttaatatgccactgctttgtctttctgttacacatacagttttgatttatttacaatatatgctgtgccattttgatttttatattgtttggttggttgaataaatttgcgacactcaaacacttgaggtgatagttgttaaaaacaataccagtatttgatccagtttcatctcaactatgttatacctggacattttagatgtttatcaaaggtcttttatggggaagaaagtaaatgtatgaaataataaatgtgtgacatttatagggaatgttggctctgaacaaacttttgaaaacttggttgacaaaattttggatcaactgaaaaaagcatgacttttgaaatctctgaatgccttggttctcagtattatcattctttattgaatttatttcttattaaaatatgtagtttttaagactttttttctgacagtattatgtaattttttagcgtgggtagatgggagtgtcgcttgtatgttatcgtacagctgacatgtatttttgtctattctttattatcttagtttcatgctatgtatgtaccataaccaacctattgcctatgagaaacatgtaagataatgtatttacagccattgttacaagtttataatgtatttttctatcttgttttatatgtatgttatataacattcaaaaagaatttttttcttgattgagaaaaggatacaaaatgcaaaatccacaattttgataactgaaaattgccaattgttttgcagtactttattatattgggtgtcttgtcttttttgggcttttagttagctaatgaatgaatacattagacacttttgggttttagttgggattttacatagcttgcattttaattctttggttctttgctgtttctattaacccacagcattattttaataaatgttataataccaacctactaactctggactttgtctgtttattaacctttatatgtttaattaaaataaacaaataaagacaaaagaatgtaaagtcttgagttactggactaaccctgaagaacgtgaccacagataacatagtgtgacttgtttttatgttgtttgtcagctgacagttttgcacactactgttaaaatggctttggttattctggtcttttagcttgggggccggggcgggtgtgggtgtaggtgcagtagagatgggaacaaagtagcctttgtttgaggcattcttctcttgccacttgcctttcagcatctgcattactaattccacaccttatttttccttctccaaaataatcactgtctgctcacagcatcgagtaaaaagatacattgtcatggtatatacctggagaaaccagtttgattctttgttgaaccatttcttttaatttctgtaaataagtaattttatggtcacattgtaaagcagagaaactgttgatattttacctttatttagatttttgttttaacttgacctttttcctttggaaagcgttgaacttgtttagctaactactcctattaggggagcttaacttgggtaaagtcaaaggcccactggctgtttctcatggtggcctgaagccccgctgctttccagtgaggaaaagaaccctcagcacgttactgagctttcctcaggtatttttttctctgtcacctactttacaaatacagtcagactaaaacattaaacaagaagtttaagggggaataacattgggatttgaaaagttgtatgtgattaatttcttgcatgcaaatcaatttaagatttcttaaatatcttcatgcttttcttggctggaacttgggtaaattaacctgtaattatgaattatttagtttaactcaaggtgcatttttatttcacagattgatacttgcttttttctgtgaaacagttctcctagataccaaaatcctcaggatgaatttttgcatttgtaaataacaatttatctttgtaaattacattttatttatttagagttctaaaattgagggctgaaatgaatgacatgtaatagaagacaaaactgtaccaatacgctgttaaccaatcagactgtccaggtattctcatttcataaatatgtatacacacatataaatacacagagtagtgttagctgatgtgagtgataacagcgaatcaccattgagatggtcatttggatcatgtaaacaaaccgtgtcatgtctctgatgggagcggtgggtagtgtactgttaggtggacaggtcttttaacatgctactatttgtaaaagtttccgttgccataacagttcatgtagtagtctgtgaaaattcgaagctgtctgtcaagctgctaatatacaagttgtcatggtaccatgtaacttaaattgatgaatttctatgcaatttactattctctgaagcctatgaatgcagcctcatctcattttcagttaagggtactttatgtataattatgtcattgctgccttttatgtaggaaatgtaaaaaagttttaaaaggcgaaaataacattacagatttcatttttatacaggttacaatattaaacatgaaactaccaaattccaagaatagtaaaattctagagtcagttgattgattgaaactatttgacaaaacagttgaaagctgagctttcagtcaagaagttggtgaaattaatgtccttaaacttttcctttaggcaaaatgtcagggaaaacttaacatgaaagtagttactcccatacgcaccagtgcagtagctccaggtgtaagaggtcacgaaggcaccctgcccataaaaccaggatgtgcatacgtacacacaatcggtgtctggttatggttttctaaacactacataaggatctgaattttttagtgtgccaaaagcaaacgataggtttaaatgaaattgctcactaccaaatcaagactcttcatatatatacgtgtgtgtatatatatatgtcataacactttcacgtgtgacagcctaaggtttctttagttttaggatggggtggggtgggagtggttttgcatgtttgaccaggatgtgatgcctgtctttattccttgataagaagtagctgttacagcatttcaagcaaattattttaggtagaatagaacttactgccaaatgattatttatttagcaaaaattattctccaacttttcgaattcacaatttttctaagtgcatagagtagttttttacattgtcacgaattccttaatacctttatttaaaatggaaaaaatatggacaatattttagaaatatgtgctacacatctaattttatctgtagtttaagtgatctaaattgagatgcctttgatatgaagagatttaccaacattatatgcactcgtgccttcaatgtggaatcaaactggttaacctcagcacagtcctctcgtttctgtgtttctgctgcactaattgccagggggtgggggagaaggcgaatgaattaattcatagtagaaggaggcgataggtgcagcaaagggcagccacagtgttgattccacattataatgttgttgcctcttcttggcaaaagacaccacattgtgggaagatctcagcttccagggtaaaagttaatttataacttaaaagtgctattaagtttttattaccaaatatatcttttatggtttatattgtagtggtatgtatgaaacatttaaaattttactgtggaaattgtgtatatatatatatatagtcgaaataggtgttcacaggtcacatgtgaacggagaactgcatgaccgtacatgaaatgcaataaaccaactggaaaaagtgcatgtgcttcatcctctcaagccaactgcagctggaaagtgctgcttatcctccacccccagaaaatgcatgtatcaatatgagaataaagaacgcacactttcaattttattgaggctttcaacactatttaaaagaaaatgtaagaatttgacattctggagttattataacattagaaaatgagcataacattcactctgattttagccattaagggagattagtaaacagactgctacagtgttccatagttggactgtgcatccaaaacatttttttatctttaataaatggtacagtttttatgtagttttcgaatgtaagaagaaaggaatgctgaccaaaacttgatttcatcagcttcatgaaaaggactagtgtcattaacctgttgaacagaattggtttattaaaaaaatcatttccagtagtgtgaaacctttacgagtctttaacatctaaatgttatgactccttgtaccttaagttttccagtctttcttatttatatcatctccaagtacctctggctcctttcctcttgctcaccggaaccttagttttcctcaacagaatgctttgttaaagtagcccacagttgcaggatccatagcaccgtcgtgcagactagcagcccaaaggtgtgtttggtttggcttatacggtgttttgctttttaaactacttgccataatttaaaagtggcaacactagacttaaaaaaaaaaaagtctgattgcccatattagattttttttttaattcttcacaaaatctgctcttcctgaaagatcaaagtgtctagaaagcccaaacatgtattcttaacatagtaggcaccagctgaaactgagtaattaaacggtcccctgaagccaagtattccctggttagtcgccaccccaccactccttcctgtctctagtgtcacacttgggctgttgattttcttactcttctcttgctttaatccttccccccggctctctggctcctgtggatatctgtgcttgtttcctggtccaggatggtgatctgactttcaaaccagcttctcaaaaggggtgacataaaatcagttttgatgtttttcctcctgaaaaatcagatgaatattttagtcactgttactcatgcacattgtgttcttatgtttacagaagtgcttaagtgaatggaagcactagacatttggatttccttcctaacgtaatttttaatgattaccccttttatacagtaatttgtggtctttagaaagcagttaaactaattgaccatctaatagttgtactatacatatgtctaaaataatagtcatggtaagtttggcatcatatcttccccaaaaaatgtttattaaaattagattattccagtttaatgctattttgtgaactgtataccctctgaaagcgcttatttttacatgctacacaacagttccaattttaaggagtgtctcctaaaattgggatgaaaatctactgtagtctgttttaaagtatgctatactatgttcattggttacttaactggatattaatataaaggttattacaagaaaaatgatgaagagcaaaaggagaagaaaatatttgcaagtgaatccacaattcttgcagaactatttgagttgatactaaagattttatgttcactcctttaccttagaactgtcaagcttgggaatgaggaaagtgccttggctgtgcttgaaacctgaattttagtgcttcccttattacattcattgttttcaatgattgatttataaaattaagacatactggtagtacaagttgaaagttggtttgaatacattttaattaaatgataatatgttaatatgcttttgttcattgctttctcactgaggtaaaacagcattaaaaagttgtccagaatttaaactg

SEQ ID NO: 6016 - protein, 325 aa, Homo sapiens; identical to SEQ ID NO: 805

SEQ ID NO: 6017 - DNA, 16361 bp, Homo sapiens
tgaactgaggcgaactccgccgccaagtgagtgaggaggaggaggaggagaaggaggaggaggaagaggaggagcgcagtcggagcgcggcggcagcggcagaggcgccgcggcggggaccagcccagagagaccccccgagcccgcggcacaggcggcggcggcgctgagcgggctcgaccagccgagcgagcggcggccccggctcctcctcgtccggcgccagcagcccgcgccccgcgcccgcactcggccagccgagacccgcctcccgcccgcccgccggcctcgtgagggacgcgccgagccgggcggccgagagcggcggcggctgggagcgcgtcgggcccgggcggaaagtgcctgcggggggcgggcgagcgcgcggtgccggccgccccggggctcggcgcgggagccagagcgggagccggcgcggagcgggacgccgggtcccgagcggcccgcggccggggctcgcccccgcccctccctcctctccggcggcggcggcggcggcggcgggcggagtgagctgcggagcctggaatatggtcggggaaatggaaacgaaggagaagccgaagcccaccccagattacctgatgcagctgatgaacgacaagaagctcatgagcagcctgcccaacttctgcgggatcttcaaccacctcgagcggctgctggacgaagaaattagcagagtacggaaagacatgtacaatgacacattaaatggcagtacagagaaaaggagtgcagaattgcctgatgctgtgggacctattgttcagttacaagagaaactttatgtgcctgtaaaagaatacccagattttaattttgttgggagaatccttggacctagaggacttacagccaaacaacttgaagcagaaaccggatgtaaaatcatggtccgaggcaaaggctcaatgagggataaaaaaaaggaggagcaaaatagaggcaagcccaattgggagcatctaaatgaagatttacatgtactaatcactgtggaagatgctcagaacagagcagaaatcaaattgaagagagcagttgaagaagtgaagaaattattggtacctgcagcagaaggagaagacagcctgaagaagatgcagctgatggagcttgcgattctgaatggcacctacagagatgccaacattaaatcaccagcccttgccttttctcttgcagcaacagcccaggctgctccaaggatcattactgggcctgcgccggttctcccaccagctgccctgcgtactcctacgccagctggccctaccataatgcctttgatcagacaaatacagaccgctgtcatgccaaacggaactcctcacccaactgctgcaatagttcctccagggcccgaagctggtttaatctatacaccctatgagtacccctacacattggcaccagctacatcaatccttgagtatcctattgaacctagtggtgtattaggtaagttcttctccccatggggttaacaacattctctttataaatatttttgctccctcagattttgaaatgattttatcagttttagagaggcaagacaagtttgcattagggaagaccgaaaactaaattttgttttatttcagcctctcataagggttcccctttgaaataattgcaccttaaatttattcagatccactttggtaactgaggttcagtttggttgggtaaatctgttgtgtacatttcaacaaatacttttacatttgacattactgaggtcattctgagttttaggtcccaccccattggcccgtcacctccatcagctccacttctcaaactttatttgagatttattttatctcacaggtttgtgtaattgttggaaaatttttaaacttctaagtgaaagtagtctgagcgctttataaaattcatattattgtgtgtgttttgtaatatttgcgatcacttaaaatatcagataaatacagtcatgcatcgcttaacaacggggatacagtctaagaattgccttgtctggcagtttcatcatttggtgtacatcatagagtgtacttacacagacatagatgatatcgtttactacacacctaggctgtgtggtatagccattataatcttatgggaccacatagtataagtggtccgttgttgaccaaaatgttgttatgcaggcatgactgtagttgtattcttaagatttttcagttcttgtgttttggagtcctagtcatattaaacatgagagatactcttaatttcagtagtacagtatggaatagttaaataaatagcaaatcactgaattcagaatctcacttaaggcagaaattaaaatcataatataaacgcttggttttacatgaacaaaaagtggtgtgctcgaaaaagacattactgatgccttttttttatagagtggattgaaatgccagtcatgcctgatatttcagcccattgacttgctggatgaaggactagaatacagcagctgttataacacgaccagtcaatgtggaacaaactgtttctgtgcaacccctttgttttaccagacaaaatttgaatactttttttcctgaattgtatatgaccttggtgctgcatgcatgctgttgacttttaggactttgatcttttaaggttttttttccccagcattaatattgatttataaagatttgaaaatctttaatgaactggagaacactaagatttaaactcgaaaattcgttgttcaagtaaagaaagccatgatgctctgtatgttatctgtgtgtgtgcatgcactcaggtgccctttgtttcatgaacaaatacatttcattgtacatgttttctgtttaaatcattgtataaagtaattgcaggtcagaattataccacagaactgtttatgagaggcttgtgtctgttgcacatttcttgaagcatttttaaaataacatgtaacctgtaaccttgttgtttaagttttcttttctattaatactctgtcctgtggtcccgtgcatgctccttttcccagaactcctctctgctgcacccacagcatctgttcccgaggagttatgactcttgacttcctgcagggctggggctcttagccaccagctgctgttccagcactttcagcgcaagatctccctgattttgccacgtggaattgtacttgtatatgattaccttatctaaaatgaataagaggtgatggaccagtttactgcttagaaatagcaagaggcactgcagtaaaacttgtttctcattgtaaagcttcatgtcttttgtttgttggaaaatttttacttatagaaacttaattattagactggtaaaataaagaccaaaatatgcagatttctaattggcattcataaggtgaataataataagtgcccaatgaaaaaatctattatggttaatttcatttcttgctttgccacctaagcagtaaaacatgatattgaccacttggagaactcagaaaattattttaaatttctaagttataataaatttgcacacagataacatgcatgctatttatgtcacatctcacattaaattattttaaaataagcagtgcccttcaaaacagatgcagacatgtgtgttggtagtagtgaggagattggtattagcatcaagtcttcattgatgactaatttttaattcccttccttttatctttaggtatggctttcccaacgaaaggctaagaattcaagaacggtcttaactgaaccctcatcagatctgaatttaacaaatgcttagtctcagcagcctccgggggaaaaaagcttagcctagcagtcagtgacttacttgcactttttgcacatagatataaagtaaaattatgttattaatttggtttagtctgtaatattacacagtaatggtaatttataaaggagtgtatagtagtatactgactgctaagtgtactatactgtttgctttactaatcacctaattcattgcagttcatacttattgactcagagtttaaaaccacaatctgtaggctttaagaattgcttttaaacctttttaagtgataaactcttgaagtggtcttaaggttagcaaataattgtctgtattaaacatggcgttatttaagtagtcctgctgcaagaaaggcacttcagtgaatatgtgactagtaaagcttaaatatgtttggatctaatagagctcatgaaatactgtaacttggggattgtaaatgaatggatacaataggttaaggcccaagatgtttgaaatgaatgcaatattaatagatgcatatatacatgacatattgtggttaattttaaaactactgtgccttaacgtgtttcttaaacttttgtagtaaatgaacatttgaaatccattttgataaacctgctgttaatgttttttccccccttgtgaatgttttctaactttgtcttggtaattgcaatttaactaggtgcggtggctactaaagttcgaaggcacgatatgcgtgtccatccttaccaaaggattgtgaccgcagaccgaggttagtttagttctgcagttcttgtctataagaaatgcgttgggtgtccataaaatttgcaacaccacacctgatggaaaaatgtaattgcttacctgcacacagttttttttccttttctaaatttgtttgtgatcattgacagatttaagggttgggttttttgttttggtttggttttttctcccttcatattttaacttattaaatcttctattattatgtactatgatttattcctactaaaacataaattagtcaatttggggagctattaaattttgatgttgcctcagttattttcattaataacttttgctaaaatttaccttttaaaagttctgaaatttggggttggtattgcaaaatgaattgaacggatggtgctttaatgagagaagtaaaggaatatatgcctcctgtgtacttttggagaaaactgaagatttagtttccatttttctttataataaaatatttgagccactgtataaacatgagggtgcacatgtcaagtacttagctaaaatcaacaaagtgaggactgtgaagataactttcatgtagttggatttttttatataaattagagcgtcaattcccttttattcttacattctcttgccaaaatggatcctttgatttttgtcatttgctgctaaaatatattatctgaaggtaaactgtctcttgaagttctgtggtggtatgagatccagctgtgtgaatataatttttgactaacctgtgactggaaaataagtcttcatttttctcctttacaacttttataatttgtgtcctgtatatgcccttggacccttttataaattatttttgcttattgaggaatggtattttcggtttattgacattgaattgttttctaagtttttccatcacaagataggaatatcaagcatggtagtaaaaaaggattttttacaagtttctattatggcacatttgtttcctacaaattaaattgatcaaagtctcaaatattagtggaggaaaaagtgctggatttgtacttcaattgtacatcttctatgaatttatgaaggacctacctgctttatgtgattaccttgagtactgatgataaatactagacacagctgttgtccacatcagaaataacatgcctttcccaaagacattgttaatatttgtttagcataatccataaagaacgttgaagacttttaaactaatgtattcatcactaacagtgattgttcagtgaacaaaatagaccccagctccgtggtcgtctatgaggatggtattccttgtaagtgttctgtatgagcacgtctcatagggatggggaagttttttggaaagtcacttgagttttaaagaaactggacaattccatgaataatttgaggttttattcatattgctaatgtctacaattgttctaaagagtattttaaagtagtttttttcccccagctaatctttccctatgtatgcccccttttaggagatttctcaccattttgctttaacacaataattattggcctacttaatactccagtgccttgagatagttggacatattttaggaagattttattgtatttggaaaattacgacacattccatgcatggatcttttgtagttacgtgttttgattagtcctgtcactgtttttatttaaaatgcagtgtcagcaaaccgaaatgctcatttcttttttagtaacagagtactcgtatacttatcactgtatgcactcattgggtctaagggagatgtctgaagtccttcacttaaattattttatgatactactgttttctctatttttgaggttaaaattattttaaaaaaatattttgaagagaagtttattagtataagcattcatttaatgcaaaaaaactcagcccttggacatataaccatgtaattctatatgaacgtttagagtactacatggttgaccaatatctagttctttactaaaagtaaactcacctctttatatatatttcaaaactgaatttgaagcctattagagaccaactgaccttttagttgtaatgaactgtatggtcttgcatggtgacacacctgtgtaggaggccaagacttggcagaggatgtagtctaggtgtcctggtatatataaatggtcactcacttcgtttatatattccacactcagaaaagaagtcagagttttttctgagtaatacaaaaaccatcacttacataatttgtataagaaactttaaacagttttaatcaaaactatgagtaacatcaaaaatgctttaagattctatattttggaatacctgtgaagtagtatgactacatcatgttaaatatttattttcttctatgattttggagcagcaatttttattttaaataaaattccacttttaagaaattcagggaagatttggtcacattgaagatacagtatttttgtagtatttataaactgttctaaatgatagactatagaaaacatttttgtcatatgaaggtaaatcagtccattattttggatcatttaaactgaacattacaccttctgggctttgatttatgaagtggcacagaatctaactttgcactgaatatcttttcattcacatctcctctgccttagtcacaatggcaacagtacagaaaattctatcaaacctcagaatatagtagaaataattaagctgttgaatgagtcttaaaaattatactactgttaagtggaccaagtttggtgaagcagaatgtgacaaaggttgattaaggaaggaacaactcaaggacattgggaatgataacttttccacttgagaactactttatgttttactgtaatttttaaagtttttttgtcctttttgttattttgcaaaagaaaatagtatttacaggtggcttcttttaaaatataaaaatataaagcaggaatgtatatgaaatgtcagattttattgtatttgcagagtattagctttgaaattgaataaagaaagctgtttgtagttttaaaatgccttattggtatcaattagaaatttcttctattttttgatgtacttagagctttttgagtgtagaattttaaatggcaggattttacagtgtttacatgcaagtgcattttataagtgttctatatgtgtaaaatagtattttcaactggaaagtgttggctagtgcaaaaggcctggccattttctggttcccatgatgttgcctacactgctagactacagtttagtatcgctttgtatcatgaggccaagaaattccatgttgtttgtaaatagaataattgaaaaagcaataaacatttattgaacaaaagaaaccttgtttggcccagagtttatgttgaaccaaatggttcatagaattttgaatttctttagattcatttctgttaatcatcagttattaataatcacatccatcattaatagttgctttaatgcttgcatcttagagaatactaatgcttaatagcagtcagatactgataactgcactgactgtttaaaaattctgtataccaaacctattcattgttgtttttcaatttccttcattgactgctactaactattagttgttagttgtattttatttctattttttcttgttaaccagttttttttttttttttgtgggagtgggctcttcttcatttgttcaaatcatgatacgaaattgtcatgattttaattgtattctgtagatggtgtcaatcagtttgtcagaattaaacatgcttttttttttattagttgtgattagtttttcatgttgtcattaagccgtcactagctgaaactaatctcttctctatcttttcttttcttttttttgttttgtttttttttgtttctaaccacccagccgccaccggcaactaacctatgaccttctgacctctgaactcttcacccaatgatgacctgaccatgcctgcctgctgatcagttaactggtaatcgcctttgcttgcctgtcgtcagtgcagcgagctgaggcacttgtccgttcgtcttaccatctaaccaaacaaaagacaaagaaattgttgtcctccaactcagctttttttttttttttttcctgtttgggtgaaagtggttctagaaactgcactgaatagtagtaaagcaataaggcccaattcatcccacagcactgatcatcttttaatatcccaccctaagcgaacggtaagaaggcctctcttaagaaggggagacagatggtccttaactactcaatgacagaggcagttactgtgagagacttctaggaatctttttcttctcatagcgaagtcaaagctctctctgaatgtactgtgtgatgatgcatcatgcatgaaccttcggtcagggatatcattggtgaagtgatttcaaaaagtattcaaaatttgatatgctgtttagtcactacagtgccctcaaagggcagaagttgcagccttttttatattgcctgccaaaatttgaagtattagaagaaagtgtgccatgagagaaaaacttaaggagttttgaaaagtaatgcaaataacaaaactgcaacactatttttaaaaagataaatatctgagttaaaattactgaatctttattttacacctaaaaaaatatgagaacaaggtacatgcattatgtgtcacattactgggcaaactgttcaagtatttttttttaaacctccctgtatagaaaaaaatcattaaggatgtaaaagccatgcttgcctatttgctgtatacatgtaatgaaattgtagataaagtgtagtgcattgaaacaaatgaacaaaaagtagatacttttactatacaagggtgctggtgcagaaaaaaatatatatatttttggaaatgtagcattttatactttcaagtgttataaaaaaaaagaaaaagaacaaagaaaccctttatttcattaaatgattttttctggtggttgtcaagaaacaaaagaccaaaagagcctttttgtctttcttttttattttttaagtattggaataagtctaaagaaaagaaagtgccttattttccttcatggtcattcagtcaagtgtctcataaagatcagctcctccctcagaatacaagttaatgcatgttactcagtcgcccagtatgtgaaagaagatatgagggagacaaatgagttgatagtttgaattataggatttttgccacgttaccttgatgcaaatttgccaaatctgatactgtgaaaagatttgataacttttctaatgcctgactagtaagttttaaaacatcattctttaaaagaatagtttaatacttttggttattccaatcttcaatgttaacccaaaggattctgagataaaaattatgtgtcatctaaacttcagtttacagacaaaattagagctttgttttatttggagaagggggatgcattcatttgattttgttttttgtttttaattaattgaatataataggatacctagcaaatgttttcacaaaagtgaatctttgtgattttcattctagaaaacaatgttttaaatcacccaaatttaatcacatgtctttatatcataccagataactggtgtagtgtatccttttactgtttcaataacctctgcctcccccaccccttaactttaaaagaatgtgaaaaactagcatcatagtgcatataaatactcaaccacatttcagcttaagcttctaatttctcaagaagttgaaacagttagttatgtagttgaagcaatttgtgtgcaaagcctacatctaaacacttgagtgaataatcattaactgctcagtaccagacgtggcaaatctcaagtgacagtggacccccccccccgcccagcttatcaactcgtcccctcttccacaccttcccagcatcacagtcagaggtcagcaggaagctgagtcattaccttcttggtgacctcccccaccatcttgtctcacttggaaaccgttgtcagtttatttactatgcaatagacattcattgttttgtatccagctagctttggtttaatatgccactgctttgtctttctgttacacatacagttttgatttatttacaatatatgctgtgccattttgatttttatattgtttggttggttgaataaatttgcgacactcaaacacttgaggtgatagttgttaaaaacaataccagtatttgatccagtttcatctcaactatgttatacctggacattttagatgtttatcaaaggtcttttatggggaagaaagtaaatgtatgaaataataaatgtgtgacatttatagggaatgttggctctgaacaaacttttgaaaacttggttgacaaaattttggatcaactgaaaaaagcatgacttttgaaatctctgaatgccttggttctcagtattatcattctttattgaatttatttcttattaaaatatgtagtttttaagactttttttctgacagtattatgtaattttttagcgtgggtagatgggagtgtcgcttgtatgttatcgtacagctgacatgtatttttgtctattctttattatcttagtttcatgctatgtatgtaccataaccaacctattgcctatgagaaacatgtaagataatgtatttacagccattgttacaagtttataatgtatttttctatcttgttttatatgtatgttatataacattcaaaaagaatttttttcttgattgagaaaaggatacaaaatgcaaaatccacaattttgataactgaaaattgccaattgttttgcagtactttattatattgggtgtcttgtcttttttgggcttttagttagctaatgaatgaatacattagacacttttgggttttagttgggattttacatagcttgcattttaattctttggttctttgctgtttctattaacccacagcattattttaataaatgttataataccaacctactaactctggactttgtctgtttattaacctttatatgtttaattaaaataaacaaataaagacaaaagaatgtaaagtcttgagttactggactaaccctgaagaacgtgaccacagataacatagtgtgacttgtttttatgttgtttgtcagctgacagttttgcacactactgttaaaatggctttggttattctggtcttttagcttgggggccggggcgggtgtgggtgtaggtgcagtagagatgggaacaaagtagcctttgtttgaggcattcttctcttgccacttgcctttcagcatctgcattactaattccacaccttatttttccttctccaaaataatcactgtctgctcacagcatcgagtaaaaagatacattgtcatggtatatacctggagaaaccagtttgattctttgttgaaccatttcttttaatttctgtaaataagtaattttatggtcacattgtaaagcagagaaactgttgatattttacctttatttagatttttgttttaacttgacctttttcctttggaaagcgttgaacttgtttagctaactactcctattaggggagcttaacttgggtaaagtcaaaggcccactggctgtttctcatggtggcctgaagccccgctgctttccagtgaggaaaagaaccctcagcacgttactgagctttcctcaggtatttttttctctgtcacctactttacaaatacagtcagactaaaacattaaacaagaagtttaagggggaataacattgggatttgaaaagttgtatgtgattaatttcttgcatgcaaatcaatttaagatttcttaaatatcttcatgcttttcttggctggaacttgggtaaattaacctgtaattatgaattatttagtttaactcaaggtgcatttttatttcacagattgatacttgcttttttctgtgaaacagttctcctagataccaaaatcctcaggatgaatttttgcatttgtaaataacaatttatctttgtaaattacattttatttatttagagttctaaaattgagggctgaaatgaatgacatgtaatagaagacaaaactgtaccaatacgctgttaaccaatcagactgtccaggtattctcatttcataaatatgtatacacacatataaatacacagagtagtgttagctgatgtgagtgataacagcgaatcaccattgagatggtcatttggatcatgtaaacaaaccgtgtcatgtctctgatgggagcggtgggtagtgtactgttaggtggacaggtcttttaacatgctactatttgtaaaagtttccgttgccataacagttcatgtagtagtctgtgaaaattcgaagctgtctgtcaagctgctaatatacaagttgtcatggtaccatgtaacttaaattgatgaatttctatgcaatttactattctctgaagcctatgaatgcagcctcatctcattttcagttaagggtactttatgtataattatgtcattgctgccttttatgtaggaaatgtaaaaaagttttaaaaggcgaaaataacattacagatttcatttttatacaggttacaatattaaacatgaaactaccaaattccaagaatagtaaaattctagagtcagttgattgattgaaactatttgacaaaacagttgaaagctgagctttcagtcaagaagttggtgaaattaatgtccttaaacttttcctttaggcaaaatgtcagggaaaacttaacatgaaagtagttactcccatacgcaccagtgcagtagctccaggtgtaagaggtcacgaaggcaccctgcccataaaaccaggatgtgcatacgtacacacaatcggtgtctggttatggttttctaaacactacataaggatctgaattttttagtgtgccaaaagcaaacgataggtttaaatgaaattgctcactaccaaatcaagactcttcatatatatacgtgtgtgtatatatatatgtcataacactttcacgtgtgacagcctaaggtttctttagttttaggatggggtggggtgggagtggttttgcatgtttgaccaggatgtgatgcctgtctttattccttgataagaagtagctgttacagcatttcaagcaaattattttaggtagaatagaacttactgccaaatgattatttatttagcaaaaattattctccaacttttcgaattcacaatttttctaagtgcatagagtagttttttacattgtcacgaattccttaatacctttatttaaaatggaaaaaatatggacaatattttagaaatatgtgctacacatctaattttatctgtagtttaagtgatctaaattgagatgcctttgatatgaagagatttaccaacattatatgcactcgtgccttcaatgtggaatcaaactggttaacctcagcacagtcctctcgtttctgtgtttctgctgcactaattgccagggggtgggggagaaggcgaatgaattaattcatagtagaaggaggcgataggtgcagcaaagggcagccacagtgttgattccacattataatgttgttgcctcttcttggcaaaagacaccacattgtgggaagatctcagcttccagggtaaaagttaatttataacttaaaagtgctattaagtttttattaccaaatatatcttttatggtttatattgtagtggtatgtatgaaacatttaaaattttactgtggaaattgtgtatatatatatatatagtcgaaataggtgttcacaggtcacatgtgaacggagaactgcatgaccgtacatgaaatgcaataaaccaactggaaaaagtgcatgtgcttcatcctctcaagccaactgcagctggaaagtgctgcttatcctccacccccagaaaatgcatgtatcaatatgagaataaagaacgcacactttcaattttattgaggctttcaacactatttaaaagaaaatgtaagaatttgacattctggagttattataacattagaaaatgagcataacattcactctgattttagccattaagggagattagtaaacagactgctacagtgttccatagttggactgtgcatccaaaacatttttttatctttaataaatggtacagtttttatgtagttttcgaatgtaagaagaaaggaatgctgaccaaaacttgatttcatcagcttcatgaaaaggactagtgtcattaacctgttgaacagaattggtttattaaaaaaatcatttccagtagtgtgaaacctttacgagtctttaacatctaaatgttatgactccttgtaccttaagttttccagtctttcttatttatatcatctccaagtacctctggctcctttcctcttgctcaccggaaccttagttttcctcaacagaatgctttgttaaagtagcccacagttgcaggatccatagcaccgtcgtgcagactagcagcccaaaggtgtgtttggtttggcttatacggtgttttgctttttaaactacttgccataatttaaaagtggcaacactagacttaaaaaaaaaaaagtctgattgcccatattagattttttttttaattcttcacaaaatctgctcttcctgaaagatcaaagtgtctagaaagcccaaacatgtattcttaacatagtaggcaccagctgaaactgagtaattaaacggtcccctgaagccaagtattccctggttagtcgccaccccaccactccttcctgtctctagtgtcacacttgggctgttgattttcttactcttctcttgctttaatccttccccccggctctctggctcctgtggatatctgtgcttgtttcctggtccaggatggtgatctgactttcaaaccagcttctcaaaaggggtgacataaaatcagttttgatgtttttcctcctgaaaaatcagatgaatattttagtcactgttactcatgcacattgtgttcttatgtttacagaagtgcttaagtgaatggaagcactagacatttggatttccttcctaacgtaatttttaatgattaccccttttatacagtaatttgtggtctttagaaagcagttaaactaattgaccatctaatagttgtactatacatatgtctaaaataatagtcatggtaagtttggcatcatatcttccccaaaaaatgtttattaaaattagattattccagtttaatgctattttgtgaactgtataccctctgaaagcgcttatttttacatgctacacaacagttccaattttaaggagtgtctcctaaaattgggatgaaaatctactgtagtctgttttaaagtatgctatactatgttcattggttacttaactggatattaatataaaggttattacaagaaaaatgatgaagagcaaaaggagaagaaaatatttgcaagtgaatccacaattcttgcagaactatttgagttgatactaaagattttatgttcactcctttaccttagaactgtcaagcttgggaatgaggaaagtgccttggctgtgcttgaaacctgaattttagtgcttcccttattacattcattgttttcaatgattgatttataaaattaagacatactggtagtacaagttgaaagttggtttgaatacattttaattaaatgataatatgttaatatgcttttgttcattgctttctcactgaggtaaaacagcattaaaaagttgtccagaatttaaactg

SEQ ID NO: 6018 - protein, 319 aa, Homo sapiens; identical to SEQ ID NO: 807

SEQ ID NO: 6019 - DNA, 14135 bp, Homo sapiens
tgaactgaggcgaactccgccgccaagtgagtgaggaggaggaggaggagaaggaggaggaggaagaggaggagcgcagtcggagcgcggcggcagcggcagaggcgccgcggcggggaccagcccagagagaccccccgagcccgcggcacaggcggcggcggcgctgagcgggctcgaccagccgagcgagcggcggccccggctcctcctcgtccggcgccagcagcccgcgccccgcgcccgcactcggccagccgagacccgcctcccgcccgcccgccggcctcgtgagggacgcgccgagccgggcggccgagagcggcggcggctgggagcgcgtcgggcccgggcggaaagtgcctgcggggggcgggcgagcgcgcggtgccggccgccccggggctcggcgcgggagccagagcgggagccggcgcggagcgggacgccgggtcccgagcggcccgcggccggggctcgcccccgcccctccctcctctccggcggcggcggcggcggcggcgggcggagtgagctgcggagcctggaatatggtcggggaaatggaaacgaaggagaagccgaagcccaccccagattacctgatgcagctgatgaacgacaagaagctcatgagcagcctgcccaacttctgcgggatcttcaaccacctcgagcggctgctggacgaagaaattagcagagtacggaaagacatgtacaatgacacattaaatggcagtacagagaaaaggagtgcagaattgcctgatgctgtgggacctattgttcagttacaagagaaactttatgtgcctgtaaaagaatacccagattttaattttgttgggagaatccttggacctagaggacttacagccaaacaacttgaagcagaaaccggatgtaaaatcatggtccgaggcaaaggctcaatgagggataaaaaaaaggaggagcaaaatagaggcaagcccaattgggagcatctaaatgaagatttacatgtactaatcactgtggaagatgctcagaacagagcagaaatcaaattgaagagagcagttgaagaagtgaagaaattattggtacctgcagcagaaggagaagacagcctgaagaagatgcagctgatggagcttgcgattctgaatggcacctacagagatgccaacattaaatcaccagcccttgccttttctcttgcagcaacagcccaggctgctccaaggatcattactgggcctgcgccggttctcccaccagctgccctgcgtactcctacgccagctggccctaccataatgcctttgatcagacaaatacagaccgctgtcatgccaaacggaactcctcacccaactgctgcaatagttcctccagggcccgaagctggtttaatctatacaccctatgagtacccctacacattggcaccagctacatcaatccttgagtatcctattgaacctagtggtgtattaggtatggctttcccaacgaaaggctaagaattcaagaacggtcttaactgaaccctcatcagatctgaatttaacaaatgcttagtctcagcagcctccgggggaaaaaagcttagcctagcagtcagtgacttacttgcactttttgcacatagatataaagtaaaattatgttattaatttggtttagtctgtaatattacacagtaatggtaatttataaaggagtgtatagtagtatactgactgctaagtgtactatactgtttgctttactaatcacctaattcattgcagttcatacttattgactcagagtttaaaaccacaatctgtaggctttaagaattgcttttaaacctttttaagtgataaactcttgaagtggtcttaaggttagcaaataattgtctgtattaaacatggcgttatttaagtagtcctgctgcaagaaaggcacttcagtgaatatgtgactagtaaagcttaaatatgtttggatctaatagagctcatgaaatactgtaacttggggattgtaaatgaatggatacaataggttaaggcccaagatgtttgaaatgaatgcaatattaatagatgcatatatacatgacatattgtggttaattttaaaactactgtgccttaacgtgtttcttaaacttttgtagtaaatgaacatttgaaatccattttgataaacctgctgttaatgttttttccccccttgtgaatgttttctaactttgtcttggtaattgcaatttaactaggtgcggtggctactaaagttcgaaggcacgatatgcgtgtccatccttaccaaaggattgtgaccgcagaccgaggttagtttagttctgcagttcttgtctataagaaatgcgttgggtgtccataaaatttgcaacaccacacctgatggaaaaatgtaattgcttacctgcacacagttttttttccttttctaaatttgtttgtgatcattgacagatttaagggttgggttttttgttttggtttggttttttctcccttcatattttaacttattaaatcttctattattatgtactatgatttattcctactaaaacataaattagtcaatttggggagctattaaattttgatgttgcctcagttattttcattaataacttttgctaaaatttaccttttaaaagttctgaaatttggggttggtattgcaaaatgaattgaacggatggtgctttaatgagagaagtaaaggaatatatgcctcctgtgtacttttggagaaaactgaagatttagtttccatttttctttataataaaatatttgagccactgtataaacatgagggtgcacatgtcaagtacttagctaaaatcaacaaagtgaggactgtgaagataactttcatgtagttggatttttttatataaattagagcgtcaattcccttttattcttacattctcttgccaaaatggatcctttgatttttgtcatttgctgctaaaatatattatctgaaggtaaactgtctcttgaagttctgtggtggtatgagatccagctgtgtgaatataatttttgactaacctgtgactggaaaataagtcttcatttttctcctttacaacttttataatttgtgtcctgtatatgcccttggacccttttataaattatttttgcttattgaggaatggtattttcggtttattgacattgaattgttttctaagtttttccatcacaagataggaatatcaagcatggtagtaaaaaaggattttttacaagtttctattatggcacatttgtttcctacaaattaaattgatcaaagtctcaaatattagtggaggaaaaagtgctggatttgtacttcaattgtacatcttctatgaatttatgaaggacctacctgctttatgtgattaccttgagtactgatgataaatactagacacagctgttgtccacatcagaaataacatgcctttcccaaagacattgttaatatttgtttagcataatccataaagaacgttgaagacttttaaactaatgtattcatcactaacagtgattgttcagtgaacaaaatagaccccagctccgtggtcgtctatgaggatggtattccttgtaagtgttctgtatgagcacgtctcatagggatggggaagttttttggaaagtcacttgagttttaaagaaactggacaattccatgaataatttgaggttttattcatattgctaatgtctacaattgttctaaagagtattttaaagtagtttttttcccccagctaatctttccctatgtatgcccccttttaggagatttctcaccattttgctttaacacaataattattggcctacttaatactccagtgccttgagatagttggacatattttaggaagattttattgtatttggaaaattacgacacattccatgcatggatcttttgtagttacgtgttttgattagtcctgtcactgtttttatttaaaatgcagtgtcagcaaaccgaaatgctcatttcttttttagtaacagagtactcgtatacttatcactgtatgcactcattgggtctaagggagatgtctgaagtccttcacttaaattattttatgatactactgttttctctatttttgaggttaaaattattttaaaaaaatattttgaagagaagtttattagtataagcattcatttaatgcaaaaaaactcagcccttggacatataaccatgtaattctatatgaacgtttagagtactacatggttgaccaatatctagttctttactaaaagtaaactcacctctttatatatatttcaaaactgaatttgaagcctattagagaccaactgaccttttagttgtaatgaactgtatggtcttgcatggtgacacacctgtgtaggaggccaagacttggcagaggatgtagtctaggtgtcctggtatatataaatggtcactcacttcgtttatatattccacactcagaaaagaagtcagagttttttctgagtaatacaaaaaccatcacttacataatttgtataagaaactttaaacagttttaatcaaaactatgagtaacatcaaaaatgctttaagattctatattttggaatacctgtgaagtagtatgactacatcatgttaaatatttattttcttctatgattttggagcagcaatttttattttaaataaaattccacttttaagaaattcagggaagatttggtcacattgaagatacagtatttttgtagtatttataaactgttctaaatgatagactatagaaaacatttttgtcatatgaaggtaaatcagtccattattttggatcatttaaactgaacattacaccttctgggctttgatttatgaagtggcacagaatctaactttgcactgaatatcttttcattcacatctcctctgccttagtcacaatggcaacagtacagaaaattctatcaaacctcagaatatagtagaaataattaagctgttgaatgagtcttaaaaattatactactgttaagtggaccaagtttggtgaagcagaatgtgacaaaggttgattaaggaaggaacaactcaaggacattgggaatgataacttttccacttgagaactactttatgttttactgtaatttttaaagtttttttgtcctttttgttattttgcaaaagaaaatagtatttacaggtggcttcttttaaaatataaaaatataaagcaggaatgtatatgaaatgtcagattttattgtatttgcagagtattagctttgaaattgaataaagaaagctgtttgtagttttaaaatgccttattggtatcaattagaaatttcttctattttttgatgtacttagagctttttgagtgtagaattttaaatggcaggattttacagtgtttacatgcaagtgcattttataagtgttctatatgtgtaaaatagtattttcaactggaaagtgttggctagtgcaaaaggcctggccattttctggttcccatgatgttgcctacactgctagactacagtttagtatcgctttgtatcatgaggccaagaaattccatgttgtttgtaaatagaataattgaaaaagcaataaacatttattgaacaaaagaaaccttgtttggcccagagtttatgttgaaccaaatggttcatagaattttgaatttctttagattcatttctgttaatcatcagttattaataatcacatccatcattaatagttgctttaatgcttgcatcttagagaatactaatgcttaatagcagtcagatactgataactgcactgactgtttaaaaattctgtataccaaacctattcattgttgtttttcaatttccttcattgactgctactaactattagttgttagttgtattttatttctattttttcttgttaaccagttttttttttttttttgtgggagtgggctcttcttcatttgttcaaatcatgatacgaaattgtcatgattttaattgtattctgtagatggtgtcaatcagtttgtcagaattaaacatgcttttttttttattagttgtgattagtttttcatgttgtcattaagccgtcactagctgaaactaatctcttctctatcttttcttttcttttttttgttttgtttttttttgtttctaaccacccagccgccaccggcaactaacctatgaccttctgacctctgaactcttcacccaatgatgacctgaccatgcctgcctgctgatcagttaactggtaatcgcctttgcttgcctgtcgtcagtgcagcgagctgaggcacttgtccgttcgtcttaccatctaaccaaacaaaagacaaagaaattgttgtcctccaactcagctttttttttttttttttcctgtttgggtgaaagtggttctagaaactgcactgaatagtagtaaagcaataaggcccaattcatcccacagcactgatcatcttttaatatcccaccctaagcgaacggtaagaaggcctctcttaagaaggggagacagatggtccttaactactcaatgacagaggcagttactgtgagagacttctaggaatctttttcttctcatagcgaagtcaaagctctctctgaatgtactgtgtgatgatgcatcatgcatgaaccttcggtcagggatatcattggtgaagtgatttcaaaaagtattcaaaatttgatatgctgtttagtcactacagtgccctcaaagggcagaagttgcagccttttttatattgcctgccaaaatttgaagtattagaagaaagtgtgccatgagagaaaaacttaaggagttttgaaaagtaatgcaaataacaaaactgcaacactatttttaaaaagataaatatctgagttaaaattactgaatctttattttacacctaaaaaaatatgagaacaaggtacatgcattatgtgtcacattactgggcaaactgttcaagtatttttttttaaacctccctgtatagaaaaaaatcattaaggatgtaaaagccatgcttgcctatttgctgtatacatgtaatgaaattgtagataaagtgtagtgcattgaaacaaatgaacaaaaagtagatacttttactatacaagggtgctggtgcagaaaaaaatatatatatttttggaaatgtagcattttatactttcaagtgttataaaaaaaaagaaaaagaacaaagaaaccctttatttcattaaatgattttttctggtggttgtcaagaaacaaaagaccaaaagagcctttttgtctttcttttttattttttaagtattggaataagtctaaagaaaagaaagtgccttattttccttcatggtcattcagtcaagtgtctcataaagatcagctcctccctcagaatacaagttaatgcatgttactcagtcgcccagtatgtgaaagaagatatgagggagacaaatgagttgatagtttgaattataggatttttgccacgttaccttgatgcaaatttgccaaatctgatactgtgaaaagatttgataacttttctaatgcctgactagtaagttttaaaacatcattctttaaaagaatagtttaatacttttggttattccaatcttcaatgttaacccaaaggattctgagataaaaattatgtgtcatctaaacttcagtttacagacaaaattagagctttgttttatttggagaagggggatgcattcatttgattttgttttttgtttttaattaattgaatataataggatacctagcaaatgttttcacaaaagtgaatctttgtgattttcattctagaaaacaatgttttaaatcacccaaatttaatcacatgtctttatatcataccagataactggtgtagtgtatccttttactgtttcaataacctctgcctcccccaccccttaactttaaaagaatgtgaaaaactagcatcatagtgcatataaatactcaaccacatttcagcttaagcttctaatttctcaagaagttgaaacagttagttatgtagttgaagcaatttgtgtgcaaagcctacatctaaacacttgagtgaataatcattaactgctcagtaccagacgtggcaaatctcaagtgacagtggacccccccccccgcccagcttatcaactcgtcccctcttccacaccttcccagcatcacagtcagaggtcagcaggaagctgagtcattaccttcttggtgacctcccccaccatcttgtctcacttggaaaccgttgtcagtttatttactatgcaatagacattcattgttttgtatccagctagctttggtttaatatgccactgctttgtctttctgttacacatacagttttgatttatttacaatatatgctgtgccattttgatttttatattgtttggttggttgaataaatttgcgacactcaaacacttgaggtgatagttgttaaaaacaataccagtatttgatccagtttcatctcaactatgttatacctggacattttagatgtttatcaaaggtcttttatggggaagaaagtaaatgtatgaaataataaatgtgtgacatttatagggaatgttggctctgaacaaacttttgaaaacttggttgacaaaattttggatcaactgaaaaaagcatgacttttgaaatctctgaatgccttggttctcagtattatcattctttattgaatttatttcttattaaaatatgtagtttttaagactttttttctgacagtattatgtaattttttagcgtgggtagatgggagtgtcgcttgtatgttatcgtacagctgacatgtatttttgtctattctttattatcttagtttcatgctatgtatgtaccataaccaacctattgcctatgagaaacatgtaagataatgtatttacagccattgttacaagtttataatgtatttttctatcttgttttatatgtatgttatataacattcaaaaagaatttttttcttgattgagaaaaggatacaaaatgcaaaatccacaattttgataactgaaaattgccaattgttttgcagtactttattatattgggtgtcttgtcttttttgggcttttagttagctaatgaatgaatacattagacacttttgggttttagttgggattttacatagcttgcattttaattctttggttctttgctgtttctattaacccacagcattattttaataaatgttataataccaacctactaactctggactttgtctgtttattaacctttatatgtttaattaaaataaacaaataaagacaaaagaatgtaaagtcttgagttactggactaaccctgaagaacgtgaccacagataacatagtgtgacttgtttttatgttgtttgtcagctgacagttttgcacactactgttaaaatggctttggttattctggtcttttagcttgggggccggggcgggtgtgggtgtaggtgcagtagagatgggaacaaagtagcctttgtttgaggcattcttctcttgccacttgcctttcagcatctgcattactaattccacaccttatttttccttctccaaaataatcactgtctgctcacagcatcgagtaaaaagatacattgtcatggtatatacctggagaaaccagtttgattctttgttgaaccatttcttttaatttctgtaaataagtaattttatggtcacattgtaaagcagagaaactgttgatattttacctttatttagatttttgttttaacttgacctttttcctttggaaagcgttgaacttgtttagctaactactcctattaggggagcttaacttgggtaaagtcaaaggcccactggctgtttctcatggtggcctgaagccccgctgctttccagtgaggaaaagaaccctcagcacgttactgagctttcctcaggtatttttttctctgtcacctactttacaaatacagtcagactaaaacattaaacaagaagtttaagggggaataacattgggatttgaaaagttgtatgtgattaatttcttgcatgcaaatcaatttaagatttcttaaatatcttcatgcttttcttggctggaacttgggtaaattaacctgtaattatgaattatttagtttaactcaaggtgcatttttatttcacagattgatacttgcttttttctgtgaaacagttctcctagataccaaaatcctcaggatgaatttttgcatttgtaaataacaatttatctttgtaaattacattttatttatttagagttctaaaattgagggctgaaatgaatgacatgtaatagaagacaaaactgtaccaatacgctgttaaccaatcagactgtccaggtattctcatttcataaatatgtatacacacatataaatacacagagtagtgttagctgatgtgagtgataacagcgaatcaccattgagatggtcatttggatcatgtaaacaaaccgtgtcatgtctctgatgggagcggtgggtagtgtactgttaggtggacaggtcttttaacatgctactatttgtaaaagtttccgttgccataacagttcatgtagtagtctgtgaaaattcgaagctgtctgtcaagctgctaatatacaagttgtcatggtaccatgtaacttaaattgatgaatttctatgcaatttactattctctgaagcctatgaatgcagcctcatctcattttcagttaagggtactttatgtataattatgtcattgctgccttttatgtaggaaatgtaaaaaagttttaaaaggcgaaaataacattacagatttcatttttatacaggttacaatattaaacatgaaactaccaaattccaagaatagtaaaattctagagtcagttgattgattgaaactatttgacaaaacagttgaaagctgagctttcagtcaagaagttggtgaaattaatgtccttaaacttttcctttaggcaaaatgtcagggaaaacttaacatgaaagtagttactcccatacgcaccagtgcagtagctccaggtgtaagaggtcacgaaggcaccctgcccataaaaccaggatgtgcatacgtacacacaatcggtgtctggttatggttttctaaacactacataaggatctgaattttttagtgtgccaaaagcaaacgataggtttaaatgaaattgctcactaccaaatcaagactcttcatatatatacgtgtgtgtatatatatatgtcataacactttcacgtgtgacagcctaaggtttctttagttttaggatggggtggggtgggagtggttttgcatgtttgaccaggatgtgatgcctgtctttattccttgataagaagtagctgttacagcatttcaagcaaattattttaggtagaatagaacttactgccaaatgattatttatttagcaaaaattattctccaacttttcgaattcacaatttttctaagtgcatagagtagttttttacattgtcacgaattccttaatacctttatttaaaatggaaaaaatatggacaatattttagaaatatgtgctacacatctaattttatctgtagtttaagtgatctaaattgagatgcctttgatatgaagagatttaccaacattatatgcactcgtgccttcaatgtggaatcaaactggttaacctcagcacagtcctctcgtttctgtgtttctgctgcactaattgccagggggtgggggagaaggcgaatgaattaattcatagtagaaggaggcgataggtgcagcaaagggcagccacagtgttgattccacattataatgttgttgcctcttcttggcaaaagacaccacattgtgggaagatctcagcttccagggtaaaagttaatttataacttaaaagtgctattaagtttttattaccaaatatatcttttatggtttatattgtagtggtatgtatgaaacatttaaaattttactgtggaaattgtgtatatatatatatatagtcgaaataggtgttcacaggtcacatgtgaacggagaactgcatgaccgtacatgaaatgcaataaaccaactggaaaaagtgcatgtgcttcatcctctcaagccaactgcagctggaaagtgctgcttatcctccacccccagaaaatgcatgtatcaatatgagaataaagaacgcacactttcaattttattgaggctttcaacactatttaaaagaaaatgtaagaatttgacattctggagttattataacattagaaaatgagcataacattcactctgattttagccattaagggagattagtaaacagactgctacagtgttccatagttggactgtgcatccaaaacatttttttatctttaataaatggtacagtttttatgtagttttcgaatgtaagaagaaaggaatgctgaccaaaacttgatttcatcagcttcatgaaaaggactagtgtcattaacctgttgaacagaattggtttattaaaaaaatcatttccagtagtgtgaaacctttacgagtctttaacatctaaatgttatgactccttgtaccttaagttttccagtctttcttatttatatcatctccaagtacctctggctcctttcctcttgctcaccggaaccttagttttcctcaacagaatgctttgttaaagtagcccacagttgcaggatccatagcaccgtcgtgcagactagcagcccaaaggtgtgtttggtttggcttatacggtgttttgctttttaaactacttgccataatttaaaagtggcaacactagacttaaaaaaaaaaaagtctgattgcccatattagattttttttttaattcttcacaaaatctgctcttcctgaaagatcaaagtgtctagaaagcccaaacatgtattcttaacatagtaggcaccagctgaaactgagtaattaaacggtcccctgaagccaagtattccctggttagtcgccaccccaccactccttcctgtctctagtgtcacacttgggctgttgattttcttactcttctcttgctttaatccttccccccggctctctggctcctgtggatatctgtgcttgtttcctggtccaggatggtgatctgactttcaaaccagcttctcaaaaggggtgacataaaatcagttttgatgtttttcctcctgaaaaatcagatgaatattttagtcactgttactcatgcacattgtgttcttatgtttacagaagtgcttaagtgaatggaagcactagacatttggatttccttcctaacgtaatttttaatgattaccccttttatacagtaatttgtggtctttagaaagcagttaaactaattgaccatctaatagttgtactatacatatgtctaaaataatagtcatggtaagtttggcatcatatcttccccaaaaaatgtttattaaaattagattattccagtttaatgctattttgtgaactgtataccctctgaaagcgcttatttttacatgctacacaacagttccaattttaaggagtgtctcctaaaattgggatgaaaatctactgtagtctgttttaaagtatgctatactatgttcattggttacttaactggatattaatataaaggttattacaagaaaaatgatgaagagcaaaaggagaagaaaatatttgcaagtgaatccacaattcttgcagaactatttgagttgatactaaagattttatgttcactcctttaccttagaactgtcaagcttgggaatgaggaaagtgccttggctgtgcttgaaacctgaattttagtgcttcccttattacattcattgttttcaatgattgatttataaaattaagacatactggtagtacaagttgaaagttggtttgaatacattttaattaaatgataatatgttaatatgcttttgttcattgctttctcactgaggtaaaacagcattaaaaagttgtccagaatttaaactg

SEQ ID NO: 6020 - protein, 319 aa, Homo sapiens; identical to SEQ ID NO: 803

SEQ ID NO: 6021 - DNA, 9462 bp, Homo sapiens
tgaactgaggcgaactccgccgccaagtgagtgaggaggaggaggaggagaaggaggaggaggaagaggaggagcgcagtcggagcgcggcggcagcggcagaggcgccgcggcggggaccagcccagagagaccccccgagcccgcggcacaggcggcggcggcgctgagcgggctcgaccagccgagcgagcggcggccccggctcctcctcgtccggcgccagcagcccgcgccccgcgcccgcactcggccagccgagacccgcctcccgcccgcccgccggcctcgtgagggacgcgccgagccgggcggccgagagcggcggcggctgggagcgcgtcgggcccgggcggaaagtgcctgcggggggcgggcgagcgcgcggtgccggccgccccggggctcggcgcgggagccagagcgggagccggcgcggagcgggacgccgggtcccgagcggcccgcggccggggctcgcccccgcccctccctcctctccggcggcggcggcggcggcggcgggcggagtgagctgcggagcctggaatatggtcggggaaatggaaacgaaggagaagccgaagcccaccccagattacctgatgcagctgatgaacgacaagaagctcatgagcagcctgcccaacttctgcgggatcttcaaccacctcgagcggctgctggacgaagaaattagcagagtacggaaagacatgtacaatgacacattaaatggcagtacagagaaaaggagtgcagaattgcctgatgctgtgggacctattgttcagttacaagagaaactttatgtgcctgtaaaagaatacccagattttaattttgttgggagaatccttggacctagaggacttacagccaaacaacttgaagcagaaaccggatgtaaaatcatggtccgaggcaaaggctcaatgagggataaaaaaaaggaggagcaaaatagaggcaagcccaattgggagcatctaaatgaagatttacatgtactaatcactgtggaagatgctcagaacagagcagaaatcaaattgaagagagcagttgaagaagtgaagaaattattggtacctgcagcagaaggagaagacagcctgaagaagatgcagctgatggagcttgcgattctgaatggcacctacagagatgccaacattaaatcaccagcccttgccttttctcttgcagcaacagcccaggctgctccaaggatcattactgggcctgcgccggttctcccaccagctgccctgcgtactcctacgccagctggccctaccataatgcctttgatcagacaaatacagaccgctgtcatgccaaacggaactcctcacccaactgctgcaatagttcctccagggcccgaagctggtttaatctatacaccctatgagtacccctacacattggcaccagctacatcaatccttgagtatcctattgaacctagtggtgtattaggtgcggtggctactaaagttcgaaggcacgatatgcgtgtccatccttaccaaaggattgtgaccgcagaccgagccgccaccggcaactaacctatgaccttctgacctctgaactcttcacccaatgatgacctgaccatgcctgcctgctgatcagttaactggtaatcgcctttgcttgcctgtcgtcagtgcagcgagctgaggcacttgtccgttcgtcttaccatctaaccaaacaaaagacaaagaaattgttgtcctccaactcagctttttttttttttttttcctgtttgggtgaaagtggttctagaaactgcactgaatagtagtaaagcaataaggcccaattcatcccacagcactgatcatcttttaatatcccaccctaagcgaacggtaagaaggcctctcttaagaaggggagacagatggtccttaactactcaatgacagaggcagttactgtgagagacttctaggaatctttttcttctcatagcgaagtcaaagctctctctgaatgtactgtgtgatgatgcatcatgcatgaaccttcggtcagggatatcattggtgaagtgatttcaaaaagtattcaaaatttgatatgctgtttagtcactacagtgccctcaaagggcagaagttgcagccttttttatattgcctgccaaaatttgaagtattagaagaaagtgtgccatgagagaaaaacttaaggagttttgaaaagtaatgcaaataacaaaactgcaacactatttttaaaaagataaatatctgagttaaaattactgaatctttattttacacctaaaaaaatatgagaacaaggtacatgcattatgtgtcacattactgggcaaactgttcaagtatttttttttaaacctccctgtatagaaaaaaatcattaaggatgtaaaagccatgcttgcctatttgctgtatacatgtaatgaaattgtagataaagtgtagtgcattgaaacaaatgaacaaaaagtagatacttttactatacaagggtgctggtgcagaaaaaaatatatatatttttggaaatgtagcattttatactttcaagtgttataaaaaaaaagaaaaagaacaaagaaaccctttatttcattaaatgattttttctggtggttgtcaagaaacaaaagaccaaaagagcctttttgtctttcttttttattttttaagtattggaataagtctaaagaaaagaaagtgccttattttccttcatggtcattcagtcaagtgtctcataaagatcagctcctccctcagaatacaagttaatgcatgttactcagtcgcccagtatgtgaaagaagatatgagggagacaaatgagttgatagtttgaattataggatttttgccacgttaccttgatgcaaatttgccaaatctgatactgtgaaaagatttgataacttttctaatgcctgactagtaagttttaaaacatcattctttaaaagaatagtttaatacttttggttattccaatcttcaatgttaacccaaaggattctgagataaaaattatgtgtcatctaaacttcagtttacagacaaaattagagctttgttttatttggagaagggggatgcattcatttgattttgttttttgtttttaattaattgaatataataggatacctagcaaatgttttcacaaaagtgaatctttgtgattttcattctagaaaacaatgttttaaatcacccaaatttaatcacatgtctttatatcataccagataactggtgtagtgtatccttttactgtttcaataacctctgcctcccccaccccttaactttaaaagaatgtgaaaaactagcatcatagtgcatataaatactcaaccacatttcagcttaagcttctaatttctcaagaagttgaaacagttagttatgtagttgaagcaatttgtgtgcaaagcctacatctaaacacttgagtgaataatcattaactgctcagtaccagacgtggcaaatctcaagtgacagtggacccccccccccgcccagcttatcaactcgtcccctcttccacaccttcccagcatcacagtcagaggtcagcaggaagctgagtcattaccttcttggtgacctcccccaccatcttgtctcacttggaaaccgttgtcagtttatttactatgcaatagacattcattgttttgtatccagctagctttggtttaatatgccactgctttgtctttctgttacacatacagttttgatttatttacaatatatgctgtgccattttgatttttatattgtttggttggttgaataaatttgcgacactcaaacacttgaggtgatagttgttaaaaacaataccagtatttgatccagtttcatctcaactatgttatacctggacattttagatgtttatcaaaggtcttttatggggaagaaagtaaatgtatgaaataataaatgtgtgacatttatagggaatgttggctctgaacaaacttttgaaaacttggttgacaaaattttggatcaactgaaaaaagcatgacttttgaaatctctgaatgccttggttctcagtattatcattctttattgaatttatttcttattaaaatatgtagtttttaagactttttttctgacagtattatgtaattttttagcgtgggtagatgggagtgtcgcttgtatgttatcgtacagctgacatgtatttttgtctattctttattatcttagtttcatgctatgtatgtaccataaccaacctattgcctatgagaaacatgtaagataatgtatttacagccattgttacaagtttataatgtatttttctatcttgttttatatgtatgttatataacattcaaaaagaatttttttcttgattgagaaaaggatacaaaatgcaaaatccacaattttgataactgaaaattgccaattgttttgcagtactttattatattgggtgtcttgtcttttttgggcttttagttagctaatgaatgaatacattagacacttttgggttttagttgggattttacatagcttgcattttaattctttggttctttgctgtttctattaacccacagcattattttaataaatgttataataccaacctactaactctggactttgtctgtttattaacctttatatgtttaattaaaataaacaaataaagacaaaagaatgtaaagtcttgagttactggactaaccctgaagaacgtgaccacagataacatagtgtgacttgtttttatgttgtttgtcagctgacagttttgcacactactgttaaaatggctttggttattctggtcttttagcttgggggccggggcgggtgtgggtgtaggtgcagtagagatgggaacaaagtagcctttgtttgaggcattcttctcttgccacttgcctttcagcatctgcattactaattccacaccttatttttccttctccaaaataatcactgtctgctcacagcatcgagtaaaaagatacattgtcatggtatatacctggagaaaccagtttgattctttgttgaaccatttcttttaatttctgtaaataagtaattttatggtcacattgtaaagcagagaaactgttgatattttacctttatttagatttttgttttaacttgacctttttcctttggaaagcgttgaacttgtttagctaactactcctattaggggagcttaacttgggtaaagtcaaaggcccactggctgtttctcatggtggcctgaagccccgctgctttccagtgaggaaaagaaccctcagcacgttactgagctttcctcaggtatttttttctctgtcacctactttacaaatacagtcagactaaaacattaaacaagaagtttaagggggaataacattgggatttgaaaagttgtatgtgattaatttcttgcatgcaaatcaatttaagatttcttaaatatcttcatgcttttcttggctggaacttgggtaaattaacctgtaattatgaattatttagtttaactcaaggtgcatttttatttcacagattgatacttgcttttttctgtgaaacagttctcctagataccaaaatcctcaggatgaatttttgcatttgtaaataacaatttatctttgtaaattacattttatttatttagagttctaaaattgagggctgaaatgaatgacatgtaatagaagacaaaactgtaccaatacgctgttaaccaatcagactgtccaggtattctcatttcataaatatgtatacacacatataaatacacagagtagtgttagctgatgtgagtgataacagcgaatcaccattgagatggtcatttggatcatgtaaacaaaccgtgtcatgtctctgatgggagcggtgggtagtgtactgttaggtggacaggtcttttaacatgctactatttgtaaaagtttccgttgccataacagttcatgtagtagtctgtgaaaattcgaagctgtctgtcaagctgctaatatacaagttgtcatggtaccatgtaacttaaattgatgaatttctatgcaatttactattctctgaagcctatgaatgcagcctcatctcattttcagttaagggtactttatgtataattatgtcattgctgccttttatgtaggaaatgtaaaaaagttttaaaaggcgaaaataacattacagatttcatttttatacaggttacaatattaaacatgaaactaccaaattccaagaatagtaaaattctagagtcagttgattgattgaaactatttgacaaaacagttgaaagctgagctttcagtcaagaagttggtgaaattaatgtccttaaacttttcctttaggcaaaatgtcagggaaaacttaacatgaaagtagttactcccatacgcaccagtgcagtagctccaggtgtaagaggtcacgaaggcaccctgcccataaaaccaggatgtgcatacgtacacacaatcggtgtctggttatggttttctaaacactacataaggatctgaattttttagtgtgccaaaagcaaacgataggtttaaatgaaattgctcactaccaaatcaagactcttcatatatatacgtgtgtgtatatatatatgtcataacactttcacgtgtgacagcctaaggtttctttagttttaggatggggtggggtgggagtggttttgcatgtttgaccaggatgtgatgcctgtctttattccttgataagaagtagctgttacagcatttcaagcaaattattttaggtagaatagaacttactgccaaatgattatttatttagcaaaaattattctccaacttttcgaattcacaatttttctaagtgcatagagtagttttttacattgtcacgaattccttaatacctttatttaaaatggaaaaaatatggacaatattttagaaatatgtgctacacatctaattttatctgtagtttaagtgatctaaattgagatgcctttgatatgaagagatttaccaacattatatgcactcgtgccttcaatgtggaatcaaactggttaacctcagcacagtcctctcgtttctgtgtttctgctgcactaattgccagggggtgggggagaaggcgaatgaattaattcatagtagaaggaggcgataggtgcagcaaagggcagccacagtgttgattccacattataatgttgttgcctcttcttggcaaaagacaccacattgtgggaagatctcagcttccagggtaaaagttaatttataacttaaaagtgctattaagtttttattaccaaatatatcttttatggtttatattgtagtggtatgtatgaaacatttaaaattttactgtggaaattgtgtatatatatatatatagtcgaaataggtgttcacaggtcacatgtgaacggagaactgcatgaccgtacatgaaatgcaataaaccaactggaaaaagtgcatgtgcttcatcctctcaagccaactgcagctggaaagtgctgcttatcctccacccccagaaaatgcatgtatcaatatgagaataaagaacgcacactttcaattttattgaggctttcaacactatttaaaagaaaatgtaagaatttgacattctggagttattataacattagaaaatgagcataacattcactctgattttagccattaagggagattagtaaacagactgctacagtgttccatagttggactgtgcatccaaaacatttttttatctttaataaatggtacagtttttatgtagttttcgaatgtaagaagaaaggaatgctgaccaaaacttgatttcatcagcttcatgaaaaggactagtgtcattaacctgttgaacagaattggtttattaaaaaaatcatttccagtagtgtgaaacctttacgagtctttaacatctaaatgttatgactccttgtaccttaagttttccagtctttcttatttatatcatctccaagtacctctggctcctttcctcttgctcaccggaaccttagttttcctcaacagaatgctttgttaaagtagcccacagttgcaggatccatagcaccgtcgtgcagactagcagcccaaaggtgtgtttggtttggcttatacggtgttttgctttttaaactacttgccataatttaaaagtggcaacactagacttaaaaaaaaaaaagtctgattgcccatattagattttttttttaattcttcacaaaatctgctcttcctgaaagatcaaagtgtctagaaagcccaaacatgtattcttaacatagtaggcaccagctgaaactgagtaattaaacggtcccctgaagccaagtattccctggttagtcgccaccccaccactccttcctgtctctagtgtcacacttgggctgttgattttcttactcttctcttgctttaatccttccccccggctctctggctcctgtggatatctgtgcttgtttcctggtccaggatggtgatctgactttcaaaccagcttctcaaaaggggtgacataaaatcagttttgatgtttttcctcctgaaaaatcagatgaatattttagtcactgttactcatgcacattgtgttcttatgtttacagaagtgcttaagtgaatggaagcactagacatttggatttccttcctaacgtaatttttaatgattaccccttttatacagtaatttgtggtctttagaaagcagttaaactaattgaccatctaatagttgtactatacatatgtctaaaataatagtcatggtaagtttggcatcatatcttccccaaaaaatgtttattaaaattagattattccagtttaatgctattttgtgaactgtataccctctgaaagcgcttatttttacatgctacacaacagttccaattttaaggagtgtctcctaaaattgggatgaaaatctactgtagtctgttttaaagtatgctatactatgttcattggttacttaactggatattaatataaaggttattacaagaaaaatgatgaagagcaaaaggagaagaaaatatttgcaagtgaatccacaattcttgcagaactatttgagttgatactaaagattttatgttcactcctttaccttagaactgtcaagcttgggaatgaggaaagtgccttggctgtgcttgaaacctgaattttagtgcttcccttattacattcattgttttcaatgattgatttataaaattaagacatactggtagtacaagttgaaagttggtttgaatacattttaattaaatgataatatgttaatatgcttttgttcattgctttctcactgaggtaaaacagcattaaaaagttgtccagaatttaaactg

SEQ ID NO: 6022 - protein, 341 aa, Homo sapiens; identical to SEQ ID NO: 801

SEQ ID NO: 6023 - DNA, 785 bp, Homo sapiens
gtgagtgaggaggaggaggaggagaaggaggaggaggaagaggaggagcgcagtcggagcgcggcggcagcggcagaggcgccgcggcggggaccagcccagagagaccccccgagcccgcggcacaggcggcggcggcgctgagcgggctcgaccagccgagcgagcggcggccccggctcctcctcgtccggcgccagcagcccgcgccccgcgcccgcactcggccagccgagacccgcctcccgcccgcccgccggcctcgtgagggacgcgccgagccgggcggccgagagcggcggcggctgggagcgcgtcgggcccgggcggaaagtgcctgcggggggcgggcgagcgcgcggtgccggccgccccggggctcggcgcgggagccagagcgggagccggcgcggagcgggacgccgggtcccgagcggcccgcggccggggctcgcccccgcccctccctcctctccggcggcggcggcggcggcggcgggcggagtgagctgcggagcctggaatatggtcggggaaatggaaacgaaggagaagccgaagcccaccccagattacctgatgcagctgatgaacgacaagaagctcatgagcagcctgcccaacttctgcgggatcttcaaccacctcgagcggctgctggacgaaggtgagcgtctccagggccccggccccggcccgacccccgagtgcagaattgcctgatgctgtgggacctattgttcagttacaagagaaactttatgtgcctgtaaaagaatacccag

SEQ ID NO: 6024 - protein, 65 aa, Homo sapiens
MVGEMETKEKPKPTPDYLMQLMNDKKLMSSLPNFCGIFNHLERLLDEGERLQGPGPGPTPECRIA

SEQ ID NO: 6025 - DNA, 495 bp, Homo sapiens
tggggattggaatgtcactagagaacaaaaggccggaaatgtttccatgataaaaaatggttaaagaaaaatcccaggagttctgttgtcttgaaagtcatagaaacaacttaaaagtagaaaatggttaggtgttacggctttctcgtcgttttgcttccgtatgttaaacatacagcactcaccaacgttgaaatgggcattttccgctgttggaacagcaaatctgttaatttcaagttgctccagagaaaacctgagctgtccctttaaggggttctgcttttcctatttgtgttggcatttgaaagattgtggaggcagaaaactttctggaatgtcaaaaaaaaaaaaaaaatgctggaactcttaaattgagtatttccaaatgtgagcgctaaggggcgccagttattttttaaccatggaaatggttggaacaaaatgtgtaacatactcaatctgactgacctatattaaatttagttgaaactt

SEQ ID NO: 6026 - protein, 69 aa, Homo sapiens
MLNIQHSPTLKWAFSAVGTANLLISSCSRENLSCPFKGFCFSYLCWHLKDCGGRKLSGMSKKKKKCWNS

SEQ ID NO: 6027 - DNA, 12839 bp, Homo sapiens
agtacctgaagtattaatttctagtagctgtgggtttctgtggacgcctagagaaaaaaaagaccacaaaaaaagtctgtttcgaaaatcgactggccaggagtttgtttgtttttttttcctgcttagaggcaccaccggaggactgtgtaaaggaaactgaaaactacagaaattagcagagtacggaaagacatgtacaatgacacattaaatggcagtacagagaaaaggagtgcagaattgcctgatgctgtgggacctattgttcagttacaagagaaactttatgtgcctgtaaaagaatacccagattttaattttgttgggagaatccttggacctagaggacttacagccaaacaacttgaagcagaaaccggatgtaaaatcatggtccgaggcaaaggctcaatgagggataaaaaaaaggaggagcaaaatagaggcaagcccaattgggagcatctaaatgaagatttacatgtactaatcactgtggaagatgctcagaacagagcagaaatcaaattgaagagagcagttgaagaagtgaagaaattattggtacctgcagcagaaggagaagacagcctgaagaagatgcagctgatggagcttgcgattctgaatggcacctacagagatgccaacattaaatcaccagcccttgccttttctcttgcagcaacagcccaggctgctccaaggatcattactgggcctgcgccggttctcccaccagctgccctgcgtactcctacgccagctggccctaccataatgcctttgatcagacaaatacagaccgctgtcatgccaaacggaactcctcacccaactgctgcaatagttcctccagggcccgaagctggtttaatctatacaccctatgagtacccctacacattggcaccagctacatcaatccttgagtatcctattgaacctagtggtgtattaggtgcggtggctactaaagttcgaaggcacgatatgcgtgtccatccttaccaaaggattgtgaccgcagaccgaggttagtttagttctgcagttcttgtctataagaaatgcgttgggtgtccataaaatttgcaacaccacacctgatggaaaaatgtaattgcttacctgcacacagttttttttccttttctaaatttgtttgtgatcattgacagatttaagggttgggttttttgttttggtttggttttttctcccttcatattttaacttattaaatcttctattattatgtactatgatttattcctactaaaacataaattagtcaatttggggagctattaaattttgatgttgcctcagttattttcattaataacttttgctaaaatttaccttttaaaagttctgaaatttggggttggtattgcaaaatgaattgaacggatggtgctttaatgagagaagtaaaggaatatatgcctcctgtgtacttttggagaaaactgaagatttagtttccatttttctttataataaaatatttgagccactgtataaacatgagggtgcacatgtcaagtacttagctaaaatcaacaaagtgaggactgtgaagataactttcatgtagttggatttttttatataaattagagcgtcaattcccttttattcttacattctcttgccaaaatggatcctttgatttttgtcatttgctgctaaaatatattatctgaaggtaaactgtctcttgaagttctgtggtggtatgagatccagctgtgtgaatataatttttgactaacctgtgactggaaaataagtcttcatttttctcctttacaacttttataatttgtgtcctgtatatgcccttggacccttttataaattatttttgcttattgaggaatggtattttcggtttattgacattgaattgttttctaagtttttccatcacaagataggaatatcaagcatggtagtaaaaaaggattttttacaagtttctattatggcacatttgtttcctacaaattaaattgatcaaagtctcaaatattagtggaggaaaaagtgctggatttgtacttcaattgtacatcttctatgaatttatgaaggacctacctgctttatgtgattaccttgagtactgatgataaatactagacacagctgttgtccacatcagaaataacatgcctttcccaaagacattgttaatatttgtttagcataatccataaagaacgttgaagacttttaaactaatgtattcatcactaacagtgattgttcagtgaacaaaatagaccccagctccgtggtcgtctatgaggatggtattccttgtaagtgttctgtatgagcacgtctcatagggatggggaagttttttggaaagtcacttgagttttaaagaaactggacaattccatgaataatttgaggttttattcatattgctaatgtctacaattgttctaaagagtattttaaagtagtttttttcccccagctaatctttccctatgtatgcccccttttaggagatttctcaccattttgctttaacacaataattattggcctacttaatactccagtgccttgagatagttggacatattttaggaagattttattgtatttggaaaattacgacacattccatgcatggatcttttgtagttacgtgttttgattagtcctgtcactgtttttatttaaaatgcagtgtcagcaaaccgaaatgctcatttcttttttagtaacagagtactcgtatacttatcactgtatgcactcattgggtctaagggagatgtctgaagtccttcacttaaattattttatgatactactgttttctctatttttgaggttaaaattattttaaaaaaatattttgaagagaagtttattagtataagcattcatttaatgcaaaaaaactcagcccttggacatataaccatgtaattctatatgaacgtttagagtactacatggttgaccaatatctagttctttactaaaagtaaactcacctctttatatatatttcaaaactgaatttgaagcctattagagaccaactgaccttttagttgtaatgaactgtatggtcttgcatggtgacacacctgtgtaggaggccaagacttggcagaggatgtagtctaggtgtcctggtatatataaatggtcactcacttcgtttatatattccacactcagaaaagaagtcagagttttttctgagtaatacaaaaaccatcacttacataatttgtataagaaactttaaacagttttaatcaaaactatgagtaacatcaaaaatgctttaagattctatattttggaatacctgtgaagtagtatgactacatcatgttaaatatttattttcttctatgattttggagcagcaatttttattttaaataaaattccacttttaagaaattcagggaagatttggtcacattgaagatacagtatttttgtagtatttataaactgttctaaatgatagactatagaaaacatttttgtcatatgaaggtaaatcagtccattattttggatcatttaaactgaacattacaccttctgggctttgatttatgaagtggcacagaatctaactttgcactgaatatcttttcattcacatctcctctgccttagtcacaatggcaacagtacagaaaattctatcaaacctcagaatatagtagaaataattaagctgttgaatgagtcttaaaaattatactactgttaagtggaccaagtttggtgaagcagaatgtgacaaaggttgattaaggaaggaacaactcaaggacattgggaatgataacttttccacttgagaactactttatgttttactgtaatttttaaagtttttttgtcctttttgttattttgcaaaagaaaatagtatttacaggtggcttcttttaaaatataaaaatataaagcaggaatgtatatgaaatgtcagattttattgtatttgcagagtattagctttgaaattgaataaagaaagctgtttgtagttttaaaatgccttattggtatcaattagaaatttcttctattttttgatgtacttagagctttttgagtgtagaattttaaatggcaggattttacagtgtttacatgcaagtgcattttataagtgttctatatgtgtaaaatagtattttcaactggaaagtgttggctagtgcaaaaggcctggccattttctggttcccatgatgttgcctacactgctagactacagtttagtatcgctttgtatcatgaggccaagaaattccatgttgtttgtaaatagaataattgaaaaagcaataaacatttattgaacaaaagaaaccttgtttggcccagagtttatgttgaaccaaatggttcatagaattttgaatttctttagattcatttctgttaatcatcagttattaataatcacatccatcattaatagttgctttaatgcttgcatcttagagaatactaatgcttaatagcagtcagatactgataactgcactgactgtttaaaaattctgtataccaaacctattcattgttgtttttcaatttccttcattgactgctactaactattagttgttagttgtattttatttctattttttcttgttaaccagttttttttttttttttgtgggagtgggctcttcttcatttgttcaaatcatgatacgaaattgtcatgattttaattgtattctgtagatggtgtcaatcagtttgtcagaattaaacatgcttttttttttattagttgtgattagtttttcatgttgtcattaagccgtcactagctgaaactaatctcttctctatcttttcttttcttttttttgttttgtttttttttgtttctaaccacccagccgccaccggcaactaacctatgaccttctgacctctgaactcttcacccaatgatgacctgaccatgcctgcctgctgatcagttaactggtaatcgcctttgcttgcctgtcgtcagtgcagcgagctgaggcacttgtccgttcgtcttaccatctaaccaaacaaaagacaaagaaattgttgtcctccaactcagctttttttttttttttttcctgtttgggtgaaagtggttctagaaactgcactgaatagtagtaaagcaataaggcccaattcatcccacagcactgatcatcttttaatatcccaccctaagcgaacggtaagaaggcctctcttaagaaggggagacagatggtccttaactactcaatgacagaggcagttactgtgagagacttctaggaatctttttcttctcatagcgaagtcaaagctctctctgaatgtactgtgtgatgatgcatcatgcatgaaccttcggtcagggatatcattggtgaagtgatttcaaaaagtattcaaaatttgatatgctgtttagtcactacagtgccctcaaagggcagaagttgcagccttttttatattgcctgccaaaatttgaagtattagaagaaagtgtgccatgagagaaaaacttaaggagttttgaaaagtaatgcaaataacaaaactgcaacactatttttaaaaagataaatatctgagttaaaattactgaatctttattttacacctaaaaaaatatgagaacaaggtacatgcattatgtgtcacattactgggcaaactgttcaagtatttttttttaaacctccctgtatagaaaaaaatcattaaggatgtaaaagccatgcttgcctatttgctgtatacatgtaatgaaattgtagataaagtgtagtgcattgaaacaaatgaacaaaaagtagatacttttactatacaagggtgctggtgcagaaaaaaatatatatatttttggaaatgtagcattttatactttcaagtgttataaaaaaaaagaaaaagaacaaagaaaccctttatttcattaaatgattttttctggtggttgtcaagaaacaaaagaccaaaagagcctttttgtctttcttttttattttttaagtattggaataagtctaaagaaaagaaagtgccttattttccttcatggtcattcagtcaagtgtctcataaagatcagctcctccctcagaatacaagttaatgcatgttactcagtcgcccagtatgtgaaagaagatatgagggagacaaatgagttgatagtttgaattataggatttttgccacgttaccttgatgcaaatttgccaaatctgatactgtgaaaagatttgataacttttctaatgcctgactagtaagttttaaaacatcattctttaaaagaatagtttaatacttttggttattccaatcttcaatgttaacccaaaggattctgagataaaaattatgtgtcatctaaacttcagtttacagacaaaattagagctttgttttatttggagaagggggatgcattcatttgattttgttttttgtttttaattaattgaatataataggatacctagcaaatgttttcacaaaagtgaatctttgtgattttcattctagaaaacaatgttttaaatcacccaaatttaatcacatgtctttatatcataccagataactggtgtagtgtatccttttactgtttcaataacctctgcctcccccaccccttaactttaaaagaatgtgaaaaactagcatcatagtgcatataaatactcaaccacatttcagcttaagcttctaatttctcaagaagttgaaacagttagttatgtagttgaagcaatttgtgtgcaaagcctacatctaaacacttgagtgaataatcattaactgctcagtaccagacgtggcaaatctcaagtgacagtggacccccccccccgcccagcttatcaactcgtcccctcttccacaccttcccagcatcacagtcagaggtcagcaggaagctgagtcattaccttcttggtgacctcccccaccatcttgtctcacttggaaaccgttgtcagtttatttactatgcaatagacattcattgttttgtatccagctagctttggtttaatatgccactgctttgtctttctgttacacatacagttttgatttatttacaatatatgctgtgccattttgatttttatattgtttggttggttgaataaatttgcgacactcaaacacttgaggtgatagttgttaaaaacaataccagtatttgatccagtttcatctcaactatgttatacctggacattttagatgtttatcaaaggtcttttatggggaagaaagtaaatgtatgaaataataaatgtgtgacatttatagggaatgttggctctgaacaaacttttgaaaacttggttgacaaaattttggatcaactgaaaaaagcatgacttttgaaatctctgaatgccttggttctcagtattatcattctttattgaatttatttcttattaaaatatgtagtttttaagactttttttctgacagtattatgtaattttttagcgtgggtagatgggagtgtcgcttgtatgttatcgtacagctgacatgtatttttgtctattctttattatcttagtttcatgctatgtatgtaccataaccaacctattgcctatgagaaacatgtaagataatgtatttacagccattgttacaagtttataatgtatttttctatcttgttttatatgtatgttatataacattcaaaaagaatttttttcttgattgagaaaaggatacaaaatgcaaaatccacaattttgataactgaaaattgccaattgttttgcagtactttattatattgggtgtcttgtcttttttgggcttttagttagctaatgaatgaatacattagacacttttgggttttagttgggattttacatagcttgcattttaattctttggttctttgctgtttctattaacccacagcattattttaataaatgttataataccaacctactaactctggactttgtctgtttattaacctttatatgtttaattaaaataaacaaataaagacaaaagaatgtaaagtcttgagttactggactaaccctgaagaacgtgaccacagataacatagtgtgacttgtttttatgttgtttgtcagctgacagttttgcacactactgttaaaatggctttggttattctggtcttttagcttgggggccggggcgggtgtgggtgtaggtgcagtagagatgggaacaaagtagcctttgtttgaggcattcttctcttgccacttgcctttcagcatctgcattactaattccacaccttatttttccttctccaaaataatcactgtctgctcacagcatcgagtaaaaagatacattgtcatggtatatacctggagaaaccagtttgattctttgttgaaccatttcttttaatttctgtaaataagtaattttatggtcacattgtaaagcagagaaactgttgatattttacctttatttagatttttgttttaacttgacctttttcctttggaaagcgttgaacttgtttagctaactactcctattaggggagcttaacttgggtaaagtcaaaggcccactggctgtttctcatggtggcctgaagccccgctgctttccagtgaggaaaagaaccctcagcacgttactgagctttcctcaggtatttttttctctgtcacctactttacaaatacagtcagactaaaacattaaacaagaagtttaagggggaataacattgggatttgaaaagttgtatgtgattaatttcttgcatgcaaatcaatttaagatttcttaaatatcttcatgcttttcttggctggaacttgggtaaattaacctgtaattatgaattatttagtttaactcaaggtgcatttttatttcacagattgatacttgcttttttctgtgaaacagttctcctagataccaaaatcctcaggatgaatttttgcatttgtaaataacaatttatctttgtaaattacattttatttatttagagttctaaaattgagggctgaaatgaatgacatgtaatagaagacaaaactgtaccaatacgctgttaaccaatcagactgtccaggtattctcatttcataaatatgtatacacacatataaatacacagagtagtgttagctgatgtgagtgataacagcgaatcaccattgagatggtcatttggatcatgtaaacaaaccgtgtcatgtctctgatgggagcggtgggtagtgtactgttaggtggacaggtcttttaacatgctactatttgtaaaagtttccgttgccataacagttcatgtagtagtctgtgaaaattcgaagctgtctgtcaagctgctaatatacaagttgtcatggtaccatgtaacttaaattgatgaatttctatgcaatttactattctctgaagcctatgaatgcagcctcatctcattttcagttaagggtactttatgtataattatgtcattgctgccttttatgtaggaaatgtaaaaaagttttaaaaggcgaaaataacattacagatttcatttttatacaggttacaatattaaacatgaaactaccaaattccaagaatagtaaaattctagagtcagttgattgattgaaactatttgacaaaacagttgaaagctgagctttcagtcaagaagttggtgaaattaatgtccttaaacttttcctttaggcaaaatgtcagggaaaacttaacatgaaagtagttactcccatacgcaccagtgcagtagctccaggtgtaagaggtcacgaaggcaccctgcccataaaaccaggatgtgcatacgtacacacaatcggtgtctggttatggttttctaaacactacataaggatctgaattttttagtgtgccaaaagcaaacgataggtttaaatgaaattgctcactaccaaatcaagactcttcatatatatacgtgtgtgtatatatatatgtcataacactttcacgtgtgacagcctaaggtttctttagttttaggatggggtggggtgggagtggttttgcatgtttgaccaggatgtgatgcctgtctttattccttgataagaagtagctgttacagcatttcaagcaaattattttaggtagaatagaacttactgccaaatgattatttatttagcaaaaattattctccaacttttcgaattcacaatttttctaagtgcatagagtagttttttacattgtcacgaattccttaatacctttatttaaaatggaaaaaatatggacaatattttagaaatatgtgctacacatctaattttatctgtagtttaagtgatctaaattgagatgcctttgatatgaagagatttaccaacattatatgcactcgtgccttcaatgtggaatcaaactggttaacctcagcacagtcctctcgtttctgtgtttctgctgcactaattgccagggggtgggggagaaggcgaatgaattaattcatagtagaaggaggcgataggtgcagcaaagggcagccacagtgttgattccacattataatgttgttgcctcttcttggcaaaagacaccacattgtgggaagatctcagcttccagggtaaaagttaatttataacttaaaagtgctattaagtttttattaccaaatatatcttttatggtttatattgtagtggtatgtatgaaacatttaaaattttactgtggaaattgtgtatatatatatatatagtcgaaataggtgttcacaggtcacatgtgaacggagaactgcatgaccgtacatgaaatgcaataaaccaactggaaaaagtgcatgtgcttcatcctctcaagccaactgcagctggaaagtgctgcttatcctccacccccagaaaatgcatgtatcaatatgagaataaagaacgcacactttcaattttattgaggctttcaacactatttaaaagaaaatgtaagaatttgacattctggagttattataacattagaaaatgagcataacattcactctgattttagccattaagggagattagtaaacagactgctacagtgttccatagttggactgtgcatccaaaacatttttttatctttaataaatggtacagtttttatgtagttttcgaatgtaagaagaaaggaatgctgaccaaaacttgatttcatcagcttcatgaaaaggactagtgtcattaacctgttgaacagaattggtttattaaaaaaatcatttccagtagtgtgaaacctttacgagtctttaacatctaaatgttatgactccttgtaccttaagttttccagtctttcttatttatatcatctccaagtacctctggctcctttcctcttgctcaccggaaccttagttttcctcaacagaatgctttgttaaagtagcccacagttgcaggatccatagcaccgtcgtgcagactagcagcccaaaggtgtgtttggtttggcttatacggtgttttgctttttaaactacttgccataatttaaaagtggcaacactagacttaaaaaaaaaaaagtctgattgcccatattagattttttttttaattcttcacaaaatctgctcttcctgaaagatcaaagtgtctagaaagcccaaacatgtattcttaacatagtaggcaccagctgaaactgagtaattaaacggtcccctgaagccaagtattccctggttagtcgccaccccaccactccttcctgtctctagtgtcacacttgggctgttgattttcttactcttctcttgctttaatccttccccccggctctctggctcctgtggatatctgtgcttgtttcctggtccaggatggtgatctgactttcaaaccagcttctcaaaaggggtgacataaaatcagttttgatgtttttcctcctgaaaaatcagatgaatattttagtcactgttactcatgcacattgtgttcttatgtttacagaagtgcttaagtgaatggaagcactagacatttggatttccttcctaacgtaatttttaatgattaccccttttatacagtaatttgtggtctttagaaagcagttaaactaattgaccatctaatagttgtactatacatatgtctaaaataatagtcatggtaagtttggcatcatatcttccccaaaaaatgtttattaaaattagattattccagtttaatgctattttgtgaactgtataccctctgaaagcgcttatttttacatgctacacaacagttccaattttaaggagtgtctcctaaaattgggatgaaaatctactgtagtctgttttaaagtatgctatactatgttcattggttacttaactggatattaatataaaggttattacaagaaaaatgatgaagagcaaaaggagaagaaaatatttgcaagtgaatccacaattcttgcagaactatttgagttgatactaaagattttatgttcactcctttaccttagaactgtcaagcttgggaatgaggaaagtgccttggctgtgcttgaaacctgaattttagtgcttcccttattacattcattgttttcaatgattgatttataaaattaagacatactggtagtacaagttgaaagttggtttgaatacattttaattaaatgataatatgttaatatgcttttgttcattgctttctcactgaggtaaaacagcattaaaaagttgtccagaatttaaactg

SEQ ID NO: 6028 - protein, 282 aa, Homo sapiens
MYNDTLNGSTEKRSAELPDAVGPIVQLQEKLYVPVKEYPDFNFVGRILGPRGLTAKQLEAETGCKIMVRGKGSMRDKKKEEQNRGKPNWEHLNEDLHVLITVEDAQNRAEIKLKRAVEEVKKLLVPAAEGEDSLKKMQLMELAILNGTYRDANIKSPALAFSLAATAQAAPRIITGPAPVLPPAALRTPTPAGPTIMPLIRQIQTAVMPNGTPHPTAAIVPPGPEAGLIYTPYEYPYTLAPATSILEYPIEPSGVLGAVATKVRRHDMRVHPYQRIVTADRG

SEQ ID NO: 6029 - DNA, 8941 bp, Homo sapiens
agtacctgaagtattaatttctagtagctgtgggtttctgtggacgcctagagaaaaaaaagaccacaaaaaaagtctgtttcgaaaatcgactggccaggagtttgtttgtttttttttcctgcttagaggcaccaccggaggactgtgtaaaggaaactgaaaactacagaaattagcagagtacggaaagacatgtacaatgacacattaaatggcagtacagagaaaaggagtgcagaattgcctgatgctgtgggacctattgttcagttacaagagaaactttatgtgcctgtaaaagaatacccagattttaattttgttgggagaatccttggacctagaggacttacagccaaacaacttgaagcagaaaccggatgtaaaatcatggtccgaggcaaaggctcaatgagggataaaaaaaaggaggagcaaaatagaggcaagcccaattgggagcatctaaatgaagatttacatgtactaatcactgtggaagatgctcagaacagagcagaaatcaaattgaagagagcagttgaagaagtgaagaaattattggtacctgcagcagaaggagaagacagcctgaagaagatgcagctgatggagcttgcgattctgaatggcacctacagagatgccaacattaaatcaccagcccttgccttttctcttgcagcaacagcccaggctgctccaaggatcattactgggcctgcgccggttctcccaccagctgccctgcgtactcctacgccagctggccctaccataatgcctttgatcagacaaatacagaccgctgtcatgccaaacggaactcctcacccaactgctgcaatagttcctccagggcccgaagctggtttaatctatacaccctatgagtacccctacacattggcaccagctacatcaatccttgagtatcctattgaacctagtggtgtattaggtgcggtggctactaaagttcgaaggcacgatatgcgtgtccatccttaccaaaggattgtgaccgcagaccgagccgccaccggcaactaacctatgaccttctgacctctgaactcttcacccaatgatgacctgaccatgcctgcctgctgatcagttaactggtaatcgcctttgcttgcctgtcgtcagtgcagcgagctgaggcacttgtccgttcgtcttaccatctaaccaaacaaaagacaaagaaattgttgtcctccaactcagctttttttttttttttttcctgtttgggtgaaagtggttctagaaactgcactgaatagtagtaaagcaataaggcccaattcatcccacagcactgatcatcttttaatatcccaccctaagcgaacggtaagaaggcctctcttaagaaggggagacagatggtccttaactactcaatgacagaggcagttactgtgagagacttctaggaatctttttcttctcatagcgaagtcaaagctctctctgaatgtactgtgtgatgatgcatcatgcatgaaccttcggtcagggatatcattggtgaagtgatttcaaaaagtattcaaaatttgatatgctgtttagtcactacagtgccctcaaagggcagaagttgcagccttttttatattgcctgccaaaatttgaagtattagaagaaagtgtgccatgagagaaaaacttaaggagttttgaaaagtaatgcaaataacaaaactgcaacactatttttaaaaagataaatatctgagttaaaattactgaatctttattttacacctaaaaaaatatgagaacaaggtacatgcattatgtgtcacattactgggcaaactgttcaagtatttttttttaaacctccctgtatagaaaaaaatcattaaggatgtaaaagccatgcttgcctatttgctgtatacatgtaatgaaattgtagataaagtgtagtgcattgaaacaaatgaacaaaaagtagatacttttactatacaagggtgctggtgcagaaaaaaatatatatatttttggaaatgtagcattttatactttcaagtgttataaaaaaaaagaaaaagaacaaagaaaccctttatttcattaaatgattttttctggtggttgtcaagaaacaaaagaccaaaagagcctttttgtctttcttttttattttttaagtattggaataagtctaaagaaaagaaagtgccttattttccttcatggtcattcagtcaagtgtctcataaagatcagctcctccctcagaatacaagttaatgcatgttactcagtcgcccagtatgtgaaagaagatatgagggagacaaatgagttgatagtttgaattataggatttttgccacgttaccttgatgcaaatttgccaaatctgatactgtgaaaagatttgataacttttctaatgcctgactagtaagttttaaaacatcattctttaaaagaatagtttaatacttttggttattccaatcttcaatgttaacccaaaggattctgagataaaaattatgtgtcatctaaacttcagtttacagacaaaattagagctttgttttatttggagaagggggatgcattcatttgattttgttttttgtttttaattaattgaatataataggatacctagcaaatgttttcacaaaagtgaatctttgtgattttcattctagaaaacaatgttttaaatcacccaaatttaatcacatgtctttatatcataccagataactggtgtagtgtatccttttactgtttcaataacctctgcctcccccaccccttaactttaaaagaatgtgaaaaactagcatcatagtgcatataaatactcaaccacatttcagcttaagcttctaatttctcaagaagttgaaacagttagttatgtagttgaagcaatttgtgtgcaaagcctacatctaaacacttgagtgaataatcattaactgctcagtaccagacgtggcaaatctcaagtgacagtggacccccccccccgcccagcttatcaactcgtcccctcttccacaccttcccagcatcacagtcagaggtcagcaggaagctgagtcattaccttcttggtgacctcccccaccatcttgtctcacttggaaaccgttgtcagtttatttactatgcaatagacattcattgttttgtatccagctagctttggtttaatatgccactgctttgtctttctgttacacatacagttttgatttatttacaatatatgctgtgccattttgatttttatattgtttggttggttgaataaatttgcgacactcaaacacttgaggtgatagttgttaaaaacaataccagtatttgatccagtttcatctcaactatgttatacctggacattttagatgtttatcaaaggtcttttatggggaagaaagtaaatgtatgaaataataaatgtgtgacatttatagggaatgttggctctgaacaaacttttgaaaacttggttgacaaaattttggatcaactgaaaaaagcatgacttttgaaatctctgaatgccttggttctcagtattatcattctttattgaatttatttcttattaaaatatgtagtttttaagactttttttctgacagtattatgtaattttttagcgtgggtagatgggagtgtcgcttgtatgttatcgtacagctgacatgtatttttgtctattctttattatcttagtttcatgctatgtatgtaccataaccaacctattgcctatgagaaacatgtaagataatgtatttacagccattgttacaagtttataatgtatttttctatcttgttttatatgtatgttatataacattcaaaaagaatttttttcttgattgagaaaaggatacaaaatgcaaaatccacaattttgataactgaaaattgccaattgttttgcagtactttattatattgggtgtcttgtcttttttgggcttttagttagctaatgaatgaatacattagacacttttgggttttagttgggattttacatagcttgcattttaattctttggttctttgctgtttctattaacccacagcattattttaataaatgttataataccaacctactaactctggactttgtctgtttattaacctttatatgtttaattaaaataaacaaataaagacaaaagaatgtaaagtcttgagttactggactaaccctgaagaacgtgaccacagataacatagtgtgacttgtttttatgttgtttgtcagctgacagttttgcacactactgttaaaatggctttggttattctggtcttttagcttgggggccggggcgggtgtgggtgtaggtgcagtagagatgggaacaaagtagcctttgtttgaggcattcttctcttgccacttgcctttcagcatctgcattactaattccacaccttatttttccttctccaaaataatcactgtctgctcacagcatcgagtaaaaagatacattgtcatggtatatacctggagaaaccagtttgattctttgttgaaccatttcttttaatttctgtaaataagtaattttatggtcacattgtaaagcagagaaactgttgatattttacctttatttagatttttgttttaacttgacctttttcctttggaaagcgttgaacttgtttagctaactactcctattaggggagcttaacttgggtaaagtcaaaggcccactggctgtttctcatggtggcctgaagccccgctgctttccagtgaggaaaagaaccctcagcacgttactgagctttcctcaggtatttttttctctgtcacctactttacaaatacagtcagactaaaacattaaacaagaagtttaagggggaataacattgggatttgaaaagttgtatgtgattaatttcttgcatgcaaatcaatttaagatttcttaaatatcttcatgcttttcttggctggaacttgggtaaattaacctgtaattatgaattatttagtttaactcaaggtgcatttttatttcacagattgatacttgcttttttctgtgaaacagttctcctagataccaaaatcctcaggatgaatttttgcatttgtaaataacaatttatctttgtaaattacattttatttatttagagttctaaaattgagggctgaaatgaatgacatgtaatagaagacaaaactgtaccaatacgctgttaaccaatcagactgtccaggtattctcatttcataaatatgtatacacacatataaatacacagagtagtgttagctgatgtgagtgataacagcgaatcaccattgagatggtcatttggatcatgtaaacaaaccgtgtcatgtctctgatgggagcggtgggtagtgtactgttaggtggacaggtcttttaacatgctactatttgtaaaagtttccgttgccataacagttcatgtagtagtctgtgaaaattcgaagctgtctgtcaagctgctaatatacaagttgtcatggtaccatgtaacttaaattgatgaatttctatgcaatttactattctctgaagcctatgaatgcagcctcatctcattttcagttaagggtactttatgtataattatgtcattgctgccttttatgtaggaaatgtaaaaaagttttaaaaggcgaaaataacattacagatttcatttttatacaggttacaatattaaacatgaaactaccaaattccaagaatagtaaaattctagagtcagttgattgattgaaactatttgacaaaacagttgaaagctgagctttcagtcaagaagttggtgaaattaatgtccttaaacttttcctttaggcaaaatgtcagggaaaacttaacatgaaagtagttactcccatacgcaccagtgcagtagctccaggtgtaagaggtcacgaaggcaccctgcccataaaaccaggatgtgcatacgtacacacaatcggtgtctggttatggttttctaaacactacataaggatctgaattttttagtgtgccaaaagcaaacgataggtttaaatgaaattgctcactaccaaatcaagactcttcatatatatacgtgtgtgtatatatatatgtcataacactttcacgtgtgacagcctaaggtttctttagttttaggatggggtggggtgggagtggttttgcatgtttgaccaggatgtgatgcctgtctttattccttgataagaagtagctgttacagcatttcaagcaaattattttaggtagaatagaacttactgccaaatgattatttatttagcaaaaattattctccaacttttcgaattcacaatttttctaagtgcatagagtagttttttacattgtcacgaattccttaatacctttatttaaaatggaaaaaatatggacaatattttagaaatatgtgctacacatctaattttatctgtagtttaagtgatctaaattgagatgcctttgatatgaagagatttaccaacattatatgcactcgtgccttcaatgtggaatcaaactggttaacctcagcacagtcctctcgtttctgtgtttctgctgcactaattgccagggggtgggggagaaggcgaatgaattaattcatagtagaaggaggcgataggtgcagcaaagggcagccacagtgttgattccacattataatgttgttgcctcttcttggcaaaagacaccacattgtgggaagatctcagcttccagggtaaaagttaatttataacttaaaagtgctattaagtttttattaccaaatatatcttttatggtttatattgtagtggtatgtatgaaacatttaaaattttactgtggaaattgtgtatatatatatatatagtcgaaataggtgttcacaggtcacatgtgaacggagaactgcatgaccgtacatgaaatgcaataaaccaactggaaaaagtgcatgtgcttcatcctctcaagccaactgcagctggaaagtgctgcttatcctccacccccagaaaatgcatgtatcaatatgagaataaagaacgcacactttcaattttattgaggctttcaacactatttaaaagaaaatgtaagaatttgacattctggagttattataacattagaaaatgagcataacattcactctgattttagccattaagggagattagtaaacagactgctacagtgttccatagttggactgtgcatccaaaacatttttttatctttaataaatggtacagtttttatgtagttttcgaatgtaagaagaaaggaatgctgaccaaaacttgatttcatcagcttcatgaaaaggactagtgtcattaacctgttgaacagaattggtttattaaaaaaatcatttccagtagtgtgaaacctttacgagtctttaacatctaaatgttatgactccttgtaccttaagttttccagtctttcttatttatatcatctccaagtacctctggctcctttcctcttgctcaccggaaccttagttttcctcaacagaatgctttgttaaagtagcccacagttgcaggatccatagcaccgtcgtgcagactagcagcccaaaggtgtgtttggtttggcttatacggtgttttgctttttaaactacttgccataatttaaaagtggcaacactagacttaaaaaaaaaaaagtctgattgcccatattagattttttttttaattcttcacaaaatctgctcttcctgaaagatcaaagtgtctagaaagcccaaacatgtattcttaacatagtaggcaccagctgaaactgagtaattaaacggtcccctgaagccaagtattccctggttagtcgccaccccaccactccttcctgtctctagtgtcacacttgggctgttgattttcttactcttctcttgctttaatccttccccccggctctctggctcctgtggatatctgtgcttgtttcctggtccaggatggtgatctgactttcaaaccagcttctcaaaaggggtgacataaaatcagttttgatgtttttcctcctgaaaaatcagatgaatattttagtcactgttactcatgcacattgtgttcttatgtttacagaagtgcttaagtgaatggaagcactagacatttggatttccttcctaacgtaatttttaatgattaccccttttatacagtaatttgtggtctttagaaagcagttaaactaattgaccatctaatagttgtactatacatatgtctaaaataatagtcatggtaagtttggcatcatatcttccccaaaaaatgtttattaaaattagattattccagtttaatgctattttgtgaactgtataccctctgaaagcgcttatttttacatgctacacaacagttccaattttaaggagtgtctcctaaaattgggatgaaaatctactgtagtctgttttaaagtatgctatactatgttcattggttacttaactggatattaatataaaggttattacaagaaaaatgatgaagagcaaaaggagaagaaaatatttgcaagtgaatccacaattcttgcagaactatttgagttgatactaaagattttatgttcactcctttaccttagaactgtcaagcttgggaatgaggaaagtgccttggctgtgcttgaaacctgaattttagtgcttcccttattacattcattgttttcaatgattgatttataaaattaagacatactggtagtacaagttgaaagttggtttgaatacattttaattaaatgataatatgttaatatgcttttgttcattgctttctcactgaggtaaaacagcattaaaaagttgtccagaatttaaactg

SEQ ID NO: 6030 - protein, 286 aa, Homo sapiens
MYNDTLNGSTEKRSAELPDAVGPIVQLQEKLYVPVKEYPDFNFVGRILGPRGLTAKQLEAETGCKIMVRGKGSMRDKKKEEQNRGKPNWEHLNEDLHVLITVEDAQNRAEIKLKRAVEEVKKLLVPAAEGEDSLKKMQLMELAILNGTYRDANIKSPALAFSLAATAQAAPRIITGPAPVLPPAALRTPTPAGPTIMPLIRQIQTAVMPNGTPHPTAAIVPPGPEAGLIYTPYEYPYTLAPATSILEYPIEPSGVLGAVATKVRRHDMRVHPYQRIVTADRAATGN

SEQ ID NO: 6031 - DNA, 811 bp, Homo sapiens
ttttttttttttttttttttttttgagacggagtctcgctctgtcgcccaggcttgaaagcaatggagtgatcttggctcactgcaacctcggcctcccaggttcaaaagattctcctgctacaggcacacaccaccacgcccagctaatttttgtagttttagtagagatggagtttcaccatgttggcctggctggtcttgaactcctggcctcaagtgatcagcccacctcggcctcccaaagtgctgggattacaggcatgagccacctcaccaggctcggtttcaaattttaaaattgcatgtttgttttcttactatgcatttccctaattctactcttaaaatgtattattttttgtttgttttttcctatatatttcaaactataaaatcagcttaaaaaccaagggctccccaatgatttgctactgaccaggagatcaggcccagtctctacaatgacctctcctgcactaaagcaaaagcgaggtgcttacttaaggccagctacttattcaatcccggggccaacctttctcagctggaacttaaccagccccagtactcacaaagcccagctcacattcactgcatgtcttcacttacagatataaatgcctgcacacacatgccctttacttacattgtgaccattatgtggagccactttatggatgtaactgcattttgatgttttattttttaagacagggtctcactgttgcccaaggtggagcgcagtagcatgatcataacactgcagccttgacctcctgggctcaagcaatcctcgctccttagcgtcc

SEQ ID NO: 6032 - protein, 42 aa, Homo sapiens
MEFHHVGLAGLELLASSDQPTSASQSAGITGMSHLTRLGFKF

SEQ ID NO: 6033 - DNA, 2151 bp, Homo sapiens
ttgaaggaaaaggaggaaggaggaaggagagagagactgagagagggagagggagaggcagagagagagagagagagagagagagagagacagagagagagaggcgcaacaccagcaaacagtctcctagacgtagggctacattgatggaccggattgtaggatttctgcactgagtccctgcccctctgcctttcctgccaccccaagtcccttcccctcctgaagcagcaatctcttccatctccctctctggtctcttctccccacccctttcctctgcacctaaccccctcccctccatccaaccccaccttcactctcctctccgaggggggagggccagggggtggggaaagaaaacccccaaatccccagccctgggcagagatgtcgaagaaacgcaaagccctcgagggtggaggaggtggcggagaaccccagctcccagaggaggaacccactgcctggtttggggacagcagcgaggagcaagttctctaagttagaagaacaacacaagtctcactgggctaacctcgaggtatcggcagggctggctccttctggaggcttcagggaagcatccatctccccacttctccagcttcttgaggccgtccgcactcctgggcttgtggtcctgctccatcttccaagccagcaacagcagattgagttcctctcacttagcatcaccctgaacttcctctactgtagacaagtcttcctcttcctccctctgctgtctccacctttgtgattaccttgggcccccaagatcatccagggtagcctcccatctctagatccctaagtgaatcaatcacatctgcaaagtctcctttgccatgtgaggtaacctagtcataggttccagagatttggatgtgaacatttttgttggggcatcattctgcccaaccacaagcatgtacccggcactcaccacatgtggcagttagttggtgtgtactttctctacctgtaaatccctggatggagaacatgattttttctctctacatctctttgcatttcatctggttcacttaacctgatccccagtgtcttagtctgtacagtgtggccgtaacagaatacctgagatggggtatttattttaaaaaaaataataggtgggtttaagtcacagttctgcagtctgggcagctcaaggccatggcccttggttctggcaaggcaagggcttttgtggtgctgcgtcataacatggcagagaaggtcaaagcgtaagtggacacgagcaaagagaagaccagaggggcctcctggctttgtaacaaaccactctcatgggactattccattccctggagaactaattcagtctttccagagtgagacctcactaccatgagaacagcaccaggccgttcatgagggatctgcatcagtgattccaacacctcccactaggccccaccacccaacactaccacattggagaccaaatttcatcatgggcttggtggggaaaagccaaccatacccacaccatagcaccagcctgggacccaaatgcaccaataaagggaatgagaaagcctagaactgaaccatccagcagtcagataccaaagagatccaaaaagttaaacaatcatgaagaaaaagcgttgagagggtgagacctcaggcaagttcaaggccaacagctggcaccaatgtgggaagatgaagccttgcataaacataagcccaatcgttatttctcgtgtaaggacttgacaattagaaaaagtgcaaagatggtccaaacctcctagatgatgctttcttgcagggtgaactttggtaaacactgggggatggaggagagaggaatctgccttccaggcttgtcaggtttgctcttaatcatcctgagaacacagggtctaatggagcatctgttggtcgtctgcatggctgtgatattttactttatcatttccacctaacacttttataagtatttttattctccataaaacaggcttttaagagcatttacaaattaatcacattaaagacttattatctgttctcttatgatacacctattttgatatggtgtgaagataattgttataatctctattaattacatactggcattcattaaatatgaaaatgttcaattgtttg

SEQ ID NO: 6034 - protein, 37 aa, Homo sapiens
MSKKRKALEGGGGGGEPQLPEEEPTAWFGDSSEEQVL

SEQ ID NO: 6035 - DNA, 948 bp, Homo sapiens
aaactctctaagttccgggcagccgggagagtcgttcctgagagcacaagcacccccaaatgtgaagtgcactcggacacacacacacacacacacgcacgcacacacaagcactcatgttctaaagagagaggtctgagtccgaagttgctgctgctgggagcttgagctgagatggactggtcttcatgggcgcccaaggcgctgggtgcagctttccccgagacccccagatggaaaggagggaaggaggaaccccacacactcgccttttgcgagaagatcggcgcgcaccccagagtgccccaagcctttggaatctgcctgctgagcggagcgcgcgagcgtggtggacaggtcccgaacttggccagcgggctttcttggcaacttgctttgcgcagttctccatggaaccctggacccactgtgctcccggcgccttgcctttttttttctttttctttctctcactgtctctttttaaatttatgaactcgaaatgaagcggaaagcagatatgcgcgtcagcatactttggcggaccagtcccagtgctgaccagtcccatcgtatctctgacggtgcatatcaggatccgcattgatcagatgccgaaaccatggcttggaatggctgcgatgaagctgagctgcgattcaaacccagacacagctttctacagagaagcacctttctccagatcttcattgccattttggacacacagctccaaacccaaaatgtgtccactggatcaacccacaatgcaaacaactgctttctaaggaaaagccgagtttctaggaggcagcccacttctgacgtgtccttcagttaacaggctgcagtggacagcgtgtggtgggtggaggaagacggcagatgagaaattcaaggagattcaccacagagcagctttctggctcagctgttctagggtgccat

SEQ ID NO: 6036 - protein, 72 aa, Homo sapiens
MAWNGCDEAELRFKPRHSFLQRSTFLQIFIAILDTQLQTQNVSTGSTHNANNCFLRKSRVSRRQPTSDVSFS

SEQ ID NO: 6037 - DNA, 1420 bp, Homo sapiens
aaactctctaagttccgggcagccgggagagtcgttcctgagagcacaagcacccccaaatgtgaagtgcactcggacacacacacacacacacacgcacgcacacacaagcactcatgttctaaagagagaggtctgagtccgaagttgctgctgctgggagcttgagctgagatggactggtcttcatgggcgcccaaggcgctgggtgcagctttccccgagacccccagatggaaaggagggaaggaggaaccccacacactcgccttttgcgagaagatcggcgcgcaccccagagtgccccaagcctttggaatctgcctgctgagcggagcgcgcgagcgtggtggacaggtcccgaacttggccagcgggctttcttggcaacttgctttgcgcagttctccatggaaccctggacccactgtgctcccggcgccttgcctttttttttctttttctttctctcactgtctctttttaaatttatgaactcgaaatgaagcggaaagcagatatgcgcgtcagcatactttggcgggatgctggcccaccactagtattctctggtgctcgttgtgctttgggagatcttctatgcaacatggaaaccatgaattgtaccacagagggagatcttctgtcccactaggaaactgcgaattgtaccacagagggagatcttctatgcaacatggagaccatgaatggtacacacagagagagatcttctatccacatggacaccatgaattgtaccacagaggcagatgttctatccaacatggaaaccatgaactgtacacacagagggggatattccatccaacataggaaccatgaactgtacacacagagggagatcttctatccaacatggagaccatgaattttaccacaaaggaagatgttctatccaaaatggaaaccatgagttgtatgcctagagggagatcttctatccaatatgtaagccacgagttggacacacagagagagatattttatccaacttggaaaccatgaattgtacacacagagagatcttctatccaacacggaaacaacgagttatacccacagggggagatcttctatccaattcaggtgttccttatgtgatagcatactctgcatctacaactagctaaagtttcgtgatgtcattattgttattgttgttgtagaggtgaggtcttgctatgttgcccaggctggtcttgaatccctggcctccagcaatcctcctgcctttgtttcccaatgtgttgggattacaggcaaaagctggtcttattctttctaaagctgaagtttgagaagtaaaaatcactttcaagggtagaatgcattttatattttctctgaaaaatgaattggcacaaatgtccagttaaatttgtgcaattttctttaa

SEQ ID NO: 6038 - protein, 50 aa, Homo sapiens
MKRKADMRVSILWRDAGPPLVFSGARCALGDLLCNMETMNCTTEGDLLSH

SEQ ID NO: 6039 - DNA, 2217 bp, Homo sapiens
aaactctctaagttccgggcagccgggagagtcgttcctgagagcacaagcacccccaaatgtgaagtgcactcggacacacacacacacacacacgcacgcacacacaagcactcatgttctaaagagagaggtctgagtccgaagttgctgctgctgggagcttgagctgagatggactggtcttcatgggcgcccaaggcgctgggtgcagctttccccgagacccccagatggaaaggagggaaggaggaaccccacacactcgccttttgcgagaagatcggcgcgcaccccagagtgccccaagcctttggaatctgcctgctgagcggagcgcgcgagcgtggtggacaggtcccgaacttggccagcgggctttcttggcaacttgctttgcgcagttctccatggaaccctggacccactgtgctcccggcgccttgcctttttttttctttttctttctctcactgtctctttttaaatttatgaactcgaaatgaagcggaaagcagatatgcgcgtcagcatactttggcggttcttcatgtgggggatggtcagcgggagatggcacttcataagatctgcggtggtcaccccagtcatcatccgacgtgttgcaccagtctgtggcacttcataaggtctgcagtggtcaccccagtcatcatccgatgtgttgcaccagtttgtggcacttcataagttctgcggtggtcaccccagtcatcatccgacgtgttgcaccagtgtgtgttgctgtttgagccgtgctgccgaccccttccagggcatctgccatgggcacctcctccagcccgtgcactaagactcaagagagtcgaagaaccagggaatcgttgtaataacaagcattctgaattgcatcgtactgtgtactagaccttttaaaaatggaactgtcggctgcggctggaaggcgcaggcaggcgccctggagagaattcacagggaggcacaggacagaacgctcccaggaacgaggaagcacccccagaaaggagcgctctatgggctccaggcagccgaggaaacgcgaacgtgagccccgtgactgcactcccacgtgcaccaacgctgccagtgtgagcagaagcggagcccgcagagcgccaggctgcgccgggagatgcatcacgatgaaaaactgcgccagagcatggcgggaactttccgagagggcgtgttgtttccaggcggttccaccttctaatatgaaacagtcttggttgattttccttgatactactttatgctcggcctggttgttggcaagtagctgcccgcgtctgtacgcgcccttgattagtttccactgcatgtgttttaacacagtcctcctttttccacgtttatttgggccaaccctgtctgcaaagatccagtttaatacagatttgagtctacgtgctatagcctggaaatgtactaaagacactacaacatattgctgaaagaatagaatctttattctgaatgcaaagcggacacctagtaaaaaattctggaataataaaacaagcaaggcttatgtgctcagttttggggacgctccaatttaaaggcttagtcattgtcacggtgtaaggtttacccattgcccccatcacacagatgtgggattgttgagagctgagtgtcctatgacctcttctgctgcccaagaacttggggtgggtggtaactggagaaatcaaagtgatcagctgcaaagaacgcttccattgctggagcttggttgtgcgggattctccacggaggtcttaaggcagagacaaaaacaaggactttgggaggctcctgtgagcagccaaaagggtttagagtcaggcagcctcaggttacaaatccagtcctgcaggctaggagttgtgtaagcttaaaaaagtgactgcacttccaggaacatcatttccctacctgctcctccttctgacgggttttctgaggacaatggaatccacactctgtgtcgaacacttttctaattagcgatgtgcagacactgtttattttacaggaataaaaatgccagaagaacccaagtcatattcatttaaagcagggtgacaagtacaccaaaatctgaaaaatcatcactaaagaacttatccatgtaaccaaaaaccattgaaataaaagtaaactatggaaacaaaatttaaaagtaataaaatttaaaagtccaaa

SEQ ID NO: 6040 - protein, 48 aa, Homo sapiens
MKRKADMRVSILWRFFMWGMVSGRWHFIRSAVVTPVIIRRVAPVCGTS

SEQ ID NO: 6041 - DNA, 1904 bp, Homo sapiens
gcctcctgttggacgcgggggggtgtccgagcagcatctccggcttaaagggaaactctctaagttccgggcagccgggagagtcgttcctgagagcacaagcacccccaaatgtgaagtgcactcggacacacacacacacacacacgcacgcacacacaagcactcatgttctaaagagagaggtctgagtccgaagttgctgctgctgggagcttgagctgagatggactggtcttcatgggcgcccaaggcgctgggtgcagctttccccgagacccccagatggaaaggagggaaggaggaaccccacacactcgccttttgcgagaagatcggcgcgcaccccagagtgccccaagcctttggaatctgcctgctgagcggagcgcgcgagcgtggtggacaggtcccgaacttggccagcgggctttcttggcaacttgctttgcgcagttctccatggaaccctggacccactgtgctcccggcgccttgcctttttttttctttttctttctctcactgtctctttttaaatttatgaactcgaaatgaagcggaaagcagatatgcgcgtcagcatactttggcggaccttttaaaaatggaactgtcggctgcggctggaaggcgcaggcaggcgccctggagagaattcacagggaggcacaggacagaacgctcccaggaacgaggaagcacccccagaaaggagcgctctatgggctccaggcagccgaggaaacgcgaacgtgagccccgtgactgcactcccacgtgcaccaacgctgccagtgtgagcagaagcggagcccgcagagcgccaggctgcgccgggagatgcatcacgatgaaaaactgcgccagagcatggcgggaactttccgagagggcgtgttgtttccaggcggttccaccttctaatatgaaacagtcttggttgattttccttgatactactttatgctcggcctggttgttggcaagtagctgcccgcgtctgtacgcgcccttgattagtttccactgcatgtgttttaacacagtcctcctttttccacgtttatttgggccaaccctgtctgcaaagatccagtttaatacagatttgagtctacgtgctatagcctggaaatgtactaaagacactacaacatattgctgaaagaatagaatctttattctgaatgcaaagcggacacctagtaaaaaattctggaataataaaacaagcaaggcttatgtgctcagttttggggacgctccaatttaaaggcttagtcattgtcacggtgtaaggtttacccattgcccccatcacacagatgtgggattgttgagagctgagtgtcctatgacctcttctgctgcccaagaacttggggtgggtggtaactggagaaatcaaagtgatcagctgcaaagaacgcttccattgctggagcttggttgtgcgggattctccacggaggtcttaaggcagagacaaaaacaaggactttgggaggctcctgtgagcagccaaaagggtttagagtcaggcagcctcaggttacaaatccagtcctgcaggctaggagttgtgtaagcttaaaaaagtgactgcacttccaggaacatcatttccctacctgctcctccttctgacgggttttctgaggacaatggaatccacactctgtgtcgaacacttttctaattagcgatgtgcagacactgtttattttacaggaataaaaatgccagaagaacccaagtcatattcatttaaagcagggtgacaagtacaccaaaatctgaaaaatcatcactaaagaacttatccatgtaaccaaaaaccattgaaataaaagtaaactatggaaacaaaatttaaaagtaataaaatttaaaagtccaaa

SEQ ID NO: 6042 - protein, 186 aa, Homo sapiens
MELSAAAGRRRQAPWREFTGRHRTERSQERGSTPRKERSMGSRQPRKREREPRDCTPTCTNAASVSRSGARRAPGCAGRCITMKNCARAWRELSERACCFQAVPPSNMKQSWLIFLDTTLCSAWLLASSCPRLYAPLISFHCMCFNTVLLFPRLFGPTLSAKIQFNTDLSLRAIAWKCTKDTTTYC

SEQ ID NO: 6043 - DNA, 1798 bp, Homo sapiens
aaactctctaagttccgggcagccgggagagtcgttcctgagagcacaagcacccccaaatgtgaagtgcactcggacacacacacacacacacacgcacgcacacacaagcactcatgttctaaagagagaggtctgagtccgaagttgctgctgctgggagcttgagctgagatggactggtcttcatgggcgcccaaggcgctgggtgcagctttccccgagacccccagatggaaaggagggaaggaggaaccccacacactcgccttttgcgagaagatcggcgcgcaccccagagtgccccaagcctttggaatctgcctgctgagcggagcgcgcgagcgtggtggacaggtcccgaacttggccagcgggctttcttggcaacttgctttgcgcagttctccatggaaccctggacccactgtgctcccggcgccttgcctttttttttctttttctttctctcactgtctctttttaaatttatgaactcgaaatgaagcggaaagcagatatgcgcgtcagcatactttggcggggatcattttacttcctatcatcaacaaaaatagccagaattatattgaaactcatgcgataactacagatgatcattttattcatctttggatgtgttcgtttttccattttttggtgaatttctggacactgatgataaaccacgacagaatacttttatgtactgtgcctcctcctaaacatttttcagacacctcattatgtaacctgcagctcataatgaatgcataacatgtgtatcatattaatagagttcttctaaagagatctcctacgtttttattttcaagtagttcttcatgtgggggatggtcagcgggagatggcacttcataagatctgcggtggtcaccccagtcatcatccgacgtgttgcaccagtctgtggcacttcataaggtctgcagtggtcaccccagtcatcatccgatgtgttgcaccagtttgtggcacttcataagttctgcggtggtcaccccagtcatcatccgacgtgttgcaccagtgtgtgttgctgtttgagccgtgctgccgaccccttccagggcatctgccatgggcacctcctccagcccgtgcactaagactcaagagagtcgaagaaccagggaatcgttgtaataacaagcattctgaattgcatcgtactgtgtactagcaggagtattcgggaacttctgttgctggaaacacgggagagcattctgcccgaaggccgcactgccatttctcctttgaggtagaacatcaccttggtgcagagcactccatgaggtctcctcccagagccttcccggtgggagcttacaggaaatatgggagatagaggaaaagacaaaatgactccatgaggaaatacccagacacgcccagaagatgaaatgtggtcttcatcaatgactgcacgtcattgataaagaagctgtggtagattaggagcaacctaaggaaagcaacaaggtacaatgaatgggccttgactggatcctgaatggttaagccagctaaagaaaatgtttggagcaaccgagtaaatttgaacgtggactagatattatataagatgaagattcattgaaatggaaacctagagcttattaactgaaaaaaaaatggttataaaattatacgtaaaaagtcatttcattttaggtatgcaagtgtatatatagatagaaaatatctgaattatattcaataatgtgtttcctgcactaatttctggatggtagagacatgtattttaattatt

SEQ ID NO: 6044 - protein, 34 aa, Homo sapiens
MKRKADMRVSILWRGSFYFLSSTKIARIILKLMR

SEQ ID NO: 6045 - DNA, 2236 bp, Homo sapiens
aaactctctaagttccgggcagccgggagagtcgttcctgagagcacaagcacccccaaatgtgaagtgcactcggacacacacacacacacacacgcacgcacacacaagcactcatgttctaaagagagaggtctgagtccgaagttgctgctgctgggagcttgagctgagatggactggtcttcatgggcgcccaaggcgctgggtgcagctttccccgagacccccagatggaaaggagggaaggaggaaccccacacactcgccttttgcgagaagatcggcgcgcaccccagagtgccccaagcctttggaatctgcctgctgagcggagcgcgcgagcgtggtggacaggtcccgaacttggccagcgggctttcttggcaacttgctttgcgcagttctccatggaaccctggacccactgtgctcccggcgccttgcctttttttttctttttctttctctcactgtctctttttaaatttatgaactcgaaatgaagcggaaagcagatatgcgcgtcagcatactttggcggggatcattttacttcctatcatcaacaaaaatagccagaattatattgaaactcatgcgataactacagatgatcattttattcatctttggatgtgttcgtttttccattttttggtgaatttctggacactgatgataaaccacgacagaatacttttatgtactgtgcctcctcctaaacatttttcagacacctcattatgtaacctgcagctcataatgaatgcataacatgtgtatcatattaatagagttcttctaaagagatctcctacgtttttattttcaagtagttcttcatgtgggggatggtcagcgggagatggcacttcataagatctgcggtggtcaccccagtcatcatccgacgtgttgcaccagtctgtggcacttcataaggtctgcagtggtcaccccagtcatcatccgatgtgttgcaccagtttgtggcacttcataagttctgcggtggtcaccccagtcatcatccgacgtgttgcaccagtgtgtgttgctgtttgagccgtgctgccgaccccttccagggcatctgccatgggcacctcctccagcccgtgcactaagactcaagagagtcgaagaaccagggaatcgttgtaataacaagcattctgaattgcatcgtactgtgtactaggtgggtttaaaagataactcatctcaaatgggttagcgtgaccaatatggcttaatcgtgatgtttaactgatttcatcttgccatggagcctatatccccattgagggtggaagaaaagataacatttttcttagttaaaggtaacaatcttttctggactgaaactatttctttttgaaaaatagagtttctgaatccatcaactcaaaactcagattatttaccagggccatttcctgtttgctgcttcttccaaagtaggtgccctgtggcaagacagatgcgatggcttcctggagtcaggacagggaccacacataatcgaggctgtcacgttttgttgcatgtacctgacctcacgtggtggcacagcttctctcactgggactctgggccaaggcctcagtcctccctgtacctactgctgtggggccagcttagtcactcccctaggcatggccaaggcggaagtcccctctgcagcttgctttgtcccaccttggcattcatgtaggattcaaacaagtccctcacctggcccctggcttagactgtccacccacagcaatcttggctctgaaatcaccttgtttctcacctcgatggtttcttgatgggcctcagctctcagctaccttccttagcaggagtattcgggaacttctgttgctggaaacacgggagagcattctgcccgaaggccgcactgccatttctcctttgaggtagaacatcaccttggtgcagagcactccatgaggtctcctcccagagccttcccggtgggaggtaggtgcaagctcctctgctctctgacttagttctgcctccatccccaccacacccactactgagaggtggaacctcctccccaggaagggagaatcaataactctttctcctggcagtgtactcttctcttgttctccattgacagagctttatactttctttgcctgatggtaggaacttcctctacctatcctgaggtctctccacctgcacttgataataaaactcttggttcagg

SEQ ID NO: 6046 - protein, 34 aa, Homo sapiens; identical to SEQ ID NO: 6044

SEQ ID NO: 6047 - DNA, 1902 bp, Homo sapiens
aaactctctaagttccgggcagccgggagagtcgttcctgagagcacaagcacccccaaatgtgaagtgcactcggacacacacacacacacacacgcacgcacacacaagcactcatgttctaaagagagaggtctgagtccgaagttgctgctgctgggagcttgagctgagatggactggtcttcatgggcgcccaaggcgctgggtgcagctttccccgagacccccagatggaaaggagggaaggaggaaccccacacactcgccttttgcgagaagatcggcgcgcaccccagagtgccccaagcctttggaatctgcctgctgagcggagcgcgcgagcgtggtggacaggtcccgaacttggccagcgggctttcttggcaacttgctttgcgcagttctccatggaaccctggacccactgtgctcccggcgccttgcctttttttttctttttctttctctcactgtctctttttaaatttatgaactcgaaatgaagcggaaagcagatatgcgcgtcagcatactttggcggttcttcatgtgggggatggtcagcgggagatggcacttcataagatctgcggtggtcaccccagtcatcatccgacgtgttgcaccagtctgtggcacttcataaggtctgcagtggtcaccccagtcatcatccgatgtgttgcaccagtttgtggcacttcataagttctgcggtggtcaccccagtcatcatccgacgtgttgcaccagtgtgtgttgctgtttgagccgtgctgccgaccccttccagggcatctgccatgggcacctcctccagcccgtgcactaagactcaagagagtcgaagaaccagggaatcgttgtaataacaagcattctgaattgcatcgtactgtgtactaggtgggtttaaaagataactcatctcaaatgggttagcgtgaccaatatggcttaatcgtgatgtttaactgatttcatcttgccatggagcctatatccccattgagggtggaagaaaagataacatttttcttagttaaaggtaacaatcttttctggactgaaactatttctttttgaaaaatagagtttctgaatccatcaactcaaaactcagattatttaccagggccatttcctgtttgctgcttcttccaaagtaggtgccctgtggcaagacagatgcgatggcttcctggagtcaggacagggaccacacataatcgaggctgtcacgttttgttgcatgtacctgacctcacgtggtggcacagcttctctcactgggactctgggccaaggcctcagtcctccctgtacctactgctgtggggccagcttagtcactcccctaggcatggccaaggcggaagtcccctctgcagcttgctttgtcccaccttggcattcatgtaggattcaaacaagtccctcacctggcccctggcttagactgtccacccacagcaatcttggctctgaaatcaccttgtttctcacctcgatggtttcttgatgggcctcagctctcagctaccttccttagcaggagtattcgggaacttctgttgctggaaacacgggagagcattctgcccgaaggccgcactgccatttctcctttgaggtagaacatcaccttggtgcagagcactccatgaggtctcctcccagagccttcccggtgggaggtaggtgcaagctcctctgctctctgacttagttctgcctccatccccaccacacccactactgagaggtggaacctcctccccaggaagggagaatcaataactctttctcctggcagtgtactcttctcttgttctccattgacagagctttatactttctttgcctgatggtaggaacttcctctacctatcctgaggt

SEQ ID NO: 6048 - protein, 48 aa, Homo sapiens; identical to SEQ ID NO: 6040

SEQ ID NO: 6049 - DNA, 2065 bp, Homo sapiens
atatctgctttccgcttcatttcgagttcataaatttaaaaagagacagtgagagaaagaaaaagaaaaaaaaaggcaaggcgccgggagcacagtgggtccagggttccatggagaactgcgcaaagcaagttgccaagaaagcccgctggccaagttcgggacctgtccaccacgctcgcgcgctccgctcagcaggcagattccaaaggcttggggcactctggggtgcgcgccgatcttctcgcaaaaggcgagtgtgtggggttcctccttccctcctttccatctgggggtctcggggaaagctgcacccagcgccttgggcgcccatgaagaccagtccatctcagctcaagctcccagcagcagcaacttcggactcagacctctctctttagaacatgagtgcttgtgtgtgcgtgcgtgtgtgtgtgtgtgtgtgtccgagtgcacttcacatttgggggtgcttgtgctctcaggaacgactctcccggctgcccggaacttagagagtttccctttaagccggagatgctgctcggacacccccccgcgtccaacaggaggcgatgacgtctgtagcctcgttgccagaacagtccccaggctaccgctgccgttcattgacaggagcgggcgctcggacgtcagcagccggacctttggcaaggctgctcccgcggagacggctcccacccccgcacctgccagcccgcccccccggggggtggtcacgaaatcaaagccaccagaggaggggcccggggaggtgctggggctgggggagggggatgactcggatctgccctctttgtcctggagcaccggagtatataaatagtgcagtctccagccagactctctcccagtcttgcacgcccccgcagtccccccaacccgacccccgccccttgtcactacgtgtcgggctcgctctgcctggagggaggctggggtgcggggaagcagggagtgcaaacagacattggttctctttcctcttcccattcatacatttctgttggagtcctagggccgccgcgccgggagtcgcaatgaatggatggatgcccgcgcgctgggaccaccaggtccgcagagatgtcgccggcgctaggggcgctcctcccgcgtggggacaggcgccctcgcctaggcgcagtgtggggggaccccaaaagacccttaagaggccaaaggcctgctctccccgttctccccaacacacaccaggggtcttttctgccccggagaagttgggacgcaaaacgtagggaactgcgctcagtctccgcaccacgaagagtcgagatggggaccgagaccagcacggacggtagcaacagagaggggagcgcccaagtggcgcaacgttgtggctgaagccaagcctgtcgcctccccctgagtaccgctggcggcccaggaccgtgcgctctcccttcctgagcacccagggatgcactgcgcagggaaggagggcacggcgggagggtgcttgcaggggactgctgcgcggattccccatccgcacccggctcgcggggaatccgtgggcttgcactcgccagaaagagctgctgcaggagcagccggatggtgaggcccgttcccgaccctgggtgggaggaacttaaagggctgagttctgaggcgccaggcacagggcgcagcttcataaatgcacccaaaagcttccatggacagacggcacagatgtcgctgaagtgaacctaaggaagtttgctaccccaagacccgggcttcgcgccaggtgacaacagacgtctgggagtgtggtgacacctgcgcagagtccctggtggttcaacctgtccgagaaggttgcaagaagatgccactgtcttacctttctcccctagtgctcatgccccagaaaaggccactgggtcactagatcccaaccccttgtgccatgagagggaagcctgcacaacggcgttggcactcccccataaatcgtctcctgggtccttcccattacgcacacacataatgtcatttctccagggaaaaataaataacaactttcttgact

SEQ ID NO: 6050 - protein, 234 aa, Homo sapiens
MTSVASLPEQSPGYRCRSLTGAGARTSAAGPLARLLPRRRLPPPHLPARPPGGWSRNQSHQRRGPGRCWGWGRGMTRICPLCPGAPEYINSAVSSQTLSQSCTPPQSPQPDPRPLSLRVGLALPGGRLGCGEAGSANRHWFSFLFPFIHFCWSPRAAAPGVAMNGWMPARWDHQVRRDVAGARGAPPAWGQAPSPRRSVGGPQKTLKRPKACSPRSPQHTPGVFSAPEKLGRKT

SEQ ID NO: 6051 - DNA, 2361 bp, Homo sapiens
gtcgcgataaatgggcgccggcggagcggagggagatccgagcggcggcggcaagctggctgcgagcggctgagcgtgaggtcgaccgcaaccaggagctcctgacgcgcatccggcagcttcaggagcgggaggccggggcggaggagaagatgcaggagcagctggagcgcaacaggcagtgtcagcagaacttggatgctgccagcaagaggctgcgtgagaaagaggacagtctggcccaggctggcgagggtcctgattgtcacgctccttactctggaattatcttatgcgcctcttccttgccaactgtccggcgtcccctacaacacgggtgaccctgtgggcaggtgggctcggccctgcatctggccttgcccctggcacacgaccatcaacgcactgaaggggaggatctcggaactgcagtggagcgtgatggaccaggagatgcgggtgaagcgcctggagtcggagaagcaggagctgcaggagcagctggacctgcaacacaaaaaatgccaggaagccaatcagaaaatccaggaactccaggccagccaagaagcaagagcagaccacgagcagcagattaaggatctggagcagaagctgtccctgcaagagcaggatgcagcgattgtgaagaacatgaagtctgagctggtacggctccctaggctggaacgggagctgaagcagctgcgggaggagagcgcgcacctgcgggagatgagagagaccaacgggctgctccaggaagagctggaagggctgcagaggaagctggggcgccaggagaagatgcaggagacgctggttggcttggagctggagaacgagaggctgctggccaagctgcaaagctgggagagactggaccagaccatgggcctgagcatcaggactccagaagacctttccagattcgtggttgagctgcagcagagggagcttgccttgaaggacaagaacagcgccgtcaccagcagcgcccgggggctggagaaggccaggcagcagctgcaggaggagctccggcaggtcagcggccagctgttggaggagaggaagaagcgcgagacccacgaggcgctggcccggaggctccagaaacgggtcctgctgctcaccaaggagcgggacggtatgcgggccatcctggggtcctacgacagcgagctgaccccggccgagtactcaccccagctgacgcggcgcatgcgggaggctgaggatatggtgcagaaggtgcacagccacagcgccgagatggaggctcagctgtcgcaggccctggaggagctgggaggccagaaacaaagagcagacatgctggagatggagctgaagatgctgaagtctcagtccagctctgccgaacagagcttcctgttctccagggaggaggcggacacgctcaggttgaaggtcgaggagctggaaggcgagcggagtcggctggaggaggaaaagaggatgctggaggcacagctggagcggcgagctctgcagggtgactatgaccagagcaggaccaaagtgctgcacatgagcctgaaccccaccagtgtggccaggcagcgcctgcgcgaggaccacagccagctgcaggcggagtgcgagcgactgcgcgggctcctgcgcgccatggagagaggaggcaccgtcccagccgaccttgaggctgccgccgcgagtctgccatcgtccaaggaggtggcagagctgaagaagcaggtggagagtgccgagctgaagaaccagcggctcaaggaggttttccagaccaagatccaggagttccgcaaggcctgctacacgctcaccggctaccagatcgacatcaccacggagaaccagtaccggctgacctcgctgtacgccgagcacccaggcgactgcctcatcttcaaggccaccagcccctcgggttccaagatgcagctactggagacagagttctcacacaccgtgggcgagctcatcgaggtgcacctgcggcgccaggacagcatccctgccttcctcagctcgctcaccctcgagctcttcagccgccagaccgtggcgtagcctgcaggctcgggggcatagccggagccactctgcttggcctgacctgcaggtcccctgccccgccagccacaggctgggtgcacgtcctgcctctccagccccacagggcagcagcatgactgacagacacgctgggacctacgtcgggcttcctgctggggcggccagcaccctctccacgtgcagaccccatgcgtcccggagcctggtgtgtgggcgtcggccaccagcctgggttcctcaccttgtgaaataaaatcttctcccctagacactccc

SEQ ID NO: 6052 - protein, 626 aa, Homo sapiens
MLPARGCVRKRTVWPRLARVLIVTLLTLELSYAPLPCQLSGVPYNTGDPVGRWARPCIWPCPWHTTINALKGRISELQWSVMDQEMRVKRLESEKQELQEQLDLQHKKCQEANQKIQELQASQEARADHEQQIKDLEQKLSLQEQDAAIVKNMKSELVRLPRLERELKQLREESAHLREMRETNGLLQEELEGLQRKLGRQEKMQETLVGLELENERLLAKLQSWERLDQTMGLSIRTPEDLSRFVVELQQRELALKDKNSAVTSSARGLEKARQQLQEELRQVSGQLLEERKKRETHEALARRLQKRVLLLTKERDGMRAILGSYDSELTPAEYSPQLTRRMREAEDMVQKVHSHSAEMEAQLSQALEELGGQKQRADMLEMELKMLKSQSSSAEQSFLFSREEADTLRLKVEELEGERSRLEEEKRMLEAQLERRALQGDYDQSRTKVLHMSLNPTSVARQRLREDHSQLQAECERLRGLLRAMERGGTVPADLEAAAASLPSSKEVAELKKQVESAELKNQRLKEVFQTKIQEFRKACYTLTGYQIDITTENQYRLTSLYAEHPGDCLIFKATSPSGSKMQLLETEFSHTVGELIEVHLRRQDSIPAFLSSLTLELFSRQTVA

SEQ ID NO: 6053 - DNA, 2742 bp, Homo sapiens
agtgtcgcgataaatgggcgccggcggagcggagggagatccgagcggcggcggcaagctggctgcgagcggctgaggagctgggatacactcttcctctcctctcctcaacagcagcactccaagctcgccggcctttggtctccaggacttgtcccagcagcccctcgaactgagaattacaccatcggacccctggctctgaggccttcagacttggactgtgtcacactgccaggcttccagggctccaacttgcagacggcctgttgtgggacagtctctgtaatcgcgaaagcaaccatggaagacctgggggaaaacaccatggttttatccaccctgagatctttgaacaacttcatctctcagcgtgtggagggaggctctggactggatatttctacctcggccccaggttctctgcagatgcagtaccagcagagcatgcagctggaggaaagagcagagcagatccgttcgaagtcccacctcatccaggtggagcgggagaaaatgcagatggagctgagtcacaagagggctcgagtggagctggagagagcagccagcaccagtgccaggaactacgagcgtgaggtcgaccgcaaccaggagctcctgacgcgcatccggcagcttcaggagcgggaggccggggcggaggagaagatgcaggagcagctggagcgcaacaggcagtgtcagcagaacttggatgctgccagcaagaggctgcgtgagaaagaggacagtctggcccaggctggcgagaccatcaacgcactgaaggggaggatctcggaactgcagtggagcgtgatggaccaggagatgcgggtgaagcgcctggagtcggagaagcaggagctgcaggagcagctggacctgcaacacaaaaaatgccaggaagccaatcagaaaatccaggaactccaggccagccaagaagcaagagcagaccacgagcagcagattaaggatctggagcagaagctgtccctgcaagagcaggatgcagcgattgtgaagaacatgaagtctgagctggtacggctccctaggctggaacgggagctgaagcagctgcgggaggagagcgcgcacctgcgggagatgagagagaccaacgggctgctccaggaagagctggaagggctgcagaggaagctggggcgccaggagaagatgcaggagacgctggttggcttggagctggagaacgagaggctgctggccaagctgcaaagctgggagagactggaccagaccatgggcctgagcatcaggactccagaagacctttccagattcgtggttgagctgcagcagagggagcttgccttgaaggacaagaacagcgccgtcaccagcagcgcccgggggctggagaaggccaggcagcagctgcaggaggagctccggcaggtcagcggccagctgttggaggagaggaagaagcgcgagacccacgaggcgctggcccggaggctccagaaacgggtcctgctgctcaccaaggagcgggacggtatgcgggccatcctggggtcctacgacagcgagctgaccccggccgagtactcaccccagctgacgcggcgcatgcgggaggctgaggatatggtgcagaaggtgcacagccacagcgccgagatggaggctcagctgtcgcaggccctggaggagctgggaggccagaaacaaagagcagacatgctggagatggagctgaagatgctgaagtctcagtccagctctgccgaacagagcttcctgttctccagggaggaggcggacacgctcaggttgaaggtcgaggagctggaaggcgagcggagtcggctggaggaggaaaagaggatgctggaggcacagctggagcggcgagctctgcagggtgactatgaccagagcaggaccaaagtgctgcacatgagcctgaaccccaccagtgtggccaggcagcgcctgcgcgaggaccacagccagctgcaggcggagtgcgagcgactgcgcgggctcctgcgcgccatggagagaggaggcaccgtcccagccgaccttgaggctgccgccgcgagtctgccatcgtccaaggaggtggcagagctgaagaagcaggtggagagtgccgagctgaagaaccagcggctcaaggaggttttccagaccaagatccaggagttccgcaaggcctgctacacgctcaccggctaccagatcgacatcaccacggagaaccagtaccggctgacctcgctgtacgccgagcacccaggcgactgcctcatcttcaaggccaccagcccctcgggttccaagatgcagctactggagacagagttctcacacaccgtgggcgagctcatcgaggtgcacctgcggcgccaggacagcatccctgccttcctcagctcgctcaccctcgagctcttcagccgccagaccgtggcgtagcctgcaggctcgggggcatagccggagccactctgcttggcctgacctgcaggtcccctgccccgccagccacaggctgggtgcacgtcctgcctctccagccccacagggcagcagcatgactgacagacacgctgggacctacgtcgggcttcctgctggggcggccagcaccctctccacgtgcagaccccatgcgtcccggagcctggtgtgtgggcgtcggccaccagcctgggttcctcaccttgtgaaataaaatcttctcccctagacactccc

SEQ ID NO: 6054 - protein, 718 aa, Homo sapiens; identical to SEQ ID NO: 810

SEQ ID NO: 6055 - DNA, 3000 bp, Homo sapiens
gcaaaattttgggaagagtcaacggtgcaagtttgtccgaggaggctgccgtgggcgcggctattccacacattacggcgcgaggcgaaagccttagtggaagcgcgtcctgcgcaaagccggggggcccccgactgcgccttggctcagccttcggttccgagtcctttccgtgcggagtctcccaggggtggcggctccgggtgcggacgcggagtccccaggatcagccggtgcgcagactcggttctttacggcccgattgccacgcaggtctcgcgagagcgcaggcgcaagtgtcgcgataaatgggcgccggcggagcggagggagatccgagcggcggcggcaagctggctgcgagcggctgagcagcactccaagctcgccggcctttggtctccaggacttgtcccagcagcccctcgaactgagaattacaccatcggacccctggctctgaggccttcagacttggactgtgtcacactgccaggcttccagggctccaacttgcagacggcctgttgtgggacagtctctgtaatcgcgaaagcaaccatggaagacctgggggaaaacaccatggttttatccaccctgagatctttgaacaacttcatctctcagcgtgtggagggaggctctggactggatatttctacctcggccccaggttctctgcagatgcagtaccagcagagcatgcagctggaggaaagagcagagcagatccgttcgaagtcccacctcatccaggtggagcgggagaaaatgcagatggagctgagtcacaagagggctcgagtggagctggagagagcagccagcaccagtgccaggaactacgagcgtgaggtcgaccgcaaccaggagctcctgacgcgcatccggcagcttcaggagcgggaggccggggcggaggagaagatgcaggagcagctggagcgcaacaggcagtgtcagcagaacttggatgctgccagcaagaggctgcgtgagaaagaggacagtctggcccaggctggcgagaccatcaacgcactgaaggggaggatctcggaactgcagtggagcgtgatggaccaggagatgcgggtgaagcgcctggagtcggagaagcaggagctgcaggagcagctggacctgcaacacaaaaaatgccaggaagccaatcagaaaatccaggaactccaggccagccaagaagcaagagcagaccacgagcagcagattaaggatctggagcagaagctgtccctgcaagagcaggatgcagcgattgtgaagaacatgaagtctgagctggtacggctccctaggctggaacgggagctgaagcagctgcgggaggagagcgcgcacctgcgggagatgagagagaccaacgggctgctccaggaagagctggaagggctgcagaggaagctggggcgccaggagaagatgcaggagacgctggttggcttggagctggagaacgagaggctgctggccaagctgcaaagctgggagagactggaccagaccatgggcctgagcatcaggactccagaagacctttccagattcgtggttgagctgcagcagagggagcttgccttgaaggacaagaacagcgccgtcaccagcagcgcccgggggctggagaaggccaggcagcagctgcaggaggagctccggcaggtcagcggccagctgttggaggagaggaagaagcgcgagacccacgaggcgctggcccggaggctccagaaacgggtcctgctgctcaccaaggagcgggacggtatgcgggccatcctggggtcctacgacagcgagctgaccccggccgagtactcaccccagctgacgcggcgcatgcgggaggctgaggatatggtgcagaaggtgcacagccacagcgccgagatggaggctcagctgtcgcaggccctggaggagctgggaggccagaaacaaagagcagacatgctggagatggagctgaagatgctgaagtctcagtccagctctgccgaacagagcttcctgttctccagggaggaggcggacacgctcaggttgaaggtcgaggagctggaaggcgagcggagtcggctggaggaggaaaagaggatgctggaggcacagctggagcggcgagctctgcagggtgactatgaccagagcaggaccaaagtgctgcacatgagcctgaaccccaccagtgtggccaggcagcgcctgcgcgaggaccacagccagctgcaggcggagtgcgagcgactgcgcgggctcctgcgcgccatggagagaggaggcaccgtcccagccgaccttgaggctgccgccgcgagtctgccatcgtccaaggaggtggcagagctgaagaagcaggtggagagtgccgagctgaagaaccagcggctcaaggaggttttccagaccaagatccaggagttccgcaaggcctgctacacgctcaccggctaccagatcgacatcaccacggagaaccagtaccggctgacctcgctgtacgccgagcacccaggcgactgcctcatcttcaaggccaccagcccctcgggttccaagatgcagctactggagacagagttctcacacaccgtgggcgagctcatcgaggtgcacctgcggcgccaggacagcatccctgccttcctcagctcgctcaccctcgagctcttcagccgccagaccgtggcgtagcctgcaggctcgggggcatagccggagccactctgcttggcctgacctgcaggtcccctgccccgccagccacaggctgggtgcacgtcctgcctctccagccccacagggcagcagcatgactgacagacacgctgggacctacgtcgggcttcctgctggggcggccagcaccctctccacgtgcagaccccatgcgtcccggagcctggtgtgtgggcgtcggccaccagcctgggttcctcaccttgtgaaataaaatcttctcccctagacactccc

SEQ ID NO: 6056 - protein, 718 aa, Homo sapiens; identical to SEQ ID NO: 810

SEQ ID NO: 6057 - DNA, 1358 bp, Homo sapiens
cagtcgtgacccatgtcaaaggtatatgcagctggatgtaagttaaagtggagaaaacagattttattcagtcgctgctgacagcaggggacagagctgagctcctttcagtataatgaagagtcctggacattatctatggaatgagcatagtgagcctctgcgggatggaggccaggggccttgggcctcggaacagcctggcggggagctgcccaggtttcctcgtctgcctctttcatcccagacttggagctaaggaagcacatccccaaaatgccgacgctccccagcaaaggactaggtaaatagcagctgggaagacagaaaatgtagttaatgcctagcaataatggaaagaaaaacttaatggatataaggtcagcagcagaatggaggcgacaggagcgcgttcgtgaactcagagatggaccgataggaactgcccatctgcccattctgaacagcagagagaatacgatggaataaaatgagcaaagttcccgacaccgatgagacctgggaatacgatggaataaaaggaacaaagtccccggtgccggtggggccacaacacaagatccagcattccagttgtggggatctgggagggtccggaggagctgagatggagccgcagaggcagcaggcagcgtcttcaaaactaatccagtgtctttgctgttctgtgggtctactcaggttgtctgtgtttctcttgagtcagttttggtagcttttgtcttttcaggagtttgttcatttcacctccgttattaattttcggcatgcagctgttcgtagtattcctttacagcctttatctctggaaggtcagctagtgtctctttcactcccaactgcagtgatctgcaccctctttcttgtttccttggttggcccagctaaaagtttctgtcaattctgttgctattctcacagaaccaactttaggcttgaccgatttcttttattgtttttgtgttctttatttcacttatttttgctctaatatttattatttcgttccttctgcttgggtcaactgaagttggactccatcaagattaaaatttttgccccgtgaaagttcctgtgaagagatgaaaagacaaggtagagataaagaggaactatttgcaagcttcatatctgacaaagacgatttgttatctgtaatagatgagaaaactctcaaaactcagtaatagaaaaacaaaacagacacacctaattagcaaacaagcaaaagatatagacagacctttttaccaaataacatatacagatgacagttaagcccgtggaaagatgttcaacatcattagtcatgagggaaatgcaagttaaaaccacag

SEQ ID NO: 6058 - protein, 81 aa, Homo sapiens [sequence omitted]

SEQ ID NO: 6059 - DNA, 7586 bp, Homo sapiens
cctcagcgctgggcggccgctcacctcgggccggggggcgccgcgcctcccgcggagtggccgcgcccgctcggagccgtcccgcctgtcctgcccgcccgtccgtccggcgcggcgctcggggtggcggctgctcggcataaagttggggccgggccgccgcggctggtgggcgctgctggcgctgcagctgcacttgctccgggcgctggcgcaagatgatgttgctccatattttaaaacggagccaggcctaccacagatccacctggaagggaaccgccttgttctcacctgccttgccgaagggagctggcctttggagttcaagtggatgcgcgatgacagtgagctcaccacctacagcagcgaatataagtacattattccatctttgcagaagctcgatgctgggttttaccgctgcgtggtgcgaaacagaatgggagcactcctgcaaagaaaatcagaagttcaagtcgcatatatgggaagtttcatggatacggaccagaggaaaacagtttctcaaggacgtgcagcgattctaaacctgctgcccatcaccagctaccccagacctcaagtgacttggtttagagaagggcacaagattattccaagcaacagaatagccatcacattggagaatcagctggtgatcctcgccaccacaaccagtgatgccggggcatactacgtgcaggccgtgaatgagaaaaatggagaaaacaagacaagcccattcattcatttgagcatagcaagagatgttggcacacctgaaaccatggccccaaccattgtggttcccccgggcaacagaagtgtggtggctggatccagtgagaccaccttggaatgtatagccagtgccaggcctgtggaggacctgagtgtgacctggaagaggaatggagtgagaatcaccagtggcctccacagctttggaagacgcctcaccatcagcaacccgacgtccgcggacaccgggccatacgtctgcgaggcggcgctgccggggagcgcttttgaaccggccagggcgacggcctttcttttcatcatagagccaccatattttactgctgagcccgagagtcggatttcagctgaagtagaagaaactgtggacatcggatgtcaagccatgggggtcccccttcccaccctccagtggtacaaggatgccatctccatcagcaggctccagaatcctcgatacaaagtgctcgccagcggaggcctgcgcatccagaagctgcgtccagaggactccggaatcttccagtgcttcgccagcaatgaaggaggggagatccagacccacacctacctggatgtaaccaatatcgctccagtgttcacccagcggccagtggacaccacagttactgacgggatgacagccattctaaggtgtgaggtgtccggggctcccaaacccgccatcacctggaaaagagaaaaccacattctggccagtggctctgtccggattcctaggttcatgcttcttgaatcggggggtctacagatcgcgcccgtcttcatccaggatgccggcaactacacctgctatgcggccaacacagagggctccctgaatgcatcggccacgctcactgtgtggaatcggacgtccatcgtccaccctcctgaggaccacgtggtgattaaggggaccacggccacgctgcactgtggtgccacacatgacccccgggtttcactccgctacgtttggaagaaggacaacgtggccctgactccatcgagcacgtctaggatcgtggtggagaaggacgggtcccttctcatcagccagacgtggtcaggcgacatcggtgactacagctgcgagattgtttctgaaggagggaatgactccaggatggcccggctggaagtgattgaactgcctcattcacctcagaacctcctggtcagccctaattcttcccacagccacgccgtggtgctctcttgggtccggccctttgatggaaacagtcctattctttattacatcgtggagctctctgaaaacaactctccatggaaggtgcatctgtcaaacgttggccctgagatgacaggcgtcaccgtgagtggcctgactccggctcgtacctatcaattccgggtgtgcgcggtgaatgaagtgggcaggggccagtacagcgccgagacaagcaggttgatgctacctgaagaaccacccagtgctcccccgaaaaatatagtggccagtgggcggactaatcagtccattatggtccagtggcagccacccccagaaacagagcacaacggggtgttgcgtggatacatcctcaggtaccgcctggctggccttcccggagagtaccagcagcggaacatcaccagcccggaggtgaactactgcctggtgacagacctgatcatctggacacagtatgagatacaggtggcggcgtacaacggggccggtctgggcgtcttcagcagggcagtgaccgagtacaccttgcagggagtgcccaccgcgcccccgcagaacgtgcagacggaagccgtgaactccaccaccattcagttcctgtggaaccctccgcctcagcagtttatcaatggcatcaaccagggatacaagcttctggcatggccggcagatgcccccgaggctgtcactgtggtcactattgccccagatttccacggagtccaccatggacacataacgaacctgaagaagtttaccgcctacttcacttccgttctgtgcttcaccacccctggggacgggcctcccagcacacctcagctggtctggactcaggaagacaaaccaggagctgtgggacatctgagtttcacagagatcttggacacatctctcaaggtcagctggcaggagcccctggagaaaaatggcatcattactggctatcagatctcttgggaagtgtacggcaggaacgactctcgtctcacgcacaccctgaacagcacgacgcacgagtacaagatccaaggcctctcatctctcaccacctacaccatcgacgtggccgctgtgactgccgtgggcactggcctggtgacttcatccaccatttcttctggagtgcccccagaccttcctggtgccccatccaacctggtcatttccaacatcagccctcgctccgccacccttcagttccggccaggctatgacgggaaaacgtccatctccaggtggattgttgaggggcaggtgggagctatcggcgacgaggaggagtgggtcaccctctatgaagaggagaatgagcctgatgcccagatgctggagatcccaaacctcacaccctacactcactacagatttcgaatgaagcaagtgaacattgttgggccgagcccctacagtccgtcttcccgggtcatccagaccctgcaggccccacccgacgtggctccaaccagcgtcacggtccgtactgccagtgagaccagcctgcggcttcgctgggtgcccctgccggattctcagtacaacgggaaccccgagtccgtgggctacaggattaagtactggcgctcagacctccagtcctcagcagtggcccaagtcgtcagtgaccggctggagagagaattcaccatcgaggagctggaggagtggatggaatacgagctgcagatgcaggccttcaacgccgtcggggctgggccgtggagcgaggtggtgcggggccggacgcgggagtcagttccttcagccgcccctgagaacgtgtcagccgaggctgtcagctcgacccagattttactgacatggacatccgtgccggaacaggaccagaatgggctcatactgggctacaagatcctgttccgggccaaagacctggatcccgagcccaggagccacatcgtgcgagggaaccacacgcagtcggccctgctggcaggcctgcgcaagttcgtgctctacgagctccaggtgctggcgttcacccgcatcgggaacggggtccccagcacgcccctcatcctggagcgcaccaaagacgatgccccaggcccaccagtgaggctcgtgttccccgaagtgagactcacctccgtgcggatagtgtggcaacctccggaggagcccaacggcatcatcctggggtaccagattgcctaccgcctggccagcagcagcccccacaccttcaccaccgtggaggtcggcgccacagtgaggcagttcacagccaccgacctggccccggagtccgcatacatcttcaggctgtccgccaagacgaggcagggctggggggagccactggaggccaccgtcatcaccaccgagaagagagagcggccggcaccccccagagagctcctggtgccccaggcagaagtgaccgcacgcagcctccggctccagtgggtcccgggcagcgacggggcctcccccatccggtacttcaccatgcaggtgcgagagctgcctcggggtgagtggcagacctactcctcgtccatcagccatgaggcgacagcatgcgtcgttgacagactgaggcccttcacctcctacaagctgcgcctgaaagccaccaacgacattggggacagtgacttcagttcagagacagaggcggtgaccacgctgcaggatgttccaggagagcccccgggatctgtctcagcgacgccacacaccacgtcctctgtcctgatacagtggcagcctccgagggacgaaagcctgaatggccttcttcagggatacaggatctactacagggagctggagtatgaagccgggtcaggcactgaggccaagacgctcaaaaaccctatagctttacatgctgagctcacagcccaaagcagcttcaagacggtgaacagcagctccacatcgacgatgtgtgaactaacacatttaaagaagtaccggcgctatgaagtaataatgaccgcctataacatcatcggcgagagcccagccagcgcgcccgtggaggtctttgtcggcgaggctgccccggccatggccccgcagaacgtgcaggtgaccccactcacggccagccagctggaggtcacgtgggacccaccacccccggagagccagaatgggaacatccaaggctacaagatttactactgggaggcagacagccagaacgaaacggagaaaatgaaggtcctcttcctccccgagcccgtggtgaggctgaagaacctgaccagccataccaagtacctggtcagcatatcagccttcaacgccgccggagatggacctaagagtgacccccagcaggggcgcacccaccaggccgcccctggggcccccagctttctggcgttctcagaaataacctccaccacgctcaacgtgtcctggggcgagcctgcggcggccaacggcatcctgcagggctatcgggtggtgtacgagcccttggcccctgtacaaggggtgagcaaggtggtgaccgtggaagtgagagggaactggcagcgctggctgaaggtgcgggacctcaccaagggagtgacctatttcttccgtgtccaagcgcggaccatcacctacgggcccgagctccaagccaatatcacagccgggccagccgagggatccccgggctcgcctagagatgtcctggtcaccaagtccgcctctgaactgacgctgcagtggactgagggacactctggcgacacacctaccacgggctatgtgatcgaggcccggccctcagatgaaggcttatgggacatgtttgtgaaggacatcccgcggagcgccacatcctacaccctcagcctggataagctccggcaaggagtgacttacgagttccgggtggtggctgtgaatgaggcgggctacggggagcccagcaacccctccacggctgtgtcagctcaagtggaagccccattctacgaggagtggtggttcctcctggtgatggctctgtccagcctgatcgtcatcctgctggtggtgttcgccctcgtcctgcacgggcagaataagaagtataagaactgcagcacaggaaaggggatctccaccatggaggagtctgtgaccctggacaacggaggatttgctgccctggagctcagcagccgccacctcaatgtcaagagcaccttctccaagaagaacgggaccaggtccccaccccggcctagccccggcggcctgcactactcagacgaggacatctgcaacaagtacaacggcgccgtgctgaccgagagcgtgagcctcaaggagaagtcggcagatgcatcagaatctgaggccacggactctgactacgaggacgcgctgcccaagcactccttcgtgaaccactacatgagcgaccccacctactacaactcatggaagcgcagggcccagggccgcgcacctgcgccgcacaggtacgaggcggtggcgggctccgaggcgggcgcgcagctgcacccggtcatcaccacgcagagcgcgggcggcgtctacacccccgctggccccggcgcgcgaactccgctcaccggcttctcctccttcgtgtgagcaaagcgccgcgcctccctcagggcggaacggaggcaactttccggagtctatttttgttaagacaatcaactccaataactgagctgaagtttttgtttaaaaagaaaaaaatctgataagtgatgattttacctacttgtggacactagatttcaattaggaaggtttttttaaacggctttttgtaacttcgctgcaggaagcaggtttgtttctttttcttttctttttaagagaaggtgtatttcactggtgcaatggcttggcacctccggggcctgggaggacctcagacctccccagccctgggtttctccgtcttcaagaccaactaggaagggtcaagcggggagagggagtggagggtcaggtgagatctcagagctgccccggccggcccccgtctctttctacctcctcttccagagaaccagcggctcacacccttctcaacgcaggacatcctcggcggctcctggggtttgaagagcaaacgtttttccctgggctcagtgcgttttgtcccaacttcatctgtttctgaaatgttctcacttggcagtgtctagtcaaggagtcggctttcaggttcctgacggccaggcagggatgctaaggtgtggctcagccgtcactgtctgtgtcactgcagtggtgcggtcctcaggcttttctgcctgtctttcccccttccttctcacctgacagcgagggagagggaagcctcttagggctggaagccaccacgctggccctctccttccccgaacacagcacacggtcaactccgcgggacacgaggacacgggacggcgtctccagaattgcttgttacgtaggaagcgtgcattgttaaccagagtatttttaaaatctttttatctttttttaaactatgtcacatgaaatgaatgcgtctttgctgtctccaggtgcctttttattaattgttcagctttgtacatgggaaagatgaaaagcaacagtgtctgcaaataaagcaaaacagctctgagaacac

SEQ ID NO: 6060 - protein, 2075 aa, Homo sapiens
MRDDSELTTYSSEYKYIIPSLQKLDAGFYRCVVRNRMGALLQRKSEVQVAYMGSFMDTDQRKTVSQGRAAILNLLPITSYPRPQVTWFREGHKIIPSNRIAITLENQLVILATTTSDAGAYYVQAVNEKNGENKTSPFIHLSIARDVGTPETMAPTIVVPPGNRSVVAGSSETTLECIASARPVEDLSVTWKRNGVRITSGLHSFGRRLTISNPTSADTGPYVCEAALPGSAFEPARATAFLFIIEPPYFTAEPESRISAEVEETVDIGCQAMGVPLPTLQWYKDAISISRLQNPRYKVLASGGLRIQKLRPEDSGIFQCFASNEGGEIQTHTYLDVTNIAPVFTQRPVDTTVTDGMTAILRCEVSGAPKPAITWKRENHILASGSVRIPRFMLLESGGLQIAPVFIQDAGNYTCYAANTEGSLNASATLTVWNRTSIVHPPEDHVVIKGTTATLHCGATHDPRVSLRYVWKKDNVALTPSSTSRIVVEKDGSLLISQTWSGDIGDYSCEIVSEGGNDSRMARLEVIELPHSPQNLLVSPNSSHSHAVVLSWVRPFDGNSPILYYIVELSENNSPWKVHLSNVGPEMTGVTVSGLTPARTYQFRVCAVNEVGRGQYSAETSRLMLPEEPPSAPPKNIVASGRTNQSIMVQWQPPPETEHNGVLRGYILRYRLAGLPGEYQQRNITSPEVNYCLVTDLIIWTQYEIQVAAYNGAGLGVFSRAVTEYTLQGVPTAPPQNVQTEAVNSTTIQFLWNPPPQQFINGINQGYKLLAWPADAPEAVTVVTIAPDFHGVHHGHITNLKKFTAYFTSVLCFTTPGDGPPSTPQLVWTQEDKPGAVGHLSFTEILDTSLKVSWQEPLEKNGIITGYQISWEVYGRNDSRLTHTLNSTTHEYKIQGLSSLTTYTIDVAAVTAVGTGLVTSSTISSGVPPDLPGAPSNLVISNISPRSATLQFRPGYDGKTSISRWIVEGQVGAIGDEEEWVTLYEEENEPDAQMLEIPNLTPYTHYRFRMKQVNIVGPSPYSPSSRVIQTLQAPPDVAPTSVTVRTASETSLRLRWVPLPDSQYNGNPESVGYRIKYWRSDLQSSAVAQVVSDRLEREFTIEELEEWMEYELQMQAFNAVGAGPWSEVVRGRTRESVPSAAPENVSAEAVSSTQILLTWTSVPEQDQNGLILGYKILFRAKDLDPEPRSHIVRGNHTQSALLAGLRKFVLYELQVLAFTRIGNGVPSTPLILERTKDDAPGPPVRLVFPEVRLTSVRIVWQPPEEPNGIILGYQIAYRLASSSPHTFTTVEVGATVRQFTATDLAPESAYIFRLSAKTRQGWGEPLEATVITTEKRERPAPPRELLVPQAEVTARSLRLQWVPGSDGASPIRYFTMQVRELPRGEWQTYSSSISHEATACVVDRLRPFTSYKLRLKATNDIGDSDFSSETEAVTTLQDVPGEPPGSVSATPHTTSSVLIQWQPPRDESLNGLLQGYRIYYRELEYEAGSGTEAKTLKNPIALHAELTAQSSFKTVNSSSTSTMCELTHLKKYRRYEVIMTAYNIIGESPASAPVEVFVGEAAPAMAPQNVQVTPLTASQLEVTWDPPPPESQNGNIQGYKIYYWEADSQNETEKMKVLFLPEPVVRLKNLTSHTKYLVSISAFNAAGDGPKSDPQQGRTHQAAPGAPSFLAFSEITSTTLNVSWGEPAAANGILQGYRVVYEPLAPVQGVSKVVTVEVRGNWQRWLKVRDLTKGVTYFFRVQARTITYGPELQANITAGPAEGSPGSPRDVLVTKSASELTLQWTEGHSGDTPTTGYVIEARPSDEGLWDMFVKDIPRSATSYTLSLDKLRQGVTYEFRVVAVNEAGYGEPSNPSTAVSAQVEAPFYEEWWFLLVMALSSLIVILLVVFALVLHGQNKKYKNCSTGKGISTMEESVTLDNGGFAALELSSRHLNVKSTFSKKNGTRSPPRPSPGGLHYSDEDICNKYNGAVLTESVSLKEKSADASESEATDSDYEDALPKHSFVNHYMSDPTYYNSWKRRAQGRAPAPHRYEAVAGSEAGAQLHPVITTQSAGGVYTPAGPGARTPLTGFSSFV

SEQ ID NO: 6061 - DNA, 10019 bp, Homo sapiens
cctcagcgctgggcggccgctcacctcgggccggggggcgccgcgcctcccgcggagtggccgcgcccgctcggagccgtcccgcctgtcctgcccgcccgtccgtccggcgcggcgctcggggtggcggctgctcggcataaagttggggccgggccgccgcggctggtgggcgctgctggcgctgcagctgcacttgctccgggcgctggcgcaagatgatgttgctccatattttaaaacggagccaggcctaccacagatccacctggaagggaaccgccttgttctcacctgccttgccgaagggagctggcctttggagttcaagtggatgcgcgatgacagtgagctcaccacctacagcagcgaatataagtacattattccatctttgcagaagctcgatgctgggttttaccgctgcgtggtgcgaaacagaatgggagcactcctgcaaagaaaatcagaagttcaagtcgcatatatgggaagtttcatggatacggaccagaggaaaacagtttctcaaggacgtgcagcgattctaaacctgctgcccatcaccagctaccccagacctcaagtgacttggtttagagaagggcacaagattattccaagcaacagaatagccatcacattggagaatcagctggtgatcctcgccaccacaaccagtgatgccggggcatactacgtgcaggccgtgaatgagaaaaatggagaaaacaagacaagcccattcattcatttgagcatagcaagagatgttggcacacctgaaaccatggccccaaccattgtggttcccccgggcaacagaagtgtggtggctggatccagtgagaccaccttggaatgtatagccagtgccaggcctgtggaggacctgagtgtgacctggaagaggaatggagtgagaatcaccagtggcctccacagctttggaagacgcctcaccatcagcaacccgacgtccgcggacaccgggccatacgtctgcgaggcggcgctgccggggagcgcttttgaaccggccagggcgacggcctttcttttcatcatagagccaccatattttactgctgagcccgagagtcggatttcagctgaagtagaagaaactgtggacatcggatgtcaagccatgggggtcccccttcccaccctccagtggtacaaggatgccatctccatcagcaggctccagaatcctcgatacaaagtgctcgccagcggaggcctgcgcatccagaagctgcgtccagaggactccggaatcttccagtgcttcgccagcaatgaaggaggggagatccagacccacacctacctggatgtaaccaatatcgctccagtgttcacccagcggccagtggacaccacagttactgacgggatgacagccattctaaggtgtgaggtgtccggggctcccaaacccgccatcacctggaaaagagaaaaccacattctggccagtggctctgtccggattcctaggttcatgcttcttgaatcggggggtctacagatcgcgcccgtcttcatccaggatgccggcaactacacctgctatgcggccaacacagagggctccctgaatgcatcggccacgctcactgtgtggaatcggacgtccatcgtccaccctcctgaggaccacgtggtgattaaggggaccacggccacgctgcactgtggtgccacacatgacccccgggtttcactccgctacgtttggaagaaggacaacgtggccctgactccatcgagcacgtctaggatcgtggtggagaaggacgggtcccttctcatcagccagacgtggtcaggcgacatcggtgactacagctgcgagattgtttctgaaggagggaatgactccaggatggcccggctggaagtgattgaactgcctcattcacctcagaacctcctggtcagccctaattcttcccacagccacgccgtggtgctctcttgggtccggccctttgatggaaacagtcctattctttattacatcgtggagctctctgaaaacaactctccatggaaggtgcatctgtcaaacgttggccctgagatgacaggcgtcaccgtgagtggcctgactccggctcgtacctatcaattccgggtgtgcgcggtgaatgaagtgggcaggggccagtacagcgccgagacaagcaggttgatgctacctgaagaaccacccagtgctcccccgaaaaatatagtggccagtgggcggactaatcagtccattatggtccagtggcagccacccccagaaacagagcacaacggggtgttgcgtggatacatcctcaggtaccgcctggctggccttcccggagagtaccagcagcggaacatcaccagcccggaggtgaactactgcctggtgacagacctgatcatctggacacagtatgagatacaggtggcggcgtacaacggggccggtctgggcgtcttcagcagggcagtgaccgagtacaccttgcagggagtgcccaccgcgcccccgcagaacgtgcagacggaagccgtgaactccaccaccattcagttcctgtggaaccctccgcctcagcagtttatcaatggcatcaaccagggatacaagcttctggcatggccggcagatgcccccgaggctgtcactgtggtcactattgccccagatttccacggagtccaccatggacacataacgaacctgaagaagtttaccgcctacttcacttccgttctgtgcttcaccacccctggggacgggcctcccagcacacctcagctggtctggactcaggaagacaaaccaggagctgtgggacatctgagtttcacagagatcttggacacatctctcaaggtcagctggcaggagcccctggagaaaaatggcatcattactggctatcagatctcttgggaagtgtacggcaggaacgactctcgtctcacgcacaccctgaacagcacgacgcacgagtacaagatccaaggcctctcatctctcaccacctacaccatcgacgtggccgctgtgactgccgtgggcactggcctggtgacttcatccaccatttcttctggagtgcccccagaccttcctggtgccccatccaacctggtcatttccaacatcagccctcgctccgccacccttcagttccggccaggctatgacgggaaaacgtccatctccaggtggattgttgaggggcaggtgggagctatcggcgacgaggaggagtgggtcaccctctatgaagaggagaatgagcctgatgcccagatgctggagatcccaaacctcacaccctacactcactacagatttcgaatgaagcaagtgaacattgttgggccgagcccctacagtccgtcttcccgggtcatccagaccctgcaggccccacccgacgtggctccaaccagcgtcacggtccgtactgccagtgagaccagcctgcggcttcgctgggtgcccctgccggattctcagtacaacgggaaccccgagtccgtgggctacaggattaagtactggcgctcagacctccagtcctcagcagtggcccaagtcgtcagtgaccggctggagagagaattcaccatcgaggagctggaggagtggatggaatacgagctgcagatgcaggccttcaacgccgtcggggctgggccgtggagcgaggtggtgcggggccggacgcgggagtcagttccttcagccgcccctgagaacgtgtcagccgaggctgtcagctcgacccagattttactgacatggacatccgtgccggaacaggaccagaatgggctcatactgggctacaagatcctgttccgggccaaagacctggatcccgagcccaggagccacatcgtgcgagggaaccacacgcagtcggccctgctggcaggcctgcgcaagttcgtgctctacgagctccaggtgctggcgttcacccgcatcgggaacggggtccccagcacgcccctcatcctggagcgcaccaaagacgatgccccaggcccaccagtgaggctcgtgttccccgaagtgagactcacctccgtgcggatagtgtggcaacctccggaggagcccaacggcatcatcctggggtaccagattgcctaccgcctggccagcagcagcccccacaccttcaccaccgtggaggtcggcgccacagtgaggcagttcacagccaccgacctggccccggagtccgcatacatcttcaggctgtccgccaagacgaggcagggctggggggagccactggaggccaccgtcatcaccaccgagaagagagagcggccggcaccccccagagagctcctggtgccccaggcagaagtgaccgcacgcagcctccggctccagtgggtcccgggcagcgacggggcctcccccatccggtacttcaccatgcaggtgcgagagctgcctcggggtgagtggcagacctactcctcgtccatcagccatgaggcgacagcatgcgtcgttgacagactgaggcccttcacctcctacaagctgcgcctgaaagccaccaacgacattggggacagtgacttcagttcagagacagaggcggtgaccacgctgcaggatgttccaggagagcccccgggatctgtctcagcgacgccacacaccacgtcctctgtcctgatacagtggcagcctccgagggacgaaagcctgaatggccttcttcagggatacaggatctactacagggagctggagtatgaagccgggtcaggcactgaggccaagacgctcaaaaaccctatagctttacatgctgagctcacagcccaaagcagcttcaagacggtgaacagcagctccacatcgacgatgtgtgaactaacacatttaaagaagtaccggcgctatgaagtaataatgaccgcctataacatcatcggcgagagcccagccagcgcgcccgtggaggtctttgtcggcgaggctgccccggccatggccccgcagaacgtgcaggtgaccccactcacggccagccagctggaggtcacgtgggacccaccacccccggagagccagaatgggaacatccaaggctacaagatttactactgggaggcagacagccagaacgaaacggagaaaatgaaggtcctcttcctccccgagcccgtggtgaggctgaagaacctgaccagccataccaagtacctggtcagcatatcagccttcaacgccgccggagatggacctaagagtgacccccagcaggggcgcacccaccaggccgcccctggggcccccagctttctggcgttctcagaaataacctccaccacgctcaacgtgtcctggggcgagcctgcggcggccaacggcatcctgcagggctatcgggtggtgtacgagcccttggcccctgtacaaggggtgagcaaggtggtgaccgtggaagtgagagggaactggcagcgctggctgaaggtgcgggacctcaccaagggagtgacctatttcttccgtgtccaagcgcggaccatcacctacgggcccgagctccaagccaatatcacagccgggccagccgagggatccccgggctcgcctagagatgtcctggtcaccaagtccgcctctgaactgacgctgcagtggactgagggacactctggcgacacacctaccacgggctatgtgatcgaggcccggccctcagatgaaggcttatgggacatgtttgtgaaggacatcccgcggagcgccacatcctacaccctcagcctggataagctccggcaaggagtgacttacgagttccgggtggtggctgtgaatgaggcgggctacggggagcccagcaacccctccacggctgtgtcagctcaagtggaagccccattctacgaggagtggtggttcctcctggtgatggctctgtccagcctgatcgtcatcctgctggtggtgttcgccctcgtcctgcacgggcagaataagaagtataagaactgcagcacaggaaaggggatctccaccatggaggagtctgtgaccctggacaacggaggatttgctgccctggagctcagcagccgccacctcaatgtcaagagcaccttctccaagaagaacgggaccaggtccccaccccggcctagccccggcggcctgcactactcagacgaggacatctgcaacaagtacaacggcgccgtgctgaccgagagcgtgagcctcaaggagaagtcggcagatgcatcagaatctgaggccacggactctgactacgaggacgcgctgcccaagcactccttcgtgaaccactacatgagcgaccccacctactacaactcatggaagcgcagggcccagggccgcgcacctgcgccgcacaggtacgaggcggtggcgggctccgaggcgggcgcgcagctgcacccggtcatcaccacgcagagcgcgggcggcgtctacacccccgctggccccggcgcgcgaactccgctcaccggcttctcctccttcgtgtgagcaaagcgccgcgcctccctcagggcggaacggaggcaactttccggagtctatttttgttaagacaatcaactccaataactgagctgaagtttttgtttaaaaagaaaaaaatctgataagtgatgattttacctacttgtggacactagatttcaattaggaaggtttttttaaacggctttttgtaacttcgctgcaggaagcaggtttgtttctttttcttttctttttaagagaaggtgtatttcactggtgcaatggcttggcacctccggggcctgggaggacctcagacctccccagccctgggtttctccgtcttcaagaccaactaggaagggtcaagcggggagagggagtggagggtcaggtgagatctcagagctgccccggccggcccccgtctctttctacctcctcttccagagaaccagcggctcacacccttctcaacgcaggacatcctcggcggctcctggggtttgaagagcaaacgtttttccctgggctcagtgcgttttgtcccaacttcatctgtttctgaaatgttctcacttggcagtgtctagtcaaggagtcggctttcaggttcctgacggccaggcagggatgctaaggtgtggctcagccgtcactgtctgtgtcactgcagtggtgcggtcctcaggcttttctgcctgtctttcccccttccttctcacctgacagcgagggagagggaagcctcttagggctggaagccaccacgctggccctctccttccccgaacacagcacacggtcaactccgcgggacacgaggacacgggacggcgtctccagaattgcttgttacgtaggaagcgtgcattgttaaccagagtatttttaaaatctttttatctttttttaaactatgtcacatgaaatgaatgcgtctttgctgtctccaggtgcctttttattaattgttcagctttgtacatgggaaagatgaaaagcaacagtgtctgcaaataaagcaaaacagctctgagaacacacgctcccgactcgcctcgtgcacaccaggccgtcccctccctctgtcctggcttctgctggctgctcgcagcagccaccgcttctccaccactggcgctgctgctgccccctctcccagtccgaggccagcttttagccttaacaggttttttggaaatgtttcttttttttatttaaaattgtcattgtttggtttaaatttttcagctagatgaaaagagtatgaactactttggaaaacttaacagctcagagatggccatgcctccagcccctcacgtcatctttgcaacagacgactgggctgccatggtccacccctcagcccgggtcccgggtctggatggaacgggagcactgctggtgcccactggcgtgtgtgccccgggtccctgtaagtgccccctcaccagcagcagcgtgacacacacaagactcaagaccaccctgtcagtgccccccagtgcacggcaaacgggcaggtgccgttcccccagtgacctgagggtaggggacaactgagcagtatctgaccagtgccacccaggagccagtctcctggccacatgcagaaagtgtggcccctgcttacctagatgttttgtgcacctccatgggcagagggtgtggatattgcctggattctgtgctgtcagcgttgctgagtatggccccaggagaccaaggagagttttgtataggctggaaaaccccttttcagtctttccaaaattagagggtatggcaagtttccttttttctcctattccttcttccttttctcctcctttttctgagtggagggggaaatattctaaaccaaaaatcctagatgctctgcccaaagccacttctgcatgagaatcgcaacccacagttccccggatgagactcaccacagtggacagtgccacctccttcccctcggccccggagagggcgaagtgggcgggaagccaggatgtgagcactggaatttcttggaagagaagcgataaatggagaccatggccagcgctgctttctgtgcactctgatgactgctctctgcagccatgaggatgtggctttacatgccagggagagtgttgagacgtcttaggttgaggatgagcagattcgagatatgtttgttgctctcgggttttcgatacaacatcatgacacttctgtttcaagctcatgttttccgtctcccctccactcttagtaaaccttgatctgtacggagcggcctgtccgaggctacgccggcctcctggctgctgctggactgtgcttaggacagcgcccatgcctcggagggactctgtcccatgagaaccacctgtgcaaaggaacagagctggatgtttccaggtagattttggcctcccagagcaatgcggcatttgagaagcaacagttcctaactccttatcttcagggaaggaaaagaaaatcacagcctaggaagatggaggttggattttaatctcggttttaaaaagaggacaaacaaaatgtctctaagccaggctagatggaatgtgctcccgctctctcctgccgtgctgaaagtcatgccttgcggatgcctcatgacagcagtggctgagtctccccacccacccccaacgtggctcatttcagattgcttcggccccaccctgcaaggatgtggtcacggagtggccaggaggctccgtctgagccacagggatgggtgtgcagagctccctcctcctggggtgccagggcagagattccaggcaggtgagcccagagagagctgccaggccacaccccctcggcctcctgcacggccaccttctgggtgaatcggtccagcccaagcccctctccccagcctcgccttcagcctctctcccagcctgcttttataaggcgcacttcactcaatgctgtagccaaaaaacgaggggccccagggagaggggacccagatggccacacacggaacgcgcctccacagccccgggaggtggctcactctgtacaggtcttcggaggccgtgtttgtatctaactgtgactgggctgaagcatgatgtttgcctaatggttcgtagcatggtttttatttcttacgcattcttggcacacagtgtagctatcctcctgacgagcaacccgtctgcgtacctaagtgtggctccccgtgggtcagcgtcctggtagcatggatccagtctgaaaggtgaggacaacgtggaaactcatgagctgagcctgcccgctgggacacgtctccttcccgcgtcaccttctggtttagggagccgtcaggtccctaaacgttccctacaactttttctgaaattgtgcagaaaaacagatctcattaaaagaaaaaaagaaacaacttgtaggaagacagagaggtgctatgggtacaatttttaataaaaacattattttgttccttaaa

SEQ ID NO: 6062 - protein, 2075 aa, Homo sapiens; identical to SEQ ID NO: 6060

SEQ ID NO: 6063 - DNA, 5441 bp, Homo sapiens
ccctgagatgacaggcgtcaccgtgagtggcctgactccggctcgtacctatcaattccgggtgtgcgcggtgaatgaagtgggcaggggccagtacagcgccgagacaagcaggttgatgctacctgaagaaccacccagtgctcccccgaaaaatatagtggccagtgggcggactaatcagtccattatggtccagtggcagccacccccagaaacagagcacaacggggtgttgcgtggatacatcctcaggtaccgcctggctggccttcccggagagtaccagcagcggaacatcaccagcccggaggtgaactactgcctggtgacagacctgatcatctggacacagtatgagatacaggtggcggcgtacaacggggccggtctgggcgtcttcagcagggcagtgaccgagtacaccttgcagggagtgcccaccgcgcccccgcagaacgtgcagacggaagccgtgaactccaccaccattcagttcctgtggaaccctccgcctcagcagtttatcaatggcatcaaccagggatacaagcttctggcatggccggcagatgcccccgaggctgtcactgtggtcactattgccccagatttccacggagtccaccatggacacataacgaacctgaagaagtttaccgcctacttcacttccgttctgtgcttcaccacccctggggacgggcctcccagcacacctcagctggtctggactcaggaagacaaaccaggagctgtgggacatctgagtttcacagagatcttggacacatctctcaaggtcagctggcaggagcccctggagaaaaatggcatcattactggctatcagatctcttgggaagtgtacggcaggaacgactctcgtctcacgcacaccctgaacagcacgacgcacgagtacaagatccaaggcctctcatctctcaccacctacaccatcgacgtggccgctgtgactgccgtgggcactggcctggtgacttcatccaccatttcttctggagtgcccccagaccttcctggtgccccatccaacctggtcatttccaacatcagccctcgctccgccacccttcagttccggccaggctatgacgggaaaacgtccatctccaggtggattgttgaggggcaggtgggagctatcggcgacgaggaggagtgggtcaccctctatgaagaggagaatgagcctgatgcccagatgctggagatcccaaacctcacaccctacactcactacagatttcgaatgaagcaagtgaacattgttgggccgagcccctacagtccgtcttcccgggtcatccagaccctgcaggccccacccgacgtggctccaaccagcgtcacggtccgtactgccagtgagaccagcctgcggcttcgctgggtgcccctgccggattctcagtacaacgggaaccccgagtccgtgggctacaggattaagtactggcgctcagacctccagtcctcagcagtggcccaagtcgtcagtgaccggctggagagagaattcaccatcgaggagctggaggagtggatggaatacgagctgcagatgcaggccttcaacgccgtcggggctgggccgtggagcgaggtggtgcggggccggacgcgggagtcagttccttcagccgcccctgagaacgtgtcagccgaggctgtcagctcgacccagattttactgacatggacatccgtgccggaacaggaccagaatgggctcatactgggctacaagatcctgttccgggccaaagacctggatcccgagcccaggagccacatcgtgcgagggaaccacacgcagtcggccctgctggcaggcctgcgcaagttcgtgctctacgagctccaggtgctggcgttcacccgcatcgggaacggggtccccagcacgcccctcatcctggagcgcaccaaagacgatgccccaggcccaccagtgaggctcgtgttccccgaagtgagactcacctccgtgcggatagtgtggcaacctccggaggagcccaacggcatcatcctggggtaccagattgcctaccgcctggccagcagcagcccccacaccttcaccaccgtggaggtcggcgccacagtgaggcagttcacagccaccgacctggccccggagtccgcatacatcttcaggctgtccgccaagacgaggcagggctggggggagccactggaggccaccgtcatcaccaccgagaagagagagcggccggcaccccccagagagctcctggtgccccaggcagaagtgaccgcacgcagcctccggctccagtgggtcccgggcagcgacggggcctcccccatccggtacttcaccatgcaggtgcgagagctgcctcggggtgagtggcagacctactcctcgtccatcagccatgaggcgacagcatgcgtcgttgacagactgaggcccttcacctcctacaagctgcgcctgaaagccaccaacgacattggggacagtgacttcagttcagagacagaggcggtgaccacgctgcaggatgttccaggagagcccccgggatctgtctcagcgacgccacacaccacgtcctctgtcctgatacagtggcagcctccgagggacgaaagcctgaatggccttcttcagggatacaggatctactacagggagctggagtatgaagccgggtcaggcactgaggccaagacgctcaaaaaccctatagctttacatgctgagctcacagatttaaagaagtaccggcgctatgaagtaataatgaccgcctataacatcatcggcgagagcccagccagcgcgcccgtggaggtctttgtcggcgaggctgccccggccatggccccgcagaacgtgcaggtgaccccactcacggccagccagctggaggtcacgtgggacccaccacccccggagagccagaatgggaacatccaaggctacaagatttactactgggaggcagacagccagaacgaaacggagaaaatgaaggtcctcttcctccccgagcccgtggtgaggctgaagaacctgaccagccataccaagtacctggtcagcatatcagccttcaacgccgccggagatggacctaagagtgacccccagcaggggcgcacccaccaggccgcccctggggcccccagctttctggcgttctcagaaataacctccaccacgctcaacgtgtcctggggcgagcctgcggcggccaacggcatcctgcagggctatcgggtggtgtacgagcccttggcccctgtacaaggggtgagcaaggtggtgaccgtggaagtgagagggaactggcagcgctggctgaaggtgcgggacctcaccaagggagtgacctatttcttccgtgtccaagcgcggaccatcacctacgggcccgagctccaagccaatatcacagccgggccagccgagggatccccgggctcgcctagagatgtcctggtcaccaagtccgcctctgaactgacgctgcagtggactgagggacactctggcgacacacctaccacgggctatgtgatcgaggcccggccctcagatgaaggcttatgggacatgtttgtgaaggacatcccgcggagcgccacatcctacaccctcagcctggataagctccggcaaggagtgacttacgagttccgggtggtggctgtgaatgaggcgggctacggggagcccagcaacccctccacggctgtgtcagctcaagtggaagccccattctacgaggagtggtggttcctcctggtgatggctctgtccagcctgatcgtcatcctgctggtggtgttcgccctcgtcctgcacgggcagaataagaagtataagaactgcagcacaggaaaggggatctccaccatggaggagtctgtgaccctggacaacggaggatttgctgccctggagctcagcagccgccacctcaatgtcaagagcaccttctccaagaagaacgggaccaggtccccaccccggcctagccccggcggcctgcactactcagacgaggacatctgcaacaagtacaacggcgccgtgctgaccgagagcgtgagcctcaaggagaagtcggcagatgcatcagaatctgaggccacggactctgactacgaggacgcgctgcccaagcactccttcgtgaaccactacatgagcgaccccacctactacaactcatggaagcgcagggcccagggccgcgcacctgcgccgcacaggtacgaggcggtggcgggctccgaggcgggcgcgcagctgcacccggtcatcaccacgcagagcgcgggcggcgtctacacccccgctggccccggcgcgcgaactccgctcaccggcttctcctccttcgtgtgagcaaagcgccgcgcctccctcagggcggaacggaggcaactttccggagtctatttttgttaagacaatcaactccaataactgagctgaagtttttgtttaaaaagaaaaaaatctgataagtgatgattttacctacttgtggacactagatttcaattaggaaggtttttttaaacggctttttgtaacttcgctgcaggaagcaggtttgtttctttttcttttctttttaagagaaggtgtatttcactggtgcaatggcttggcacctccggggcctgggaggacctcagacctccccagccctgggtttctccgtcttcaagaccaactaggaagggtcaagcggggagagggagtggagggtcaggtgagatctcagagctgccccggccggcccccgtctctttctacctcctcttccagagaaccagcggctcacacccttctcaacgcaggacatcctcggcggctcctggggtttgaagagcaaacgtttttccctgggctcagtgcgttttgtcccaacttcatctgtttctgaaatgttctcacttggcagtgtctagtcaaggagtcggctttcaggttcctgacggccaggcagggatgctaaggtgtggctcagccgtcactgtctgtgtcactgcagtggtgcggtcctcaggcttttctgcctgtctttcccccttccttctcacctgacagcgagggagagggaagcctcttagggctggaagccaccacgctggccctctccttccccgaacacagcacacggtcaactccgcgggacacgaggacacgggacggcgtctccagaattgcttgttacgtaggaagcgtgcattgttaaccagagtatttttaaaatctttttatctttttttaaactatgtcacatgaaatgaatgcgtctttgctgtctccaggtgcctttttattaattgttcagctttgtacatgggaaagatgaaaagcaacagtgtctgcaaataaagcaaaacagctctgagaacac

SEQ ID NO: 6064 - protein, 1469 aa, Homo sapiens
MTGVTVSGLTPARTYQFRVCAVNEVGRGQYSAETSRLMLPEEPPSAPPKNIVASGRTNQSIMVQWQPPPETEHNGVLRGYILRYRLAGLPGEYQQRNITSPEVNYCLVTDLIIWTQYEIQVAAYNGAGLGVFSRAVTEYTLQGVPTAPPQNVQTEAVNSTTIQFLWNPPPQQFINGINQGYKLLAWPADAPEAVTVVTIAPDFHGVHHGHITNLKKFTAYFTSVLCFTTPGDGPPSTPQLVWTQEDKPGAVGHLSFTEILDTSLKVSWQEPLEKNGIITGYQISWEVYGRNDSRLTHTLNSTTHEYKIQGLSSLTTYTIDVAAVTAVGTGLVTSSTISSGVPPDLPGAPSNLVISNISPRSATLQFRPGYDGKTSISRWIVEGQVGAIGDEEEWVTLYEEENEPDAQMLEIPNLTPYTHYRFRMKQVNIVGPSPYSPSSRVIQTLQAPPDVAPTSVTVRTASETSLRLRWVPLPDSQYNGNPESVGYRIKYWRSDLQSSAVAQVVSDRLEREFTIEELEEWMEYELQMQAFNAVGAGPWSEVVRGRTRESVPSAAPENVSAEAVSSTQILLTWTSVPEQDQNGLILGYKILFRAKDLDPEPRSHIVRGNHTQSALLAGLRKFVLYELQVLAFTRIGNGVPSTPLILERTKDDAPGPPVRLVFPEVRLTSVRIVWQPPEEPNGIILGYQIAYRLASSSPHTFTTVEVGATVRQFTATDLAPESAYIFRLSAKTRQGWGEPLEATVITTEKRERPAPPRELLVPQAEVTARSLRLQWVPGSDGASPIRYFTMQVRELPRGEWQTYSSSISHEATACVVDRLRPFTSYKLRLKATNDIGDSDFSSETEAVTTLQDVPGEPPGSVSATPHTTSSVLIQWQPPRDESLNGLLQGYRIYYRELEYEAGSGTEAKTLKNPIALHAELTDLKKYRRYEVIMTAYNIIGESPASAPVEVFVGEAAPAMAPQNVQVTPLTASQLEVTWDPPPPESQNGNIQGYKIYYWEADSQNETEKMKVLFLPEPVVRLKNLTSHTKYLVSISAFNAAGDGPKSDPQQGRTHQAAPGAPSFLAFSEITSTTLNVSWGEPAAANGILQGYRVVYEPLAPVQGVSKVVTVEVRGNWQRWLKVRDLTKGVTYFFRVQARTITYGPELQANITAGPAEGSPGSPRDVLVTKSASELTLQWTEGHSGDTPTTGYVIEARPSDEGLWDMFVKDIPRSATSYTLSLDKLRQGVTYEFRVVAVNEAGYGEPSNPSTAVSAQVEAPFYEEWWFLLVMALSSLIVILLVVFALVLHGQNKKYKNCSTGKGISTMEESVTLDNGGFAALELSSRHLNVKSTFSKKNGTRSPPRPSPGGLHYSDEDICNKYNGAVLTESVSLKEKSADASESEATDSDYEDALPKHSFVNHYMSDPTYYNSWKRRAQGRAPAPHRYEAVAGSEAGAQLHPVITTQSAGGVYTPAGPGARTPLTGFSSFV

SEQ ID NO: 6065 - DNA, 6314 bp, Homo sapiens
ccctgagatgacaggcgtcaccgtgagtggcctgactccggctcgtacctatcaattccgggtgtgcgcggtgaatgaagtgggcaggggccagtacagcgccgagacaagcaggttgatgctacctgaagaaccacccagtgctcccccgaaaaatatagtggccagtgggcggactaatcagtccattatggtccagtggcagccacccccagaaacagagcacaacggggtgttgcgtggatacatcctcaggtaccgcctggctggccttcccggagagtaccagcagcggaacatcaccagcccggaggtgaactactgcctggtgacagacctgatcatctggacacagtatgagatacaggtggcggcgtacaacggggccggtctgggcgtcttcagcagggcagtgaccgagtacaccttgcagggagtgcccaccgcgcccccgcagaacgtgcagacggaagccgtgaactccaccaccattcagttcctgtggaaccctccgcctcagcagtttatcaatggcatcaaccagggatacaagcttctggcatggccggcagatgcccccgaggctgtcactgtggtcactattgccccagatttccacggagtccaccatggacacataacgaacctgaagaagtttaccgcctacttcacttccgttctgtgcttcaccacccctggggacgggcctcccagcacacctcagctggtctggactcaggaagacaaaccaggagctgtgggacatctgagtttcacagagatcttggacacatctctcaaggtcagctggcaggagcccctggagaaaaatggcatcattactggctatcagatctcttgggaagtgtacggcaggaacgactctcgtctcacgcacaccctgaacagcacgacgcacgagtacaagatccaaggcctctcatctctcaccacctacaccatcgacgtggccgctgtgactgccgtgggcactggcctggtgacttcatccaccatttcttctggagtgcccccagaccttcctggtgccccatccaacctggtcatttccaacatcagccctcgctccgccacccttcagttccggccaggctatgacgggaaaacgtccatctccaggtggattgttgaggggcaggtgggagctatcggcgacgaggaggagtgggtcaccctctatgaagaggagaatgagcctgatgcccagatgctggagatcccaaacctcacaccctacactcactacagatttcgaatgaagcaagtgaacattgttgggccgagcccctacagtccgtcttcccgggtcatccagaccctgcaggccccacccgacgtggctccaaccagcgtcacggtccgtactgccagtgagaccagcctgcggcttcgctgggtgcccctgccggattctcagtacaacgggaaccccgagtccgtgggctacaggattaagtactggcgctcagacctccagtcctcagcagtggcccaagtcgtcagtgaccggctggagagagaattcaccatcgaggagctggaggagtggatggaatacgagctgcagatgcaggccttcaacgccgtcggggctgggccgtggagcgaggtggtgcggggccggacgcgggagtcagttccttcagccgcccctgagaacgtgtcagccgaggctgtcagctcgacccagattttactgacatggacatccgtgccggaacaggaccagaatgggctcatactgggctacaagatcctgttccgggccaaagacctggatcccgagcccaggagccacatcgtgcgagggaaccacacgcagtcggccctgctggcaggcctgcgcaagttcgtgctctacgagctccaggtgctggcgttcacccgcatcgggaacggggtccccagcacgcccctcatcctggagcgcaccaaagacgatgccccaggcccaccagtgaggctcgtgttccccgaagtgagactcacctccgtgcggatagtgtggcaacctccggaggagcccaacggcatcatcctggggtaccagattgcctaccgcctggccagcagcagcccccacaccttcaccaccgtggaggtcggcgccacagtgaggcagttcacagccaccgacctggccccggagtccgcatacatcttcaggctgtccgccaagacgaggcagggctggggggagccactggaggccaccgtcatcaccaccgagaagagagagcggccggcaccccccagagagctcctggtgccccaggcagaagtgaccgcacgcagcctccggctccagtgggtcccgggcagcgacggggcctcccccatccggtacttcaccatgcaggtgcgagagctgcctcggggtgagtggcagacctactcctcgtccatcagccatgaggcgacagcatgcgtcgttgacagactgaggcccttcacctcctacaagctgcgcctgaaagccaccaacgacattggggacagtgacttcagttcagagacagaggcggtgaccacgctgcaggatgttccaggagagcccccgggatctgtctcagcgacgccacacaccacgtcctctgtcctgatacagtggcagcctccgagggacgaaagcctgaatggccttcttcagggatacaggatctactacagggagctggagtatgaagccgggtcaggcactgaggccaagacgctcaaaaaccctatagctttacatgctgagctcacagatttaaagaagtaccggcgctatgaagtaataatgaccgcctataacatcatcggcgagagcccagccagcgcgcccgtggaggtctttgtcggcgaggctgccccggccatggccccgcagaacgtgcaggtgaccccactcacggccagccagctggaggtcacgtgggacccaccacccccggagagccagaatgggaacatccaaggctacaagatttactactgggaggcagacagccagaacgaaacggagaaaatgaaggtcctcttcctccccgagcccgtggtgaggctgaagaacctgaccagccataccaagtacctggtcagcatatcagccttcaacgccgccggagatggacctaagagtgacccccagcaggggcgcacccaccaggccgcccctggggcccccagctttctggcgttctcagaaataacctccaccacgctcaacgtgtcctggggcgagcctgcggcggccaacggcatcctgcagggctatcgggtggtgtacgagcccttggcccctgtacaaggggtgagcaaggtggtgaccgtggaagtgagagggaactggcagcgctggctgaaggtgcgggacctcaccaagggagtgacctatttcttccgtgtccaagcgcggaccatcacctacgggcccgagctccaagccaatatcacagccgggccagccgagggatccccgggctcgcctagagatgtcctggtcaccaagtccgcctctgaactgacgctgcagtggactgagggacactctggcgacacacctaccacgggctatgtgatcgaggcccggccctcagatgaaggcttatgggacatgtttgtgaaggacatcccgcggagcgccacatcctacaccctcagcctggataagctccggcaaggagtgacttacgagttccgggtggtggctgtgaatgaggcgggctacggggagcccagcaacccctccacggctgtgtcagctcaagtggaagccccattctacgaggagtggtggttcctcctggtgatggctctgtccagcctgatcgtcatcctgctggtggtgttcgccctcgtcctgcacgggcagaataagaagtataagaactgcagcacaggaaaggggatctccaccatggaggagtctgtgaccctggacaacggaggatttgctgccctggagctcagcagccgccacctcaatgtcaagagcaccttctccaagaagaacgggaccaggtccccaccccggcctagccccggcggcctgcactactcagacgaggacatctgcaacaagtacaacggcgccgtgctgaccgagagcgtgagcctcaaggagaagtcggcagatgcatcagaatctgaggccacggactctgactacgaggacgcgctgcccaagcactccttcgtgaaccactacatgagcgaccccacctactacaactcatggaagcgcagggcccagggccgcgcacctgcgccgcacaggtacgaggcggtggcgggctccgaggcgggcgcgcagctgcacccggtcatcaccacgcagagcgcgggcggcgtctacacccccgctggccccggcgcgcgaactccgctcaccggcttctcctccttcgtgtgagcaaagcgccgcgcctccctcagggcggaacggaggcaactttccggagtctatttttgttaagacaatcaactccaataactgagctgaagtttttgtttaaaaagaaaaaaatctgataagtgatgattttacctacttgtggacactagatttcaattaggaaggtttttttaaacggctttttgtaacttcgctgcaggaagcaggtttgtttctttttcttttctttttaagagaaggtgtatttcactggtgcaatggcttggcacctccggggcctgggaggacctcagacctccccagccctgggtttctccgtcttcaagaccaactaggaagggtcaagcggggagagggagtggagggtcaggtgagatctcagagctgccccggccggcccccgtctctttctacctcctcttccagagaaccagcggctcacacccttctcaacgcaggacatcctcggcggctcctggggtttgaagagcaaacgtttttccctgggctcagtgcgttttgtcccaacttcatctgtttctgaaatgttctcacttggcagtgtctagtcaaggagtcggctttcaggttcctgacggccaggcagggatgctaaggtgtggctcagccgtcactgtctgtgtcactgcagtggtgcggtcctcaggcttttctgcctgtctttcccccttccttctcacctgacagcgagggagagggaagcctcttagggctggaagccaccacgctggccctctccttccccgaacacagcacacggtcaactccgcgggacacgaggacacgggacggcgtctccagaattgcttgttacgtaggaagcgtgcattgttaaccagagtatttttaaaatctttttatctttttttaaactatgtcacatgaaatgaatgcgtctttgctgtctccaggtgcctttttattaattgttcagctttgtacatgggaaagatgaaaagcaacagtgtctgcaaataaagcaaaacagctctgagaacacacgctcccgactcgcctcgtgcacaccaggccgtcccctccctctgtcctggcttctgctggctgctcgcagcagccaccgcttctccaccactggcgctgctgctgccccctctcccagtccgaggccagcttttagccttaacaggttttttggaaatgtttcttttttttatttaaaattgtcattgtttggtttaaatttttcagctagatgaaaagagtatgaactactttggaaaacttaacagctcagagatggccatgcctccagcccctcacgtcatctttgcaacagacgactgggctgccatggtccacccctcagcccgggtcccgggtctggatggaacgggagcactgctggtgcccactggcgtgtgtgccccgggtccctgtaagtgccccctcaccagcagcagcgtgacacacacaagactcaagaccaccctgtcagtgccccccagtgcacggcaaacgggcaggtgccgttcccccagtgacctgagggtaggggacaactgagcagtatctgaccagtgccacccaggagccagtctcctggccacatgcagaaagtgtggcccctgcttacctagatgttttgtgcacctccatgggcagagggtgtggatattgcctggattctgtgctgtcagcgttgctgagtatggccccaggagaccaaggagagttttgtataggctggaaaaccccttttcagtctttccaaaattagagggtatggcaagtttccttttttctctcctcccttccttcccctccttcctttcctttacccctcctttccttccttcctcccttcctctcttctttcctccctccctccctccttccctcccttccttcctct

SEQ ID NO: 6066 - protein, 1469 aa, Homo sapiens; identical to SEQ ID NO: 6064

SEQ ID NO: 6067 - DNA, 3110 bp, Homo sapiens
cactaactcaagctcccctggagcgcagtcactttacaaccaccttcctccccaaatgccagcatggacaaattagatccagaagccctgcacacagccatcctcagggagaaagcacagttggctgggccttgattcacgaagggggcctgccccatgccacggcggtccctcctggcacccgcctcctgataaccctcgtgctgtgtcgataccacagatcctgttccgggccaaagacctggatcccgagcccaggagccacatcgtgcgagggaaccacacgcagtcggccctgctggcaggcctgcgcaagttcgtgctctacgagctccaggtgctggcgttcacccgcatcgggaacggggtccccagcacgcccctcatcctggagcgcaccaaagacgatgccccaggcccaccagtgaggctcgtgttccccgaagtgagactcacctccgtgcggatagtgtggcaacctccggaggagcccaacggcatcatcctggggtaccagattgcctaccgcctggccagcagcagcccccacaccttcaccaccgtggaggtcggcgccacagtgaggcagttcacagccaccgacctggccccggagtccgcatacatcttcaggctgtccgccaagacgaggcagggctggggggagccactggaggccaccgtcatcaccaccgagaagagagagcggccggcaccccccagagagctcctggtgccccaggcagaagtgaccgcacgcagcctccggctccagtgggtcccgggcagcgacggggcctcccccatccggtacttcaccatgcaggtgcgagagctgcctcggggtgagtggcagacctactcctcgtccatcagccatgaggcgacagcatgcgtcgttgacagactgaggcccttcacctcctacaagctgcgcctgaaagccaccaacgacattggggacagtgacttcagttcagagacagaggcggtgaccacgctgcaggatgttccaggagagcccccgggatctgtctcagcgacgccacacaccacgtcctctgtcctgatacagtggcagcctccgagggacgaaagcctgaatggccttcttcagggatacaggatctactacagggagctggagtatgaagccgggtcaggcactgaggccaagacgctcaaaaaccctatagctttacatgctgagctcacagcccaaagcagcttcaagacggtgaacagcagctccacatcgacgatgtgtgaactaacacatttaaagaagtaccggcgctatgaagtaataatgaccgcctataacatcatcggcgagagcccagccagcgcgcccgtggaggtctttgtcggcgaggctgccccggccatggccccgcagaacgtgcaggtgaccccactcacggccagccagctggaggtcacgtgggacccaccacccccggagagccagaatgggaacatccaaggctacaagatttactactgggaggcagacagccagaacgaaacggagaaaatgaaggtcctcttcctccccgagcccgtggtgaggctgaagaacctgaccagccataccaagtacctggtcagcatatcagccttcaacgccgccggagatggacctaagagtgacccccagcaggggcgcacccaccaggccgcccctggggcccccagctttctggcgttctcagaaataacctccaccacgctcaacgtgtcctggggcgagcctgcggcggccaacggcatcctgcagggctatcgggtggtgtacgagcccttggcccctgtacaaggggtgagcaaggtggtgaccgtggaagtgagagggaactggcagcgctggctgaaggtgcgggacctcaccaagggagtgacctatttcttccgtgtccaagcgcggaccatcacctacgggcccgagctccaagccaatatcacagccgggccagccgagggatccccgggctcgcctagagatgtcctggtcaccaagtccgcctctgaactgacgctgcagtggactgagggacactctggcgacacacctaccacgggctatgtgatcgaggcccggccctcagatgaaggcttatgggacatgtttgtgaaggacatcccgcggagcgccacatcctacaccctcagcctggataagctccggcaaggagtgacttacgagttccgggtggtggctgtgaatgaggcgggctacggggagcccagcaacccctccacggctgtgtcagctcaagtggaagccccattctacgaggagtggtggttcctcctggtgatggctctgtccagcctgatcgtcatcctgctggtggtgttcgccctcgtcctgcacgggcagaataagaagtataagaactgcagcacaggaaaggggatctccaccatggaggagtctgtgaccctggacaacggaggatttgctgccctggagctcagcagccgccacctcaatgtcaagagcaccttctccaagaagaacgggaccaggtccccaccccggcctagccccggcggcctgcactactcagacgaggacatctgcaacaagtacaacggcgccgtgctgaccgagagcgtgagcctcaaggagaagtcggcagatgcatcagaatctgaggccacggactctgactacgaggacgcgctgcccaagcactccttcgtgaaccactacatgagcgaccccacctactacaactcatggaagcgcagggcccagggccgcgcacctgcgccgcacagtgtagctatcctcctgacgagcaacccgtctgcgtacctaagtgtggctccccgtgggtcagcgtcctggtagcatggatccagtctgaaaggtgaggacaacgtggaaactcatgagctgagcctgcccgctgggacacgtctccttcccgcgtcaccttctggtttagggagccgtcaggtccctaaacgttccctacaactttttctgaaattgtgcagaaaaacagatctcattaaaagaaaaaaagaaacaacttgtaggaagacagagaggtgctatgggtacaatttttaataaaaacattattttgttccttaaa

SEQ ID NO: 6068 - protein, 679 aa, Homo sapiens
MQVRELPRGEWQTYSSSISHEATACVVDRLRPFTSYKLRLKATNDIGDSDFSSETEAVTTLQDVPGEPPGSVSATPHTTSSVLIQWQPPRDESLNGLLQGYRIYYRELEYEAGSGTEAKTLKNPIALHAELTAQSSFKTVNSSSTSTMCELTHLKKYRRYEVIMTAYNIIGESPASAPVEVFVGEAAPAMAPQNVQVTPLTASQLEVTWDPPPPESQNGNIQGYKIYYWEADSQNETEKMKVLFLPEPVVRLKNLTSHTKYLVSISAFNAAGDGPKSDPQQGRTHQAAPGAPSFLAFSEITSTTLNVSWGEPAAANGILQGYRVVYEPLAPVQGVSKVVTVEVRGNWQRWLKVRDLTKGVTYFFRVQARTITYGPELQANITAGPAEGSPGSPRDVLVTKSASELTLQWTEGHSGDTPTTGYVIEARPSDEGLWDMFVKDIPRSATSYTLSLDKLRQGVTYEFRVVAVNEAGYGEPSNPSTAVSAQVEAPFYEEWWFLLVMALSSLIVILLVVFALVLHGQNKKYKNCSTGKGISTMEESVTLDNGGFAALELSSRHLNVKSTFSKKNGTRSPPRPSPGGLHYSDEDICNKYNGAVLTESVSLKEKSADASESEATDSDYEDALPKHSFVNHYMSDPTYYNSWKRRAQGRAPAPHSVAILLTSNPSAYLSVAPRGSASW

SEQ ID NO: 6069 - DNA, 875 bp, Homo sapiens
ccctctctctcacacagggagagagctgttctcctttctctttcttcttcctattaaacctccacgcctaaactcagtcctcttgggtgtctatgtccttaattttcttagcgagagactacaaacccggggtatttaccccagacaactaccccgcttcatattgggaatctcagccaggatcccaaggtacattcatcggaacgaaaacacttgtctcttctttgatgctgactcaaaggtctgatcccctgcctggaagctaaccttggatagattcccagaattgtctcttctactcccacaaccaacctttttcaaagacttcagaagactggatcaacatttttgcctatgttggatgactcacagaagcacacactatatagtatagtgattttacagcctttcttctaaacccagactcgcttagctatgtattctttaatgggccaagagtgctacaacttccactctgctctactagcagccacgggcttggatttctaccaataattaaatttattaaatgtaatagcctttagcaagcaccaagtttagttagctaaagcttaaaagaaaagaatagcctacataatatccacagccagactatagtggaaatatgtgatccctagactcagcttctggtgtcccagtcattttatgctaaggaattaggttgaatatgtgcagagcacctcagctcaggcaagccaataagctctagggtccctttagcctttaataacaagataatcacatagcccttccaatatatatgactgggagtccatgacgagcttccatctacaaatgcagttgtgtgtcatcaaagctggtttttccttatttaataaacaatgttgacagtg

SEQ ID NO: 6070 - protein, 57 aa, Homo sapiens
MSLIFLARDYKPGVFTPDNYPASYWESQPGSQGTFIGTKTLVSSLMLTQRSDPLPGS

SEQ ID NO: 6071 - DNA, 678 bp, Homo sapiens
gagataacaatttggctattattttattaaagtgcatgataatcaatgtttgactgcaatgttaacaagaaaaggggtgaagggattcttggtcaacattgtgaaggaagcaacataacttagtgatttgagaagtgactttttctgaactttagaatgtccatcttctagtcttagaaacttgtattcaccgaaagcagtcactcctgatcttagatttcaaatcctcttaaccatgatagtggcttcattttcaacaggattctcctggggaactttgaggatccttgtaatgcctggtggtcacaaaagtatccctgaagtgtcaacttggttgacggaaactgcagtagtccctttgccttagttcctggtggtttgctggtgacgtttggcattcactggcttgtggcaacatatatccaatcttcacatggtcttctccctgtgtctctctgtccaaattttcccttcttatgaggacactagtcagattagattagagcccaccttaatgacttcttaatttgactacatctgcaaaggcctcttctccaaataaaatcactttctcaggcaagaggagttatcctttcaacatatgacacacatgtgactttgctatgaatttgtagagagacaaaattcagcccataatagccctctttgtatttccag

SEQ ID NO: 6072 - protein, 43 aa, Homo sapiens [sequence omitted]

SEQ ID NO: 6073 - DNA, 5051 bp, Homo sapiens
ttccaatgggccgggtgttctggaagggggtggcagtggggaggaggatgctgtgagcagagttcttgaagctccactcctctggggaagccgagctgtgtgggagccttcttactgtgccgggagcgtgtgaattggaaaggatcctgagaactggctagtcccagttcctctccggaaaagcagtggctctcgcttcagagatgcgctcagctttcgcctgcatcacactgcattctttaacacattattgaaattacaagcatccaaagcagtttcatgtggacagattgcatattttgaaagcctgaggtattttatcatgaaacatgccatgtggaatctttgaagcatagacctctgcgcaacacctgaataaagaatcttttacctggtatgtgacagagcttctcaccaccaccatgacaaaccaggaaaaatgggcccacctcagcccttcggaattttcccaacttcagaaatatgctgagtattctacaaagaaattaaaggatgttcttgaagaattccatggtaatggtgtgcttgcaaagtataatcctgaagggaaacaagacattcttaaccaaacaatagattttgaaggtttcaaactattcatgaagacattcctggaagccgagcttcctgatgatttcactgcacaccttttcatgtcatttagcaacaagtttcctcattctagtccaatggtaaaaagtaagcctgctctcctatcaggcggtctgagaatgaataaaggtgccatcacccctccccggactacttctcctgcaaatacgtgttccccagaagtaatccatctgaaggacattgtctgttacctgtctctgcttgaaagaggaagacctgaggataagcttgagtttatgtttcgcctttatgacacggatgggaatggcttcctggacagctcggagctagaaaatatcatcagtcagatgatgcatgttgcagaataccttgagtgggatgtcactgaacttaatccaatcctccatgaaatgatggaagaaattgactatgatcatgatggaaccgtgtctctggaggaatggattcaaggaggaatgacaacgattccacttcttgtgctcctgggcttagaaaataacgtgaaggatgatggacagcacgtgtggcgactgaagcactttaacaaacctgcctattgcaacctttgcctgaacatgctgattggcgtggggaagcagggcctctgctgttccttctgcaagtacacagtccatgagcgctgtgtggctcgagcacctccctcttgcatcaagacctatgtgaagtccaaaaggaacactgatgtcatgcaccattactgggttgaaggtaactgcccaaccaagtgtgataagtgccacaaaactgttaaatgttaccagggcctgacaggactgcattgtgtttggtgtcagatcacactgcataataaatgtgcttctcatctaaaacctgaatgtgactgtggacctttgaaggaccatattttaccacccacaacaatctgtccagtggtactgcagactctgcccacttcaggagtttcagttcctgaggaaagacaatcaacagtgaaaaaggaaaagagtggttcccagcagccaaacaaagtgattgacaagaataaaatgcaaagagccaactctgttactgtagatggacaaggcctgcaggtcactcctgtgcctggtactcacccacttttagtttttgtgaaccccaaaagtggtggaaaacaaggagaacgaatttacagaaaattccagtatctattaaatcctcgtcaggtttacagtctttctggaaatggaccaatgccagggttaaactttttccgtgatgttcctgacttcagagtgttagcctgtggtggagatggaaccgtgggctgggttttggattgcatagaaaaggccaatgtaggcaagcatcctccagttgcgattctgcctcttgggactggcaatgatctagcaagatgcctgcgatggggaggaggttacgaaggtgagaatctgatgaaaattctaaaagacattgaaaacagcacagaaatcatgttggacaggtggaagtttgaagtcatacctaatgacaaagatgagaaaggagacccagtgccttacagtatcatcaataattacttttccattggcgtggatgcctccattgcacacagattccacatcatgagagaaaaacacccagagaaattcaacagtagaatgaagaacaaattttggtattttgagtttggcacatctgaaactttctcagccacctgcaagaagctacatgaatctgtagaaatagaatgtgatggagtacagatagatttaataaacatctctctggaaggaattgctattttgaatataccaagcatgcatggaggatccaatctttggggagagtctaagaaaagacgaagccatcgacgaatagagaaaaaagggtctgacaaaaggaccaccgtcacagatgccaaagagttgaagtttgcaagtcaagatctcagtgaccagctgctggaggtggtcggcttggaaggagccatggagatggggcaaatatacacaggcctgaaaagtgctggccggcggctggctcagtgctcctgcgtggtcatcaggacgagcaagtctctgccaatgcaaattgatggggagccatggatgcagaccccatgcacaataaaaattacacacaagaaccaagccccaatgctgatgggcccgcctccaaaaaccggtttattctgctccctcgtcaaaaggacaagaaaccgaagcaaggaataatcctgtgttgtttcactcttagaaattgaattagcataattgggccatggaacacatatgctggaaatctttgaaccatttcaagtctcctgctcatgcaaaatcatggaagtggtttaacagtttttgttactaagctaatgtaaaattcagctattagaaaatttattgtctcagtttttataggcatctttgcatgaagaaagcagaagtttacctgaagtgatactgcatatttttggtgcatgcattcccatagatttttacatctcccacccaactcttccccaatttccttttactaacctgtgagaaaaacccgtgaaacatgaaaaaggaaataccatgggaaacgtgattctcagtgtgattccaattattacgaagcactaatcagtaacgctacaatgatcataattgcagattgctatacgtttcccttttagaatcagtgtatcagtgacctatgacttgaggagaaacttttaattcgaagattttattaaatagttgactacaataccttgctatatatacatagtttttcttcaacatcttaactcttctgagtggaaataaaaatatcaggcataaggttttctcatgctgaaaaatagaacgcggtttttattttgcttagttttctttttaattccagaaataagtgaaaacatgttacttgacagtcaagtgtggtaatatggcaagccttgttcctttctgcatgagaatctaggagagaattcataaccacaccaataacgaaatagaagttttaaactatgtgcctaatcaatgtgtttcccaccaaagattcagaaaacaatgcttgagagaaatgggttaatgcataattaattaagcattgtggagcaaatttagggttcctgtgattaattttgtgatgactaaaatgctggaaagcgagtgagttgcccattaattatgattaaaattctcacctttcacagacagacaataagccagacaacacaatcaaagctcaatagatgatttcttgcttttttcagtcatttataaatataggtgtaatttttcatggatcagttaagtacacttgaaggaagtaaatgattgtatcagtttatttctagtataaatgggtacctgtaataatactgagctcttggaagcgaatcatgcatgcaattagctccctcctcctcacctactccactcccatctttatgacatttcaaatgtttatttggaaacaacagcctagatcactgttgaaggtgttcatggcatagttggagtctctgactgtttaaagaaatcacagaacagtacttttcttttagtgtttcattaagcctatgatgtaaaatgaaatgcttctgagcagtcttgtaatattgttcattcatattgacctgcatctcatcattgcatgttttatgttttcaaacatgccataaggaaaacgagtgcctgaactgcatgatttattagtttctctccactctgcattaaagtgctaatgatttatcggttctattttgttattgattcattcatctttctttgaataacaaatagcatttagtgattctgttgaacacaatcctgtgcatggatttatggatttcaagtgaaattgctataattttagttctttggtttgaaaactcaactgaatgctgttatatcaaatagctgctctcaagcaatgtgctataatggaagattacgtacaaagtgtattcttttagtgttcctggaacattggacggtaaatatcaatcaacaataagcttaattactttaaaaataaaagcttttgaataaaattaagacataatttagcattcccaggaaaattatgattacaattgcaaatttagtacagcaatcacttgcgctggtataaaataaaaaagttgtttggcagaagagtaatccagaccaaaagaaagaaagaaatctcaaaacagtaacaagtacattactgacataatgttacgtaacacacacattgattttttgtatctatggttgcaggtaataaatattttcacatgaattgacaaaattttctacaatgggcaggcaggctttgtgtcaaaaacatattttgaagccacaaattattttatgttcgctacaacatacaattatgtcttggctaccttttatagtatatagtttgaaggcagcaacagtttgtgaatcattcttaacaatctgtac

SEQ ID NO: 6074 - protein, 804 aa, Homo sapiens [sequence omitted]

SEQ ID NO: 6075 - DNA, 5344 bp, Homo sapiens
agtcacctgctccgaggttaccaagccggaatgcagcaagagcgtctgcagctgctacaattggtagaagtggcttcggcagatggttgctgaacaatgacccaccaaggactacagttgtagaagggagaggggagacgggtatcatatttcctccctgagatgtatagtgagtggtagtaattgcagtgaatccagctcactgtctcaacagcctctcacctgcaccgtctcctcccctgtcttataactggaccagcagttaaacagctgtatagccttgtctccctgtctcattttcccctgagctccatcagcaagagtagcaatagcagctggagaagcggcagccagagataggcagggctggtgcttgcagccgcgcaaatcgcctcctcctcaacacacacacacacacacacacacacacacacacacacacactgcacagacttccaatatcaacgcgtcttgacataaatcaaggactaagagagactgaagaagagcgttagtcatggacaacagttctttaacacattattgaaattacaagcatccaaagcagtttcatgtggacagattgcatattttgaaagcctgaggtattttatcatgaaacatgccatgtggaatctttgaagcatagacctctgcgcaacacctgaataaagaatcttttacctggtatgtgacagagcttctcaccaccaccatgacaaaccaggaaaaatgggcccacctcagcccttcggaattttcccaacttcagaaatatgctgagtattctacaaagaaattaaaggatgttcttgaagaattccatggtaatggtgtgcttgcaaagtataatcctgaagggaaacaagacattcttaaccaaacaatagattttgaaggtttcaaactattcatgaagacattcctggaagccgagcttcctgatgatttcactgcacaccttttcatgtcatttagcaacaagtttcctcattctagtccaatggtaaaaagtaagcctgctctcctatcaggcggtctgagaatgaataaaggtgccatcacccctccccggactacttctcctgcaaatacgtgttccccagaagtaatccatctgaaggacattgtctgttacctgtctctgcttgaaagaggaagacctgaggataagcttgagtttatgtttcgcctttatgacacggatgggaatggcttcctggacagctcggagctagaaaatatcatcagtcagatgatgcatgttgcagaataccttgagtgggatgtcactgaacttaatccaatcctccatgaaatgatggaagaaattgactatgatcatgatggaaccgtgtctctggaggaatggattcaaggaggaatgacaacgattccacttcttgtgctcctgggcttagaaaataacgtgaaggatgatggacagcacgtgtggcgactgaagcactttaacaaacctgcctattgcaacctttgcctgaacatgctgattggcgtggggaagcagggcctctgctgttccttctgcaagtacacagtccatgagcgctgtgtggctcgagcacctccctcttgcatcaagacctatgtgaagtccaaaaggaacactgatgtcatgcaccattactgggttgaaggtaactgcccaaccaagtgtgataagtgccacaaaactgttaaatgttaccagggcctgacaggactgcattgtgtttggtgtcagatcacactgcataataaatgtgcttctcatctaaaacctgaatgtgactgtggacctttgaaggaccatattttaccacccacaacaatctgtccagtggtactgcagactctgcccacttcaggagtttcagttcctgaggaaagacaatcaacagtgaaaaaggaaaagagtggttcccagcagccaaacaaagtgattgacaagaataaaatgcaaagagccaactctgttactgtagatggacaaggcctgcaggtcactcctgtgcctggtactcacccacttttagtttttgtgaaccccaaaagtggtggaaaacaaggagaacgaatttacagaaaattccagtatctattaaatcctcgtcaggtttacagtctttctggaaatggaccaatgccagggttaaactttttccgtgatgttcctgacttcagagtgttagcctgtggtggagatggaaccgtgggctgggttttggattgcatagaaaaggccaatgtaggcaagcatcctccagttgcgattctgcctcttgggactggcaatgatctagcaagatgcctgcgatggggaggaggttacgaaggtgagaatctgatgaaaattctaaaagacattgaaaacagcacagaaatcatgttggacaggtggaagtttgaagtcatacctaatgacaaagatgagaaaggagacccagtgccttacagtatcatcaataattacttttccattggcgtggatgcctccattgcacacagattccacatcatgagagaaaaacacccagagaaattcaacagtagaatgaagaacaaattttggtattttgagtttggcacatctgaaactttctcagccacctgcaagaagctacatgaatctgtagaaatagaatgtgatggagtacagatagatttaataaacatctctctggaaggaattgctattttgaatataccaagcatgcatggaggatccaatctttggggagagtctaagaaaagacgaagccatcgacgaatagagaaaaaagggtctgacaaaaggaccaccgtcacagatgccaaagagttgaagtttgcaagtcaagatctcagtgaccagctgctggaggtggtcggcttggaaggagccatggagatggggcaaatatacacaggcctgaaaagtgctggccggcggctggctcagtgctcctgcgtggtcatcaggacgagcaagtctctgccaatgcaaattgatggggagccatggatgcagaccccatgcacaataaaaattacacacaagaaccaagccccaatgctgatgggcccgcctccaaaaaccggtttattctgctccctcgtcaaaaggacaagaaaccgaagcaaggaataatcctgtgttgtttcactcttagaaattgaattagcataattgggccatggaacacatatgctggaaatctttgaaccatttcaagtctcctgctcatgcaaaatcatggaagtggtttaacagtttttgttactaagctaatgtaaaattcagctattagaaaatttattgtctcagtttttataggcatctttgcatgaagaaagcagaagtttacctgaagtgatactgcatatttttggtgcatgcattcccatagatttttacatctcccacccaactcttccccaatttccttttactaacctgtgagaaaaacccgtgaaacatgaaaaaggaaataccatgggaaacgtgattctcagtgtgattccaattattacgaagcactaatcagtaacgctacaatgatcataattgcagattgctatacgtttcccttttagaatcagtgtatcagtgacctatgacttgaggagaaacttttaattcgaagattttattaaatagttgactacaataccttgctatatatacatagtttttcttcaacatcttaactcttctgagtggaaataaaaatatcaggcataaggttttctcatgctgaaaaatagaacgcggtttttattttgcttagttttctttttaattccagaaataagtgaaaacatgttacttgacagtcaagtgtggtaatatggcaagccttgttcctttctgcatgagaatctaggagagaattcataaccacaccaataacgaaatagaagttttaaactatgtgcctaatcaatgtgtttcccaccaaagattcagaaaacaatgcttgagagaaatgggttaatgcataattaattaagcattgtggagcaaatttagggttcctgtgattaattttgtgatgactaaaatgctggaaagcgagtgagttgcccattaattatgattaaaattctcacctttcacagacagacaataagccagacaacacaatcaaagctcaatagatgatttcttgcttttttcagtcatttataaatataggtgtaatttttcatggatcagttaagtacacttgaaggaagtaaatgattgtatcagtttatttctagtataaatgggtacctgtaataatactgagctcttggaagcgaatcatgcatgcaattagctccctcctcctcacctactccactcccatctttatgacatttcaaatgtttatttggaaacaacagcctagatcactgttgaaggtgttcatggcatagttggagtctctgactgtttaaagaaatcacagaacagtacttttcttttagtgtttcattaagcctatgatgtaaaatgaaatgcttctgagcagtcttgtaatattgttcattcatattgacctgcatctcatcattgcatgttttatgttttcaaacatgccataaggaaaacgagtgcctgaactgcatgatttattagtttctctccactctgcattaaagtgctaatgatttatcggttctattttgttattgattcattcatctttctttgaataacaaatagcatttagtgattctgttgaacacaatcctgtgcatggatttatggatttcaagtgaaattgctataattttagttctttggtttgaaaactcaactgaatgctgttatatcaaatagctgctctcaagcaatgtgctataatggaagattacgtacaaagtgtattcttttagtgttcctggaacattggacggtaaatatcaatcaacaataagcttaattactttaaaaataaaagcttttgaataaaattaagacataatttagcattcccaggaaaattatgattacaattgcaaatttagtacagcaatcacttgcgctggtataaaataaaaaagttgtttggcagaagagtaatccagaccaaaagaaagaaagaaatctcaaaacagtaacaagtacattactgacataatgttacgtaacacacacattgattttttgtatctatggttgcaggtaataaatattttcacatgaattgacaaaattttctacaatgggcaggcaggctttgtgtcaaaaacatattttgaagccacaaattattttatgttcgctacaacatacaattatgtcttggctaccttttatagtatatagtttgaaggcagcaacagtttgtgaatcattcttaacaatctgtac

SEQ ID NO: 6076 - protein, 804 aa, Homo sapiens [sequence omitted]

SEQ ID NO: 6077 - DNA, 4898 bp, Homo sapiens
acataaattagtaccttactggctagggaatgttgaatcacagttggatgaagaaacaattcatgttaatgtttctctaaagttctttaacacattattgaaattacaagcatccaaagcagtttcatgtggacagattgcatattttgaaagcctgaggtattttatcatgaaacatgccatgtggaatctttgaagcatagacctctgcgcaacacctgaataaagaatcttttacctggtatgtgacagagcttctcaccaccaccatgacaaaccaggaaaaatgggcccacctcagcccttcggaattttcccaacttcagaaatatgctgagtattctacaaagaaattaaaggatgttcttgaagaattccatggtaatggtgtgcttgcaaagtataatcctgaagggaaacaagacattcttaaccaaacaatagattttgaaggtttcaaactattcatgaagacattcctggaagccgagcttcctgatgatttcactgcacaccttttcatgtcatttagcaacaagtttcctcattctagtccaatggtaaaaagtaagcctgctctcctatcaggcggtctgagaatgaataaaggtgccatcacccctccccggactacttctcctgcaaatacgtgttccccagaagtaatccatctgaaggacattgtctgttacctgtctctgcttgaaagaggaagacctgaggataagcttgagtttatgtttcgcctttatgacacggatgggaatggcttcctggacagctcggagctagaaaatatcatcagtcagatgatgcatgttgcagaataccttgagtgggatgtcactgaacttaatccaatcctccatgaaatgatggaagaaattgactatgatcatgatggaaccgtgtctctggaggaatggattcaaggaggaatgacaacgattccacttcttgtgctcctgggcttagaaaataacgtgaaggatgatggacagcacgtgtggcgactgaagcactttaacaaacctgcctattgcaacctttgcctgaacatgctgattggcgtggggaagcagggcctctgctgttccttctgcaagtacacagtccatgagcgctgtgtggctcgagcacctccctcttgcatcaagacctatgtgaagtccaaaaggaacactgatgtcatgcaccattactgggttgaaggtaactgcccaaccaagtgtgataagtgccacaaaactgttaaatgttaccagggcctgacaggactgcattgtgtttggtgtcagatcacactgcataataaatgtgcttctcatctaaaacctgaatgtgactgtggacctttgaaggaccatattttaccacccacaacaatctgtccagtggtactgcagactctgcccacttcaggagtttcagttcctgaggaaagacaatcaacagtgaaaaaggaaaagagtggttcccagcagccaaacaaagtgattgacaagaataaaatgcaaagagccaactctgttactgtagatggacaaggcctgcaggtcactcctgtgcctggtactcacccacttttagtttttgtgaaccccaaaagtggtggaaaacaaggagaacgaatttacagaaaattccagtatctattaaatcctcgtcaggtttacagtctttctggaaatggaccaatgccagggttaaactttttccgtgatgttcctgacttcagagtgttagcctgtggtggagatggaaccgtgggctgggttttggattgcatagaaaaggccaatgtaggcaagcatcctccagttgcgattctgcctcttgggactggcaatgatctagcaagatgcctgcgatggggaggaggttacgaaggtgagaatctgatgaaaattctaaaagacattgaaaacagcacagaaatcatgttggacaggtggaagtttgaagtcatacctaatgacaaagatgagaaaggagacccagtgccttacagtatcatcaataattacttttccattggcgtggatgcctccattgcacacagattccacatcatgagagaaaaacacccagagaaattcaacagtagaatgaagaacaaattttggtattttgagtttggcacatctgaaactttctcagccacctgcaagaagctacatgaatctgtagaaatagaatgtgatggagtacagatagatttaataaacatctctctggaaggaattgctattttgaatataccaagcatgcatggaggatccaatctttggggagagtctaagaaaagacgaagccatcgacgaatagagaaaaaagggtctgacaaaaggaccaccgtcacagatgccaaagagttgaagtttgcaagtcaagatctcagtgaccagctgctggaggtggtcggcttggaaggagccatggagatggggcaaatatacacaggcctgaaaagtgctggccggcggctggctcagtgctcctgcgtggtcatcaggacgagcaagtctctgccaatgcaaattgatggggagccatggatgcagaccccatgcacaataaaaattacacacaagaaccaagccccaatgctgatgggcccgcctccaaaaaccggtttattctgctccctcgtcaaaaggacaagaaaccgaagcaaggaataatcctgtgttgtttcactcttagaaattgaattagcataattgggccatggaacacatatgctggaaatctttgaaccatttcaagtctcctgctcatgcaaaatcatggaagtggtttaacagtttttgttactaagctaatgtaaaattcagctattagaaaatttattgtctcagtttttataggcatctttgcatgaagaaagcagaagtttacctgaagtgatactgcatatttttggtgcatgcattcccatagatttttacatctcccacccaactcttccccaatttccttttactaacctgtgagaaaaacccgtgaaacatgaaaaaggaaataccatgggaaacgtgattctcagtgtgattccaattattacgaagcactaatcagtaacgctacaatgatcataattgcagattgctatacgtttcccttttagaatcagtgtatcagtgacctatgacttgaggagaaacttttaattcgaagattttattaaatagttgactacaataccttgctatatatacatagtttttcttcaacatcttaactcttctgagtggaaataaaaatatcaggcataaggttttctcatgctgaaaaatagaacgcggtttttattttgcttagttttctttttaattccagaaataagtgaaaacatgttacttgacagtcaagtgtggtaatatggcaagccttgttcctttctgcatgagaatctaggagagaattcataaccacaccaataacgaaatagaagttttaaactatgtgcctaatcaatgtgtttcccaccaaagattcagaaaacaatgcttgagagaaatgggttaatgcataattaattaagcattgtggagcaaatttagggttcctgtgattaattttgtgatgactaaaatgctggaaagcgagtgagttgcccattaattatgattaaaattctcacctttcacagacagacaataagccagacaacacaatcaaagctcaatagatgatttcttgcttttttcagtcatttataaatataggtgtaatttttcatggatcagttaagtacacttgaaggaagtaaatgattgtatcagtttatttctagtataaatgggtacctgtaataatactgagctcttggaagcgaatcatgcatgcaattagctccctcctcctcacctactccactcccatctttatgacatttcaaatgtttatttggaaacaacagcctagatcactgttgaaggtgttcatggcatagttggagtctctgactgtttaaagaaatcacagaacagtacttttcttttagtgtttcattaagcctatgatgtaaaatgaaatgcttctgagcagtcttgtaatattgttcattcatattgacctgcatctcatcattgcatgttttatgttttcaaacatgccataaggaaaacgagtgcctgaactgcatgatttattagtttctctccactctgcattaaagtgctaatgatttatcggttctattttgttattgattcattcatctttctttgaataacaaatagcatttagtgattctgttgaacacaatcctgtgcatggatttatggatttcaagtgaaattgctataattttagttctttggtttgaaaactcaactgaatgctgttatatcaaatagctgctctcaagcaatgtgctataatggaagattacgtacaaagtgtattcttttagtgttcctggaacattggacggtaaatatcaatcaacaataagcttaattactttaaaaataaaagcttttgaataaaattaagacataatttagcattcccaggaaaattatgattacaattgcaaatttagtacagcaatcacttgcgctggtataaaataaaaaagttgtttggcagaagagtaatccagaccaaaagaaagaaagaaatctcaaaacagtaacaagtacattactgacataatgttacgtaacacacacattgattttttgtatctatggttgcaggtaataaatattttcacatgaattgacaaaattttctacaatgggcaggcaggctttgtgtcaaaaacatattttgaagccacaaattattttatgttcgctacaacatacaattatgtcttggctaccttttatagtatatagtttgaaggcagcaacagtttgtgaatcattcttaacaatctgtac

SEQ ID NO: 6078 - protein, 804 aa, Homo sapiens [sequence omitted]

SEQ ID NO: 6079 - DNA, 3576 bp, Homo sapiens
ttccaatgggccgggtgttctggaagggggtggcagtggggaggaggatgctgtgagcagagttcttgaagctccactcctctggggaagccgagctgtgtgggagccttcttactgtgccgggagcgtgtgaattggaaaggatcctgagaactggctagtcccagttcctctccggaaaagcagtggctctcgcttcagagatgcgctcagctttcgcctgcatcacactgcattctttaacacattattgaaattacaagcatccaaagcagtttcatgtggacagattgcatattttgaaagcctgaggtattttatcatgaaacatgccatgtggaatctttgaagcatagacctctgcgcaacacctgaataaagaatcttttacctggtatgtgacagagcttctcaccaccaccatgacaaaccaggaaaaatgggcccacctcagcccttcggaattttcccaacttcagaaatatgctgagtattctacaaagaaattaaaggatgttcttgaagaattccatggtaatggtgtgcttgcaaagtataatcctgaagggaaacaagacattcttaaccaaacaatagattttgaaggtttcaaactattcatgaagacattcctggaagccgagcttcctgatgatttcactgcacaccttttcatgtcatttagcaacaagtttcctcattctagtccaatggtaaaaagtaagcctgctctcctatcaggcggtctgagaatgaataaaggtgccatcacccctccccggactacttctcctgcaaatacgtgttccccagaagtaatccatctgaaggacattgtctgttacctgtctctgcttgaaagaggaagacctgaggataagcttgagtttatgtttcgcctttatgacacggatgggaatggcttcctggacagctcggagctagaaaatatcatcagtcagatgatgcatgttgcagaataccttgagtgggatgtcactgaacttaatccaatcctccatgaaatgatggaagaaattgactatgatcatgatggaaccgtgtctctggaggaatggattcaaggaggaatgacaacgattccacttcttgtgctcctgggcttagaaaataacgtgaaggatgatggacagcacgtgtggcgactgaagcactttaacaaacctgcctattgcaacctttgcctgaacatgctgattggcgtggggaagcagggcctctgctgttccttctgcaagtacacagtccatgagcgctgtgtggctcgagcacctccctcttgcatcaagacctatgtgaagtccaaaaggaacactgatgtcatgcaccattactgggttgaaggtaactgcccaaccaagtgtgataagtgccacaaaactgttaaatgttaccagggcctgacaggactgcattgtgtttggtgtcagatcacactgcataataaatgtgcttctcatctaaaacctgaatgtgactgtggacctttgaaggaccatattttaccacccacaacaatctgtccagtggtactgcagactctgcccacttcaggagtttcagttcctgaggaaagacaatcaacagtgaaaaaggaaaagagtggttcccagcagccaaacaaagtgattgacaagaataaaatgcaaagagccaactctgttactgtagatggacaaggcctgcaggtcactcctgtgcctggtactcacccacttttagtttttgtgaaccccaaaagtggtggaaaacaaggagaacgaatttacagaaaattccagtatctattaaatcctcgtcaggtttacagtctttctggaaatggaccaatgccagggttaaactttttccgtgatgttcctgacttcagagtgttagcctgtggtggagatggaaccgtgggctgggttttggattgcatagaaaaggccaatgtaggcaagcatcctccagttgcgattctgcctcttgggactggcaatgatctagcaagatgcctgcgatggggaggaggttacgaaggtgagaatctgatgaaaattctaaaagacattgaaaacagcacagaaatcatgttggacaggtggaagtttgaagtcatacctaatgacaaagatgagaaaggagacccagtgccttacagtatcatcaataattacttttccattggcgtggatgcctccattgcacacagattccacatcatgagagaaaaacacccagagaaattcaacagtagaatgaagaacaaattttggtattttgagtttggcacatctgaaactttctcagccacctgcaagaagctacatgaatctgtagaaatagaatgtgatggagtacagatagatttaataaacatctctctggaaggaattgctattttgaatataccaagcatgcatggaggatccaatctttggggagagtctaagaaaagacgaagccatcgacgaatagagaaaaaagggtctgacaaaaggaccaccgtcacagatgccaaagagttgaagtttgcaagtcaagatctcagtgaccagctgctggaggtggtcggcttggaaggagccatggagatggggcaaatatacacaggcctgaaaagtgctggccggcggctggctcagtgctcctgcgtggtcatcaggacgagcaagtctctgccaatgcaaattgatggggagccatggatgcagaccccatgcacagtgagtacagagtagttgatatgctatgtcaatctcagttttgctttcctctttgactaaataaccacaataactgatttttttctttatttcttttcaacctatcagcaaatagtctttttgttgttgttgttatgtgtgtgtcagagccactacatttaggttgtagacattatatacccttggcaatgatttagctcttgaatgtttgtgttagcctaagtataaatagatcttttaaatagatcaattataaaccatagatcaattataaactatggagctaaacaaaatattaataaaagtttatctgaaacttttttgtttatttcagagcacattattagaatattatttgcaagaaatgcagacctaagcttatatgtgaacttatttctcagcttttctatgcctccatttggggatttgagggctttcttctccataagaaaaaaatttctctccagtttctaccataattaattgtgttttccagaatgaggtattatttaaggcagacactgcccctctcaaaaaaaaatcagttttcatttgcatagtgaatattttattgcatttcaaaaacatgctaggaactgcttttggcactgggagtagacacatgaacaagaccaacagtgtaatttccttcaagttacttacattcctataatagaggaccgaataaataaacaactacatgataaatataacttcagactgtgagagttattaaaaaataaggtgaaatgatgataagaagctggattaggtgtggagaataaatactacttgagataagggagacctctttgaaaggacatagccaaaagcttagtataaaatt

SEQ ID NO: 6080 - protein, 773 aa, Homo sapiens; identical to SEQ ID NO: 821

SEQ ID NO: 6081 - DNA, 3869 bp, Homo sapiens
agtcacctgctccgaggttaccaagccggaatgcagcaagagcgtctgcagctgctacaattggtagaagtggcttcggcagatggttgctgaacaatgacccaccaaggactacagttgtagaagggagaggggagacgggtatcatatttcctccctgagatgtatagtgagtggtagtaattgcagtgaatccagctcactgtctcaacagcctctcacctgcaccgtctcctcccctgtcttataactggaccagcagttaaacagctgtatagccttgtctccctgtctcattttcccctgagctccatcagcaagagtagcaatagcagctggagaagcggcagccagagataggcagggctggtgcttgcagccgcgcaaatcgcctcctcctcaacacacacacacacacacacacacacacacacacacacacactgcacagacttccaatatcaacgcgtcttgacataaatcaaggactaagagagactgaagaagagcgttagtcatggacaacagttctttaacacattattgaaattacaagcatccaaagcagtttcatgtggacagattgcatattttgaaagcctgaggtattttatcatgaaacatgccatgtggaatctttgaagcatagacctctgcgcaacacctgaataaagaatcttttacctggtatgtgacagagcttctcaccaccaccatgacaaaccaggaaaaatgggcccacctcagcccttcggaattttcccaacttcagaaatatgctgagtattctacaaagaaattaaaggatgttcttgaagaattccatggtaatggtgtgcttgcaaagtataatcctgaagggaaacaagacattcttaaccaaacaatagattttgaaggtttcaaactattcatgaagacattcctggaagccgagcttcctgatgatttcactgcacaccttttcatgtcatttagcaacaagtttcctcattctagtccaatggtaaaaagtaagcctgctctcctatcaggcggtctgagaatgaataaaggtgccatcacccctccccggactacttctcctgcaaatacgtgttccccagaagtaatccatctgaaggacattgtctgttacctgtctctgcttgaaagaggaagacctgaggataagcttgagtttatgtttcgcctttatgacacggatgggaatggcttcctggacagctcggagctagaaaatatcatcagtcagatgatgcatgttgcagaataccttgagtgggatgtcactgaacttaatccaatcctccatgaaatgatggaagaaattgactatgatcatgatggaaccgtgtctctggaggaatggattcaaggaggaatgacaacgattccacttcttgtgctcctgggcttagaaaataacgtgaaggatgatggacagcacgtgtggcgactgaagcactttaacaaacctgcctattgcaacctttgcctgaacatgctgattggcgtggggaagcagggcctctgctgttccttctgcaagtacacagtccatgagcgctgtgtggctcgagcacctccctcttgcatcaagacctatgtgaagtccaaaaggaacactgatgtcatgcaccattactgggttgaaggtaactgcccaaccaagtgtgataagtgccacaaaactgttaaatgttaccagggcctgacaggactgcattgtgtttggtgtcagatcacactgcataataaatgtgcttctcatctaaaacctgaatgtgactgtggacctttgaaggaccatattttaccacccacaacaatctgtccagtggtactgcagactctgcccacttcaggagtttcagttcctgaggaaagacaatcaacagtgaaaaaggaaaagagtggttcccagcagccaaacaaagtgattgacaagaataaaatgcaaagagccaactctgttactgtagatggacaaggcctgcaggtcactcctgtgcctggtactcacccacttttagtttttgtgaaccccaaaagtggtggaaaacaaggagaacgaatttacagaaaattccagtatctattaaatcctcgtcaggtttacagtctttctggaaatggaccaatgccagggttaaactttttccgtgatgttcctgacttcagagtgttagcctgtggtggagatggaaccgtgggctgggttttggattgcatagaaaaggccaatgtaggcaagcatcctccagttgcgattctgcctcttgggactggcaatgatctagcaagatgcctgcgatggggaggaggttacgaaggtgagaatctgatgaaaattctaaaagacattgaaaacagcacagaaatcatgttggacaggtggaagtttgaagtcatacctaatgacaaagatgagaaaggagacccagtgccttacagtatcatcaataattacttttccattggcgtggatgcctccattgcacacagattccacatcatgagagaaaaacacccagagaaattcaacagtagaatgaagaacaaattttggtattttgagtttggcacatctgaaactttctcagccacctgcaagaagctacatgaatctgtagaaatagaatgtgatggagtacagatagatttaataaacatctctctggaaggaattgctattttgaatataccaagcatgcatggaggatccaatctttggggagagtctaagaaaagacgaagccatcgacgaatagagaaaaaagggtctgacaaaaggaccaccgtcacagatgccaaagagttgaagtttgcaagtcaagatctcagtgaccagctgctggaggtggtcggcttggaaggagccatggagatggggcaaatatacacaggcctgaaaagtgctggccggcggctggctcagtgctcctgcgtggtcatcaggacgagcaagtctctgccaatgcaaattgatggggagccatggatgcagaccccatgcacagtgagtacagagtagttgatatgctatgtcaatctcagttttgctttcctctttgactaaataaccacaataactgatttttttctttatttcttttcaacctatcagcaaatagtctttttgttgttgttgttatgtgtgtgtcagagccactacatttaggttgtagacattatatacccttggcaatgatttagctcttgaatgtttgtgttagcctaagtataaatagatcttttaaatagatcaattataaaccatagatcaattataaactatggagctaaacaaaatattaataaaagtttatctgaaacttttttgtttatttcagagcacattattagaatattatttgcaagaaatgcagacctaagcttatatgtgaacttatttctcagcttttctatgcctccatttggggatttgagggctttcttctccataagaaaaaaatttctctccagtttctaccataattaattgtgttttccagaatgaggtattatttaaggcagacactgcccctctcaaaaaaaaatcagttttcatttgcatagtgaatattttattgcatttcaaaaacatgctaggaactgcttttggcactgggagtagacacatgaacaagaccaacagtgtaatttccttcaagttacttacattcctataatagaggaccgaataaataaacaactacatgataaatataacttcagactgtgagagttattaaaaaataaggtgaaatgatgataagaagctggattaggtgtggagaataaatactacttgagataagggagacctctttgaaaggacatagccaaaagcttagtataaaatt

SEQ ID NO: 6082 - protein, 773 aa, Homo sapiens; identical to SEQ ID NO: 821

SEQ ID NO: 6083 - DNA, 3423 bp, Homo sapiens
acataaattagtaccttactggctagggaatgttgaatcacagttggatgaagaaacaattcatgttaatgtttctctaaagttctttaacacattattgaaattacaagcatccaaagcagtttcatgtggacagattgcatattttgaaagcctgaggtattttatcatgaaacatgccatgtggaatctttgaagcatagacctctgcgcaacacctgaataaagaatcttttacctggtatgtgacagagcttctcaccaccaccatgacaaaccaggaaaaatgggcccacctcagcccttcggaattttcccaacttcagaaatatgctgagtattctacaaagaaattaaaggatgttcttgaagaattccatggtaatggtgtgcttgcaaagtataatcctgaagggaaacaagacattcttaaccaaacaatagattttgaaggtttcaaactattcatgaagacattcctggaagccgagcttcctgatgatttcactgcacaccttttcatgtcatttagcaacaagtttcctcattctagtccaatggtaaaaagtaagcctgctctcctatcaggcggtctgagaatgaataaaggtgccatcacccctccccggactacttctcctgcaaatacgtgttccccagaagtaatccatctgaaggacattgtctgttacctgtctctgcttgaaagaggaagacctgaggataagcttgagtttatgtttcgcctttatgacacggatgggaatggcttcctggacagctcggagctagaaaatatcatcagtcagatgatgcatgttgcagaataccttgagtgggatgtcactgaacttaatccaatcctccatgaaatgatggaagaaattgactatgatcatgatggaaccgtgtctctggaggaatggattcaaggaggaatgacaacgattccacttcttgtgctcctgggcttagaaaataacgtgaaggatgatggacagcacgtgtggcgactgaagcactttaacaaacctgcctattgcaacctttgcctgaacatgctgattggcgtggggaagcagggcctctgctgttccttctgcaagtacacagtccatgagcgctgtgtggctcgagcacctccctcttgcatcaagacctatgtgaagtccaaaaggaacactgatgtcatgcaccattactgggttgaaggtaactgcccaaccaagtgtgataagtgccacaaaactgttaaatgttaccagggcctgacaggactgcattgtgtttggtgtcagatcacactgcataataaatgtgcttctcatctaaaacctgaatgtgactgtggacctttgaaggaccatattttaccacccacaacaatctgtccagtggtactgcagactctgcccacttcaggagtttcagttcctgaggaaagacaatcaacagtgaaaaaggaaaagagtggttcccagcagccaaacaaagtgattgacaagaataaaatgcaaagagccaactctgttactgtagatggacaaggcctgcaggtcactcctgtgcctggtactcacccacttttagtttttgtgaaccccaaaagtggtggaaaacaaggagaacgaatttacagaaaattccagtatctattaaatcctcgtcaggtttacagtctttctggaaatggaccaatgccagggttaaactttttccgtgatgttcctgacttcagagtgttagcctgtggtggagatggaaccgtgggctgggttttggattgcatagaaaaggccaatgtaggcaagcatcctccagttgcgattctgcctcttgggactggcaatgatctagcaagatgcctgcgatggggaggaggttacgaaggtgagaatctgatgaaaattctaaaagacattgaaaacagcacagaaatcatgttggacaggtggaagtttgaagtcatacctaatgacaaagatgagaaaggagacccagtgccttacagtatcatcaataattacttttccattggcgtggatgcctccattgcacacagattccacatcatgagagaaaaacacccagagaaattcaacagtagaatgaagaacaaattttggtattttgagtttggcacatctgaaactttctcagccacctgcaagaagctacatgaatctgtagaaatagaatgtgatggagtacagatagatttaataaacatctctctggaaggaattgctattttgaatataccaagcatgcatggaggatccaatctttggggagagtctaagaaaagacgaagccatcgacgaatagagaaaaaagggtctgacaaaaggaccaccgtcacagatgccaaagagttgaagtttgcaagtcaagatctcagtgaccagctgctggaggtggtcggcttggaaggagccatggagatggggcaaatatacacaggcctgaaaagtgctggccggcggctggctcagtgctcctgcgtggtcatcaggacgagcaagtctctgccaatgcaaattgatggggagccatggatgcagaccccatgcacagtgagtacagagtagttgatatgctatgtcaatctcagttttgctttcctctttgactaaataaccacaataactgatttttttctttatttcttttcaacctatcagcaaatagtctttttgttgttgttgttatgtgtgtgtcagagccactacatttaggttgtagacattatatacccttggcaatgatttagctcttgaatgtttgtgttagcctaagtataaatagatcttttaaatagatcaattataaaccatagatcaattataaactatggagctaaacaaaatattaataaaagtttatctgaaacttttttgtttatttcagagcacattattagaatattatttgcaagaaatgcagacctaagcttatatgtgaacttatttctcagcttttctatgcctccatttggggatttgagggctttcttctccataagaaaaaaatttctctccagtttctaccataattaattgtgttttccagaatgaggtattatttaaggcagacactgcccctctcaaaaaaaaatcagttttcatttgcatagtgaatattttattgcatttcaaaaacatgctaggaactgcttttggcactgggagtagacacatgaacaagaccaacagtgtaatttccttcaagttacttacattcctataatagaggaccgaataaataaacaactacatgataaatataacttcagactgtgagagttattaaaaaataaggtgaaatgatgataagaagctggattaggtgtggagaataaatactacttgagataagggagacctctttgaaaggacatagccaaaagcttagtataaaatt

SEQ ID NO: 6084 - protein, 773 aa, Homo sapiens; identical to SEQ ID NO: 821

SEQ ID NO: 6085 - DNA, 2184 bp, Homo sapiens
ctctctacacagaatcggctgttgagtgtgctctcagtggagctttggttttagctgttctctgacaaagagcttgttctgagctgcacatctcgtcctctttgttcagcctcaggcttcaagcattgaatcctaaatattctccagctgggaatcagacaagggcagaaatgaagaacccagaagcccagcaggatgtttcagtttcccagggatttcgcatgttgttttacacgatgaaacccagtgaaacttcattccaaacattagaagaggtgcctgattatgtaaaaaaggcaactccatttttcatttctttgatgctgcttgaacttgttgtcagctggattctcaaaggaaagccaccaggtcgcctggatgatgctttaacgtcaatctcagctggtgttctgtctcgacttccaagtctatttttcaggagcattgaactgaccagttatatttatatctgggagaactacaggctgttcaatttgccttgggattctccatggacttggtattcagccttcttaggagttgactttggctactactggttccatcgtatggctcatgaagttaatattatgtgggccggacaccaaacacatcatagttctgaagactataacttatccacagcactgagacagtctgtcctccagatatatacttcctggattttctactctcccctggccctcttcatacccccttcagtatatgctgttcatcttcaattcaatcttctttaccaattttggatccatacagaggtcatcaataaccttggtcctttggaactgattcttaatactcctagccatcatagggttcatcatggcagaaatcgttattgcatagacaaaaattatgctggtgttcttattatttgggataaaatttttgggacatttgaagcagaaaatgaaaaagttgtatatggcttaacacatcccattaatacatttgaaccaatcaaagtgcagttccatcacttattttccatatggactacattctgggccacacctggattcttcaataagttttctgtcatatttaagggaccgggatggggtccaggtaaaccaagacttggtctcagtgaagaaattccagaggtcaccggcaaagaagttcccttctcatcatcttcatctcagctattaaagatatatacagttgtacagtttgctctgatgttggcattttatgaagagacctttgcagatacagctgcactgtcgcaagttactctccttctgagggtttgcttcattatcctgaccttgacttccattggatttcttctggatcaaagacccaaggcagctattatggaaactctccgttgcttgatgttcttaatgctgtaccgatttggtcacctgaagcctcttgtcccttcattgtcatctgcttttgagattgttttttccatttgcattgctttctggggagttagaagcatgaaacaactcacctctcacccttggaaataacctgaatttgtacataattctcttcttttaatgagttgtccacacgcatattatgactgcatattaaaatgtaattattttatgtaatgcttatatgaactatttcttcaatgaaaagtaaaattacttatttactattgtttgcctttcacatttgttattttctattaaaaattaaagtcagttttggttacttcccccctttactacaattaaaaaaagatttcaaatataatgatgttatattaactgatagccttatatgacaagtataaaaagaagggatgaaacttaaaaacagtaaaaacaagaaggaatattgcctttacatcaatttgaaaacaatgtttcctttgatgtttgctaaaattatgcatagatacatgtttgtagtcataaaaatgtattacattggttgtcttcctaaggccacagttacctttgcaatccatataacctaagaagctgcattccagaaaaagacatcactgagacatcactgaaagaaaaatgaacagaatttgtcagaattagttttttcaacaggttactttgtcatacatttctctaatatgcttggtcaatttgttttggcagactgggcagcatgcagcaattctgcattatttaaagttatcagaacaatgttaattctctaaataaaattacccaaggt

SEQ ID NO: 6086 - protein, 445 aa, Homo sapiens; identical to SEQ ID NO: 823

SEQ ID NO: 6087 - DNA, 512 bp, Homo sapiens
caaagaagttcccttctcatcatcttcatctcagctattaaagatatatacagttgtacagtttgctctgatgttggcattttatgaagagacctttgcagatacagctgcactgtcgcaagttactctccttctgagggtttgcttcattatcctgaccttgacttccattggatttcttctggatcaaagacccaaggcagctattatggaaactctccgttgcttgatgttcttaatgctgtaccgatttggtcacctgaagcctcttgtcccttcattgtcatctgcttttgagattgttttttccatttgcattgctttctggggagttagaagcatgaaacaactcacctctcacccttggaaataacctgaatttgtacataattctcttcttttaatgagttgtccacacgcatattatgactgcatattaaaatgtaattattttatgtaatgcttatatgaactatttcttcaatgaaaagtaaaattacttatttactatt

SEQ ID NO: 6088 - protein, 100 aa, Homo sapiens
MLAFYEETFADTAALSQVTLLLRVCFIILTLTSIGFLLDQRPKAAIMETLRCLMFLMLYRFGHLKPLVPSLSSAFEIVFSICIAFWGVRSMKQLTSHPWK

SEQ ID NO: 6089 - DNA, 1589 bp, Homo sapiens
ctctctacacagaatcggctgttgagtgtgctctcagtggagctttggttttagctgttctctgacaaagagcttgttctgagctgcacatctcgtcctctttgttcagcctcaggcttcaagcattgaatcctaaatattctccagctgggaatcagacaagggcagaaatgaagaacccagaagcccagcaggatgtttcagtttcccagggatttcgcatgttgttttacacgatgaaacccagtgaaacttcattccaaacattagaagaggtgcctgattatgtaaaaaaggcaactccatttttcatttctttgatgctgcttgaacttgttgtcagctggattctcaaaggaaagccaccaggtcgcctggatgatgctttaacgtcaatctcagctggtgttctgtctcgacttccaagtctatttttcaggagcattgaactgaccagttatatttatatctgggagaactacaggctgttcaatttgccttgggattctccatggacttggtattcagccttcttaggagttgactttggctactactggttccatcgtatggctcatgaagttaatattatgtgggccggacaccaaacacatcatagttctgaagactataacttatccacagcactgagacagtctgtcctccagatatatacttcctggattttctactctcccctggccctcttcatacccccttcagtatatgctgttcatcttcaattcaatcttctttaccaattttggatccatacagaggtcatcaataaccttggtcctttggaactgattcttaatactcctagccatcatagggttcatcatggcagaaatcgttattgcatagacaaaaattatgctggtgttcttattatttgggataaaatttttgggacatttgaagcagaaaatgaaaaagttgtatatggcttaacacatcccattaatacatttgaaccaatcaaagtgcagttccatcacttattttccatatggactacattctgggccacacctggattcttcaataagttttctgtcatatttaagggaccgggatggggtccaggtaaaccaagacttggtctcagtgaagaaattccagaggtcaccggcaaagaagttcccttctcatcatcttcatctcagctattaaagatatatacagttgtacagtttgctctgatgttggcattttatgaagagacctttgcagatacagctgcactgtcgcaagttactctccttctgagggtttgcttcattatcctgaccttgacttccattggatttcttctggatcaaagacccaaggcagctattatggaaactctccgttgcttgatgttcttaatgctgtaccgatttggtcacctgaagcctcttgtcccttcattgtcatctgcttttgagattgttttttccatttgcattgctttctggggagttagaagcatgaaacaactcacctctcacccttggaaataacctgaatttgtacataattctcttcttttaatgagttgtccacacgcatattatgactgcatattaaaatgtaattatttt

SEQ ID NO: 6090 - protein, 445 aa, Homo sapiens; identical to SEQ ID NO: 823

SEQ ID NO: 6091 - DNA, 3721 bp, Homo sapiens
agttaatgtgcaattacttatataataaagtttgagctttctcaaaacccagtggtattctaaagtgatgttttggcatgacatgtggtaagttttaattgaggtaaactttttccatattaaattagaccattaatttgatgtttgttctttgaagattatttgaagcttgtaaagtttggttcaccttttaactttgtggatgtgttctttatgttacgctctttcttccttcttcttcccagggtatagttaataaagtgtcttctagccacattggctgtttagtacatgggtgtttcaatgcctccattcctaaacctgagcagttgtcagctgagcagtggcaaaccatggagataaacatgggtgatgaactagaatttgaagtatttcgtttagactcagatgctgctggagtattctgcattcggggaaaactaaatatcacaagtttacaattcaagcgctctgaagtttctgaagaagttacagaaaatggcactgaggaagctgctaaaaaacctaaaaagaagaaaaagaagaaagacccagagacatatgaagtggacagtggtaccacaaagctagcagatgatgcagatgacactccaatggaagagtcagccctgcagaatactaataatgcgaatggcatctgggaggaggagccaaagaaaaagaagaagaagaaaaagcaccaggaagttcaggaccaggaccctgttttccaaggcagtgactccagtggttaccaaagtgaccataaaaagaaaaaaaagaaaagaaaacacagtgaagaggccgaatttaccccacctttgaaatgctcaccaaaaagaaaagggaaaagtaattttctttagtgtattttaaacacgattcagtttttaaaagatcgatctacatacaatagatgaataaatgttttcagtgatatgaaaaggttaagtatgccagtagtttacaaaacagaaaatacttaactaggagtaggaggctttatatgctaaaaatgataaaactgactgtaaattaatttggggaaagccagtattgttaaaataccattttatacaaaataaaaagctgctctcactgtcagctctcatattcttccaggttttgcactctacataaaattatttctacaatgtcaagactagccaaaggactttataatacaatattatattactaaagaatgagttaagtttgagattttgatgatttgattttgtgtgtgtttaataggcttcaccttattacatgctattttattttgcttttttaaaaactcaggacattaactaattttaggttttcctttatcatggctttctacagtatttctattgtttaacataaaatagtttgccaaagaagtttctgaagtcttcacagctcttaaaagccaggccagtactgactgtgtggtggtaaatgctattcattattttcttttctttcttccaagtgcatgtgtgtccttgtcttcttaagtctgagaggttgctggaaaggactgttttcttgtacttgttcatttgtgcctcagccattctagttttgttgtgtgttggaggacagtctaatgaagacaggataaatgtgattctgactagtgggaaatttcagattactttttaatgattggaatgggctataagatattgtgctgaagagaaaacagttgttctgttcactgctttcattgagaaaatgtggaatgtctcttgactaattgacaaagtgtaatgaaatgacaagctggttgaagctggtaatcaatgcatggccatatttattcattttccacacacttgaccatctactttgtataacacattctgctaaggcccagggatacaatggcaaacaagatagatgtagttccttcccttgtggcatgtcataagagaaacagatgtgcatatacacacaataaataagaaaattaataattgtattaagtggtatgaaaaaaagggggaggattgttcactcactgttacctgtgttagtatctgcaaatgcatgaatggttgaactcccatgtcagcatttttgttgccatttatttagtaccagacatagtgctggtctcacagcttaatatttggtaatgaataaattctgctagtggtatatgttgatctgaacttacaatgatgggatatagaattggcagagtggcagatgttcacaattgtctacaagtagatgtgctagacaatggaaggatgcaggccaacctctttgattacaattgagattcatgtgactattgagccctggaaatgtagcttgtccaaattgagatgtgctgtcagtataaaatacataccagattttaaagatgtaccaaaaaatgtaaactatctcaatttttatattggtgaaatcaatatgtcttggtatagtggcttaaataaaacaattttagcctttctcagtttatttttctgcaaaaagattaaaaattgtacatgaagctcatgttaactttcttttggtcagtgctattttaaaggaagtatgagttgaaaaaaaattgaaataaactatatcatattactaggacttaatatagtggcatacccaggaaatgcttagtaagtgttcccttcacattttaaaatttgagtatacaatcatgtttgacaatatagaaatttaatttttagtgaaacaattctaaaccccttttccatagacacaagaaagatggcaaatttatgctattcctggaaaaatacattgtggcttagcaaataagcaagttcccacgttacttttgttttgcttcaagtaatacttctgccagttgtgttttatgaattaaacagggaacggcatgctgaacttgaaactagatttgttcctgcttttttcacaatgtgagtagttttgaaaagtcagatctggccatttgtctttcctagaatagcataactttgttcattgttttttttgtttgtctttctgacacagaaagactgatgatggtgtccactatgtattcttcaaaacatttggcacatgctgcactaacctagtctatcttttctatcttggaatttgctcatacaaaccctatagcctagactagatcccttaccctctctccagttcctatcattcacccatttcactgtgcaagacacctcactagtcaccagtgatacagaaatgacttttaagcagtttctgctcttaagggcttaccgttttgtctataagatacacaagtataaatgacaagtacaaataacaatgaatgtttaatgctttacgtttagtgtttaagcttgttgttggaagagcagcattttgacccttggagaagaaaaactagctgtggcattccaggtggagaacctgacagaggactaagaagttatctaatgtaaaagacctcaggcaccaccttcgcataaactttttccagacaaggctaaatgtgcatgcttcataaccataattcttatttttctttaataaatatttttctacttgtaacactgtgcattatttcaaactgtttacctgtttgtaaagcttgtctcttaatcaaatttgtcttgaccaaataagtttcctgagggctggaattatgccttaactatatctatagtatttaacagtgaatcctttgtataatgaaagcatcaacagataattttaaattgataaataaaaagcacagtttcaaatggta

SEQ ID NO: 6092 - protein, 170 aa, Homo sapiens
MEINMGDELEFEVFRLDSDAAGVFCIRGKLNITSLQFKRSEVSEEVTENGTEEAAKKPKKKKKKKDPETYEVDSGTTKLADDADDTPMEESALQNTNNANGIWEEEPKKKKKKKKHQEVQDQDPVFQGSDSSGYQSDHKKKKKKRKHSEEAEFTPPLKCSPKRKGKSNFL

SEQ ID NO: 6093 - DNA, 3903 bp, Homo sapiens
ggcgcgcgccgtgggaaccttgacaagcagcatggctgcaggttgctcagaggcgccgcggccagcggcggcttctgatgggtctctggtagggcaggctggcgtcctgccttgcctagagttgccgacttatgccgctgcttgtgcgctggtgaacagtcgctactcatgcctggtggccgggccgcaccaaaggcacatcgcgctgtcgccccgctaccttaacaggaaacgcaccggcattcgagaacagcttgatgcggagctccttcgctattctgagagccttttaggtgtccctattgcatatgataacatcaaagttgtgggagagcttggagatatttatgatgatcaaggacacattcatcttaacattgaagccgattttgttattttctgccctgaaccagggcagaagcttatgggtatagttaataaagtgtcttctagccacattggctgtttagtacatgggtgtttcaatgcctccattcctaaacctgagcagttgtcagctgagcagtggcaaaccatggagataaacatgggtgatgaactagaatttgaagtatttcgtttagactcagatgctgctggagtattctgcattcggggaaaactaaatatcacaagtttacaattcaagcgctctgaagtttctgaagaagttacagaaaatggcactgaggaagctgctaaaaaacctaaaaagaagaaaaagaagaaagacccagagacatatgaagtggacagtggtaccacaaagctagcagatgatgcagatgacactccaatggaagagtcagccctgcagaatactaataatgcgaatggcatctgggaggaggagccaaagaaaaagaagaagaagaaaaagcaccaggaagttcaggaccaggaccctgttttccaaggcagtgactccagtggttaccaaagtgaccataaaaagaaaaaaaagaaaagaaaacacagtgaagaggccgaatttaccccacctttgaaatgctcaccaaaaagaaaagggaaaagtaattttctttagtgtattttaaacacgattcagtttttaaaagatcgatctacatacaatagatgaataaatgttttcagtgatatgaaaaggttaagtatgccagtagtttacaaaacagaaaatacttaactaggagtaggaggctttatatgctaaaaatgataaaactgactgtaaattaatttggggaaagccagtattgttaaaataccattttatacaaaataaaaagctgctctcactgtcagctctcatattcttccaggttttgcactctacataaaattatttctacaatgtcaagactagccaaaggactttataatacaatattatattactaaagaatgagttaagtttgagattttgatgatttgattttgtgtgtgtttaataggcttcaccttattacatgctattttattttgcttttttaaaaactcaggacattaactaattttaggttttcctttatcatggctttctacagtatttctattgtttaacataaaatagtttgccaaagaagtttctgaagtcttcacagctcttaaaagccaggccagtactgactgtgtggtggtaaatgctattcattattttcttttctttcttccaagtgcatgtgtgtccttgtcttcttaagtctgagaggttgctggaaaggactgttttcttgtacttgttcatttgtgcctcagccattctagttttgttgtgtgttggaggacagtctaatgaagacaggataaatgtgattctgactagtgggaaatttcagattactttttaatgattggaatgggctataagatattgtgctgaagagaaaacagttgttctgttcactgctttcattgagaaaatgtggaatgtctcttgactaattgacaaagtgtaatgaaatgacaagctggttgaagctggtaatcaatgcatggccatatttattcattttccacacacttgaccatctactttgtataacacattctgctaaggcccagggatacaatggcaaacaagatagatgtagttccttcccttgtggcatgtcataagagaaacagatgtgcatatacacacaataaataagaaaattaataattgtattaagtggtatgaaaaaaagggggaggattgttcactcactgttacctgtgttagtatctgcaaatgcatgaatggttgaactcccatgtcagcatttttgttgccatttatttagtaccagacatagtgctggtctcacagcttaatatttggtaatgaataaattctgctagtggtatatgttgatctgaacttacaatgatgggatatagaattggcagagtggcagatgttcacaattgtctacaagtagatgtgctagacaatggaaggatgcaggccaacctctttgattacaattgagattcatgtgactattgagccctggaaatgtagcttgtccaaattgagatgtgctgtcagtataaaatacataccagattttaaagatgtaccaaaaaatgtaaactatctcaatttttatattggtgaaatcaatatgtcttggtatagtggcttaaataaaacaattttagcctttctcagtttatttttctgcaaaaagattaaaaattgtacatgaagctcatgttaactttcttttggtcagtgctattttaaaggaagtatgagttgaaaaaaaattgaaataaactatatcatattactaggacttaatatagtggcatacccaggaaatgcttagtaagtgttcccttcacattttaaaatttgagtatacaatcatgtttgacaatatagaaatttaatttttagtgaaacaattctaaaccccttttccatagacacaagaaagatggcaaatttatgctattcctggaaaaatacattgtggcttagcaaataagcaagttcccacgttacttttgttttgcttcaagtaatacttctgccagttgtgttttatgaattaaacagggaacggcatgctgaacttgaaactagatttgttcctgcttttttcacaatgtgagtagttttgaaaagtcagatctggccatttgtctttcctagaatagcataactttgttcattgttttttttgtttgtctttctgacacagaaagactgatgatggtgtccactatgtattcttcaaaacatttggcacatgctgcactaacctagtctatcttttctatcttggaatttgctcatacaaaccctatagcctagactagatcccttaccctctctccagttcctatcattcacccatttcactgtgcaagacacctcactagtcaccagtgatacagaaatgacttttaagcagtttctgctcttaagggcttaccgttttgtctataagatacacaagtataaatgacaagtacaaataacaatgaatgtttaatgctttacgtttagtgtttaagcttgttgttggaagagcagcattttgacccttggagaagaaaaactagctgtggcattccaggtggagaacctgacagaggactaagaagttatctaatgtaaaagacctcaggcaccaccttcgcataaactttttccagacaaggctaaatgtgcatgcttcataaccataattcttatttttctttaataaatatttttctacttgtaacactgtgcattatttcaaactgtttacctgtttgtaaagcttgtctcttaatcaaatttgtcttgaccaaataagtttcctgagggctggaattatgccttaactatatctatagtatttaacagtgaatcctttgtataatgaaagcatcaacagataattttaaattgataaataaaaagcacagtttcaaatggta

SEQ ID NO: 6094 - protein, 338 aa, Homo sapiens; identical to SEQ ID NO: 825

SEQ ID NO: 6095 - DNA, 1017 bp, Homo sapiens
ggcgcgcgccgtgggaaccttgacaagcagcatggctgcaggttgctcagaggcgccgcggccagcggcggcttctgatgggtctctggtagggcaggctggcgtcctgccttgcctagagttgccgacttatgccgctgcttgtgcgctggtgaacagtcgctactcatgcctggtggccgggccgcaccaaaggcacatcgcgctgtcgccccgctaccttaacaggaaacgcaccggcattcgagaacagcttgatgcggagctccttcgctattctgagagccttttaggtgtccctattgcatatgataacatcaaagttgtgggagagcttggagatatttatgatgatcaaggacacattcatcttaacattgaagccgattttgttattttctgccctgaaccagggcagaagcttatgggtatagttaataaagtgtcttctagccacattggctgtttagtacatgggtgtttcaatgcctccattcctaaacctgagcagttgtcagctgagcagtggcaaaccatggagataaacatgggtgatgaactagaatttgaagtatttcgtttagactcagatgctgctggagtattctgcattcggggaaaactaaatatcacaagtttacaattcaagcgctctgaagtttctgaagaagttacagaaaatggcactgaggaagctgctaaaaaacctaaaaagaagaaaaagaagaaagacccagagacatatgaagtggacagtggtaccacaaagctagcagatgatgcagatgacactccaatggaagagtcagccctgcagaatactaataatgcgaatggcatctgggaggaggagccaaagaaaaagaagaagaagaaaaagcaccaggaagttcaggaccaggaccctgttttccaaggcagtgactccagtggttaccaaagtgaccataaaaagaaaaaaaagaaaagaaaacacagtgaagaggccgaatttaccccacctttgaaatgctcacc

SEQ ID NO: 6096 - protein, 327 aa, Homo sapiens
MAAGCSEAPRPAAASDGSLVGQAGVLPCLELPTYAAACALVNSRYSCLVAGPHQRHIALSPRYLNRKRTGIREQLDAELLRYSESLLGVPIAYDNIKVVGELGDIYDDQGHIHLNIEADFVIFCPEPGQKLMGIVNKVSSSHIGCLVHGCFNASIPKPEQLSAEQWQTMEINMGDELEFEVFRLDSDAAGVFCIRGKLNITSLQFKRSEVSEEVTENGTEEAAKKPKKKKKKKDPETYEVDSGTTKLADDADDTPMEESALQNTNNANGIWEEEPKKKKKKKKHQEVQDQDPVFQGSDSSGYQSDHKKKKKKRKHSEEAEFTPPLKC

SEQ ID NO: 6097 - DNA, 4279 bp, Homo sapiens
gctcactgctccccctaccccgcgtacaagctaaagaaagtttttctcagaatgagcccgcgttgacgtaggcatcgcctcccctctccgctggatagaagcccagaaaggagccacggggagaagcggaggtaggggtcgcctggatttctgttgctgcggtccgggggcggggcggatcaaaggccagccaagagtactggtcctggatctacaaatacattaggctttttcctcctccgtcaacctcctaaaccccaatgaggtcatagcaatgaaagagaatcagctcgagagaaaggaggaggaagaggacgacgacgagggagaagaaacccagacggaaagaggccatcagacaaggtcgctttttctggcgacaaagcaactgcaaggagcgtggtgctgaatatcatccgcccgctctgcctggggacccagagacttgcagaagcacttcgcattgccacgaaaacaaaggagaggtgacgaacgggagagggagagagaaactcggagcggttccctttggatctccgggaagcaaagctcctctcctcggcaataaaacagaagggaccctgtgaaagggtctagtaggctgaggagggcgcgggtttccctgcggagatttgggacgcggcagaactctggacagcgcctggggagcaaggctcggagctccctgggctcctccaggttttccgctgcttaaaagccccggtaccggtgtgcaatcttcgcaccaccgaacccaggaagatccttctacgatccctatctgaacgtgccagggggtggagcagctcctttgcctctggcccagccagggaaggtcttcgtttctggaaatccagcccttgtggataatgcctcgctcttgaagaaagaaaagttttgggatctggtagggggtggaaggggtaaggaggatagtggaagaaaaaaaggtagatggttgatttccctctctgatctggaaggaagatgaccgaggaaggatgtgcaccagcggtcagattattgggagcctcttggtgctctccgtgctggagatagggctgggggtgtccagcgtggccgtgggggcggtcagcttcagcctggccctccgagagcacaagccgcagctcggagactcgtccccgtttcttctttgtggcatttgtggaatattgtgtgccaaaaaaaaatcaggacttgtcatgatcctcttttcagcctgctgtatctgtggacttattgggggcatcctgaattttcagttcctccgggcagtcacaaagaaaacttcctccctatacccactgcaccttgcctccatgtctctcgcgtgcattgggatcgggggctgcactctctcttcctggctcacttgtcgactagccagttatgaacagaggaggatgttctcagaaagggagcattccctgcatcactctcatgaaatggctgagaaagaaataacagacaacatgagcaatggaggaccacagctgatatttaatggaagagtgtaatcaatgttttaaagaattgaacactttttaggattttcatgaggcaatgagacaccaaaggactagaaaataaaacagtttttgcatttgcatttatctctcctgagcatccactaaaattattcttcctaaaaaatatattgcctcactggtttctccacccttttttatggggtaaaaaactttccagaaacattctagtacaataatttcaagaggctttccagattgttctaaagaagacttttcaggaaaaagagataataaaacagaaataaaatgcatattctatacaaacactatttgactagcatgattattatatttgtaatgacatatttcatatgagtaattgaaaagtgcaaatatcaagaaataaaaataacttattgacgtctttgttctgaaagacagatggcttcaaggatgctacaattcaaaacctcagtaatgccttgttataaaaacattgtaattattttcaacttgtgaatgaaatatatttcataatttatttgtaaatgacaaaaaacctcaagcataaaaaagagactttttagagagagagaatactaatctatatggtatttttgcatttttgcacaaagagtgaaaagttatatgtgaatatcatttaagaaaataaacatgttttgatcatactgtgcagattgatctgcatgttcatgaatgagcctaagaataaagtatgtgtgtgaatgtgtgtatacatactgtaaatatagaacatgtatacagcatatattatagcatacatgaatgtaaataggtattagaaaagaaattgtgatgctgtgggggtattattaagattctactccaatagaaatgggaaggcaattgctcaaggcccttctatgcccacaaaatcacatgtttaatttctactaaaattgcccatttttcttcttttaattaggttttgtgtaaatatcattgtgggtgatatttatgaagatgagtgatctgaatagtgtagtatacagatagactacttatttgactatttcactatgattatagtatttatgtatagcaattaaaattaatttataaacgaacatgactttaatgacatacttccgtatttataaagatatcatgacttaaaattattgatgatattgatatttcaaacaccttgcagtccagttaaatgatacaaaagggcagatgatgtaaccccccaacaatgaagttataattacctttgctgtaatctaatttaggtgttttgttttacgattctcatgaaataatataggcagtccatatataagaaagcctatatccaaagatcctgaaagaattctttgaggaaaaagtgaaaagataggctaacatttgtatagctagattcaatcctttcctctaataatggaatgttaaaatagcaaacaagaacaacacatataagtgaaaaaacaacatatatctgaatatatttatcagaatataacctctggcaacagacaaagaaatctatcatttttaaatacataactctcactatattgtatacttttctttttcctcaaatctaatcaattttcaagtcattttttatgagttacttgttgaaccataggtaaattaaaatatttactgttcagtatgagaatataatttataaacaaaacatgagttttaattgtgctaacacagtaatgatcattcaagttaatgaaaatttgaaggtcttttatagcaacatgatcatcgtttaacctatttaaatcagctcacttaaaattctggctgtcatctattcaacagaaataactggactctgcttgtttggtgcactttttgaagtctcccaattcctttggataacttcattgcctagtagattacagaagttgtccataaatgcaacctcatatagtgaatcaacatcataactattcattcaatgccacaaacaggcatgatctttgccaatgaaaatctaaattacatcatgaagatatttgtgtgtgtatggtcctcctgaattcatgcaaggatgtagttttgtactgaaagaataaacactgactctaattttcagtagcatttctctataaacatgcttgttcaatacaaaattataatacatcagaaaaatgttgtaatgccttttgaactgatctataacataacacattaaaggacaaaaggagacatatcactgctttgatgtatagttaaaaagagatgccatcatcacaattattcaaatagtttacagtgtatgtttaaccaagtatagatatatttttaaatatgattatttctacctagtattttcagaattgagtttagaatgatttacttgggatgtgcggcgattcttttttagataagtgggggatgttaggaagacattgttcaagtgcttgaaactttaatttggacaatacattgaaccacatgctggaatgttttaagtgactaccttatagttttagtatgagcctacccttggaagaaagtaaggtgatactaaattagaaaaactatgtgaaactggagtggtggtatactttggaccatatcaaataggtagagtattataagcataaaagaataaaattgggctcgctttggaaattttaaacatatatgtgtatgtgtgtatatatatgcatatacatacacatatgtgtatatacacacacacaatggtttggaagtggaacaggaaatgataactctactgacatgtctataataaaatgatgtgctttgaaact

SEQ ID NO: 6098 - protein, 172 aa, Homo sapiens
MCTSGQIIGSLLVLSVLEIGLGVSSVAVGAVSFSLALREHKPQLGDSSPFLLCGICGILCAKKKSGLVMILFSACCICGLIGGILNFQFLRAVTKKTSSLYPLHLASMSLACIGIGGCTLSSWLTCRLASYEQRRMFSEREHSLHHSHEMAEKEITDNMSNGGPQLIFNGRV

SEQ ID NO: 6099 - DNA, 1171 bp, Homo sapiens
agaaaggagccacggggagaagcggagtttcttctttgtggcatttgtggaatattgtgtgccaaaaaaaaatcaggacttgtcatgatcctcttttcagcctgctgtatctgtggacttattgggggcatcctgaattttcagttcctccgggcagtcacaaagaaaacttcctccctatacccactgcaccttgcctccatgtctctcgcgtgcattgggatcgggggctgcactctctcttcctggctcacttgtcgactagccagttatgaacagaggaggatgttctcagaaagggagcattccctgcatcactctcatgaaatggctgagaaaagattgagggctattgaaataaccgacttgcccagctgcccggtggtgcccccgacaccagagttacctacaaggaaataacagacaacatgagcaatggaggaccacagctgatatttaatggaagagtgtaatcaatgttttaaagaattgaacactttttaggattttcatgaggcaatgagacaccaaaggactagaaaataaaacagtttttgcatttgcatttatctctcctgagcatccactaaaattattcttcctaaaaaatatattgcctcactggtttctccacccttttttatggggtaaaaaactttccagaaacattctagtacaataatttcaagaggctttccagattgttctaaagaagacttttcaggaaaaagagataataaaacagaaataaaatgcatattctatacaaacactatttgactagcatgattattatatttgtaatgacatatttcatatgagtaattgaaaagtgcaaatatcaagaaataaaaataacttattgacgtctttgttctgaaagacagatggcttcaaggatgctacaattcaaaacctcagtaatgccttgttataaaaacattgtaattattttcaacttgtgaatgaaatatatttcataatttatttgtaaatgacaaaaaacctcaagcataaaaaagagactttttagagagagagaatactaatctatatggtatttttgcatttttgcacaaagagtgaaaagttatatgtgaatatcatttaagaaaataaacatgttttgatcatactgtgcagattgatctgcatgttcatgaatgagcct

SEQ ID NO: 6100 - protein, 111 aa, Homo sapiens
MILFSACCICGLIGGILNFQFLRAVTKKTSSLYPLHLASMSLACIGIGGCTLSSWLTCRLASYEQRRMFSEREHSLHHSHEMAEKRLRAIEITDLPSCPVVPPTPELPTRK

SEQ ID NO: 6101 - DNA, 673 bp, Homo sapiens
tttcttctttgtggcatttgtggaatattgtgtgccaaaaaaaaatcaggacttgtcatgatcctcttttcagcctgctgtatctgtggacttattgggggcatcctgaattttcagttcctccgggcagtcacaaagaaaacttcctccctatacccactgcaccttgcctccatgtctctcgcgtgcattgggatcgggggctgcactctctcttcctggctcacttgtcgactagccagttatgaacagaggaggatgttctcagaaagggagcattccctgcatcactctcatgaaatggctgagaaagaaataacagacaacatgagcaatggaggaccacagctgatatttaatggaagagtgtaatcaatgttttaaagaattgaacactttttaggattttcatgaggcaatgagacaccaaaggactagaaaataaaacagtttttgcatttgcatttatctctcctgagcatccactaaaattattcttcctaaaaaatatattgcctcactggtttctccacccttttttatggggtaaaaaactttccagaaacattctagtacaataatttcaagaggctttccagattgttctaaagaagacttttcaggaaaaagagataataaaacagaaataaaatgcatattctatacaaacact

SEQ ID NO: 6102 - protein, 104 aa, Homo sapiens; identical to SEQ ID NO: 827

SEQ ID NO: 6103 - DNA, 774 bp, Homo sapiens
agaaaggagccacggggagaagcggagtttcttctttgtggcatttgtggaatattgtgtgccaaaaaaaaatcaggacttgtcatgatcctcttttcagcctgctgtatctgtggacttattgggggcatcctgaattttcagttcctccgggcagtcacaaagaaaacttcctccctatacccactgcaccttgcctccatgtctctcgcgtgcattgggatcgggggctgcactctctcttcctggctcacttgtcgactagccagttatgaacagaggaggatgttctcagaaagggagcattccctgcatcactctcatgaaatggctgagaaaagattgagggctattgaaataaccgacttgcccagctgcccggtggtgcccccgacaccagagttacctacaaggaaataacagacaacatgagcaatggaggaccacagctgatatttaatggaagagtgtaatcaatgttttaaagaattgaacactttttaggattttcatgaggcaatgagacaccaaaggactagaaaataaaacagtttttgcatttgcatttatctctcctgagcatccactaaaattattcttcctaaaaaatatattgcctcactggtttctccacccttttttatggggtaaaaaactttccagaaacattctagtacaataatttcaagaggctttccagattgttctaaagaagacttttcaggaaaaagagataataaaacagaaataaaatgcatattctatacaaacact

SEQ ID NO: 6104 - protein, 111 aa, Homo sapiens; identical to SEQ ID NO: 6100

SEQ ID NO: 6105 - DNA, 575 bp, Homo sapiens
acatctggctttgacactttctagttatgtgacctttgaatctcagcattccaccaagacaatctccaaaaaaggaaaagcaaatgagcagggctgtttctgaggatatgaaatactttacaattaaataaggaagaagaggaaacattccagacagaagcaatctcttactgcaagagaataagaagtaataagaattttcatcatttgaaatgcagccatgtggcaattttatccatccagaacaactgacatacagtaaatacttaacatgtagcagattctgctgtgttttttgatgtcttgttatattaaatctcttcaaccacactatgagattccattcccttacctgtgaagtgcggatggttgtgtggttgctgaggtgctgtccagcttggacatcgaggaattgtatgagcacctttgattgccttgcatgcagaaacaactctgaacccagcagtgttacttagatttcacagaaaagggaggcagagaggaagatgttagtcaggacaagaccagaacaaaacaagcggccctatgtctaagtgttgctgaccacactccag

SEQ ID NO: 6106 - protein, 47 aa, Homo sapiens
MRFHSLTCEVRMVVWLLRCCPAWTSRNCMSTFDCLACRNNSEPSSVT

SEQ ID NO: 6107 - DNA, 973 bp, Homo sapiens
aaaatgcttcagacgaacacaacaactttttcagagacttcattggacaggcatgatggaggcatggacaaccatgtggagatgtgactggacacaaagggtaccatccaacactaacacagtggggagcccagcagggcctctctgtccagattcttcttgacctctctgtgtggcatttcttcctcctggatatggggcaggacctcttctgaaatagggtcttatgacctacagtcagggaagttagtttgcagaattactctcctatgatggcacagaaatcacaaggatctgacaaccttcaggaaggccaggaaaagagcaagagagagatcctgaagtgcaccaaaagcgcgtgggctccgctggatgagtggctgccccctgaccctgaggaggaaagccagagtctcaccatccccatgctggaagattccaagcaagaaagtattcagcagtggctggactctggattctttgtctctgcaaatgaaaactttcaacaagtcattgaccgcactggtaagacaagagaagcagttatgctttgggaagctgagtaggagatatattcaaatatctacgtgaataaatcttcttaaaatgagcattatcagaggcttctagaaatgatcagccctcaaaaactatccagctcaatctcttcatttgacatatgactgcgacaaaaatgataggtgcttccccagcagcaggttaagggccgaacccagggctcttgccatatcatcaatggctcagagtatagcataaactcactgggttctatgaagacatttgcaaggatgtagttatgaaaatgaaattgtttaattttccccatcctgtattatacttttatttctgaatctagattttttctattctttggtctcaaaattgcacttacattctctctttctaataatgcacttgttctcaagaagaataaatgtctgaattctaaagc

SEQ ID NO: 6108 - protein, 98 aa, Homo sapiens
MMAQKSQGSDNLQEGQEKSKREILKCTKSAWAPLDEWLPPDPEEESQSLTIPMLEDSKQESIQQWLDSGFFVSANENFQQVIDRTGKTREAVMLWEAE

SEQ ID NO: 6109 - DNA, 2376 bp, Homo sapiens
gtggcctgcccccggagcccaggcaggaggagggtcttccttaaggaactgctgccaggacagggcagaggattgcagtaattatcactctctgctaatgaggaccaggccgtggttcactcgagccccgccccagtagcaatctaattccaaccgcggccctctcagaagtcggtccccgcctttgcgcctcagcctctctggactccagcccccagaagtcggcgcggcacggcgtgacctgcgcagtggcgtccgttgtaagtgctatgacaacagggcgaagatggctcagagttaggctggagaggggaggtgtcccttccgctgcggccgtcgggtttctgctacatcccattcaccgcctcctccatcctttcctcctcggtgtgagcagcaggacttgcatttgttctcgcctgcctagtgtcttccaagggatagatgccgtttcctctgctggtctctgggggtgacggggggcgcaggggagcttcttgggggaatcactccaactctgtggagctggtggtgctgcctggtggggctctctctttgcccgggacgtggaacaactttcagctggaggacgagagggaatagtgaagctaaaggttgcttttctctgcaccgtccgttcttgctccctctgctccatcactgggaccttgtcaggcgttcataaagcaaaatttgccgaacgagggttcgcagaaaggtggggcagagctcatctgacgtggcatcagtgtgaaagaaaatgtctttatttaaagcccgtgattggtggtctactattctgggagataaagaagaatttgatcaaggctgtttgtgtctggctaatgttgacaatagtggaaatggacaagataaaataattgtgggtagctttatgggatacctaaggatctttagcccccatcctgcaaaaacaggagatggagctcaagccgaagatttgcttctagaagtggatctacgagatccagtacttcaagtggaagtaggaaagtttgtttcaggtaccgaaatgctacatttggctgtgttacattctagaaaactttgtgtctactctgtctcaggaaccttgggtaatgtggaacatgggaaccaatgtcagatgaaattgatgtatgaacataatcttcagagaacagcctgcaatatgacctatggatcatttggtggtgtaaaaggtcgagatttaatttgcatccagtctatggatgggatgctgatggtatttgagcaggagagctatgcttttggaagatttctccctggctttcttctgcctggtcctcttgcctacagttcccgtacagattccttccttactgtctcttcctgccaacaagtggaaagttataagtaccaggtacttgcttttgcaacagatgcagataaaaggcaggagactgaacagcaaaaacttggttctggaaaaagactagttgtggattggactctaaatattggagagcaagcccttgacatatgtattgtctctttcaatcagtcggcatcctctgtttttgttcttggtgagagaaactttttttgccttaaggataatggacaaattcgattcatgaagaagcttgattggagcccaagttgttttctgccatattgctcagtttctgaaggaacaataaatactttgattggaaatcataataacatgctgcatatttatcaagatgtgacactgaagtgggccacccaacttccccacattcctgtagcagtaagagtgggctgtttgcatgatttaaagggagtgatagtcactctgagtgatgatggtcacttgcagtgttcatacctggggacagatccttctctgttccaagctccaaacgttcaatctcgagaactaaactatgtgctgaccaggttgctattctggaagcggcatttctgccgctacaagaagacactcaagaattgggctgggaagaaacggtggatgccgccatttcccacctgttgaagacttgcctgtcgaagagttctaaggagcaggctttgaacctcaacagccagctgaacatacccaaagacacaagccaactgaagaaacatatcaccttgctctgcgatagattatccaaaggtggccgtctctgcctaagtaccgatgcagcagccccacagaccatggtcatgccaggtaagagctctgtccatgctccctaatcacaattgtacttctcctaaattagaggaatgtgcctgtggttgtatttggggtttaaatttcatattaaagtgatgatagccaagaaaattgatttcacgtttcccctctgacatcccagggtaaccccttgaataaatatccctgagatatttgcttgctagaca

SEQ ID NO: 6110 - protein, 413 aa, Homo sapiens
MSLFKARDWWSTILGDKEEFDQGCLCLANVDNSGNGQDKIIVGSFMGYLRIFSPHPAKTGDGAQAEDLLLEVDLRDPVLQVEVGKFVSGTEMLHLAVLHSRKLCVYSVSGTLGNVEHGNQCQMKLMYEHNLQRTACNMTYGSFGGVKGRDLICIQSMDGMLMVFEQESYAFGRFLPGFLLPGPLAYSSRTDSFLTVSSCQQVESYKYQVLAFATDADKRQETEQQKLGSGKRLVVDWTLNIGEQALDICIVSFNQSASSVFVLGERNFFCLKDNGQIRFMKKLDWSPSCFLPYCSVSEGTINTLIGNHNNMLHIYQDVTLKWATQLPHIPVAVRVGCLHDLKGVIVTLSDDGHLQCSYLGTDPSLFQAPNVQSRELNYVLTRLLFWKRHFCRYKKTLKNWAGKKRWMPPFPTC

SEQ ID NO: 6111 - DNA, 3828 bp, Homo sapiens
gtggcctgcccccggagcccaggcaggaggagggtcttccttaaggaactgctgccaggacagggcagaggattgcagtaattatcactctctgctaatgaggaccaggccgtggttcactcgagccccgccccagtagcaatctaattccaaccgcggccctctcagaagtcggtccccgcctttgcgcctcagcctctctggactccagcccccagaagtcggcgcggcacggcgtgacctgcgcagtggcgtccgttgtaagtgctatgacaacagggcgaagatggctcagagttaggctggagaggggaggtgtcccttccgctgcggccgtcgggtttctgctacatcccattcaccgcctcctccatcctttcctcctcggtgtgagcagcaggacttgcatttgttctcgcctgcctagtgtcttccaagggatagatgccgtttcctctgctggtctctgggggtgacggggggcgcaggggagcttcttgggggaatcactccaactctgtggagctggtggtgctgcctggtggggctctctctttgcccgggacgtggaacaactttcagctggaggacgagagggaatagtgaagctaaaggttgcttttctctgcaccgtccgttcttgctccctctgctccatcactgggaccttgtcaggcgttcataaagcaaaatttgccgaacgagggttcgcagaaaggtggggcagagctcatctgacgtggcatcagtgtgaaagaaaatgtctttatttaaagcccgtgattggtggtctactattctgggagataaagaagaatttgatcaaggctgtttgtgtctggctaatgttgacaatagtggaaatggacaagataaaataattgtgggtagctttatgggatacctaaggatctttagcccccatcctgcaaaaacaggagatggagctcaagccgaagatttgcttctagaagtggatctacgagatccagtacttcaagtggaagtaggaaagtttgtttcaggtaccgaaatgctacatttggctgtgttacattctagaaaactttgtgtctactctgtctcaggaaccttgggtaatgtggaacatgggaaccaatgtcagatgaaattgatgtatgaacataatcttcagagaacagcctgcaatatgacctatggatcatttggtggtgtaaaaggtcgagatttaatttgcatccagtctatggatgggatgctgatggtatttgagcaggagagctatgcttttggaagatttctccctggctttcttctgcctggtcctcttgcctacagttcccgtacagattccttccttactgtctcttcctgccaacaagtggaaagttataagtaccaggtacttgcttttgcaacagatgcagataaaaggcaggagactgaacagcaaaaacttggttctggaaaaagactagttgtggattggactctaaatattggagagcaagcccttgacatatgtattgtctctttcaatcagtcggcatcctctgtttttgttcttggtgagagaaactttttttgccttaaggataatggacaaattcgattcatgaagaagcttgattggagcccaagttgttttctgccatattgctcagtttctgaaggaacaataaatactttgattggaaatcataataacatgctgcatatttatcaagatgtgacactgaagtgggccacccaacttccccacattcctgtagcagtaagagtgggctgtttgcatgatttaaagggagtgatagtcactctgagtgatgatggtcacttgcagtgttcatacctggggacagatccttctctgttccaagctccaaacgttcaatctcgagaactaaactatgatgaacttgatgtagaaatgaaagaacttcagaaaatcatcaaagatgttaacaaatcacaaggtgtttggcccatgactgagagagaagatgacttgaacgtttctgtcgtggtttctcctaactttgattcagtttctcaagcgaccgatgttgaggtgggaactgaccttgtcccttctgtcacggtgaaggtcacactgcagaacagagtgatattgcaaaaagccaaattatcagtctacgtgcaaccaccattagaattgacttgtgatcagttcacctttgaatttatgacaccagatttgactagaacagtaagcttttctgtttatctgaaaagaagttatacaccatcagaattggaaggaaatgctgttgtttcttattccagaccaacagatcgaaatcctgatggcattccgcgagttatccaatgtaaatttagacttcccctaaagttaatttgcctaccaggtcagccttcaaaaactgcaagccacaaaattactattgataccaacaaatctccagtcagtcttcttagtctcttcccaggttttgccagtcagtcagatgatgatcaggtgaatgtaatgggttttcacttcttaggaggtgctcgaattactgttcttgcttccaaaacttctcaacgatatcgcattcagagtgaacaatttgaagatctttggctcataaccaatgagcttattcttcgccttcaagaatattttgaaaaacagggagtcaaagattttgcatgttctttttcgggatctataccccttcaagaatattttgagttgattgatcatcattttgagctacggataaatggtgaaaaattagaagaactcttatctgagagagctgtacaatttcgggccattcaacgccggctactagcaagattcaaagataaaactcctgcccctcttcaacacctggacaccttgttagatggaacctacaagcaggtaattgctctagcagatgcagtggaggaaaaccaaggcaatctgttccagtcattcaccaggctgaagagtgccacccatttggtgattctgctgatcgcgctgtggcagaagcttagtgctgaccaggttgctattctggaagcggcatttctgccgctacaagaagacactcaagaattgggctgggaagaaacggtggatgccgccatttcccacctgttgaagacttgcctgtcgaagagttctaaggagcaggctttgaacctcaacagccagctgaacatacccaaagacacaagccaactgaagaaacatatcaccttgctctgcgatagattatccaaaggtggccgtctctgcctaagtaccgatgcagcagccccacagaccatggtcatgccaggtggttgtactacaatcccagagtcagacctagaagaaagatcagtagaacaagactctacagaactgtttaccaaccacagacatctcactgcagagacacccaggcctgaagtttcacccctccaaggagtctcggaataattcaagtagagttgtttggttgagaggaacatccccatctcaaggccgaacctgtgtgaacctcatgccaagcacagatatagggctggcgcaggtgcttcctaaagctcaccttcctggagatgacatgcatagaaagaggggttgggactttttacttcactaggagaacttgtaacaccatggggaagtcagctgaaacttgtcttgttttgccaggaaaggaagtagttgcctttggtcatccatctgctaatagtcacagaatacagtgaaatgacatagttttgggttagattttataatgcaaagattcagatccaaaataatttcataccccattttttcacagaattcttatatagtaaatgtatcaagtttaataaagcatctcattgtcaaat

SEQ ID NO: 6112 - protein, 887 aa, Homo sapiens; identical to SEQ ID NO: 835

SEQ ID NO: 6113 - DNA, 3972 bp, Homo sapiens
gtggcctgcccccggagcccaggcaggaggagggtcttccttaaggaactgctgccaggacagggcagaggattgcagtaattatcactctctgctaatgaggaccaggccgtggttcactcgagccccgccccagtagcaatctaattccaaccgcggccctctcagaagtcggtccccgcctttgcgcctcagcctctctggactccagcccccagaagtcggcgcggcacggcgtgacctgcgcagtggcgtccgttgtaagtgctatgacaacagggcgaagatggctcagagttaggctggagaggggaggtgtcccttccgctgcggccgtcgggtttctgctacatcccattcaccgcctcctccatcctttcctcctcggtgtgagcagcaggacttgcatttgttctcgcctgcctagtgtcttccaagggatagatgccgtttcctctgctggtctctgggggtgacggggggcgcaggggagcttcttgggggaatcactccaactctgtggagctggtggtgctgcctggtggggctctctctttgcccgggacgtggaacaactttcagctggaggacgagagggaatagtgaagctaaaggttgcttttctctgcaccgtccgttcttgctccctctgctccatcactgggaccttgtcaggcgttcataaagcaaaatttgccgaacgagggttcgcagaaaggtggggcagagctcatctgacgtggcatcagtgtgaaagaaaatgtctttatttaaagcccgtgattggtggtctactattctgggagataaagaagaatttgatcaaggctgtttgtgtctggctaatgttgacaatagtggaaatggacaagataaaataattgtgggtagctttatgggatacctaaggatctttagcccccatcctgcaaaaacaggagatggagctcaagccgaagatttgcttctagaagtggatctacgagatccagtacttcaagtggaagtaggaaagtttgtttcaggtaccgaaatgctacatttggctgtgttacattctagaaaactttgtgtctactctgtctcaggaaccttgggtaatgtggaacatgggaaccaatgtcagatgaaattgatgtatgaacataatcttcagagaacagcctgcaatatgacctatggatcatttggtggtgtaaaaggtcgagatttaatttgcatccagtctatggatgggatgctgatggtatttgagcaggagagctatgcttttggaagatttctccctggctttcttctgcctggtcctcttgcctacagttcccgtacagattccttccttactgtctcttcctgccaacaagtggaaagttataagtaccaggtacttgcttttgcaacagatgcagataaaaggcaggagactgaacagcaaaaacttggttctggaaaaagactagttgtggattggactctaaatattggagagcaagcccttgacatatgtattgtctctttcaatcagtcggcatcctctgtttttgttcttggtgagagaaactttttttgccttaaggataatggacaaattcgattcatgaagaagcttgattggagcccaagttgttttctgccatattgctcagtttctgaaggaacaataaatactttgattggaaatcataataacatgctgcatatttatcaagatgtgacactgaagtgggccacccaacttccccacattcctgtagcagtaagagtgggctgtttgcatgatttaaagggagtgatagtcactctgagtgatgatggtcacttgcagtgttcatacctggggacagatccttctctgttccaagctccaaacgttcaatctcgagaactaaactatgatgaacttgatgtagaaatgaaagaacttcagaaaatcatcaaagatgttaacaaatcacaaggtgtttggcccatgactgagagagaagatgacttgaacgtttctgtcgtggtttctcctaactttgattcagtttctcaagcgaccgatgttgaggtgggaactgaccttgtcccttctgtcacggtgaagcagccaagatatacaaccatgcaagtttccatcataataaatcctgttaattgagaaaatttttccatccgttccaagtgaatgaagatgtggctaccttgagtatgtgtgcatgatgcgtgaccatctattccaggcaactaggtcacactgcagaacagagtgatattgcaaaaagccaaattatcagtctacgtgcaaccaccattagaattgacttgtgatcagttcacctttgaatttatgacaccagatttgactagaacagtaagcttttctgtttatctgaaaagaagttatacaccatcagaattggaaggaaatgctgttgtttcttattccagaccaacagatcgaaatcctgatggcattccgcgagttatccaatgtaaatttagacttcccctaaagttaatttgcctaccaggtcagccttcaaaaactgcaagccacaaaattactattgataccaacaaatctccagtcagtcttcttagtctcttcccaggttttgccagtcagtcagatgatgatcaggtgaatgtaatgggttttcacttcttaggaggtgctcgaattactgttcttgcttccaaaacttctcaacgatatcgcattcagagtgaacaatttgaagatctttggctcataaccaatgagcttattcttcgccttcaagaatattttgaaaaacagggagtcaaagattttgcatgttctttttcgggatctataccccttcaagaatattttgagttgattgatcatcattttgagctacggataaatggtgaaaaattagaagaactcttatctgagagagctgtacaatttcgggccattcaacgccggctactagcaagattcaaagataaaactcctgcccctcttcaacacctggacaccttgttagatggaacctacaagcaggtaattgctctagcagatgcagtggaggaaaaccaaggcaatctgttccagtcattcaccaggctgaagagtgccacccatttggtgattctgctgatcgcgctgtggcagaagcttagtgctgaccaggttgctattctggaagcggcatttctgccgctacaagaagacactcaagaattgggctgggaagaaacggtggatgccgccatttcccacctgttgaagacttgcctgtcgaagagttctaaggagcaggctttgaacctcaacagccagctgaacatacccaaagacacaagccaactgaagaaacatatcaccttgctctgcgatagattatccaaaggtggccgtctctgcctaagtaccgatgcagcagccccacagaccatggtcatgccaggtggttgtactacaatcccagagtcagacctagaagaaagatcagtagaacaagactctacagaactgtttaccaaccacagacatctcactgcagagacacccaggcctgaagtttcacccctccaaggagtctcggaataattcaagtagagttgtttggttgagaggaacatccccatctcaaggccgaacctgtgtgaacctcatgccaagcacagatatagggctggcgcaggtgcttcctaaagctcaccttcctggagatgacatgcatagaaagaggggttgggactttttacttcactaggagaacttgtaacaccatggggaagtcagctgaaacttgtcttgttttgccaggaaaggaagtagttgcctttggtcatccatctgctaatagtcacagaatacagtgaaatgacatagttttgggttagattttataatgcaaagattcagatccaaaataatttcataccccattttttcacagaattcttatatagtaaatgtatcaagtttaataaagcatctcattgtcaaat

SEQ ID NO: 6114 - protein, 460 aa, Homo sapiens
MSLFKARDWWSTILGDKEEFDQGCLCLANVDNSGNGQDKIIVGSFMGYLRIFSPHPAKTGDGAQAEDLLLEVDLRDPVLQVEVGKFVSGTEMLHLAVLHSRKLCVYSVSGTLGNVEHGNQCQMKLMYEHNLQRTACNMTYGSFGGVKGRDLICIQSMDGMLMVFEQESYAFGRFLPGFLLPGPLAYSSRTDSFLTVSSCQQVESYKYQVLAFATDADKRQETEQQKLGSGKRLVVDWTLNIGEQALDICIVSFNQSASSVFVLGERNFFCLKDNGQIRFMKKLDWSPSCFLPYCSVSEGTINTLIGNHNNMLHIYQDVTLKWATQLPHIPVAVRVGCLHDLKGVIVTLSDDGHLQCSYLGTDPSLFQAPNVQSRELNYDELDVEMKELQKIIKDVNKSQGVWPMTEREDDLNVSVVVSPNFDSVSQATDVEVGTDLVPSVTVKQPRYTTMQVSIIINPVN

SEQ ID NO: 6115 - DNA, 4251 bp, Homo sapiens
gtggcctgcccccggagcccaggcaggaggagggtcttccttaaggaactgctgccaggacagggcagaggattgcagtaattatcactctctgctaatgaggaccaggccgtggttcactcgagccccgccccagtagcaatctaattccaaccgcggccctctcagaagtcggtccccgcctttgcgcctcagcctctctggactccagcccccagaagtcggcgcggcacggcgtgacctgcgcagtggcgtccgttgtaagtgctatgacaacagggcgaagatggctcagagttaggctggagaggggaggtgtcccttccgctgcggccgtcgggtttctgctacatcccattcaccgcctcctccatcctttcctcctcggtgtgagcagcaggacttgcatttgttctcgcctgcctagtgtcttccaagggatagatgccgtttcctctgctggtctctgggggtgacggggggcgcaggggagcttcttgggggaatcactccaactctgtggagctggtggtgctgcctggtggggctctctctttgcccgggacgtggaacaactttcagctggaggacgagagggaatagtgaagctaaaggttgcttttctctgcaccgtccgttcttgctccctctgctccatcactgggaccttgtcaggcgttcataaagcaaaatttgccgaacgagggttcgcagaaaggtggggcagagctcatctgacgtggcatcagtgtgaaagaaaatgtctttatttaaagcccgtgattggtggtctactattctgggagataaagaagaatttgatcaaggctgtttgtgtctggctaatgttgacaatagtggaaatggacaagataaaataattgtgggtagctttatgggatacctaaggatctttagcccccatcctgcaaaaacaggagatggagctcaagccgaagatttgcttctagaagtggatctacgagatccagtacttcaagtggaagtaggaaagtttgtttcaggtaccgaaatgctacatttggctgtgttacattctagaaaactttgtgtctactctgtctcaggaaccttgggtaatgtggaacatgggaaccaatgtcagatgaaattgatgtatgaacataatcttcagagaacagcctgcaatatgacctatggatcatttggtggtgtaaaaggtcgagatttaatttgcatccagtctatggatgggatgctgatggtatttgagcaggagagctatgcttttggaagatttctccctggctttcttctgcctggtcctcttgcctacagttcccgtacagattccttccttactgtctcttcctgccaacaagtggaaagttataagtaccaggtacttgcttttgcaacagatgcagataaaaggcaggagactgaacagcaaaaacttggttctggaaaaagactagttgtggattggactctaaatattggagagcaagcccttgacatatgtattgtctctttcaatcagtcggcatcctctgtttttgttcttggtgagagaaactttttttgccttaaggataatggacaaattcgattcatgaagaagcttgattggagcccaagttgttttctgccatattgctcagtttctgaaggaacaataaatactttgattggaaatcataataacatgctgcatatttatcaagatgtgacactgaagtgggccacccaacttccccacattcctgtagcagtaagagtgggctgtttgcatgatttaaagggagtgatagtcactctgagtgatgatggtcacttgcagtgttcatacctggggacagatccttctctgttccaagctccaaacgttcaatctcgagaactaaactatgatgaacttgatgtagaaatgaaagaacttcagaaaatcatcaaagatgttaacaaatcacaaggtgtttggcccatgactgagagagaagatgacttgaacgtttctgtcgtggtttctcctaactttgattcagtttctcaagcgaccgatgttgaggtgggaactgaccttgtcccttctgtcacggtgaaggtcacactgcagaacagagtgatattgcaaaaagccaaattatcagtctacgtgcaaccaccattagaattgacttgtgatcagttcacctttgaatttatgacaccagatttgactagaacagtaagcttttctgtttatctgaaaagaagttatacaccatcagaattggaaggaaatgctgttgtttcttattccagaccaacaggcattccgcgagttatccaatgtaaatttagacttcccctaaagttaatttgcctaccaggtcagccttcaaaaactgcaagccacaaaattactattgataccaacaaatctccagtcagtcttcttagtctcttcccaggttttgccagtcagtcagatgatgatcaggtgaatgtaatgggttttcacttcttaggaggtgctcgaattactgttcttgcttccaaaacttctcaacgatatcgcattcagagtgaacaatttgaagatctttggctcataaccaatgagcttattcttcgccttcaagaatattttgaaaaacagggagtcaaagattttgcatgttctttttcgggatctataccccttcaagaatattttgagttgattgatcatcattttgagctacggataaatggtgaaaaattagaagaactcttatctgagagagctgtacaatttcgggccattcaacgccggctactagcaagattcaaagataaaactcctgcccctcttcaacacctggacaccttgttagatggaacctacaagcaggtaattgctctagcagatgcagtggaggaaaaccaaggcaatctgttccagtcattcaccaggctgaagagtgccacccatttggtgattctgctgatcgcgctgtggcagaagcttagtgctgaccaggttgctattctggaagcggcatttctgccgctacaagaagacactcaagaattgggctgggaagaaacggtggatgccgccatttcccacctgttgaagacttgcctgtcgaagagttctaaggagcaggctttgaacctcaacagccagctgaacatacccaaagacacaagccaactgaagaaacatatcaccttgctctgcgatagattatccaaaggtggccgtctctgcctaagtaccgatgcagcagccccacagaccatggtcatgccaggtggttgtactacaatcccagagtcagacctagaagaaagatcagtagaacaagactctacagaactgtttaccaaccacagacatctcactgcagagacacccaggcctgaagtttcacccctccaaggagtctcggaataattcaagtagagttgtttggttgagaggaacatccccatctcaaggccgaacctgtgtgaacctcatgccaagcacagatatagggctggcgcaggtgcttcctaaagctcaccttcctggagatgacatgcatagaaagaggggttgggactttttacttcactaggagaacttgtaacaccatggggaagtcagctgaaacttgtcttgttttgccaggaaaggaagtagttgcctttggtcatccatctgctaatagtcacagaatacagtgaaatgacatagttttgggttagattttataatgcaaagattcagatccaaaataatttcataccccattttttcacagaattcttatatagtaaatgtatcaagtttaataaagcatctcattgtcaaataatatcttggattttatttataattagagggatttatgagtgattgctctacattatttcttcaaaggaaaggaaaggaattgaagactttgctactctctggtaagacttgaatgtgattattttataaataaaagaaccactatgaaactttcatgtgatttgttctattaagctaaacgtggaagaagggaagttttctagtattgtatgaaaatgtttaaatattttcaaggaagctagtacattaacatccccttttcattaccccattgggtggcaccttttaaaaatccaggttattaaaggattcacactttattacagttaaaatttaaggtttttatgtgtaagaagtgaaagaaactttgctaatttcaagttcgaattacagttgtgagattgatttatttaaataaaaatatgcctttgccagtt

SEQ ID NO: 6116 - protein, 882 aa, Homo sapiens; identical to SEQ ID NO: 831

SEQ ID NO: 6117 - DNA, 4161 bp, Homo sapiens
gtggcctgcccccggagcccaggcaggaggagggtcttccttaaggaactgctgccaggacagggcagaggattgcagtaattatcactctctgctaatgaggaccaggccgtggttcactcgagccccgccccagtagcaatctaattccaaccgcggccctctcagaagtcggtccccgcctttgcgcctcagcctctctggactccagcccccagaagtcggcgcggcacggcgtgacctgcgcagtggcgtccgttgtaagtgctatgacaacagggcgaagatggctcagagttaggctggagaggggaggtgtcccttccgctgcggccgtcgggtttctgctacatcccattcaccgcctcctccatcctttcctcctcggtgtgagcagcaggacttgcatttgttctcgcctgcctagtgtcttccaagggatagatgccgtttcctctgctggtctctgggggtgacggggggcgcaggggagcttcttgggggaatcactccaactctgtggagctggtggtgctgcctggtggggctctctctttgcccgggacgtggaacaactttcagctggaggacgagagggaatagtgaagctaaaggttgcttttctctgcaccgtccgttcttgctccctctgctccatcactgggaccttgtcaggcgttcataaagcaaaatttgccgaacgagggttcgcagaaaggtggggcagagctcatctgacgtggcatcagtgtgaaagaaaatgtctttatttaaagcccgtgattggtggtctactattctgggagataaagaagaatttgatcaaggctgtttgtgtctggctaatgttgacaatagtggaaatggacaagataaaataattgtgggtagctttatgggatacctaaggatctttagcccccatcctgcaaaaacaggagatggagctcaagccgaagatttgcttctagaagtggatctacgagatccagtacttcaagtggaagtaggaaagtttgtttcaggtaccgaaatgctacatttggctgtgttacattctagaaaactttgtgtctactctgtctcaggaaccttgggtaatgtggaacatgggaaccaatgtcagatgaaattgatgtatgaacataatcttcagagaacagcctgcaatatgacctatggatcatttggtggtgtaaaaggtcgagatttaatttgcatccagtctatggatgggatgctgatggtatttgagcaggagagctatgcttttggaagatttctccctggctttcttctgcctggtcctcttgcctacagttcccgtacagattccttccttactgtctcttcctgccaacaagtggaaagttataagtaccaggtacttgcttttgcaacagatgcagataaaaggcaggagactgaacagcaaaaacttggttctggaaaaagactagttgtggattggactctaaatattggagagcaagcccttgacatatgtattgtctctttcaatcagtcggcatcctctgtttttgttcttggtgagagaaactttttttgccttaaggataatggacaaattcgattcatgaagaagcttgattggagcccaagttgttttctgccatattgctcagtttctgaaggaacaataaatactttgattggaaatcataataacatgctgcatatttatcaagatgtgacactgaagtgggccacccaacttccccacattcctgtagcagtaagagtgggctgtttgcatgatttaaagggagtgatagtcactctgagtgatgatggtcacttgcagtgttcatacctggggacagatccttctctgttccaagctccaaacgttcaatctcgagaactaaactatgatgaacttgatgtagaaatgaaagaacttcagaaaatcatcaaagatgttaacaaatcacaaggtgtttggcccatgactgagagagaagatgacttgaacgtttctgtcgtggtttctcctaactttgattcagtttctcaagcgaccgatgttgaggtgggaactgaccttgtcccttctgtcacggtgaaggtcacactgcagaacagagtgatattgcaaaaagccaaattatcagtctacgtgcaaccaccattagaattgacttgtgatcagttcacctttgaatttatgaatcgaaatcctgatggcattccgcgagttatccaatgtaaatttagacttcccctaaagttaatttgcctaccaggtcagccttcaaaaactgcaagccacaaaattactattgataccaacaaatctccagtcagtcttcttagtctcttcccaggttttgccagtcagtcagatgatgatcaggtgaatgtaatgggttttcacttcttaggaggtgctcgaattactgttcttgcttccaaaacttctcaacgatatcgcattcagagtgaacaatttgaagatctttggctcataaccaatgagcttattcttcgccttcaagaatattttgaaaaacagggagtcaaagattttgcatgttctttttcgggatctataccccttcaagaatattttgagttgattgatcatcattttgagctacggataaatggtgaaaaattagaagaactcttatctgagagagctgtacaatttcgggccattcaacgccggctactagcaagattcaaagataaaactcctgcccctcttcaacacctggacaccttgttagatggaacctacaagcaggtaattgctctagcagatgcagtggaggaaaaccaaggcaatctgttccagtcattcaccaggctgaagagtgccacccatttggtgattctgctgatcgcgctgtggcagaagcttagtgctgaccaggttgctattctggaagcggcatttctgccgctacaagaagacactcaagaattgggctgggaagaaacggtggatgccgccatttcccacctgttgaagacttgcctgtcgaagagttctaaggagcaggctttgaacctcaacagccagctgaacatacccaaagacacaagccaactgaagaaacatatcaccttgctctgcgatagattatccaaaggtggccgtctctgcctaagtaccgatgcagcagccccacagaccatggtcatgccaggtggttgtactacaatcccagagtcagacctagaagaaagatcagtagaacaagactctacagaactgtttaccaaccacagacatctcactgcagagacacccaggcctgaagtttcacccctccaaggagtctcggaataattcaagtagagttgtttggttgagaggaacatccccatctcaaggccgaacctgtgtgaacctcatgccaagcacagatatagggctggcgcaggtgcttcctaaagctcaccttcctggagatgacatgcatagaaagaggggttgggactttttacttcactaggagaacttgtaacaccatggggaagtcagctgaaacttgtcttgttttgccaggaaaggaagtagttgcctttggtcatccatctgctaatagtcacagaatacagtgaaatgacatagttttgggttagattttataatgcaaagattcagatccaaaataatttcataccccattttttcacagaattcttatatagtaaatgtatcaagtttaataaagcatctcattgtcaaataatatcttggattttatttataattagagggatttatgagtgattgctctacattatttcttcaaaggaaaggaaaggaattgaagactttgctactctctggtaagacttgaatgtgattattttataaataaaagaaccactatgaaactttcatgtgatttgttctattaagctaaacgtggaagaagggaagttttctagtattgtatgaaaatgtttaaatattttcaaggaagctagtacattaacatccccttttcattaccccattgggtggcaccttttaaaaatccaggttattaaaggattcacactttattacagttaaaatttaaggtttttatgtgtaagaagtgaaagaaactttgctaatttcaagttcgaattacagttgtgagattgatttatttaaataaaaatatgcctttgccagtt

SEQ ID NO: 6118 - protein, 852 aa, Homo sapiens; identical to SEQ ID NO: 829

SEQ ID NO: 6119 - DNA, 4146 bp, Homo sapiens
gtggcctgcccccggagcccaggcaggaggagggtcttccttaaggaactgctgccaggacagggcagaggattgcagtaattatcactctctgctaatgaggaccaggccgtggttcactcgagccccgccccagtagcaatctaattccaaccgcggccctctcagaagtcggtccccgcctttgcgcctcagcctctctggactccagcccccagaagtcggcgcggcacggcgtgacctgcgcagtggcgtccgttgtaagtgctatgacaacagggcgaagatggctcagagttaggctggagaggggaggtgtcccttccgctgcggccgtcgggtttctgctacatcccattcaccgcctcctccatcctttcctcctcggtgtgagcagcaggacttgcatttgttctcgcctgcctagtgtcttccaagggatagatgccgtttcctctgctggtctctgggggtgacggggggcgcaggggagcttcttgggggaatcactccaactctgtggagctggtggtgctgcctggtggggctctctctttgcccgggacgtggaacaactttcagctggaggacgagagggaatagtgaagctaaaggttgcttttctctgcaccgtccgttcttgctccctctgctccatcactgggaccttgtcaggcgttcataaagcaaaatttgccgaacgagggttcgcagaaaggtggggcagagctcatctgacgtggcatcagtgtgaaagaaaatgtctttatttaaagcccgtgattggtggtctactattctgggagataaagaagaatttgatcaaggctgtttgtgtctggctaatgttgacaatagtggaaatggacaagataaaataattgtgggtagctttatgggatacctaaggatctttagcccccatcctgcaaaaacaggagatggagctcaagccgaagatttgcttctagaagtggatctacgagatccagtacttcaagtggaagtaggaaagtttgtttcaggtaccgaaatgctacatttggctgtgttacattctagaaaactttgtgtctactctgtctcaggaaccttgggtaatgtggaacatgggaaccaatgtcagatgaaattgatgtatgaacataatcttcagagaacagcctgcaatatgacctatggatcatttggtggtgtaaaaggtcgagatttaatttgcatccagtctatggatgggatgctgatggtatttgagcaggagagctatgcttttggaagatttctccctggctttcttctgcctggtcctcttgcctacagttcccgtacagattccttccttactgtctcttcctgccaacaagtggaaagttataagtaccaggtacttgcttttgcaacagatgcagataaaaggcaggagactgaacagcaaaaacttggttctggaaaaagactagttgtggattggactctaaatattggagagcaagcccttgacatatgtattgtctctttcaatcagtcggcatcctctgtttttgttcttggtgagagaaactttttttgccttaaggataatggacaaattcgattcatgaagaagcttgattggagcccaagttgttttctgccatattgctcagtttctgaaggaacaataaatactttgattggaaatcataataacatgctgcatatttatcaagatgtgacactgaagtgggccacccaacttccccacattcctgtagcagtaagagtgggctgtttgcatgatttaaagggagtgatagtcactctgagtgatgatggtcacttgcagtgttcatacctggggacagatccttctctgttccaagctccaaacgttcaatctcgagaactaaactatgatgaacttgatgtagaaatgaaagaacttcagaaaatcatcaaagatgttaacaaatcacaaggtgtttggcccatgactgagagagaagatgacttgaacgtttctgtcgtggtttctcctaactttgattcagtttctcaagcgaccgatgttgaggtgggaactgaccttgtcccttctgtcacggtgaaggtcacactgcagaacagagtgatattgcaaaaagccaaattatcagtctacgtgcaaccaccattagaattgacttgtgatcagttcacctttgaatttatgagcattccgcgagttatccaatgtaaatttagacttcccctaaagttaatttgcctaccaggtcagccttcaaaaactgcaagccacaaaattactattgataccaacaaatctccagtcagtcttcttagtctcttcccaggttttgccagtcagtcagatgatgatcaggtgaatgtaatgggttttcacttcttaggaggtgctcgaattactgttcttgcttccaaaacttctcaacgatatcgcattcagagtgaacaatttgaagatctttggctcataaccaatgagcttattcttcgccttcaagaatattttgaaaaacagggagtcaaagattttgcatgttctttttcgggatctataccccttcaagaatattttgagttgattgatcatcattttgagctacggataaatggtgaaaaattagaagaactcttatctgagagagctgtacaatttcgggccattcaacgccggctactagcaagattcaaagataaaactcctgcccctcttcaacacctggacaccttgttagatggaacctacaagcaggtaattgctctagcagatgcagtggaggaaaaccaaggcaatctgttccagtcattcaccaggctgaagagtgccacccatttggtgattctgctgatcgcgctgtggcagaagcttagtgctgaccaggttgctattctggaagcggcatttctgccgctacaagaagacactcaagaattgggctgggaagaaacggtggatgccgccatttcccacctgttgaagacttgcctgtcgaagagttctaaggagcaggctttgaacctcaacagccagctgaacatacccaaagacacaagccaactgaagaaacatatcaccttgctctgcgatagattatccaaaggtggccgtctctgcctaagtaccgatgcagcagccccacagaccatggtcatgccaggtggttgtactacaatcccagagtcagacctagaagaaagatcagtagaacaagactctacagaactgtttaccaaccacagacatctcactgcagagacacccaggcctgaagtttcacccctccaaggagtctcggaataattcaagtagagttgtttggttgagaggaacatccccatctcaaggccgaacctgtgtgaacctcatgccaagcacagatatagggctggcgcaggtgcttcctaaagctcaccttcctggagatgacatgcatagaaagaggggttgggactttttacttcactaggagaacttgtaacaccatggggaagtcagctgaaacttgtcttgttttgccaggaaaggaagtagttgcctttggtcatccatctgctaatagtcacagaatacagtgaaatgacatagttttgggttagattttataatgcaaagattcagatccaaaataatttcataccccattttttcacagaattcttatatagtaaatgtatcaagtttaataaagcatctcattgtcaaataatatcttggattttatttataattagagggatttatgagtgattgctctacattatttcttcaaaggaaaggaaaggaattgaagactttgctactctctggtaagacttgaatgtgattattttataaataaaagaaccactatgaaactttcatgtgatttgttctattaagctaaacgtggaagaagggaagttttctagtattgtatgaaaatgtttaaatattttcaaggaagctagtacattaacatccccttttcattaccccattgggtggcaccttttaaaaatccaggttattaaaggattcacactttattacagttaaaatttaaggtttttatgtgtaagaagtgaaagaaactttgctaatttcaagttcgaattacagttgtgagattgatttatttaaataaaaatatgcctttgccagtt

SEQ ID NO: 6120 - protein, 847 aa, Homo sapiens; identical to SEQ ID NO: 833

SEQ ID NO: 6121 - DNA, 4266 bp, Homo sapiens
gtggcctgcccccggagcccaggcaggaggagggtcttccttaaggaactgctgccaggacagggcagaggattgcagtaattatcactctctgctaatgaggaccaggccgtggttcactcgagccccgccccagtagcaatctaattccaaccgcggccctctcagaagtcggtccccgcctttgcgcctcagcctctctggactccagcccccagaagtcggcgcggcacggcgtgacctgcgcagtggcgtccgttgtaagtgctatgacaacagggcgaagatggctcagagttaggctggagaggggaggtgtcccttccgctgcggccgtcgggtttctgctacatcccattcaccgcctcctccatcctttcctcctcggtgtgagcagcaggacttgcatttgttctcgcctgcctagtgtcttccaagggatagatgccgtttcctctgctggtctctgggggtgacggggggcgcaggggagcttcttgggggaatcactccaactctgtggagctggtggtgctgcctggtggggctctctctttgcccgggacgtggaacaactttcagctggaggacgagagggaatagtgaagctaaaggttgcttttctctgcaccgtccgttcttgctccctctgctccatcactgggaccttgtcaggcgttcataaagcaaaatttgccgaacgagggttcgcagaaaggtggggcagagctcatctgacgtggcatcagtgtgaaagaaaatgtctttatttaaagcccgtgattggtggtctactattctgggagataaagaagaatttgatcaaggctgtttgtgtctggctaatgttgacaatagtggaaatggacaagataaaataattgtgggtagctttatgggatacctaaggatctttagcccccatcctgcaaaaacaggagatggagctcaagccgaagatttgcttctagaagtggatctacgagatccagtacttcaagtggaagtaggaaagtttgtttcaggtaccgaaatgctacatttggctgtgttacattctagaaaactttgtgtctactctgtctcaggaaccttgggtaatgtggaacatgggaaccaatgtcagatgaaattgatgtatgaacataatcttcagagaacagcctgcaatatgacctatggatcatttggtggtgtaaaaggtcgagatttaatttgcatccagtctatggatgggatgctgatggtatttgagcaggagagctatgcttttggaagatttctccctggctttcttctgcctggtcctcttgcctacagttcccgtacagattccttccttactgtctcttcctgccaacaagtggaaagttataagtaccaggtacttgcttttgcaacagatgcagataaaaggcaggagactgaacagcaaaaacttggttctggaaaaagactagttgtggattggactctaaatattggagagcaagcccttgacatatgtattgtctctttcaatcagtcggcatcctctgtttttgttcttggtgagagaaactttttttgccttaaggataatggacaaattcgattcatgaagaagcttgattggagcccaagttgttttctgccatattgctcagtttctgaaggaacaataaatactttgattggaaatcataataacatgctgcatatttatcaagatgtgacactgaagtgggccacccaacttccccacattcctgtagcagtaagagtgggctgtttgcatgatttaaagggagtgatagtcactctgagtgatgatggtcacttgcagtgttcatacctggggacagatccttctctgttccaagctccaaacgttcaatctcgagaactaaactatgatgaacttgatgtagaaatgaaagaacttcagaaaatcatcaaagatgttaacaaatcacaaggtgtttggcccatgactgagagagaagatgacttgaacgtttctgtcgtggtttctcctaactttgattcagtttctcaagcgaccgatgttgaggtgggaactgaccttgtcccttctgtcacggtgaaggtcacactgcagaacagagtgatattgcaaaaagccaaattatcagtctacgtgcaaccaccattagaattgacttgtgatcagttcacctttgaatttatgacaccagatttgactagaacagtaagcttttctgtttatctgaaaagaagttatacaccatcagaattggaaggaaatgctgttgtttcttattccagaccaacagatcgaaatcctgatggcattccgcgagttatccaatgtaaatttagacttcccctaaagttaatttgcctaccaggtcagccttcaaaaactgcaagccacaaaattactattgataccaacaaatctccagtcagtcttcttagtctcttcccaggttttgccagtcagtcagatgatgatcaggtgaatgtaatgggttttcacttcttaggaggtgctcgaattactgttcttgcttccaaaacttctcaacgatatcgcattcagagtgaacaatttgaagatctttggctcataaccaatgagcttattcttcgccttcaagaatattttgaaaaacagggagtcaaagattttgcatgttctttttcgggatctataccccttcaagaatattttgagttgattgatcatcattttgagctacggataaatggtgaaaaattagaagaactcttatctgagagagctgtacaatttcgggccattcaacgccggctactagcaagattcaaagataaaactcctgcccctcttcaacacctggacaccttgttagatggaacctacaagcaggtaattgctctagcagatgcagtggaggaaaaccaaggcaatctgttccagtcattcaccaggctgaagagtgccacccatttggtgattctgctgatcgcgctgtggcagaagcttagtgctgaccaggttgctattctggaagcggcatttctgccgctacaagaagacactcaagaattgggctgggaagaaacggtggatgccgccatttcccacctgttgaagacttgcctgtcgaagagttctaaggagcaggctttgaacctcaacagccagctgaacatacccaaagacacaagccaactgaagaaacatatcaccttgctctgcgatagattatccaaaggtggccgtctctgcctaagtaccgatgcagcagccccacagaccatggtcatgccaggtggttgtactacaatcccagagtcagacctagaagaaagatcagtagaacaagactctacagaactgtttaccaaccacagacatctcactgcagagacacccaggcctgaagtttcacccctccaaggagtctcggaataattcaagtagagttgtttggttgagaggaacatccccatctcaaggccgaacctgtgtgaacctcatgccaagcacagatatagggctggcgcaggtgcttcctaaagctcaccttcctggagatgacatgcatagaaagaggggttgggactttttacttcactaggagaacttgtaacaccatggggaagtcagctgaaacttgtcttgttttgccaggaaaggaagtagttgcctttggtcatccatctgctaatagtcacagaatacagtgaaatgacatagttttgggttagattttataatgcaaagattcagatccaaaataatttcataccccattttttcacagaattcttatatagtaaatgtatcaagtttaataaagcatctcattgtcaaataatatcttggattttatttataattagagggatttatgagtgattgctctacattatttcttcaaaggaaaggaaaggaattgaagactttgctactctctggtaagacttgaatgtgattattttataaataaaagaaccactatgaaactttcatgtgatttgttctattaagctaaacgtggaagaagggaagttttctagtattgtatgaaaatgtttaaatattttcaaggaagctagtacattaacatccccttttcattaccccattgggtggcaccttttaaaaatccaggttattaaaggattcacactttattacagttaaaatttaaggtttttatgtgtaagaagtgaaagaaactttgctaatttcaagttcgaattacagttgtgagattgatttatttaaataaaaatatgcctttgccagtt

SEQ ID NO: 6122 - protein, 887 aa, Homo sapiens; identical to SEQ ID NO: 835

SEQ ID NO: 6123 - DNA, 2452 bp, Homo sapiens
ctttctaaaatacattctaaataatttattttttccatttattatggctctctaatacaggttgggggccagatatgttaacatagatgagcacgcacaatctgttaagtggctactgtgtaacactcctcatccattttctccttcagtctatgttctacccatgataaattgctattttcctcccaaattctcttgcccttttgtgtaccgttttctctgttcatgctgtctgttcctcgaagtaaagaacagcagtggtgtagaatgccagtttctttgtaccttgttctggagttaattcctagtagctgtgttaccttaggcaagcttctttttttgtttttgtttctgtttttgagacagagtctcactctgttgcctggactggagtgcagtggagcaatctcggttcactgcaaactccaccttccaggtgtcaccacgcccagctaatttttttgtatttttagtaaagatgtggttttctcatgttggctaggctggtcttgaacttctggcctcacgtgatccgcccacctaggcctcccaaagtgttgggattacaggcgtgagccactgtgcccggtcttaggcaagcttcttaatctctctgtatttcagttttctcatcataataaatgaggacaataatagtatcaacctcacaggtttgttgtgaagatttaaagagttacttcatgtaagtgcttatgacagtacctggcatgtggtgagtgcttattaaattttaactgttgttaataacagttgccccaaattatgtaatttatattatttttacattgcttatagcaccagatttgactagaacagtaagcttttctgtttatctgaaaagaagttatacaccatcagaattggaaggaaatgctgttgtttcttattccagaccaacagatcgaaatcctgatggcattccgcgagttatccaatgtaaatttagacttcccctaaagttaatttgcctaccaggtcagccttcaaaaactgcaagccacaaaattactattgataccaacaaatctccagtcagtcttcttagtctcttcccaggttttgccagtcagtcagatgatgatcaggtgaatgtaatgggttttcacttcttaggaggtgctcgaattactgttcttgcttccaaaacttctcaacgatatcgcattcagagtgaacaatttgaagatctttggctcataaccaatgagcttattcttcgccttcaagaatattttgaaaaacagggagtcaaagattttgcatgttctttttcgggatctataccccttcaagaatattttgagttgattgatcatcattttgagctacggataaatggtgaaaaattagaagaactcttatctgagagagctgtacaatttcgggccattcaacgccggctactagcaagattcaaagataaaactcctgcccctcttcaacacctggacaccttgttagatggaacctacaagcaggtaattgctctagcagatgcagtggaggaaaaccaaggcaatctgttccagtcattcaccaggctgaagagtgccacccatttggtgattctgctgatcgcgctgtggcagaagcttagtgctgaccaggttgctattctggaagcggcatttctgccgctacaagaagacactcaagaattgggctgggaagaaacggtggatgccgccatttcccacctgttgaagacttgcctgtcgaagagttctaaggagcaggctttgaacctcaacagccagctgaacatacccaaagacacaagccaactgaagaaacatatcaccttgctctgcgatagattatccaaaggtggccgtctctgcctaagtaccgatgcagcagccccacagaccatggtcatgccaggtggttgtactacaatcccagagtcagacctagaagaaagatcagtagaacaagactctacagaactgtttaccaaccacagacatctcactgcagagacacccaggcctgaagtttcacccctccaaggagtctcggaataattcaagtagagttgtttggttgagaggaacatccccatctcaaggccgaacctgtgtgaacctcatgccaagcacagatatagggctggcgcaggtgcttcctaaagctcaccttcctggagatgacatgcatagaaagaggggttgggactttttacttcactaggagaacttgtaacaccatggggaagtcagctgaaacttgtcttgttttgccaggaaaggaagtagttgcctttggtcatccatctgctaatagtcacagaatacagtgaaatgacatagttttgggttagattttataatgcaaagattcagatccaaaataatttcataccccattttttcacagaattcttatatagtaaatgtatcaagtttaataaagcatctcattgtcaaat

SEQ ID NO: 6124 - protein, 310 aa, Homo sapiens [sequence omitted]

SEQ ID NO: 6125 - DNA, 2890 bp, Homo sapiens
ctttctaaaatacattctaaataatttattttttccatttattatggctctctaatacaggttgggggccagatatgttaacatagatgagcacgcacaatctgttaagtggctactgtgtaacactcctcatccattttctccttcagtctatgttctacccatgataaattgctattttcctcccaaattctcttgcccttttgtgtaccgttttctctgttcatgctgtctgttcctcgaagtaaagaacagcagtggtgtagaatgccagtttctttgtaccttgttctggagttaattcctagtagctgtgttaccttaggcaagcttctttttttgtttttgtttctgtttttgagacagagtctcactctgttgcctggactggagtgcagtggagcaatctcggttcactgcaaactccaccttccaggtgtcaccacgcccagctaatttttttgtatttttagtaaagatgtggttttctcatgttggctaggctggtcttgaacttctggcctcacgtgatccgcccacctaggcctcccaaagtgttgggattacaggcgtgagccactgtgcccggtcttaggcaagcttcttaatctctctgtatttcagttttctcatcataataaatgaggacaataatagtatcaacctcacaggtttgttgtgaagatttaaagagttacttcatgtaagtgcttatgacagtacctggcatgtggtgagtgcttattaaattttaactgttgttaataacagttgccccaaattatgtaatttatattatttttacattgcttatagcaccagatttgactagaacagtaagcttttctgtttatctgaaaagaagttatacaccatcagaattggaaggaaatgctgttgtttcttattccagaccaacagatcgaaatcctgatggcattccgcgagttatccaatgtaaatttagacttcccctaaagttaatttgcctaccaggtcagccttcaaaaactgcaagccacaaaattactattgataccaacaaatctccagtcagtcttcttagtctcttcccaggttttgccagtcagtcagatgatgatcaggtgaatgtaatgggttttcacttcttaggaggtgctcgaattactgttcttgcttccaaaacttctcaacgatatcgcattcagagtgaacaatttgaagatctttggctcataaccaatgagcttattcttcgccttcaagaatattttgaaaaacagggagtcaaagattttgcatgttctttttcgggatctataccccttcaagaatattttgagttgattgatcatcattttgagctacggataaatggtgaaaaattagaagaactcttatctgagagagctgtacaatttcgggccattcaacgccggctactagcaagattcaaagataaaactcctgcccctcttcaacacctggacaccttgttagatggaacctacaagcaggtaattgctctagcagatgcagtggaggaaaaccaaggcaatctgttccagtcattcaccaggctgaagagtgccacccatttggtgattctgctgatcgcgctgtggcagaagcttagtgctgaccaggttgctattctggaagcggcatttctgccgctacaagaagacactcaagaattgggctgggaagaaacggtggatgccgccatttcccacctgttgaagacttgcctgtcgaagagttctaaggagcaggctttgaacctcaacagccagctgaacatacccaaagacacaagccaactgaagaaacatatcaccttgctctgcgatagattatccaaaggtggccgtctctgcctaagtaccgatgcagcagccccacagaccatggtcatgccaggtggttgtactacaatcccagagtcagacctagaagaaagatcagtagaacaagactctacagaactgtttaccaaccacagacatctcactgcagagacacccaggcctgaagtttcacccctccaaggagtctcggaataattcaagtagagttgtttggttgagaggaacatccccatctcaaggccgaacctgtgtgaacctcatgccaagcacagatatagggctggcgcaggtgcttcctaaagctcaccttcctggagatgacatgcatagaaagaggggttgggactttttacttcactaggagaacttgtaacaccatggggaagtcagctgaaacttgtcttgttttgccaggaaaggaagtagttgcctttggtcatccatctgctaatagtcacagaatacagtgaaatgacatagttttgggttagattttataatgcaaagattcagatccaaaataatttcataccccattttttcacagaattcttatatagtaaatgtatcaagtttaataaagcatctcattgtcaaataatatcttggattttatttataattagagggatttatgagtgattgctctacattatttcttcaaaggaaaggaaaggaattgaagactttgctactctctggtaagacttgaatgtgattattttataaataaaagaaccactatgaaactttcatgtgatttgttctattaagctaaacgtggaagaagggaagttttctagtattgtatgaaaatgtttaaatattttcaaggaagctagtacattaacatccccttttcattaccccattgggtggcaccttttaaaaatccaggttattaaaggattcacactttattacagttaaaatttaaggtttttatgtgtaagaagtgaaagaaactttgctaatttcaagttcgaattacagttgtgagattgatttatttaaataaaaatatgcctttgccagtt

SEQ ID NO: 6126 - protein, 310 aa, Homo sapiens [sequence omitted]

SEQ ID NO: 6127 - DNA, 807 bp, Homo sapiens
ggcatttctgccgctacaagaagacactcaagaattgggctgggaagaaacggtggatgccgccatttcccacctgttgaagacttgcctgtcgaagagttctaaggagcaggctttgaacctcaacagccagctgaacatacccaaagacacaagccaactgaagaaacatatcaccttgctctgcgatagattatccaaaggtggccgtctctgcctaagtaccgatgcagcagccccacagaccatggtcatgccaggtggttgtactacaatcccagagtcagacctagaagaaagatcagtagaacaagactctacagaactgtttaccaaccacagacatctcactgcagagacacccaggcctgaagtttcacccctccaaggagtctcggaataattcaagtagagttgtttggttgagaggaacatccccatctcaaggccgaacctgtgtgaacctcatgccaagcacagatatagggctggcgcaggtgcttcctaaagctcaccttcctggagatgacatgcatagaaagaggggttgggactttttacttcactaggagaacttgtaacaccatggggaagtcagctgaaacttgtcttgttttgccaggaaaggaagtagttgcctttggtcatccatctgctaatagtcacagaatacagtgaaatgacatagttttgggttagattttataatgcaaagattcagatccaaaataatttcataccccattttttcacagaattcttatatagtaaatgtatcaagtttaataaagcatctcattgtcaaat

SEQ ID NO: 6128 - protein, 51 aa, Homo sapiens
MVMPGGCTTIPESDLEERSVEQDSTELFTNHRHLTAETPRPEVSPLQGVSE

SEQ ID NO: 6129 - DNA, 1245 bp, Homo sapiens
ggcatttctgccgctacaagaagacactcaagaattgggctgggaagaaacggtggatgccgccatttcccacctgttgaagacttgcctgtcgaagagttctaaggagcaggctttgaacctcaacagccagctgaacatacccaaagacacaagccaactgaagaaacatatcaccttgctctgcgatagattatccaaaggtggccgtctctgcctaagtaccgatgcagcagccccacagaccatggtcatgccaggtggttgtactacaatcccagagtcagacctagaagaaagatcagtagaacaagactctacagaactgtttaccaaccacagacatctcactgcagagacacccaggcctgaagtttcacccctccaaggagtctcggaataattcaagtagagttgtttggttgagaggaacatccccatctcaaggccgaacctgtgtgaacctcatgccaagcacagatatagggctggcgcaggtgcttcctaaagctcaccttcctggagatgacatgcatagaaagaggggttgggactttttacttcactaggagaacttgtaacaccatggggaagtcagctgaaacttgtcttgttttgccaggaaaggaagtagttgcctttggtcatccatctgctaatagtcacagaatacagtgaaatgacatagttttgggttagattttataatgcaaagattcagatccaaaataatttcataccccattttttcacagaattcttatatagtaaatgtatcaagtttaataaagcatctcattgtcaaataatatcttggattttatttataattagagggatttatgagtgattgctctacattatttcttcaaaggaaaggaaaggaattgaagactttgctactctctggtaagacttgaatgtgattattttataaataaaagaaccactatgaaactttcatgtgatttgttctattaagctaaacgtggaagaagggaagttttctagtattgtatgaaaatgtttaaatattttcaaggaagctagtacattaacatccccttttcattaccccattgggtggcaccttttaaaaatccaggttattaaaggattcacactttattacagttaaaatttaaggtttttatgtgtaagaagtgaaagaaactttgctaatttcaagttcgaattacagttgtgagattgatttatttaaataaaaatatgcctttgccagtt

SEQ ID NO: 6130 - protein, 51 aa, Homo sapiens; identical to SEQ ID NO: 6128

SEQ ID NO: 6131 - DNA, 1037 bp, Homo sapiens
gatctccaacccttggagggacagactgttaacatcctcatttgtagatgaggatgaggctaagaggaattaagtaacttgctcaaggtcaaacaggtgacagagccagaattccaaaccagcctagtctggaatattccagataccacactcttcacaggttcccaacacttgaacataaacactcaataatctgtataatacatcaagtgcccacttttcttattgtcatctttgtattaattcaaaattggcttttgtatccagggctgggaagaaacggtggatgccgccatttcccacctgttgaagacttgcctgtcgaagagttctaaggagcaggctttgaacctcaacagccagctgaacatacccaaagacacaagccaactgaagaaacatatcaccttgctctgcgatagattatccaaaggtggccgtctctgcctaagtaccgatgcagcagccccacagaccatggtcatgccaggtggttgtactacaatcccagagtcagacctagaagaaagatcagtagaacaagactctacagaactgtttaccaaccacagacatctcactgcagagacacccaggcctgaagtttcacccctccaaggagtctcggaataattcaagtagagttgtttggttgagaggaacatccccatctcaaggccgaacctgtgtgaacctcatgccaagcacagatatagggctggcgcaggtgcttcctaaagctcaccttcctggagatgacatgcatagaaagaggggttgggactttttacttcactaggagaacttgtaacaccatggggaagtcagctgaaacttgtcttgttttgccaggaaaggaagtagttgcctttggtcatccatctgctaatagtcacagaatacagtgaaatgacatagttttgggttagattttataatgcaaagattcagatccaaaataatttcataccccattttttcacagaattcttatatagtaaatgtatcaagtttaataaagcatctcattgtcaaat

SEQ ID NO: 6132 - protein, 51 aa, Homo sapiens; identical to SEQ ID NO: 6128

SEQ ID NO: 6133 - DNA, 1475 bp, Homo sapiens
gatctccaacccttggagggacagactgttaacatcctcatttgtagatgaggatgaggctaagaggaattaagtaacttgctcaaggtcaaacaggtgacagagccagaattccaaaccagcctagtctggaatattccagataccacactcttcacaggttcccaacacttgaacataaacactcaataatctgtataatacatcaagtgcccacttttcttattgtcatctttgtattaattcaaaattggcttttgtatccagggctgggaagaaacggtggatgccgccatttcccacctgttgaagacttgcctgtcgaagagttctaaggagcaggctttgaacctcaacagccagctgaacatacccaaagacacaagccaactgaagaaacatatcaccttgctctgcgatagattatccaaaggtggccgtctctgcctaagtaccgatgcagcagccccacagaccatggtcatgccaggtggttgtactacaatcccagagtcagacctagaagaaagatcagtagaacaagactctacagaactgtttaccaaccacagacatctcactgcagagacacccaggcctgaagtttcacccctccaaggagtctcggaataattcaagtagagttgtttggttgagaggaacatccccatctcaaggccgaacctgtgtgaacctcatgccaagcacagatatagggctggcgcaggtgcttcctaaagctcaccttcctggagatgacatgcatagaaagaggggttgggactttttacttcactaggagaacttgtaacaccatggggaagtcagctgaaacttgtcttgttttgccaggaaaggaagtagttgcctttggtcatccatctgctaatagtcacagaatacagtgaaatgacatagttttgggttagattttataatgcaaagattcagatccaaaataatttcataccccattttttcacagaattcttatatagtaaatgtatcaagtttaataaagcatctcattgtcaaataatatcttggattttatttataattagagggatttatgagtgattgctctacattatttcttcaaaggaaaggaaaggaattgaagactttgctactctctggtaagacttgaatgtgattattttataaataaaagaaccactatgaaactttcatgtgatttgttctattaagctaaacgtggaagaagggaagttttctagtattgtatgaaaatgtttaaatattttcaaggaagctagtacattaacatccccttttcattaccccattgggtggcaccttttaaaaatccaggttattaaaggattcacactttattacagttaaaatttaaggtttttatgtgtaagaagtgaaagaaactttgctaatttcaagttcgaattacagttgtgagattgatttatttaaataaaaatatgcctttgccagtt

SEQ ID NO: 6134 - protein, 51 aa, Homo sapiens; identical to SEQ ID NO: 6128

SEQ ID NO: 6135 - DNA, 633 bp, Homo sapiens
ggaatgagaaagaggaaaactctgagaaagcagccacacagaagccaagcgaagggaggatttccaaggtcagcagatggagcaaggtggttgtactacaatcccagagtcagacctagaagaaagatcagtagaacaagactctacagaactgtttaccaaccacagacatctcactgcagagacacccaggcctgaagtttcacccctccaaggagtctcggaataattcaagtagagttgtttggttgagaggaacatccccatctcaaggccgaacctgtgtgaacctcatgccaagcacagatatagggctggcgcaggtgcttcctaaagctcaccttcctggagatgacatgcatagaaagaggggttgggactttttacttcactaggagaacttgtaacaccatggggaagtcagctgaaacttgtcttgttttgccaggaaaggaagtagttgcctttggtcatccatctgctaatagtcacagaatacagtgaaatgacatagttttgggttagattttataatgcaaagattcagatccaaaataatttcataccccattttttcacagaattcttatatagtaaatgtatcaagtttaataaagcatctcattgtcaaat

SEQ ID NO: 6136 - protein, 64 aa, Homo sapiens
MRKRKTLRKQPHRSQAKGGFPRSADGARWLYYNPRVRPRRKISRTRLYRTVYQPQTSHCRDTQA

SEQ ID NO: 6137 - DNA, 1071 bp, Homo sapiens
ggaatgagaaagaggaaaactctgagaaagcagccacacagaagccaagcgaagggaggatttccaaggtcagcagatggagcaaggtggttgtactacaatcccagagtcagacctagaagaaagatcagtagaacaagactctacagaactgtttaccaaccacagacatctcactgcagagacacccaggcctgaagtttcacccctccaaggagtctcggaataattcaagtagagttgtttggttgagaggaacatccccatctcaaggccgaacctgtgtgaacctcatgccaagcacagatatagggctggcgcaggtgcttcctaaagctcaccttcctggagatgacatgcatagaaagaggggttgggactttttacttcactaggagaacttgtaacaccatggggaagtcagctgaaacttgtcttgttttgccaggaaaggaagtagttgcctttggtcatccatctgctaatagtcacagaatacagtgaaatgacatagttttgggttagattttataatgcaaagattcagatccaaaataatttcataccccattttttcacagaattcttatatagtaaatgtatcaagtttaataaagcatctcattgtcaaataatatcttggattttatttataattagagggatttatgagtgattgctctacattatttcttcaaaggaaaggaaaggaattgaagactttgctactctctggtaagacttgaatgtgattattttataaataaaagaaccactatgaaactttcatgtgatttgttctattaagctaaacgtggaagaagggaagttttctagtattgtatgaaaatgtttaaatattttcaaggaagctagtacattaacatccccttttcattaccccattgggtggcaccttttaaaaatccaggttattaaaggattcacactttattacagttaaaatttaaggtttttatgtgtaagaagtgaaagaaactttgctaatttcaagttcgaattacagttgtgagattgatttatttaaataaaaatatgcctttgccagtt

SEQ ID NO: 6138 - protein, 64 aa, Homo sapiens; identical to SEQ ID NO: 6136

SEQ ID NO: 6139 - DNA, 1263 bp, Homo sapiens
atgaaaagttgcgggggccctactgccccgggtgtgtcgctccttcccaaaggtggggcacccgggagcgagcagggtggtggggcgcccctgcgtcccgtttgctgctccctcgctggattggggcacccgggcctgagcgctagtgctgcggcatccccggggctcccccaagaaagggaggaggagccgcgctcgcccggacagtggagacgcgccttctcggctctggtccgcgccctggggccctggcctccctggaggggctggggaactggaagctgggccgagagagttcccgctgcagctatcgcgcagtccctcctgcgcccgggcgcccccagcgggttccgggaggcgcccggtgagcccacgtctgttgcggcggagcgagcgcgctccgggagggccgagagccggcggggctggcaggaggtgaggagtgcgggagtggaggacgctgcggcagcgacagcgacagcccccgaaacagtagcggcagcccgggcggcggctgagcggcagtgcgcagtcggcagcgccgcagctcctctcagtctatctccggctgccgcaacaccccttcctcctggccccctctccggcgctgaggggctgactgctaagccactctctcgggcgcccgcctccctccttcgcggacggtctcccgacacgccggctgagagcccttttcgactgtgagctgcggcagctgagcagaggcggcggcgcgggacctgcagtcgccagggattccctccaggtgacgatgctctggttctccggcgtcggggctctggctgagcgttactgccgccgctcgcctgggattacgtgctgcgtcttgctgctactcaattgctcgggggtccccatgtctctggcttcctccttcttgacaggttctgttgcaaaatgtgaaaatgaaggtgaagtcctccagattccatttatcacagacaacccttgcataatgtgtgtctgcttgaacaaggaagtgacatgtaagagagagaagtgccccgtgctgtcccgagactgtgccctggccatcaagcagaggggagcctgttgtgaacagtgcaaaggtgattgatgtcttggccgtcttctcttctggctgctgcttcaggcatttttatttctctttctctcaccttccttttcactcagcttttggctggggtgcacatgggtggggaggagaagtagggtgtgtgtgtgtgtgtgtgtgtgtatgtgtgtgtttgtgtgtatgtg

SEQ ID NO: 6140 - protein, 234 aa, Homo sapiens
MKSCGGPTAPGVSLLPKGGAPGSEQGGGAPLRPVCCSLAGLGHPGLSASAAASPGLPQEREEEPRSPGQWRRAFSALVRALGPWPPWRGWGTGSWAERVPAAAIAQSLLRPGAPSGFREAPGEPTSVAAERARSGRAESRRGWQEVRSAGVEDAAAATATAPETVAAARAAAERQCAVGSAAAPLSLSPAAATPLPPGPLSGAEGLTAKPLSRAPASLLRGRSPDTPAESPFRL

SEQ ID NO: 6141 - DNA, 4068 bp, Homo sapiens
atgaaaagttgcgggggccctactgccccgggtgtgtcgctccttcccaaaggtggggcacccgggagcgagcagggtggtggggcgcccctgcgtcccgtttgctgctccctcgctggattggggcacccgggcctgagcgctagtgctgcggcatccccggggctcccccaagaaagggaggaggagccgcgctcgcccggacagtggagacgcgccttctcggctctggtccgcgccctggggccctggcctccctggaggggctggggaactggaagctgggccgagagagttcccgctgcagctatcgcgcagtccctcctgcgcccgggcgcccccagcgggttccgggaggcgcccggtgagcccacgtctgttgcggcggagcgagcgcgctccgggagggccgagagccggcggggctggcaggaggtgaggagtgcgggagtggaggacgctgcggcagcgacagcgacagcccccgaaacagtagcggcagcccgggcggcggctgagcggcagtgcgcagtcggcagcgccgcagctcctctcagtctatctccggctgccgcaacaccccttcctcctggccccctctccggcgctgaggggctgactgctaagccactctctcgggcgcccgcctccctccttcgcggacggtctcccgacacgccggctgagagcccttttcgactgtgagctgcggcagctgagcagaggcggcggcgcgggacctgcagtcgccagggattccctccaggtgacgatgctctggttctccggcgtcggggctctggctgagcgttactgccgccgctcgcctgggattacgtgctgcgtcttgctgctactcaattgctcgggggtccccatgtctctggcttcctccttcttgacaggttctgttgcaaaatgtgaaaatgaaggtgaagtcctccagattccatttatcacagacaacccttgcataatgtgtgtctgcttgaacaaggaagtgacatgtaagagagagaagtgccccgtgctgtcccgagactgtgccctggccatcaagcagaggggagcctgttgtgaacagtgcaaaggttgcacctatgaaggaaatacctataacagctccttcaaatggcagagcccggctgagccttgtgttctacgccagtgccaggagggcgttgtcacagagtctggggtgcgctgtgttgttcattgtaaaaaccctttggagcatctgggaatgtgctgccccacatgtccaggctgtgtgtttgagggtgtgcagtatcaagaaggggaggaatttcagccagaaggaagcaaatgtaccaagtgttcctgcactggaggcaggacacaatgtgtgagagaagtctgtcccattctctcctgtccccagcaccttagtcacatacccccaggacagtgctgccccaaatgtttgggtcagaggaaagtgtttgacctcccttttgggagctgcctctttcgaagtgatgtttatgacaatggatcctcatttctgtacgataactgcacagcttgtacctgcagggactctactgtggtttgcaagaggaagtgctcccaccctggtggctgtgaccaaggccaggagggctgttgtgaagagtgcctcctacgagtgcccccagaagacatcaaagtatgcaaatttggcaacaagattttccaggatggagagatgtggtcctctatcaattgtaccatctgtgcttgtgtgaaaggcaggacggagtgtcgcaataagcagtgcattcccatcagtagctgcccacagggcaaaattctcaacagaaaaggatgctgtcctatttgcactgaaaagcccggcgtttgcacggtgtttggagatccccactacaacacttttgacggtcggacatttaactttcaggggacgtgtcagtacgttttgacaaaagactgctcctcccctgcctcgcccttccaggtgctggtgaagaacgacgcccgccggacacgctccttctcgtggaccaagtcggtggagctggtgctgggcgagagcagggtcagcctgcagcagcacctcaccgtgcgctggaacggctcgcgcatcgcgctcccctgccgcgcgccacacttccacatcgacctggatggctacctcttgaaagtgaccaccaaagcaggtttggaaatatcttgggatggagacagttttgtagaagtcatggctgcgccgcatctcaagggcaagctctgtggtctttgtggcaactacaatggacataaacgtgatgacttaattggtggagatggaaacttcaagtttgatgtggatgactttgctgaatcttggagggtggagtccaatgagttctgcaacagacctcagagaaagccagtgcctgaactgtgtcaagggacagtcaaggtaaagctccgggcccatcgagaatgccaaaagctcaaatcctgggagtttcagacctgccactcgactgtggactacgccactttctaccggtcctgtgtgacagacatgtgtgaatgtccagtccataaaaactgttattgcgagtcatttttggcatatacccgggcctgccagagagagggcatcaaagtccactgggagcctcagcagaattgtgcagccacccagtgtaagcatggtgctgtgtacgatacctgtggtccgggatgtatcaagacgtgtgacaactggaatgaaattggtccatgcaacaagccgtgcgttgctgggtgccactgtccagcaaacttggtccttcacaagggaaggtgcatcaagccagtcctttgtccccagcggtgacctttgtttcgatccttaagactctgaaatctggtgactttgacactgaagcggaagagccaatgaaggactgcagtatttgtgtgcccgattctgtaaacacacacacacagagtatatatgtgtatatatatatagatatattcaaaaacattgcatcatttatatgaactatagggggattattatatgtatattttttgctataagacatgtattgtttctaggatcctaacctgtaagccattgaacatgttgtataaatacaccaggtgtttttaatttaataaggtggcatgcagatacattggatagtgttaacatcacatacatttgtcatttttaaggaagttttctaagagccctcaattgcctgcctgtattaattttagttttgagtcaggatttgtaatggagtgggaaatgtgtttctctggagaagggcacatttatctaggggcatttcaggtttccaaagaaaggaatgtatgcctgggaaagacagcaggagattggtgaccggccctaatggtgcatgaaaagcgagtgataggctgttagaatgtattaggtcatgggctaacattatttccaaaattgattggctggttgccaagaaatatatatttgtcactagggcataaccgaagaatcaagtgatttcttgccatccttgcgtagtcctcaagtcttctaatcatctatgtgtgtatgatggatgtgaccatttatatgtcatgtgttgaaattaaagggtgtctggatgccatgttaattttattgagcatgagaaagtatttgaagaaactgttgcacaacatatgatgaaattttgatttctctgaatctcagagtaatttaagatgggcaaatccaatgagttgatgtaacccatctacattttgtggctatttcatgtataaaatgaaaggctttagttatttctagaggagtcccatccaacactatttggcgactgttaatatgttataattattagacagtggaaaagcctttattgactaattgatttaacctcagtccaaagaacagtctctatacttgccctcatttactgataggctgctactagttaccatttgattgtcttgactttcgtcttcagttgaattggtgaaaacatcaacaaaaacaaaacccactgtgtcttaaaataaaatgttctgcattgtagtcaataaagggcttaagatgtaaaacaatgcattttctctctc

SEQ ID NO: 6142 - protein, 685 aa, Homo sapiens; identical to SEQ ID NO: 839

SEQ ID NO: 6143 - DNA, 5499 bp, Homo sapiens
atgaaaagttgcgggggccctactgccccgggtgtgtcgctccttcccaaaggtggggcacccgggagcgagcagggtggtggggcgcccctgcgtcccgtttgctgctccctcgctggattggggcacccgggcctgagcgctagtgctgcggcatccccggggctcccccaagaaagggaggaggagccgcgctcgcccggacagtggagacgcgccttctcggctctggtccgcgccctggggccctggcctccctggaggggctggggaactggaagctgggccgagagagttcccgctgcagctatcgcgcagtccctcctgcgcccgggcgcccccagcgggttccgggaggcgcccggtgagcccacgtctgttgcggcggagcgagcgcgctccgggagggccgagagccggcggggctggcaggaggtgaggagtgcgggagtggaggacgctgcggcagcgacagcgacagcccccgaaacagtagcggcagcccgggcggcggctgagcggcagtgcgcagtcggcagcgccgcagctcctctcagtctatctccggctgccgcaacaccccttcctcctggccccctctccggcgctgaggggctgactgctaagccactctctcgggcgcccgcctccctccttcgcggacggtctcccgacacgccggctgagagcccttttcgactgtgagctgcggcagctgagcagaggcggcggcgcgggacctgcagtcgccagggattccctccaggtgacgatgctctggttctccggcgtcggggctctggctgagcgttactgccgccgctcgcctgggattacgtgctgcgtcttgctgctactcaattgctcgggggtccccatgtctctggcttcctccttcttgacaggttctgttgcaaaatgtgaaaatgaaggtgaagtcctccagattccatttatcacagacaacccttgcataatgtgtgtctgcttgaacaaggaagtgacatgtaagagagagaagtgccccgtgctgtcccgagactgtgccctggccatcaagcagaggggagcctgttgtgaacagtgcaaagtgcttgtctcaagggttttaagggacacagtcctgttcactcttaaatactggagactcccagtattttggttgcacctatgaaggaaatacctataacagctccttcaaatggcagagcccggctgagccttgtgttctacgccagtgccaggagggcgttgtcacagagtctggggtgcgctgtgttgttcattgtaaaaaccctttggagcatctgggaatgtgctgccccacatgtccaggctgtgtgtttgagggtgtgcagtatcaagaaggggaggaatttcagccagaaggaagcaaatgtaccaagtgttcctgcactggaggcaggacacaatgtgtgagagaagtctgtcccattctctcctgtccccagcaccttagtcacatacccccaggacagtgctgccccaaatgtttgggtcagaggaaagtgtttgacctcccttttgggagctgcctctttcgaagtgatgtttatgacaatggatcctcatttctgtacgataactgcacagcttgtacctgcagggactctactgtggtttgcaagaggaagtgctcccaccctggtggctgtgaccaaggccaggagggctgttgtgaagagtgcctcctacgagtgcccccagaagacatcaaagtatgcaaatttggcaacaagattttccaggatggagagatgtggtcctctatcaattgtaccatctgtgcttgtgtgaaaggcaggacggagtgtcgcaataagcagtgcattcccatcagtagctgcccacagggcaaaattctcaacagaaaaggatgctgtcctatttgcactgaaaagcccggcgtttgcacggtgtttggagatccccactacaacacttttgacggtcggacatttaactttcaggggacgtgtcagtacgttttgacaaaagactgctcctcccctgcctcgcccttccaggtgctggtgaagaacgacgcccgccggacacgctccttctcgtggaccaagtcggtggagctggtgctgggcgagagcagggtcagcctgcagcagcacctcaccgtgcgctggaacggctcgcgcatcgcgctcccctgccgcgcgccacacttccacatcgacctggatggctacctcttgaaagtgaccaccaaagcaggtttggaaatatcttgggatggagacagttttgtagaagtcatggctgcgccgcatctcaagggcaagctctgtggtctttgtggcaactacaatggacataaacgtgatgacttaattggtggagatggaaacttcaagtttgatgtggatgactttgctgaatcttggagggtggagtccaatgagttctgcaacagacctcagagaaagccagtgcctgaactgtgtcaagggacagtcaaggtaaagctccgggcccatcgagaatgccaaaagctcaaatcctgggagtttcagacctgccactcgactgtggactacgccactttctaccggtcctgtgtgacagacatgtgtgaatgtccagtccataaaaactgttattgcgagtcatttttggcatatacccgggcctgccagagagagggcatcaaagtccactgggagcctcagcagaattgtgcagccacccagtgtaagcatggtgctgtgtacgatacctgtggtccgggatgtatcaagacgtgtgacaactggaatgaaattggtccatgcaacaagccgtgcgttgctgggtgccactgtccagcaaacttggtccttcacaagggaaggtgcatcaagccagtcctttgtccccagcggtgacctttgtttcgatccttaagactctgaaatctggtgactttgacactgaagcggaagagccaatgaaggactgcagtatttgtgtgcccgattctgtaaacacacacacacagagtatatatgtgtatatatatatagatatattcaaaaacattgcatcatttatatgaactatagggggattattatatgtatattttttgctataagacatgtattgtttctaggatcctaacctgtaagccattgaacatgttgtataaatacaccaggtgtttttaatttaataaggtggcatgcagatacattggatagtgttaacatcacatacatttgtcatttttaaggaagttttctaagagccctcaattgcctgcctgtattaattttagttttgagtcaggatttgtaatggagtgggaaatgtgtttctctggagaagggcacatttatctaggggcatttcaggtttccaaagaaaggaatgtatgcctgggaaagacagcaggagattggtgaccggccctaatggtgcatgaaaagcgagtgataggctgttagaatgtattaggtcatgggctaacattatttccaaaattgattggctggttgccaagaaatatatatttgtcactagggcataaccgaagaatcaagtgatttcttgccatccttgcgtagtcctcaagtcttctaatcatctatgtgtgtatgatggatgtgaccatttatatgtcatgtgttgaaattaaagggtgtctggatgccatgttaattttattgagcatgagaaagtatttgaagaaactgttgcacaacatatgatgaaattttgatttctctgaatctcagagtaatttaagatgggcaaatccaatgagttgatgtaacccatctacattttgtggctatttcatgtataaaatgaaaggctttagttatttctagaggagtcccatccaacactatttggcgactgttaatatgttataattattagacagtggaaaagcctttattgactaattgatttaacctcagtccaaagaacagtctctatacttgccctcatttactgataggctgctactagttaccatttgattgtcttgactttcgtcttcagttgaattggtgaaaacatcaacaaaaacaaaacccactgtgtcttaaaataaaatgttctgcattgtagtcaataaagggcttaagatgtaaaacaatgcattttctctctcaagatgtcctgtgttatactttacaattagttgtatcaacttcagattcattaaattttaacagctgtatttagttataatttttgtatcttacaacagtatatataaagactattattaatagacaaaagcaaacccacgtttttgacaagccagcatattgccaatgctcgtcaaagacatttatgtttcttttacattcatgacagctaaagtattaacttggaatttttttttttttttttgactggaaaatccctagttgtttgaattaactgaataaagtgcagggcgtaatagtgactggctgggggcactgggcctttgtgttttttttcattcctgtgtttggatactaatcaccctcgtatctgcagcctgaggtagtcaggtcattgtttcaatgctgcccttggaaagaagactttgacttaggtgctttgggatctaagtgtggtttgtgactatccccattatttaagcatttgggggtctcacttttgcttatctgtaacacaaagaggccatgtagtatagtgagcagggttgagaatcgggaaaactagacccctgccactaacaggctaggagactttgggcagtaatgggaggcactgagggtttgcaaatactttcctacttgtaatctcattgattccctgctctgccctgacaggaggggtagggaaaatcagttgacgttgcctggtggttcctaccttctgtaaaacgaacagattccttaagattagctttaaatcccttttcagttcactgttggttctcatctttgaaagagggcagcataagggaaatgatggagaagggagaattgtggatggttatttatagctcatgattcatccaaggactgagttattctccccatgaggctaaccggcctctttcccaacacttaatcatggcagccaggatgggtgaatgatgaaagctcttctgcatgagccggtttcatcatcttgggtgggttgattacaagtttgtgtggcattcctttagctggggattagcttaatctctgtacatttttctcatttctaattgaagaagaaagggagggcagagaggacagaaaattacttgggtttactaattcaaagagccatctctgatgggagagggtgaggaaatcagctgaatggttggcctgcatattcttttttaggccacaggctacagctgagcaatggcttagtctaatgattgggcacaatgaggatttaccaagtgcttcaatgagagcagtcctgtttcattcacatgggatgttttcaattggttcttcaactaagctcttgcagagtgagatgacttgaaataaaaatgttctatgaatattg

SEQ ID NO: 6144 - protein, 528 aa, Homo sapiens
MCCPTCPGCVFEGVQYQEGEEFQPEGSKCTKCSCTGGRTQCVREVCPILSCPQHLSHIPPGQCCPKCLGQRKVFDLPFGSCLFRSDVYDNGSSFLYDNCTACTCRDSTVVCKRKCSHPGGCDQGQEGCCEECLLRVPPEDIKVCKFGNKIFQDGEMWSSINCTICACVKGRTECRNKQCIPISSCPQGKILNRKGCCPICTEKPGVCTVFGDPHYNTFDGRTFNFQGTCQYVLTKDCSSPASPFQVLVKNDARRTRSFSWTKSVELVLGESRVSLQQHLTVRWNGSRIALPCRAPHFHIDLDGYLLKVTTKAGLEISWDGDSFVEVMAAPHLKGKLCGLCGNYNGHKRDDLIGGDGNFKFDVDDFAESWRVESNEFCNRPQRKPVPELCQGTVKVKLRAHRECQKLKSWEFQTCHSTVDYATFYRSCVTDMCECPVHKNCYCESFLAYTRACQREGIKVHWEPQQNCAATQCKHGAVYDTCGPGCIKTCDNWNEIGPCNKPCVAGCHCPANLVLHKGRCIKPVLCPQR

SEQ ID NO: 6145 - DNA, 5329 bp, Homo sapiens
atgaaaagttgcgggggccctactgccccgggtgtgtcgctccttcccaaaggtggggcacccgggagcgagcagggtggtggggcgcccctgcgtcccgtttgctgctccctcgctggattggggcacccgggcctgagcgctagtgctgcggcatccccggggctcccccaagaaagggaggaggagccgcgctcgcccggacagtggagacgcgccttctcggctctggtccgcgccctggggccctggcctccctggaggggctggggaactggaagctgggccgagagagttcccgctgcagctatcgcgcagtccctcctgcgcccgggcgcccccagcgggttccgggaggcgcccggtgagcccacgtctgttgcggcggagcgagcgcgctccgggagggccgagagccggcggggctggcaggaggtgaggagtgcgggagtggaggacgctgcggcagcgacagcgacagcccccgaaacagtagcggcagcccgggcggcggctgagcggcagtgcgcagtcggcagcgccgcagctcctctcagtctatctccggctgccgcaacaccccttcctcctggccccctctccggcgctgaggggctgactgctaagccactctctcgggcgcccgcctccctccttcgcggacggtctcccgacacgccggctgagagcccttttcgactgtgagctgcggcagctgagcagaggcggcggcgcgggacctgcagtcgccagggattccctccaggtgacgatgctctggttctccggcgtcggggctctggctgagcgttactgccgccgctcgcctgggattacgtgctgcgtcttgctgctactcaattgctcgggggtccccatgtctctggcttcctccttcttgacaggttctgttgcaaaatgtgaaaatgaaggtgaagtcctccagattccatttatcacagacaacccttgcataatgtgtgtctgcttggttgcacctatgaaggaaatacctataacagctccttcaaatggcagagcccggctgagccttgtgttctacgccagtgccaggagggcgttgtcacagagtctggggtgcgctgtgttgttcattgtaaaaaccctttggagcatctgggaatgtgctgccccacatgtccaggctgtgtgtttgagggtgtgcagtatcaagaaggggaggaatttcagccagaaggaagcaaatgtaccaagtgttcctgcactggaggcaggacacaatgtgtgagagaagtctgtcccattctctcctgtccccagcaccttagtcacatacccccaggacagtgctgccccaaatgtttgggtcagaggaaagtgtttgacctcccttttgggagctgcctctttcgaagtgatgtttatgacaatggatcctcatttctgtacgataactgcacagcttgtacctgcagggactctactgtggtttgcaagaggaagtgctcccaccctggtggctgtgaccaaggccaggagggctgttgtgaagagtgcctcctacgagtgcccccagaagacatcaaagtatgcaaatttggcaacaagattttccaggatggagagatgtggtcctctatcaattgtaccatctgtgcttgtgtgaaaggcaggacggagtgtcgcaataagcagtgcattcccatcagtagctgcccacagggcaaaattctcaacagaaaaggatgctgtcctatttgcactgaaaagcccggcgtttgcacggtgtttggagatccccactacaacacttttgacggtcggacatttaactttcaggggacgtgtcagtacgttttgacaaaagactgctcctcccctgcctcgcccttccaggtgctggtgaagaacgacgcccgccggacacgctccttctcgtggaccaagtcggtggagctggtgctgggcgagagcagggtcagcctgcagcagcacctcaccgtgcgctggaacggctcgcgcatcgcgctcccctgccgcgcgccacacttccacatcgacctggatggctacctcttgaaagtgaccaccaaagcaggtttggaaatatcttgggatggagacagttttgtagaagtcatggctgcgccgcatctcaagggcaagctctgtggtctttgtggcaactacaatggacataaacgtgatgacttaattggtggagatggaaacttcaagtttgatgtggatgactttgctgaatcttggagggtggagtccaatgagttctgcaacagacctcagagaaagccagtgcctgaactgtgtcaagggacagtcaaggtaaagctccgggcccatcgagaatgccaaaagctcaaatcctgggagtttcagacctgccactcgactgtggactacgccactttctaccggtcctgtgtgacagacatgtgtgaatgtccagtccataaaaactgttattgcgagtcatttttggcatatacccgggcctgccagagagagggcatcaaagtccactgggagcctcagcagaattgtgcagccacccagtgtaagcatggtgctgtgtacgatacctgtggtccgggatgtatcaagacgtgtgacaactggaatgaaattggtccatgcaacaagccgtgcgttgctgggtgccactgtccagcaaacttggtccttcacaagggaaggtgcatcaagccagtcctttgtccccagcggtgacctttgtttcgatccttaagactctgaaatctggtgactttgacactgaagcggaagagccaatgaaggactgcagtatttgtgtgcccgattctgtaaacacacacacacagagtatatatgtgtatatatatatagatatattcaaaaacattgcatcatttatatgaactatagggggattattatatgtatattttttgctataagacatgtattgtttctaggatcctaacctgtaagccattgaacatgttgtataaatacaccaggtgtttttaatttaataaggtggcatgcagatacattggatagtgttaacatcacatacatttgtcatttttaaggaagttttctaagagccctcaattgcctgcctgtattaattttagttttgagtcaggatttgtaatggagtgggaaatgtgtttctctggagaagggcacatttatctaggggcatttcaggtttccaaagaaaggaatgtatgcctgggaaagacagcaggagattggtgaccggccctaatggtgcatgaaaagcgagtgataggctgttagaatgtattaggtcatgggctaacattatttccaaaattgattggctggttgccaagaaatatatatttgtcactagggcataaccgaagaatcaagtgatttcttgccatccttgcgtagtcctcaagtcttctaatcatctatgtgtgtatgatggatgtgaccatttatatgtcatgtgttgaaattaaagggtgtctggatgccatgttaattttattgagcatgagaaagtatttgaagaaactgttgcacaacatatgatgaaattttgatttctctgaatctcagagtaatttaagatgggcaaatccaatgagttgatgtaacccatctacattttgtggctatttcatgtataaaatgaaaggctttagttatttctagaggagtcccatccaacactatttggcgactgttaatatgttataattattagacagtggaaaagcctttattgactaattgatttaacctcagtccaaagaacagtctctatacttgccctcatttactgataggctgctactagttaccatttgattgtcttgactttcgtcttcagttgaattggtgaaaacatcaacaaaaacaaaacccactgtgtcttaaaataaaatgttctgcattgtagtcaataaagggcttaagatgtaaaacaatgcattttctctctcaagatgtcctgtgttatactttacaattagttgtatcaacttcagattcattaaattttaacagctgtatttagttataatttttgtatcttacaacagtatatataaagactattattaatagacaaaagcaaacccacgtttttgacaagccagcatattgccaatgctcgtcaaagacatttatgtttcttttacattcatgacagctaaagtattaacttggaatttttttttttttttttgactggaaaatccctagttgtttgaattaactgaataaagtgcagggcgtaatagtgactggctgggggcactgggcctttgtgttttttttcattcctgtgtttggatactaatcaccctcgtatctgcagcctgaggtagtcaggtcattgtttcaatgctgcccttggaaagaagactttgacttaggtgctttgggatctaagtgtggtttgtgactatccccattatttaagcatttgggggtctcacttttgcttatctgtaacacaaagaggccatgtagtatagtgagcagggttgagaatcgggaaaactagacccctgccactaacaggctaggagactttgggcagtaatgggaggcactgagggtttgcaaatactttcctacttgtaatctcattgattccctgctctgccctgacaggaggggtagggaaaatcagttgacgttgcctggtggttcctaccttctgtaaaacgaacagattccttaagattagctttaaatcccttttcagttcactgttggttctcatctttgaaagagggcagcataagggaaatgatggagaagggagaattgtggatggttatttatagctcatgattcatccaaggactgagttattctccccatgaggctaaccggcctctttcccaacacttaatcatggcagccaggatgggtgaatgatgaaagctcttctgcatgagccggtttcatcatcttgggtgggttgattacaagtttgtgtggcattcctttagctggggattagcttaatctctgtacatttttctcatttctaattgaagaagaaagggagggcagagaggacagaaaattacttgggtttactaattcaaagagccatctctgatgggagagggtgaggaaatcagctgaatggttggcctgcatattcttttttaggccacaggctacagctgagcaatggcttagtctaatgattgggcacaatgaggatttaccaagtgcttcaatgagagcagtcctgtttcattcacatgggatgttttcaattggttcttcaactaagctcttgcagagtgagatgacttgaaataaaaatgttctatgaatattg

SEQ ID NO: 6146 - protein, 528 aa, Homo sapiens; identical to SEQ ID NO: 6144

SEQ ID NO: 6147 - DNA, 5429 bp, Homo sapiens
atgaaaagttgcgggggccctactgccccgggtgtgtcgctccttcccaaaggtggggcacccgggagcgagcagggtggtggggcgcccctgcgtcccgtttgctgctccctcgctggattggggcacccgggcctgagcgctagtgctgcggcatccccggggctcccccaagaaagggaggaggagccgcgctcgcccggacagtggagacgcgccttctcggctctggtccgcgccctggggccctggcctccctggaggggctggggaactggaagctgggccgagagagttcccgctgcagctatcgcgcagtccctcctgcgcccgggcgcccccagcgggttccgggaggcgcccggtgagcccacgtctgttgcggcggagcgagcgcgctccgggagggccgagagccggcggggctggcaggaggtgaggagtgcgggagtggaggacgctgcggcagcgacagcgacagcccccgaaacagtagcggcagcccgggcggcggctgagcggcagtgcgcagtcggcagcgccgcagctcctctcagtctatctccggctgccgcaacaccccttcctcctggccccctctccggcgctgaggggctgactgctaagccactctctcgggcgcccgcctccctccttcgcggacggtctcccgacacgccggctgagagcccttttcgactgtgagctgcggcagctgagcagaggcggcggcgcgggacctgcagtcgccagggattccctccaggtgacgatgctctggttctccggcgtcggggctctggctgagcgttactgccgccgctcgcctgggattacgtgctgcgtcttgctgctactcaattgctcgggggtccccatgtctctggcttcctccttcttgacaggttctgttgcaaaatgtgaaaatgaaggtgaagtcctccagattccatttatcacagacaacccttgcataatgtgtgtctgcttgaacaaggaagtgacatgtaagagagagaagtgccccgtgctgtcccgagactgtgccctggccatcaagcagaggggagcctgttgtgaacagtgcaaaggttgcacctatgaaggaaatacctataacagctccttcaaatggcagagcccggctgagccttgtgttctacgccagtgccaggagggcgttgtcacagagtctggggtgcgctgtgttgttcattgtaaaaaccctttggagcatctgggaatgtgctgccccacatgtccaggctgtgtgtttgagggtgtgcagtatcaagaaggggaggaatttcagccagaaggaagcaaatgtaccaagtgttcctgcactggaggcaggacacaatgtgtgagagaagtctgtcccattctctcctgtccccagcaccttagtcacatacccccaggacagtgctgccccaaatgtttgggtcagaggaaagtgtttgacctcccttttgggagctgcctctttcgaagtgatgtttatgacaatggatcctcatttctgtacgataactgcacagcttgtacctgcagggactctactgtggtttgcaagaggaagtgctcccaccctggtggctgtgaccaaggccaggagggctgttgtgaagagtgcctcctacgagtgcccccagaagacatcaaagtatgcaaatttggcaacaagattttccaggatggagagatgtggtcctctatcaattgtaccatctgtgcttgtgtgaaaggcaggacggagtgtcgcaataagcagtgcattcccatcagtagctgcccacagggcaaaattctcaacagaaaaggatgctgtcctatttgcactgaaaagcccggcgtttgcacggtgtttggagatccccactacaacacttttgacggtcggacatttaactttcaggggacgtgtcagtacgttttgacaaaagactgctcctcccctgcctcgcccttccaggtgctggtgaagaacgacgcccgccggacacgctccttctcgtggaccaagtcggtggagctggtgctgggcgagagcagggtcagcctgcagcagcacctcaccgtgcgctggaacggctcgcgcatcgcgctcccctgccgcgcgccacacttccacatcgacctggatggctacctcttgaaagtgaccaccaaagcaggtttggaaatatcttgggatggagacagttttgtagaagtcatggctgcgccgcatctcaagggcaagctctgtggtctttgtggcaactacaatggacataaacgtgatgacttaattggtggagatggaaacttcaagtttgatgtggatgactttgctgaatcttggagggtggagtccaatgagttctgcaacagacctcagagaaagccagtgcctgaactgtgtcaagggacagtcaaggtaaagctccgggcccatcgagaatgccaaaagctcaaatcctgggagtttcagacctgccactcgactgtggactacgccactttctaccggtcctgtgtgacagacatgtgtgaatgtccagtccataaaaactgttattgcgagtcatttttggcatatacccgggcctgccagagagagggcatcaaagtccactgggagcctcagcagaattgtgcagccacccagtgtaagcatggtgctgtgtacgatacctgtggtccgggatgtatcaagacgtgtgacaactggaatgaaattggtccatgcaacaagccgtgcgttgctgggtgccactgtccagcaaacttggtccttcacaagggaaggtgcatcaagccagtcctttgtccccagcggtgacctttgtttcgatccttaagactctgaaatctggtgactttgacactgaagcggaagagccaatgaaggactgcagtatttgtgtgcccgattctgtaaacacacacacacagagtatatatgtgtatatatatatagatatattcaaaaacattgcatcatttatatgaactatagggggattattatatgtatattttttgctataagacatgtattgtttctaggatcctaacctgtaagccattgaacatgttgtataaatacaccaggtgtttttaatttaataaggtggcatgcagatacattggatagtgttaacatcacatacatttgtcatttttaaggaagttttctaagagccctcaattgcctgcctgtattaattttagttttgagtcaggatttgtaatggagtgggaaatgtgtttctctggagaagggcacatttatctaggggcatttcaggtttccaaagaaaggaatgtatgcctgggaaagacagcaggagattggtgaccggccctaatggtgcatgaaaagcgagtgataggctgttagaatgtattaggtcatgggctaacattatttccaaaattgattggctggttgccaagaaatatatatttgtcactagggcataaccgaagaatcaagtgatttcttgccatccttgcgtagtcctcaagtcttctaatcatctatgtgtgtatgatggatgtgaccatttatatgtcatgtgttgaaattaaagggtgtctggatgccatgttaattttattgagcatgagaaagtatttgaagaaactgttgcacaacatatgatgaaattttgatttctctgaatctcagagtaatttaagatgggcaaatccaatgagttgatgtaacccatctacattttgtggctatttcatgtataaaatgaaaggctttagttatttctagaggagtcccatccaacactatttggcgactgttaatatgttataattattagacagtggaaaagcctttattgactaattgatttaacctcagtccaaagaacagtctctatacttgccctcatttactgataggctgctactagttaccatttgattgtcttgactttcgtcttcagttgaattggtgaaaacatcaacaaaaacaaaacccactgtgtcttaaaataaaatgttctgcattgtagtcaataaagggcttaagatgtaaaacaatgcattttctctctcaagatgtcctgtgttatactttacaattagttgtatcaacttcagattcattaaattttaacagctgtatttagttataatttttgtatcttacaacagtatatataaagactattattaatagacaaaagcaaacccacgtttttgacaagccagcatattgccaatgctcgtcaaagacatttatgtttcttttacattcatgacagctaaagtattaacttggaatttttttttttttttttgactggaaaatccctagttgtttgaattaactgaataaagtgcagggcgtaatagtgactggctgggggcactgggcctttgtgttttttttcattcctgtgtttggatactaatcaccctcgtatctgcagcctgaggtagtcaggtcattgtttcaatgctgcccttggaaagaagactttgacttaggtgctttgggatctaagtgtggtttgtgactatccccattatttaagcatttgggggtctcacttttgcttatctgtaacacaaagaggccatgtagtatagtgagcagggttgagaatcgggaaaactagacccctgccactaacaggctaggagactttgggcagtaatgggaggcactgagggtttgcaaatactttcctacttgtaatctcattgattccctgctctgccctgacaggaggggtagggaaaatcagttgacgttgcctggtggttcctaccttctgtaaaacgaacagattccttaagattagctttaaatcccttttcagttcactgttggttctcatctttgaaagagggcagcataagggaaatgatggagaagggagaattgtggatggttatttatagctcatgattcatccaaggactgagttattctccccatgaggctaaccggcctctttcccaacacttaatcatggcagccaggatgggtgaatgatgaaagctcttctgcatgagccggtttcatcatcttgggtgggttgattacaagtttgtgtggcattcctttagctggggattagcttaatctctgtacatttttctcatttctaattgaagaagaaagggagggcagagaggacagaaaattacttgggtttactaattcaaagagccatctctgatgggagagggtgaggaaatcagctgaatggttggcctgcatattcttttttaggccacaggctacagctgagcaatggcttagtctaatgattgggcacaatgaggatttaccaagtgcttcaatgagagcagtcctgtttcattcacatgggatgttttcaattggttcttcaactaagctcttgcagagtgagatgacttgaaataaaaatgttctatgaatattg

SEQ ID NO: 6148 - protein, 685 aa, Homo sapiens; identical to SEQ ID NO: 839

SEQ ID NO: 6149 - DNA, 738 bp, Homo sapiens
ggacagtggagacgcgccttctcggctctggtccgcgccctggggccctggcctccctggaggggctggggaactggaagctgggccgagagagttcccgctgcagctatcgcgcagtccctcctgcgcccgggcgcccccagcgggttccgggaggcgcccggtgagcccacgtctgttgcggcggagcgagcgcgctccgggagggccgagagccggcggggctggcaggagctctcgggcgcccgcctccctccttcgcggacggtctcccgacacgccggctgagagcccttttcgactgtgagctgcggcagctgagcagaggcggcggcgcgggacctgcagtcgccagggattccctccaggtgacgatgctctggttctccggcgtcggggctctggctgagcgttactgccgccgctcgcctgggattacgtgctgcgtcttgctgctactcaattgctcgggggtccccatgtctctggcttcctccttcttgacaggttctgttgcaaaatgtgaaaatgaaggtgaagtcctccagattccatttatcacagacaacccttgcataatgtgtgtctgcttgcatgagccaactagatggagcaatctgacacaaaacccagggttttatgactgacctagtgcgccagctgcatctggaggaaccagacgcaaacaacgcagagttgagggccaggtgaagcgggatccagctccccacttcaccc

SEQ ID NO: 6150 - protein, 90 aa, Homo sapiens
MLWFSGVGALAERYCRRSPGITCCVLLLLNCSGVPMSLASSFLTGSVAKCENEGEVLQIPFITDNPCIMCVCLHEPTRWSNLTQNPGFYD

SEQ ID NO: 6151 - DNA, 3670 bp, Homo sapiens
ggacagtggagacgcgccttctcggctctggtccgcgccctggggccctggcctccctggaggggctggggaactggaagctgggccgagagagttcccgctgcagctatcgcgcagtccctcctgcgcccgggcgcccccagcgggttccgggaggcgcccggtgagcccacgtctgttgcggcggagcgagcgcgctccgggagggccgagagccggcggggctggcaggagctctcgggcgcccgcctccctccttcgcggacggtctcccgacacgccggctgagagcccttttcgactgtgagctgcggcagctgagcagaggcggcggcgcgggacctgcagtcgccagggattccctccaggtgacgatgctctggttctccggcgtcggggctctggctgagcgttactgccgccgctcgcctgggattacgtgctgcgtcttgctgctactcaattgctcgggggtccccatgtctctggcttcctccttcttgacaggttctgttgcaaaatgtgaaaatgaaggtgaagtcctccagattccatttatcacagacaacccttgcataatgtgtgtctgcttgaacaaggaagtgacatgtaagagagagaagtgccccgtgctgtcccgagactgtgccctggccatcaagcagaggggagcctgttgtgaacagtgcaaaggttgcacctatgaaggaaatacctataacagctccttcaaatggcagagcccggctgagccttgtgttctacgccagtgccaggagggcgttgtcacagagtctggggtgcgctgtgttgttcattgtaaaaaccctttggagcatctgggaatgtgctgccccacatgtccaggctgtgtgtttgagggtgtgcagtatcaagaaggggaggaatttcagccagaaggaagcaaatgtaccaagtgttcctgcactggaggcaggacacaatgtgtgagagaagtctgtcccattctctcctgtccccagcaccttagtcacatacccccaggacagtgctgccccaaatgtttgggtcagaggaaagtgtttgacctcccttttgggagctgcctctttcgaagtgatgtttatgacaatggatcctcatttctgtacgataactgcacagcttgtacctgcagggactctactgtggtttgcaagaggaagtgctcccaccctggtggctgtgaccaaggccaggagggctgttgtgaagagtgcctcctacgagtgcccccagaagacatcaaagtatgcaaatttggcaacaagattttccaggatggagagatgtggtcctctatcaattgtaccatctgtgcttgtgtgaaaggcaggacggagtgtcgcaataagcagtgcattcccatcagtagctgcccacagggcaaaattctcaacagaaaaggatgctgtcctatttgcactgaaaagcccggcgtttgcacggtgtttggagatccccactacaacacttttgacggtcggacatttaactttcaggggacgtgtcagtacgttttgacaaaagactgctcctcccctgcctcgcccttccaggtgctggtgaagaacgacgcccgccggacacgctccttctcgtggaccaagtcggtggagctggtgctgggcgagagcagggtcagcctgcagcagcacctcaccgtgcgctggaacggctcgcgcatcgcgctcccctgccgcgcgccacacttccacatcgacctggatggctacctcttgaaagtgaccaccaaagcaggtttggaaatatcttgggatggagacagttttgtagaagtcatggctgcgccgcatctcaagggcaagctctgtggtctttgtggcaactacaatggacataaacgtgatgacttaattggtggagatggaaacttcaagtttgatgtggatgactttgctgaatcttggagggtggagtccaatgagttctgcaacagacctcagagaaagccagtgcctgaactgtgtcaagggacagtcaaggtaaagctccgggcccatcgagaatgccaaaagctcaaatcctgggagtttcagacctgccactcgactgtggactacgccactttctaccggtcctgtgtgacagacatgtgtgaatgtccagtccataaaaactgttattgcgagtcatttttggcatatacccgggcctgccagagagagggcatcaaagtccactgggagcctcagcagaattgtgcagccacccagtgtaagcatggtgctgtgtacgatacctgtggtccgggatgtatcaagacgtgtgacaactggaatgaaattggtccatgcaacaagccgtgcgttgctgggtgccactgtccagcaaacttggtccttcacaagggaaggtgcatcaagccagtcctttgtccccagcggtgacctttgtttcgatccttaagactctgaaatctggtgactttgacactgaagcggaagagccaatgaaggactgcagtatttgtgtgcccgattctgtaaacacacacacacagagtatatatgtgtatatatatatagatatattcaaaaacattgcatcatttatatgaactatagggggattattatatgtatattttttgctataagacatgtattgtttctaggatcctaacctgtaagccattgaacatgttgtataaatacaccaggtgtttttaatttaataaggtggcatgcagatacattggatagtgttaacatcacatacatttgtcatttttaaggaagttttctaagagccctcaattgcctgcctgtattaattttagttttgagtcaggatttgtaatggagtgggaaatgtgtttctctggagaagggcacatttatctaggggcatttcaggtttccaaagaaaggaatgtatgcctgggaaagacagcaggagattggtgaccggccctaatggtgcatgaaaagcgagtgataggctgttagaatgtattaggtcatgggctaacattatttccaaaattgattggctggttgccaagaaatatatatttgtcactagggcataaccgaagaatcaagtgatttcttgccatccttgcgtagtcctcaagtcttctaatcatctatgtgtgtatgatggatgtgaccatttatatgtcatgtgttgaaattaaagggtgtctggatgccatgttaattttattgagcatgagaaagtatttgaagaaactgttgcacaacatatgatgaaattttgatttctctgaatctcagagtaatttaagatgggcaaatccaatgagttgatgtaacccatctacattttgtggctatttcatgtataaaatgaaaggctttagttatttctagaggagtcccatccaacactatttggcgactgttaatatgttataattattagacagtggaaaagcctttattgactaattgatttaacctcagtccaaagaacagtctctatacttgccctcatttactgataggctgctactagttaccatttgattgtcttgactttcgtcttcagttgaattggtgaaaacatcaacaaaaacaaaacccactgtgtcttaaaataaaatgttctgcattgtagtcaataaagggcttaagatgtaaaacaatgcattttctctctc

SEQ ID NO: 6152 - protein, 685 aa, Homo sapiens; identical to SEQ ID NO: 839

SEQ ID NO: 6153 - DNA, 5031 bp, Homo sapiens
ggacagtggagacgcgccttctcggctctggtccgcgccctggggccctggcctccctggaggggctggggaactggaagctgggccgagagagttcccgctgcagctatcgcgcagtccctcctgcgcccgggcgcccccagcgggttccgggaggcgcccggtgagcccacgtctgttgcggcggagcgagcgcgctccgggagggccgagagccggcggggctggcaggagctctcgggcgcccgcctccctccttcgcggacggtctcccgacacgccggctgagagcccttttcgactgtgagctgcggcagctgagcagaggcggcggcgcgggacctgcagtcgccagggattccctccaggtgacgatgctctggttctccggcgtcggggctctggctgagcgttactgccgccgctcgcctgggattacgtgctgcgtcttgctgctactcaattgctcgggggtccccatgtctctggcttcctccttcttgacaggttctgttgcaaaatgtgaaaatgaaggtgaagtcctccagattccatttatcacagacaacccttgcataatgtgtgtctgcttgaacaaggaagtgacatgtaagagagagaagtgccccgtgctgtcccgagactgtgccctggccatcaagcagaggggagcctgttgtgaacagtgcaaaggttgcacctatgaaggaaatacctataacagctccttcaaatggcagagcccggctgagccttgtgttctacgccagtgccaggagggcgttgtcacagagtctggggtgcgctgtgttgttcattgtaaaaaccctttggagcatctgggaatgtgctgccccacatgtccaggctgtgtgtttgagggtgtgcagtatcaagaaggggaggaatttcagccagaaggaagcaaatgtaccaagtgttcctgcactggaggcaggacacaatgtgtgagagaagtctgtcccattctctcctgtccccagcaccttagtcacatacccccaggacagtgctgccccaaatgtttgggtcagaggaaagtgtttgacctcccttttgggagctgcctctttcgaagtgatgtttatgacaatggatcctcatttctgtacgataactgcacagcttgtacctgcagggactctactgtggtttgcaagaggaagtgctcccaccctggtggctgtgaccaaggccaggagggctgttgtgaagagtgcctcctacgagtgcccccagaagacatcaaagtatgcaaatttggcaacaagattttccaggatggagagatgtggtcctctatcaattgtaccatctgtgcttgtgtgaaaggcaggacggagtgtcgcaataagcagtgcattcccatcagtagctgcccacagggcaaaattctcaacagaaaaggatgctgtcctatttgcactgaaaagcccggcgtttgcacggtgtttggagatccccactacaacacttttgacggtcggacatttaactttcaggggacgtgtcagtacgttttgacaaaagactgctcctcccctgcctcgcccttccaggtgctggtgaagaacgacgcccgccggacacgctccttctcgtggaccaagtcggtggagctggtgctgggcgagagcagggtcagcctgcagcagcacctcaccgtgcgctggaacggctcgcgcatcgcgctcccctgccgcgcgccacacttccacatcgacctggatggctacctcttgaaagtgaccaccaaagcaggtttggaaatatcttgggatggagacagttttgtagaagtcatggctgcgccgcatctcaagggcaagctctgtggtctttgtggcaactacaatggacataaacgtgatgacttaattggtggagatggaaacttcaagtttgatgtggatgactttgctgaatcttggagggtggagtccaatgagttctgcaacagacctcagagaaagccagtgcctgaactgtgtcaagggacagtcaaggtaaagctccgggcccatcgagaatgccaaaagctcaaatcctgggagtttcagacctgccactcgactgtggactacgccactttctaccggtcctgtgtgacagacatgtgtgaatgtccagtccataaaaactgttattgcgagtcatttttggcatatacccgggcctgccagagagagggcatcaaagtccactgggagcctcagcagaattgtgcagccacccagtgtaagcatggtgctgtgtacgatacctgtggtccgggatgtatcaagacgtgtgacaactggaatgaaattggtccatgcaacaagccgtgcgttgctgggtgccactgtccagcaaacttggtccttcacaagggaaggtgcatcaagccagtcctttgtccccagcggtgacctttgtttcgatccttaagactctgaaatctggtgactttgacactgaagcggaagagccaatgaaggactgcagtatttgtgtgcccgattctgtaaacacacacacacagagtatatatgtgtatatatatatagatatattcaaaaacattgcatcatttatatgaactatagggggattattatatgtatattttttgctataagacatgtattgtttctaggatcctaacctgtaagccattgaacatgttgtataaatacaccaggtgtttttaatttaataaggtggcatgcagatacattggatagtgttaacatcacatacatttgtcatttttaaggaagttttctaagagccctcaattgcctgcctgtattaattttagttttgagtcaggatttgtaatggagtgggaaatgtgtttctctggagaagggcacatttatctaggggcatttcaggtttccaaagaaaggaatgtatgcctgggaaagacagcaggagattggtgaccggccctaatggtgcatgaaaagcgagtgataggctgttagaatgtattaggtcatgggctaacattatttccaaaattgattggctggttgccaagaaatatatatttgtcactagggcataaccgaagaatcaagtgatttcttgccatccttgcgtagtcctcaagtcttctaatcatctatgtgtgtatgatggatgtgaccatttatatgtcatgtgttgaaattaaagggtgtctggatgccatgttaattttattgagcatgagaaagtatttgaagaaactgttgcacaacatatgatgaaattttgatttctctgaatctcagagtaatttaagatgggcaaatccaatgagttgatgtaacccatctacattttgtggctatttcatgtataaaatgaaaggctttagttatttctagaggagtcccatccaacactatttggcgactgttaatatgttataattattagacagtggaaaagcctttattgactaattgatttaacctcagtccaaagaacagtctctatacttgccctcatttactgataggctgctactagttaccatttgattgtcttgactttcgtcttcagttgaattggtgaaaacatcaacaaaaacaaaacccactgtgtcttaaaataaaatgttctgcattgtagtcaataaagggcttaagatgtaaaacaatgcattttctctctcaagatgtcctgtgttatactttacaattagttgtatcaacttcagattcattaaattttaacagctgtatttagttataatttttgtatcttacaacagtatatataaagactattattaatagacaaaagcaaacccacgtttttgacaagccagcatattgccaatgctcgtcaaagacatttatgtttcttttacattcatgacagctaaagtattaacttggaatttttttttttttttttgactggaaaatccctagttgtttgaattaactgaataaagtgcagggcgtaatagtgactggctgggggcactgggcctttgtgttttttttcattcctgtgtttggatactaatcaccctcgtatctgcagcctgaggtagtcaggtcattgtttcaatgctgcccttggaaagaagactttgacttaggtgctttgggatctaagtgtggtttgtgactatccccattatttaagcatttgggggtctcacttttgcttatctgtaacacaaagaggccatgtagtatagtgagcagggttgagaatcgggaaaactagacccctgccactaacaggctaggagactttgggcagtaatgggaggcactgagggtttgcaaatactttcctacttgtaatctcattgattccctgctctgccctgacaggaggggtagggaaaatcagttgacgttgcctggtggttcctaccttctgtaaaacgaacagattccttaagattagctttaaatcccttttcagttcactgttggttctcatctttgaaagagggcagcataagggaaatgatggagaagggagaattgtggatggttatttatagctcatgattcatccaaggactgagttattctccccatgaggctaaccggcctctttcccaacacttaatcatggcagccaggatgggtgaatgatgaaagctcttctgcatgagccggtttcatcatcttgggtgggttgattacaagtttgtgtggcattcctttagctggggattagcttaatctctgtacatttttctcatttctaattgaagaagaaagggagggcagagaggacagaaaattacttgggtttactaattcaaagagccatctctgatgggagagggtgaggaaatcagctgaatggttggcctgcatattcttttttaggccacaggctacagctgagcaatggcttagtctaatgattgggcacaatgaggatttaccaagtgcttcaatgagagcagtcctgtttcattcacatgggatgttttcaattggttcttcaactaagctcttgcagagtgagatgacttgaaataaaaatgttctatgaatattg

SEQ ID NO: 6154 - protein, 685 aa, Homo sapiens; identical to SEQ ID NO: 839

SEQ ID NO: 6155 - DNA, 6839 bp, Homo sapiens
ggggatgcaagcgggaggataaagcgatgaagtgtgctgcgttaccgcgcatcaggcgctgttgttggagccggaacaccgtgcgactctgaccgaaccggccccctcctcgcgcacacactcgccgagccgcgcgcgcccctccgccgtgacagtggccgtggcctccgctctctcggggcacccggcagccagagcgcagcgagagcgggcggtcgccagggtcccctccccagccagtcccaggcgcccggtgcactatgcggggcacgtgcgccccccagctctaatctgcgcgctgacaggagcatgatctgtgcccaggccagggctgccaagatatcaatgctatgttcagcagaaacggatacagcaagagcagcatagttcaaaaattgagggaggcatcttctctcttttcctgggatttaaacgcgatttaggagggcagatgccctacccgaaaaggccaaccgttaaagaccccggcagtgttgtggtccaaggcgtctcaaagcaggtggccagatctgcgtttctcatcagcagactcactccggctgtggctattacggaattgatgcgcgtacacgtggtgggtcattatgctgctgcacctgtgtagtgtgaagaatctgtaccagaacaggtttttaggcctggccgccatggcgtctccttctagaaactcccagagccgacgccggtgcaaggagccgctccgatacagctacaaccccgaccagttccacaacatggacctcaggggcggcccccacgatggcgtcaccattccccgctccaccagcgacactgacctggtcacctcggacagccgctccacgctcatggtcagcagctcctactattccatcgggcactctcaggacctggtcatccactgggacataaaggaggaagtggacgctggggactggattggcatgtacctcattgatgaggtcttgtccgaaaactttctggactataaaaaccgtggagtcaatggttctcatcggggccagatcatctggaagatcgatgccagctcgtactttgtggaacctgaaactaagatctgcttcaaatactaccatggagtgagtggggccctgcgagcaaccacccccagtgtcacggtcaaaaactcggcagctcctatttttaaaagcattggtgctgatgagaccgtccaaggacaaggaagtcggaggctgatcagcttctctctctcagatttccaagccatggggttgaagaaagggatgtttttcaacccagacccttatctgaagatttccattcagcctgggaaacacagcatcttccccgccctccctcaccatggacaggagaggagatccaagatcataggcaacaccgtgaaccccatctggcaggccgagcaattcagttttgtgtccttgcccactgacgtgctggaaattgaggtgaaggacaagtttgccaagagccgccccatcatcaagcgcttcttgggaaagctgtcgatgcccgttcaaagactcctggagagacacgccataggggatagggtggtcagctacacacttggccgcaggcttccaacagatcatgtgagtggacagctgcaattccgatttgagatcacttcctccatccacccagatgatgaggagatttccctgagtaccgagcctgagtcagcccaaattcaggacagccccatgaacaacctgatggaaagcggcagtggggaacctcggtctgaggcaccagagtcctctgagagctggaagccagagcagctgggtgagggcagtgtccccgatggtccagggaaccaaagcatagagctttccagaccagctgaggaagcagcagtcatcacggaggcaggagaccagggcatggtctctgtgggacctgaaggggctggggagctcctggcccaggtgcaaaaggacatccagcctgcccccagtgcagaagagctggccgagcagctggacctgggtgaggaggcatcagcactgctgctggaagacggtgaagccccagccagcaccaaggaggagcccttggaggaggaagcaacgacccagagccgggctggaagggaagaagaggagaaggagcaggaggaggagggagatgtgtctaccctggagcagggagagggcaggctgcagctgcgggcctcggtgaagagaaaaagcaggccctgctccttgcctgtgtccgagctggagacggtgatcgcgtcagcctgcggggaccccgagaccccgcggacacactacatccgcatccacaccctgctgcacagcatgccctccgcccagggcggcagcgcggcagaggaggaggacggcgcggaggaggagtccaccctcaaggactcctcggagaaggatgggctcagcgaggtggacacggtggccgctgacccgtctgccctggaagaggacagagaagagcccgagggggctactccaggcacggcgcaccctggccactccgggggccacttccccagcctggccaatggcgcggcccaggatggcgacacgcaccccagcaccgggagcgagagcgactccagccccaggcaaggcggggaccacagttgcgagggctgtgacgcgtcctgctgcagcccctcgtgctacagctcctcgtgctacagcacgtcctgctacagcagctcgtgctacagcgcctcgtgctacagcccctcctgctacaacggcaacaggttcgccagccacacgcgcttctcctccgtggacagcgccaagatctccgagagcacggtcttctcctcgcaagacgacgaggaggaggagaacagcgcgttcgagtcggtacccgactccatgcagagccctgagctggacccggagtccacgaacggcgctgggccgtggcaagacgagctggccgcccctagcgggcacgtggaaagaagcccggaaggtctggaatcccccgtggcaggtccaagcaatcggagagaaggtgaatgtcctatactccataattcccagccagtaagccagcttccttccctgaggcctgaacatcatcactacccaacaatcgatgagcctcttccaccaaactgggaagctcgaattgacagccacgggcgggtcttttatgtggaccacgtgaaccgcacaaccacctggcagcgtccgacggcagcagccaccccggatggcatgcggagatcggggtccatccagcagatggagcaactcaacaggcggtatcaaaacattcagcgaaccattgcaacagagaggtccgaagaagattctggcagccaaagctgcgagcaagccccagcaggaggaggcggaggtggagggagtgactcagaagccgaatcttcccagtccagcttagatctaaggagagaagggtcactttctccagtgaactcacaaaaaatcaccttgctgctgcagtccccagcggtcaagttcatcaccaaccccgagttcttcactgtgctacatgccaattatagtgcctaccgagtcttcaccagtagcacctgcttaaagcacatgattctgaaagtccgacgggatgctcgcaattttgaacgctaccagcacaaccgggacttggtgaatttcatcaacatgttcgcagacactcggctggaactgccccggggctgggagatcaaaacggaccagcagggaaagtcttttttcgtggaccacaacagtcgagctaccactttcattgacccccgaatccctcttcagaacggtcgtcttcccaatcatctaactcaccgacagcacctccagaggctccgaagttacagcgctggagaggcctcagaagtttctagaaacagaggagcctctttactggccaggccaggacacagcttagtagctgctattcgaagccaacatcaacatgagtcattgccactggcatataatgacaagattgtggcatttcttcgccagccaaacatttttgaaatgctgcaagagcgtcagccaagcttagcaagaaaccacacactcagggagaaaatccattacattcggactgagggtaatcacgggcttgagaagttgtcctgtgatgcggatctggtcattttgctgagtctctttgaagaagagattatgtcctacgtccccctgcaggctgccttccaccctgggtatagcttctctccccgatgttcaccctgttcttcacctcagaactccccaggtttacagagagccagtgcaagagccccttccccctaccgaagagactttgaggccaagctccgcaatttctacagaaaactggaagccaaaggatttggtcagggtccggggaaaattaagctcattattcgccgggatcatttgttggagggaaccttcaatcaggtgatggcctattcgcggaaagagctccagcgaaacaagctctacgtcacctttgttggagaggagggcctggactacagtggcccctcgcgggagttcttcttccttctgtctcaggagctcttcaacccttactatggactctttgagtactcggcaaatgatacttacacggtgcagatcagccccatgtccgcatttgtagaaaaccatcttgagtggttcaggtttagcggtcgcatcctgggtctggctctgatccatcagtaccttcttgacgctttcttcacgaggcccttctacaaggcactcctgagactgccctgtgatttgagtgacctggaatatttggatgaggaattccaccagagtttgcagtggatgaaggacaacaacatcacagacatcttagacctcactttcactgttaatgaagaggtttttggacaggtcacggaaagggagttgaagtctggaggagccaacacacaggtgacggagaaaaacaagaaggagtacatcgagcgcatggtgaagtggcgggtggagcgcggcgtggtacagcagaccgaggcgctggtgcgcggcttctacgaggttgtagactcgaggctggtgtccgtgtttgatgccagggagctggagctggtgatagctggcaccgcggaaatcgacctaaatgactggcggaataacactgagtaccggggaggttaccacgatgggcatcttgtgatccgctggttctgggctgcggtggagcgcttcaataatgagcagaggctgagattactgcagtttgtcacgggaacatccagcgtgccctacgaaggcttcgcagccctccgtgggagcaatgggcttcggcgcttctgcatagagaaatgggggaaaattacttctctccccagggcacacacatgcttcaaccgactggatcttccaccgtatccctcgtactccatgttgtatgaaaagctgttaacagcagtagaggaaaccagcacctttggacttgagtgaggacatggaacctcgcctgacattttcctggccagtgacatcacccttcctgggatgatccccttttccctttcccttaatcaactctcctttgattttggtattccatgatttttattttcaaaccaaatcaggattgacaaaagctgtgcatgaagaactgccttcttctaagatctaaccttcaggcttctctcctctgttttcaatgaactgctagcctgtatgcaatattaaaaaacagctgtctcaaggtctgtgtatatctccacatacctccattactaacaatgaaatatgaatgcaagttaagctacacttgaccaaatggtaataaatgtttacttccatttctatcattgaagggaaaatgtgagcattaagcactccaggctttcatatgcccatgtcttctgagcagagccaccattttttataatttctaataaccaactccagaactaggagctgatcaactctttgttttcctctccatctacttttccctgtgcataatatccatccaaaggacaacagtggcaaagctgaaatttttatacattcaactcatgattcacatgtggcatcagtcccatcagccggaactagcctagacatacggtgcaaatatgacacttctaacgattaacaacagcaagaaaacacctgctgctgatgcaatgcaatgcatcccaatggttgtggggattgtgggctcaactcaagagaagtttaggagggggagcatccctagtgaatactcacaccacaagaaggacaaacttgtgcacatgtccaagaaagaaagcttcttgattgaggtagcatgaaggatgaggcttcagcccccattgtcttatgtagaatgtggcaatgccaactggagaaagggaagaaggacatattaccttggtttgaatccctgagttctgtactgttctgttttgtttagtctagccacagttcttcacaaaggaaaaaaaaatgtgtagatgataccatgacttttgttaaagccatgacttttgtttgcttggcagacaaaccctttttttaaaactttgatatttttttttcacatttttttttccttttcctttcttaatcatggagttcaagttcctttgcattcgattgtccatcgggaccacactaggaagctgcagagagtgatggtgcttgttagggatcaagggcaacatagtacttctccttcacccatagtaatcctcctggggcagaaacataacaccccaaaggcacgttgatttgtatcaaaataaatatccagtttcttttagcattcagtgaaaacatatctcagaaaacttcatgttgtcagaaaaacagctgcaggctccaaagacagcctaacctctcaactacatttgaaataaacccaaccataatggt

SEQ ID NO: 6156 - protein, 1606 aa, Homo sapiens; identical to SEQ ID NO: 841

SEQ ID NO: 6157 - DNA, 6516 bp, Homo sapiens
agtgtgctgcgttaccgcgcatcaggcgctgttgttggagccggaacaccgtgcgactctgaccgaaccggccccctcctcgcgcacacactcgccgagccgcgcgcgcccctccgccgtgacagtggccgtggcctccgctctctcggggcacccggcagccagagcgcagcgagagcgggcggtcgccagggtcccctccccagccagtcccaggcgcccggtgcactatgcggggcacgtgcgccccccagctctaatctgcgcgctgacaggagcatgatctgtgcccaggccagggctgccaagaatctgtaccagaacaggtttttaggcctggccgccatggcgtctccttctagaaactcccagagccgacgccggtgcaaggagccgctccgatacagctacaaccccgaccagttccacaacatggacctcaggggcggcccccacgatggcgtcaccattccccgctccaccagcgacactgacctggtcacctcggacagccgctccacgctcatggtcagcagctcctactattccatcgggcactctcaggacctggtcatccactgggacataaaggaggaagtggacgctggggactggattggcatgtacctcattgatgaggtcttgtccgaaaactttctggactataaaaaccgtggagtcaatggttctcatcggggccagatcatctggaagatcgatgccagctcgtactttgtggaacctgaaactaagatctgcttcaaatactaccatggagtgagtggggccctgcgagcaaccacccccagtgtcacggtcaaaaactcggcagctcctatttttaaaagcattggtgctgatgagaccgtccaaggacaaggaagtcggaggctgatcagcttctctctctcagatttccaagccatggggttgaagaaagggatgtttttcaacccagacccttatctgaagatttccattcagcctgggaaacacagcatcttccccgccctccctcaccatggacaggagaggagatccaagatcataggcaacaccgtgaaccccatctggcaggccgagcaattcagttttgtgtccttgcccactgacgtgctggaaattgaggtgaaggacaagtttgccaagagccgccccatcatcaagcgcttcttgggaaagctgtcgatgcccgttcaaagactcctggagagacacgccataggggatagggtggtcagctacacacttggccgcaggcttccaacagatcatgtgagtggacagctgcaattccgatttgagatcacttcctccatccacccagatgatgaggagatttccctgagtaccgagcctgagtcagcccaaattcaggacagccccatgaacaacctgatggaaagcggcagtggggaacctcggtctgaggcaccagagtcctctgagagctggaagccagagcagctgggtgagggcagtgtccccgatggtccagggaaccaaagcatagagctttccagaccagctgaggaagcagcagtcatcacggaggcaggagaccagggcatggtctctgtgggacctgaaggggctggggagctcctggcccaggtgcaaaaggacatccagcctgcccccagtgcagaagagctggccgagcagctggacctgggtgaggaggcatcagcactgctgctggaagacggtgaagccccagccagcaccaaggaggagcccttggaggaggaagcaacgacccagagccgggctggaagggaagaagaggagaaggagcaggaggaggagggagatgtgtctaccctggagcagggagagggcaggctgcagctgcgggcctcggtgaagagaaaaagcaggccctgctccttgcctgtgtccgagctggagacggtgatcgcgtcagcctgcggggaccccgagaccccgcggacacactacatccgcatccacaccctgctgcacagcatgccctccgcccagggcggcagcgcggcagaggaggaggacggcgcggaggaggagtccaccctcaaggactcctcggagaaggatgggctcagcgaggtggacacggtggccgctgacccgtctgccctggaagaggacagagaagagcccgagggggctactccaggcacggcgcaccctggccactccgggggccacttccccagcctggccaatggcgcggcccaggatggcgacacgcaccccagcaccgggagcgagagcgactccagccccaggcaaggcggggaccacagttgcgagggctgtgacgcgtcctgctgcagcccctcgtgctacagctcctcgtgctacagcacgtcctgctacagcagctcgtgctacagcgcctcgtgctacagcccctcctgctacaacggcaacaggttcgccagccacacgcgcttctcctccgtggacagcgccaagatctccgagagcacggtcttctcctcgcaagacgacgaggaggaggagaacagcgcgttcgagtcggtacccgactccatgcagagccctgagctggacccggagtccacgaacggcgctgggccgtggcaagacgagctggccgcccctagcgggcacgtggaaagaagcccggaaggtctggaatcccccgtggcaggtccaagcaatcggagagaaggtgaatgtcctatactccataattcccagccagtaagccagcttccttccctgaggcctgaacatcatcactacccaacaatcgatgagcctcttccaccaaactgggaagctcgaattgacagccacgggcgggtcttttatgtggaccacgtgaaccgcacaaccacctggcagcgtccgacggcagcagccaccccggatggcatgcggagatcggggtccatccagcagatggagcaactcaacaggcggtatcaaaacattcagcgaaccattgcaacagagaggtccgaagaagattctggcagccaaagctgcgagcaagccccagcaggaggaggcggaggtggagggagtgactcagaagccgaatcttcccagtccagcttagatctaaggagagaagggtcactttctccagtgaactcacaaaaaatcaccttgctgctgcagtccccagcggtcaagttcatcaccaaccccgagttcttcactgtgctacatgccaattatagtgcctaccgagtcttcaccagtagcacctgcttaaagcacatgattctgaaagtccgacgggatgctcgcaattttgaacgctaccagcacaaccgggacttggtgaatttcatcaacatgttcgcagacactcggctggaactgccccggggctgggagatcaaaacggaccagcagggaaagtcttttttcgtggaccacaacagtcgagctaccactttcattgacccccgaatccctcttcagaacggtcgtcttcccaatcatctaactcaccgacagcacctccagaggctccgaagttacagcgctggagaggcctcagaagtttctagaaacagaggagcctctttactggccaggccaggacacagcttagtagctgctattcgaagccaacatcaacatgagtcattgccactggcatataatgacaagattgtggcatttcttcgccagccaaacatttttgaaatgctgcaagagcgtcagccaagcttagcaagaaaccacacactcagggagaaaatccattacattcggactgagggtaatcacgggcttgagaagttgtcctgtgatgcggatctggtcattttgctgagtctctttgaagaagagattatgtcctacgtccccctgcaggctgccttccaccctgggtatagcttctctccccgatgttcaccctgttcttcacctcagaactccccaggtttacagagagccagtgcaagagccccttccccctaccgaagagactttgaggccaagctccgcaatttctacagaaaactggaagccaaaggatttggtcagggtccggggaaaattaagctcattattcgccgggatcatttgttggagggaaccttcaatcaggtgatggcctattcgcggaaagagctccagcgaaacaagctctacgtcacctttgttggagaggagggcctggactacagtggcccctcgcgggagttcttcttccttctgtctcaggagctcttcaacccttactatggactctttgagtactcggcaaatgatacttacacggtgcagatcagccccatgtccgcatttgtagaaaaccatcttgagtggttcaggtttagcggtcgcatcctgggtctggctctgatccatcagtaccttcttgacgctttcttcacgaggcccttctacaaggcactcctgagactgccctgtgatttgagtgacctggaatatttggatgaggaattccaccagagtttgcagtggatgaaggacaacaacatcacagacatcttagacctcactttcactgttaatgaagaggtttttggacaggtcacggaaagggagttgaagtctggaggagccaacacacaggtgacggagaaaaacaagaaggagtacatcgagcgcatggtgaagtggcgggtggagcgcggcgtggtacagcagaccgaggcgctggtgcgcggcttctacgaggttgtagactcgaggctggtgtccgtgtttgatgccagggagctggagctggtgatagctggcaccgcggaaatcgacctaaatgactggcggaataacactgagtaccggggaggttaccacgatgggcatcttgtgatccgctggttctgggctgcggtggagcgcttcaataatgagcagaggctgagattactgcagtttgtcacgggaacatccagcgtgccctacgaaggcttcgcagccctccgtgggagcaatgggcttcggcgcttctgcatagagaaatgggggaaaattacttctctccccagggcacacacatgcttcaaccgactggatcttccaccgtatccctcgtactccatgttgtatgaaaagctgttaacagcagtagaggaaaccagcacctttggacttgagtgaggacatggaacctcgcctgacattttcctggccagtgacatcacccttcctgggatgatccccttttccctttcccttaatcaactctcctttgattttggtattccatgatttttattttcaaaccaaatcaggattgacaaaagctgtgcatgaagaactgccttcttctaagatctaaccttcaggcttctctcctctgttttcaatgaactgctagcctgtatgcaatattaaaaaacagctgtctcaaggtctgtgtatatctccacatacctccattactaacaatgaaatatgaatgcaagttaagctacacttgaccaaatggtaataaatgtttacttccatttctatcattgaagggaaaatgtgagcattaagcactccaggctttcatatgcccatgtcttctgagcagagccaccattttttataatttctaataaccaactccagaactaggagctgatcaactctttgttttcctctccatctacttttccctgtgcataatatccatccaaaggacaacagtggcaaagctgaaatttttatacattcaactcatgattcacatgtggcatcagtcccatcagccggaactagcctagacatacggtgcaaatatgacacttctaacgattaacaacagcaagaaaacacctgctgctgatgcaatgcaatgcatcccaatggttgtggggattgtgggctcaactcaagagaagtttaggagggggagcatccctagtgaatactcacaccacaagaaggacaaacttgtgcacatgtccaagaaagaaagcttcttgattgaggtagcatgaaggatgaggcttcagcccccattgtcttatgtagaatgtggcaatgccaactggagaaagggaagaaggacatattaccttggtttgaatccctgagttctgtactgttctgttttgtttagtctagccacagttcttcacaaaggaaaaaaaaatgtgtagatgataccatgacttttgttaaagccatgacttttgtttgcttggcagacaaaccctttttttaaaactttgatatttttttttcacatttttttttccttttcctttcttaatcatggagttcaagttcctttgcattcgattgtccatcgggaccacactaggaagctgcagagagtgatggtgcttgttagggatcaagggcaacatagtacttctccttcacccatagtaatcctcctggggcagaaacataacaccccaaaggcacgttgatttgtatcaaaataaatatccagtttcttttagcattcagtgaaaacatatctcagaaaacttcatgttgtcagaaaaacagctgcaggctccaaagacagcctaacctctcaactacatttgaaataaacccaaccataatggt

SEQ ID NO: 6158 - protein, 1607 aa, Homo sapiens
MICAQARAAKNLYQNRFLGLAAMASPSRNSQSRRRCKEPLRYSYNPDQFHNMDLRGGPHDGVTIPRSTSDTDLVTSDSRSTLMVSSSYYSIGHSQDLVIHWDIKEEVDAGDWIGMYLIDEVLSENFLDYKNRGVNGSHRGQIIWKIDASSYFVEPETKICFKYYHGVSGALRATTPSVTVKNSAAPIFKSIGADETVQGQGSRRLISFSLSDFQAMGLKKGMFFNPDPYLKISIQPGKHSIFPALPHHGQERRSKIIGNTVNPIWQAEQFSFVSLPTDVLEIEVKDKFAKSRPIIKRFLGKLSMPVQRLLERHAIGDRVVSYTLGRRLPTDHVSGQLQFRFEITSSIHPDDEEISLSTEPESAQIQDSPMNNLMESGSGEPRSEAPESSESWKPEQLGEGSVPDGPGNQSIELSRPAEEAAVITEAGDQGMVSVGPEGAGELLAQVQKDIQPAPSAEELAEQLDLGEEASALLLEDGEAPASTKEEPLEEEATTQSRAGREEEEKEQEEEGDVSTLEQGEGRLQLRASVKRKSRPCSLPVSELETVIASACGDPETPRTHYIRIHTLLHSMPSAQGGSAAEEEDGAEEESTLKDSSEKDGLSEVDTVAADPSALEEDREEPEGATPGTAHPGHSGGHFPSLANGAAQDGDTHPSTGSESDSSPRQGGDHSCEGCDASCCSPSCYSSSCYSTSCYSSSCYSASCYSPSCYNGNRFASHTRFSSVDSAKISESTVFSSQDDEEEENSAFESVPDSMQSPELDPESTNGAGPWQDELAAPSGHVERSPEGLESPVAGPSNRREGECPILHNSQPVSQLPSLRPEHHHYPTIDEPLPPNWEARIDSHGRVFYVDHVNRTTTWQRPTAAATPDGMRRSGSIQQMEQLNRRYQNIQRTIATERSEEDSGSQSCEQAPAGGGGGGGSDSEAESSQSSLDLRREGSLSPVNSQKITLLLQSPAVKFITNPEFFTVLHANYSAYRVFTSSTCLKHMILKVRRDARNFERYQHNRDLVNFINMFADTRLELPRGWEIKTDQQGKSFFVDHNSRATTFIDPRIPLQNGRLPNHLTHRQHLQRLRSYSAGEASEVSRNRGASLLARPGHSLVAAIRSQHQHESLPLAYNDKIVAFLRQPNIFEMLQERQPSLARNHTLREKIHYIRTEGNHGLEKLSCDADLVILLSLFEEEIMSYVPLQAAFHPGYSFSPRCSPCSSPQNSPGLQRASARAPSPYRRDFEAKLRNFYRKLEAKGFGQGPGKIKLIIRRDHLLEGTFNQVMAYSRKELQRNKLYVTFVGEEGLDYSGPSREFFFLLSQELFNPYYGLFEYSANDTYTVQISPMSAFVENHLEWFRFSGRILGLALIHQYLLDAFFTRPFYKALLRLPCDLSDLEYLDEEFHQSLQWMKDNNITDILDLTFTVNEEVFGQVTERELKSGGANTQVTEKNKKEYIERMVKWRVERGVVQQTEALVRGFYEVVDSRLVSVFDARELELVIAGTAEIDLNDWRNNTEYRGGYHDGHLVIRWFWAAVERFNNEQRLRLLQFVTGTSSVPYEGFAALRGSNGLRRFCIEKWGKITSLPRAHTCFNRLDLPPYPSYSMLYEKLLTAVEETSTFGLE

SEQ ID NO: 6159 - DNA, 2186 bp, Homo sapiens
ggtgacaatgcagcaaaatccgagggctcaaacaatgtggcccctccatccccggctccagggcattctgattgctctgccgctttgacgtcccggccacttggctgattttcagagccatgatgcgcggtgtctctgtcttgcacacagaggctgggcaccataacttcttccctgccgaatttcagcgcgtagggggagctggcagggacacaggctgcagagatgcccggcttcctgtggttccgggcacagcgcgcctcagtctgcattgggctgacaccagagagcatgtggggattttcctagttgccgaagaagatattatttgacgttgctgtagttttgtgcttacttctcttggaatctgcagtggtgcaattctccccttgttttccccccttctctttgaaaagatatcaatgctatgttcagcagaaacggatacagcaagagcagcatagttcaaaaattgagggaggcatcttctctcttttcctgggatttaaacgcgatttaggagggcagatgccctacccgaaaaggccaaccgttaaagaccccggcagtgttgtggtccaaggcgtctcaaagcaggtggccagatctgcgtttctcatcagcagactcactccggctgtggctattacgaatctgtaccagaacaggtttttaggcctggccgccatggcgtctccttctagaaactcccagagccgacgccggtgcaaggagccgctccgatacagctacaaccccgaccagttccacaacatggacctcaggggcggcccccacgatggcgtcaccattccccgctccaccagcgacactgacctggtcacctcggacagccgctccacgctcatggtcagcagctcctactattccatcgggcactctcaggacctggtcatccactgggacataaaggaggaagtggacgctggggactggattggcatgtacctcattgatgaggtcttgtccgaaaactttctggactataaaaaccgtggagtcaatggttctcatcggggccagatcatctggaagatcgatgccagctcgtactttgtggaacctgaaactaagatctgcttcaaatactaccatggagtgagtggggccctgcgagcaaccacccccagtgtcacggtcaaaaactcggcagctcctatttttaaaagcattggtgctgatgagaccgtccaaggacaaggaagtcggaggctgatcagcttctctctctcagatttccaagccatggggttgaagaaagggatgtttttcaacccagacccttatctgaagatttccattcagcctgggaaacacagcatcttccccgccctccctcaccatggacaggagaggagatccaagatcataggcaacaccgtgaaccccatctggcaggccgagcaattcagttttgtgtccttgcccactgacgtgctggaaattgaggtgaaggacaagtttgccaagagccgccccatcatcaagcgcttcttgggaaagctgtcgatgcccgttcaaagactcctggagagacacgccatagggtaaacctgtgactgagatcttactatcactaggttcccaccaacaggtcgtgcccaaaggtggcctgtaggctgcaatagtatagtctcacagagagtcaaaatggtatcattatatttcctttgtttttcctactaattatgttgcctgagccaacataagtgtttgttatattaaacaaacccatcccttttcacttgatgtgtaacactggttacttacccaagagagtaaaaaatcctattaaaaatattaaacagtattaaaagaagccctcaatggggcatttttctgtacaggtagaaactaaagtttgttttactatgaagaatattatttcattcatatgccagtctggtatgtaagatttaatcatatgtgacatttccataacaagatggaatactgggtaactactgtagagtttcttacttagaagacactagtatctgcagatgctagataacatggataagaatttgaaagcatgattctcatggaatgacagcaattaagatgctcacagaattcaattgtatatgagaatgggtttctgttttgtctcttttacattcatgtccactcatggttctcattaaagtggactatgaccagat

SEQ ID NO: 6160 - protein, 347 aa, Homo sapiens
MPYPKRPTVKDPGSVVVQGVSKQVARSAFLISRLTPAVAITNLYQNRFLGLAAMASPSRNSQSRRRCKEPLRYSYNPDQFHNMDLRGGPHDGVTIPRSTSDTDLVTSDSRSTLMVSSSYYSIGHSQDLVIHWDIKEEVDAGDWIGMYLIDEVLSENFLDYKNRGVNGSHRGQIIWKIDASSYFVEPETKICFKYYHGVSGALRATTPSVTVKNSAAPIFKSIGADETVQGQGSRRLISFSLSDFQAMGLKKGMFFNPDPYLKISIQPGKHSIFPALPHHGQERRSKIIGNTVNPIWQAEQFSFVSLPTDVLEIEVKDKFAKSRPIIKRFLGKLSMPVQRLLERHAIG

SEQ ID NO: 6161 - DNA, 1840 bp, Homo sapiens
agaactgatacttttcctgatttattggtctgaagcttgatgcatatggaggcctgaaaaataaggatgtggcatacagacaggctctcctggtgttatcaggcatctatgcatgtgatatgcagggagaatttggtggatggaacttaagccggtaccaggggggcgggggaagagttgggaaaggacgccatctgtgcccatgatgacaaatgccatcatggagacttcattcggggtcccttttatatatttagtgaagcagattttccatttcacactttctagatatatttgtattgcacagatgtcagggaaatatcatgtgtgtgaaagaaaaaaaaaagatcaaaattcacatccatggccagggattgtaattcaatcattttgtcctgaaattgacatccatttaacgtgcatggatgttccctgcttttgcttttgctttgggggttcaagtcagagcagttggagaaacataaatctcagccctacacattgttaaaattcagagatctaggttaaggggggaaaagatggggagaataaaattaaacatataagaccttgccatcagtgccgtcagtaccagagctgatgaaatcaatcagcaagtgattcctcatcctctttcctgtaacacacagatgagctgaagaaaccacaggacgcagtcaaatatgcttcaaaaaggttgtcccactggccttcttcactccctccatctcagcctctaaagacatattttattgtgacatatttgattttgacaaacagcacattgaacatatatgaaatatatgaagcaaaatatgacacacacccaccatgcagcctgagaccagaagatcaccatcttatttgaagctacttttgtgtttctgccacctctcaccttttgcctgtcttgagagcacctcgatcagcctccctactaaatgctgagctcctctaggttaagggcttgtcacacttctcttagtattcctgaaactacttgcctcagtatctgcctcagcaggtacttctttctccgaatgtgaaatgagctcaaggaacaacctaagagttgagaaggtctgcatttcgttgcttctagaatgctatacgccatgttgtgtccacaaaatgcgtaccccaaagaacagatgaaatgaaaccatagataaacgtgtaagaggtacttttgaaagcagagctataaaactcagttccatattcatcatggcttggatgtccagaacttgcttacatctatttgtggacttttttgtatcaaagagaatggatcaatcaaataagaaaagaagagtgcattgggagtcaggagactgaggtgtggtctggctctgctgctaacttcaagtttacactcaattgatcaagtcccttgatgacatggaactaaagtgacttttgaagaacatgagtacctcaaggatcttgctaaaatacagattctgatctaataatgcagccttgtgagatagtgaactctccattcctggaagtattcaagctaaggttggagaggtgatgacggtttccattattttggagggtgaacttccaagatgaagaacatgagtcttagagaagtcaaagaagttgcctaaggtcacatgagcagtgagcagaggagttgcttacctttgttagactccaaatcctgtgtgactatgaaactcattaactgaaacaacccggcacctttggacctgtgcaggcaaaggcaagggagttgaccaggagcacacagcacagacgagaacagtcccaaagccttttgctgtatcccatctgtgcaaaccactcccaataaacaaacaaacacaca

SEQ ID NO: 6162 - protein, 38 aa, Homo sapiens
MQPETRRSPSYLKLLLCFCHLSPFACLESTSISLPTKC

SEQ ID NO: 6163 - DNA, 348 bp, Homo sapiens
gtaacaacatatattgtattccaaccctctatgaaggtgccagactccaacttgtcagtgctcagcgctatgatttaaacccttttagttttgctcttttgccaaaggaagagggatactggaggtgggctctttgcagctgtaaaagtcagaataataaccctccaactgggagaggtaatgaaagaagatgttttctcagtgattggaattgctgctgcccggactggcataagccagttgttcaggaactattggatgctggtgaagatatcatttcaacttacattttctcggcttatgtagtcaatggtttaatctatgctgatgattaaatatctctttatt

SEQ ID NO: 6164 - protein, 41 aa, Homo sapiens
MKEDVFSVIGIAAARTGISQLFRNYWMLVKISFQLTFSRLM

SEQ ID NO: 6165 - DNA, 865 bp, Homo sapiens
cgccgcgagcccggcgaagtcctcagcccgccccgcttgcccactccccacttcccgagccggctccgtgtttagggagggcagtgatcacgcaagccggagcggcgggctgacgttggacgagctgccaggtagctgaaagcaggcagccaggcagccgagacacttcccagcgattccagcctgggctccgcaggaagcctcgctgaatcccagccagctggttctaaccttccagaatcgcaatcccttctccccacagccagccctcgccaagcaagcagcaggatgtttgcagtgtcgcgcccagggctctgagactgagcctgccatccactcgcacgcctttctttcagggcttttcggctgttggctacactgatgtgacccccctccctttttggaatgatggggatctttttggtgtatgttggatttgttttcttttccgttttatatgtacaacaagggctttcttctcaagcaaaatttaccgagtttccgcggaacgtgacggcgaccgaggggcagaatgtggagatgtcctgcgccttccagagcggctccgcctcggtgtatctggagatccaatggtggttcctgcgggggccggaggacctggatcccggggccgagggggccggcgcgcaggtggagctcttgcccgacagagacccggacagcgacgggaccaagatcagcgtgagtgcggggcgcgccaagggccgcgggcccaggctcgggacgcacagcccttccctgtccccgagaaggcggcttgccagcgctgcaggacagccggacagccgggtgccccttgcttgcctcattagatacatacaaatggaagcacatttagagtccc

SEQ ID NO: 6166 - protein, 152 aa, Homo sapiens
MMGIFLVYVGFVFFSVLYVQQGLSSQAKFTEFPRNVTATEGQNVEMSCAFQSGSASVYLEIQWWFLRGPEDLDPGAEGAGAQVELLPDRDPDSDGTKISVSAGRAKGRGPRLGTHSPSLSPRRRLASAAGQPDSRVPLACLIRYIQMEAHLE

SEQ ID NO: 6167 - DNA, 3398 bp, Homo sapiens
gccgcgagcccggcgaagtcctcagcccgccccgcttgcccactccccacttcccgagccggctccgtgtttagggagggcagtgatcacgcaagccggagcggcgggctgacgttggacgagctgccaggtagctgaaagcaggcagccaggcagccgagacacttcccagcgattccagcctgggctccgcaggaagcctcgctgaatcccagccagctggttctaaccttccagaatcgcaatcccttctccccacagccagccctcgccaagcaagcagcaggatgtttgcagtgtcgcgcccagggctctgagactgagcctgccatccactcgcacgcctttctttcagggcttttcggctgttggctacactgatgtgacccccctccctttttggaatgatggggatctttttggtgtatgttggatttgttttcttttccgttttatatgtacaacaagggctttcttctcaagcaaaatttaccgagtttccgcggaacgtgacggcgaccgaggggcagaatgtggagatgtcctgcgccttccagagcggctccgcctcggtgtatctggagatccaatggtggttcctgcgggggccggaggacctggatcccggggccgagggggccggcgcgcaggtggagctcttgcccgacagagacccggacagcgacgggaccaagatcagcacagtgaaagtccaaggcaatgacatctcccacaagcttcagatttccaaagtgaggaaaaaggatgaaggcttatatgagtgcagggtgactgatgccaactacggggagcttcaggaacacaaggcccaggcctatctgaaagtcaatgccaacagccatgcccgcagaatgcaggccttcgaagcctcgcccatgtggctgcaggatatgaagccccgcaagaacgtctccgcagccatccccagcagcatccatggctctgccaaccaacgaacgcactccacctccagccctcaagtggtagccaaaatccccaaacaaagtccacaatcaggtatggaaacccatttcgagccttttattttaccactcacaaacgctccacagaaaggtcagtcgtatagagtagacagatttatgaatggtgatttttaaaatcggagacctagttcagtgcaagtgattatgagaggtgagcaccgagcctgcaccaattcactcagagctcaaagcatgtgggtgcaccccgtcagtcccctagtggtgcttcatttccagggcatctgagagctggactctggtttttatcctttctgtatttacacattataagaacaataaatcatgtaatgttggttacattacaaatgcatgttcattttctctacagatttatgtatcgataatgacccaaattaagaggctttcacttaatcaaaatgtaaatgagagagacatgccatatcatgcattttcagcgacccatagctctaagcaggactattctccaagggcttttgattttgaaggagaaacctcagctgcctgtgatgatgataatggaaggatggaggggggattgaagactgtaagtggtgcagagataaggcaactcctctgtgaatttgccttccaggccaatttagaagcttagtcacaggattctgaaggcagctgtgcaagttaaagctgttctgaatggcattaatgtatgcagtcattcagccaatggaaatgcgtggaagttttaaccttgatgtgggataaaggcttcgtggaatgagcagtaccctgcacaaccccgcggccgtcccgatttcctcaaacacgtgacatgggatgaagggagcacaaacatactgactttatccttctttaggtttttccctaaagaagtattgatgctaccatcagtaatggaaaattacattgctaatatttaaggtctcttcagccattaaattaaaaagtctgattacttcaccaggatgatttctgagatctcatctcatatcgtcctgaatacacacacacacacacacacacgcacacacacacacatctcagaaatcatcctaatcaaatatagactttatatatatcaaatatatatatacatgtagaaatacatataggtatgtatctttaagtccttgcttgtgaacaatgcttttaaatgtttttaaaatactgtatgccaaaataggttttctcttaatgctttacttcctaatggatgtgatttgcagatttgtagggcacttggattagggttctctgagtttgccctgccttataatgtagatgagcaactctcctggcatgccttggtcattgcaatttatgtcagtctgatgaacagatggcttagcctctctgaagcccaatgtgtgtggatttgtctaatttttttctttataatcttttctgcttaccaaattaaaggacaaactagtatagctggaacatatatgtgtgtatccatacacactaaacacacaggtatatgctaaattgtaatggtaaccaaatgatggttacaactttgtgactattatttgaggaagatttaatgtctttggagtgattttcccctctttcttcacattatcataaaagaagttagacactacaggcaagattacagagtagcctaagcagacaatttacaacctaattagcaagaactccaaatcatggaagtgaaattattattatcctacatagactgttccaagttagatgtcatcaatctgttcggcagaataaaatcaaacagattacctattccaagtgaagaattccaagggtagaatgaaatgctttatctatttctagaatgttttcttagcttttggggtttaataatgcaatctcaaaatatctatttattttattttaatatctcttagcgctgtgattagtgctaaatgataaactctagatctcttctaacaattatcaaataaaaattactgctctttttgcatcccattgccagccttgctgtcagattcaaaattgctttttctagagttaaaggtagaaggagagaaaaaagtgactcatgaagtctatattcattaaaagtcctgttcactaaacatatctgcttatatcaaagagtaacttgaaatatctgaaaatatttaatttcaatatttccaaccagtgaatactggataatatttttatatacttctatcaacattttctaatttcgatttcagaagctggggcagtccagtcactcactttacttatgtgtaagttcctatacttgcacaattattatatatgattcagtatctggggtggatatttatatattatattcactgtaatacccacatcctgatttatgatttttgcctcacgattttcagattatattcaaataaagcttatttcaat

SEQ ID NO: 6168 - protein, 244 aa, Homo sapiens
MMGIFLVYVGFVFFSVLYVQQGLSSQAKFTEFPRNVTATEGQNVEMSCAFQSGSASVYLEIQWWFLRGPEDLDPGAEGAGAQVELLPDRDPDSDGTKISTVKVQGNDISHKLQISKVRKKDEGLYECRVTDANYGELQEHKAQAYLKVNANSHARRMQAFEASPMWLQDMKPRKNVSAAIPSSIHGSANQRTHSTSSPQVVAKIPKQSPQSGMETHFEPFILPLTNAPQKGQSYRVDRFMNGDF

SEQ ID NO: 6169 - DNA, 3109 bp, Homo sapiens
gccgcgagcccggcgaagtcctcagcccgccccgcttgcccactccccacttcccgagccggctccgtgtttagggagggcagtgatcacgcaagccggagcggcgggctgacgttggacgagctgccaggtagctgaaagcaggcagccaggcagccgagacacttcccagcgattccagcctgggctccgcaggaagcctcgctgaatcccagccagctggttctaaccttccagaatcgcaatcccttctccccacagccagccctcgccaagcaagcagcaggatgtttgcagtgtcgcgcccagggctctgagactgagcctgccatccactcgcacgcctttctttcagggcttttcggctgttggctacactgatgtgacccccctccctttttggaatgatggggatctttttggtgtatgttggatttgttttcttttccgttttatatgtacaacaagggctttcttctcaagcaaaatttaccgagtttccgcggaacgtgacggcgaccgaggggcagaatgtggagatgtcctgcgccttccagagcggctccgcctcggtgtatctggagatccaatggtggttcctgcgggggccggaggacctggatcccggggccgagggggccggcgcgcaggtggagctcttgcccgacagagacccggacagcgacgggaccaagatcagcacagtgaaagtccaaggcaatgacatctcccacaagcttcagatttccaaagtgaggaaaaaggatgaaggcttatatgagtgcagggtgactgatgccaactacggggagcttcaggaacacaaggcccaggcctatctgaaagtcaatgccaacagccatgcccgcagaatgcaggccttcgaagcctcgcccatgtggctgcaggatatgaagccccgcaagaacgtctccgcagccatccccagcagcatccatggctctgccaaccaacgaacgcactccacctccagccctcaagtggtagccaaaatccccaaacaaagtccacaatcaggtgcgaggatagctacaagccatggactttctgtcctgcttcttgtttgtggctttgtgaagggtgctttgctttaatctaaagtgctgacttttttccaatatcactttctcttcttaaagcaaagagcaaatcgcctgtaaaatctacggagcggacagcaaagttgaccctaaactccaagcaccaccctgcacccactgtactctaattcactacacaaggagcgcctgcttccggaagcataaatgaagaggctatcacatgctttgttgatcatattttctttggcaaaacactgatcttttattttaagagaattaacgtgaagtgatagaacgttttctaatagcaagatctattttttcccttttctttcggcgactaaaatcatctcactgactgctcaagggttggcctgaatgtcatcaggatagggaatatttactatggataccactaatttcctactaaaggacccagcatcttcaggaagcaaacagagatcaaaaggctacagaacagaagctatcatcagacaaaaccccctttttaggggaagaacaaaactatcaacactgcaagtcaacaaggaggacattactttaaggaataacatgagaaagaaatttttttattttcccctttttttcttggatttttcttctttttcttgattacagttcttgttcaatggtggcaagtgctggttatggccaatctccgtcaatcctaggaggtttatagaactacattttgagtgttctatatttcagtgtattttaattcattttgcaattcctgtgtatgcaaacctgataaattctgtaaattgcttatagtatgtgtgctataacttcaaagtagatgtactgcgaccctcatgcaagctgatttttatcattatatatataaatatatacttaagaatatctgtgtgttgggccaatgaccaactttttttgacgaagcatttgtttttcgttgataattcatacactgcgtgaattttgtaattcattgtttcacttccacaggtttgacagctgcagatggtctctattgtcctctgcttcattctggaaagtgcatattcaaaattgtatcagtctctgatcgatgaattaattttgttatgtctgtgctaagttggaatttactatgttcctttatacatggtgtttattgaggtttgagagtctcttgactgtgaagaatgtacactgtctggttttgacagctatttctgtattattatcattataatcttgtcaaatagaaatgttgcttctagaaaatttgcctaggaggcgaatgtggggaaggtgaagcactcaccataattccctaaattcatgttagaacatttcttgctatggttaaaaatgctgcttcctttgacctttatgaatttctgtacctttgtcattctgttacctttgtcattctgttatttgcgctaattatattttaatgtctcctaattaaaaattaaaatttggttgttggctaaatacaatatgcaaaagatgatggcaggtccccgactaaagaagattaatgtgttcagttttcactggttaagtgaattataattttaaatattccattcttatttatgtctttatgataattcagactattttattttgaacctgttttctactctggcaaagaaagataggcagaactattagtgttccatatacattatggaatagataaagcttgagagataaatgacctaagttttccttccagagagactcttccattttctctcattacaaaaccagaagatcagctatgtggggccatcagctcccagcctaaggtcctataacccgaagcttgaaggcaatcagtacctctgcttttcaaaggtaaatgcattcattttctttgattcagttataagcaagtatatattttcataatattcttgacattacctgagaaataatacttcatgctaaatcttttactgccacttttctcattcatttggtttatcatttcagtttaatgagaaaaattaataaaggttttgattgcactattttattaacct

SEQ ID NO: 6170 - protein, 236 aa, Homo sapiens; identical to SEQ ID NO: 843

SEQ ID NO: 6171 - DNA, 3194 bp, Homo sapiens
gccgcgagcccggcgaagtcctcagcccgccccgcttgcccactccccacttcccgagccggctccgtgtttagggagggcagtgatcacgcaagccggagcggcgggctgacgttggacgagctgccaggtagctgaaagcaggcagccaggcagccgagacacttcccagcgattccagcctgggctccgcaggaagcctcgctgaatcccagccagctggttctaaccttccagaatcgcaatcccttctccccacagccagccctcgccaagcaagcagcaggatgtttgcagtgtcgcgcccagggctctgagactgagcctgccatccactcgcacgcctttctttcagggcttttcggctgttggctacactgatgtgacccccctccctttttggaatgatggggatctttttggtgtatgttggatttgttttcttttccgttttatatgtacaacaagggctttcttctcaagcaaaatttaccgagtttccgcggaacgtgacggcgaccgaggggcagaatgtggagatgtcctgcgccttccagagcggctccgcctcggtgtatctggagatccaatggtggttcctgcgggggccggaggacctggatcccggggccgagggggccggcgcgcaggtggagctcttgcccgacagagacccggacagcgacgggaccaagatcagcacagtgaaagtccaaggcaatgacatctcccacaagcttcagatttccaaagtgaggaaaaaggatgaaggcttatatgagtgcagggtgactgatgccaactacggggagcttcaggaacacaaggcccaggcctatctgaaagtcaatgccaacagccatgcccgcagaatgcaggccttcgaagcctcgcccatgtggctgcaggatatgaagccccgcaagaacgtctccgcagccatccccagcagcatccatggctctgccaaccaacgaacgcactccacctccagccctcaagtggtagccaaaatccccaaacaaagtccacaatcagtgtctccaatccttccagaagtcaaacatctccacagaccacctctactagtccttcctttcttctctctgtcttcacttttttctactgacccccttcccaccttcccaacgtcacacagaactgtgaagcggcttcctgctcctcttccccaacctggccatggatcaacccctggtgtgcagagctgcgtgctggctcctccagcaaagagcaaatcgcctgtaaaatctacggagcggacagcaaagttgaccctaaactccaagcaccaccctgcacccactgtactctaattcactacacaaggagcgcctgcttccggaagcataaatgaagaggctatcacatgctttgttgatcatattttctttggcaaaacactgatcttttattttaagagaattaacgtgaagtgatagaacgttttctaatagcaagatctattttttcccttttctttcggcgactaaaatcatctcactgactgctcaagggttggcctgaatgtcatcaggatagggaatatttactatggataccactaatttcctactaaaggacccagcatcttcaggaagcaaacagagatcaaaaggctacagaacagaagctatcatcagacaaaaccccctttttaggggaagaacaaaactatcaacactgcaagtcaacaaggaggacattactttaaggaataacatgagaaagaaatttttttattttcccctttttttcttggatttttcttctttttcttgattacagttcttgttcaatggtggcaagtgctggttatggccaatctccgtcaatcctaggaggtttatagaactacattttgagtgttctatatttcagtgtattttaattcattttgcaattcctgtgtatgcaaacctgataaattctgtaaattgcttatagtatgtgtgctataacttcaaagtagatgtactgcgaccctcatgcaagctgatttttatcattatatatataaatatatacttaagaatatctgtgtgttgggccaatgaccaactttttttgacgaagcatttgtttttcgttgataattcatacactgcgtgaattttgtaattcattgtttcacttccacaggtttgacagctgcagatggtctctattgtcctctgcttcattctggaaagtgcatattcaaaattgtatcagtctctgatcgatgaattaattttgttatgtctgtgctaagttggaatttactatgttcctttatacatggtgtttattgaggtttgagagtctcttgactgtgaagaatgtacactgtctggttttgacagctatttctgtattattatcattataatcttgtcaaatagaaatgttgcttctagaaaatttgcctaggaggcgaatgtggggaaggtgaagcactcaccataattccctaaattcatgttagaacatttcttgctatggttaaaaatgctgcttcctttgacctttatgaatttctgtacctttgtcattctgttacctttgtcattctgttatttgcgctaattatattttaatgtctcctaattaaaaattaaaatttggttgttggctaaatacaatatgcaaaagatgatggcaggtccccgactaaagaagattaatgtgttcagttttcactggttaagtgaattataattttaaatattccattcttatttatgtctttatgataattcagactattttattttgaacctgttttctactctggcaaagaaagataggcagaactattagtgttccatatacattatggaatagataaagcttgagagataaatgacctaagttttccttccagagagactcttccattttctctcattacaaaaccagaagatcagctatgtggggccatcagctcccagcctaaggtcctataacccgaagcttgaaggcaatcagtacctctgcttttcaaaggtaaatgcattcattttctttgattcagttataagcaagtatatattttcataatattcttgacattacctgagaaataatacttcatgctaaatcttttactgccacttttctcattcatttggtttatcatttcagtttaatgagaaaaattaataaaggttttgattgcactattttattaacct

SEQ ID NO: 6172 - protein, 309 aa, Homo sapiens
MMGIFLVYVGFVFFSVLYVQQGLSSQAKFTEFPRNVTATEGQNVEMSCAFQSGSASVYLEIQWWFLRGPEDLDPGAEGAGAQVELLPDRDPDSDGTKISTVKVQGNDISHKLQISKVRKKDEGLYECRVTDANYGELQEHKAQAYLKVNANSHARRMQAFEASPMWLQDMKPRKNVSAAIPSSIHGSANQRTHSTSSPQVVAKIPKQSPQSVSPILPEVKHLHRPPLLVLPFFSLSSLFSTDPLPTFPTSHRTVKRLPAPLPQPGHGSTPGVQSCVLAPPAKSKSPVKSTERTAKLTLNSKHHPAPTVL

SEQ ID NO: 6173 - DNA, 2987 bp, Homo sapiens
gccgcgagcccggcgaagtcctcagcccgccccgcttgcccactccccacttcccgagccggctccgtgtttagggagggcagtgatcacgcaagccggagcggcgggctgacgttggacgagctgccaggtagctgaaagcaggcagccaggcagccgagacacttcccagcgattccagcctgggctccgcaggaagcctcgctgaatcccagccagctggttctaaccttccagaatcgcaatcccttctccccacagccagccctcgccaagcaagcagcaggatgtttgcagtgtcgcgcccagggctctgagactgagcctgccatccactcgcacgcctttctttcagggcttttcggctgttggctacactgatgtgacccccctccctttttggaatgatggggatctttttggtgtatgttggatttgttttcttttccgttttatatgtacaacaagggctttcttctcaagcaaaatttaccgagtttccgcggaacgtgacggcgaccgaggggcagaatgtggagatgtcctgcgccttccagagcggctccgcctcggtgtatctggagatccaatggtggttcctgcgggggccggaggacctggatcccggggccgagggggccggcgcgcaggtggagctcttgcccgacagagacccggacagcgacgggaccaagatcagcacagtgaaagtccaaggcaatgacatctcccacaagcttcagatttccaaagtgaggaaaaaggatgaaggcttatatgagtgcagggtgactgatgccaactacggggagcttcaggaacacaaggcccaggcctatctgaaagtcaatgccaacagccatgcccgcagaatgcaggccttcgaagcctcgcccatgtggctgcaggatatgaagccccgcaagaacgtctccgcagccatccccagcagcatccatggctctgccaaccaacgaacgcactccacctccagccctcaagtggtagccaaaatccccaaacaaagtccacaatcagcaaagagcaaatcgcctgtaaaatctacggagcggacagcaaagttgaccctaaactccaagcaccaccctgcacccactgtactctaattcactacacaaggagcgcctgcttccggaagcataaatgaagaggctatcacatgctttgttgatcatattttctttggcaaaacactgatcttttattttaagagaattaacgtgaagtgatagaacgttttctaatagcaagatctattttttcccttttctttcggcgactaaaatcatctcactgactgctcaagggttggcctgaatgtcatcaggatagggaatatttactatggataccactaatttcctactaaaggacccagcatcttcaggaagcaaacagagatcaaaaggctacagaacagaagctatcatcagacaaaaccccctttttaggggaagaacaaaactatcaacactgcaagtcaacaaggaggacattactttaaggaataacatgagaaagaaatttttttattttcccctttttttcttggatttttcttctttttcttgattacagttcttgttcaatggtggcaagtgctggttatggccaatctccgtcaatcctaggaggtttatagaactacattttgagtgttctatatttcagtgtattttaattcattttgcaattcctgtgtatgcaaacctgataaattctgtaaattgcttatagtatgtgtgctataacttcaaagtagatgtactgcgaccctcatgcaagctgatttttatcattatatatataaatatatacttaagaatatctgtgtgttgggccaatgaccaactttttttgacgaagcatttgtttttcgttgataattcatacactgcgtgaattttgtaattcattgtttcacttccacaggtttgacagctgcagatggtctctattgtcctctgcttcattctggaaagtgcatattcaaaattgtatcagtctctgatcgatgaattaattttgttatgtctgtgctaagttggaatttactatgttcctttatacatggtgtttattgaggtttgagagtctcttgactgtgaagaatgtacactgtctggttttgacagctatttctgtattattatcattataatcttgtcaaatagaaatgttgcttctagaaaatttgcctaggaggcgaatgtggggaaggtgaagcactcaccataattccctaaattcatgttagaacatttcttgctatggttaaaaatgctgcttcctttgacctttatgaatttctgtacctttgtcattctgttacctttgtcattctgttatttgcgctaattatattttaatgtctcctaattaaaaattaaaatttggttgttggctaaatacaatatgcaaaagatgatggcaggtccccgactaaagaagattaatgtgttcagttttcactggttaagtgaattataattttaaatattccattcttatttatgtctttatgataattcagactattttattttgaacctgttttctactctggcaaagaaagataggcagaactattagtgttccatatacattatggaatagataaagcttgagagataaatgacctaagttttccttccagagagactcttccattttctctcattacaaaaccagaagatcagctatgtggggccatcagctcccagcctaaggtcctataacccgaagcttgaaggcaatcagtacctctgcttttcaaaggtaaatgcattcattttctttgattcagttataagcaagtatatattttcataatattcttgacattacctgagaaataatacttcatgctaaatcttttactgccacttttctcattcatttggtttatcatttcagtttaatgagaaaaattaataaaggttttgattgcactattttattaacct

SEQ ID NO: 6174 - protein, 240 aa, Homo sapiens
MMGIFLVYVGFVFFSVLYVQQGLSSQAKFTEFPRNVTATEGQNVEMSCAFQSGSASVYLEIQWWFLRGPEDLDPGAEGAGAQVELLPDRDPDSDGTKISTVKVQGNDISHKLQISKVRKKDEGLYECRVTDANYGELQEHKAQAYLKVNANSHARRMQAFEASPMWLQDMKPRKNVSAAIPSSIHGSANQRTHSTSSPQVVAKIPKQSPQSAKSKSPVKSTERTAKLTLNSKHHPAPTVL

SEQ ID NO: 6175 - DNA, 2390 bp, Homo sapiens
gagtggagaagggaaggaaaaggagagaagagaggaagcgaggagagaaggaagtggagctcttgcccgacagagacccggacagcgacgggaccaagatcagcacagtgaaagtccaaggcaatgacatctcccacaagcttcagatttccaaagtgaggaaaaaggatgaaggcttatatgagtgcagggtgactgatgccaactacggggagcttcaggaacacaaggcccaggcctatctgaaagtcaatgccaacagccatgcccgcagaatgcaggccttcgaagcctcgcccatgtggctgcaggatatgaagccccgcaagaacgtctccgcagccatccccagcagcatccatggctctgccaaccaacgaacgcactccacctccagccctcaagtggtagccaaaatccccaaacaaagtccacaatcagcaaagagcaaatcgcctgtaaaatctacggagcggacagcaaagttgaccctaaactccaagcaccaccctgcacccactgtactctaattcactacacaaggagcgcctgcttccggaagcataaatgaagaggctatcacatgctttgttgatcatattttctttggcaaaacactgatcttttattttaagagaattaacgtgaagtgatagaacgttttctaatagcaagatctattttttcccttttctttcggcgactaaaatcatctcactgactgctcaagggttggcctgaatgtcatcaggatagggaatatttactatggataccactaatttcctactaaaggacccagcatcttcaggaagcaaacagagatcaaaaggctacagaacagaagctatcatcagacaaaaccccctttttaggggaagaacaaaactatcaacactgcaagtcaacaaggaggacattactttaaggaataacatgagaaagaaatttttttattttcccctttttttcttggatttttcttctttttcttgattacagttcttgttcaatggtggcaagtgctggttatggccaatctccgtcaatcctaggaggtttatagaactacattttgagtgttctatatttcagtgtattttaattcattttgcaattcctgtgtatgcaaacctgataaattctgtaaattgcttatagtatgtgtgctataacttcaaagtagatgtactgcgaccctcatgcaagctgatttttatcattatatatataaatatatacttaagaatatctgtgtgttgggccaatgaccaactttttttgacgaagcatttgtttttcgttgataattcatacactgcgtgaattttgtaattcattgtttcacttccacaggtttgacagctgcagatggtctctattgtcctctgcttcattctggaaagtgcatattcaaaattgtatcagtctctgatcgatgaattaattttgttatgtctgtgctaagttggaatttactatgttcctttatacatggtgtttattgaggtttgagagtctcttgactgtgaagaatgtacactgtctggttttgacagctatttctgtattattatcattataatcttgtcaaatagaaatgttgcttctagaaaatttgcctaggaggcgaatgtggggaaggtgaagcactcaccataattccctaaattcatgttagaacatttcttgctatggttaaaaatgctgcttcctttgacctttatgaatttctgtacctttgtcattctgttacctttgtcattctgttatttgcgctaattatattttaatgtctcctaattaaaaattaaaatttggttgttggctaaatacaatatgcaaaagatgatggcaggtccccgactaaagaagattaatgtgttcagttttcactggttaagtgaattataattttaaatattccattcttatttatgtctttatgataattcagactattttattttgaacctgttttctactctggcaaagaaagataggcagaactattagtgttccatatacattatggaatagataaagcttgagagataaatgacctaagttttccttccagagagactcttccattttctctcattacaaaaccagaagatcagctatgtggggccatcagctcccagcctaaggtcctataacccgaagcttgaaggcaatcagtacctctgcttttcaaaggtaaatgcattcattttctttgattcagttataagcaagtatatattttcataatattcttgacattacctgagaaataatacttcatgctaaatcttttactgccacttttctcattcatttggtttatcatttcagtttaatgagaaaaattaataaaggttttgattgcactattttattaacct

SEQ ID NO: 6176 - protein, 84 aa, Homo sapiens
MQAFEASPMWLQDMKPRKNVSAAIPSSIHGSANQRTHSTSSPQVVAKIPKQSPQSAKSKSPVKSTERTAKLTLNSKHHPAPTVL

SEQ ID NO: 6177 - DNA, 2527 bp, Homo sapiens
ggacagcgccgggacagcgccgggacagccccgggacagccccggggaaagcgcggggacggcgtggggtggagctcttgcccgacagagacccggacagcgacgggaccaagatcagcacagtgaaagtccaaggcaatgacatctcccacaagcttcagatttccaaagtgaggaaaaaggatgaaggcttatatgagtgcagggtgactgatgccaactacggggagcttcaggaacacaaggcccaggcctatctgaaagtcaatgccaacagccatgcccgcagaatgcaggccttcgaagcctcgcccatgtggctgcaggatatgaagccccgcaagaacgtctccgcagccatccccagcagcatccatggctctgccaaccaacgaacgcactccacctccagccctcaagtggtagccaaaatccccaaacaaagtccacaatcaggtgcgaggatagctacaagccatggactttctgtcctgcttcttgtttgtggctttgtgaagggtgctttgctttaatctaaagtgctgacttttttccaatatcactttctcttcttaaagcaaagagcaaatcgcctgtaaaatctacggagcggacagcaaagttgaccctaaactccaagcaccaccctgcacccactgtactctaattcactacacaaggagcgcctgcttccggaagcataaatgaagaggctatcacatgctttgttgatcatattttctttggcaaaacactgatcttttattttaagagaattaacgtgaagtgatagaacgttttctaatagcaagatctattttttcccttttctttcggcgactaaaatcatctcactgactgctcaagggttggcctgaatgtcatcaggatagggaatatttactatggataccactaatttcctactaaaggacccagcatcttcaggaagcaaacagagatcaaaaggctacagaacagaagctatcatcagacaaaaccccctttttaggggaagaacaaaactatcaacactgcaagtcaacaaggaggacattactttaaggaataacatgagaaagaaatttttttattttcccctttttttcttggatttttcttctttttcttgattacagttcttgttcaatggtggcaagtgctggttatggccaatctccgtcaatcctaggaggtttatagaactacattttgagtgttctatatttcagtgtattttaattcattttgcaattcctgtgtatgcaaacctgataaattctgtaaattgcttatagtatgtgtgctataacttcaaagtagatgtactgcgaccctcatgcaagctgatttttatcattatatatataaatatatacttaagaatatctgtgtgttgggccaatgaccaactttttttgacgaagcatttgtttttcgttgataattcatacactgcgtgaattttgtaattcattgtttcacttccacaggtttgacagctgcagatggtctctattgtcctctgcttcattctggaaagtgcatattcaaaattgtatcagtctctgatcgatgaattaattttgttatgtctgtgctaagttggaatttactatgttcctttatacatggtgtttattgaggtttgagagtctcttgactgtgaagaatgtacactgtctggttttgacagctatttctgtattattatcattataatcttgtcaaatagaaatgttgcttctagaaaatttgcctaggaggcgaatgtggggaaggtgaagcactcaccataattccctaaattcatgttagaacatttcttgctatggttaaaaatgctgcttcctttgacctttatgaatttctgtacctttgtcattctgttacctttgtcattctgttatttgcgctaattatattttaatgtctcctaattaaaaattaaaatttggttgttggctaaatacaatatgcaaaagatgatggcaggtccccgactaaagaagattaatgtgttcagttttcactggttaagtgaattataattttaaatattccattcttatttatgtctttatgataattcagactattttattttgaacctgttttctactctggcaaagaaagataggcagaactattagtgttccatatacattatggaatagataaagcttgagagataaatgacctaagttttccttccagagagactcttccattttctctcattacaaaaccagaagatcagctatgtggggccatcagctcccagcctaaggtcctataacccgaagcttgaaggcaatcagtacctctgcttttcaaaggtaaatgcattcattttctttgattcagttataagcaagtatatattttcataatattcttgacattacctgagaaataatacttcatgctaaatcttttactgccacttttctcattcatttggtttatcatttcagtttaatgagaaaaattaataaaggttttgattgcactattttattaacct

SEQ ID NO: 6178 - protein, 80 aa, Homo sapiens
MQAFEASPMWLQDMKPRKNVSAAIPSSIHGSANQRTHSTSSPQVVAKIPKQSPQSGARIATSHGLSVLLLVCGFVKGALL

SEQ ID NO: 6179 - DNA, 2250 bp, Homo sapiens
gtccgggcagcccccggcgcagcgcggccgcagcagcctccgccccccgcacggtgtgagcgcccgacgcggccgaggcggccggagtcccgagctagccccggcggccgccgccgcccagaccggacgacaggccacctcgtcggcgtccgcccgagtccccgcctcgccgccaacgccacaaccaccgcgcacggccccctgactccgtccagtattgatcgggagagccggagcgagctcttcggggagcagcgatgcgaccctccgggacggccggggcagcgctcctggcgctgctggctgcgctctgcccggcgagtcgggctctggaggaaaagaaagtttgccaaggcacgagtaacaagctcacgcagttgggcacttttgaagatcattttctcagcctccagaggatgttcaataactgtgaggtggtccttgggaatttggaaattacctatgtgcagaggaattatgatctttccttcttaaagaccatccaggaggtggctggttatgtcctcattgccctcaacacagtggagcgaattcctttggaaaacctgcagatcatcagaggaaatatgtactacgaaaattcctatgccttagcagtcttatctaactatgatgcaaataaaaccggactgaaggagctgcccatgagaaatttacaggaaatcctgcatggcgccgtgcggttcagcaacaaccctgccctgtgcaacgtggagagcatccagtggcgggacatagtcagcagtgactttctcagcaacatgtcgatggacttccagaaccacctgggcagctgccaaaagtgtgatccaagctgtcccaatgggagctgctggggtgcaggagaggagaactgccagaaactgaccaaaatcatctgtgcccagcagtgctccgggcgctgccgtggcaagtcccccagtgactgctgccacaaccagtgtgctgcaggctgcacaggcccccgggagagcgactgcctggtctgccgcaaattccgagacgaagccacgtgcaaggacacctgccccccactcatgctctacaaccccaccacgtaccagatggatgtgaaccccgagggcaaatacagctttggtgccacctgcgtgaagaagtgtccccgtaattatgtggtgacagatcacggctcgtgcgtccgagcctgtggggccgacagctatgagatggaggaagacggcgtccgcaagtgtaagaagtgcgaagggccttgccgcaaagtgtgtaacggaataggtattggtgaatttaaagactcactctccataaatgctacgaatattaaacacttcaaaaactgcacctccatcagtggcgatctccacatcctgccggtggcatttaggggtgactccttcacacatactcctcctctggatccacaggaactggatattctgaaaaccgtaaaggaaatcacagggtttttgctgattcaggcttggcctgaaaacaggacggacctccatgcctttgagaacctagaaatcatacgcggcaggaccaagcaacatggtcagttttctcttgcagtcgtcagcctgaacataacatccttgggattacgctccctcaaggagataagtgatggagatgtgataatttcaggaaacaaaaatttgtgctatgcaaatacaataaactggaaaaaactgtttgggacctccggtcagaaaaccaaaattataagcaacagaggtgaaaacagctgcaaggccacaggccaggtctgccatgccttgtgctcccccgagggctgctggggcccggagcccagggactgcgtctcttgccggaatgtcagccgaggcagggaatgcgtggacaagtgcaaccttctggagggtgagccaagggagtttgtggagaactctgagtgcatacagtgccacccagagtgcctgcctcaggccatgaacatcacctgcacaggacggggaccagacaactgtatccagtgtgcccactacattgacggcccccactgcgtcaagacctgcccggcaggagtcatgggagaaaacaacaccctggtctggaagtacgcagacgccggccatgtgtgccacctgtgccatccaaactgcacctacgggtcctaataaatcttcactgtctgactttagtctcccactaaaactgcatttcctttctacaatttcaatttctccctttgcttcaaataaagtcctgacactattcatttga

SEQ ID NO: 6180 - protein, 628 aa, Homo sapiens; identical to SEQ ID NO: 847

SEQ ID NO: 6181 - DNA, 2876 bp, Homo sapiens
gtccgggcagcccccggcgcagcgcggccgcagcagcctccgccccccgcacggtgtgagcgcccgacgcggccgaggcggccggagtcccgagctagccccggcggccgccgccgcccagaccggacgacaggccacctcgtcggcgtccgcccgagtccccgcctcgccgccaacgccacaaccaccgcgcacggccccctgactccgtccagtattgatcgggagagccggagcgagctcttcggggagcagcgatgcgaccctccgggacggccggggcagcgctcctggcgctgctggctgcgctctgcccggcgagtcgggctctggaggaaaagaaagtttgccaaggcacgagtaacaagctcacgcagttgggcacttttgaagatcattttctcagcctccagaggatgttcaataactgtgaggtggtccttgggaatttggaaattacctatgtgcagaggaattatgatctttccttcttaaagaccatccaggaggtggctggttatgtcctcattgccctcaacacagtggagcgaattcctttggaaaacctgcagatcatcagaggaaatatgtactacgaaaattcctatgccttagcagtcttatctaactatgatgcaaataaaaccggactgaaggagctgcccatgagaaatttacaggaaatcctgcatggcgccgtgcggttcagcaacaaccctgccctgtgcaacgtggagagcatccagtggcgggacatagtcagcagtgactttctcagcaacatgtcgatggacttccagaaccacctgggcagctgccaaaagtgtgatccaagctgtcccaatgggagctgctggggtgcaggagaggagaactgccagaaactgaccaaaatcatctgtgcccagcagtgctccgggcgctgccgtggcaagtcccccagtgactgctgccacaaccagtgtgctgcaggctgcacaggcccccgggagagcgactgcctggtctgccgcaaattccgagacgaagccacgtgcaaggacacctgccccccactcatgctctacaaccccaccacgtaccagatggatgtgaaccccgagggcaaatacagctttggtgccacctgcgtgaagaagtgtccccgtaattatgtggtgacagatcacggctcgtgcgtccgagcctgtggggccgacagctatgagatggaggaagacggcgtccgcaagtgtaagaagtgcgaagggccttgccgcaaagtgtgtaacggaataggtattggtgaatttaaagactcactctccataaatgctacgaatattaaacacttcaaaaactgcacctccatcagtggcgatctccacatcctgccggtggcatttaggggtgactccttcacacatactcctcctctggatccacaggaactggatattctgaaaaccgtaaaggaaatcacagggtttttgctgattcaggcttggcctgaaaacaggacggacctccatgcctttgagaacctagaaatcatacgcggcaggaccaagcaacatggtcagttttctcttgcagtcgtcagcctgaacataacatccttgggattacgctccctcaaggagataagtgatggagatgtgataatttcaggaaacaaaaatttgtgctatgcaaatacaataaactggaaaaaactgtttgggacctccggtcagaaaaccaaaattataagcaacagaggtgaaaacagctgcaaggccacaggccaggtctgccatgccttgtgctcccccgagggctgctggggcccggagcccagggactgcgtctcttgccggaatgtcagccgaggcagggaatgcgtggacaagtgcaaccttctggagggtgagccaagggagtttgtggagaactctgagtgcatacagtgccacccagagtgcctgcctcaggccatgaacatcacctgcacaggacggggaccagacaactgtatccagtgtgcccactacattgacggcccccactgcgtcaagacctgcccggcaggagtcatgggagaaaacaacaccctggtctggaagtacgcagacgccggccatgtgtgccacctgtgccatccaaactgcacctacgggccaggaaatgagagtctcaaagccatgttattctgcctttttaaactatcatcctgtaatcaaagtaatgatggcagcgtgtcccaccagagcgggagcccagctgctcaggagtcatgcttaggatggatcccttctcttctgccgtcagagtttcagctgggttggggtggatgcagccacctccatgcctggccttctgcatctgtgatcatcacggcctcctcctgccactgagcctcatgccttcacgtgtctgttccccccgcttttcctttctgccacccctgcacgtgggccgccaggttcccaagagtatcctacccatttccttccttccactccctttgccagtgcctctcaccccaactagtagctaaccatcacccccaggactgacctcttcctcctcgctgccagatgattgttcaaagcacagaatttgtcagaaacctgcagggactccatgctgccagccttctccgtaattagcatggccccagtccatgcttctagccttggttccttctgcccctctgtttgaaattctagagccagctgtgggacaattatctgtgtcaaaagccagatgtgaaaacatctcaataacaaactggctgctttgttcaatgctagaacaacgcctgtcacagagtagaaactcaaaaatatttgctgagtgaatgaacaaatgaataaatgcataataaataattaaccaccaatccaacatccaga

SEQ ID NO: 6182 - protein, 705 aa, Homo sapiens; identical to SEQ ID NO: 851

SEQ ID NO: 6183 - DNA, 3843 bp, Homo sapiens
gtccgggcagcccccggcgcagcgcggccgcagcagcctccgccccccgcacggtgtgagcgcccgacgcggccgaggcggccggagtcccgagctagccccggcggccgccgccgcccagaccggacgacaggccacctcgtcggcgtccgcccgagtccccgcctcgccgccaacgccacaaccaccgcgcacggccccctgactccgtccagtattgatcgggagagccggagcgagctcttcggggagcagcgatgcgaccctccgggacggccggggcagcgctcctggcgctgctggctgcgctctgcccggcgagtcgggctctggaggaaaagaaagtttgccaaggcacgagtaacaagctcacgcagttgggcacttttgaagatcattttctcagcctccagaggatgttcaataactgtgaggtggtccttgggaatttggaaattacctatgtgcagaggaattatgatctttccttcttaaagaccatccaggaggtggctggttatgtcctcattgccctcaacacagtggagcgaattcctttggaaaacctgcagatcatcagaggaaatatgtactacgaaaattcctatgccttagcagtcttatctaactatgatgcaaataaaaccggactgaaggagctgcccatgagaaatttacagggccaaaagtgtgatccaagctgtcccaatgggagctgctggggtgcaggagaggagaactgccagaaactgaccaaaatcatctgtgcccagcagtgctccgggcgctgccgtggcaagtcccccagtgactgctgccacaaccagtgtgctgcaggctgcacaggcccccgggagagcgactgcctggtctgccgcaaattccgagacgaagccacgtgcaaggacacctgccccccactcatgctctacaaccccaccacgtaccagatggatgtgaaccccgagggcaaatacagctttggtgccacctgcgtgaagaagtgtccccgtaattatgtggtgacagatcacggctcgtgcgtccgagcctgtggggccgacagctatgagatggaggaagacggcgtccgcaagtgtaagaagtgcgaagggccttgccgcaaagtgtgtaacggaataggtattggtgaatttaaagactcactctccataaatgctacgaatattaaacacttcaaaaactgcacctccatcagtggcgatctccacatcctgccggtggcatttaggggtgactccttcacacatactcctcctctggatccacaggaactggatattctgaaaaccgtaaaggaaatcacagggtttttgctgattcaggcttggcctgaaaacaggacggacctccatgcctttgagaacctagaaatcatacgcggcaggaccaagcaacatggtcagttttctcttgcagtcgtcagcctgaacataacatccttgggattacgctccctcaaggagataagtgatggagatgtgataatttcaggaaacaaaaatttgtgctatgcaaatacaataaactggaaaaaactgtttgggacctccggtcagaaaaccaaaattataagcaacagaggtgaaaacagctgcaaggccacaggccaggtctgccatgccttgtgctcccccgagggctgctggggcccggagcccagggactgcgtctcttgccggaatgtcagccgaggcagggaatgcgtggacaagtgcaaccttctggagggtgagccaagggagtttgtggagaactctgagtgcatacagtgccacccagagtgcctgcctcaggccatgaacatcacctgcacaggacggggaccagacaactgtatccagtgtgcccactacattgacggcccccactgcgtcaagacctgcccggcaggagtcatgggagaaaacaacaccctggtctggaagtacgcagacgccggccatgtgtgccacctgtgccatccaaactgcacctacggatgcactgggccaggtcttgaaggctgtccaacgaatgggcctaagatcccgtccatcgccactgggatggtgggggccctcctcttgctgctggtggtggccctggggatcggcctcttcatgcgaaggcgccacatcgttcggaagcgcacgctgcggaggctgctgcaggagagggagcttgtggagcctcttacacccagtggagaagctcccaaccaagctctcttgaggatcttgaaggaaactgaattcaaaaagatcaaagtgctgggctccggtgcgttcggcacggtgtataagggactctggatcccagaaggtgagaaagttaaaattcccgtcgctatcaaggaattaagagaagcaacatctccgaaagccaacaaggaaatcctcgatgaagcctacgtgatggccagcgtggacaacccccacgtgtgccgcctgctgggcatctgcctcacctccaccgtgcagctcatcacgcagctcatgcccttcggctgcctcctggactatgtccgggaacacaaagacaatattggctcccagtacctgctcaactggtgtgtgcagatcgcaaagggcatgaactacttggaggaccgtcgcttggtgcaccgcgacctggcagccaggaacgtactggtgaaaacaccgcagcatgtcaagatcacagattttgggctggccaaactgctgggtgcggaagagaaagaataccatgcagaaggaggcaaagtgcctatcaagtggatggcattggaatcaattttacacagaatctatacccaccagagtgatgtctggagctacggggtgactgtttgggagttgatgacctttggatccaagccatatgacggaatccctgccagcgagatctcctccatcctggagaaaggagaacgcctccctcagccacccatatgtaccatcgatgtctacatgatcatggtcaagtgctggatgatagacgcagatagtcgcccaaagttccgtgagttgatcatcgaattctccaaaatggcccgagacccccagcgctaccttgtcattcagggggatgaaagaatgcatttgccaagtcctacagactccaacttctaccgtgccctgatggatgaagaagacatggacgacgtggtggatgccgacgagtacctcatcccacagcagggcttcttcagcagcccctccacgtcacggactcccctcctgagctctctgagtgcaaccagcaacaattccaccgtggcttgcattgatagaaatgggctgcaaagctgtcccatcaaggaagacagcttcttgcagcgatacagctcagaccccacaggcgccttgactgaggacagcatagacgacaccttcctcccagtgcctggtgagtggcttgtctggaaacagtcctgctcctcaacctcctcgacccactcagcagcagccagtctccagtgtccaagccaggtgctccctccagcatctccagagggggaaacagtggcagatttgcagacacagtgaagggcgtaaggagcagataaacacatgaccgagcctgcacaagctctttgttgtgtctggttgtttgctgtacctctgttgtaagaatgaatctgcaaaatttctagcttatgaagcaaatcacggacatacacatctgtgtgtgtgagtgttcatgatgtgtgtacatctgtgtatgtgtgtgtgtgtatgtgtgtgtttgtgacagatttgatccctgttctctctgctggctctatcttgacctgtgaaacgtatatttaactaattaaatattagttaatattaataaattttaagctttatccag

SEQ ID NO: 6184 - protein, 1091 aa, Homo sapiens
MRPSGTAGAALLALLAALCPASRALEEKKVCQGTSNKLTQLGTFEDHFLSLQRMFNNCEVVLGNLEITYVQRNYDLSFLKTIQEVAGYVLIALNTVERIPLENLQIIRGNMYYENSYALAVLSNYDANKTGLKELPMRNLQGQKCDPSCPNGSCWGAGEENCQKLTKIICAQQCSGRCRGKSPSDCCHNQCAAGCTGPRESDCLVCRKFRDEATCKDTCPPLMLYNPTTYQMDVNPEGKYSFGATCVKKCPRNYVVTDHGSCVRACGADSYEMEEDGVRKCKKCEGPCRKVCNGIGIGEFKDSLSINATNIKHFKNCTSISGDLHILPVAFRGDSFTHTPPLDPQELDILKTVKEITGFLLIQAWPENRTDLHAFENLEIIRGRTKQHGQFSLAVVSLNITSLGLRSLKEISDGDVIISGNKNLCYANTINWKKLFGTSGQKTKIISNRGENSCKATGQVCHALCSPEGCWGPEPRDCVSCRNVSRGRECVDKCNLLEGEPREFVENSECIQCHPECLPQAMNITCTGRGPDNCIQCAHYIDGPHCVKTCPAGVMGENNTLVWKYADAGHVCHLCHPNCTYGCTGPGLEGCPTNGPKIPSIATGMVGALLLLLVVALGIGLFMRRRHIVRKRTLRRLLQERELVEPLTPSGEAPNQALLRILKETEFKKIKVLGSGAFGTVYKGLWIPEGEKVKIPVAIKELREATSPKANKEILDEAYVMASVDNPHVCRLLGICLTSTVQLITQLMPFGCLLDYVREHKDNIGSQYLLNWCVQIAKGMNYLEDRRLVHRDLAARNVLVKTPQHVKITDFGLAKLLGAEEKEYHAEGGKVPIKWMALESILHRIYTHQSDVWSYGVTVWELMTFGSKPYDGIPASEISSILEKGERLPQPPICTIDVYMIMVKCWMIDADSRPKFRELIIEFSKMARDPQRYLVIQGDERMHLPSPTDSNFYRALMDEEDMDDVVDADEYLIPQQGFFSSPSTSRTPLLSSLSATSNNSTVACIDRNGLQSCPIKEDSFLQRYSSDPTGALTEDSIDDTFLPVPGEWLVWKQSCSSTSSTHSAAASLQCPSQVLPPASPEGETVADLQTQ

SEQ ID NO: 6185 - DNA, 5610 bp, Homo sapiens
gtccgggcagcccccggcgcagcgcggccgcagcagcctccgccccccgcacggtgtgagcgcccgacgcggccgaggcggccggagtcccgagctagccccggcggccgccgccgcccagaccggacgacaggccacctcgtcggcgtccgcccgagtccccgcctcgccgccaacgccacaaccaccgcgcacggccccctgactccgtccagtattgatcgggagagccggagcgagctcttcggggagcagcgatgcgaccctccgggacggccggggcagcgctcctggcgctgctggctgcgctctgcccggcgagtcgggctctggaggaaaagaaagtttgccaaggcacgagtaacaagctcacgcagttgggcacttttgaagatcattttctcagcctccagaggatgttcaataactgtgaggtggtccttgggaatttggaaattacctatgtgcagaggaattatgatctttccttcttaaagaccatccaggaggtggctggttatgtcctcattgccctcaacacagtggagcgaattcctttggaaaacctgcagatcatcagaggaaatatgtactacgaaaattcctatgccttagcagtcttatctaactatgatgcaaataaaaccggactgaaggagctgcccatgagaaatttacaggaaatcctgcatggcgccgtgcggttcagcaacaaccctgccctgtgcaacgtggagagcatccagtggcgggacatagtcagcagtgactttctcagcaacatgtcgatggacttccagaaccacctgggcagctgccaaaagtgtgatccaagctgtcccaatgggagctgctggggtgcaggagaggagaactgccagaaactgaccaaaatcatctgtgcccagcagtgctccgggcgctgccgtggcaagtcccccagtgactgctgccacaaccagtgtgctgcaggctgcacaggcccccgggagagcgactgcctggtctgccgcaaattccgagacgaagccacgtgcaaggacacctgccccccactcatgctctacaaccccaccacgtaccagatggatgtgaaccccgagggcaaatacagctttggtgccacctgcgtgaagaagtgtccccgtaattatgtggtgacagatcacggctcgtgcgtccgagcctgtggggccgacagctatgagatggaggaagacggcgtccgcaagtgtaagaagtgcgaagggccttgccgcaaagtgtgtaacggaataggtattggtgaatttaaagactcactctccataaatgctacgaatattaaacacttcaaaaactgcacctccatcagtggcgatctccacatcctgccggtggcatttaggggtgactccttcacacatactcctcctctggatccacaggaactggatattctgaaaaccgtaaaggaaatcacagggtttttgctgattcaggcttggcctgaaaacaggacggacctccatgcctttgagaacctagaaatcatacgcggcaggaccaagcaacatggtcagttttctcttgcagtcgtcagcctgaacataacatccttgggattacgctccctcaaggagataagtgatggagatgtgataatttcaggaaacaaaaatttgtgctatgcaaatacaataaactggaaaaaactgtttgggacctccggtcagaaaaccaaaattataagcaacagaggtgaaaacagctgcaaggccacaggccaggtctgccatgccttgtgctcccccgagggctgctggggcccggagcccagggactgcgtctcttgccggaatgtcagccgaggcagggaatgcgtggacaagtgcaaccttctggagggtgagccaagggagtttgtggagaactctgagtgcatacagtgccacccagagtgcctgcctcaggccatgaacatcacctgcacaggacggggaccagacaactgtatccagtgtgcccactacattgacggcccccactgcgtcaagacctgcccggcaggagtcatgggagaaaacaacaccctggtctggaagtacgcagacgccggccatgtgtgccacctgtgccatccaaactgcacctacggatgcactgggccaggtcttgaaggctgtccaacgaatgggcctaagatcccgtccatcgccactgggatggtgggggccctcctcttgctgctggtggtggccctggggatcggcctcttcatgcgaaggcgccacatcgttcggaagcgcacgctgcggaggctgctgcaggagagggagcttgtggagcctcttacacccagtggagaagctcccaaccaagctctcttgaggatcttgaaggaaactgaattcaaaaagatcaaagtgctgggctccggtgcgttcggcacggtgtataagggactctggatcccagaaggtgagaaagttaaaattcccgtcgctatcaaggaattaagagaagcaacatctccgaaagccaacaaggaaatcctcgatgaagcctacgtgatggccagcgtggacaacccccacgtgtgccgcctgctgggcatctgcctcacctccaccgtgcagctcatcacgcagctcatgcccttcggctgcctcctggactatgtccgggaacacaaagacaatattggctcccagtacctgctcaactggtgtgtgcagatcgcaaagggcatgaactacttggaggaccgtcgcttggtgcaccgcgacctggcagccaggaacgtactggtgaaaacaccgcagcatgtcaagatcacagattttgggctggccaaactgctgggtgcggaagagaaagaataccatgcagaaggaggcaaagtgcctatcaagtggatggcattggaatcaattttacacagaatctatacccaccagagtgatgtctggagctacggggtgactgtttgggagttgatgacctttggatccaagccatatgacggaatccctgccagcgagatctcctccatcctggagaaaggagaacgcctccctcagccacccatatgtaccatcgatgtctacatgatcatggtcaagtgctggatgatagacgcagatagtcgcccaaagttccgtgagttgatcatcgaattctccaaaatggcccgagacccccagcgctaccttgtcattcagggggatgaaagaatgcatttgccaagtcctacagactccaacttctaccgtgccctgatggatgaagaagacatggacgacgtggtggatgccgacgagtacctcatcccacagcagggcttcttcagcagcccctccacgtcacggactcccctcctgagctctctgagtgcaaccagcaacaattccaccgtggcttgcattgatagaaatgggctgcaaagctgtcccatcaaggaagacagcttcttgcagcgatacagctcagaccccacaggcgccttgactgaggacagcatagacgacaccttcctcccagtgcctgaatacataaaccagtccgttcccaaaaggcccgctggctctgtgcagaatcctgtctatcacaatcagcctctgaaccccgcgcccagcagagacccacactaccaggacccccacagcactgcagtgggcaaccccgagtatctcaacactgtccagcccacctgtgtcaacagcacattcgacagccctgcccactgggcccagaaaggcagccaccaaattagcctggacaaccctgactaccagcaggacttctttcccaaggaagccaagccaaatggcatctttaagggctccacagctgaaaatgcagaatacctaagggtcgcgccacaaagcagtgaatttattggagcatgaccacggaggatagtatgagccctaaaaatccagactctttcgatacccaggaccaagccacagcaggtcctccatcccaacagccatgcccgcattagctcttagacccacagactggttttgcaacgtttacaccgactagccaggaagtacttccacctcgggcacattttgggaagttgcattcctttgtcttcaaactgtgaagcatttacagaaacgcatccagcaagaatattgtccctttgagcagaaatttatctttcaaagaggtatatttgaaaaaaaaaaaaagtatatgtgaggatttttattgattggggatcttggagtttttcattgtcgctattgatttttacttcaatgggctcttccaacaaggaagaagcttgctggtagcacttgctaccctgagttcatccaggcccaactgtgagcaaggagcacaagccacaagtcttccagaggatgcttgattccagtggttctgcttcaaggcttccactgcaaaacactaaagatccaagaaggccttcatggccccagcaggccggatcggtactgtatcaagtcatggcaggtacagtaggataagccactctgtcccttcctgggcaaagaagaaacggaggggatggaattcttccttagacttacttttgtaaaaatgtccccacggtacttactccccactgatggaccagtggtttccagtcatgagcgttagactgacttgtttgtcttccattccattgttttgaaactcagtatgctgcccctgtcttgctgtcatgaaatcagcaagagaggatgacacatcaaataataactcggattccagcccacattggattcatcagcatttggaccaatagcccacagctgagaatgtggaatacctaaggatagcaccgcttttgttctcgcaaaaacgtatctcctaatttgaggctcagatgaaatgcatcaggtcctttggggcatagatcagaagactacaaaaatgaagctgctctgaaatctcctttagccatcaccccaaccccccaaaattagtttgtgttacttatggaagatagttttctccttttacttcacttcaaaagctttttactcaaagagtatatgttccctccaggtcagctgcccccaaaccccctccttacgctttgtcacacaaaaagtgtctctgccttgagtcatctattcaagcacttacagctctggccacaacagggcattttacaggtgcgaatgacagtagcattatgagtagtgtggaattcaggtagtaaatatgaaactagggtttgaaattgataatgctttcacaacatttgcagatgttttagaaggaaaaaagttccttcctaaaataatttctctacaattggaagattggaagattcagctagttaggagcccaccttttttcctaatctgtgtgtgccctgtaacctgactggttaacagcagtcctttgtaaacagtgttttaaactctcctagtcaatatccaccccatccaatttatcaaggaagaaatggttcagaaaatattttcagcctacagttatgttcagtcacacacacatacaaaatgttccttttgcttttaaagtaatttttgactcccagatcagtcagagcccctacagcattgttaagaaagtatttgatttttgtctcaatgaaaataaaactatattcatttccactct

SEQ ID NO: 6186 - protein, 1210 aa, Homo sapiens [sequence omitted]

SEQ ID NO: 6187 - DNA, 9841 bp, Homo sapiens
gtccgggcagcccccggcgcagcgcggccgcagcagcctccgccccccgcacggtgtgagcgcccgacgcggccgaggcggccggagtcccgagctagccccggcggccgccgccgcccagaccggacgacaggccacctcgtcggcgtccgcccgagtccccgcctcgccgccaacgccacaaccaccgcgcacggccccctgactccgtccagtattgatcgggagagccggagcgagctcttcggggagcagcgatgcgaccctccgggacggccggggcagcgctcctggcgctgctggctgcgctctgcccggcgagtcgggctctggaggaaaagaaagtttgccaaggcacgagtaacaagctcacgcagttgggcacttttgaagatcattttctcagcctccagaggatgttcaataactgtgaggtggtccttgggaatttggaaattacctatgtgcagaggaattatgatctttccttcttaaagaccatccaggaggtggctggttatgtcctcattgccctcaacacagtggagcgaattcctttggaaaacctgcagatcatcagaggaaatatgtactacgaaaattcctatgccttagcagtcttatctaactatgatgcaaataaaaccggactgaaggagctgcccatgagaaatttacaggaaatcctgcatggcgccgtgcggttcagcaacaaccctgccctgtgcaacgtggagagcatccagtggcgggacatagtcagcagtgactttctcagcaacatgtcgatggacttccagaaccacctgggcagctgccaaaagtgtgatccaagctgtcccaatgggagctgctggggtgcaggagaggagaactgccagaaactgaccaaaatcatctgtgcccagcagtgctccgggcgctgccgtggcaagtcccccagtgactgctgccacaaccagtgtgctgcaggctgcacaggcccccgggagagcgactgcctggtctgccgcaaattccgagacgaagccacgtgcaaggacacctgccccccactcatgctctacaaccccaccacgtaccagatggatgtgaaccccgagggcaaatacagctttggtgccacctgcgtgaagaagtgtccccgtaattatgtggtgacagatcacggctcgtgcgtccgagcctgtggggccgacagctatgagatggaggaagacggcgtccgcaagtgtaagaagtgcgaagggccttgccgcaaagtgtgtaacggaataggtattggtgaatttaaagactcactctccataaatgctacgaatattaaacacttcaaaaactgcacctccatcagtggcgatctccacatcctgccggtggcatttaggggtgactccttcacacatactcctcctctggatccacaggaactggatattctgaaaaccgtaaaggaaatcacagggtttttgctgattcaggcttggcctgaaaacaggacggacctccatgcctttgagaacctagaaatcatacgcggcaggaccaagcaacatggtcagttttctcttgcagtcgtcagcctgaacataacatccttgggattacgctccctcaaggagataagtgatggagatgtgataatttcaggaaacaaaaatttgtgctatgcaaatacaataaactggaaaaaactgtttgggacctccggtcagaaaaccaaaattataagcaacagaggtgaaaacagctgcaaggccacaggccaggtctgccatgccttgtgctcccccgagggctgctggggcccggagcccagggactgcgtctcttgccggaatgtcagccgaggcagggaatgcgtggacaagtgcaaccttctggagggtgagccaagggagtttgtggagaactctgagtgcatacagtgccacccagagtgcctgcctcaggccatgaacatcacctgcacaggacggggaccagacaactgtatccagtgtgcccactacattgacggcccccactgcgtcaagacctgcccggcaggagtcatgggagaaaacaacaccctggtctggaagtacgcagacgccggccatgtgtgccacctgtgccatccaaactgcacctacggatgcactgggccaggtcttgaaggctgtccaacgaatgggcctaagatcccgtccatcgccactgggatggtgggggccctcctcttgctgctggtggtggccctggggatcggcctcttcatgcgaaggcgccacatcgttcggaagcgcacgctgcggaggctgctgcaggagagggagcttgtggagcctcttacacccagtggagaagctcccaaccaagctctcttgaggatcttgaaggaaactgaattcaaaaagatcaaagtgctgggctccggtgcgttcggcacggtgtataagggactctggatcccagaaggtgagaaagttaaaattcccgtcgctatcaaggaattaagagaagcaacatctccgaaagccaacaaggaaatcctcgatgaagcctacgtgatggccagcgtggacaacccccacgtgtgccgcctgctgggcatctgcctcacctccaccgtgcagctcatcacgcagctcatgcccttcggctgcctcctggactatgtccgggaacacaaagacaatattggctcccagtacctgctcaactggtgtgtgcagatcgcaaagggcatgaactacttggaggaccgtcgcttggtgcaccgcgacctggcagccaggaacgtactggtgaaaacaccgcagcatgtcaagatcacagattttgggctggccaaactgctgggtgcggaagagaaagaataccatgcagaaggaggcaaagtgcctatcaagtggatggcattggaatcaattttacacagaatctatacccaccagagtgatgtctggagctacggggtgactgtttgggagttgatgacctttggatccaagccatatgacggaatccctgccagcgagatctcctccatcctggagaaaggagaacgcctccctcagccacccatatgtaccatcgatgtctacatgatcatggtcaagtgctggatgatagacgcagatagtcgcccaaagttccgtgagttgatcatcgaattctccaaaatggcccgagacccccagcgctaccttgtcattcagggggatgaaagaatgcatttgccaagtcctacagactccaacttctaccgtgccctgatggatgaagaagacatggacgacgtggtggatgccgacgagtacctcatcccacagcagggcttcttcagcagcccctccacgtcacggactcccctcctgagctctctgagtgcaaccagcaacaattccaccgtggcttgcattgatagaaatgggctgcaaagctgtcccatcaaggaagacagcttcttgcagcgatacagctcagaccccacaggcgccttgactgaggacagcatagacgacaccttcctcccagtgcctgaatacataaaccagtccgttcccaaaaggcccgctggctctgtgcagaatcctgtctatcacaatcagcctctgaaccccgcgcccagcagagacccacactaccaggacccccacagcactgcagtgggcaaccccgagtatctcaacactgtccagcccacctgtgtcaacagcacattcgacagccctgcccactgggcccagaaaggcagccaccaaattagcctggacaaccctgactaccagcaggacttctttcccaaggaagccaagccaaatggcatctttaagggctccacagctgaaaatgcagaatacctaagggtcgcgccacaaagcagtgaatttattggagcatgaccacggaggatagtatgagccctaaaaatccagactctttcgatacccaggaccaagccacagcaggtcctccatcccaacagccatgcccgcattagctcttagacccacagactggttttgcaacgtttacaccgactagccaggaagtacttccacctcgggcacattttgggaagttgcattcctttgtcttcaaactgtgaagcatttacagaaacgcatccagcaagaatattgtccctttgagcagaaatttatctttcaaagaggtatatttgaaaaaaaaaaaaagtatatgtgaggatttttattgattggggatcttggagtttttcattgtcgctattgatttttacttcaatgggctcttccaacaaggaagaagcttgctggtagcacttgctaccctgagttcatccaggcccaactgtgagcaaggagcacaagccacaagtcttccagaggatgcttgattccagtggttctgcttcaaggcttccactgcaaaacactaaagatccaagaaggccttcatggccccagcaggccggatcggtactgtatcaagtcatggcaggtacagtaggataagccactctgtcccttcctgggcaaagaagaaacggaggggatggaattcttccttagacttacttttgtaaaaatgtccccacggtacttactccccactgatggaccagtggtttccagtcatgagcgttagactgacttgtttgtcttccattccattgttttgaaactcagtatgctgcccctgtcttgctgtcatgaaatcagcaagagaggatgacacatcaaataataactcggattccagcccacattggattcatcagcatttggaccaatagcccacagctgagaatgtggaatacctaaggatagcaccgcttttgttctcgcaaaaacgtatctcctaatttgaggctcagatgaaatgcatcaggtcctttggggcatagatcagaagactacaaaaatgaagctgctctgaaatctcctttagccatcaccccaaccccccaaaattagtttgtgttacttatggaagatagttttctccttttacttcacttcaaaagctttttactcaaagagtatatgttccctccaggtcagctgcccccaaaccccctccttacgctttgtcacacaaaaagtgtctctgccttgagtcatctattcaagcacttacagctctggccacaacagggcattttacaggtgcgaatgacagtagcattatgagtagtgtggaattcaggtagtaaatatgaaactagggtttgaaattgataatgctttcacaacatttgcagatgttttagaaggaaaaaagttccttcctaaaataatttctctacaattggaagattggaagattcagctagttaggagcccaccttttttcctaatctgtgtgtgccctgtaacctgactggttaacagcagtcctttgtaaacagtgttttaaactctcctagtcaatatccaccccatccaatttatcaaggaagaaatggttcagaaaatattttcagcctacagttatgttcagtcacacacacatacaaaatgttccttttgcttttaaagtaatttttgactcccagatcagtcagagcccctacagcattgttaagaaagtatttgatttttgtctcaatgaaaataaaactatattcatttccactctattatgctctcaaatacccctaagcatctatactagcctggtatgggtatgaaagatacaaagataaataaaacatagtccctgattctaagaaattcacaatttagcaaaggaaatggactcatagatgctaaccttaaaacaacgtgacaaatgccagacaggacccatcagccaggcactgtgagagcacagagcagggaggttgggtcctgcctgaggagacctggaagggaggcctcacaggaggatgaccaggtctcagtcagcggggaggtggaaagtgcaggtgcatcaggggcaccctgaccgaggaaacagctgccagaggcctccactgctaaagtccacataaggctgaggtcagtcaccctaaacaacctgctccctctaagccaggggatgagcttggagcatcccacaagttccctaaaagttgcagcccccagggggattttgagctatcatctctgcacatgcttagtgagaagactacacaacatttctaagaatctgagattttatattgtcagttaaccactttcattattcattcacctcaggacatgcagaaatatttcagtcagaactgggaaacagaaggacctacattctgctgtcacttatgtgtcaagaagcagatgatcgatgaggcaggtcagttgtaagtgagtcacattgtagcattaaattctagtatttttgtagtttgaaacagtaacttaataaaagagcaaaagctattctagctttcttcttcatattttaattttccaccataaagtttagttgctaaattctattaattttaagattgtgcttcccaaaatagttctcacttcatctgtccagggaggcacagttctgtctggtagaagccgcaaagcccttagcctcttcacggatctggcgactgtgatgggcaggtcaggagaggagctgcccaaagtcccatgattttcacctaacagccctgatcagtcagtactcaaagcttggactccatccctgaaggtcttcctgattgatagcctggccttaataccctacagaaagcctgtccattggctgtttcttcctcagtcagttcctggaagaccttaccccatgaccccagcttcagatgtggtctttggaaacagaggtcgaaggaaagtaaggagctgagagctcacattcataggtgccgccagccttcgtgcatcttcttgcatcatctctaaggagctcctctaattacaccatgcccgtcaccccatgagggatcagagaagggatgagtcttctaaactctatattcgctgtgagtccaggttgtaagggggagcactgtggatgcatcctattgcactccagctgatgacaccaaagcttaggtgtttgctgaaagttcttgatgttgtgacttaccacccctgcctcacaactgcagacataaggggactatggattgcttagcaggaaaggcactggttctcaagggcggctgcccttgggaatcttctggtcccaaccagaaagactgtggcttgattttctcaggtgcagcccagccgtagggccttttcagagcaccccctggttattgcaacattcatcaaagtttctagaacctctggcctaaaggaagggcctggtgggatctacttggcactcgctggggggccaccccccagtgccactctcactaggcctctgattgcacttgtgtaggatgaagctggtgggtgatgggaactcagcacctcccctcaggcagaaaagaatcatctgtggagcttcaaaagaaggggcctggagtctctgcagaccaattcaacccaaatctcgggggctctttcatgattctaatgggcaaccagggttgaaacccttatttctagggtcttcagttgtacaagactgtgggtctgtaccagagcccccgtcagagtagaataaaaggctgggtagggtagagattcccatgtgcagtggagagaacaatctgcagtcactgataagcctgagacttggctcatttcaaaagcgttcaattcatcctcaccagcagttcagctggaaaggggcaaatacccccacctgagctttgaaaacgccctgggaccctctgcattctctaagtaagttatagaaaccagtctcttccctcctttgtgagtgagctgctattccacgtaggcaacacctgttgaaattgccctcaatgtctactctgcatttctttcttgtgataagcacacacttttattgcaacataatgatctgctcacatttccttgcctgggggctgtaaaaccttacagaacagaaatccttgcctctttcaccagccacacctgccataccaggggtacagctttgtactattgaagacacagacaggatttttaaatgtaaatctatttttgtaactttgttgcgggatatagttctctttatgtagcactgaactttgtacaatatatttttagaaactcatttttctactaaaacaaacacagtttactttagagagactgcaatagaatcaaaatttgaaactgaaatctttgtttaaaagggttaagttgaggcaagaggaaagccctttctctctcttataaaaaggcacaacctcattggggagctaagctaggtcattgtcatggtgaagaagagaagcatcgtttttatatttaggaaattttaaaagatgatggaaagcacatttagcttggtctgaggcaggttctgttggggcagtgttaatggaaagggctcactgttgttactactagaaaaatccagttgcatgccatactctcatcatctgccagtgtaaccctgtacatgtaagaaaagcaataacatagcactttgttggtttatatatataatgtgacttcaatgcaaattttatttttatatttacaattgatatgcatttaccagtataaactagacatgtctggagagcctaataatgttcagcacactttggttagttcaccaacagtcttaccaagcctgggcccagccaccctagagaagttattcagccctggctgcagtgacatcacctgaggagcttttaaaagcttgaagcccagctacacctcagaccgattaaacgcaaatctctggggctgaaacccaagcattcgtagtttttaaagctcctgaggtcattccaatgtgcggccaaagttgagaactactggcctagggattagccacaaggacatggacttggaggcaaattctgcaggtgtatgtgattctcaggcctagagagctaagacacaaagacctccacatctgtcgctgagagtcaagaacctgaacagagtttccatgaaggttctccaagcactagaagggagagtgtctaaacaatggttgaaaagcaaaggaaatataaaacagacacctctttccatttcctaaggtttctctctttattaagggtggactagtaataaaatataatattcttgctgcttatgcagctgacattgttgccctccctaaagcaaccaagtagcctttatttcccacagtgaaagaaaacgctggcctatcagttacattacaaaaggcagatttcaagaggattgagtaagtagttggatggctttcataaaaacaagaattcaagaagaggattcatgctttaagaaacatttgttatacattcctcacaaattatacctgggataaaaactatgtagcaggcagtgtgttttccttccatgtctctctgcactacctgcagtgtgtcctctgaggctgcaagtctgtcctatctgaattcccagcagaagcactaagaagctccaccctatcacctagcagataaaactatggggaaaacttaaatctgtgcatacatttctggatgcatttacttatctttaaaaaaaaaggaatcctatgacctgatttggccacaaaaataatcttgctgtacaatacaatctcttggaaattaagagatcctatggatttgatgactggtattagaggtgacaatgtaaccgattaacaacagacagcaataacttcgttttagaaacattcaagcaatagctttatagcttcaacatatggtacgttttaaccttgaaagttttgcaatgatgaaagcagtatttgtacaaatgaaaagcagaattctcttttatatggtttatactgttgatcagaaatgttgattgtgcattgagtattaaaaaattagatgtatatt

SEQ ID NO: 6188 - protein, 1210 aa, Homo sapiens [sequence omitted]

SEQ ID NO: 6189 - DNA, 9903 bp, Homo sapiens
gtccgggcagcccccggcgcagcgcggccgcagcagcctccgccccccgcacggtgtgagcgcccgacgcggccgaggcggccggagtcccgagctagccccggcggccgccgccgcccagaccggacgacaggccacctcgtcggcgtccgcccgagtccccgcctcgccgccaacgccacaaccaccgcgcacggccccctgactccgtccagtattgatcgggagagccggagcgagctcttcggggagcagcgatgcgaccctccgggacggccggggcagcgctcctggcgctgctggctgcgctctgcccggcgagtcgggctctggaggaaaagaaagtttgccaaggcacgagtaacaagctcacgcagttgggcacttttgaagatcattttctcagcctccagaggatgttcaataactgtgaggtggtccttgggaatttggaaattacctatgtgcagaggaattatgatctttccttcttaaagaccatccaggaggtggctggttatgtcctcattgccctcaacacagtggagcgaattcctttggaaaacctgcagatcatcagaggaaatatgtactacgaaaattcctatgccttagcagtcttatctaactatgatgcaaataaaaccggactgaaggagctgcccatgagaaatttacaggaaatcctgcatggcgccgtgcggttcagcaacaaccctgccctgtgcaacgtggagagcatccagtggcgggacatagtcagcagtgactttctcagcaacatgtcgatggacttccagaaccacctgggcagctgccaaaagtgtgatccaagctgtcccaatgggagctgctggggtgcaggagaggagaactgccagaaactgaccaaaatcatctgtgcccagcagtgctccgggcgctgccgtggcaagtcccccagtgactgctgccacaaccagtgtgctgcaggctgcacaggcccccgggagagcgactgcctggtctgccgcaaattccgagacgaagccacgtgcaaggacacctgccccccactcatgctctacaaccccaccacgtaccagatggatgtgaaccccgagggcaaatacagctttggtgccacctgcgtgaagaagtgtccccgtaattatgtggtgacagatcacggctcgtgcgtccgagcctgtggggccgacagctatgagatggaggaagacggcgtccgcaagtgtaagaagtgcgaagggccttgccgcaaagtgtgtaacggaataggtattggtgaatttaaagactcactctccataaatgctacgaatattaaacacttcaaaaactgcacctccatcagtggcgatctccacatcctgccggtggcatttaggggtgactccttcacacatactcctcctctggatccacaggaactggatattctgaaaaccgtaaaggaaatcacagggtttttgctgattcaggcttggcctgaaaacaggacggacctccatgcctttgagaacctagaaatcatacgcggcaggaccaagcaacatggtcagttttctcttgcagtcgtcagcctgaacataacatccttgggattacgctccctcaaggagataagtgatggagatgtgataatttcaggaaacaaaaatttgtgctatgcaaatacaataaactggaaaaaactgtttgggacctccggtcagaaaaccaaaattataagcaacagaggtgaaaacagctgcaaggccacaggccaggtctgccatgccttgtgctcccccgagggctgctggggcccggagcccagggactgcgtctcttgccggaatgtcagccgaggcagggaatgcgtggacaagtgcaaccttctggagggtgagccaagggagtttgtggagaactctgagtgcatacagtgccacccagagtgcctgcctcaggccatgaacatcacctgcacaggacggggaccagacaactgtatccagtgtgcccactacattgacggcccccactgcgtcaagacctgcccggcaggagtcatgggagaaaacaacaccctggtctggaagtacgcagacgccggccatgtgtgccacctgtgccatccaaactgcacctacggatgcactgggccaggtcttgaaggctgtccaacgaatgggcctaagatcccgtccatcgccactgggatggtgggggccctcctcttgctgctggtggtggccctggggatcggcctcttcatgcgaaggcgccacatcgttcggaagcgcacgctgcggaggctgctgcaggagagggagcttgtggagcctcttacacccagtggagaagctcccaaccaagctctcttgaggatcttgaaggaaactgaattcaaaaagatcaaagtgctgggctccggtgcgttcggcacggtgtataagggactctggatcccagaaggtgagaaagttaaaattcccgtcgctatcaaggaattaagagaagcaacatctccgaaagccaacaaggaaatcctcgatgaagcctacgtgatggccagcgtggacaacccccacgtgtgccgcctgctgggcatctgcctcacctccaccgtgcagctcatcacgcagctcatgcccttcggctgcctcctggactatgtccgggaacacaaagacaatattggctcccagtacctgctcaactggtgtgtgcagatcgcaaagggcatgaactacttggaggaccgtcgcttggtgcaccgcgacctggcagccaggaacgtactggtgaaaacaccgcagcatgtcaagatcacagattttgggctggccaaactgctgggtgcggaagagaaagaataccatgcagaaggaggcaaagtgcctatcaagtggatggcattggaatcaattttacacagaatctatacccaccagagtgatgtctggagctacggggtgactgtttgggagttgatgacctttggatccaagccatatgacggaatccctgccagcgagatctcctccatcctggagaaaggagaacgcctccctcagccacccatatgtaccatcgatgtctacatgatcatggtcaagtgctggatgatagacgcagatagtcgcccaaagttccgtgagttgatcatcgaattctccaaaatggcccgagacccccagcgctaccttgtcattcagggggatgaaagaatgcatttgccaagtcctacagactccaacttctaccgtgccctgatggatgaagaagacatggacgacgtggtggatgccgacgagtacctcatcccacagcagggcttcttcagcagcccctccacgtcacggactcccctcctgagctctctgagtgcaaccagcaacaattccaccgtggcttgcattgatagaaatgggctgcaaagctgtcccatcaaggaagacagcttcttgcagcgatacagctcagaccccacaggcgccttgactgaggacagcatagacgacaccttcctcccagtgcctgaatacataaaccagtccgttcccaaaaggcccgctggctctgtgcagaatcctgtctatcacaatcagcctctgaaccccgcgcccagcagagacccacactaccaggacccccacagcactgcagtgggcaaccccgagtatctcaacactgtccagcccacctgtgtcaacagcacattcgacagccctgcccactgggcccagaaaggcagccaccaaattagcctggacaaccctgactaccagcaggacttctttcccaaggaagccaagccaaatggcatctttaagggctccacagctgaaaatgcagaatacctaagggtcgcgccacaaagcagtgaatttattggagcatgaccacggaggatagtatgagccctaaaaatccagactctttcgatacccaggaccaagccacagcaggtcctccatcccaacagccatgcccgcattagctcttagacccacagactggttttgcaacgtttacaccgactagccaggaagtacttccacctcgggcacattttgggaagttgcattcctttgtcttcaaactgtgaagcatttacagaaacgcatccagcaagaatattgtccctttgagcagaaatttatctttcaaagaggtatatttgaaaaaaaaaaaaagtatatgtgaggatttttattgattggggatcttggagtttttcattgtcgctattgatttttacttcaatgggctcttccaacaaggaagaagcttgctggtagcacttgctaccctgagttcatccaggcccaactgtgagcaaggagcacaagccacaagtcttccagaggatgcttgattccagtggttctgcttcaaggcttccactgcaaaacactaaagatccaagaaggccttcatggccccagcaggccggatcggtactgtatcaagtcatggcaggtacagtaggataagccactctgtcccttcctgggcaaagaagaaacggaggggatggaattcttccttagacttacttttgtaaaaatgtccccacggtacttactccccactgatggaccagtggtttccagtcatgagcgttagactgacttgtttgtcttccattccattgttttgaaactcagtatgctgcccctgtcttgctgtcatgaaatcagcaagagaggatgacacatcaaataataactcggattccagcccacattggattcatcagcatttggaccaatagcccacagctgagaatgtggaatacctaaggatagcaccgcttttgttctcgcaaaaacgtatctcctaatttgaggctcagatgaaatgcatcaggtcctttggggcatagatcagaagactacaaaaatgaagctgctctgaaatctcctttagccatcaccccaaccccccaaaattagtttgtgttacttatggaagatagttttctccttttacttcacttcaaaagctttttactcaaagagtatatgttccctccaggtcagctgcccccaaaccccctccttacgctttgtcacacaaaaagtgtctctgccttgagtcatctattcaagcacttacagctctggccacaacagggcattttacaggtgcgaatgacagtagcattatgagtagtgtggaattcaggtagtaaatatgaaactagggtttgaaattgataatgctttcacaacatttgcagatgttttagaaggaaaaaagttccttcctaaaataatttctctacaattggaagattggaagattcagctagttaggagcccaccttttttcctaatctgtgtgtgccctgtaacctgactggttaacagcagtcctttgtaaacagtgttttaaactctcctagtcaatatccaccccatccaatttatcaaggaagaaatggttcagaaaatattttcagcctacagttatgttcagtcacacacacatacaaaatgttccttttgcttttaaagtaatttttgactcccagatcagtcagagcccctacagcattgttaagaaagtatttgatttttgtctcaatgaaaataaaactatattcatttccactctattatgctctcaaatacccctaagcatctatactagcctggtatgggtatgaaagatacaaagataaataaaacatagtccctgattctaagaaattcacaatttagcaaaggaaatggactcatagatgctaaccttaaaacaacgtgacaaatgccagacaggacccatcagccaggcactgtgagagcacagagcagggaggttgggtcctgcctgaggagacctggaagggaggcctcacaggaggatgaccaggtctcagtcagcggggaggtggaaagtgcaggtgcatcaggggcaccctgaccgaggaaacagctgccagaggcctccactgctaaagtccacataaggctgaggtcagtcaccctaaacaacctgctccctctaagccaggggatgagcttggagcatcccacaagttccctaaaagttgcagcccccagggggattttgagctatcatctctgcacatgcttagtgagaagactacacaacatttctaagaatctgagattttatattgtcagttaaccactttcattattcattcacctcaggacatgcagaaatatttcagtcagaactgggaaacagaaggacctacattctgctgtcacttatgtgtcaagaagcagatgatcgatgaggcaggtcagttgtaagtgagtcacattgtagcattaaattctagtatttttgtagtttgaaacagtaacttaataaaagagcaaaagctattctagctttcttcttcatattttaattttccaccataaagtttagttgctaaattctattaattttaagattgtgcttcccaaaatagttctcacttcatctgtccagggaggcacagttctgtctggtagaagccgcaaagcccttagcctcttcacggatctggcgactgtgatgggcaggtcaggagaggagctgcccaaagtcccatgattttcacctaacagccctgatcagtcagtactcaaagcttggactccatccctgaaggtcttcctgattgatagcctggccttaataccctacagaaagcctgtccattggctgtttcttcctcagtcagttcctggaagaccttaccccatgaccccagcttcagatgtggtctttggaaacagaggtcgaaggaaagtaaggagctgagagctcacattcataggtgccgccagccttcgtgcatcttcttgcatcatctctaaggagctcctctaattacaccatgcccgtcaccccatgagggatcagagaagggatgagtcttctaaactctatattcgctgtgagtccaggttgtaagggggagcactgtggatgcatcctattgcactccagctgatgacaccaaagcttaggtgtttgctgaaagttcttgatgttgtgacttaccacccctgcctcacaactgcagacataaggggactatggattgcttagcaggaaaggcactggttctcaagggcggctgcccttgggaatcttctggtcccaaccagaaagactgtggcttgattttctcaggtgcagcccagccgtagggccttttcagagcaccccctggttattgcaacattcatcaaagtttctagaacctctggcctaaaggaagggcctggtgggatctacttggcactcgctggggggccaccccccagtgccactctcactaggcctctgattgcacttgtgtaggatgaagctggtgggtgatgggaactcagcacctcccctcaggcagaaaagaatcatctgtggagcttcaaaagaaggggcctggagtctctgcagaccaattcaacccaaatctcgggggctctttcatgattctaatgggcaaccagggttgaaacccttatttctagggtcttcagttgtacaagactgtgggtctgtaccagagcccccgtcagagtagaataaaaggctgggtagggtagagattcccatgtgcagtggagagaacaatctgcagtcactgataagcctgagacttggctcatttcaaaagcgttcaattcatcctcaccagcagttcagctggaaaggggcaaatacccccacctgagctttgaaaacgccctgggaccctctgcattctctaagtaagttatagaaaccagtctcttccctcctttgtgagtgagctgctattccacgtaggcaacacctgttgaaattgccctcaatgtctactctgcatttctttcttgtgataagcacacacttttattgcaacataatgatctgctcacatttccttgcctgggggctgtaaaaccttacagaacagaaatccttgcctctttcaccagccacacctgccataccaggggtacagctttgtactattgaagacacagacaggatttttaaatgtaaatctatttttgtaactttgttgcgggatatagttctctttatgtagcactgaactttgtacaatatatttttagaaactcatttttctactaaaacaaacacagtttactttagagagactgcaatagaatcaaaatttgaaactgaaatctttgtttaaaagggttaagttgaggcaagaggaaagccctttctctctcttataaaaaggcacaacctcattggggagctaagctaggtcattgtcatggtgaagaagagaagcatcgtttttatatttaggaaattttaaaagatgatggaaagcacatttagcttggtctgaggcaggttctgttggggcagtgttaatggaaagggctcactgttgttactactagaaaaatccagttgcatgccatactctcatcatctgccagtgtaaccctgtacatgtaagaaaagcaataacatagcactttgttggtttatatatataatgtgacttcaatgcaaattttatttttatatttacaattgatatgcatttaccagtataaactagacatgtctggagagcctaataatgttcagcacactttggttagttcaccaacagtcttaccaagcctgggcccagccaccctagagaagttattcagccctggctgcagtgacatcacctgaggagcttttaaaagcttgaagcccagctacacctcagaccgattaaacgcaaatctctggggctgaaacccaagcattcgtagtttttaaagctcctgaggtcattccaatgtgcggccaaagttgagaactactggcctagggattagccacaaggacatggacttggaggcaaattctgcaggtgtatgtgattctcaggcctagagagctaagacacaaagacctccacatctgtcgctgagagtcaagaacctgaacagagtttccatgaaggttctccaagcactagaagggagagtgtctaaacaatggttgaaaagcaaaggaaatataaaacagacacctctttccatttcctaaggtttctctctttattaagggtggactagtaataaaatataatattcttgctgcttatgcagctgacattgttgccctccctaaagcaaccaagtagcctttatttcccacagtgaaagaaaacgctggcctatcagttacattacaaaaggcagatttcaagaggattgagtaagtagttggatggctttcataaaaacaagaattcaagaagaggattcatgctttaagaaacatttgttatacattcctcacaaattatacctgggataaaaactatgtagcaggcagtgtgttttccttccatgtctctctgcactacctgcagtgtgtcctctgaggctgcaagtctgtcctatctgaattcccagcagaagcactaagaagctccaccctatcacctagcagataaaactatggggaaaacttaaatctgtgcatacatttctggatgcatttacttatctttaaaaaaaaaggaatcctatgacctgatttggccacaaaaataatcttgctgtacaatacaatctcttggaaattaagagatcctatggatttgatgactggtattagaggtgacaatgtaaccgattaacaacagacagcaataacttcgttttagaaacattcaagcaatagctttatagcttcaacatatggtacgttttaaccttgaaagttttgcaatgatgaaagcagtatttgtacaaatgaaaagcagaattctcttttatatggtttatactgttgatcagaaatgttgattgtgcattgagtattaaaaaattagatgtatattattcattgttctttactcctgagtaccttataataataataatgtattctttgttaacaatg

SEQ ID NO: 6190 - protein, 1210 aa, Homo sapiens [sequence omitted]

SEQ ID NO: 6191 - DNA, 9996 bp, Homo sapiens
gtccgggcagcccccggcgcagcgcggccgcagcagcctccgccccccgcacggtgtgagcgcccgacgcggccgaggcggccggagtcccgagctagccccggcggccgccgccgcccagaccggacgacaggccacctcgtcggcgtccgcccgagtccccgcctcgccgccaacgccacaaccaccgcgcacggccccctgactccgtccagtattgatcgggagagccggagcgagctcttcggggagcagcgatgcgaccctccgggacggccggggcagcgctcctggcgctgctggctgcgctctgcccggcgagtcgggctctggaggaaaagaaagtttgccaaggcacgagtaacaagctcacgcagttgggcacttttgaagatcattttctcagcctccagaggatgttcaataactgtgaggtggtccttgggaatttggaaattacctatgtgcagaggaattatgatctttccttcttaaagaccatccaggaggtggctggttatgtcctcattgccctcaacacagtggagcgaattcctttggaaaacctgcagatcatcagaggaaatatgtactacgaaaattcctatgccttagcagtcttatctaactatgatgcaaataaaaccggactgaaggagctgcccatgagaaatttacaggaaatcctgcatggcgccgtgcggttcagcaacaaccctgccctgtgcaacgtggagagcatccagtggcgggacatagtcagcagtgactttctcagcaacatgtcgatggacttccagaaccacctgggcagctgccaaaagtgtgatccaagctgtcccaatgggagctgctggggtgcaggagaggagaactgccagaaactgaccaaaatcatctgtgcccagcagtgctccgggcgctgccgtggcaagtcccccagtgactgctgccacaaccagtgtgctgcaggctgcacaggcccccgggagagcgactgcctggtctgccgcaaattccgagacgaagccacgtgcaaggacacctgccccccactcatgctctacaaccccaccacgtaccagatggatgtgaaccccgagggcaaatacagctttggtgccacctgcgtgaagaagtgtccccgtaattatgtggtgacagatcacggctcgtgcgtccgagcctgtggggccgacagctatgagatggaggaagacggcgtccgcaagtgtaagaagtgcgaagggccttgccgcaaagtgtgtaacggaataggtattggtgaatttaaagactcactctccataaatgctacgaatattaaacacttcaaaaactgcacctccatcagtggcgatctccacatcctgccggtggcatttaggggtgactccttcacacatactcctcctctggatccacaggaactggatattctgaaaaccgtaaaggaaatcacagggtttttgctgattcaggcttggcctgaaaacaggacggacctccatgcctttgagaacctagaaatcatacgcggcaggaccaagcaacatggtcagttttctcttgcagtcgtcagcctgaacataacatccttgggattacgctccctcaaggagataagtgatggagatgtgataatttcaggaaacaaaaatttgtgctatgcaaatacaataaactggaaaaaactgtttgggacctccggtcagaaaaccaaaattataagcaacagaggtgaaaacagctgcaaggccacaggccaggtctgccatgccttgtgctcccccgagggctgctggggcccggagcccagggactgcgtctcttgccggaatgtcagccgaggcagggaatgcgtggacaagtgcaaccttctggagggtgagccaagggagtttgtggagaactctgagtgcatacagtgccacccagagtgcctgcctcaggccatgaacatcacctgcacaggacggggaccagacaactgtatccagtgtgcccactacattgacggcccccactgcgtcaagacctgcccggcaggagtcatgggagaaaacaacaccctggtctggaagtacgcagacgccggccatgtgtgccacctgtgccatccaaactgcacctacggatgcactgggccaggtcttgaaggctgtccaacgaatgggcctaagatcccgtccatcgccactgggatggtgggggccctcctcttgctgctggtggtggccctggggatcggcctcttcatgcgaaggcgccacatcgttcggaagcgcacgctgcggaggctgctgcaggagagggagcttgtggagcctcttacacccagtggagaagctcccaaccaagctctcttgaggatcttgaaggaaactgaattcaaaaagatcaaagtgctgggctccggtgcgttcggcacggtgtataagggactctggatcccagaaggtgagaaagttaaaattcccgtcgctatcaaggaattaagagaagcaacatctccgaaagccaacaaggaaatcctcgatgaagcctacgtgatggccagcgtggacaacccccacgtgtgccgcctgctgggcatctgcctcacctccaccgtgcagctcatcacgcagctcatgcccttcggctgcctcctggactatgtccgggaacacaaagacaatattggctcccagtacctgctcaactggtgtgtgcagatcgcaaagggcatgaactacttggaggaccgtcgcttggtgcaccgcgacctggcagccaggaacgtactggtgaaaacaccgcagcatgtcaagatcacagattttgggctggccaaactgctgggtgcggaagagaaagaataccatgcagaaggaggcaaagtgcctatcaagtggatggcattggaatcaattttacacagaatctatacccaccagagtgatgtctggagctacggggtgactgtttgggagttgatgacctttggatccaagccatatgacggaatccctgccagcgagatctcctccatcctggagaaaggagaacgcctccctcagccacccatatgtaccatcgatgtctacatgatcatggtcaagtgctggatgatagacgcagatagtcgcccaaagttccgtgagttgatcatcgaattctccaaaatggcccgagacccccagcgctaccttgtcattcagggggatgaaagaatgcatttgccaagtcctacagactccaacttctaccgtgccctgatggatgaagaagacatggacgacgtggtggatgccgacgagtacctcatcccacagcagggcttcttcagcagcccctccacgtcacggactcccctcctgagctctctgagtgcaaccagcaacaattccaccgtggcttgcattgatagaaatgggctgcaaagctgtcccatcaaggaagacagcttcttgcagcgatacagctcagaccccacaggcgccttgactgaggacagcatagacgacaccttcctcccagtgcctgaatacataaaccagtccgttcccaaaaggcccgctggctctgtgcagaatcctgtctatcacaatcagcctctgaaccccgcgcccagcagagacccacactaccaggacccccacagcactgcagtgggcaaccccgagtatctcaacactgtccagcccacctgtgtcaacagcacattcgacagccctgcccactgggcccagaaaggcagccaccaaattagcctggacaaccctgactaccagcaggacttctttcccaaggaagccaagccaaatggcatctttaagggctccacagctgaaaatgcagaatacctaagggtcgcgccacaaagcagtgaatttattggagcatgaccacggaggatagtatgagccctaaaaatccagactctttcgatacccaggaccaagccacagcaggtcctccatcccaacagccatgcccgcattagctcttagacccacagactggttttgcaacgtttacaccgactagccaggaagtacttccacctcgggcacattttgggaagttgcattcctttgtcttcaaactgtgaagcatttacagaaacgcatccagcaagaatattgtccctttgagcagaaatttatctttcaaagaggtatatttgaaaaaaaaaaaaagtatatgtgaggatttttattgattggggatcttggagtttttcattgtcgctattgatttttacttcaatgggctcttccaacaaggaagaagcttgctggtagcacttgctaccctgagttcatccaggcccaactgtgagcaaggagcacaagccacaagtcttccagaggatgcttgattccagtggttctgcttcaaggcttccactgcaaaacactaaagatccaagaaggccttcatggccccagcaggccggatcggtactgtatcaagtcatggcaggtacagtaggataagccactctgtcccttcctgggcaaagaagaaacggaggggatggaattcttccttagacttacttttgtaaaaatgtccccacggtacttactccccactgatggaccagtggtttccagtcatgagcgttagactgacttgtttgtcttccattccattgttttgaaactcagtatgctgcccctgtcttgctgtcatgaaatcagcaagagaggatgacacatcaaataataactcggattccagcccacattggattcatcagcatttggaccaatagcccacagctgagaatgtggaatacctaaggatagcaccgcttttgttctcgcaaaaacgtatctcctaatttgaggctcagatgaaatgcatcaggtcctttggggcatagatcagaagactacaaaaatgaagctgctctgaaatctcctttagccatcaccccaaccccccaaaattagtttgtgttacttatggaagatagttttctccttttacttcacttcaaaagctttttactcaaagagtatatgttccctccaggtcagctgcccccaaaccccctccttacgctttgtcacacaaaaagtgtctctgccttgagtcatctattcaagcacttacagctctggccacaacagggcattttacaggtgcgaatgacagtagcattatgagtagtgtggaattcaggtagtaaatatgaaactagggtttgaaattgataatgctttcacaacatttgcagatgttttagaaggaaaaaagttccttcctaaaataatttctctacaattggaagattggaagattcagctagttaggagcccaccttttttcctaatctgtgtgtgccctgtaacctgactggttaacagcagtcctttgtaaacagtgttttaaactctcctagtcaatatccaccccatccaatttatcaaggaagaaatggttcagaaaatattttcagcctacagttatgttcagtcacacacacatacaaaatgttccttttgcttttaaagtaatttttgactcccagatcagtcagagcccctacagcattgttaagaaagtatttgatttttgtctcaatgaaaataaaactatattcatttccactctattatgctctcaaatacccctaagcatctatactagcctggtatgggtatgaaagatacaaagataaataaaacatagtccctgattctaagaaattcacaatttagcaaaggaaatggactcatagatgctaaccttaaaacaacgtgacaaatgccagacaggacccatcagccaggcactgtgagagcacagagcagggaggttgggtcctgcctgaggagacctggaagggaggcctcacaggaggatgaccaggtctcagtcagcggggaggtggaaagtgcaggtgcatcaggggcaccctgaccgaggaaacagctgccagaggcctccactgctaaagtccacataaggctgaggtcagtcaccctaaacaacctgctccctctaagccaggggatgagcttggagcatcccacaagttccctaaaagttgcagcccccagggggattttgagctatcatctctgcacatgcttagtgagaagactacacaacatttctaagaatctgagattttatattgtcagttaaccactttcattattcattcacctcaggacatgcagaaatatttcagtcagaactgggaaacagaaggacctacattctgctgtcacttatgtgtcaagaagcagatgatcgatgaggcaggtcagttgtaagtgagtcacattgtagcattaaattctagtatttttgtagtttgaaacagtaacttaataaaagagcaaaagctattctagctttcttcttcatattttaattttccaccataaagtttagttgctaaattctattaattttaagattgtgcttcccaaaatagttctcacttcatctgtccagggaggcacagttctgtctggtagaagccgcaaagcccttagcctcttcacggatctggcgactgtgatgggcaggtcaggagaggagctgcccaaagtcccatgattttcacctaacagccctgatcagtcagtactcaaagcttggactccatccctgaaggtcttcctgattgatagcctggccttaataccctacagaaagcctgtccattggctgtttcttcctcagtcagttcctggaagaccttaccccatgaccccagcttcagatgtggtctttggaaacagaggtcgaaggaaagtaaggagctgagagctcacattcataggtgccgccagccttcgtgcatcttcttgcatcatctctaaggagctcctctaattacaccatgcccgtcaccccatgagggatcagagaagggatgagtcttctaaactctatattcgctgtgagtccaggttgtaagggggagcactgtggatgcatcctattgcactccagctgatgacaccaaagcttaggtgtttgctgaaagttcttgatgttgtgacttaccacccctgcctcacaactgcagacataaggggactatggattgcttagcaggaaaggcactggttctcaagggcggctgcccttgggaatcttctggtcccaaccagaaagactgtggcttgattttctcaggtgcagcccagccgtagggccttttcagagcaccccctggttattgcaacattcatcaaagtttctagaacctctggcctaaaggaagggcctggtgggatctacttggcactcgctggggggccaccccccagtgccactctcactaggcctctgattgcacttgtgtaggatgaagctggtgggtgatgggaactcagcacctcccctcaggcagaaaagaatcatctgtggagcttcaaaagaaggggcctggagtctctgcagaccaattcaacccaaatctcgggggctctttcatgattctaatgggcaaccagggttgaaacccttatttctagggtcttcagttgtacaagactgtgggtctgtaccagagcccccgtcagagtagaataaaaggctgggtagggtagagattcccatgtgcagtggagagaacaatctgcagtcactgataagcctgagacttggctcatttcaaaagcgttcaattcatcctcaccagcagttcagctggaaaggggcaaatacccccacctgagctttgaaaacgccctgggaccctctgcattctctaagtaagttatagaaaccagtctcttccctcctttgtgagtgagctgctattccacgtaggcaacacctgttgaaattgccctcaatgtctactctgcatttctttcttgtgataagcacacacttttattgcaacataatgatctgctcacatttccttgcctgggggctgtaaaaccttacagaacagaaatccttgcctctttcaccagccacacctgccataccaggggtacagctttgtactattgaagacacagacaggatttttaaatgtaaatctatttttgtaactttgttgcgggatatagttctctttatgtagcactgaactttgtacaatatatttttagaaactcatttttctactaaaacaaacacagtttactttagagagactgcaatagaatcaaaatttgaaactgaaatctttgtttaaaagggttaagttgaggcaagaggaaagccctttctctctcttataaaaaggcacaacctcattggggagctaagctaggtcattgtcatggtgaagaagagaagcatcgtttttatatttaggaaattttaaaagatgatggaaagcacatttagcttggtctgaggcaggttctgttggggcagtgttaatggaaagggctcactgttgttactactagaaaaatccagttgcatgccatactctcatcatctgccagtgtaaccctgtacatgtaagaaaagcaataacatagcactttgttggtttatatatataatgtgacttcaatgcaaattttatttttatatttacaattgatatgcatttaccagtataaactagacatgtctggagagcctaataatgttcagcacactttggttagttcaccaacagtcttaccaagcctgggcccagccaccctagagaagttattcagccctggctgcagtgacatcacctgaggagcttttaaaagcttgaagcccagctacacctcagaccgattaaacgcaaatctctggggctgaaacccaagcattcgtagtttttaaagctcctgaggtcattccaatgtgcggccaaagttgagaactactggcctagggattagccacaaggacatggacttggaggcaaattctgcaggtgtatgtgattctcaggcctagagagctaagacacaaagacctccacatctgtcgctgagagtcaagaacctgaacagagtttccatgaaggttctccaagcactagaagggagagtgtctaaacaatggttgaaaagcaaaggaaatataaaacagacacctctttccatttcctaaggtttctctctttattaagggtggactagtaataaaatataatattcttgctgcttatgcagctgacattgttgccctccctaaagcaaccaagtagcctttatttcccacagtgaaagaaaacgctggcctatcagttacattacaaaaggcagatttcaagaggattgagtaagtagttggatggctttcataaaaacaagaattcaagaagaggattcatgctttaagaaacatttgttatacattcctcacaaattatacctgggataaaaactatgtagcaggcagtgtgttttccttccatgtctctctgcactacctgcagtgtgtcctctgaggctgcaagtctgtcctatctgaattcccagcagaagcactaagaagctccaccctatcacctagcagataaaactatggggaaaacttaaatctgtgcatacatttctggatgcatttacttatctttaaaaaaaaaggaatcctatgacctgatttggccacaaaaataatcttgctgtacaatacaatctcttggaaattaagagatcctatggatttgatgactggtattagaggtgacaatgtaaccgattaacaacagacagcaataacttcgttttagaaacattcaagcaatagctttatagcttcaacatatggtacgttttaaccttgaaagttttgcaatgatgaaagcagtatttgtacaaatgaaaagcagaattctcttttatatggtttatactgttgatcagaaatgttgattgtgcattgagtattaaaaaattagatgtatattattcattgttctttactcctgagtaccttataataataataatgtattctttgttaacaatgccatgttggtactagttattaatcatatctaaccaactgtaggtgttctttcctgataacttttttaaaaaatcaataaattatttttagagc

SEQ ID NO: 6192 - protein, 1210 aa, Homo sapiens [sequence omitted]

SEQ ID NO: 6193 - DNA, 2604 bp, Homo sapiens
gtccgggcagcccccggcgcagcgcggccgcagcagcctccgccccccgcacggtgtgagcgcccgacgcggccgaggcggccggagtcccgagctagccccggcggccgccgccgcccagaccggacgacaggccacctcgtcggcgtccgcccgagtccccgcctcgccgccaacgccacaaccaccgcgcacggccccctgactccgtccagtattgatcgggagagccggagcgagctcttcggggagcagcgatgcgaccctccgggacggccggggcagcgctcctggcgctgctggctgcgctctgcccggcgagtcgggctctggaggaaaagaaagtttgccaaggcacgagtaacaagctcacgcagttgggcacttttgaagatcattttctcagcctccagaggatgttcaataactgtgaggtggtccttgggaatttggaaattacctatgtgcagaggaattatgatctttccttcttaaagaccatccaggaggtggctggttatgtcctcattgccctcaacacagtggagcgaattcctttggaaaacctgcagatcatcagaggaaatatgtactacgaaaattcctatgccttagcagtcttatctaactatgatgcaaataaaaccggactgaaggagctgcccatgagaaatttacaggaaatcctgcatggcgccgtgcggttcagcaacaaccctgccctgtgcaacgtggagagcatccagtggcgggacatagtcagcagtgactttctcagcaacatgtcgatggacttccagaaccacctgggcagctgccaaaagtgtgatccaagctgtcccaatgggagctgctggggtgcaggagaggagaactgccagaaactgaccaaaatcatctgtgcccagcagtgctccgggcgctgccgtggcaagtcccccagtgactgctgccacaaccagtgtgctgcaggctgcacaggcccccgggagagcgactgcctggtctgccgcaaattccgagacgaagccacgtgcaaggacacctgccccccactcatgctctacaaccccaccacgtaccagatggatgtgaaccccgagggcaaatacagctttggtgccacctgcgtgaagaagtgtccccgtaattatgtggtgacagatcacggctcgtgcgtccgagcctgtggggccgacagctatgagatggaggaagacggcgtccgcaagtgtaagaagtgcgaagggccttgccgcaaagtgtgtaacggaataggtattggtgaatttaaagactcactctccataaatgctacgaatattaaacacttcaaaaactgcacctccatcagtggcgatctccacatcctgccggtggcatttaggggtgactccttcacacatactcctcctctggatccacaggaactggatattctgaaaaccgtaaaggaaatcacagggtttttgctgattcaggcttggcctgaaaacaggacggacctccatgcctttgagaacctagaaatcatacgcggcaggaccaagcaacatggtcagttttctcttgcagtcgtcagcctgaacataacatccttgggattacgctccctcaaggagataagtgatggagatgtgataatttcaggaaacaaaaatttgtgctatgcaaatacaataaactggaaaaaactgtttgggacctccggtcagaaaaccaaaattataagcaacagaggtgaaaacagctgcaaggccacaggccaggtctgccatgccttgtgctcccccgagggctgctggggcccggagcccagggactgcgtctcttgccggaatgtcagccgaggcagggaatgcgtggacaagtgcaaccttctggagggtgagccaagggagtttgtggagaactctgagtgcatacagtgccacccagagtgcctgcctcaggccatgaacatcacctgcacaggacggggaccagacaactgtatccagtgtgcccactacattgacggcccccactgcgtcaagacctgcccggcaggagtcatgggagaaaacaacaccctggtctggaagtacgcagacgccggccatgtgtgccacctgtgccatccaaactgcacctacggatgcactgggccaggtcttgaaggctgtccaacgaatggaagctacatagtgtctcactttccaagatcattctacaagatgtcagtgcactgaaacatgcaggggcgtgttgatgcccgtgaggatcttgacaagttgttttgaagatggcattttgctaagtccctgagggtcactggtcctcaaagcggcatggcggcatggcgtggctggttctgccacatgccagctgtgtgacctctgagactccacttcttcagtgctgaaaataaagaaggagttttactaaggaccaaacaagataatgaatgtgaaactgctccacgaaccccaaagaattatgcacatagatgcgatcattaagatgcgaagccatcgagttaccacctggcatgcttaaactgtaaagagtgggtcaaagtaaactgaattggaaaatccaaagttatgcagaaaaacaataaag

SEQ ID NO: 6194 - protein, 657 aa, Homo sapiens
MRPSGTAGAALLALLAALCPASRALEEKKVCQGTSNKLTQLGTFEDHFLSLQRMFNNCEVVLGNLEITYVQRNYDLSFLKTIQEVAGYVLIALNTVERIPLENLQIIRGNMYYENSYALAVLSNYDANKTGLKELPMRNLQEILHGAVRFSNNPALCNVESIQWRDIVSSDFLSNMSMDFQNHLGSCQKCDPSCPNGSCWGAGEENCQKLTKIICAQQCSGRCRGKSPSDCCHNQCAAGCTGPRESDCLVCRKFRDEATCKDTCPPLMLYNPTTYQMDVNPEGKYSFGATCVKKCPRNYVVTDHGSCVRACGADSYEMEEDGVRKCKKCEGPCRKVCNGIGIGEFKDSLSINATNIKHFKNCTSISGDLHILPVAFRGDSFTHTPPLDPQELDILKTVKEITGFLLIQAWPENRTDLHAFENLEIIRGRTKQHGQFSLAVVSLNITSLGLRSLKEISDGDVIISGNKNLCYANTINWKKLFGTSGQKTKIISNRGENSCKATGQVCHALCSPEGCWGPEPRDCVSCRNVSRGRECVDKCNLLEGEPREFVENSECIQCHPECLPQAMNITCTGRGPDNCIQCAHYIDGPHCVKTCPAGVMGENNTLVWKYADAGHVCHLCHPNCTYGCTGPGLEGCPTNGSYIVSHFPRSFYKMSVH

SEQ ID NO: 6195 - DNA, 1861 bp, Homo sapiens
gctatggcaatgacaagtcttacagagctacaaacgagagttttatgagaaagccattttaccagctaatgtcaagtaataactagaaaaggatatcaaatagaaacaggctaatctggagttccatgtcatcatagacactgacgtttatccctgaccattacctcagtcatgatgtgctgccatactcgctcttaaaaactttttttaaaagccctgctttgcaccatttgcctattcccttagtgtaaatactcctactatagctgatttcaaggtaccaagtttcactcagctggtcacagaattcttatttcacgataggcgctaatgaccccataggagccagctctgaaggcttcagagtttcactgaattttggatggggtttacttagccttcttctgtttttcttttacctttcctttttaaataagaaataatgcaagacagatacaaagtaattctttttaatttccattttcactggagagtgttgaaccccgtgaggcatgagagcacagtgttccagaacaatgcttactgctcattatcacaggggtcaaaggctaacgtgcagggattgttgcagatcgtggacatgctgcctcctgtgtccatgactgcaatcgtctacctattttacagttgttgagcactcgtgtgcattagggttcaactgggcgtcctagggctccctggacccattttagaccttgagttcttgagttcctcaaaagagaaatcacgcatttatgttttctcttcttagaccatccaggaggtggctggttatgtcctcattgccctcaacacagtggagcgaattcctttggaaaacctgcagatcatcagaggaaatatgtactacgaaaattcctatgccttagcagtcttatctaactatgatgcaaataaaaccggactgaaggagctgcccatgagaaatttacaggaaatcctgcatggcgccgtgcggttcagcaacaaccctgccctgtgcaacgtggagagcatccagtggcgggacatagtcagcagtgactttctcagcaacatgtcgatggacttccagaaccacctgggcagctgtaagtgtcgcatacacactatctctgcctccagctcctatgggggacagctctacagcactggggcaggggagagaagccatgtttagtaagtcacattaatcagaaacaaaaagtagtaagcaaaatatctgaccactagaaaagcatgtatttaccacggacatagagatcgtttttttgtggcgggtggcagcccagctggttggcagtgcaggccaccggaggcagatcccctgcagggacagcagagcacttgtgtcctgagaagagctgctgttcatggggctggcagcaccagggcctctcctagcctgccctgctgacactggccagactcctacatgcttctgagtctccagaggctacccggccctcctgaagcaccagggctgaatccacccccagctgagggcatgaacactgccacatggagtcacacacacagctgggcactgccatggagaggaagtctgtccatgtttccttgaatactggtggcctggtccctgtcccattccccagtgaggcagcctgtggggaagcctggcagggaaccaggcgcaggtcagcgtggcgccctgactcaggccagcactgatgggggactctgagacgcaagctcacactcacccagctcccctgggctgcgcccgttcctgatcgcttggactttctgttctttagagtaagaagtgatcaccatttcctgcttctttgtttctccacaactgtgcagtggatgcctgtttgttttctgccctcagaac

SEQ ID NO: 6196 - protein, 105 aa, Homo sapiens
MYYENSYALAVLSNYDANKTGLKELPMRNLQEILHGAVRFSNNPALCNVESIQWRDIVSSDFLSNMSMDFQNHLGSCKCRIHTISASSSYGGQLYSTGAGERSHV

SEQ ID NO: 6197 - DNA, 4369 bp, Homo sapiens
ctttgtctctggctgcagtcgtagctccaggtcttttcttctctgttctgtgtcttctgctcctagaggcccagcttctgtgtccctgtgacctgtaggtattgggagatccacagctaagatgccaggaccccctgggaagcctagaaaaatggttctgcctgcaaagaagattgtgacatattgctggttgcaacaccacggtgatgttactttttgccttctcactgccctcagaaggcattgtgatatgttggtggtcccagcttcaaagaaatacttgtctgcagcgcagattgctacatattgcttggcccagctcctatgtgatgtgactctcctgtcatacctgagtgctccccactgcggtaattgtgacatatagctgggctctggccctagtttatgtaacttttcttcctgactgctactcacctgggggcattgtgacatatctctgaacctctcacctaagtgatgtgaatctcctgcttgagcccacttctcagggagtattattatatattgtcacacacagcaactaggtgatatgactctctctacagcttggactctgcccaataaaaaactgtgatgtatcactggacccagcaccaaggctatgtgactctcctgccggggctctacattcattgtttttgtgacatacggctgggaataatgtctaggtcatgtgactgtcctgcatggaccctgcccacaggggtattatgacacatttttttagtcatctaggtgatgtgactcacttctgcctgggccctgccagaaagaatgatagtgacttatcactgaacccagcacttaagtgatgtgactctcctcttttgcctggaccttgcatgtttttggtattgtgacatattgctgggcccaacacctaggaaatgagacatttttgcttcagccctgactacaggcagctttctgacattactctgtatccatcacatagggcatacgtctctcatctcttctgcctgcacctgcccacagggaagatggtgacataacacaacaactaggtgatgtgtctccagcctgggcctagcccaccagaagtattgtgacagctggtttctgagcccagtgatatgttacaatgctccctgtggagccccctgtgacacctggtctcagaaactaggtgatgtgactactgcccaagccctgcttttagaaaggaattgtgacttatcactggccaaatgtgacatgagcctcctgcctggtccttgctttcagagaagaccatgacatatctctgttccagcacccaggtgatgtgataatactgcctgggctctcccctcaggaagtatcaagacatatttctggacccagcccataggtggtatgactgtcctccactacttagactctgcccaagaagcgactatgatgtatcaatattcccagcacttagatgatgtaactctcttatgcttgggccctgttcacatagtatatgaaacatatgtctgggtccatcacctagttgatgtgactcttctgcatgggctctgtccatggagatatgaaatattttttcattcatcccctgccatttctcttttgtgcctcttttgcctgggccttgccaaaaagaggattataatgtatcactggacccagaacctaggtgaggtgactcctattttgcctggggctcacatatttgggtattgtgatataggggatggatgggaggcacatgagtgggctttgctcacagaaggccttgtgacatctcagcattcattacctaggaaatgtgactattgtcttccatttgcaccctgcttacagggaagattgtgacatattgctggacctagcaaccaggtgatgtgtctctcttgcctgaaccctgcccacagggagcattgtaacatatctctgggctcagcagccaagggatgttactatccttcccggtccctgccctcaagtaatattgtacaaatctttggcccagcacccgggtgatgtgactcccctgcttattacctacctgcacgtggatttgttacacataatgttgttccagctcataggtgtgatgatgactctcatatattgaaccagccaatagttgatacagtctctcatagctaggcttagaaaaatggataagattctgggtcttctgtttttataaaggtcagaaaggagtatcacactctcacatatggtataaagtcttcaggttgtacacagtgtgtcattgcagagcccagtgcacaggtgagatttacttgtgtgtatgcacaccctactatccattaaaattgtaattctcacagacggacagaccctacttgtaatctcacatatggatgcagtccacatttggaattgtcatatgtgaacatccagccagatatgggatagtaaaacatttttaaatgcagctcatagaaaggtgagggctctcctatctagacacagaaaattagggagatgttgactcttatacctggggttaagaacacagatatgattataggttcataccagcacaaatgtcttagaatagattgtgactctcatgcaaaacataaagccctagcatagtacagagagtgtcctaacagggccaagcacacaggtgagattacgacacttgtatgcacacactttcaacagtaaagattgtcctgcacccacataaacaacccgctgttgaggttctgaacctcacacacaaagccagctgaaatttggaaaattgaatcatgtggatctggcccacagctgggttggtgactctcagataaagattcagcactcttgtgagcctctgactccactaggggaaaatagttcacaggagggattgaggctttcagacacagatctagccacctttaagactatgactcacgaaattagacccaaaatagagaaggtattgactctcatacctagaaccaggacgtgtgtgggatgtttaatataatccctagaccttgcaggtgtgattgtgacatacaccttttcccagcacctaagtgatttgacccttctgcctgggccctacagatgggattgtggcaaatgactaaacctagcacctggatgatgtgagcctataattttgtctaagcacttttcacagagagaattgtgaaatattgctggccctaacacccaggtgaagtgactttcctctattgcttgatctctctgcccaaggacagattgtgatatatgactgggcccagcacctaggtaatgtgacttccttctcctgcctgggccctgcatacattgagtattgtgacatatggctgggtctaacactttcatgatgcaaatctgcatgggcccggcctacagaggtattagaacatatctgtttattcatcacccaggtgacggagaagaggtggtgattgatttcactctcctcttctgccggggccctgccaaaatcagggattgtgacatatctctgattttgcatctagcatctaggtgatgaaacctggtagcatctagcatgtaggtggacctagcatctaggtgatgaaactcttctgttttccctgggccccacatattttggagattattacacatatctgggacccatacctatgggatggggtgcttctgcctgggccctgcccacaagggaccttgtaaaatatctttttatttatcacctaggaaatgtgactctctcttacctgtattctgcccatagaaaatgttgtgacatattgctgggccatgacaccaggtgatttgtctttcctgctaaggccatgcccagaaggagcattttgacatcactggacttagcatacaggcaatattaatacaggagttaaatcaaaattattttagggagttagtaagagtaagggttctcaatggaatttttctttaataaaacagggccccagagctatttgttttcctaaaagaaagcagcctaaaacgtgaagctgtaagcatagatcagcaagctggaagcttgcatatgcaaatgccaggagctatactaaaagccaggtacaccacacatgacaattttccctcctttttctgtcatcacgtgtgcaggtgtcatggcatcggccaggtagagattacatttacataataaaagattagggtagaagggacattttctttgtgggctatgtaaatggcacacctggtcaaaccaatctcctgggccctgtgtaaatcaatcactgcctcctcaatccaatcctctataaaattgaatctattctgccccaaactcagaaacccccttgggtgacccactttttctgaaagaggaagctctgtctctccctttcttctattaaactttctgcttcttaaactc

SEQ ID NO: 6198 - protein, 87 aa, Homo sapiens
MPGPPGKPRKMVLPAKKIVTYCWLQHHGDVTFCLLTALRRHCDMLVVPASKKYLSAAQIATYCLAQLLCDVTLLSYLSAPHCGNCDI

SEQ ID NO: 6199 - DNA, 659 bp, Homo sapiens
aatcaggcacgcagctggagcggacaggacggcttccgggatttggcggggcctttgtctctggctgcagccggagctcctgctctcctcctcactgctcagtgtcctctgctcctagaggcccagcctctgtgtccctgtgacctgcagatattgggagatccacagctaagacgccgggactccctggaaacctagaaatggaaccactgacatttaaagatgtcgccatagaattctctctggaggagtggcaatgcctggatactgcacagcgggatttatataggaatgtgttgttagagaactacagaaacctggtctttttgggtattgctgtctctaagccatatctgatcacctgtctggagcaaaaaaaagagccctggaatataaaaagacatgagatggtagccaaacccccagtaatgtcttttcattttgcccaagacctttggccagagcagaacataaaagattctttccagaaagtgacactgagaagatacggaaaatgtgaatatgagaatttacagttaagaaaaggctgtaaacatgtggatgagtgtacggggcacaaaggaggtcataatacagttaaccaatgtttgacagctaccccaagcaaaatattccagtgtaataaatatgtgaaagtc

SEQ ID NO: 6200 - protein, 152 aa, Homo sapiens
MEPLTFKDVAIEFSLEEWQCLDTAQRDLYRNVLLENYRNLVFLGIAVSKPYLITCLEQKKEPWNIKRHEMVAKPPVMSFHFAQDLWPEQNIKDSFQKVTLRRYGKCEYENLQLRKGCKHVDECTGHKGGHNTVNQCLTATPSKIFQCNKYVK

SEQ ID NO: 6201 - DNA, 909 bp, Homo sapiens
gggatttggcggggcctttgtctctggctgcagccggagctcctgctctcctcctcactgctcagtgtcctctgctcctagaggcccagcctctgtgtccctgtgacctgcagatattgggagatccacagctaagacgccgggactccctggaaacctagaaatgactgtgccataacacacatttgatgctgaaatccgggataggggaactcctttgggagtcgtgtcccttaaccccttcccccgacttcttgaagagacccacccgcgacctcggtacctcggaccagctctgtaaaagccccgcctctgccttcggataggtctggccccaccctggagtcttgcctcacagaactgattagaagagatcagagttttggctggtgcctttccggagtggttgctaacaattcccgaattccacaaggagataaatgggaaaaaaaggaaccactgacatttaaagatgtcgccatagaattctctctggaggagtggcaatgcctggatactgcacagcgggatttatataggaatgtgttgttagagaactacagaaacctggtctttttgggtattgctgtctctaagccatatctgatcacctgtctggagcaaaaaaaagagccctggaatataaaaagacatgagatggtagccaaacccccagtaatgtcttttcattttgcccaagacctttggccagagcagaacataaaagattctttccagaaagtgacactgagaagatacggaaaatgtgaatatgagaatttacagttaagaaaaggctgtaaacatgtggatgagtgtacggggcacaaaggaggtcataatacagttaaccaatgtttgacagctaccccaagcaaaatattccagtgtaataaatatgtgaaagtc

SEQ ID NO: 6202 - protein, 83 aa, Homo sapiens
MVAKPPVMSFHFAQDLWPEQNIKDSFQKVTLRRYGKCEYENLQLRKGCKHVDECTGHKGGHNTVNQCLTATPSKIFQCNKYVK

SEQ ID NO: 6203 - DNA, 950 bp, Homo sapiens
atttggcggggcctttgtctctggctgcagccggagctcctgctctcctcctcactgctcagtgtcctctgctcctagaggcccagcctctgtgtccctgtgacctgcagatattgggagatccacagctaagacgccgggactccctggaaacctagaaatgactgtgccataacacacatttgatgctgaaatccgggataggggaactcctttgggagtcgtgtcccttaaccccttcccccgacttcttgaagagacccacccgcgacctcggtacctcggaccagctctgtaaaagccccgcctctgccttcggataggaaccactgacatttaaagatgtcgccatagaattctctctggaggagtggcaatgcctggatactgcacagcgggatttatataggaatgtgttgttagagaactacagaaacctggtctttttgggtattgctgtctctaagccatatctgatcacctgtctggagcaaaaaaaagagccctggaatataaaaagacatgagatggtagccaaacccccagtaatgtcttttcattttgcccaagacctttggccagagcagaacataaaagattctttccagaaagtgacactgagaagatacggaaaatgtgaatatgagaatttacagttaagaaaaggctgtaaacatgtggatgagtgtacggggcacaaaggaggtcataatacagttaaccaatgtttgacagctaccccaagcaaaatattccagtgtaataaatatgtgaaagtctttgataaattttcaaattcaaatagatataagagaagacatacaggaaacaaacacttcaaatgtaaagaatgtagcaaatcattttgcgtgctttcacaactaactcagcatagaagaattcatactagagtgaattcctacaaatgtgaagaatgtggaaaagccttt

SEQ ID NO: 6204 - protein, 140 aa, Homo sapiens
MVAKPPVMSFHFAQDLWPEQNIKDSFQKVTLRRYGKCEYENLQLRKGCKHVDECTGHKGGHNTVNQCLTATPSKIFQCNKYVKVFDKFSNSNRYKRRHTGNKHFKCKECSKSFCVLSQLTQHRRIHTRVNSYKCEECGKA

SEQ ID NO: 6205 - DNA, 1058 bp, Homo sapiens
gcctttgtctctggctgcagccggagctcctgctctcctcctcactgctcagtgtcctctgctcctagaggcccagcctctgtgtccctgtgacctgcagatattgggagatccacagctaagacgccgggactccctggaaacctagaaatgatggagtctcgctctgttgctcaggctgaagggcagtggtgcgatctcggctcactgaaacctccgccttccgggctcaagcaattctcctgcctcaacctcgcaagtagctgggattacaggcatgcaccaccatgcccagactgtgccataacacacatttgatgctgaaatccgggataggggaactcctttgggagtcgtgtcccttaaccccttcccccgacttcttgaagagacccacccgcgacctcggtacctcggaccagctctgtaaaagccccgcctctgccttcggataggtctggccccaccctggagtcttgcctcacagaactgattagaagagatcagagttttggctggtgcctttccggagtggttgctaacaattcccgaattccacaaggagataaatgggaaaaaaaggaaccactgacatttaaagatgtcgccatagaattctctctggaggagtggcaatgcctggatactgcacagcgggatttatataggaatgtgttgttagagaactacagaaacctggtctttttgggtattgctgtctctaagccatatctgatcacctgtctggagcaaaaaaaagagccctggaatataaaaagacatgagatggtagccaaacccccagtaatgtcttttcattttgcccaagacctttggccagagcagaacataaaagattctttccagaaagtgacactgagaagatacggaaaatgtgaatatgagaatttacagttaagaaaaggctgtaaacatgtggatgagtgtacggggcacaaaggaggtcataatacagttaaccaatgtttgacagctaccccaagcaaaatattccagtgtaataaatatgtgaaagtctttgataaattttcaaattc

SEQ ID NO: 6206 - protein, 89 aa, Homo sapiens
MVAKPPVMSFHFAQDLWPEQNIKDSFQKVTLRRYGKCEYENLQLRKGCKHVDECTGHKGGHNTVNQCLTATPSKIFQCNKYVKVFDKFS

SEQ ID NO: 6207 - DNA, 764 bp, Homo sapiens
gctctcctcctcactgctcagtgtcctctgctcctagaggcccagcctctgtgtccctgtgacctgcagatattgggagatccacagctaagacgccgggactccctggaaacctagaaatgactgtgccataacacacatttgatgctgaaatccgggataggggaactcctttgggagtcgtgtcccttaaccccttcccccgacttcttgaagagacccacccgcgacctcggtacctcggaccagctctgtaaaagccccgcctctgccttcggatagatacccagccatatgaggacactctggccagacagcccatcctgataaagagcttaaccccctgatctctacaacctcagtggacaggacccttcctggtcgtttatggtaccccaatggctgtctgcttacaagatcctcctcagtggattcacccttccagagtaaagctgtgtccatctgacactcagcctgacccttcttcctcctcttggaagtcgcaagtactctccccgacctcgttaaaactcaccgaaatccctgaagaaacttaaatgtcctgctcctgtccgccctgcttcttcaccctcttcctccactctatttgccaagacatctcctggtttcatccccaaactcccaccttagattctctcttaaactggatagatgatctcatcttttagggcactctgtataacttcttcccagatgagacgcctctgtttaccttcctactcactctttatctatccctcctg

SEQ ID NO: 6208 - protein, 52 aa, Homo sapiens
MAVCLQDPPQWIHPSRVKLCPSDTQPDPSSSSWKSQVLSPTSLKLTEIPEET

SEQ ID NO: 6209 - DNA, 877 bp, Homo sapiens
tcagtgtcctctgctcctagaggcccagcctctgtgtccctgtgacctgcagatattgggagatccacagctaagacgccgggactccctggaaacctagaaatgatggagtctcgctctgttgctcaggctgaagggcagtggtgcgatctcggctcactgaaacctccgccttccgggctcaagcaattctcctgcctcaacctcgcaagtagctgggattacaggcatgcaccaccatgcccagactgtgccataacacacatttgatgctgaaatccgggataggggaactcctttgggagtcgtgtcccttaaccccttcccccgacttcttgaagagacccacccgcgacctcggtacctcggaccagctctgtaaaagccccgcctctgccttcggatagatacccagccatatgaggacactctggccagacagcccatcctgataaagagcttaaccccctgatctctacaacctcagtggacaggacccttcctggtcgtttatggtaccccaatggctgtctgcttacaagatcctcctcagtggattcacccttccagagtaaagctgtgtccatctgacactcagcctgacccttcttcctcctcttggaagtcgcaagtactctccccgacctcgttaaaactcaccgaaatccctgaagaaacttaaatgtcctgctcctgtccgccctgcttcttcaccctcttcctccactctatttgccaagacatctcctggtttcatccccaaactcccaccttagattctctcttaaactggatagatgatctcatcttttagggcactctgtataacttcttcccagatgagacgcctctgtttaccttcctactcactctttat

SEQ ID NO: 6210 - protein, 55 aa, Homo sapiens
MMESRSVAQAEGQWCDLGSLKPPPSGLKQFSCLNLASSWDYRHAPPCPDCAITHI

SEQ ID NO: 6211 - DNA, 2760 bp, Homo sapiens
ctcggcttggcggctgaggaatgacactgcccgaacacctcggaggccccatggaccatcatggacctcgggtaactcttaaggtggagggaaaggttgaaagagccaacggcctcttaaaaactcaccctccaactccgaaaggactggactgttctcctaccacttgtgcttctcaggatctgagccaccgcccatgaacctaccagatacccagccatatgaggacactctggccagacagcccatcctgataaagagcttaaccccctgatctctacaacctcagtggacaggacccttcctggtcgtttatggtaccccaatggctgtctgcttacaagatcctcctcagtggattcacccttccagagtaaagctgtgtccatctgacactcagcctgacccttcttcctcctcttggaagtcgcaagtactctccccgacctcgttaaaactcaccgaaatccctgaagaaacttaaatgtcctgctcctgtccgccctgcttcttcaccctcttcctccactctatttgccaagacatctcctggtttcatccccaaactcccaccttagattctctcttaaactggatagatgatctcatcttttagggcactctgtataacttcttcccagatgagacgcctctgtttaccttcctactcactctttatctatccctcctgctcctttggctacctggcatggccgcactcccacttccagtaatgcctaattacctctacaaaactctcaacccactctctgttaaaccagtccaacccttctttggcaaaggacgctggctttgcatttctctatcagctaccacttacgttgccactctcattcccacaaaaaactgggtagttactagcttaacctaccaccctcgtaatgaaggaaaaagccccttctaactcctacatatgcagtcattggccaacttctccatcaatgaaatgaccgaaaataccctgacaggtcgtgcagttcaacttttacgctcctacatgtccagcctcacccattacacaagtaatgaaaagcccatacacggccctgtgactacaaacgctgtcttaactttccaagcccctttatgcatccaacacaacctgtcatcaggcctacctctaggtcacctactgttccatcagtgcaactacgccttgcagcttcaagccccaactgactgtattaacttccaggtctcccaaacagctacattcaaacagcctgtccgcttctcaaagcccccagaagtcatcagcacctctctgcttaacaaacaatccgggttttgtaatggcaggcatacgcactgcatgaccattcacccctggacctcctgcagcagcactcccaccactgacgaatgcctccttatcccctctttcgattacccttctgagtggctcctagtagatacaaaatgatttttcctccaatgggaaaataaaacacagggagccactcagcttatcccaaacatcccttttcagccgctcactggggccgccttggcaagtaccctaggggtgtgggaaaatgaaaacaaattcacacacctttttaacatacacagccagttctgcctacccagccaaggcatattcttcttgtgtggaacttcaacctatgtctgcctcaccactaactggacaagcacctgtaccctaatcttcctaagccccaaaattgacattgcccctggaaaccaaaccttaccagtccctgtcagagcccaagtccatcagcatagggctgtgcagataatacccttgcttataggactaggagttaccaatgccacaggaactggaatagcaggtttgtccccttccctgtcctactatcatacactctcaaaggatctctcagacagcctacaagacatagcaaaatccacccttactctccaatcccaaatagactccttagcagcagtaactctgcagaaccaccgtggcttagacctcctaaccgtcgaaaaaggtgggctatgcacctttttaggggaagattgtttttccaccaaccagtctggactagtacgagatgctgcctcgcagttaaatgaaaaggcttctaaaatcagacaatgtctttcagacttttaacaccaatctttggagctgggcgttgtggcttctccctatagctgggcccctcatttccatcattctccttctcctatttggaccctgcctcttccgtctagcctctcagttcctacaaaatctcattcaagctattaccaatcaatctatgcgacaaatgctactcctaactgcccctcaatgtcacccccaccccaagatctctctcccaattaggagtccatgccgccccaagtcccgctcgaagaatccctgagaaacatcaccccgtccacttcttttcttattaaaacaaaaagacaggaatgtcatatcccacaaatatggctgcattattgccagcaggccattattgacggtgggccattaagaactctgtgaccagcacatatgcctccagacttcctggaaccagaaaacctgcaacaaccaaaaaccacaaaagaagaacaacgggtttctgttccaactggttgatcaacttcttgagtcaacaagtcccaaaaccatgttgtaattttccacccgccactttgccctgtaaagactgctctccctcacacctccgggctgactcccttttccgattcagcccactaacacccaagtgaataaacggccttgttgctcac

SEQ ID NO: 6212 - protein, 59 aa, Homo sapiens
MTLPEHLGGPMDHHGPRVTLKVEGKVERANGLLKTHPPTPKGLDCSPTTCASQDLSHRP

SEQ ID NO: 6213 - DNA, 402 bp, Homo sapiens
tacaggcatgaaccacagtacccgactatcctatacatttttttaaaaattcaatgacagcttatggctgcttggtaaatgtgtgtgtgtttgtgtttttcaggaaccactgacatttaaagatgtcgccatagaattctctctggaggagtggcaatgcctggatactgcacagcgggatttatataggaatgtgttgttagagaactacagaaacctggtctttttgggtattgctgtctctaagccatatctgatcacctgtctggagcaaaaaaaagagccctggaatataaaaagacatgagatggtagccaaacccccagtaatgtcttttcattttgcccaagacctttggccagagcagaacataaaagattctttccagaaagtgacactgag

SEQ ID NO: 6214 - protein, 30 aa, Homo sapiens
MVAKPPVMSFHFAQDLWPEQNIKDSFQKVT

SEQ ID NO: 6215 - DNA, 725 bp, Homo sapiens
agtctcagttcatcaaccaggctggagttcggtggcaccatcttggctcactgcaacctccacctcccaggttcaagtgattctcctgcctcaacctccagagcaactaggactacaggctcacaccaccacacctggcaaatttttttttttgaaatgacaacgtctccagcccagctgattctgtctttaaatggtggataattcccaaagtacacttgcccttgggagtagtggcaaaatgacacggtggtgtcggccccctctggctggaacctccaggagactgaggtcaacccgccagtcgtattagtagacttgaacttgcaggtcagcttcccttgtgtaccatttgccacgaagatttcttttggtaaatatacttccaagactgatactccagctgtcaagagccccagcgccaccgccagcaccgaccacagccagcgcctcctgtctggggctgcaatcactgccccggctccagcgggcgctgccatcatccagccactgcagtcgccgctgccgcgcccctgagcccgggtccctgccgaggttcgcttggcttggggaagagggttctgatctctctgccacctgcactgggtggcaacgccacgccgcgctccctactctggccccagctgtggctcgccagctctgcactctagcctcagccctgctctggccacatctggctaatttttttatgtttagtaaagatg

SEQ ID NO: 6216 - protein, 39 aa, Homo sapiens
MVDNSQSTLALGSSGKMTRWCRPPLAGTSRRLRSTRQSY

SEQ ID NO: 6217 - DNA, 3030 bp, Homo sapiens
ggacatgacgtcttccgggaggcggcggggtctttgtctcgctgcagcgggtgctgcaggtctggccttcacttttctgcgtcctcttactcctagaggcccagcctctgtggcgctgtgatctggttattgggagattcacagctaagacgccaggatcccccggaagcctagaaatgctctgtgttctcgttttgcccaagacctttggctagagcagaacataaaagattctttccaaaaagtgacactgagcagatatggaaaatatggacataagaatttacagttaagaaaaggctgtaaaagtgtggatgagtgtaagggacaccaaggaggttttaatggacttaaccaatgtttgaaaattaccacaagcaaaatatttcaatgtaataaatatgtaaaagtcatgcataaattttcaaattcaaatagacacaagataagacatactgaaaataaacatttcagatgtaaagaatgtgacaaatcactttgcatgctttcacgcctaactcaacataaaaaaattcatactagagagaatttctacaaatgtgaagagtgtggaaaaacctttaactggtccacaaacctttctaaacctaagaaaattcatactggagaaaaaccctacaaatgtgaagtatgtggaaaagcctttcaccaatcctcaatccttactaaacataagataattcgtactggagaaaaaccctataaatgtgcacactgtggcaaagcctttaaacagtcctcacaccttactagacataagataattcatactgaagagaaaccctacaaatgtgaacaatgtggcaaggtctttaagcagtccccaacccttactaaacatcagataatttatactggagaggaaccatacaaatgtgaggaatgtggcaaagcttttaacctatcttaacaacttactgaacataagaaaatttacactagagagaaagcctacaaatgtgaagaatgtggcaaagcctttaaccagttttcaacccttattacacataagataattcatagcggagagaaaccccacaaatgtgaagaatgtggcagagcttttaaccagtccgcaaagctcactgaacataagttaattcatactggagaaaaaccctacaaatgtaaagaatgtggaaaagcttttcaccgatactcaatccttagtacacataagaaaattcatactggggagaaaccccacaaatgtggagaatgcggaaaagcctttaactggtcctcaactcttattacacataagataattcacagtggagaaaaaccctacaaatgtgaagaatgtggcaaagcttttaaccagtcctcacaccttatgagacataagaaaattcatagtaaagagaaaccctacaaatgtgaacagtgtggcaaggtctttaagaagtcctcaactcttactgcacataagatcattcatactggagagaaaccttacaaatgtgaggaatgtggcaaaggttttagccaactctcaaaccttactaaacacaagaagattcatactagagagaaaccctacaaatgtgaagaatgtggcatatcttttaaccagttctcacaacttgctatacataagatgattcacacttgaatgaaaccctacaaatgtgaacgatgtggcagttgttttaactagttctcgaactttactatgcataagaaaattcaaactggagagaaactctacaaatgtgaagaatgtggcaaagcttttaaccaagtctcaacacttactatacataagataatttatactggagcaaaaccttggaaattcaaagaatgtggtaaaacttacaatcctcaaaacttcttacacctaaaattcatgcaggagagaaacaccacaaatgtgaaaaatttggtaaattctttaacaagtcttcaaccctttctgcacataatataattcatactggagagaaaccccacaaatatgaagaatgtggtaatgcttttaaccaattctcaaatcttactaaacaaaattaatactgaaaatgttacaaaccagaaaaatgtgaaaatgattttaacaaaaccttcaaatttttctaaacataaaggaaatcatactggtaagaaattataaaaatgtgaagaatgtgacaaagcctttaaatggttgtcacacttgattgtaggtaagataattcatactggcagaaactcccagaagtgtgaagaatatggcaaaactttaattcctataccttattgcacaggaaagcatttatacttcagaaaatgttgtactgatataaagaatgtagaaaagccattaatatgtgcttacatcttattcaacattagagagttagtacttaataaaagcattataaatgcaattactgtcaaaactcagcataaggttttgttttagtgtgtggtttgtttgtttgtttgttttgttttgttttttttaaatgagactacgtaatactctctcccaggctggagtgcactggtgcaatcttggtttaccgtaacctctgccttccaggttcaagcaattctcctgcctgggcctccagaatagctgggactacaggcatgtaccatcacgcccggctaagttttgtattttttagtagagacaggattttactgtgttggccaggctcatctcgaactcctgacttgaaatgatccatacacctctgcctcccaaagtgctggaataacaggtgtgagccactgttcccagccaatataagcctttaaagtaaaaaaagagtttttattttgaagacaaacattagaaacataaagagggttgtagtgcctgccttacttgtatcacagatcttattgtacacattttgtatccgaagcagttgctcaaacttcgttcaacatcagggaatttatatcggagaaaaactacaaatgtaatacatttcaaaaatttttcaaaaactacatcttagaaaacaccaggggatgcatactaaactatatttttccacatgcagtaaatataaa

SEQ ID NO: 6218 - protein, 172 aa, Homo sapiens
MHKFSNSNRHKIRHTENKHFRCKECDKSLCMLSRLTQHKKIHTRENFYKCEECGKTFNWSTNLSKPKKIHTGEKPYKCEVCGKAFHQSSILTKHKIIRTGEKPYKCAHCGKAFKQSSHLTRHKIIHTEEKPYKCEQCGKVFKQSPTLTKHQIIYTGEEPYKCEECGKAFNLS

SEQ ID NO: 6219 - DNA, 3235 bp, Homo sapiens
atgacgtcttccgggaggcggcggggtctttgtctcgctgcagcgggtgctgcaggtctggccttcacttttctgcgtcctcttactcctagaggcccagcctctgtggcgctgtgatctggttattgggagattcacagctaagacgccaggatcccccggaagcctagaaatgggaccactgacatttatggatgtggccatagagttctctttggaggagtggcagtgcctggacactgcacagcggaatgtatataggcatgtgatgttagagaactacagaaacctggttttcttggccagacctgattacctgtctggaacaaggaaaagagccctggaatatgaagagacatgagatggtggtagccaaacattcagctctgtgttctcgttttgcccaagacctttggctagagcagaacataaaagattctttccaaaaagtgacactgagcagatatggaaaatatggacataagaatttacagttaagaaaaggctgtaaaagtgtggatgagtgtaagggacaccaaggaggttttaatggacttaaccaatgtttgaaaattaccacaagcaaaatatttcaatgtaataaatatgtaaaagtcatgcataaattttcaaattcaaatagacacaagataagacatactgaaaataaacatttcagatgtaaagaatgtgacaaatcactttgcatgctttcacgcctaactcaacataaaaaaattcatactagagagaatttctacaaatgtgaagagtgtggaaaaacctttaactggtccacaaacctttctaaacctaagaaaattcatactggagaaaaaccctacaaatgtgaagtatgtggaaaagcctttcaccaatcctcaatccttactaaacataagataattcgtactggagaaaaaccctataaatgtgcacactgtggcaaagcctttaaacagtcctcacaccttactagacataagataattcatactgaagagaaaccctacaaatgtgaacaatgtggcaaggtctttaagcagtccccaacccttactaaacatcagataatttatactggagaggaaccatacaaatgtgaggaatgtggcaaagcttttaacctatcttaacaacttactgaacataagaaaatttacactagagagaaagcctacaaatgtgaagaatgtggcaaagcctttaaccagttttcaacccttattacacataagataattcatagcggagagaaaccccacaaatgtgaagaatgtggcagagcttttaaccagtccgcaaagctcactgaacataagttaattcatactggagaaaaaccctacaaatgtaaagaatgtggaaaagcttttcaccgatactcaatccttagtacacataagaaaattcatactggggagaaaccccacaaatgtggagaatgcggaaaagcctttaactggtcctcaactcttattacacataagataattcacagtggagaaaaaccctacaaatgtgaagaatgtggcaaagcttttaaccagtcctcacaccttatgagacataagaaaattcatagtaaagagaaaccctacaaatgtgaacagtgtggcaaggtctttaagaagtcctcaactcttactgcacataagatcattcatactggagagaaaccttacaaatgtgaggaatgtggcaaaggttttagccaactctcaaaccttactaaacacaagaagattcatactagagagaaaccctacaaatgtgaagaatgtggcatatcttttaaccagttctcacaacttgctatacataagatgattcacacttgaatgaaaccctacaaatgtgaacgatgtggcagttgttttaactagttctcgaactttactatgcataagaaaattcaaactggagagaaactctacaaatgtgaagaatgtggcaaagcttttaaccaagtctcaacacttactatacataagataatttatactggagcaaaaccttggaaattcaaagaatgtggtaaaacttacaatcctcaaaacttcttacacctaaaattcatgcaggagagaaacaccacaaatgtgaaaaatttggtaaattctttaacaagtcttcaaccctttctgcacataatataattcatactggagagaaaccccacaaatatgaagaatgtggtaatgcttttaaccaattctcaaatcttactaaacaaaattaatactgaaaatgttacaaaccagaaaaatgtgaaaatgattttaacaaaaccttcaaatttttctaaacataaaggaaatcatactggtaagaaattataaaaatgtgaagaatgtgacaaagcctttaaatggttgtcacacttgattgtaggtaagataattcatactggcagaaactcccagaagtgtgaagaatatggcaaaactttaattcctataccttattgcacaggaaagcatttatacttcagaaaatgttgtactgatataaagaatgtagaaaagccattaatatgtgcttacatcttattcaacattagagagttagtacttaataaaagcattataaatgcaattactgtcaaaactcagcataaggttttgttttagtgtgtggtttgtttgtttgtttgttttgttttgttttttttaaatgagactacgtaatactctctcccaggctggagtgcactggtgcaatcttggtttaccgtaacctctgccttccaggttcaagcaattctcctgcctgggcctccagaatagctgggactacaggcatgtaccatcacgcccggctaagttttgtattttttagtagagacaggattttactgtgttggccaggctcatctcgaactcctgacttgaaatgatccatacacctctgcctcccaaagtgctggaataacaggtgtgagccactgttcccagccaatataagcctttaaagtaaaaaaagagtttttattttgaagacaaacattagaaacataaagagggttgtagtgcctgccttacttgtatcacagatcttattgtacacattttgtatccgaagcagttgctcaaacttcgttcaacatcagggaatttatatcggagaaaaactacaaatgtaatacatttcaaaaatttttcaaaaactacatcttagaaaacaccaggggatgcatactaaactatatttttccacatgcagtaaatataaa

SEQ ID NO: 6220 - protein, 262 aa, Homo sapiens
MKRHEMVVAKHSALCSRFAQDLWLEQNIKDSFQKVTLSRYGKYGHKNLQLRKGCKSVDECKGHQGGFNGLNQCLKITTSKIFQCNKYVKVMHKFSNSNRHKIRHTENKHFRCKECDKSLCMLSRLTQHKKIHTRENFYKCEECGKTFNWSTNLSKPKKIHTGEKPYKCEVCGKAFHQSSILTKHKIIRTGEKPYKCAHCGKAFKQSSHLTRHKIIHTEEKPYKCEQCGKVFKQSPTLTKHQIIYTGEEPYKCEECGKAFNLS

SEQ ID NO: 6221 - DNA, 3337 bp, Homo sapiens
gacgtcttccgggaggcggcggggtctttgtctcgctgcagcgggtgctgcaggtctggccttcacttttctgcgtcctcttactcctagaggcccagcctctgtggcgctgtgatctggttattgggagattcacagctaagacgccaggatcccccggaagcctagaaatgggaccactgacatttatggatgtggccatagagttctctttggaggagtggcagtgcctggacactgcacagcggaatgtatataggcatgtgatgttagagaactacagaaacctggttttcttggccagacctgattacctgtctggaacaaggaaaagagccctggaatatgaagagacatgagatggtggtagccaaacattcagacacccttccactttggattttatgggggcggagtgtgactacttaagataccttataagtggaatcatccagtctccatcattttgttactggattatttcagctctgtgttctcgttttgcccaagacctttggctagagcagaacataaaagattctttccaaaaagtgacactgagcagatatggaaaatatggacataagaatttacagttaagaaaaggctgtaaaagtgtggatgagtgtaagggacaccaaggaggttttaatggacttaaccaatgtttgaaaattaccacaagcaaaatatttcaatgtaataaatatgtaaaagtcatgcataaattttcaaattcaaatagacacaagataagacatactgaaaataaacatttcagatgtaaagaatgtgacaaatcactttgcatgctttcacgcctaactcaacataaaaaaattcatactagagagaatttctacaaatgtgaagagtgtggaaaaacctttaactggtccacaaacctttctaaacctaagaaaattcatactggagaaaaaccctacaaatgtgaagtatgtggaaaagcctttcaccaatcctcaatccttactaaacataagataattcgtactggagaaaaaccctataaatgtgcacactgtggcaaagcctttaaacagtcctcacaccttactagacataagataattcatactgaagagaaaccctacaaatgtgaacaatgtggcaaggtctttaagcagtccccaacccttactaaacatcagataatttatactggagaggaaccatacaaatgtgaggaatgtggcaaagcttttaacctatcttaacaacttactgaacataagaaaatttacactagagagaaagcctacaaatgtgaagaatgtggcaaagcctttaaccagttttcaacccttattacacataagataattcatagcggagagaaaccccacaaatgtgaagaatgtggcagagcttttaaccagtccgcaaagctcactgaacataagttaattcatactggagaaaaaccctacaaatgtaaagaatgtggaaaagcttttcaccgatactcaatccttagtacacataagaaaattcatactggggagaaaccccacaaatgtggagaatgcggaaaagcctttaactggtcctcaactcttattacacataagataattcacagtggagaaaaaccctacaaatgtgaagaatgtggcaaagcttttaaccagtcctcacaccttatgagacataagaaaattcatagtaaagagaaaccctacaaatgtgaacagtgtggcaaggtctttaagaagtcctcaactcttactgcacataagatcattcatactggagagaaaccttacaaatgtgaggaatgtggcaaaggttttagccaactctcaaaccttactaaacacaagaagattcatactagagagaaaccctacaaatgtgaagaatgtggcatatcttttaaccagttctcacaacttgctatacataagatgattcacacttgaatgaaaccctacaaatgtgaacgatgtggcagttgttttaactagttctcgaactttactatgcataagaaaattcaaactggagagaaactctacaaatgtgaagaatgtggcaaagcttttaaccaagtctcaacacttactatacataagataatttatactggagcaaaaccttggaaattcaaagaatgtggtaaaacttacaatcctcaaaacttcttacacctaaaattcatgcaggagagaaacaccacaaatgtgaaaaatttggtaaattctttaacaagtcttcaaccctttctgcacataatataattcatactggagagaaaccccacaaatatgaagaatgtggtaatgcttttaaccaattctcaaatcttactaaacaaaattaatactgaaaatgttacaaaccagaaaaatgtgaaaatgattttaacaaaaccttcaaatttttctaaacataaaggaaatcatactggtaagaaattataaaaatgtgaagaatgtgacaaagcctttaaatggttgtcacacttgattgtaggtaagataattcatactggcagaaactcccagaagtgtgaagaatatggcaaaactttaattcctataccttattgcacaggaaagcatttatacttcagaaaatgttgtactgatataaagaatgtagaaaagccattaatatgtgcttacatcttattcaacattagagagttagtacttaataaaagcattataaatgcaattactgtcaaaactcagcataaggttttgttttagtgtgtggtttgtttgtttgtttgttttgttttgttttttttaaatgagactacgtaatactctctcccaggctggagtgcactggtgcaatcttggtttaccgtaacctctgccttccaggttcaagcaattctcctgcctgggcctccagaatagctgggactacaggcatgtaccatcacgcccggctaagttttgtattttttagtagagacaggattttactgtgttggccaggctcatctcgaactcctgacttgaaatgatccatacacctctgcctcccaaagtgctggaataacaggtgtgagccactgttcccagccaatataagcctttaaagtaaaaaaagagtttttattttgaagacaaacattagaaacataaagagggttgtagtgcctgccttacttgtatcacagatcttattgtacacattttgtatccgaagcagttgctcaaacttcgttcaacatcagggaatttatatcggagaaaaactacaaatgtaatacatttcaaaaatttttcaaaaactacatcttagaaaacaccaggggatgcatactaaactatatttttccacatgcagtaaatataaa

SEQ ID NO: 6222 - protein, 277 aa, Homo sapiens
MGAECDYLRYLISGIIQSPSFCYWIISALCSRFAQDLWLEQNIKDSFQKVTLSRYGKYGHKNLQLRKGCKSVDECKGHQGGFNGLNQCLKITTSKIFQCNKYVKVMHKFSNSNRHKIRHTENKHFRCKECDKSLCMLSRLTQHKKIHTRENFYKCEECGKTFNWSTNLSKPKKIHTGEKPYKCEVCGKAFHQSSILTKHKIIRTGEKPYKCAHCGKAFKQSSHLTRHKIIHTEEKPYKCEQCGKVFKQSPTLTKHQIIYTGEEPYKCEECGKAFNLS

SEQ ID NO: 6223 - DNA, 361 bp, Homo sapiens
gtcttccgggaggcggcggggtctttgtctcgctgcagcgggtgctgcaggtctggccttcacttttctgcgtcctcttactcctagaggcccagcctctgtggcgctgtgatctggttattgggagattcacagctaagacgccaggatcccccggaagcctagaaatgagttttgctcttgttgcccaggctggagtgcaatggcacgatctcggctcaccgcaacctctgcctctggattcaagtgatttctcctgccgcagcctcctgagtagctgggattacagacatgcgccaccacgcccagctgattttatatttttagtaaagacggggtttctccatgttcaggctggtct

SEQ ID NO: 6224 - protein, 63 aa, Homo sapiens
MSFALVAQAGVQWHDLGSPQPLPLDSSDFSCRSLLSSWDYRHAPPRPADFIFLVKTGFLHVQA

SEQ ID NO: 6225 - DNA, 482 bp, Homo sapiens
ggcggggtctttgtctcgctgcagcgggtgctgcaggtctggccttcacttttctgcgtcctcttactcctagaggcccagcctctgtggcgctgtgatctggttattgggagattcacagctaagacgccaggatcccccggaagcctagaaatgggaccactgacatttatggatgtggccatagagttctctttggaggagtggcagtgcctggacactgcacagcggaatgtatataggcatgtgatgttagagaactacagaaacctggttttcttggccagacctgattacctgtctggaacaaggaaaagagccctggaatatgaagagacatgagatggtggtagccaaacattcagctgtagcatttacctttgatctcagtggactcaacattttgtcattccaaagtatcctgccatttgtttcagcactttatgtcatgggaaacagaaaccagtgtctgcaaaagcacc

SEQ ID NO: 6226 - protein, 62 aa, Homo sapiens
MGPLTFMDVAIEFSLEEWQCLDTAQRNVYRHVMLENYRNLVFLARPDYLSGTRKRALEYEET

SEQ ID NO: 6227 - DNA, 3265 bp, Homo sapiens
gtctttgtctcgctgcagcgggtgctgcaggtctggccttcacttttctgcgtcctcttactcctagaggcccagcctctgtggcgctgtgatctggttattgggagattcacagctaagacgccaggatcccccggaagcctagaaatgggaccactgacatttatggatgtggccatagagttctctttggaggagtggcagtgcctggacactgcacagcggaatgtatataggcatgtgatgttagagaactacagaaacctggttttcttggctgtagcatttacctttgatctcagtggactcaacattttgtcattccaaagtatcctgccatttgtttcagcactttatgtcatgggaaacagaaaccagtgtctgcaaaagcacctagaagccagaaataaagatctctgtgttctcgttttgcccaagacctttggctagagcagaacataaaagattctttccaaaaagtgacactgagcagatatggaaaatatggacataagaatttacagttaagaaaaggctgtaaaagtgtggatgagtgtaagggacaccaaggaggttttaatggacttaaccaatgtttgaaaattaccacaagcaaaatatttcaatgtaataaatatgtaaaagtcatgcataaattttcaaattcaaatagacacaagataagacatactgaaaataaacatttcagatgtaaagaatgtgacaaatcactttgcatgctttcacgcctaactcaacataaaaaaattcatactagagagaatttctacaaatgtgaagagtgtggaaaaacctttaactggtccacaaacctttctaaacctaagaaaattcatactggagaaaaaccctacaaatgtgaagtatgtggaaaagcctttcaccaatcctcaatccttactaaacataagataattcgtactggagaaaaaccctataaatgtgcacactgtggcaaagcctttaaacagtcctcacaccttactagacataagataattcatactgaagagaaaccctacaaatgtgaacaatgtggcaaggtctttaagcagtccccaacccttactaaacatcagataatttatactggagaggaaccatacaaatgtgaggaatgtggcaaagcttttaacctatcttaacaacttactgaacataagaaaatttacactagagagaaagcctacaaatgtgaagaatgtggcaaagcctttaaccagttttcaacccttattacacataagataattcatagcggagagaaaccccacaaatgtgaagaatgtggcagagcttttaaccagtccgcaaagctcactgaacataagttaattcatactggagaaaaaccctacaaatgtaaagaatgtggaaaagcttttcaccgatactcaatccttagtacacataagaaaattcatactggggagaaaccccacaaatgtggagaatgcggaaaagcctttaactggtcctcaactcttattacacataagataattcacagtggagaaaaaccctacaaatgtgaagaatgtggcaaagcttttaaccagtcctcacaccttatgagacataagaaaattcatagtaaagagaaaccctacaaatgtgaacagtgtggcaaggtctttaagaagtcctcaactcttactgcacataagatcattcatactggagagaaaccttacaaatgtgaggaatgtggcaaaggttttagccaactctcaaaccttactaaacacaagaagattcatactagagagaaaccctacaaatgtgaagaatgtggcatatcttttaaccagttctcacaacttgctatacataagatgattcacacttgaatgaaaccctacaaatgtgaacgatgtggcagttgttttaactagttctcgaactttactatgcataagaaaattcaaactggagagaaactctacaaatgtgaagaatgtggcaaagcttttaaccaagtctcaacacttactatacataagataatttatactggagcaaaaccttggaaattcaaagaatgtggtaaaacttacaatcctcaaaacttcttacacctaaaattcatgcaggagagaaacaccacaaatgtgaaaaatttggtaaattctttaacaagtcttcaaccctttctgcacataatataattcatactggagagaaaccccacaaatatgaagaatgtggtaatgcttttaaccaattctcaaatcttactaaacaaaattaatactgaaaatgttacaaaccagaaaaatgtgaaaatgattttaacaaaaccttcaaatttttctaaacataaaggaaatcatactggtaagaaattataaaaatgtgaagaatgtgacaaagcctttaaatggttgtcacacttgattgtaggtaagataattcatactggcagaaactcccagaagtgtgaagaatatggcaaaactttaattcctataccttattgcacaggaaagcatttatacttcagaaaatgttgtactgatataaagaatgtagaaaagccattaatatgtgcttacatcttattcaacattagagagttagtacttaataaaagcattataaatgcaattactgtcaaaactcagcataaggttttgttttagtgtgtggtttgtttgtttgtttgttttgttttgttttttttaaatgagactacgtaatactctctcccaggctggagtgcactggtgcaatcttggtttaccgtaacctctgccttccaggttcaagcaattctcctgcctgggcctccagaatagctgggactacaggcatgtaccatcacgcccggctaagttttgtattttttagtagagacaggattttactgtgttggccaggctcatctcgaactcctgacttgaaatgatccatacacctctgcctcccaaagtgctggaataacaggtgtgagccactgttcccagccaatataagcctttaaagtaaaaaaagagtttttattttgaagacaaacattagaaacataaagagggttgtagtgcctgccttacttgtatcacagatcttattgtacacattttgtatccgaagcagttgctcaaacttcgttcaacatcagggaatttatatcggagaaaaactacaaatgtaatacatttcaaaaatttttcaaaaactacatcttagaaaacaccaggggatgcatactaaactatatttttccacatgcagtaaatataaa

SEQ ID NO: 6228 - protein, 100 aa, Homo sapiens
MGPLTFMDVAIEFSLEEWQCLDTAQRNVYRHVMLENYRNLVFLAVAFTFDLSGLNILSFQSILPFVSALYVMGNRNQCLQKHLEARNKDLCVLVLPKTFG

SEQ ID NO: 6229 - DNA, 3128 bp, Homo sapiens
gtctttgtctcgctgcagcgggtgctgcaggtctggccttcacttttctgcgtcctcttactcctagaggcccagcctctgtggcgctgtgatctggttattgggagattcacagctaagacgccaggatcccccggaagcctagaaatgggaccactgacatttatggatgtggccatagagttctctttggaggagtggcagtgcctggacactgcacagcggaatgtatataggcatgtgatgttagagaactacagaaacctggttttcttggctctgtgttctcgttttgcccaagacctttggctagagcagaacataaaagattctttccaaaaagtgacactgagcagatatggaaaatatggacataagaatttacagttaagaaaaggctgtaaaagtgtggatgagtgtaagggacaccaaggaggttttaatggacttaaccaatgtttgaaaattaccacaagcaaaatatttcaatgtaataaatatgtaaaagtcatgcataaattttcaaattcaaatagacacaagataagacatactgaaaataaacatttcagatgtaaagaatgtgacaaatcactttgcatgctttcacgcctaactcaacataaaaaaattcatactagagagaatttctacaaatgtgaagagtgtggaaaaacctttaactggtccacaaacctttctaaacctaagaaaattcatactggagaaaaaccctacaaatgtgaagtatgtggaaaagcctttcaccaatcctcaatccttactaaacataagataattcgtactggagaaaaaccctataaatgtgcacactgtggcaaagcctttaaacagtcctcacaccttactagacataagataattcatactgaagagaaaccctacaaatgtgaacaatgtggcaaggtctttaagcagtccccaacccttactaaacatcagataatttatactggagaggaaccatacaaatgtgaggaatgtggcaaagcttttaacctatcttaacaacttactgaacataagaaaatttacactagagagaaagcctacaaatgtgaagaatgtggcaaagcctttaaccagttttcaacccttattacacataagataattcatagcggagagaaaccccacaaatgtgaagaatgtggcagagcttttaaccagtccgcaaagctcactgaacataagttaattcatactggagaaaaaccctacaaatgtaaagaatgtggaaaagcttttcaccgatactcaatccttagtacacataagaaaattcatactggggagaaaccccacaaatgtggagaatgcggaaaagcctttaactggtcctcaactcttattacacataagataattcacagtggagaaaaaccctacaaatgtgaagaatgtggcaaagcttttaaccagtcctcacaccttatgagacataagaaaattcatagtaaagagaaaccctacaaatgtgaacagtgtggcaaggtctttaagaagtcctcaactcttactgcacataagatcattcatactggagagaaaccttacaaatgtgaggaatgtggcaaaggttttagccaactctcaaaccttactaaacacaagaagattcatactagagagaaaccctacaaatgtgaagaatgtggcatatcttttaaccagttctcacaacttgctatacataagatgattcacacttgaatgaaaccctacaaatgtgaacgatgtggcagttgttttaactagttctcgaactttactatgcataagaaaattcaaactggagagaaactctacaaatgtgaagaatgtggcaaagcttttaaccaagtctcaacacttactatacataagataatttatactggagcaaaaccttggaaattcaaagaatgtggtaaaacttacaatcctcaaaacttcttacacctaaaattcatgcaggagagaaacaccacaaatgtgaaaaatttggtaaattctttaacaagtcttcaaccctttctgcacataatataattcatactggagagaaaccccacaaatatgaagaatgtggtaatgcttttaaccaattctcaaatcttactaaacaaaattaatactgaaaatgttacaaaccagaaaaatgtgaaaatgattttaacaaaaccttcaaatttttctaaacataaaggaaatcatactggtaagaaattataaaaatgtgaagaatgtgacaaagcctttaaatggttgtcacacttgattgtaggtaagataattcatactggcagaaactcccagaagtgtgaagaatatggcaaaactttaattcctataccttattgcacaggaaagcatttatacttcagaaaatgttgtactgatataaagaatgtagaaaagccattaatatgtgcttacatcttattcaacattagagagttagtacttaataaaagcattataaatgcaattactgtcaaaactcagcataaggttttgttttagtgtgtggtttgtttgtttgtttgttttgttttgttttttttaaatgagactacgtaatactctctcccaggctggagtgcactggtgcaatcttggtttaccgtaacctctgccttccaggttcaagcaattctcctgcctgggcctccagaatagctgggactacaggcatgtaccatcacgcccggctaagttttgtattttttagtagagacaggattttactgtgttggccaggctcatctcgaactcctgacttgaaatgatccatacacctctgcctcccaaagtgctggaataacaggtgtgagccactgttcccagccaatataagcctttaaagtaaaaaaagagtttttattttgaagacaaacattagaaacataaagagggttgtagtgcctgccttacttgtatcacagatcttattgtacacattttgtatccgaagcagttgctcaaacttcgttcaacatcagggaatttatatcggagaaaaactacaaatgtaatacatttcaaaaatttttcaaaaactacatcttagaaaacaccaggggatgcatactaaactatatttttccacatgcagtaaatataaa

SEQ ID NO: 6230 - protein, 293 aa, Homo sapiens
MGPLTFMDVAIEFSLEEWQCLDTAQRNVYRHVMLENYRNLVFLALCSRFAQDLWLEQNIKDSFQKVTLSRYGKYGHKNLQLRKGCKSVDECKGHQGGFNGLNQCLKITTSKIFQCNKYVKVMHKFSNSNRHKIRHTENKHFRCKECDKSLCMLSRLTQHKKIHTRENFYKCEECGKTFNWSTNLSKPKKIHTGEKPYKCEVCGKAFHQSSILTKHKIIRTGEKPYKCAHCGKAFKQSSHLTRHKIIHTEEKPYKCEQCGKVFKQSPTLTKHQIIYTGEEPYKCEECGKAFNLS

SEQ ID NO: 6231 - DNA, 676 bp, Homo sapiens
tttgtctcgctgcagcgggtgctgcaggtctggccttcacttttctgcgtcctcttactcctagaggcccagcctctgtggcgctgtgatctggttattgggagattcacagctaagacgccaggatcccccggaagcctagaaatgagtgttgctgttgtcgtctaggctggagtgcaatggtgggatctcgacttactgcaacctcttcctcctaagttcaagtgattctcctacctcggcctcctgagtagctgggattacaggcacccgccaccatgcccaactaatttttgtatttttattagagacagggtttcaccatgttggccaggttggtcttgaactcctgacctcaggtgatccacctgttttggacccccaaagtgcccggcctgtttttcaaatgcagatttattcagacatagctgccttctgtttgttctgtaaacttaaaagagccagcaaaaaatatgaaaattgattatcttcatttgtcctagaagtatttgtattttgacaagagtgctgagtgtaaggaactctgctgtgtctgctttctctaactaatgctaataatgagcccaaggggagcaacatcagctttgacaggagacttgtttaaaactcccattcatgaaccctttccaaacctgcagtatcacattacataggg

SEQ ID NO: 6232 - protein, 34 aa, Homo sapiens
MLIMSPRGATSALTGDLFKTPIHEPFPNLQYHIT

SEQ ID NO: 6233 - DNA, 646 bp, Homo sapiens
tttgtctcgctgcagcgggtgctgcaggtctggccttcacttttctgcgtcctcttactcctagaggcccagcctctgtggcgctgtgatctggttattgggagattcacagctaagacgccaggatcccccggaagcctagaaatgggaccactgacatttatggatgtggccatagagttctctttggaggagtggcagtgcctggacactgcacagcggaatgtatataggcatgtgatgttagagaactacagaaacctggttttcttgggtgagaataacttcagtacacatttcctaatatatcctaaaggtttcatttttttttttttttgggtagaatgtcttttggtaatttatgctttgcataaatgagtttcagattcctgttttcaaaagaatctttgagatttgtcagtgtagaaaacaatttctttaagatgtttcatcttgacctgaactttccacatttctgagctgatatgtatccttcactctagattagtggtaattccagaaatttattggcgtaaagtgttgttgcccacacctaaatctaactcccaacaccaattattttgaatcaatagtactgggtagtgaaattaagaatttacaaatttaaaatattttctaaatattt

SEQ ID NO: 6234 - protein, 77 aa, Homo sapiens [sequence omitted]

SEQ ID NO: 6235 - DNA, 554 bp, Homo sapiens
tttgtctcgctgcagcgggtgctgcaggtctggccttcacttttctgcgtcctcttactcctagaggcccagcctctgtggcgctgtgatctggttattgggagattcacagctaagacgccaggatcccccggaagcctagaaatgggaccactgacatttatggatgtggccatagagttctctttggaggagtggcagtgcctggacactgcacagcggaatgtatataggcatgtgatgttagagaactacagaaacctggttttcttggtgttttccaagcagtgaagcacttgccgtgttgaactgaatgcactactggagaatgttctgggtccaagatgctcttgagagaagactaggcttttcaaatcaaacactcaaaggaatcatgcaaccctcttatgactgggatgccgtcatgtgccactgaccaatgctatctctccagaaaaccattcaagactcttaaaaaatcagacttataataaatatacataaaatgaagacaccaactgctctttgacatgactacgataatgtctgtgcta

SEQ ID NO: 6236 - protein, 48 aa, Homo sapiens
MGPLTFMDVAIEFSLEEWQCLDTAQRNVYRHVMLENYRNLVFLVFSKQ

SEQ ID NO: 6237 - DNA, 2227 bp, Homo sapiens
ttcagctctgtgttctcgttttgcccaagacctttggctagagcagaacataaaagattctttccaaaaagtgacactgagcagatatggaaaatatggacataagaatttacagttaagaaaaggctgtaaaagtgtggatgagtgtaagggacaccaaggaggttttaatggacttaaccaatgtttgaaaattaccacaagcaaaatatttcaatgtaataaatatgtaaaagtcatgcataaattttcaaattcaaatagacacaagataagacatactgaaaataaacatttcagatgtaaagaatgtgacaaatcactttgcatgctttcacgcctaactcaacataaaaaaattcatactagagagaatttctacaaatgtgaagagtgtggaaaaacctttaactggtccacaaacctttctaaacctaagaaaattcatactggagaaaaaccctacaaatgtgaagtatgtggaaaagcctttcaccaatcctcaatccttactaaacataagataattcgtactggagaaaaaccctataaatgtgcacactgtggcaaagcctttaaacagtcctcacaccttactagacataagataattcatactgaagagaaaccctacaaatgtgaacaatgtggcaaggtctttaagcagtccccaacccttactaaacatcagataatttatactggagaggaaccatacaaatgtgaggaatgtggcaaagcttttaacctatcttaacaacttactgaacataagaaaatttacactagagagaaagcctacaaatgtgaagaatgtggcaaagcctttaaccagttttcaacccttattacacataagataattcatagcggagagaaaccccacaaatgtgaagaatgtggcagagcttttaaccagtccgcaaagctcactgaacataagttaattcatactggagaaaaaccctacaaatgtaaagaatgtggaaaagcttttcaccgatactcaatccttagtacacataagaaaattcatactggggagaaaccccacaaatgtggagaatgcggaaaagcctttaactggtcctcaactcttattacacataagataattcacagtggagaaaaaccctacaaatgtgaagaatgtggcaaagcttttaaccagtcctcacaccttatgagacataagaaaattcatagtaaagagaaaccctacaaatgtgaacagtgtggcaaggtctttaagaagtcctcaactcttactgcacataagatcattcatactggagagaaaccttacaaatgtgaggaatgtggcaaaggttttagccaactctcaaaccttactaaacacaagaagattcatactagagagaaaccctacaaatgtgaagaatgtggcatatcttttaaccagttctcacaacttgctatacataagatgattcacacttgaatgaaaccctacaaatgtgaacgatgtggcagttgttttaactagttctcgaactttactatgcataagaaaattcaaactggagagaaactctacaaatgtgaagaatgtggcaaagcttttaaccaagtctcaacacttactatacataagataatttatactggagcaaaaccttggaaattcaaagaatgtggtaaaacttacaatcctcaaaacttcttacacctaaaattcatgcaggagagaaacaccacaaatgtgaaaaatttggtaaattctttaacaagtcttcaaccctttctgcacataatataattcatactggagagaaaccccacaaatatgaagaatgtggtaatgcttttaaccaattctcaaatcttactaaacaaaattaatactgaaaatgttacaaaccagaaaaatgtgaaaatgattttaacaaaaccttcaaatttttctaaacataaaggaaatcatactggtaagaaattataaaaatgtgaagaatgtgacaaagcctttaaatggttgtcacacttgattgtaggtaagataattcatactggcagaaactcccagaagtgtgaagaatatggcaaaactttaattcctataccttattgcacaggaaagcatttatacttcagaaaatgttgtactgatataaagaatgtagaaaagccattaatatgtgcttacatcttattcaacattagagagttagtacttaataaaagcattataaatgcaattactgtc

SEQ ID NO: 6238 - protein, 172 aa, Homo sapiens; identical to SEQ ID NO: 6218

SEQ ID NO: 6239 - DNA, 1914 bp, Homo sapiens
taagttaattcatactggagaaaaaccctacaaatgtaaagaatgtggaaaagcttttcaccgatactcaatccttagtacacataagaaaattcatactggggagaaaccccacaaatgtggagaatgcggaaaagcctttaactggtcctcaactcttattacacataagataattcacagtggagaaaaaccctacaaatgtgaagaatgtggcaaagcttttaaccagtcctcacaccttatgagacataagaaaattcatagtaaagagaaaccctacaaatgtgaacagtgtggcaaggtctttaagaagtcctcaactcttactgcacataagatcattcatactggagagaaaccttacaaatgtgaggaatgtggcaaaggttttagccaactctcaaaccttactaaacacaagaagattcatactagagagaaaccctacaaatgtgaagaatgtggcatatcttttaaccagttctcacaacttgctatacataagatgattcacacttgaatgaaaccctacaaatgtgaacgatgtggcagttgttttaactagttctcgaactttactatgcataagaaaattcaaactggagagaaactctacaaatgtgaagaatgtggcaaagcttttaaccaagtctcaacacttactatacataagataatttatactggagcaaaaccttggaaattcaaagaatgtggtaaaacttacaatcctcaaaacttcttacacctaaaattcatgcaggagagaaacaccacaaatgtgaaaaatttggtaaattctttaacaagtcttcaaccctttctgcacataatataattcatactggagagaaaccccacaaatatgaagaatgtggtaatgcttttaaccaattctcaaatcttactaaacaaaattaatactgaaaatgttacaaaccagaaaaatgtgaaaatgattttaacaaaaccttcaaatttttctaaacataaaggaaatcatactggtaagaaattataaaaatgtgaagaatgtgacaaagcctttaaatggttgtcacacttgattgtaggtaagataattcatactggcagaaactcccagaagtgtgaagaatatggcaaaactttaattcctataccttattgcacaggaaagcatttatacttcagaaaatgttgtactgatataaagaatgtagaaaagccattaatatgtgcttacatcttattcaacattagagagttagtacttaataaaagcattataaatgcaattactgtcaaaactcagcataaggttttgttttagtgtgtggtttgtttgtttgtttgttttgttttgttttttttaaatgagactacgtaatactctctcccaggctggagtgcactggtgcaatcttggtttaccgtaacctctgccttccaggttcaagcaattctcctgcctgggcctccagaatagctgggactacaggcatgtaccatcacgcccggctaagttttgtattttttagtagagacaggattttactgtgttggccaggctcatctcgaactcctgacttgaaatgatccatacacctctgcctcccaaagtgctggaataacaggtgtgagccactgttcccagccaatataagcctttaaagtaaaaaaagagtttttattttgaagacaaacattagaaacataaagagggttgtagtgcctgccttacttgtatcacagatcttattgtacacattttgtatccgaagcagttgctcaaacttcgttcaacatcagggaatttatatcggagaaaaactacaaatgtaatacatttcaaaaatttttcaaaaactacatcttagaaaacaccaggggatgcatactaaactatatttttccacatgcagtaaatat

SEQ ID NO: 6240 - protein, 92 aa, Homo sapiens [sequence omitted]

SEQ ID NO: 6241 - DNA, 582 bp, Homo sapiens
gtgaagaatgtggcaaagcttttaaccaagtctcaacacttactatacataagataatttatactggagcaaaaccttggaaattcaaagaatgtgtgttttccaagcagtgaagcacttgccgtgttgaactgaatgcactactggagaatgttctgggtccaagatgctcttgagagaagactaggcttttcaaatcaaacactcaaaggaatcatgcaaccctcttatgactgggatgccgtcatgtgccactgaccaatgctatctctccagaaaaccattcaagactcttaaaaaatcagacttataataaatatacataaaatgaagacaccaactgctctttgacatgactacgataatgtctgtgctatgtggaagcacatttaaaaagagcctattcggcaaaaggtaagtgtctaaagattcaaaatgtatcaacagtattggataacaatataattctcaactcagaagctgcctcaagattaggtgcatcttcagttaatgtgacaggaaaaaaaggcatggattttattttattaattgtatccacttacaaactgacctaaggtcacc

SEQ ID NO: 6242 - protein, 40 aa, Homo sapiens
MHYWRMFWVQDALERRLGFSNQTLKGIMQPSYDWDAVMCH

SEQ ID NO: 6243 - DNA, 4399 bp, Homo sapiens
gtgtcatgcaggttgtcaggggtgtgggggaaagggggagagccagcagttacatgactcacccatctctcatgcaaccccaaaagcaagactcattcccaccatgctccccacccccaagagcaccgagtgttctgccaggcagtgagggaacagagctaagaacttgcccctggctaccagcctcccagctgcaaaagcaagcagggcttttgtgccttgctgcctgtggagtctgctcacccaattcacaccctttccgaatttctggtcaggagacttcacgtttggttagaattgttagaaagttcagctggaggtttccttctccctgtggtcctttccaagttcccctggcagccctccccaagggcccctttgacgcaagtctaaaatggcttcccagaagactcagagcccaccgggcttttcccacttcttctacctctgtatttagctcagctctctaaattgactcagctccaggtaaagtcagatttcttattccatgttctagactttcaggttccccagtgagggtatgtgttcaagggcagactatccctttttcccactttcacatcttgaacactatcaatattttggctgtctgccaggtcctgttggagcagtttgcttccgtcagagggtctttggattctctcagctctcctggtttattcctgcagtacttctggagaaaagttaatgatgcgagtctccacatactgctctgagtgggagctgcaatctagcccttgcctcctgttcgctattttttcccccagaaaaggggtttttaaatttctctttatttctactaatttagaaaattcaaagccaaaaatgttgggtcaaaaataaaaagtagcattggatgagagggtgttgggcataatggttaagattgaaacgccgtatcaggtggttccttgtttcattccagttttgccatttatggactatatgacatgaatacagtttcttgatctctctgtgcttgactcttcagctctttactgcctaaatcatagggttttggtaaaattaaagcagttaatacaaataaatgtgcccaataagtccccagcacatagcaagtgtacaggaaatttattcactcttatttattgattcttttagatcatgattaatgttaaacctaaaaacaaggtggccacatcagtggtttgtaacccatgtttcttctagtcagtctgggggtataatagtagttgaatgttttaaatactatccttttaaaaatatatatattaatagcatttttcattcaccagagttctgtacattatggggtacaatgagatatttgaatatatgtatatagtatgaaatgattttgtcgagttaaataacaacttgcttacctatcatttttttgtggtgagacacttgaaatttactcttagttattctgaaatatacaatacattattgtttactatagtcaccctgctgtgcaatagaactcaaaacctatttatcctgtctatttgaaactttgtattttttgatcaacccctctctgtttccttcccaccacacccagcctctggtaaagattattccactttgtacttttttgagttaaactttattcttttttttatacaacagcaatttaaaaaattaagtatttatttgaataacaagtttaagtttgggctgcaatgttggcaatgcaggtttttaacacagatcacaaaaagcgtgcacaaaaatgtacgagcgcaaaggacaaaataatgctaagaattacgctaaatagctgctgattttaagaaaacaaaaggcctgaaatcactatacaaaatataaaatgtattaaacactaccatccacagaacagtctttattattgattatatttaaaaattatttgcgtaattatatattgaattgtaaatgagtattatacatgaacctccatttggaaggcaattccttgtagcactataaaatacctaattacattgcaaaaagtatcctttttttgctatcgataaagaaaacagttaatggtattactgtaaatgtcaggaagcctccaaaaaaagaaataagatttcttttttgtcttcaaagtgttttccaagcagtgaagcacttgccgtgttgaactgaatgcactactggagaatgttctgggtccaagatgctcttgagagaagactaggcttttcaaatcaaacactcaaaggaatcatgcaaccctcttatgactgggatgccgtcatgtgccactgaccaatgctatctctccagaaaaccattcaagactcttaaaaaatcagacttataataaatatacataaaatgaagacaccaactgctctttgacatgactacgataatgtctgtgctatgtggaagcacatttaaaaagagcctattcggcaaaaggtaagtgtctaaagattcaaaatgtatcaacagtattggataacaatataattctcaactcagaagctgcctcaagattaggtgcatcttcagttaatgtgacaggaaaaaaaggcatggattttattttattaattgtatccacttacaaactgacctaaggtcacctgatatgtagatacagtgagatttttgttgcttatagtctttaattgaagcgatgataaaggaaatagatctatttaaaaacaaaaccaaacagctatttctgcttagattaagaggtggccccgggtgtgggattcacattttgagtggccacttgtggtgcaatctcgatgatcaggggtttgtctatgattctggctgtgtggttgcccttctctacaatcccaataatccatgcttggtggtcttcaccatatttgggggactttatctctgcacagaaccgagctgtttgctcacatggtaaacagatcagaagcccgcctgtcctgttgagcctcgccatgttcatcatcacctcctcgtaggccagctctacatcttcttgggtgaccactagtttaatattattccatttcttaggaatatccagccactgatgcacagccactgccccctgtgtccccaggggttttgtcaacaccagcacatcccctggtactgcattgtctggcatgataaattcactgggctgacagacagtggtagtgactcttcccaggacaatccaggggtttagtactgtttggccgcccattacagacgtttctgcctcctcagctgcgtctttaaaaccttggataatcagaggcatcactttatccatttccctgttggtcattttattactgactccaaggagcatcagcatattgtcacattctgtgacccccattgcgtagaggtcactgaggacattggcacatgctatcctgcctgtcacgtaagagtcgtctacaattgggtaaatgtaatctgtagtttgaaccaaggaaagcccaccgtgtctcaaaggaatgacaagtatccattccaatgccaagccttggcataaaggctcccagaaactgctcatcttcttggaagtggttctgtaaagattccagcaatttttgcaggacatcttggggcactttgtagcctgtgcccttcagttcagtgaatctggttagccggaagcttttgtccaattcgtaactttccgggttaaaggactcccatgtagatatggttgttgggccccactctcctcacagctcagcccctcccttccctctgcgagttggctgggttctttatggatccaccggctcgctttgcgccccgagttaaacttttttctatatatatgagatcatgtagtatttgtctttctatgtcaggattattccatctagtatgctgtcttctaaatttatctatattgattcaaatgatgaaacttaccacctttgaaggctgaatagtattccattgtgtatctatacaacatttattttaaaaaattaaatatattgattgaaaaactcatgtgttataaaagggcattcccgtcttaaagcacatactagtgtacttcagcatatacatatcatattaatcgttaatttgtactgagcattaaccataatactttaatgtgttaataaatttaattctcacagtaactgaataacataggtgttattatcctcagtttgcagagaaagaaacacagccaatattaaaacacaggcaaatgtgtctccagagataacactccttagtataacaataaaaaccatctttaatcgtttgaacccaggaggtggaggttgcagtgagccgagatcgagtcactgcactccagcctgggtaacagcaaggctctgtctcaaaaaaacaaaacaaaacaaaaacctctttaaccagaaaaaaaaaaataattattttcacactcacttttaataaaaattaacaaaaattg

SEQ ID NO: 6244 - protein, 154 aa, Homo sapiens
MQVVRGVGERGRASSYMTHPSLMQPQKQDSFPPCSPPPRAPSVLPGSEGTELRTCPWLPASQLQKQAGLLCLAACGVCSPNSHPFRISGQETSRLVRIVRKFSWRFPSPCGPFQVPLAALPKGPFDASLKWLPRRLRAHRAFPTSSTSVFSSAL

SEQ ID NO: 6245 - DNA, 1088 bp, Homo sapiens
atggaatactattcagccttcaaaggtgagtggggcccaacaaccatatctacatgggagtcctttaacccggaaagttacgaattggacaaaagcttccggctaaccagattcactgaactgaagggcacaggctacaaagtgccccaagatgtcctgcaaaaattgctggaatctttacagaaccacttccaagaagatgagcagtttctgggagcctttatgccaaggcttggcattggaatggatacttgtcattcctttgagacacggtgggctttccttggttcaaactacagattacatttacccaattgtagacgactcttacgtgacaggcaggatagcatgtgccaatgtcctcagtgacctctacgcaatgggggtcacagaatgtgacaatatgctgatgctccttggagtcagtaataaaatgaccaacagggaaatggataaagtgatgcctctgattatccaaggttttaaagacgcagctgaggaggcagaaacgtctgtaatgggcggccaaacagtactaaacccctggattgtcctgggaagagtcactaccactgtctgtcagcccagtgaatttatcatgccagacaatgcagtaccaggggatgtgctggtgttgacaaaacccctggggacacagggggcagtggctgtgcatcagtggctggatattcctaagaaatggaataatattaaactagtggtcacccaagaagatgtagagctggcctacgaggaggtgatgatgaacatggcgaggctcaacaggacaggcgggcttctgatctgtttaccatgtgagcaaacagctcggttctgtgcagagataaagtcccccaaatatggtgaagaccaccaagcatggattattgggattgtagagaagggcaaccacacagccagaatcatagacaaacccctgatcatcgagattgcaccacaagtggccactcaaaatgtgaatcccacacccggggccacctcttaatctaagcagaaatagctgtttggttttgtttttaaatagatctatttcctttatcatcgcttcaattaaagactataagcaa

SEQ ID NO: 6246 - protein, 122 aa, Homo sapiens [sequence omitted]

SEQ ID NO: 6247 - DNA, 277 bp, Homo sapiens
cagcctgtctaagcagaggaaaacggagcaggcagagccggcctgatctcggaataaaggctgcatgcgacaaacactgagggaccctaaaagtctcgaccatagggcctcttctggccatctccgtggtcgtgtcccgctggaggaggaggcgattagagactgtgaggtgaagatgcgggacccaaaccacatttcaccagactgtatcctcacccccatctgaccttactgctgctcacactctccgtcccagaatgaaatccccagaagatgg

SEQ ID NO: 6248 - protein, 53 aa, Homo sapiens
MRQTLRDPKSLDHRASSGHLRGRVPLEEEAIRDCEVKMRDPNHISPDCILTPI

SEQ ID NO: 6249 - DNA, 2283 bp, Homo sapiens
aaaccagtagacttctgtggacgtgcatcgccgctggactctcacccgtcttctctgagagatccacgggatagtcccctgatcctagaattgggcagggccgacccagggtgaagaaacctcaagcggactcccagggctgcagatcgaaatccctaaggatcccaggggacccgcaggatgtgtcaggcatgcctaggcggtgtgggggcttgaaatcgcccttagacagcctctgagacactttctcaacctcacctgccccggtgggatgccaactccaggtgtcagacctctgctccaccttggactagcctttgtcgtggttcctgcctttcccagacgaccgtgctgagaagcaggagcccctgtgaggcccaggatgaaggaagacagtgagcttaaggacacaggaatcttccgctagcaccatcatccagaattttaactaaaattccatctcaaagagacccctcaaaaactcacaagactgtatctccagcccaatgggacccgattcctacacacagcctttttcgggaatggaatcagaaacgcagtttccatggcccaactcacagtctcaaagcctgtcctcctccagcgggacagggccacggagacaaactaaggaagccctacggtgagcaacgttgggggcccgcagtacttgttgcaggcagcctatttcctgagaccaggcaggctctgcctgcaccattttccttgcttaggtaggctgaaaaccctgacagcctggtgaccgaaactgcctcatgcatgcaccagtggcggggcaccaggagcaagtagtgagcgcgggctcgagtcacagtgaatgccttcgttgcatctcgacaagtctctgactcttggcaaagagggggtcctctgtgacgtgcgtcgaagttggacttccggttgtcttctctggggatccatgggatactcccacgatccaggatacaatagaggcagaccattctgaggaaatgtcaagtagcacttagcacctgcccgccctccaccttctccaccacccagcaggagcggggcggcctggatctgttttctgcccctgaccagggggccgcgtcttcggcaaagtcttcggggtgagaggtccggctcctggaggacagcgggatgggagagtcccgttcacacccagccccgcagagccggatagaaacgctgccactgccgactccatgctgccgggaagtgcactgtggaggccactttctggaaagaagaaaccgtctgaacacaaagttgctcaagccatgttcatctatctgccagggaaacggaggccctgagtgccagagtccaagtcaccctgcaagagaaaactctggtggagcccagggtgtccagcccctgtccacccagccgccgtggtcaaggttaataagggcaaggggccaagcagaaccgcctacaaggaaccgagtgtccacaaagcaggaagcgaagaacgtttctcctacctagagcgcagccgttttgcggaaggcacagtccgggctccgggagccaagcagggatccgggcctcgttgcggaggggacgcccgggctgagctgagctcacttgctggcggcggcagcccctgcagtcatggggtcaccggcttgtggagaggggctggcgctgttccttggccccgctccccgcccgcaaagggccgggaggtcgggctcccggcagtgtccaggctctcgcccgccggtgcctgagccgtacccaccgcgtcccctccgccccaacagctggtgctgagggtccggcccggggtcatctggcagggccgtgcggctcctgcgggtgaccaggagcgcggagccccttcccactcgggctcgggtggcctcacctttcctggggctgcgtccccgcgggacgccaggttcccggtttcttctaggtcgccctggttcctggcagctcctggtgccacgcggtcctctacggtctcctctgacctgagagggacagtgagatggggctggcggggatgggggtccccgcgctgttggaaagcagcggggctgctgctgaccggagccgcctgggtctgttctggaaccgtcgccctggggcccctccgccccgcaaacgctcgggatgcggtttgggagtgtagctggacaccgagcaccatccacgctcagccccacggggctccaggagtcccgagcccaagcccctgcacttgcattttatttaaaaaacctgagggttaaattcgggcaagtcagttgcctcagtgtttgtcgc

SEQ ID NO: 6250 - protein, 116 aa, Homo sapiens
MGESRSHPAPQSRIETLPLPTPCCREVHCGGHFLERRNRLNTKLLKPCSSICQGNGGPECQSPSHPARENSGGAQGVQPLSTQPPWSRLIRARGQAEPPTRNRVSTKQEAKNVSPT

SEQ ID NO: 6251 - DNA, 612 bp, Homo sapiens
tgcatcgccgttggactctcgcctgtcttctctgaaggatccatgggatagtcccgcgatcctagaagtgtgctggggcgacccagcctgaagaaacctcaagcggagcccaagggatacagcgcaaaattcctaaggatccgcaggatgcttcaggcctgcctagacggtgtgggtgtgagtctccttgaaacttgcccccctgtgatttctagggcctattgaattcacttcgaaatccgttgccagcagagcaggagcttcaggtggggaggcgagcactcctccatcgtcttggtatttcattctggtcggagaggtccgatacgggcttgaaatcgcccttagacagcctctgagacactttctcaacctcacctgccccggtgggatgccaactccaggtgtcagacctctgctccaccttggactagcctttgtcgtggttcctgcctttcccagacgaccgtgctgagaagcaggagcccctgtgaggcccaggatgaaggaagacagtgagcttaaggacacaggaatcttccgctagcaccatcatccagaattttaactaaaattccatctcaaagagacccctcaaaaactcacaagact

SEQ ID NO: 6252 - protein, 47 aa, Homo sapiens
GLLNSLRNPLPAEQELQVGRRALLHRLGISFWSERSDTGLKSPLDSL

SEQ ID NO: 6253 - DNA, 5481 bp, Homo sapiens
gcatgtgccagtggcggggcacaaggcgccagcggcgagcactggcttgcttcacagtgaacgccttcgttgcctggcgactagtccctgcggcttagcggagagggggcgtcggcgttgggctctcgcctgtcttctctggggggatcctcgggatactcccacgatctaggacagggcaggggcgagccagcctgaggaaacgtcaagggaaggcccagggatacaccgcgaaatccctaagaatccaaaaggatccgcaggaggcgtcaggcctgcctagacggagtgggaaatctttagagatggatcattttccttacaagaatagataccagtcacagagagaggacagcagcgtacatggtgaggtgctgacgattctggtccactggatcccaccatccctaggacagtaaataccgtcctagtcactacccagcaagttaccaccgcatcatttcctgcatgttccaaaatgaataaagacggaatcttgctctgtcgcccagactggagtgcagtggcgcaatctcagctcacttcaagctctgcctcccagtttcacgccattctcctgcctcagcctcccgagtagctgggactacaggcgcccgccaccacacccagctaattttttgtatttttagtagagacggggtttcactgtgctggccagcatggtctcgatctcctgagctcgtgatccacccgcctcggcctcccaaagtgctgggattacaggcatgagccaccgtgcccagccaaaaagctgatgtgttttaagcaaaataagcatacgcatcaatagtaaaatgcttctggtaaaataaaggttcattttgttgatttctttttttttttttttttctgagacggagtcttgctctgtcgcccagtctggagtgcagtggcacggtctctgctcactgcaagctctgcctcctgggttcacgccagtctcccgtctcagtctcccgtctcagcctcccgagtagctgggactacaggcgcctgccaccacgcccggctaattttttgtattttttagtagagacagggtttcaccgtgttagccaggatggtctcgatctcctgacctcgtaatcctcccgcctcggcctcccaaagtgctggtattacaggcgtgagccaccgcacccggcctcattttgctgatttctcttgagctcaggccagaaaaactgggaaaatcacaggctcttccacttactggatgtttgacaaaatattcttcttgggccaaaaacattggcattactgggaccactgacatttagggatgtggccatagaattctctctggaggagtggcaatgcctggacacttcacagcagaatttgtataggaatgtgatgttagataactacagaaacctggtcttcctgggtattgctgtctctaagccagacctgatcacttgtctggagcaaggaaaagagccctgcaatatgaagagacatgcgatggtagccaaacccccagttgtgtgttctcattttgcccaagacctttggccaaagcagggcttaaaagattcttttcaaaaagtgatactgagaagatatggaaaatatggacatgagaatttacaattaagaaaaggctgtaaaagtgcggatgagcataaggtgcacaaaagaggttataatggacttaaccaatgtttgacaactacccagagcaaaatatttcaatgtgataaatatgttaaagtccttcataaattctcaaattcaaatatacataagaaaagacaaactggaaagaaacctttcaaatgtaaagaatgtggcaaatcatgttgcatactttcacaactaactcagcataagaaaactgctactagagtgaatttctacaaatgtaagacatgtggaaaagcctttaaccagttctcaaatcttactaaacataagataattcatcctgaagtgaatccctacaaatgtgaagaatgtggcaaagcctttaaccagtccttaactcttactaaacataaaaaaattcatactgaagagaaaccttacaaatgtgaagattgtggcaaagtctttagtgtattttcagtccttactaaacataagataattcatacaggaacaaaaccctacaattgtgaagaatgtggcaaaggctttagtatattctcaacccttactaaacataagataattcatactggagagaaaccctacaaatgcaatgaatgtggtaaagcctttaactggtcctcaactcttactaaacataagagaattcatactggagagaaaccctacaaatgtgaagaatgtggcaaagcttttaaccagtcctcaacccttactagacataagatagttcatactggagagaaaccctacaaatgtgaagaatgtggtaaagcctttaaacggtccacaactcttactaaacataagagaatttatactaaagagaaaccatacaaatgtgaagaatgtggaaaagcctttagtgtattctcaacccttactaaacataagataattcatactggagcaaaaccttacaaatgtgaagaatgtggcagtgcctttagggcattctcaacccttactgaacataagagagttcatactggagagaaaccttacaaatgcaatgaatgtggtaaagcctttaactggtcctcaactcttactaaacataagagaattcatactggagagaagccctacaaatgtgaagaatgtggcaaagcttttaaccggtcctcaaaccttactcgacataagaaaattcatactggagagaaaccatacaaacctaaaagatgtgacagtgcttttgacaacaccccaaacttttctagacataaaagaaatcatatgggtgagaaatcctagaaatgtgaagaatgtgacaaagcctttaagcggttgtcacacttgattgtatataagataattcatactggagaaaactcccagaagtggagttttccttattgcacaggaaagcatttatacttgagaaaaattgtataaagaatggaaaagtcattaatatctgctcatatcttaacatcagcgagttggtatttaataaaagcattatcaatgaaattactgtcaaaagatctttcagacaatataagcctgcaaagtgcagcagagtatttattttgaagagaaacattaaaagtacaaagaggtttgtagtacctttgtttgtatcatagatcttattgtacacattttgtaccagagaaaaaccctgaagcagttgttcaaactttgttcaataccaggaaatttatattggagaaaaaccctatgagtgtaatgaatttggaaaaatatttttttcaacaacagcttagaaaacatgggaggaattacactaaaatatatttttgcaaatgcagcagtaaatatgaaagaaatgatccaaagttaggtttatataaatatcagagaattcacaatacagatatctaagatactgacacttcagacattacacaaaatcagagtgctgagtacagaaagttatccaaaacaaaagttggtagataactaatagtgaacaagtttttggcagaggtatatttacattcagagtacacttttctttggaaaaaattacaggttttttgaaaagtgaataatgtaattcaactctcaaattcatggtttttttttttttggttttggttttgggttttttgtttgtttgtttgtttgtttttgagacggagtttcactcttgttgcccaggctggagtgcaatggcgtgatctcagctcaccgcaacctctgcctcccagattcaagcaattctcctgcctcagcctccctagtagctgggattacaggcatgtgccacacctggctaatttttgtggttttagtagagacagggtttctccatgttggtcagtctggtctcaaactcccaacctcaggtgatatgcccgcctcggcctcccaaaatgttgggattacaggcatgagccactgcacccggcgcatgttttttcttcattcctattgtattcacatgtgaaagcatgtgatcaacttgctgcatcaaagatatgagatttttttttttattaggtgggcattatttatgaccttttctgtggaagagtaagaacattaaaatgaaagatgcatgatgaaaatctaagtagagaggctcttgtggttaactgataatattgagtgatgcatgaggtaggtgttcagagtaatattctgcattatagtgaaaaatttttaatattaaaattcaattatatcattttatgaattgtgcttttcataatgcagtacatttcaaaatttttagattatgtatgaacttagatttttaaacatgttttaacatgttaagacttgtgcattcagtgaagcgttattatgccacaaactaacctacctcaccttactcaatggtgtaggtaaaagatgatagcaatatattatttggttacatagtggactaacatttttagtaatctcttttgccagtggctttaaactgcagataagttaaatattcccataggttttacatttatattttttcttatttaaatttattgttcttatttttcatgggtacatagtatgtttttatgctgtatatggcatgttttgatacaggtatataatatgtaataatcacatcagggtaaatgaggtatcccttactagcatttatcctttgtattttattttaaaatgtacaactaaattgttatggactacagggttatttttatggtcataataaaaattacaaaagtatgaataaaatacatacatttctgagtcctgaatatttttaaaaatttgttatatatttttcttctaacatgtggcctctttgcctgcaaacatataaagactcagttttgatttacatagagttaaatatacatatattttactttaaagataaatcttaagtgtaagaaaattgtagagtaagtgtgcttgtgtgagtatgtttgtacctgttttcaaaagaaaacagcaatattggaacaaaacaaatcattttaataaggtgactaatttattagaaaactaacaacctcaaaaatgctgaaagcaaatctatactctctctgctttgtactgaattcattactgtaaaatattatggcttatggttcagaatctccccatgcagatgttctgtttttacttgcctggtactcatggtagagccatacatttcttttttcttacaatttcttttacagtttatgaagtattatatgagctggtcagggattacaacaattattttttttataaaatttagtagtgcacaaaaagtaatttttagatgtaattttactattagtctattaagttatattttatttatttagttaaaacattgccctttgttcttttaattggagaaccctatgtaagccgacttttttaaagttattctttctttcacttttcata

SEQ ID NO: 6254 - protein, 504 aa, Homo sapiens
MLDNYRNLVFLGIAVSKPDLITCLEQGKEPCNMKRHAMVAKPPVVCSHFAQDLWPKQGLKDSFQKVILRRYGKYGHENLQLRKGCKSADEHKVHKRGYNGLNQCLTTTQSKIFQCDKYVKVLHKFSNSNIHKKRQTGKKPFKCKECGKSCCILSQLTQHKKTATRVNFYKCKTCGKAFNQFSNLTKHKIIHPEVNPYKCEECGKAFNQSLTLTKHKKIHTEEKPYKCEDCGKVFSVFSVLTKHKIIHTGTKPYNCEECGKGFSIFSTLTKHKIIHTGEKPYKCNECGKAFNWSSTLTKHKRIHTGEKPYKCEECGKAFNQSSTLTRHKIVHTGEKPYKCEECGKAFKRSTTLTKHKRIYTKEKPYKCEECGKAFSVFSTLTKHKIIHTGAKPYKCEECGSAFRAFSTLTEHKRVHTGEKPYKCNECGKAFNWSSTLTKHKRIHTGEKPYKCEECGKAFNRSSNLTRHKKIHTGEKPYKPKRCDSAFDNTPNFSRHKRNHMGEKS

SEQ ID NO: 6255 - DNA, 580 bp, Homo sapiens
acaaggcgccagcggcgagcactggcttgcttcacagtgaacgccttcgttgcctggcgactagtccctgcggcttagcggagagggggcgtcggcgttgggctctcgcctgtcttctctggggggatcctcgggatactcccacgatctaggacagggcaggggcgagccagcctgaggaaacgtcaagggaaggcccagggatacaccgcgaaatccctaagaatccaaaaggatccgcaggaggcgtcaggcctgcctagacggagtgggtagcacttagcacctgcccgccctccaccttctccaccacccagcaggagcggggcggcctggatctgttttctgcccctgaccagggggccgcgtcttcggcaaagtcttcggggtgagaggtccggctcctggaggacagcgggatgggagagtcccgttcacacccagccccgcagagccggatagaaacgctgccactgccgactccatgctgccgggaagtgcactgtggaggccactttctggaaagaagaaaccgtctgaacacaaagttgctcaagccatgttcatctatctgccaggg

SEQ ID NO: 6256 - protein, 52 aa, Homo sapiens
MGESRSHPAPQSRIETLPLPTPCCREVHCGGHFLERRNRLNTKLLKPCSSIC

SEQ ID NO: 6257 - DNA, 1873 bp, Homo sapiens
cctcacagccctgagtgagggtgtgcagcctccttgggcaagaggatgcgggctctgggaggctgcgtcgcacatctccagtccccactgcagggcctctcaccggctggggcagtgacccctggtcggaagcacctcagtgctgctcatgattgcagaggtggcctcaccagatagagggtcctggagggcgtgggggcttggtctctgactgccagcaaaagaagccgacatagaggcagcaggcgacaaacactgaggcaactgacttgcccgaatttaaccctcaggttttttaaataaaatgcaagtgcaggggcttgggctcgggactcctggagccccgtggggctgagcgtggatggtgctcggtgtccagctacactcccaaaccgcatcccgagcgtttgcggggcggaggggccccagggcgacggttccagaacagacccaggcggctccggtcagcagcagccccgctgctttccaacagcgcggggacccccatccccgccagccccatctcactgtccctctcaggtcagaggagaccgtagaggaccgcgtggcaccaggagctgccaggaaccagggcgacctagaagaaaccgggaacctggcgtcccgcggggacgcagccccaggaaaggggctgccgccgccagcaagtgagctcagctcagcccgggcgtcccctccgcaacgaggcccggatccctgcttggctcccggagcccggactgtgccttccgcaaaacggctgcgctctagaaagtggcctccacagtgcacttcccggcagcatggagtcggcagtggcagcgtttctatccggctctgcggggctgggtgtgaacgggactctcccatcccgctgtcctccaggagccggacctctcaccccgaagactttgccgaagacgcggccccctggtcaggggcagaaaacagatccaggccgccccgctcctgctgggtggtggagaaggtggagggcgggcaggtgctaagtgctactgtgaaaataaaaatcatcataataaagaacgaatgggtttcgaatttgagctcagaggtgttgagcagcctgtgcgaggccacggagctcacaggaggaaggacccccatagagacagggacatctgacgagggagcgccctcctctggctggagggtggggcagcagcagcagcagccaggcttcagggaatggggtgaaatgagggccccgggggctccccaggtggaagaagcacaggtctggatgcaagttctggattcgcacaagggtgaggaaccagtgacccacccgaccacccctctgaaatgggtcaaggggaaccctggggcaggacaccctgctcagaagaagaggagcaagagtccaacgccgacacgtgtccacaaaggtcccctggtccaccaagagggagaaacttgtcaccaggcaacggtggcatacactgacacgcgagccaaggctcaccgctcgcgacaggtgtcccgcgactggcgcatgcgaatccgcgaggcaggtgctggggccaggctgtcagggctgtcagggctggcatcctcgggccgtctcattagtcgggtcccgctggaggaaaaggcgattcgagaatgtgaggtgggcgctgggaacttctctttggactccattcccgaaagagtctgtgtgcaagaatccggtcccagggagaagggaatacagtctggtgagttgttgagggatctccgggtgatggaatcatacctgagaccccagaggagggtgtcagtggaagactgtgaggcctttgagctcactgcctccgttcatccagggccccccagggagtcctgcttctcagcgcggctgtctgggtaa

SEQ ID NO: 6258 - protein, 503 aa, Homo sapiens [sequence omitted]

SEQ ID NO: 6259 - DNA, 1059 bp, Homo sapiens
cctcacagccctgagtgagggtgtgcagcctccttgggcaagaggatgcgggctctgggaggctgcgtcgcacatctccagtccccactgcagggcctctcaccggctggggcagtgacccctggtcggaagcacctcagtgctgctcatgattgcagaggtggcctcaccagatagagggtcctggagggcgtgggggcttggtctctgactgccagcaaaagaagccgacatagaggcagcaggcgacaaacactgaggcaactgacttgcccgaatttaaccctcaggttttttaaataaaatgcaagtgcaggggcttgggctcgggactcctggagccccgtggggctgagcgtggatggtgctcggtgtccagctacactcccaaaccgcatcccgagcgtttgcggggcggaggggccccagggcgacggttccagaacagacccaggcggctccggtcagcagcagccccgctgctttccaacagcgcggggacccccatccccgccagccccatctcactgtccctctcaggtcagaggagaccgtagaggaccgcgtggcaccaggagctgccaggaaccagggcgacctagaagaaaccgggaacctggcgtcccgcggggacgcagccccaggaaaggggctgccgccgccagcaagtgagctcagctcagcccgggcgtcccctccgcaacgaggcccggatccctgcttggctcccggagcccggactgtgccttccgcaaaacggctgcgctctagaaagtggcctccacagtgcacttcccggcagcatggagtcggcagtggcagcgtttctatccggctctgcggggctgggtgtgaacgggactctcccatcccgctgtcctccaggagccggacctctcaccccgaagactttgccgaagacgcggccccctggtcaggggcagaaaacagatccaggccgccccgctcctgctgggtggtggagaaggtggagggcgggcaggtgctaagtgctactgtgaaaataaaaatcatcataataaagaacgaatgggtttc

SEQ ID NO: 6260 - protein, 231 aa, Homo sapiens
MVLGVQLHSQTASRAFAGRRGPRATVPEQTQAAPVSSSPAAFQQRGDPHPRQPHLTVPLRSEETVEDRVAPGAARNQGDLEETGNLASRGDAAPGKGLPPPASELSSARASPPQRGPDPCLAPGARTVPSAKRLRSRKWPPQCTSRQHGVGSGSVSIRLCGAGCERDSPIPLSSRSRTSHPEDFAEDAAPWSGAENRSRPPRSCWVVEKVEGGQVLSATVKIKIIIIKNEW

SEQ ID NO: 6261 - DNA, 435 bp, Homo sapiens
ccagcccctctccacaagccggtgaccccatgactgcaggggctgccgccgccagcaagtgagctcagctcagcccgggcgtcccctccgcaacgaggcccggatccctgcttggctcccggagcccggactgtgccttccgcaaaacggctgcgctctagaaagtggcctccacagtgcacttcccggcagcatggagtcggcagtggcagcgtttctatccggctctgcggggctgggtgtgaacgggactctcccatcccgctgtcctccaggagccggacctctcaccccgaagactttgccgaagacgcggccccctggtcaggggcagaaaacagatccaggccgccccgctcctgctgggtggtggagaaggtggagggcgggcaggtgctaagtgctactgtgaaaataaaaatcatcataataaag

SEQ ID NO: 6262 - protein, 68 aa, Homo sapiens
MESAVAAFLSGSAGLGVNGTLPSRCPPGAGPLTPKTLPKTRPPGQGQKTDPGRPAPAGWWRRWRAGRC

SEQ ID NO: 6263 - DNA, 3791 bp, Homo sapiens
aggacggcttccgggatttggcggggcctttgtctctcgctgcagtcgcagctccaggtctcgtcttcactgctctatgtcctctgctcctagaggtccaccttctgtggccccgttacctgcaggtattgggagatccacagctaagacgccaggactccctggaagcctagaaatggccagaaaaactgggaaaatcacaggctcttccacttactggatgtttgacaaaatattcttcttgggccaaaaacattggcattactgggaccactgacatttagggatgtggccatagaattctctctggaggagtggcaatgcctggacacttcacagcagaatttgtataggaatgtgatgttagataactacagaaacctggtcttcctgggtattgctgtctctaagccagacctgatcacttgtctggagcaaggaaaagagccctgcaatatgaagagacatgcgatggtagccaaacccccagttgtgtgttctcattttgcccaagacctttggccaaagcagggcttaaaagattcttttcaaaaagtgatactgagaagatatggaaaatatggacatgagaatttacaattaagaaaaggctgtaaaagtgcggatgagcataaggtgcacaaaagaggttataatggacttaaccaatgtttgacaactacccagagcaaaatatttcaatgtgataaatatgttaaagtccttcataaattctcaaattcaaatatacataagaaaagacaaactggaaagaaacctttcaaatgtaaagaatgtggcaaatcatgttgcatactttcacaactaactcagcataagaaaactgctactagagtgaatttctacaaatgtaagacatgtggaaaagcctttaaccagttctcaaatcttactaaacataagataattcatcctgaagtgaatccctacaaatgtgaagaatgtggcaaagcctttaaccagtccttaactcttactaaacataaaaaaattcatactgaagagaaaccttacaaatgtgaagattgtggcaaagtctttagtgtattttcagtccttactaaacataagataattcatacaggaacaaaaccctacaattgtgaagaatgtggcaaaggctttagtatattctcaacccttactaaacataagataattcatactggagagaaaccctacaaatgcaatgaatgtggtaaagcctttaactggtcctcaactcttactaaacataagagaattcatactggagagaaaccctacaaatgtgaagaatgtggcaaagcttttaaccagtcctcaacccttactagacataagatagttcatactggagagaaaccctacaaatgtgaagaatgtggtaaagcctttaaacggtccacaactcttactaaacataagagaatttatactaaagagaaaccatacaaatgtgaagaatgtggaaaagcctttagtgtattctcaacccttactaaacataagataattcatactggagcaaaaccttacaaatgtgaagaatgtggcagtgcctttagggcattctcaacccttactgaacataagagagttcatactggagagaaaccttacaaatgcaatgaatgtggtaaagcctttaactggtcctcaactcttactaaacataagagaattcatactggagagaagccctacaaatgtgaagaatgtggcaaagcttttaaccggtcctcaaaccttactcgacataagaaaattcatactggagagaaaccatacaaacctaaaagatgtgacagtgcttttgacaacaccccaaacttttctagacataaaagaaatcatatgggtgagaaatcctagaaatgtgaagaatgtgacaaagcctttaagcggttgtcacacttgattgtatataagataattcatactggagaaaactcccagaagtggagttttccttattgcacaggaaagcatttatacttgagaaaaattgtataaagaatggaaaagtcattaatatctgctcatatcttaacatcagcgagttggtatttaataaaagcattatcaatgaaattactgtcaaaagatctttcagacaatataagcctgcaaagtgcagcagagtatttattttgaagagaaacattaaaagtacaaagaggtttgtagtacctttgtttgtatcatagatcttattgtacacattttgtaccagagaaaaaccctgaagcagttgttcaaactttgttcaataccaggaaatttatattggagaaaaaccctatgagtgtaatgaatttggaaaaatatttttttcaacaacagcttagaaaacatgggaggaattacactaaaatatatttttgcaaatgcagcagtaaatatgaaagaaatgatccaaagttaggtttatataaatatcagagaattcacaatacagatatctaagatactgacacttcagacattacacaaaatcagagtgctgagtacagaaagttatccaaaacaaaagttggtagataactaatagtgaacaagtttttggcagaggtatatttacattcagagtacacttttctttggaaaaaattacaggttttttgaaaagtgaataatgtaattcaactctcaaattcatggtttttttttttttggttttggttttgggttttttgtttgtttgtttgtttgtttttgagacggagtttcactcttgttgcccaggctggagtgcaatggcgtgatctcagctcaccgcaacctctgcctcccagattcaagcaattctcctgcctcagcctccctagtagctgggattacaggcatgtgccacacctggctaatttttgtggttttagtagagacagggtttctccatgttggtcagtctggtctcaaactcccaacctcaggtgatatgcccgcctcggcctcccaaaatgttgggattacaggcatgagccactgcacccggcgcatgttttttcttcattcctattgtattcacatgtgaaagcatgtgatcaacttgctgcatcaaagatatgagatttttttttttattaggtgggcattatttatgaccttttctgtggaagagtaagaacattaaaatgaaagatgcatgatgaaaatctaagtagagaggctcttgtggttaactgataatattgagtgatgcatgaggtaggtgttcagagtaatattctgcattatagtgaaaaatttttaatattaaaattcaattatatcattttatgaattgtgcttttcataatgcagtacatttcaaaatttttagattatgtatgaacttagatttttaaacatgttttaacatgttaagacttgtgcattcagtgaagcgttattatgccacaaactaacctacctcaccttactcaatggtgtaggtaaaagatgatagcaatatattatttggttacatagtggactaacatttttagtaatctcttttgccagtggctttaaactgcagataagttaaatattcccataggttttacatttatattttttcttatttaaatttattgttcttatttttcatgggtacatagtatgtttttatgctgtatatggcatgttttgatacaggtatataatatgtaataatcacatcagggtaaatgaggtatcccttactagcatttatcctttgtattttattttaaaatgtacaactaaattgttatggactacagggttatttttatggtcataataaaaattacaaaagtatgaat

SEQ ID NO: 6264 - protein, 504 aa, Homo sapiens; identical to SEQ ID NO: 6254

SEQ ID NO: 6265 - DNA, 4464 bp, Homo sapiens
aggacggcttccgggatttggcggggcctttgtctctcgctgcagtcgcagctccaggtctcgtcttcactgctctatgtcctctgctcctagaggtccaccttctgtggccccgttacctgcaggtattgggagatccacagctaagacgccaggactccctggaagcctagaaatggccagaaaaactgggaaaatcacaggctcttccacttactggatgtttgacaaaatattcttcttgggccaaaaacattggcattactgggaccactgacatttagggatgtggccatagaattctctctggaggagtggcaatgcctggacacttcacagcagaatttgtataggaatgtgatgttagataactacagaaacctggtcttcctgggtattgctgtctctaagccagacctgatcacttgtctggagcaaggaaaagagccctgcaatatgaagagacatgcgatggtagccaaacccccagttgtgtgttctcattttgcccaagacctttggccaaagcagggcttaaaagattcttttcaaaaagtgatactgagaagatatggaaaatatggacatgagaatttacaattaagaaaaggctgtaaaagtgcggatgagcataaggtgcacaaaagaggttataatggacttaaccaatgtttgacaactacccagagcaaaatatttcaatgtgataaatatgttaaagtccttcataaattctcaaattcaaatatacataagaaaagacaaactggaaagaaacctttcaaatgtaaagaatgtggcaaatcatgttgcatactttcacaactaactcagcataagaaaactgctactagagtgaatttctacaaatgtaagacatgtggaaaagcctttaaccagttctcaaatcttactaaacataagataattcatcctgaagtgaatccctacaaatgtgaagaatgtggcaaagcctttaaccagtccttaactcttactaaacataaaaaaattcatactgaagagaaaccttacaaatgtgaagattgtggcaaagtctttagtgtattttcagtccttactaaacataagataattcatacaggaacaaaaccctacaattgtgaagaatgtggcaaaggctttagtatattctcaacccttactaaacataagataattcatactggagagaaaccctacaaatgcaatgaatgtggtaaagcctttaactggtcctcaactcttactaaacataagagaattcatactggagagaaaccctacaaatgtgaagaatgtggcaaagcttttaaccagtcctcaacccttactagacataagatagttcatactggagagaaaccctacaaatgtgaagaatgtggtaaagcctttaaacggtccacaactcttactaaacataagagaatttatactaaagagaaaccatacaaatgtgaagaatgtggaaaagcctttagtgtattctcaacccttactaaacataagataattcatactggagcaaaaccttacaaatgtgaagaatgtggcagtgcctttagggcattctcaacccttactgaacataagagagttcatactggagagaaaccttacaaatgcaatgaatgtggtaaagcctttaactggtcctcaactcttactaaacataagagaattcatactggagagaagccctacaaatgtgaagaatgtggcaaagcttttaaccggtcctcaaaccttactcgacataagaaaattcatactggagagaaaccatacaaacctaaaagatgtgacagtgcttttgacaacaccccaaacttttctagacataaaagaaatcatatgggtgagaaatcctagaaatgtgaagaatgtgacaaagcctttaagcggttgtcacacttgattgtatataagataattcatactggagaaaactcccagaagtggagttttccttattgcacaggaaagcatttatacttgagaaaaattgtataaagaatggaaaagtcattaatatctgctcatatcttaacatcagcgagttggtatttaataaaagcattatcaatgaaattactgtcaaaagatctttcagacaatataagcctgcaaagtgcagcagagtatttattttgaagagaaacattaaaagtacaaagaggtttgtagtacctttgtttgtatcatagatcttattgtacacattttgtaccagagaaaaaccctgaagcagttgttcaaactttgttcaataccaggaaatttatattggagaaaaaccctatgagtgtaatgaatttggaaaaatatttttttcaacaacagcttagaaaacatgggaggaattacactaaaatatatttttgcaaatgcagcagtaaatatgaaagaaatgatccaaagttaggtttatataaatatcagagaattcacaatacagatatctaagatactgacacttcagacattacacaaaatcagagtgctgagtacagaaagttatccaaaacaaaagttggtagataactaatagtgaacaagtttttggcagaggtatatttacattcagagtacacttttctttggaaaaaattacaggttttttgaaaagtgaataatgtaattcaactctcaaattcatggtttttttttttttggttttggttttgggttttttgtttgtttgtttgtttgtttttgagacggagtttcactcttgttgcccaggctggagtgcaatggcgtgatctcagctcaccgcaacctctgcctcccagattcaagcaattctcctgcctcagcctccctagtagctgggattacaggcatgtgccacacctggctaatttttgtggttttagtagagacagggtttctccatgttggtcagtctggtctcaaactcccaacctcaggtgatatgcccgcctcggcctcccaaaatgttgggattacaggcatgagccactgcacccggcgcatgttttttcttcattcctattgtattcacatgtgaaagcatgtgatcaacttgctgcatcaaagatatgagatttttttttttattaggtgggcattatttatgaccttttctgtggaagagtaagaacattaaaatgaaagatgcatgatgaaaatctaagtagagaggctcttgtggttaactgataatattgagtgatgcatgaggtaggtgttcagagtaatattctgcattatagtgaaaaatttttaatattaaaattcaattatatcattttatgaattgtgcttttcataatgcagtacatttcaaaatttttagattatgtatgaacttagatttttaaacatgttttaacatgttaagacttgtgcattcagtgaagcgttattatgccacaaactaacctacctcaccttactcaatggtgtaggtaaaagatgatagcaatatattatttggttacatagtggactaacatttttagtaatctcttttgccagtggctttaaactgcagataagttaaatattcccataggttttacatttatattttttcttatttaaatttattgttcttatttttcatgggtacatagtatgtttttatgctgtatatggcatgttttgatacaggtatataatatgtaataatcacatcagggtaaatgaggtatcccttactagcatttatcctttgtattttattttaaaatgtacaactaaattgttatggactacagggttatttttatggtcataataaaaattacaaaagtatgaataaaatacatacatttctgagtcctgaatatttttaaaaatttgttatatatttttcttctaacatgtggcctctttgcctgcaaacatataaagactcagttttgatttacatagagttaaatatacatatattttactttaaagataaatcttaagtgtaagaaaattgtagagtaagtgtgcttgtgtgagtatgtttgtacctgttttcaaaagaaaacagcaatattggaacaaaacaaatcattttaataaggtgactaatttattagaaaactaacaacctcaaaaatgctgaaagcaaatctatactctctctgctttgtactgaattcattactgtaaaatattatggcttatggttcagaatctccccatgcagatgttctgtttttacttgcctggtactcatggtagagccatacatttcttttttcttacaatttcttttacagtttatgaagtattatatgagctggtcagggattacaacaattattttttttataaaatttagtagtgcacaaaaagtaatttttagatgtaattttactattagtctattaagttatattttatttatttagttaaaacattgccctttgttcttttaattggagaaccctatgtaagccgacttttttaaagttattctttctttcacttttcata

SEQ ID NO: 6266 - protein, 504 aa, Homo sapiens; identical to SEQ ID NO: 6254

SEQ ID NO: 6267 - DNA, 1223 bp, Homo sapiens
ggcttccgggatttggcggggcctttgtctctcgctgcagtcgcagctccaggtctcgtcttcactgctctatgtcctctgctcctagaggtccaccttctgtggccccgttacctgcaggtattgggagatccacagctaagacgccaggactccctggaagcctagaaatgggaccactgacatttagggatgtggccatagaattctctctggaggagtggcaatgcctggacacttcacagcagaatttgtataggaatgtgatgttagataactacagaaacctggtcttcctgggtattgctgtctctaagccagacctgatcacttgtctggagcaaggaaaagagccctgcaatatgaagagacatgcgatggtagccaaacccccaggttggagtgcagtggcgtgatcttgggttactgcaacctctgcccctcgggattcaagtgattctactgcctcagcctcccgagtagctgggattataggcgagtgccatcatgcccggctaatttttgtatttttagtagagtgagggtttcaccatgttggccaggctggtctcgaacgcctgacctcgtgtgatccgccctcctcagcctcccaaagtgctgggattacaggcatgagccacagtgcccggccaagtatttttatatttcagatcatatctactgaatgatttggtgacagaaatttgcattgcttttacctattggctttcagtaacaatggtataataattatgggtatgaaaatgactcttcatatgaccacatatgtgaaagtatatatatgtgctgcattctattttactagtctcctttttttttttacctttatacttgtagcaaattgttttaattctgtagctttgtaatatgttttaaaatcagaaactataatgcttccaacattgttcctttttttgaagattgttaggtactttattgtctcttgagattccatatactttaggggttgctgtttttatgtcttcaaaaatgcaatgagaaattgagaaaacattgcattaaatcttgtagattacattgagcagtatagacatcttcccaatatttcaacttttgaacaaaagcatgctaaagaatgtggtttaatttactatatatttgtaaacttgttagcttttaatattgttttatattgtcattccatttttgttatagaaagtaatccataaaatttcagttct

SEQ ID NO: 6268 - protein, 114 aa, Homo sapiens
MSSAPRGPPSVAPLPAGIGRSTAKTPGLPGSLEMGPLTFRDVAIEFSLEEWQCLDTSQQNLYRNVMLDNYRNLVFLGIAVSKPDLITCLEQGKEPCNMKRHAMVAKPPGWSAVA

SEQ ID NO: 6269 - DNA, 1369 bp, Homo sapiens
ggcttccgggatttggcggggcctttgtctctcgctgcagtcgcagctccaggtctcgtcttcactgctctatgtcctctgctcctagaggtccaccttctgtggccccgttacctgcaggtattgggagatccacagctaagacgccaggactccctggaagcctagaaatgggaccactgacatttagggatgtggccatagaattctctctggaggagtggcaatgcctggacacttcacagcagaatttgtataggaatgtgatgttagataactacagaaacctggtcttcctgggtattgctgtctctaagccagacctgatcacttgtctggagcaaggaaaagagccctgcaatatgaagagacatgcgatggtagccaaacccccaggttggagtgcagtggcgtgatcttgggttactgcaacctctgcccctcgggattcaagtgattctactgcctcagcctcccgagtagctgggattataggcgagtgccatcatgcccggctaatttttgtatttttagtagagtgagggtttcaccatgttggccaggctggtctcgaacgcctgacctcgtgtgatccgccctcctcagcctcccaaagtgctgggattacaggcatgagccacagtgcccggccaagtatttttatatttcagatcatatctactgaatgatttggtgacagaaatttgcattgcttttacctattggctttcagtaacaatggtataataattatgggtatgaaaatgactcttcatatgaccacatatgtgaaagtatatatatgtgctgcattctattttactagtctcctttttttttttacctttatacttgtagcaaattgttttaattctgtagctttgtaatatgttttaaaatcagaaactataatgcttccaacattgttcctttttttgaagattgttaggtactttattgtctcttgagattccatatactttaggggttgctgtttttatgtcttcaaaaatgcaatgagaaattgagaaaacattgcattaaatcttgtagattacattgagcagtatagacatcttcccaatatttcaacttttgaacaaaagcatgctaaagaatgtggtttaatttactatatatttgtaaacttgttagcttttaatattgttttatattgtcattccatttttgttatagaaagtaatccataaaatttcagttctaaaatactttttaagactcttttgacttatttggtggtctgtcaagaagaaagttgtataagctattgataagggtgtgtatcttaatgttgttgagttttgtatacctatgttaggaatatttgttttatactgccttcaggtcc

SEQ ID NO: 6270 - protein, 114 aa, Homo sapiens; identical to SEQ ID NO: 6268

SEQ ID NO: 6271 - DNA, 4370 bp, Homo sapiens
ggcttccgggatttggcggggcctttgtctctcgctgcagtcgcagctccaggtctcgtcttcactgctctatgtcctctgctcctagaggtccaccttctgtggccccgttacctgcaggtattgggagatccacagctaagacgccaggactccctggaagcctagaaatgggaccactgacatttagggatgtggccatagaattctctctggaggagtggcaatgcctggacacttcacagcagaatttgtataggaatgtgatgttagataactacagaaacctggtcttcctgggtattgctgtctctaagccagacctgatcacttgtctggagcaaggaaaagagccctgcaatatgaagagacatgcgatggtagccaaacccccagttgtgtgttctcattttgcccaagacctttggccaaagcagggcttaaaagattcttttcaaaaagtgatactgagaagatatggaaaatatggacatgagaatttacaattaagaaaaggctgtaaaagtgcggatgagcataaggtgcacaaaagaggttataatggacttaaccaatgtttgacaactacccagagcaaaatatttcaatgtgataaatatgttaaagtccttcataaattctcaaattcaaatatacataagaaaagacaaactggaaagaaacctttcaaatgtaaagaatgtggcaaatcatgttgcatactttcacaactaactcagcataagaaaactgctactagagtgaatttctacaaatgtaagacatgtggaaaagcctttaaccagttctcaaatcttactaaacataagataattcatcctgaagtgaatccctacaaatgtgaagaatgtggcaaagcctttaaccagtccttaactcttactaaacataaaaaaattcatactgaagagaaaccttacaaatgtgaagattgtggcaaagtctttagtgtattttcagtccttactaaacataagataattcatacaggaacaaaaccctacaattgtgaagaatgtggcaaaggctttagtatattctcaacccttactaaacataagataattcatactggagagaaaccctacaaatgcaatgaatgtggtaaagcctttaactggtcctcaactcttactaaacataagagaattcatactggagagaaaccctacaaatgtgaagaatgtggcaaagcttttaaccagtcctcaacccttactagacataagatagttcatactggagagaaaccctacaaatgtgaagaatgtggtaaagcctttaaacggtccacaactcttactaaacataagagaatttatactaaagagaaaccatacaaatgtgaagaatgtggaaaagcctttagtgtattctcaacccttactaaacataagataattcatactggagcaaaaccttacaaatgtgaagaatgtggcagtgcctttagggcattctcaacccttactgaacataagagagttcatactggagagaaaccttacaaatgcaatgaatgtggtaaagcctttaactggtcctcaactcttactaaacataagagaattcatactggagagaagccctacaaatgtgaagaatgtggcaaagcttttaaccggtcctcaaaccttactcgacataagaaaattcatactggagagaaaccatacaaacctaaaagatgtgacagtgcttttgacaacaccccaaacttttctagacataaaagaaatcatatgggtgagaaatcctagaaatgtgaagaatgtgacaaagcctttaagcggttgtcacacttgattgtatataagataattcatactggagaaaactcccagaagtggagttttccttattgcacaggaaagcatttatacttgagaaaaattgtataaagaatggaaaagtcattaatatctgctcatatcttaacatcagcgagttggtatttaataaaagcattatcaatgaaattactgtcaaaagatctttcagacaatataagcctgcaaagtgcagcagagtatttattttgaagagaaacattaaaagtacaaagaggtttgtagtacctttgtttgtatcatagatcttattgtacacattttgtaccagagaaaaaccctgaagcagttgttcaaactttgttcaataccaggaaatttatattggagaaaaaccctatgagtgtaatgaatttggaaaaatatttttttcaacaacagcttagaaaacatgggaggaattacactaaaatatatttttgcaaatgcagcagtaaatatgaaagaaatgatccaaagttaggtttatataaatatcagagaattcacaatacagatatctaagatactgacacttcagacattacacaaaatcagagtgctgagtacagaaagttatccaaaacaaaagttggtagataactaatagtgaacaagtttttggcagaggtatatttacattcagagtacacttttctttggaaaaaattacaggttttttgaaaagtgaataatgtaattcaactctcaaattcatggtttttttttttttggttttggttttgggttttttgtttgtttgtttgtttgtttttgagacggagtttcactcttgttgcccaggctggagtgcaatggcgtgatctcagctcaccgcaacctctgcctcccagattcaagcaattctcctgcctcagcctccctagtagctgggattacaggcatgtgccacacctggctaatttttgtggttttagtagagacagggtttctccatgttggtcagtctggtctcaaactcccaacctcaggtgatatgcccgcctcggcctcccaaaatgttgggattacaggcatgagccactgcacccggcgcatgttttttcttcattcctattgtattcacatgtgaaagcatgtgatcaacttgctgcatcaaagatatgagatttttttttttattaggtgggcattatttatgaccttttctgtggaagagtaagaacattaaaatgaaagatgcatgatgaaaatctaagtagagaggctcttgtggttaactgataatattgagtgatgcatgaggtaggtgttcagagtaatattctgcattatagtgaaaaatttttaatattaaaattcaattatatcattttatgaattgtgcttttcataatgcagtacatttcaaaatttttagattatgtatgaacttagatttttaaacatgttttaacatgttaagacttgtgcattcagtgaagcgttattatgccacaaactaacctacctcaccttactcaatggtgtaggtaaaagatgatagcaatatattatttggttacatagtggactaacatttttagtaatctcttttgccagtggctttaaactgcagataagttaaatattcccataggttttacatttatattttttcttatttaaatttattgttcttatttttcatgggtacatagtatgtttttatgctgtatatggcatgttttgatacaggtatataatatgtaataatcacatcagggtaaatgaggtatcccttactagcatttatcctttgtattttattttaaaatgtacaactaaattgttatggactacagggttatttttatggtcataataaaaattacaaaagtatgaataaaatacatacatttctgagtcctgaatatttttaaaaatttgttatatatttttcttctaacatgtggcctctttgcctgcaaacatataaagactcagttttgatttacatagagttaaatatacatatattttactttaaagataaatcttaagtgtaagaaaattgtagagtaagtgtgcttgtgtgagtatgtttgtacctgttttcaaaagaaaacagcaatattggaacaaaacaaatcattttaataaggtgactaatttattagaaaactaacaacctcaaaaatgctgaaagcaaatctatactctctctgctttgtactgaattcattactgtaaaatattatggcttatggttcagaatctccccatgcagatgttctgtttttacttgcctggtactcatggtagagccatacatttcttttttcttacaatttcttttacagtttatgaagtattatatgagctggtcagggattacaacaattattttttttataaaatttagtagtgcacaaaaagtaatttttagatgtaattttactattagtctattaagttatattttatttatttagttaaaacattgccctttgttcttttaattggagaaccctatgtaagccgacttttttaaagttattctttctttcacttttcata

SEQ ID NO: 6272 - protein, 569 aa, Homo sapiens; identical to SEQ ID NO: 864

SEQ ID NO: 6273 - DNA, 1472 bp, Homo sapiens
cgggatttggcggggcctttgtctctcgctgcagtcgcagctccaggtctcgtcttcactgctctatgtcctctgctcctagaggtccaccttctgtggccccgttacctgcaggccagaaaaactgggaaaatcacaggctcttccacttactggatgtttgacaaaatattcttcttgggccaaaaacattggcattactgggaccactgacatttagggatgtggccatagaattctctctggaggagtggcaatgcctggacacttcacagcagaatttgtataggaatgtgatgttagataactacagaaacctggtcttcctgggtattgctgtctctaagccagacctgatcacttgtctggagcaaggaaaagagccctgcaatatgaagagacatgcgatggtagccaaacccccaggttggagtgcagtggcgtgatcttgggttactgcaacctctgcccctcgggattcaagtgattctactgcctcagcctcccgagtagctgggattataggcgagtgccatcatgcccggctaatttttgtatttttagtagagtgagggtttcaccatgttggccaggctggtctcgaacgcctgacctcgtgtgatccgccctcctcagcctcccaaagtgctgggattacaggcatgagccacagtgcccggccaagtatttttatatttcagatcatatctactgaatgatttggtgacagaaatttgcattgcttttacctattggctttcagtaacaatggtataataattatgggtatgaaaatgactcttcatatgaccacatatgtgaaagtatatatatgtgctgcattctattttactagtctcctttttttttttacctttatacttgtagcaaattgttttaattctgtagctttgtaatatgttttaaaatcagaaactataatgcttccaacattgttcctttttttgaagattgttaggtactttattgtctcttgagattccatatactttaggggttgctgtttttatgtcttcaaaaatgcaatgagaaattgagaaaacattgcattaaatcttgtagattacattgagcagtatagacatcttcccaatatttcaacttttgaacaaaagcatgctaaagaatgtggtttaatttactatatatttgtaaacttgttagcttttaatattgttttatattgtcattccatttttgttatagaaagtaatccataaaatttcagttctaaaatactttttaagactcttttgacttatttggtggtctgtcaagaagaaagttgtataagctattgataagggtgtgtatcttaatgttgttgagttttgtatacctatgttaggaatatttgttttatactgccttcaggtcctctgttctcttactaatgttctgtcttgttttattcttactatagaaaatgggatattaaaatagtctataat

SEQ ID NO: 6274 - protein, 49 aa, Homo sapiens
MLDNYRNLVFLGIAVSKPDLITCLEQGKEPCNMKRHAMVAKPPGWSAVA

SEQ ID NO: 6275 - DNA, 500 bp, Homo sapiens
ggcctttgtctctcgctgcagtcgcagctccaggtctcgtcttcactgctctatgtcctctgctcctagaggtccaccttctgtggccccgttacctgcaggtattgggagatccacagctaagacgccaggactccctggaagcctagaaatggccagaaaaactgggaaaatcacaggctcttccacttactggatgttcaaattaaatattctgtccagagcaagttggtaaatatgtttttgtgtgtgtgtgtttttcagggaccactgacatttagggatgtggccatagaattctctctggaggagtggcaatgcctggacacttcacagcagaatttgtataggaatgtgatgttagataactacagaaacctggtcttcctgggtattgctgtctctaagccagacctgatcacttgtctggagcaaggaaaagagccctgcaatatgaagagacatgcgatggtagccaaacccccaggtaggtgagagtg

SEQ ID NO: 6276 - protein, 85 aa, Homo sapiens
MFLCVCVFQGPLTFRDVAIEFSLEEWQCLDTSQQNLYRNVMLDNYRNLVFLGIAVSKPDLITCLEQGKEPCNMKRHAMVAKPPGR

SEQ ID NO: 6277 - DNA, 1233 bp, Homo sapiens
gtctctcgctgcagtcgcagctccaggtctcgtcttcactgctctatgtcctctgctcctagaggtccaccttctgtggccccgttacctgcaggccagaaaaactgggaaaatcacaggctcttccacttactggatgtttgacaaaatattcttcttgggccaaaaacattggcattactgggaccactgacatttagggatgtggccatagaattctctctggaggagtggcaatgcctggacacttcacagcagaatttgtataggaatgtgatgttagataactacagaaacctggtcttcctgggtattgctgtctctaagccagacctgatcacttgtctggagcaaggaaaagagccctgcaatatgaagagacatgcgatggtagccaaacccccaggttggagtgcagtggcgtgatcttgggttactgcaacctctgcccctcgggattcaagtgattctactgcctcagcctcccgagtagctgggattataggcgagtgccatcatgcccggctaatttttgtatttttagtagagtgagggtttcaccatgttggccaggctggtctcgaacgcctgacctcgtgtgatccgccctcctcagcctcccaaagtgctgggattacaggcatgagccacagtgcccggccaagtatttttatatttcagatcatatctactgaatgatttggtgacagaaatttgcattgcttttacctattggctttcagtaacaatggtataataattatgggtatgaaaatgactcttcatatgaccacatatgtgaaagtatatatatgtgctgcattctattttactagtctcctttttttttttacctttatacttgtagcaaattgttttaattctgtagctttgtaatatgttttaaaatcagaaactataatgcttccaacattgttcctttttttgaagattgttaggtactttattgtctcttgagattccatatactttaggggttgctgtttttatgtcttcaaaaatgcaatgagaaattgagaaaacattgcattaaatcttgtagattacattgagcagtatagacatcttcccaatatttcaacttttgaacaaaagcatgctaaagaatgtggtttaatttactatatatttgtaaacttgttagcttttaatattgttttatattgtcattccatttttgttatagaaagtaatccataaaatttcagttct

SEQ ID NO: 6278 - protein, 49 aa, Homo sapiens; identical to SEQ ID NO: 6274

SEQ ID NO: 6279 - DNA, 453 bp, Homo sapiens
ctctgctcctagaggtccaccttctgtggccccgttacctgcaggtattgggagatccacagctaagacgccaggactccctggaagcctagaaatggccagaaaaactgggaaaatcacaggctcttccacttactggatgttcaaattaaatattctgtccagagcaagttggtaaatatgtttttgtgtgtgtgtgtttttcagggaccactgacatttagggatgtggccatagaattctctctggaggagtggcaatgcctggacacttcacagcagaatttgtataggaatgtgatgttagataactacagaaacctggtctaagtatttttatatttcagatcatatctactgaatgatttggtgacagaaatttgcattgcttttacctattggctttcagtaacaatggtataataattatgggtatgaaaatgactcttcata

SEQ ID NO: 6280 - protein, 49 aa, Homo sapiens
MFLCVCVFQGPLTFRDVAIEFSLEEWQCLDTSQQNLYRNVMLDNYRNLV

SEQ ID NO: 6281 - DNA, 855 bp, Homo sapiens
cccaggttggagtgcagtggcgtgatcttgggttactgcaacctctgcccctcgggattcaagtgattctactgcctcagcctcccgatgctgggattacaggcatgagccacagtgcccggccaagtatttttatatttcagatcatatctactgaatgatttggtgacagaaatttgcattgcttttacctattggctttcagtaacaatggtataataattatgggtatgaaaatgactcttcatatgaccacatatgtgaaagtatatatatgtgctgcattctattttactagtctcctttttttttttacctttatacttgtagcaaattgttttaattctgtagctttgtaatatgttttaaaatcagaaactataatgcttccaacattgttcctttttttgaagattgttaggtactttattgtctcttgagattccatatactttaggggttgctgtttttatgtcttcaaaaatgcaatgagaaattgagaaaacattgcattaaatcttgtagattacattgagcagtatagacatcttcccaatatttcaacttttgaacaaaagcatgctaaagaatgtggtttaatttactatatatttgtaaacttgttagcttttaatattgttttatattgtcattccatttttgttatagaaagtaatccataaaatttcagttctaaaatactttttaagactcttttgacttatttggtggtctgtcaagaagaaagttgtataagctattgataagggtgtgtatcttaatgttgttgagttttgtatacctatgttaggaatatttgttttatactgccttcaggtcctctgttctcttact

SEQ ID NO: 6282 - protein, 44 aa, Homo sapiens
MGMKMTLHMTTYVKVYICAAFYFTSLLFFFTFILVANCFNSVAL

SEQ ID NO: 6283 - DNA, 1357 bp, Homo sapiens
cacctcagtgctgctcataattgcagaggatggcctcaccagtcagggggtcctggagggcctgggggggcttggtctctgactgccagcaaaagacgctggtcacatctaggcagcaggaggcaaacactgagtcagctgacttgcctgactttaaccctcaggttttttaaaaaaattaaaatacaggtgcaggggcttgggctcgggactcctggacccacgtggggctgagcgtggatggtgtttggtgtccggcttcactcccaaaccgcacccggagggtttgcggggcggaggggcctcagggcgacggttccagaacagacccaggctgctccggtcagcagcagccccgccgctctcccacctagcggggacccccagccccgccagccgcatcgctctgtccctctcatgtcaggcaagccagttccggaccgcgtggcaccaggagccgccaggagccggggcgacccagaggtctccagcgacctggcgtccggcgaggacacagcccccaggaggggttagaccacgggagccggagcccgagtcccagggccgccgagccagtttagagtggtctccaggccctagtgggaaggggctccgcgcttctgggcgtccacaggagctgcatggccctgcccgctgacgcccggtcgggacgctccacaccctgtgtgggggcggaggggacgcggtgggtgcggcctgggcgcgggtgggctagagcctggagaccgccgggagcccgacttcctggcgctttgccctttggggagcggagccaaggaacagcgccaacctctctccacaagccagggaccctacgacccaccgccgcaggccagaaccagcagctgatttagataccatcaagacacctaaaaccttatcatgagccagatgctgtggaagagattctgggagaatcctgaggaccccccagttgcagccatgtcaagactgatgctgaggaggaccccaactgtcacgagcaacacccgtcgaacacagccacctacttggggaaagatcaagaagctgtcacagatggtggaagaaaacctgaggaaagcgggacaaccagtcacaatgagtaatttaatgatagctatgagagcggtgatcaccattgcttctgcagatgcagatcctgactcctgcgagaagtagctcaccgtgataaagctgcctttgcttttattgccctgcaaaaacaagaagggggatatgctggggaataggcccccaaatctggacataaactggccccaaaactggccataaacaaaatctctgcagcgctgtgacatgttcatggtggccataacgcccatgctggaaggct

SEQ ID NO: 6284 - protein, 92 aa, Homo sapiens
MSQMLWKRFWENPEDPPVAAMSRLMLRRTPTVTSNTRRTQPPTWGKIKKLSQMVEENLRKAGQPVTMSNLMIAMRAVITIASADADPDSCEK

SEQ ID NO: 6285 - DNA, 6025 bp, Homo sapiens
aagattttgtaagttcttgtttttctttctgtagcatggcaaggtcacaagacatgtttaagtaaggtaggctcatgttgcaaatcctgttgtaaaacctgtcacggtatgattaactgcctttgttctgcttctgtaagactgctttctcacctcgcaggttttgcgccaaaaacccgacttgcccctgcctgatgcatgtataaaagtcaagccctgtctttgttcagggctcagcctttggatgttaatccgctgggccagtggccacctaaataaaaccttcctgttgcacccagtgatctctccggcctcctgattcccacaacatataagcattcctttttctctgcaacctagcccgcatctgtcattgactttttaacaataggcattctgactggatgagatggtatctcactgtggtttttctctgcatttttctaataattaacaacgtgaattttgttttcatatgcttgtcagccacatgtatgtcttcttttgaaaagtatctgttcatgtttttgcttactttttaattaggtttttggttttctttttgttgttgttgttgttttctgagatggagtcttgctgtgtcaccaggatggagtgcagtggcatgatctcgactcactgcaacctccacctcccaggttcagatgattcttctgcttcagtctcctgagtagctgggatcacagggaccattgacatttatggatgtggccatagaattctctttggaggagtggcaatgcctggacactgcacagcagaatttatataggcatgtgatgtgagagaactacagaaacctggttttcttgggtgaaggtattgctgtctctaagccagacctgattacctgtctggagcaaggaaaagagccctggaatatgaagagacatgagatggtagctaaacatttagttatgttttattattttgcccaacacctttggccagagcagaacataagagattctttccagaaagtgaccctaagaagatatagaaaatgtggatatgagaatttacagttaagaaaaggctgtaaaagtgtggttgagtgtaaacagcacaaaggagattatagtggacttaaccaatgtttgaaaactaccttgagcaaaatatttcaatgtaataaatatgtagaagttttccataaaatttcaaattcaaatagacacaagatgagacatactgaaaataaacattttaaatgtaaagaatgtcgcaaaacattttgcatgctttcacacctaactcaacataaaagaatccaaactagagtgaatttctacaaatgtgaagcatatggaagagcctttaactggtcctcaacccttaataaacataagagaattcatactggagaaaaaccttacaaatgtaaagaatgtggcaaagcctttaaccagacctcacaccttattagacataagagaattcatactgaagagaaaccctacaaatgtgaagaatgtggcaaagcctttaaccagtcatcgacccttactacacataatataattcatactggggaaattccctacaaatgtgagaaatgtgttagagcttttaaccaagcctcaaagcttactgaacataagttaattcataccggagagaaacgttatgaatgtgaagaatgcggcaaagcttttaaccgatcctcaaaacttactgaacataagtacattcatactggagagaagctgtacaaatgtgaagaatgtggtaaagcctttaaccagtcctcaacccttactacacataagagaattcatagtggagagaagccctacaaatgtgaagaatgtggcaaagcttttaaacaattttcaaatcttactgaccataaaaaaattcatactggagagaaaccctacaaatgtgaggaatgtggcaaagcttttaaccaactctcaaaccttactagacataaggtaattcatactggagagaaaccctacaaatgtggagaatgtggcaaagcctttaaccagtcctcagcccttaatacacataagataatccatactggagagaatccccacaaatgtagagaatctggcaaagttttccacctatcctcaaaacttagtacatgtaagaaaattcatactggagagaaactctacaaatgtgaagaatgtggcaaagcctttaaccgatcttcaacccttattggacataagagaattcatactggagagaaaccctacaaatgtgaagaatgtggcaaagcttttaaccaatcttcaacacttactacacataagataattcatactgaagagaaacagtacaaatgtgatgaatgtggcaaagcttctacctgatcctcaaaactcattgaacacaagaaaattcatactggagagaaaccttacaagtgtgaagaatgtggcaaaacttctaaccatttctcaacccttactaaacataagatgattcatactggagagaagttacacaaatgtgatgaatgtgacaaagcttttaaccaatcttcaaccctttctacacataaaagaattcatactggagagaaaccctacaaatgtgaagaatgtggcagagcttttaattgatcatcaaaccttattaaacataagaaaattcatattggagagaaaccctacaaatgtgaagaatgtggaaaagcttttaaccagttctcaactcttactacacataaaataattcatactggagagaaaccatataaatgtgaagaatgtggcaaagctttcaacctatacgtaaaccttactacacataagaaaattcatactggagagaaaccctacaagtgtgaagaatgtggcaaagcttttagccaagtgtcaactcttactatacataaaagaattcatactggagagaaaccctacaagtgtgaagaatgtggcaaagcttttaaccaagtgtcaactcttactatacataaaagaattcatactggagagaaaccttacaaatgtgaggaatgtggcaaaactttcagtcgatgctcaaaacttactacacataagaaaattcatacaggagagaaaccttacaaatgtgaaaaatgtgctaaagcttttagccagtcttcaaccctttctacatataagataattcacactggagagaaatgctacaaatgtgaagaatgtggcaaagtttttaaccgatcttcaaaccttacagaccataaaaaaattcatacaggagagaaatcctacaaatgtgaagaatgtgacaaggcctttaacctgtcctcaacgcttactaaacataaggtaattcatactggagagaaactgtacaaatgtaaagaatgtggtaaagcttttaaacagttctcacaccttgctatacataatataattcatactggagagaaactctacaaatgtgaagaatgtggcaaagcttttaacttatcctcaaaccttactgcacataagaaaaatcgtactggagagaaaccctacaaatgtgaagaatgtggcaaagctaacctatcatcaacccttactccacataagacaattcatatttgagagaaaccctgcaaatgtgaagaatgtggcaatgcttgtaactaaatctcaaactttactaaacataagaaaattaatactggaaactttacaaacctgaaagatgtgacaatgattttgacaacaccttcaaacttttctaaacataaaataaatcatactggtgagaaatcttaaaaatatgaagaatggtacaaagcctttaaatggttgtcacacttgattgtaggtaagataatttatactggaggaaactcccagaagtgtgaagaatgtggcaaaacttttaatttttcacaccttatagcacaggaaagcacttcagaaaaattgtacaaatataaatgtggaaaagccattaatatctgcttacatcttactcaacattagagagttagtgcttaataaaagcattataaaagcaattagtgtaaaatcagaaaatgaaagttttttttttttttttagatggagtcttgctctgtcacccaggctggagtgcagtggtgtgatcttggctcactgcaacctctgcctcccaggttcaagcaattctcctgccttagcctccagagtagctgagactacaggcacacaccaccacatttggctaatttttttatttttagtagagactggctatcaccatgttggccaggctgatcttgaactcctgacctcaagtgatccacatgcctctgcctcccaaagtgctgggattataggtgtgagtcactgtgcctgacaaatataagcctttaaagagaagaaggttttcattttgaagacaaacattaggtacataaagagggttgtagtgtctttatttgtatcacagattttattgtacacattatgtactaaaggaaaatcctgaagcagtgctcaaactttgatcaacatcagggagtttatattggagaaaaactgcaaatgtaatatatttggaaaaacatttttcaaaaactactgcttagaaaacaccaggggatttatactaaaatatatttttgcagatgcagtaagtataaaagaaatttaatccaaaattaagtgtgtgtaaatatcagagaattcacagtagaaatatctaaggcactgacattttagacattgaactaatcagtgtgctgagtacagaaaataatccaaaattaaagttggtagataaattatttatatataactttaaaagaggtagaaatatttttagttataattacatttaaagtatacttttttctttgaaaaaattacaaaatttttaaaaagtgaatgatgtaattcaactcaaattacttcatgcttttcattctattgtattcacatgtgaaagcatgtgatcaattgctgcttcatcaaagatatgagacattcttttttgttaggtgggcaatattttttaccttttctatggaagagtaaagacattacaatgtaggatgcatgataaaaatctaagtggagaggctctttgtgtttaatttataatattgaatgatgtatgagggaagtgttcagaggaatattctgcattctagtgaaaatatcttttattttagttaaaattaaattaaaattagtagtatatcattttactaactgtacttttatgtaataaaatgcagcacatttaaaaaattttagattattgtgaacttaattttttaattaaactttttttttaacatgttaagaccaattgtgcattcagtgaagtattatcatgccactaacttcaacctatcccaccttactcaagggtgttggtaaaagatagtaacaatgtactatttaataacagagtggactaacatctctaataatttctcttgccagtgactttaaactaaagaacttaattaaagaacattgttcccataggttaaatttttattctttttcttatttaaacatatttttcttaacttttgtgggtacatagtgtgtgtatatatttatgccatatatggcatattttgatacaggcatatgaataggtattaatcacatcagggcaaatgaaatatccatcaactccagcatttatcatttgtattacaaaccgattctacacttttagttactttaaaatgtacaagtaaattgctattgactatagggtcattttcatgggtataataaaaattatatacaagtataaataaaatcctgagtcttaaaattctgagtcctgcttaaacattttaaaaattttgttatgtatttttctttgaacatgtctctctgcctgcaaacataacagaattttagtattggtttacatagagttaactatacccatatattactctaaaaataaatgttaagtgcaagaaagttatggactgtttttgtgtgagtgtgagtttgtacctattttcaaaagaaaagagcaatattggagcaaaacaaatattttaataaagtaatgtactagacaactgaaaacttcaaaa

SEQ ID NO: 6286 - protein, 483 aa, Homo sapiens; identical to SEQ ID NO: 870

SEQ ID NO: 6287 - DNA, 5913 bp, Homo sapiens
aagattttgtaagttcttgtttttctttctgtagcatggcaaggtcacaagacatgtttaagtaaggtaggctcatgttgcaaatcctgttgtaaaacctgtcacggtatgattaactgcctttgttctgcttctgtaagactgctttctcacctcgcaggttttgcgccaaaaacccgacttgcccctgcctgatgcatgtataaaagtcaagccctgtctttgttcagggctcagcctttggatgttaatccgctgggccagtggccacctaaataaaaccttcctgttgcacccagtgatctctccggcctcctgattcccacaacatataagcattcctttttctctgcaacctagcccgcatctgtcattgactttttaacaataggcattctgactggatgagatggtatctcactgtggtttttctctgcatttttctaataattaacaacgtgaattttgttttcatatgcttgtcagccacatgtatgtcttcttttgaaaagtatctgttcatgtttttgcttactttttaattaggtttttggttttctttttgttgttgttgttgttttctgagatggagtcttgctgtgtcaccaggatggagtgcagtggcatgatctcgactcactgcaacctccacctcccaggttcagatgattcttctgcttcagtctcctgagtagctgggatcacagggaccattgacatttatggatgtggccatagaattctctttggaggagtggcaatgcctggacactgcacagcagaatttatataggcatgtgatgtgagagaactacagaaacctggttttcttgggtgaaggtattgctgtctctaagccagacctgattacctgtctggagcaaggaaaagagccctggaatatgaagagacatgagatggtagctaaacatttagttatgttttattattttgcccaacacctttggccagagcagaacataagagattctttccagaaagtgaccctaagaagatatagaaaatgtggatatgagaatttacagttaagaaaaggctgtaaaagtgtggttgagtgtaaacagcacaaaggagattatagtggacttaaccaatgtttgaaaactaccttgagcaaaatatttcaatgtaataaatatgtagaagttttccataaaatttcaaattcaaatagacacaagatgagacatactgaaaataaacattttaaatgtaaagaatgtcgcaaaacattttgcatgctttcacacctaactcaacataaaagaatccaaactagagtgaatttctacaaatgtgaagcatatggaagagcctttaactggtcctcaacccttaataaacataagagaattcatactggagaaaaaccttacaaatgtaaagaatgtggcaaagcctttaaccagacctcacaccttattagacataagagaattcatactgaagagaaaccctacaaatgtgaagaatgtggcaaagcctttaaccagtcatcgacccttactacacataatataattcatactggggaaattccctacaaatgtgagaaatgtgttagagcttttaaccaagcctcaaagcttactgaacataagttaattcataccggagagaaacgttatgaatgtgaagaatgcggcaaagcttttaaccgatcctcaaaacttactgaacataagtacattcatactggagagaagctgtacaaatgtgaagaatgtggtaaagcctttaaccagtcctcaacccttactacacataagagaattcatagtggagagaagccctacaaatgtgaagaatgtggcaaagcttttaaacaattttcaaatcttactgaccataaaaaaattcatactggagagaaaccctacaaatgtgaggaatgtggcaaagcttttaaccaactctcaaaccttactagacataaggtaattcatactggagagaaaccctacaaatgtggagaatgtggcaaagcctttaaccagtcctcagcccttaatacacataagataatccatactggagagaatccccacaaatgtagagaatctggcaaagttttccacctatcctcaaaacttagtacatgtaagaaaattcatactggagagaaactctacaaatgtgaagaatgtggcaaagcctttaaccgatcttcaacccttattggacataagagaattcatactggagagaaaccctacaaatgtgaagaatgtggcaaagcttttaaccaatcttcaacacttactacacataagataattcatactgaagagaaacagtacaaatgtgatgaatgtggcaaagcttctacctgatcctcaaaactcattgaacacaagaaaattcatactggagagaaaccttacaagtgtgaagaatgtggcaaaacttctaaccatttctcaacccttactaaacataagatgattcatactggagagaagttacacaaatgtgatgaatgtgacaaagcttttaaccaatcttcaaccctttctacacataaaagaattcatactggagagaaaccctacaaatgtgaagaatgtggcagagcttttaattgatcatcaaaccttattaaacataagaaaattcatattggagagaaaccctacaaatgtgaagaatgtggaaaagcttttaaccagttctcaactcttactacacataaaataattcatactggagagaaaccatataaatgtgaagaatgtggcaaagctttcaacctatacgtaaaccttactacacataagaaaattcatactggagagaaaccctacaagtgtgaagaatgtggcaaagcttttagccaagtgtcaactcttactatacataaaagaattcatactggagagaaaccctacaagtgtgaagaatgtggcaaagcttttaaccaagtgtcaactcttactatacataaaagaattcatactggagagaaaccttacaaatgtgaggaatgtggcaaaactttcagtcgatgctcaaaacttactacacataagaaaattcatacaggagagaaaccttacaaatgtgaaaaatgtgctaaagcttttagccagtcttcaaccctttctacatataagataattcacactggagagaaatgctacaaatgtgaagaatgtggcaaagtttttaaccgatcttcaaaccttacagaccataaaaaaattcatacaggagagaaatcctacaaatgtgaagaatgtgacaaggcctttaacctgtcctcaacgcttactaaacataaggtaattcatactggagagaaactgtacaaatgtaaagaatgtggtaaagcttttaaacagttctcacaccttgctatacataatataattcatactggagagaaactctacaaatgtgaagaatgtggcaaagcttttaacttatcctcaaaccttactgcacataagaaaaatcgtactggagagaaaccctacaaatgtgaagaatgtggcaaagctaacctatcatcaacccttactccacataagacaattcatatttgagagaaaccctgcaaatgtgaagaatgtggcaatgcttgtaactaaatctcaaactttactaaacataagaaaattaatactggaaactttacaaacctgaaagatgtgacaatgattttgacaacaccttcaaacttttctaaacataaaataaatcatactggtgagaaatcttaaaaatatgaagaatggtacaaagcctttaaatggttgtcacacttgattgtaggtaagataatttatactggaggaaactcccagaagtgtgaagaatgtggcaaaacttttaatttttcacaccttatagcacaggaaagcacttcagaaaaattgtacaaatataaatgtggaaaagccattaatatctgcttacatcttactcaacattagagagttagtgcttaataaaagcattataaaagcaattagtgtaaaatcagaaaatgaaagttttttttttttttttagatggagtcttgctctgtcacccaggctggagtgcagtggtgtgatcttggctcactgcaacctctgcctcccaggttcaagcaattctcctgccttagcctccagagtagctgagactacaggcacacaccaccacatttggctaatttttttatttttagtagagactggctatcaccatgttggccaggctgatcttgaactcctgacctcaagtgatccacatgcctctgcctcccaaagtgctgggattataggtgtgagtcactgtgcctgacaaatataagcctttaaagagaagaaggttttcattttgaagacaaacattaggtacataaagagggttgtagtgtctttatttgtatcacagattttattgtacacattatgtactaaaggaaaatcctgaagcagtgctcaaactttgatcaacatcagggagtttatattggagaaaaactgcaaatgtaatatatttggaaaaacatttttcaaaaactactgcttagaaaacaccaggggatttatactaaaatatatttttgcagatgcagtaagtataaaagaaatttaatccaaaattaagtgtgtgtaaatatcagagaattcacagtagaaatatctaaggcactgacattttagacattgaactaatcagtgtgctgagtacagaaaataatccaaaattaaagttggtagataaattatttatatataactttaaaagaggtagaaatatttttagttataattacatttaaagtatacttttttctttgaaaaaattacaaaatttttaaaaagtgaatgatgtaattcaactcaaattacttcatgcttttcattctattgtattcacatgtgaaagcatgtgatcaattgctgcttcatcaaagatatgagacattcttttttgttaggtgggcaatattttttaccttttctatggaagagtaaagacattacaatgtaggatgcatgataaaaatctaagtggagaggctctttgtgtttaatttataatattgaatgatgtatgagggaagtgttcagaggaatattctgcattctagtgaaaatatcttttattttagttaaaattaaattaaaattagtagtatatcattttactaactgtacttttatgtaataaaatgcagcacatttaaaaaattttagattattgtgaacttaattttttaattaaactttttttttaacatgttaagaccaattgtgcattcagtgaagtattatcatgccactaacttcaacctatcccaccttactcaagggtgttggtaaaagatagtaacaatgtactatttaataacagagtggactaacatctctaataatttctcttgccagtgactttaaactaaagaacttaattaaagaacattgttcccataggttaaatttttattctttttcttatttaaacatatttttcttaacttttgtgggtacatagtgtgtgtatatatttatgccatatatggcatattttgatacaggcatatgaataggtattaatcacatcagggcaaatgaaatatccatcaactccagcatttatcatttgtattacaaaccgattctacacttttagttactttaaaatgtacaagtaaattgctattgactatagggtcattttcatgggtataataaaaattatatacaagtataaataaaatcctgagtcttaaaattctgagtcctgcttaaacattttaaaaattttgttatgtatttttctttgaacatgtctctctgcctgcaaacataacagaattttagtattggtttacatagagttaactatacccatatattactctaaaaataaatgttaagtgcaagaaagttatgg

SEQ ID NO: 6288 - protein, 483 aa, Homo sapiens; identical to SEQ ID NO: 870

SEQ ID NO: 6289 - DNA, 1244 bp, Homo sapiens
agttatgttttattattttgcccaacacctttggccagagcagaacataagagattctttccagaaagtgaccctaagaagatatagaaaatgtggatatgagaatttacagttaagaaaaggctgtaaaagtgtggttgagtgtaaacagcacaaaggagattatagtggacttaaccaatgtttgaaaactaccttgagcaaaatatttcaatgtaataaatatgtagaagttttccataaaatttcaaattcaaatagacacaagatgagacatactgaaaataaacattttaaatgtaaagaatgtcgcaaaacattttgcatgctttcacacctaactcaacataaaagaatccaaactagagtgaatttctacaaatgtgaagcatatggaagagcctttaactggtcctcaacccttaataaacataagagaattcatactggagaaaaaccttacaaatgtaaagaatgtggcaaagcctttaaccagacctcacaccttattagacataagagaattcatactgaagagaaaccctacaaatgtgaagaatgtggcaaagcctttaaccagtcatcgacccttactacacataatataattcatactggggaaattccctacaaatgtgagaaatgtgttagagcttttaaccaagcctcaaagcttactgaacataagttaattcataccggagagaaacgttatgaatgtgaagaatgcggcaaagcttttaaccgatcctcaaaacttactgaacataagtacattcatactggagagaagctgtacaaatgtgaagaatgtggtaaagcctttaaccagtcctcaacccttactagacataaggtaattcatactggagagaaaccctacaaatgtggagaatgtggcaaagcctttaaccagtcctcagcccttaatacacataagataattcatactggagagaaactctacaaatgtgaagaatgtggcaaagcctttaaccgatcttcaacccttattggacataagagaattcatactggagagaaaccctacaaatgtgaagaatgtggcaaagcttttaaccaatcttcaacacttactacacataagaaaattcatattggagagaaaccctacaaatgtgaagaatgtggaaaagcttttaaccagttctcaactcttactacacataagaaaattcatatggaaactttacaaacctgaaagatgtgacaatgattttgac

SEQ ID NO: 6290 - protein, 405 aa, Homo sapiens
MFYYFAQHLWPEQNIRDSFQKVTLRRYRKCGYENLQLRKGCKSVVECKQHKGDYSGLNQCLKTTLSKIFQCNKYVEVFHKISNSNRHKMRHTENKHFKCKECRKTFCMLSHLTQHKRIQTRVNFYKCEAYGRAFNWSSTLNKHKRIHTGEKPYKCKECGKAFNQTSHLIRHKRIHTEEKPYKCEECGKAFNQSSTLTTHNIIHTGEIPYKCEKCVRAFNQASKLTEHKLIHTGEKRYECEECGKAFNRSSKLTEHKYIHTGEKLYKCEECGKAFNQSSTLTRHKVIHTGEKPYKCGECGKAFNQSSALNTHKIIHTGEKLYKCEECGKAFNRSSTLIGHKRIHTGEKPYKCEECGKAFNQSSTLTTHKKIHIGEKPYKCEECGKAFNQFSTLTTHKKIHMETLQT

SEQ ID NO: 6291 - DNA, 1861 bp, Homo sapiens
ttggtggggcctttgtctctggcggcagccggagcttctggtgtagtcttcactgctctgtgtcttctgctcctagaggcccagcttctgtggcctcgttacctgcaggtattgggagatccacagctaagacgccaggacccactggaagcctagaaatgggaccattgacatttatggatgtggccatagaattctctttggaggagtggcaatgcctggacactgcacagcagaatttatataggcatgtgatgtgagagaactacagaaacctggttttcttgggtgaaggtattgctgtctctaagccagacctgattacctgtctggagcaaggaaaagagccctggaatatgaagagacatgagatggtagctaaacatttaggtaagtgagagtgaatacacagatggcacagagaagaggtcaaaggccaaggagaaggccacagcttaaaatgtgatttggtaagctgtgttccaaaggaaatagtttctggaaagcccgagtttttttttatttttctctcacatagaacatattttgtattgtttttcaattctctaaggattcctctttccctttagtgatctgtcttcaatttcacagtgaaagccaacatcctcttcatgggatataaaagactgcacaatctgactggtttttttttgttgttgttttgggggacacacaaatatgcataattttgagaaactctatgttaaacagttttttaaattctctttttgcatcaagtctgaaatgtgtgagtagtgatttctgttccattggtttttttgttgttgtttatttttctgtatattccattctgtttttactactatagctttgaaatatagttacatatgtaaggcatatgcagtgccaatataccttttcaggatttggctattttggattggctttttctttttatttggcaggacagatttgctgctggtattattctcacttgacagctattttcttcaggacttggacaatgtcacacagttagttcccttctggcctgcaaattttcttgagaaattcactcattacctcataagactatgcttataaataacatatcacttttatcttgcaactcacaatattctcttgtctgtgacttttaaaattgtgcttatatatgttcttgttgtaaatatctttgtgtgtattctagtttctttgttaacctttttaatttttacatcagtttttcttataatttttcagttccttttttatattttttacctccacaatatctgttttttgatatttttaatatttttgttatcccaatttttatgatttttaatagttgtctgtgtttctatttcattcatggagtattattcaatttatgttaactttttaaaattaattttttaatggttgctttctgaaaattttataatatctgatagagctatgttgccctaaaattttgtatgcattgtaatctttaattgaaatttgaacattaaaaacaagctacctgtcacagtgtctataatgtagctttgtcctggcaaagtctgaaaccatttgtcttagctagagatcctgagagtctttcaaacatgttcttaggatgtgtcttgtctgaaatgttctagttgttttttagttaaaagactttattcatgtttcttcttaatagtcatcacttgccacaactgttccctgtctgtagtacagtctctttcctgctgtaacatttacctttgatctcagcagactcaaaatgtcattccaaagtataccactgttaatttcagcactttatgtcattggagacagaaaccagtgtccgccaaagcacctaataaagccagaaataaagatg

SEQ ID NO: 6292 - protein, 33 aa, Homo sapiens
MGPLTFMDVAIEFSLEEWQCLDTAQQNLYRHVM

SEQ ID NO: 6293 - DNA, 735 bp, Homo sapiens
gtccaatcaggcactcagctggagcagacaggacggcttccgggtttggtggggcctttgtctctggcggcagccggagcttctggtgtagtcttcactgctctgtgtcttctgctcctagaggcccagcttctgtggcctcgttacctgcaggtattgggagatccacagctaagacgccaggacccactggaagcctagaaatgttgcaggaattgtgccttggatccatccatccagtcagctgaaaccagcagcccaggacaagtggaccagccaacaggacctagaccatgcaacccagctgatcctacgatggaaccaaggtgccagtgagatgacaacagccctgctctggtcactccggaagctgaccagtccacacacggctgaagcttgaggagacaacagccctgctctagtcaccccagaagctgactagtctatgcacggccgaagcttgagtcatcatcagggaagtaaatgtggttagaaatctgaagtccagtaattttccttgtcatattaattactttgctattaagctgtcactttgcttagccttctccccccaggaaaaagccttttctgtccatgctgggtatgaacatgctactcatcactttgttcttgctactccccttatccatgttaaaaggagaaccctgggagggatgcctccactgcacccacactacgtggtcggggaacatcatgactaaaaccctgttgtat

SEQ ID NO: 6294 - protein, 46 aa, Homo sapiens
MLGMNMLLITLFLLLPLSMLKGEPWEGCLHCTHTTWSGNIMTKTLL

SEQ ID NO: 6295 - DNA, 533 bp, Homo sapiens
agacaggacggcttccgggtttggtggggcctttgtctctggcggcagccggagcttctggtgtagtcttcactgctctgtgtcttctgctcctagaggcccagcttctgtggcctcgttacctgcaggtattgggagatccacagctaagacgccaggacccactggaagcctagaaatgttgcaggaattgtgccttgctgatcctacgatggaaccaaggtgccagtgagatgacaacagccctgctctggtcactccggaagctgaccagtccacacacggctgaagcttgaggagacaacagccctgctctagtcaccccagaagctgactagtctatgcacggccgaagcttgagtcatcatcagggaagtaaatgtggttagaaatctgaagtccagtaattttccttgtcatattaattactttgctattaagctgtcactttgcttagccttctccccccaggaaaaagccttttctgtccatgctgggtatgaacatgctactcatcactttgttcttgctac

SEQ ID NO: 6296 - protein, 57 aa, Homo sapiens
TGRLPGLVGPLSLAAAGASGVVFTALCLLLLEAQLLWPRYLQVLGDPQLRRQDPLEA

SEQ ID NO: 6297 - DNA, 1729 bp, Homo sapiens
caatcaggcactcagctggagcagacaggacggcttccgggtttggtggggcctttgtctctggcggcagccggagcttctggtgtagtcttcactgctctgtgtcttctgctcctagaggcccagcttctgtggcctcgttacctgcaggtattgggagatccacagctaagacgccaggacccactggaagcctagaaatgctcctggcctggaatgaaacttcgcatatctgggaatgggagacaggacagcctgaagttggagtgtagcctctcaagggagcaggtggatgccctgaggctgagaggagtctcctggggtactcttcctttgaaaagcaaacccttagagaagttaagattgtcttcaagcaacccgggttccatttctcgaagacacattgctggtcagccaatcagatggtggtaatgagggaaaaacaaataattactgccacctggattctccaagaattatgaaagagaaaatagtatcccaaaagacaaaaaaaaaaaaaaaaaaaaaatcaaacctggccccagtgagatggtgcagcaacttgcaaagtgaaatgcaccttggggcactcaatggggcctagtacagtgtctctggagagggtggtcactgagcacttaagtgagcaggatgggggtgggagaatctctcaagggattgggtggcctgacttgacatatgagtcaaacacatctgttttttaatgagcaccgtagctccctgggtttgtcaccttgaaaaggtttgttcacttattttgactacagttttttaactgtaacttgcattttattagtagggcttaaaaggtaagaaaatatttacaaagggcataaaagaggtggggctcagaagaaaataaatatctaatcctatattccattcttaagaatactcatttaaggaagactctgtctcaaaaacaaaaacaaaactcatttacctttttctttcccagaccgagtttagaaattttctcaggtgtgtgtttttgtttttgttttgttttgttttgagacggagttttgctcttgttgcccaggctggagtgcaatggctcagtatcagctcactgaaacctctgcctctgggttcaagtgattctcctacctcagcctcccaagtagctgggattactggcatgtgccaccatgcaccagctaattttttgtatttttagtggagatagcgtttttccatgttggtcaggctggtcttgaactccctgcctcaggtgacctgcccgatctgcccgcctttgcctcccaaagtgctgggattacaggcgtgagccaccgcgcccagccaggtgtgtttttttaatgacttggtgacatccaacagaattccaaggcttagtttttagagtgctacaaaggaaaaaaatagggaaaatctctcttccattttggctgtagaaaatgaatacatttccataagaaaatgtggtagataattggtgagttacattcatgaaaacatcagttcctctttttgcagggtacatttgttacagggaatacctctgttctgtactctatcatcttgatatgtgatgttaatgctaaattttatgagaggaaacttggtatctcctagaagtgctcccatatgactaattgtttactacatgatttttaatggaaataataacatattgtcttaaaggaataaatgcttttgtatttcttattgaggtatgaaatgt

SEQ ID NO: 6298 - protein, 71 aa, Homo sapiens
MKLRISGNGRQDSLKLECSLSREQVDALRLRGVSWGTLPLKSKPLEKLRLSSSNPGSISRRHIAGQPIRWW

SEQ ID NO: 6299 - DNA, 513 bp, Homo sapiens
ggcggcagccggagcttctggtgtagtcttcactgctctgtgtcttctgctcctagaggcccagcttctgtggcctcgttacctgcaggtattgggagatccacagctaagacgccaggacccactggaagcctagaaatgctggctccaaaatccgcggccccgagttctccttggcgcagctcggccctcagtccccttcagccataggatggcggccgggctgacagctcggaccccgggcatcctgtctcctccctgcgcagtgactgtgccttgttctggagtcctctgtgggcagctctgcccccactgccgcagctctccccgattgtgcagggaccactggacggtcgtcaggggagaatactgactcaggatgcagagttcatgaatgggaagagctttggtctgcggggttcccagtccccctttttttctattaaaaatttgtggaagtctccgcagaaatattaaagaatttaattaaagagtaattcaagaattgtagag

SEQ ID NO: 6300 - protein, 53 aa, Homo sapiens
MAAGLTARTPGILSPPCAVTVPCSGVLCGQLCPHCRSSPRLCRDHWTVVRGEY

SEQ ID NO: 6301 - DNA, 356 bp, Homo sapiens
gtagtcttcactgctctgtgtcttctgctcctagaggcccagcttctgtggcctcgttacctgcaggtattgggagatccacagctaagacgccaggacccactggaagcctagaaatgtgactgtgccttgttctggagtcctctgtgggcagctctgcccccactgccgcagctctccccgattgtgcagggaccactggacggtcgtcaggggagaatactgactcaggatgcagagttcatgaatgggaagagctttggtctgcggggttcccagtccccctttttttctattaaaaatttgtggaagtctccgcagaaatattaaagaatttaattaaagagtaattcaag

SEQ ID NO: 6302 - protein, 31 aa, Homo sapiens
MGRALVCGVPSPPFFLLKICGSLRRNIKEFN

SEQ ID NO: 6303 - DNA, 3702 bp, Homo sapiens
ggtggcggcggcggcaggatggcgacggccgtcctgctgagcgtgtcggtgccgcggtgggagcgggtggcccggtatgcagtgtgcgctgccggaatcctgctctccatctacgcctaccatgtggagaggcagaaggagcgggaccccgagcaccgggccctctgcgacctggggccctgggtgaagtgctccgtcgcccttgcctccagcaaattcaacacccaacagcttccttaatagcaaaggtagcaacagcccaggatgatataactggtgatggtacgacttccaacgtcctaatcattggagagctgctgaaacaggcggatctctacatttctgaaggccttcatcccagaataatcactgaaggatttgaagctgtgaaggaaaaggcccttcattttttggaagaagtcaaagtaagcagagagatggacaaggaaacacttaaagatgtggccagggcatctctttgtactaaagttcatgctgaacttgcagatgtcttaacagaggctgtagtgggctccattttggccattaaaagaaaagatgaacctattgatctcttcatgattttgtgatcattgacaagaaacataaatctgaaactgatacgagagaagtgaattctggctttttttacaagagtgcagaaagagaaaaactcataaaagctgaaagaaaattcattgaagatagagttaaaacaaataatagaactgaaaaggaaagtctgtggtgattcagataaaggatttgttattaatcaaaagggaattgaccccttttccttagatgctctttcaaagaaggcatagtcgctcttcacagagctaaaaggaggaatatggagaggtatgagtagcagatttatccaagtaatttgacttttacttattttgcaaatgaattgggattatttgtttttccttatactttatttttgggttttcaactgtacaattaattggcattaactatattcgcgttattttgcacccatcagcactgtccatctctaggattttttttatcatcacaaactgaaactgtatacccattaaatagttactccccatttctcattccctctatgcccttgtaaacattattttactttttgtctctgaattcagtatactttctcccaaagagctcaccacaataaaagtttttttaaaaatattattttattatttttttgagacagtcttgctctgttgtacagtggcatgatcgtggttcattgcaacttctacttcctgggttcttaggattcttgtgcctcagcctcccgagtagctaggattacgggtgtctgccaccatgcccgttgaatgtttcgttttcgttttgcttttttggtagaggtggggttttgccatgttggctaggctggtctcaaactcctggcctcaagtgatccacccacctcagcctcccaaggtgttgggattacaggcgtgagccaccatgcctggccaataaagagctcttgtccatctttagatttcatttgctgacttggggagagtggtttaaatggagggttaaaagactggttttcagctggttgatggcaaatgaaaaggcttaggttaaagtacattttaaactgtaattttgtgtgtaattctgaaaaattccttcctagaaattactggtcttctctttgaacttcactggtaacattgcttattcatttcccttaaaatgctatttcaggctgactcttgcttgtggtggggtggccctgaattcttttgaggacctaagtcctgactgcttgggacatgcaggacttgtatatgagtatacattggtaagtgtattttcttcctgagggtaatagaactttttagctcatgaattatttttgttttgtttgagatgggttctcactcctgcccgggctggagtgcagtggtgtgatcacagctcactgtagcctcctcatcctgggctcaagtgatcctcctgcttcaggctcctgagcaaatgggaccacagacatgtgctaccatgcctggctaaattttttttgtaatttttgtagaaacagggtggtattgtgttgcccaggctggtcttaaactctcgggctcaggctgtccttcaccctcagcctcccaaagtgctgagattacaggcaggagccactgtgcctggttcatgaagtctttagcagaaaaatcaattgaaattcaggatcagatttttgtttatatacattttgaaggtttatgtgtagtaatgggaagccatttatatgtgatttttcaaaaagataatttggtttgatgtgatcaagtttgttccttattaatatgctgcttgtcattctctgtaagtccctcttctctctttgcacacatcgtgtttttgaaaatcatgtttcttctacacaaagggagaagttcacctttattgagaagtgtaacaaccctcgttctatcacattattgatcaaaggaccaaataagcccacacttagatcaaagatgcagtaagggatggcttgagggctgtcaaaaatgctgttgatgatggctgtgtggttccgggtgctggtgctgtggaagtggcaatggcagaagccctgaataaatataagctcagtgtaaagggcaaggcacagcttggagtccaagcatttgctgatgcgttgctcgttattcccaaggtgagcccgtggtagcagcagaagcaggcattatgggataacgattgtgtaaagaaacagcttcttcattcctgcactgattgccaccaacattctcttggttgatgagatcatgcgagctggaatgtcttctctgaaaggttgaattgaagcttcctctgtatctgagtcttgaagactctgcaaagtgatcctgaagaatacagctgtggaatttttgtccaagcttcaaatgagtttcaagggaattttcccatgtgaaaaaaggagagaacactggcatctgtggaagttctgaaattataattacagtattttttaaaaattgcactgaagtgtacacagataaagcaggtctttcacccagtgaacaggatgttttgctttagcagcagtgacataaaattccatgttaaataagcatatattacctaccttattaaatattccttgaaaaagcagattttaatggtttaattttatgtggacatatgttaaattattcagcagtaccctattgttaagcatctggttttaaaatttttatgctaatataaataacgcttagtaatttaaaattttggaagcatcccgttagtgtaaatttctgagtaaatttattgatcagttggacttttcacgcttttgaaatagctttgctaaaatgctccccctacaaagttgtaggaaatgggaagaggagtaaactagaggcaagggagttgagagagctggaaggcatggtggctaagggctacggttatcaggtgaaatttgagatttgtaggctgactatattttcaagcttctgaacttttgcttatgcaaaatattcatcccaaagcctctagcgtcatagtttcctcacccaaattactatgtttccacaagatttatatagttggtctatctctgcggtccttgaaagtgaagttggtgttactaggctgtgggttttgggggctcagcagtgacctggagtgtgcaaataaatgttaagttgaaacctc

SEQ ID NO: 6304 - protein, 73 aa, Homo sapiens
MATAVLLSVSVPRWERVARYAVCAAGILLSIYAYHVERQKERDPEHRALCDLGPWVKCSVALASSKFNTQQLP

SEQ ID NO: 6305 - DNA, 198 bp, Homo sapiens; identical to SEQ ID NO: 873

SEQ ID NO: 6306 - protein, 65 aa, Homo sapiens [sequence omitted]

SEQ ID NO: 6307 - DNA, 6431 bp, Homo sapiens
gcagtgcccgggctcccgctgcagccgcccggggacacgccgtgcaccctccggctcggggctttctcggcggcggcggcggcagcagcagcagcgttagcggcggcggcgagagcagcgttcccggctgcgcttctccctcaggcggggcggcgagagaagcggcggcggcggcggcggcacaccggtgtctctcccgctggagatttctttctgctttcctcatcgactgactgactcaccccctcccttttttgaggaagggtgacctcttctctgggactggaaaaaatatttttgtgaggaggggggcgggtggcagcgacagggtttgcttcttctcttctttcatctccctctcctcccccctcgaagaccgaaaagcaaaccccacaactgctccagcagcatcctccttcccttcctccgcctcccttctcctccgccgctcgcagtttcgccctctcttccgctaatgattgcattattatgctcccctctctggggggtctcgcccctcttgggtcgctccggagccccggcctcccctggctgcatttcttaaaaatttgggagcctgggagtgagttttctccgaggcgtgtgtgagaggcggcgggggtgttttcctgcgcgaggggcgggtgaagttcattgcccccacttttcccgcgacctttttcggacccgattttggatcgagttgaggggggcgcgggcgttttcggggggcggggggcgcggcggagaatggccgcggggagggctccccggagcctcccagtctcttgatcaaagcattccgctattctgatttattgcttgcttggtgagttatttttttttcctctaaaggagacctgtgtgttcagccattactttgctcggcgctgctcccaggcatctccgaccctcggtgctgtggggagccccacacttgggtcggggcggagggaagccgtgaagggggagggagggctcggtgtcaatttttttttgtgtggctgcggccgtagcctgtggcgggcaagcggggagaccccggcgcagcagaaccatggatggcccgacgcggggccatggactccgcaaaaagcggcggtcgcggtcgcagcgagaccgggagaggcgctcccggggcgggctgggggccggcgcggccggcggcggcggggctggccggacccgggcgctctcactcgcctcgtcgtcgggctccgacaaggaagacaatgggaagcccccgtcctccgccccgtcccggcccagacccccgcggaggaagcggagagagtccacctcggcagaagaggacatcattgatggatttgccatgaccagctttgtcacttttgaagcgctggagaaagatgtagcacttaagcctcaggaacgtgtggagaaacgccagacgcccctgaccaagaagaaacgagaagcacttaccaatggcttgtcctttcattcaaagaagagcagactcagccacccacaccactacagctcagatcgagaaaatgaccgcaatctctgccagcaccttgggaagagaaagaaaatgccgaaggcactcagacagctcaagccaggacagaacagctgcagggacagtgacagtgaaagtgccagtggagaatccaagggcttccaccggagcagctctcgggaaaggctcagtgatagttcagctccttccagcttgggaacaggctacttcagatccggagttaggtgttggcacgctaccagaacatgacagccaggatgcagggccgattgtccccaagatatcgggtctagagagaagccaggagaagagccaggactgttgcaaagagccaatctttgagcctgtggtgcttaaagacccctgccctcaggtcgcacagccaataccccagccgcagacggagccccaactccgagctccttctccggaccctgacttggtgcagcgcacagaggccccacctcaacccccacctctgagtacacagccaccacagggccctcctgaggcccagctccagcctgccccgcagcctcaggtgcagaggccacccaggccacagtcccccacccagctgctccatcagaacctcccacctgtgcaggcccacccctctgctcagagcctctcccagccattgtcagcctacaacagcagtagcttaagcctcaacagtttaagcagcagcagaagcagcactccagcgaagaatatgtttgcccctcccactgctctgcctcctccaccaccactgacatcaggaagtctgcaggtggccggacacccggccgggagcacttactcagagcaagacatcttgcgacaggaactgaacactcgttttttggcctctcagagtgctgaccgcggggcttccctgggccctccgccctacctgcggaccgagttccatcagcaccagcaccagcaccagcacacccaccagcacacgcaccagcacaccttcacgccgttcccccacgccatcccacccaccgccatcatgccgacgccagcacctcccatgtttgacaaataccctacaaaagttgacccattctaccggcacagtctcttccattcctatcctcctgcagtgtcgggcatcccccctatgatcccacccactggcccttttggttcactacaaggagcatttcagccgaagttgacagatcctttcagacctatgttaaggaaaccagggaagtggtgtgctatgcatgttcacatcgcctggcagatttaccaccaccaacagaaagtcaagaaacagatgcagtcagacccacataagctggactttggactgaaacctgagttcctgagccgccctccaggccccagtctttttggagccatccaccacccccatgacctggcacggccttcaactttgttctctgccgctggtgctgcacacccaactgggaccccttttgggccacctcctcatcacagcaacttcctcaaccctgctgcccacctagagccttttaatcggccgtctacattcacaggcctagcagcagttggtggcaatgccttcgggggacttggaaatccttccgttacacccaactcaatgttcggccacaaggatggccccagtgtgcagaactttagcaaccctcacgaaccctggaaccggctgcaccgaacgcctccgtcgttcccgacccctccgccctggctgaagccaggggagctggagcgcagcgcgtccgctgcagctcatgacagagatagagatgtagataaacgagactcatctgttagtaaagatgacaaagaaagggaaagcgtcgagaagagacactccagccacccttcaccagcacctgtcctcccggtgaatgccctgggacatacccgcagctccactgaacagatccgggctcatctgaacactgaggctcgggagaaggacaaacccaaagagagggagagagaccactcggaatcccgcaaggacctggccgccgacgagcacaaggcgaaagagggccacctgcccgagaaggacgggcacggccacgaggggcgcgccgcgggcgaagaggccaagcagctggcccgggtgccgtctccctacgtgcggaccccggtggtggagagtgccaggcccaacagcacctcgagccgggaggccgagccgcgcaagggtgagccggcctacgagaaccccaagaagagctccgaggtcaaggtgaaggaggagcggaaggaagaccatgacctgcctccagaggccccgcagacccaccgggcctcggagccgccgcctcccaactcctcgtccagcgtgcacccggggcccctggcctcgatgcccatgacggtgggggtgacgggcattcaccccatgaacagcatcagcagcctggacaggactcgcatgatgacccccttcatgggcatcagccccctcccgggcggagagcgcttcccgtacccttctttccactgggaccccatccgggaccccttgagggatccttaccgagaacttgacattcaccggagagacccgctgggcagggacttcctgctaaggaacgacccgctccaccggctctcgactccccggctgtacgaagccgaccgctccttcagggaccgggagcctcacgactacagccaccaccaccaccaccaccaccacccgctgtctgtggaccctcggcgggagcacgagcggggaggccacctggacgagcgggagcgcttgcacatgctcagagaagactacgagcacacgcggctccactccgtgcaccccgcctccctcgacggacacctcccccaccccagcctcatcaccccgggactccccagcatgcactatccccgcatcagccccaccgcgggcaaccagaacggactcctcaacaagacccctccgacagcagcgctgagcgcacctcccccgctcatctccacgctggggggccgcccggtctctcccagaaggacgactcctctgtccgcagagataagggagaggcccccttcccacacgctgaaggatatcgaggcccgataagccgagaacaggagcaagaacgaggaagaagaaaccctaggcagacaccaggccaggcttgagagacagaactcctgcatggctcacacagactgggggggaaagccccaccccttccccttgtaaaaaatgtatagactcagtgcacattttgaaatgttttgtatattatatgttgagatttttcagatcttttagcccagtcatatgttctcacgtctcctactttttgtttctcgtataaaactttttgatttgaaccaaaacagtgaagatgacaacacacaccaattggatgataattgtagcgggggcggtgggggggagaagtccacgccatccatcatgcaaaattctttcagatgaggtgggaaggccgtgtacatagttatgtaaaaagagattgcttcatgagctaatggttcatatatgcaaaagggtaagatgaaagctttactttgtacaaatgtaaatagataaagtaacataatacattaatacttcttaaaatgtgctatttgcaaacttacttaatatcagtgaacacagtcggctaaagctgtgttcccatatattgttatagacagctaaacccttcaactatgcaatgaatgttcgggcttttcacaaaagcccgcctaactcaaaggagccttttcaaatccatttacagcatacttaaggtcatattttccctgaacaagcgcttacgtgatatgactctgttttccttgcttgttttttttcaaacggagaaacatcctgttttgcaaattggaccccaggctggaacttagcatctgaagttgccgcttgtgggctctgggggaaagtgtagccccggagaggtaactgaggacatgagcaaccagtgccagggagggtgggatttgccagatgccaaaatcaggggacgggtggtggtgtctgtcagacacacacaggtcgccagtgacttcacacacacctcatgtgagaaccatgccttttttagtgtgtcctatttcatacctgtacacacttcctcgttttgtaatgagatttacttacacccaaacagatcctgaaagaaagcttcaagttttctcagatgatggatatgttttcactgtattcaataactgacggatgtaaggtgcacgtttcctgatgtgacgcactgtattccagctggtgatcaagtctgggaacagccgtaacaggtcaaccttgtggagccatcgcgagttagagggtgaaagatggcagaaaaaaaagtcttgtgtgtgagtgtgttttttgagtttgcatcaatcttaatgtctcttcataatacttttataatacattaagcctcttgtctacatatttggagagaatatgactttactagcagagaaatacaatatatcttgtctactggactgtaaaatatatgtatgaaataaaattagttccatttggtcttctagtatattaaagtgctatctgacgttgttatcctgtttttgcaaaaaaaaaaaaaaaaaaaagttaactacagaccattgtttctaataagcagagagatctattttagtagtaaactgaaggtttagttgtgagcttcagattttgtgaactccagatgttgtgcggtgtttttttttttttttaagacaacaactaaaaaaaatgcaaggaatatgtacactggaactgtagtggtagctttcagtattgtaaagagattgttctatacggacctttttgctgtttatcctgtatgtaataaagtcctttctagatcctatgtgaaaagaaaagtgaagcaactgaatcttcagcatgttctcatcggcggagccttcttgtgtaatgtaaactgtgccatgttattaaaaaatgtgaactaag

SEQ ID NO: 6308 - protein, 1035 aa, Homo sapiens
MACPFIQRRADSATHTTTAQIEKMTAISASTLGRERKCRRHSDSSSQDRTAAGTVTVKVPVENPRASTGAALGKGSVIVQLLPAWEQATSDPELGVGTLPEHDSQDAGPIVPKISGLERSQEKSQDCCKEPIFEPVVLKDPCPQVAQPIPQPQTEPQLRAPSPDPDLVQRTEAPPQPPPLSTQPPQGPPEAQLQPAPQPQVQRPPRPQSPTQLLHQNLPPVQAHPSAQSLSQPLSAYNSSSLSLNSLSSSRSSTPAKNMFAPPTALPPPPPLTSGSLQVAGHPAGSTYSEQDILRQELNTRFLASQSADRGASLGPPPYLRTEFHQHQHQHQHTHQHTHQHTFTPFPHAIPPTAIMPTPAPPMFDKYPTKVDPFYRHSLFHSYPPAVSGIPPMIPPTGPFGSLQGAFQPKLTDPFRPMLRKPGKWCAMHVHIAWQIYHHQQKVKKQMQSDPHKLDFGLKPEFLSRPPGPSLFGAIHHPHDLARPSTLFSAAGAAHPTGTPFGPPPHHSNFLNPAAHLEPFNRPSTFTGLAAVGGNAFGGLGNPSVTPNSMFGHKDGPSVQNFSNPHEPWNRLHRTPPSFPTPPPWLKPGELERSASAAAHDRDRDVDKRDSSVSKDDKERESVEKRHSSHPSPAPVLPVNALGHTRSSTEQIRAHLNTEAREKDKPKERERDHSESRKDLAADEHKAKEGHLPEKDGHGHEGRAAGEEAKQLARVPSPYVRTPVVESARPNSTSSREAEPRKGEPAYENPKKSSEVKVKEERKEDHDLPPEAPQTHRASEPPPPNSSSSVHPGPLASMPMTVGVTGIHPMNSISSLDRTRMMTPFMGISPLPGGERFPYPSFHWDPIRDPLRDPYRELDIHRRDPLGRDFLLRNDPLHRLSTPRLYEADRSFRDREPHDYSHHHHHHHHPLSVDPRREHERGGHLDERERLHMLREDYEHTRLHSVHPASLDGHLPHPSLITPGLPSMHYPRISPTAGNQNGLLNKTPPTAALSAPPPLISTLGGRPVSPRRTTPLSAEIRERPPSHTLKDIEAR

SEQ ID NO: 6309 - DNA, 6630 bp, Homo sapiens
gcagtgcccgggctcccgctgcagccgcccggggacacgccgtgcaccctccggctcggggctttctcggcggcggcggcggcagcagcagcagcgttagcggcggcggcgagagcagcgttcccggctgcgcttctccctcaggcggggcggcgagagaagcggcggcggcggcggcggcacaccggtgtctctcccgctggagatttctttctgctttcctcatcgactgactgactcaccccctcccttttttgaggaagggtgacctcttctctgggactggaaaaaatatttttgtgaggaggggggcgggtggcagcgacagggtttgcttcttctcttctttcatctccctctcctcccccctcgaagaccgaaaagcaaaccccacaactgctccagcagcatcctccttcccttcctccgcctcccttctcctccgccgctcgcagtttcgccctctcttccgctaatgattgcattattatgctcccctctctggggggtctcgcccctcttgggtcgctccggagccccggcctcccctggctgcatttcttaaaaatttgggagcctgggagtgagttttctccgaggcgtgtgtgagaggcggcgggggtgttttcctgcgcgaggggcgggtgaagttcattgcccccacttttcccgcgacctttttcggacccgattttggatcgagttgaggggggcgcgggcgttttcggggggcggggggcgcggcggagaatggccgcggggagggctccccggagcctcccagtctcttgatcaaagcattccgctattctgatttattgcttgcttggtgagttatttttttttcctctaaaggagacctgtgtgttcagccattactttgctcggcgctgctcccaggcatctccgaccctcggtgctgtggggagccccacacttgggtcggggcggagggaagccgtgaagggggagggagggctcggtgtcaatttttttttgtgtggctgcggccgtagcctgtggcgggcaagcggggagaccccggcgcagcagaaccatggatggcccgacgcggggccatggactccgcaaaaagcggcggtcgcggtcgcagcgagaccgggagaggcgctcccggggcgggctgggggccggcgcggccggcggcggcggggctggccggacccgggcgctctcactcgcctcgtcgtcgggctccgacaaggaagacaatgggaagcccccgtcctccgccccgtcccggcccagacccccgcggaggaagcggagagagtccacctcggcagaagaggacatcattgatggatttgccatgaccagctttgtcacttttgaagcgctggagaaagatgtagcacttaagcctcaggaacgtgtggagaaacgccagacgcccctgaccaagaagaaacgagaagcacttaccaatggcttgtcctttcattcaaagaagagcagactcagccacccacaccactacagctcagatcgagaaaatgaccgcaatctctgccagcaccttgggaagagaaagaaaatgccgaaggcactcagacagctcaagccaggacagaacagctgcagggacagtgacagtgaaagtgccagtggagaatccaagggcttccaccggagcagctctcgggaaaggctcagtgatagttcagctccttccagcttgggaacaggctacttcagatccggagttaggtgttggcacgctaccagaacatgacagccaggatgcagggccgattgtccccaagatatcgggtctagagagaagccaggagaagagccaggactgttgcaaagagccaatctttgagcctgtggtgcttaaagacccctgccctcaggtcgcacagccaataccccagccgcagacggagccccaactccgagctccttctccggaccctgacttggtgcagcgcacagaggccccacctcaacccccacctctgagtacacagccaccacagggccctcctgaggcccagctccagcctgccccgcagcctcaggtgcagaggccacccaggccacagtcccccacccagctgctccatcagaacctcccacctgtgcaggcccacccctctgctcagagcctctcccagccattgtcagcctacaacagcagtagcttaagcctcaacagtttaagcagcagcagaagcagcactccagcgaagaatatgtttgcccctcccactgctctgcctcctccaccaccactgacatcaggaagtctgcaggtggccggacacccggccgggagcacttactcagagcaagacatcttgcgacaggaactgaacactcgttttttggcctctcagagtgctgaccgcggggcttccctgggccctccgccctacctgcggaccgagttccatcagcaccagcaccagcaccagcacacccaccagcacacgcaccagcacaccttcacgccgttcccccacgccatcccacccaccgccatcatgccgacgccagcacctcccatgtttgacaaataccctacaaaagttgacccattctaccggcacagtctcttccattcctatcctcctgcagtgtcgggcatcccccctatgatcccacccactggcccttttggttcactacaaggagcatttcagccgaagttgacagatcctttcagacctatgttaaggaaaccagggaagtggtgtgctatgcatgttcacatcgcctggcagatttaccaccaccaacagaaagtcaagaaacagatgcagtcagacccacataagctggactttggactgaaacctgagttcctgagccgccctccaggccccagtctttttggagccatccaccacccccatgacctggcacggccttcaactttgttctctgccgctggtgctgcacacccaactgggaccccttttgggccacctcctcatcacagcaacttcctcaaccctgctgcccacctagagccttttaatcggccgtctacattcacaggcctagcagcagttggtggcaatgccttcgggggacttggaaatccttccgttacacccaactcaatgttcggccacaaggatggccccagtgtgcagaactttagcaaccctcacgaaccctggaaccggctgcaccgaacgcctccgtcgttcccgacccctccgccctggctgaagccaggggagctggagcgcagcgcgtccgctgcagctcatgacagagatagagatgtagataaacgagactcatctgttagtaaagatgacaaagaaagggaaagcgtcgagaagagacactccagccacccttcaccagcacctgtcctcccggtgaatgccctgggacatacccgcagctccactgaacagatccgggctcatctgaacactgaggctcgggagaaggacaaacccaaagagagggagagagaccactcggaatcccgcaaggacctggccgccgacgagcacaaggcgaaagagggccacctgcccgagaaggacgggcacggccacgaggggcgcgccgcgggcgaagaggccaagcagctggcccgggtgccgtctccctacgtgcggaccccggtggtggagagtgccaggcccaacagcacctcgagccgggaggccgagccgcgcaagggtgagccggcctacgagaaccccaagaagagctccgaggtcaaggtgaaggaggagcggaaggaagaccatgacctgcctccagaggccccgcagacccaccgggcctcggagccgccgcctcccaactcctcgtccagcgtgcacccggggcccctggcctcgatgcccatgacggtgggggtgacgggcattcaccccatgaacagcatcagcagcctggacaggactcgcatgatgacccccttcatgggcatcagccccctcccgggcggagagcgcttcccgtacccttctttccactgggaccccatccgggaccccttgagggatccttaccgagaacttgacattcaccggagagacccgctgggcagggacttcctgctaaggaacgacccgctccaccggctctcgactccccggctgtacgaagccgaccgctccttcagggaccgggagcctcacgactacagccaccaccaccaccaccaccaccacccgctgtctgtggaccctcggcgggagcacgagcggggaggccacctggacgagcgggagcgcttgcacatgctcagagaagactacgagcacacgcggctccactccgtgcaccccgcctccctcgacggacacctcccccaccccagcctcatcaccccgggactccccagcatgcactatccccgcatcagccccaccgcgggcaaccagaacggactcctcaacaagacccctccgacagcagcgctgagcgcacctcccccgctcatctccacgctggggggccgcccggtctctcccagaaggacgactcctctgtccgcagagataagggagaggcccccttcccacacgctgaaggatatcgaggcccgataagccgagaacaggagcaagaacgaggaagaagaaaccctaggcagacaccaggccaggcttgagagacagaactcctgcatggctcacacagactgggggggaaagccccaccccttccccttgtaaaaaatgtatagactcagtgcacattttgaaatgttttgtatattatatgttgagatttttcagatcttttagcccagtcatatgttctcacgtctcctactttttgtttctcgtataaaactttttgatttgaaccaaaacagtgaagatgacaacacacaccaattggatgataattgtagcgggggcggtgggggggagaagtccacgccatccatcatgcaaaattctttcagatgaggtgggaaggccgtgtacatagttatgtaaaaagagattgcttcatgagctaatggttcatatatgcaaaagggtaagatgaaagctttactttgtacaaatgtaaatagataaagtaacataatacattaatacttcttaaaatgtgctatttgcaaacttacttaatatcagtgaacacagtcggctaaagctgtgttcccatatattgttatagacagctaaacccttcaactatgcaatgaatgttcgggcttttcacaaaagcccgcctaactcaaaggagccttttcaaatccatttacagcatacttaaggtcatattttccctgaacaagcgcttacgtgatatgactctgttttccttgcttgttttttttcaaacggagaaacatcctgttttgcaaattggaccccaggctggaacttagcatctgaagttgccgcttgtgggctctgggggaaagtgtagccccggagaggtaactgaggacatgagcaaccagtgccagggagggtgggatttgccagatgccaaaatcaggggacgggtggtggtgtctgtcagacacacacaggtcgccagtgacttcacacacacctcatgtgagaaccatgccttttttagtgtgtcctatttcatacctgtacacacttcctcgttttgtaatgagatttacttacacccaaacagatcctgaaagaaagcttcaagttttctcagatgatggatatgttttcactgtattcaataactgacggatgtaaggtgcacgtttcctgatgtgacgcactgtattccagctggtgatcaagtctgggaacagccgtaacaggtcaaccttgtggagccatcgcgagttagagggtgaaagatggcagaaaaaaaagtcttgtgtgtgagtgtgttttttgagtttgcatcaatcttaatgtctcttcataatacttttataatacattaagcctcttgtctacatatttggagagaatatgactttactagcagagaaatacaatatatcttgtctactggactgtaaaatatatgtatgaaataaaattagttccatttggtcttctagtatattaaagtgctatctgacgttgttatcctgtttttgcaaaaaaaaaaaaaaaaaaaagttaactacagaccattgtttctaataagcagagagatctattttagtagtaaactgaaggtttagttgtgagcttcagattttgtgaactccagatgttgtgcggtgtttttttttttttttaagacaacaactaaaaaaaatgcaaggaatatgtacactggaactgtagtggtagctttcagtattgtaaagagattgttctatacggacctttttgctgtttatcctgtatgtaataaagtcctttctagatcctatgtgaaaagaaaagtgaagcaactgaatcttcagcatgttctcatcggcggagccttcttgtgtaatgtaaactgtgccatgttattaaaaaatgtgaactaagcttccagctgcttgtttgtgtgaggtgaccatcattaccttagggaagaagccatacctgtacaagaccgggctcttgaaaagaaacacctcgaacccagcccgtgtaagaacagaaggctcacctgcagtggctgaccaccctacccaactcggttagtgtctcaccaatttgttactataaacatttgcaccccaca

SEQ ID NO: 6310 - protein, 1035 aa, Homo sapiens; identical to SEQ ID NO: 6308

SEQ ID NO: 6311 - DNA, 6390 bp, Homo sapiens
cgctcgcagtttcgccctctcttccgctaatgattgcattattatgctcccctctctggggggtctcgcccctcttgggtcgctccggagccccggcctcccctggctgcatttcttaaaaatttgggagcctgggagtgagttttctccgaggcgtgtgtgagaggcggcgggggtgttttcctgcgcgaggggcgggtgaagttcattgcccccacttttcccgcgacctttttcggacccgattttggatcgagttgaggggggcgcgggcgttttcggggggcggggggcgcggcggagaatggccgcggggagggctccccggagcctcccagtctcttgatcaaagcattccgctattctgatttattgcttgcttggtgagttatttttttttcctctaaaggagacctgtgtgttcagccattactttgctcggcgctgctcccaggcatctccgaccctcggtgctgtggggagccccacacttgggctcctcgcctctcgccctcgctccccgtccctcctcccctctctccgccccttcccccttttctttctcctctctttcttcccctctctcccttctttcggccgccgtctcccccgcgccctcctcggggcggagggaagccgtgaagggggagggagggctcggtgtcaatttttttttgtgtggctgcggccgtagcctgtggcgggcaagcggggagaccccggcgcagcagaaccatggatggcccgacgcggggccatggactccgcaaaaagcggcggtcgcggtcgcagcgagaccgggagaggcgctcccggggcgggctgggggccggcgcggccggcggcggcggggctggccggacccgggcgctctcactcgcctcgtcgtcgggctccgacaaggaagacaatgggaagcccccgtcctccgccccgtcccggcccagacccccgcggaggaagcggagagagtccacctcggcagaagaggacatcattgatggatttgccatgaccagctttgtcacttttgaagcgctggagaaagatgtagcacttaagcctcaggaacgtgtggagaaacgccagacgcccctgaccaagaagaaacgagaagcacttaccaatggcttgtcctttcattcaaagaagagcagactcagccacccacaccactacagctcagatcgagaaaatgaccgcaatctctgccagcaccttgggaagagaaagaaaatgccgaaggcactcagacagctcaagccaggacagaacagctgcagggacagtgacagtgaaagtgccagtggagaatccaagggcttccaccggagcagctctcgggaaaggctcagtgatagttcagctccttccagcttgggaacaggctacttctgtgacagtgacagtgaccaggaagagaaggcatcagatgccagctctgaaaaactcttcaacactgttattgtaaacaaagatccggagttaggtgttggcacgctaccagaacatgacagccaggatgcagggccgattgtccccaagatatcgggtctagagagaagccaggagaagagccaggactgttgcaaagagccaatctttgagcctgtggtgcttaaagacccctgccctcaggtcgcacagccaataccccagccgcagacggagccccaactccgagctccttctccggaccctgacttggtgcagcgcacagaggccccacctcaacccccacctctgagtacacagccaccacagggccctcctgaggcccagctccagcctgccccgcagcctcaggtgcagaggccacccaggccacagtcccccacccagctgctccatcagaacctcccacctgtgcaggcccacccctctgctcagagcctctcccagccattgtcagcctacaacagcagtagcttaagcctcaacagtttaagcagcagcagaagcagcactccagcgaagactcagcccgccccacctcacatctcccaccacccctctgcctccccgttccccctctccctgcccaaccacagccccctgcacagcttcacacccaccctccagccccccgcacactcacatcaccccaatatgtttgcccctcccactgctctgcctcctccaccaccactgacatcaggaagtctgcaggtggccggacacccggccgggagcacttactcagagcaagacatcttgcgacaggaactgaacactcgttttttggcctctcagagtgctgaccgcggggcttccctgggccctccgccctacctgcggaccgagttccatcagcaccagcaccagcaccagcacacccaccagcacacgcaccagcacaccttcacgccgttcccccacgccatcccacccaccgccatcatgccgacgccagcacctcccatgtttgacaaataccctacaaaagttgacccattctaccggcacagtctcttccattcctatcctcctgcagtgtcgggcatcccccctatgatcccacccactggcccttttggttcactacaaggagcatttcagccgaagacatccaaccctatcgatgtcgctgctcggcctgggacagtcccacacactttactccaaaaggacccgaggttgacagatcctttcagacctatgttaaggaaaccagggaagtggtgtgctatgcatgttcacatcgcctggcagatttaccaccaccaacagaaagtcaagaaacagatgcagtcagacccacataagctggactttggactgaaacctgagttcctgagccgccctccaggccccagtctttttggagccatccaccacccccatgacctggcacggccttcaactttgttctctgccgctggtgctgcacacccaactgggaccccttttgggccacctcctcatcacagcaacttcctcaaccctgctgcccacctagagccttttaatcggccgtctacattcacaggcctagcagcagttggtggcaatgccttcgggggacttggaaatccttccgttacacccaactcaatgttcggccacaaggatggccccagtgtgcagaactttagcaaccctcacgaaccctggaaccggctgcaccgaacgcctccgtcgttcccgacccctccgccctggctgaagccaggggagctggagcgcagcgcgtccgctgcagctcatgacagagatagagatgtagataaacgagactcatctgttagtaaagatgacaaagaaagggaaagcgtcgagaagagacactccagccacccttcaccagcacctgtcctcccggtgaatgccctgggacatacccgcagctccactgaacagatccgggctcatctgaacactgaggctcgggagaaggacaaacccaaagagagggagagagaccactcggaatcccgcaaggacctggccgccgacgagcacaaggcgaaagagggccacctgcccgagaaggacgggcacggccacgaggggcgcgccgcgggcgaagaggccaagcagctggcccgggtgccgtctccctacgtgcggaccccggtggtggagagtgccaggcccaacagcacctcgagccgggaggccgagccgcgcaagggtgagccggcctacgagaaccccaagaagagctccgaggtcaaggtgaaggaggagcggaaggaagaccatgacctgcctccagaggccccgcagacccaccgggcctcggagccgccgcctcccaactcctcgtccagcgtgcacccggggcccctggcctcgatgcccatgacggtgggggtgacgggcattcaccccatgaacagcatcagcagcctggacaggactcgcatgatgacccccttcatgggcatcagccccctcccgggcggagagcgcttcccgtacccttctttccactgggaccccatccgggaccccttgagggatccttaccgagaacttgacattcaccggagagacccgctgggcagggacttcctgctaaggaacgacccgctccaccggctctcgactccccggctgtacgaagccgaccgctccttcagggaccgggagcctcacgactacagccaccaccaccaccaccaccaccacccgctgtctgtggaccctcggcgggagcacgagcggggaggccacctggacgagcgggagcgcttgcacatgctcagagaagactacgagcacacgcggctccactccgtgcaccccgcctccctcgacggacacctcccccaccccagcctcatcaccccgggactccccagcatgcactatccccgcatcagccccaccgcgggcaaccagaacggactcctcaacaagacccctccgacagcagcgctgagcgcacctcccccgctcatctccacgctggggggccgcccggtctctcccagaaggacgactcctctgtccgcagagataagggagaggcccccttcccacacgctgaaggatatcgaggcccgataagccgagaacaggagcaagaacgaggaagaagaaaccctaggcagacaccaggccaggcttgagagacagaactcctgcatggctcacacagactgggggggaaagccccaccccttccccttgtaaaaaatgtatagactcagtgcacattttgaaatgttttgtatattatatgttgagatttttcagatcttttagcccagtcatatgttctcacgtctcctactttttgtttctcgtataaaactttttgatttgaaccaaaacagtgaagatgacaacacacaccaattggatgataattgtagcgggggcggtgggggggagaagtccacgccatccatcatgcaaaattctttcagatgaggtgggaaggccgtgtacatagttatgtaaaaagagattgcttcatgagctaatggttcatatatgcaaaagggtaagatgaaagctttactttgtacaaatgtaaatagataaagtaacataatacattaatacttcttaaaatgtgctatttgcaaacttacttaatatcagtgaacacagtcggctaaagctgtgttcccatatattgttatagacagctaaacccttcaactatgcaatgaatgttcgggcttttcacaaaagcccgcctaactcaaaggagccttttcaaatccatttacagcatacttaaggtcatattttccctgaacaagcgcttacgtgatatgactctgttttccttgcttgttttttttcaaacggagaaacatcctgttttgcaaattggaccccaggctggaacttagcatctgaagttgccgcttgtgggctctgggggaaagtgtagccccggagaggtaactgaggacatgagcaaccagtgccagggagggtgggatttgccagatgccaaaatcaggggacgggtggtggtgtctgtcagacacacacaggtcgccagtgacttcacacacacctcatgtgagaaccatgccttttttagtgtgtcctatttcatacctgtacacacttcctcgttttgtaatgagatttacttacacccaaacagatcctgaaagaaagcttcaagttttctcagatgatggatatgttttcactgtattcaataactgacggatgtaaggtgcacgtttcctgatgtgacgcactgtattccagctggtgatcaagtctgggaacagccgtaacaggtcaaccttgtggagccatcgcgagttagagggtgaaagatggcagaaaaaaaagtcttgtgtgtgagtgtgttttttgagtttgcatcaatcttaatgtctcttcataatacttttataatacattaagcctcttgtctacatatttggagagaatatgactttactagcagagaaatacaatatatcttgtctactggactgtaaaatatatgtatgaaataaaattagttccatttggtcttctagtatattaaagtgctatctgacgttgttatcctgtttttgcaaaaaaaaaaaaaaaaaaaagttaactacagaccattgtttctaataagcagagagatctattttagtagtaaactgaaggtttagttgtgagcttcagattttgtgaactccagatgttgtgcggtgtttttttttttttttaagacaacaactaaaaaaaatgcaaggaatatgtacactggaactgtagtggtagctttcagtattgtaaagagattgttctatacggacctttttgctgtttatcctgtatgtaataaagtcctttctagatcctatgtgaaaagaaaagtgaagcaactgaatcttcagcatgttctcatcggcggagccttcttgtgtaatgtaaactgtgccatgttattaaaaaatgtgaactaag

SEQ ID NO: 6312 - protein, 1259 aa, Homo sapiens; identical to SEQ ID NO: 876

SEQ ID NO: 6313 - DNA, 6318 bp, Homo sapiens
cgctcgcagtttcgccctctcttccgctaatgattgcattattatgctcccctctctggggggtctcgcccctcttgggtcgctccggagccccggcctcccctggctgcatttcttaaaaatttgggagcctgggagtgagttttctccgaggcgtgtgtgagaggcggcgggggtgttttcctgcgcgaggggcgggtgaagttcattgcccccacttttcccgcgacctttttcggacccgattttggatcgagttgaggggggcgcgggcgttttcggggggcggggggcgcggcggagaatggccgcggggagggctccccggagcctcccagtctcttgatcaaagcattccgctattctgatttattgcttgcttggtgagttatttttttttcctctaaaggagacctgtgtgttcagccattactttgctcggcgctgctcccaggcatctccgaccctcggtgctgtggggagccccacacttgggctcctcgcctctcgccctcgctccccgtccctcctcccctctctccgccccttcccccttttctttctcctctctttcttcccctctctcccttctttcggccgccgtctcccccgcgccctcctcggggcggagggaagccgtgaagggggagggagggctcggtgtcaatttttttttgtgtggctgcggccgtagcctgtggcgggcaagcggggagaccccggcgcagcagaaccatggatggcccgacgcggggccatggactccgcaaaaagcggcggtcgcggtcgcagcgagaccgggagaggcgctcccggggcgggctgggggccggcgcggccggcggcggcggggctggccggacccgggcgctctcactcgcctcgtcgtcgggctccgacaaggaagacaatgggaagcccccgtcctccgccccgtcccggcccagacccccgcggaggaagcggagagagtccacctcggcagaagaggacatcattgatggatttgccatgaccagctttgtcacttttgaagcgctggagaaagatgtagcacttaagcctcaggaacgtgtggagaaacgccagacgcccctgaccaagaagaaacgagaagcacttaccaatggcttgtcctttcattcaaagaagagcagactcagccacccacaccactacagctcagatcgagaaaatgaccgcaatctctgccagcaccttgggaagagaaagaaaatgccgaaggcactcagacagctcaagccaggacagaacagctgcagggacagtgacagtgaaagtgccagtggagaatccaagggcttccaccggagcagctctcgggaaaggctcagtgatagttcagctccttccagcttgggaacaggctacttctgtgacagtgacagtgaccaggaagagaaggcatcagatgccagctctgaaaaactcttcaacactgttattgtaaacaaagatccggagttaggtgttggcacgctaccagaacatgacagccaggatgcagggccgattgtccccaagatatcgggtctagagagaagccaggagaagagccaggactgttgcaaagagccaatctttgagcctgtggtgcttaaagacccctgccctcaggtcgcacagccaataccccagccgcagacggagccccaactccgagctccttctccggaccctgacttggtgcagcgcacagaggccccacctcaacccccacctctgagtacacagccaccacagggccctcctgaggcccagctccagcctgccccgcagcctcaggtgcagaggccacccaggccacagtcccccacccagctgctccatcagaacctcccacctgtgcaggcccacccctctgctcagagcctctcccagccattgtcagcctacaacagcagtagcttaagcctcaacagtttaagcagcagcagaagcagcactccagcgaagactcagcccgccccacctcacatctcccaccacccctctgcctccccgttccccctctccctgcccaaccacagccccctgcacagcttcacacccaccctccagccccccgcacactcacatcaccccaatatgtttgcccctcccactgctctgcctcctccaccaccactgacatcaggaagtctgcaggtggccggacacccggccgggagcacttactcagagcaagacatcttgcgacaggaactgaacactcgttttttggcctctcagagtgctgaccgcggggcttccctgggccctccgccctacctgcggaccgagttccatcagcaccagcaccagcaccagcacacccaccagcacacgcaccagcacaccttcacgccgttcccccacgccatcccacccaccgccatcatgccgacgccagcacctcccatgtttgacaaataccctacaaaagttgacccattctaccggcacagtctcttccattcctatcctcctgcagtgtcgggcatcccccctatgatcccacccactggcccttttggttcactacaaggagcatttcagccgaagttgacagatcctttcagacctatgttaaggaaaccagggaagtggtgtgctatgcatgttcacatcgcctggcagatttaccaccaccaacagaaagtcaagaaacagatgcagtcagacccacataagctggactttggactgaaacctgagttcctgagccgccctccaggccccagtctttttggagccatccaccacccccatgacctggcacggccttcaactttgttctctgccgctggtgctgcacacccaactgggaccccttttgggccacctcctcatcacagcaacttcctcaaccctgctgcccacctagagccttttaatcggccgtctacattcacaggcctagcagcagttggtggcaatgccttcgggggacttggaaatccttccgttacacccaactcaatgttcggccacaaggatggccccagtgtgcagaactttagcaaccctcacgaaccctggaaccggctgcaccgaacgcctccgtcgttcccgacccctccgccctggctgaagccaggggagctggagcgcagcgcgtccgctgcagctcatgacagagatagagatgtagataaacgagactcatctgttagtaaagatgacaaagaaagggaaagcgtcgagaagagacactccagccacccttcaccagcacctgtcctcccggtgaatgccctgggacatacccgcagctccactgaacagatccgggctcatctgaacactgaggctcgggagaaggacaaacccaaagagagggagagagaccactcggaatcccgcaaggacctggccgccgacgagcacaaggcgaaagagggccacctgcccgagaaggacgggcacggccacgaggggcgcgccgcgggcgaagaggccaagcagctggcccgggtgccgtctccctacgtgcggaccccggtggtggagagtgccaggcccaacagcacctcgagccgggaggccgagccgcgcaagggtgagccggcctacgagaaccccaagaagagctccgaggtcaaggtgaaggaggagcggaaggaagaccatgacctgcctccagaggccccgcagacccaccgggcctcggagccgccgcctcccaactcctcgtccagcgtgcacccggggcccctggcctcgatgcccatgacggtgggggtgacgggcattcaccccatgaacagcatcagcagcctggacaggactcgcatgatgacccccttcatgggcatcagccccctcccgggcggagagcgcttcccgtacccttctttccactgggaccccatccgggaccccttgagggatccttaccgagaacttgacattcaccggagagacccgctgggcagggacttcctgctaaggaacgacccgctccaccggctctcgactccccggctgtacgaagccgaccgctccttcagggaccgggagcctcacgactacagccaccaccaccaccaccaccaccacccgctgtctgtggaccctcggcgggagcacgagcggggaggccacctggacgagcgggagcgcttgcacatgctcagagaagactacgagcacacgcggctccactccgtgcaccccgcctccctcgacggacacctcccccaccccagcctcatcaccccgggactccccagcatgcactatccccgcatcagccccaccgcgggcaaccagaacggactcctcaacaagacccctccgacagcagcgctgagcgcacctcccccgctcatctccacgctggggggccgcccggtctctcccagaaggacgactcctctgtccgcagagataagggagaggcccccttcccacacgctgaaggatatcgaggcccgataagccgagaacaggagcaagaacgaggaagaagaaaccctaggcagacaccaggccaggcttgagagacagaactcctgcatggctcacacagactgggggggaaagccccaccccttccccttgtaaaaaatgtatagactcagtgcacattttgaaatgttttgtatattatatgttgagatttttcagatcttttagcccagtcatatgttctcacgtctcctactttttgtttctcgtataaaactttttgatttgaaccaaaacagtgaagatgacaacacacaccaattggatgataattgtagcgggggcggtgggggggagaagtccacgccatccatcatgcaaaattctttcagatgaggtgggaaggccgtgtacatagttatgtaaaaagagattgcttcatgagctaatggttcatatatgcaaaagggtaagatgaaagctttactttgtacaaatgtaaatagataaagtaacataatacattaatacttcttaaaatgtgctatttgcaaacttacttaatatcagtgaacacagtcggctaaagctgtgttcccatatattgttatagacagctaaacccttcaactatgcaatgaatgttcgggcttttcacaaaagcccgcctaactcaaaggagccttttcaaatccatttacagcatacttaaggtcatattttccctgaacaagcgcttacgtgatatgactctgttttccttgcttgttttttttcaaacggagaaacatcctgttttgcaaattggaccccaggctggaacttagcatctgaagttgccgcttgtgggctctgggggaaagtgtagccccggagaggtaactgaggacatgagcaaccagtgccagggagggtgggatttgccagatgccaaaatcaggggacgggtggtggtgtctgtcagacacacacaggtcgccagtgacttcacacacacctcatgtgagaaccatgccttttttagtgtgtcctatttcatacctgtacacacttcctcgttttgtaatgagatttacttacacccaaacagatcctgaaagaaagcttcaagttttctcagatgatggatatgttttcactgtattcaataactgacggatgtaaggtgcacgtttcctgatgtgacgcactgtattccagctggtgatcaagtctgggaacagccgtaacaggtcaaccttgtggagccatcgcgagttagagggtgaaagatggcagaaaaaaaagtcttgtgtgtgagtgtgttttttgagtttgcatcaatcttaatgtctcttcataatacttttataatacattaagcctcttgtctacatatttggagagaatatgactttactagcagagaaatacaatatatcttgtctactggactgtaaaatatatgtatgaaataaaattagttccatttggtcttctagtatattaaagtgctatctgacgttgttatcctgtttttgcaaaaaaaaaaaaaaaaaaaagttaactacagaccattgtttctaataagcagagagatctattttagtagtaaactgaaggtttagttgtgagcttcagattttgtgaactccagatgttgtgcggtgtttttttttttttttaagacaacaactaaaaaaaatgcaaggaatatgtacactggaactgtagtggtagctttcagtattgtaaagagattgttctatacggacctttttgctgtttatcctgtatgtaataaagtcctttctagatcctatgtgaaaagaaaagtgaagcaactgaatcttcagcatgttctcatcggcggagccttcttgtgtaatgtaaactgtgccatgttattaaaaaatgtgaactaag

SEQ ID NO: 6314 - protein, 1235 aa, Homo sapiens
MDGPTRGHGLRKKRRSRSQRDRERRSRGGLGAGAAGGGGAGRTRALSLASSSGSDKEDNGKPPSSAPSRPRPPRRKRRESTSAEEDIIDGFAMTSFVTFEALEKDVALKPQERVEKRQTPLTKKKREALTNGLSFHSKKSRLSHPHHYSSDRENDRNLCQHLGKRKKMPKALRQLKPGQNSCRDSDSESASGESKGFHRSSSRERLSDSSAPSSLGTGYFCDSDSDQEEKASDASSEKLFNTVIVNKDPELGVGTLPEHDSQDAGPIVPKISGLERSQEKSQDCCKEPIFEPVVLKDPCPQVAQPIPQPQTEPQLRAPSPDPDLVQRTEAPPQPPPLSTQPPQGPPEAQLQPAPQPQVQRPPRPQSPTQLLHQNLPPVQAHPSAQSLSQPLSAYNSSSLSLNSLSSSRSSTPAKTQPAPPHISHHPSASPFPLSLPNHSPLHSFTPTLQPPAHSHHPNMFAPPTALPPPPPLTSGSLQVAGHPAGSTYSEQDILRQELNTRFLASQSADRGASLGPPPYLRTEFHQHQHQHQHTHQHTHQHTFTPFPHAIPPTAIMPTPAPPMFDKYPTKVDPFYRHSLFHSYPPAVSGIPPMIPPTGPFGSLQGAFQPKLTDPFRPMLRKPGKWCAMHVHIAWQIYHHQQKVKKQMQSDPHKLDFGLKPEFLSRPPGPSLFGAIHHPHDLARPSTLFSAAGAAHPTGTPFGPPPHHSNFLNPAAHLEPFNRPSTFTGLAAVGGNAFGGLGNPSVTPNSMFGHKDGPSVQNFSNPHEPWNRLHRTPPSFPTPPPWLKPGELERSASAAAHDRDRDVDKRDSSVSKDDKERESVEKRHSSHPSPAPVLPVNALGHTRSSTEQIRAHLNTEAREKDKPKERERDHSESRKDLAADEHKAKEGHLPEKDGHGHEGRAAGEEAKQLARVPSPYVRTPVVESARPNSTSSREAEPRKGEPAYENPKKSSEVKVKEERKEDHDLPPEAPQTHRASEPPPPNSSSSVHPGPLASMPMTVGVTGIHPMNSISSLDRTRMMTPFMGISPLPGGERFPYPSFHWDPIRDPLRDPYRELDIHRRDPLGRDFLLRNDPLHRLSTPRLYEADRSFRDREPHDYSHHHHHHHHPLSVDPRREHERGGHLDERERLHMLREDYEHTRLHSVHPASLDGHLPHPSLITPGLPSMHYPRISPTAGNQNGLLNKTPPTAALSAPPPLISTLGGRPVSPRRTTPLSAEIRERPPSHTLKDIEAR

SEQ ID NO: 6315 - DNA, 6517 bp, Homo sapiens
cgctcgcagtttcgccctctcttccgctaatgattgcattattatgctcccctctctggggggtctcgcccctcttgggtcgctccggagccccggcctcccctggctgcatttcttaaaaatttgggagcctgggagtgagttttctccgaggcgtgtgtgagaggcggcgggggtgttttcctgcgcgaggggcgggtgaagttcattgcccccacttttcccgcgacctttttcggacccgattttggatcgagttgaggggggcgcgggcgttttcggggggcggggggcgcggcggagaatggccgcggggagggctccccggagcctcccagtctcttgatcaaagcattccgctattctgatttattgcttgcttggtgagttatttttttttcctctaaaggagacctgtgtgttcagccattactttgctcggcgctgctcccaggcatctccgaccctcggtgctgtggggagccccacacttgggctcctcgcctctcgccctcgctccccgtccctcctcccctctctccgccccttcccccttttctttctcctctctttcttcccctctctcccttctttcggccgccgtctcccccgcgccctcctcggggcggagggaagccgtgaagggggagggagggctcggtgtcaatttttttttgtgtggctgcggccgtagcctgtggcgggcaagcggggagaccccggcgcagcagaaccatggatggcccgacgcggggccatggactccgcaaaaagcggcggtcgcggtcgcagcgagaccgggagaggcgctcccggggcgggctgggggccggcgcggccggcggcggcggggctggccggacccgggcgctctcactcgcctcgtcgtcgggctccgacaaggaagacaatgggaagcccccgtcctccgccccgtcccggcccagacccccgcggaggaagcggagagagtccacctcggcagaagaggacatcattgatggatttgccatgaccagctttgtcacttttgaagcgctggagaaagatgtagcacttaagcctcaggaacgtgtggagaaacgccagacgcccctgaccaagaagaaacgagaagcacttaccaatggcttgtcctttcattcaaagaagagcagactcagccacccacaccactacagctcagatcgagaaaatgaccgcaatctctgccagcaccttgggaagagaaagaaaatgccgaaggcactcagacagctcaagccaggacagaacagctgcagggacagtgacagtgaaagtgccagtggagaatccaagggcttccaccggagcagctctcgggaaaggctcagtgatagttcagctccttccagcttgggaacaggctacttctgtgacagtgacagtgaccaggaagagaaggcatcagatgccagctctgaaaaactcttcaacactgttattgtaaacaaagatccggagttaggtgttggcacgctaccagaacatgacagccaggatgcagggccgattgtccccaagatatcgggtctagagagaagccaggagaagagccaggactgttgcaaagagccaatctttgagcctgtggtgcttaaagacccctgccctcaggtcgcacagccaataccccagccgcagacggagccccaactccgagctccttctccggaccctgacttggtgcagcgcacagaggccccacctcaacccccacctctgagtacacagccaccacagggccctcctgaggcccagctccagcctgccccgcagcctcaggtgcagaggccacccaggccacagtcccccacccagctgctccatcagaacctcccacctgtgcaggcccacccctctgctcagagcctctcccagccattgtcagcctacaacagcagtagcttaagcctcaacagtttaagcagcagcagaagcagcactccagcgaagactcagcccgccccacctcacatctcccaccacccctctgcctccccgttccccctctccctgcccaaccacagccccctgcacagcttcacacccaccctccagccccccgcacactcacatcaccccaatatgtttgcccctcccactgctctgcctcctccaccaccactgacatcaggaagtctgcaggtggccggacacccggccgggagcacttactcagagcaagacatcttgcgacaggaactgaacactcgttttttggcctctcagagtgctgaccgcggggcttccctgggccctccgccctacctgcggaccgagttccatcagcaccagcaccagcaccagcacacccaccagcacacgcaccagcacaccttcacgccgttcccccacgccatcccacccaccgccatcatgccgacgccagcacctcccatgtttgacaaataccctacaaaagttgacccattctaccggcacagtctcttccattcctatcctcctgcagtgtcgggcatcccccctatgatcccacccactggcccttttggttcactacaaggagcatttcagccgaagttgacagatcctttcagacctatgttaaggaaaccagggaagtggtgtgctatgcatgttcacatcgcctggcagatttaccaccaccaacagaaagtcaagaaacagatgcagtcagacccacataagctggactttggactgaaacctgagttcctgagccgccctccaggccccagtctttttggagccatccaccacccccatgacctggcacggccttcaactttgttctctgccgctggtgctgcacacccaactgggaccccttttgggccacctcctcatcacagcaacttcctcaaccctgctgcccacctagagccttttaatcggccgtctacattcacaggcctagcagcagttggtggcaatgccttcgggggacttggaaatccttccgttacacccaactcaatgttcggccacaaggatggccccagtgtgcagaactttagcaaccctcacgaaccctggaaccggctgcaccgaacgcctccgtcgttcccgacccctccgccctggctgaagccaggggagctggagcgcagcgcgtccgctgcagctcatgacagagatagagatgtagataaacgagactcatctgttagtaaagatgacaaagaaagggaaagcgtcgagaagagacactccagccacccttcaccagcacctgtcctcccggtgaatgccctgggacatacccgcagctccactgaacagatccgggctcatctgaacactgaggctcgggagaaggacaaacccaaagagagggagagagaccactcggaatcccgcaaggacctggccgccgacgagcacaaggcgaaagagggccacctgcccgagaaggacgggcacggccacgaggggcgcgccgcgggcgaagaggccaagcagctggcccgggtgccgtctccctacgtgcggaccccggtggtggagagtgccaggcccaacagcacctcgagccgggaggccgagccgcgcaagggtgagccggcctacgagaaccccaagaagagctccgaggtcaaggtgaaggaggagcggaaggaagaccatgacctgcctccagaggccccgcagacccaccgggcctcggagccgccgcctcccaactcctcgtccagcgtgcacccggggcccctggcctcgatgcccatgacggtgggggtgacgggcattcaccccatgaacagcatcagcagcctggacaggactcgcatgatgacccccttcatgggcatcagccccctcccgggcggagagcgcttcccgtacccttctttccactgggaccccatccgggaccccttgagggatccttaccgagaacttgacattcaccggagagacccgctgggcagggacttcctgctaaggaacgacccgctccaccggctctcgactccccggctgtacgaagccgaccgctccttcagggaccgggagcctcacgactacagccaccaccaccaccaccaccaccacccgctgtctgtggaccctcggcgggagcacgagcggggaggccacctggacgagcgggagcgcttgcacatgctcagagaagactacgagcacacgcggctccactccgtgcaccccgcctccctcgacggacacctcccccaccccagcctcatcaccccgggactccccagcatgcactatccccgcatcagccccaccgcgggcaaccagaacggactcctcaacaagacccctccgacagcagcgctgagcgcacctcccccgctcatctccacgctggggggccgcccggtctctcccagaaggacgactcctctgtccgcagagataagggagaggcccccttcccacacgctgaaggatatcgaggcccgataagccgagaacaggagcaagaacgaggaagaagaaaccctaggcagacaccaggccaggcttgagagacagaactcctgcatggctcacacagactgggggggaaagccccaccccttccccttgtaaaaaatgtatagactcagtgcacattttgaaatgttttgtatattatatgttgagatttttcagatcttttagcccagtcatatgttctcacgtctcctactttttgtttctcgtataaaactttttgatttgaaccaaaacagtgaagatgacaacacacaccaattggatgataattgtagcgggggcggtgggggggagaagtccacgccatccatcatgcaaaattctttcagatgaggtgggaaggccgtgtacatagttatgtaaaaagagattgcttcatgagctaatggttcatatatgcaaaagggtaagatgaaagctttactttgtacaaatgtaaatagataaagtaacataatacattaatacttcttaaaatgtgctatttgcaaacttacttaatatcagtgaacacagtcggctaaagctgtgttcccatatattgttatagacagctaaacccttcaactatgcaatgaatgttcgggcttttcacaaaagcccgcctaactcaaaggagccttttcaaatccatttacagcatacttaaggtcatattttccctgaacaagcgcttacgtgatatgactctgttttccttgcttgttttttttcaaacggagaaacatcctgttttgcaaattggaccccaggctggaacttagcatctgaagttgccgcttgtgggctctgggggaaagtgtagccccggagaggtaactgaggacatgagcaaccagtgccagggagggtgggatttgccagatgccaaaatcaggggacgggtggtggtgtctgtcagacacacacaggtcgccagtgacttcacacacacctcatgtgagaaccatgccttttttagtgtgtcctatttcatacctgtacacacttcctcgttttgtaatgagatttacttacacccaaacagatcctgaaagaaagcttcaagttttctcagatgatggatatgttttcactgtattcaataactgacggatgtaaggtgcacgtttcctgatgtgacgcactgtattccagctggtgatcaagtctgggaacagccgtaacaggtcaaccttgtggagccatcgcgagttagagggtgaaagatggcagaaaaaaaagtcttgtgtgtgagtgtgttttttgagtttgcatcaatcttaatgtctcttcataatacttttataatacattaagcctcttgtctacatatttggagagaatatgactttactagcagagaaatacaatatatcttgtctactggactgtaaaatatatgtatgaaataaaattagttccatttggtcttctagtatattaaagtgctatctgacgttgttatcctgtttttgcaaaaaaaaaaaaaaaaaaaagttaactacagaccattgtttctaataagcagagagatctattttagtagtaaactgaaggtttagttgtgagcttcagattttgtgaactccagatgttgtgcggtgtttttttttttttttaagacaacaactaaaaaaaatgcaaggaatatgtacactggaactgtagtggtagctttcagtattgtaaagagattgttctatacggacctttttgctgtttatcctgtatgtaataaagtcctttctagatcctatgtgaaaagaaaagtgaagcaactgaatcttcagcatgttctcatcggcggagccttcttgtgtaatgtaaactgtgccatgttattaaaaaatgtgaactaagcttccagctgcttgtttgtgtgaggtgaccatcattaccttagggaagaagccatacctgtacaagaccgggctcttgaaaagaaacacctcgaacccagcccgtgtaagaacagaaggctcacctgcagtggctgaccaccctacccaactcggttagtgtctcaccaatttgttactataaacatttgcaccccaca

SEQ ID NO: 6316 - protein, 1235 aa, Homo sapiens; identical to SEQ ID NO: 6314

SEQ ID NO: 6317 - DNA, 6589 bp, Homo sapiens
cgctcgcagtttcgccctctcttccgctaatgattgcattattatgctcccctctctggggggtctcgcccctcttgggtcgctccggagccccggcctcccctggctgcatttcttaaaaatttgggagcctgggagtgagttttctccgaggcgtgtgtgagaggcggcgggggtgttttcctgcgcgaggggcgggtgaagttcattgcccccacttttcccgcgacctttttcggacccgattttggatcgagttgaggggggcgcgggcgttttcggggggcggggggcgcggcggagaatggccgcggggagggctccccggagcctcccagtctcttgatcaaagcattccgctattctgatttattgcttgcttggtgagttatttttttttcctctaaaggagacctgtgtgttcagccattactttgctcggcgctgctcccaggcatctccgaccctcggtgctgtggggagccccacacttgggctcctcgcctctcgccctcgctccccgtccctcctcccctctctccgccccttcccccttttctttctcctctctttcttcccctctctcccttctttcggccgccgtctcccccgcgccctcctcggggcggagggaagccgtgaagggggagggagggctcggtgtcaatttttttttgtgtggctgcggccgtagcctgtggcgggcaagcggggagaccccggcgcagcagaaccatggatggcccgacgcggggccatggactccgcaaaaagcggcggtcgcggtcgcagcgagaccgggagaggcgctcccggggcgggctgggggccggcgcggccggcggcggcggggctggccggacccgggcgctctcactcgcctcgtcgtcgggctccgacaaggaagacaatgggaagcccccgtcctccgccccgtcccggcccagacccccgcggaggaagcggagagagtccacctcggcagaagaggacatcattgatggatttgccatgaccagctttgtcacttttgaagcgctggagaaagatgtagcacttaagcctcaggaacgtgtggagaaacgccagacgcccctgaccaagaagaaacgagaagcacttaccaatggcttgtcctttcattcaaagaagagcagactcagccacccacaccactacagctcagatcgagaaaatgaccgcaatctctgccagcaccttgggaagagaaagaaaatgccgaaggcactcagacagctcaagccaggacagaacagctgcagggacagtgacagtgaaagtgccagtggagaatccaagggcttccaccggagcagctctcgggaaaggctcagtgatagttcagctccttccagcttgggaacaggctacttctgtgacagtgacagtgaccaggaagagaaggcatcagatgccagctctgaaaaactcttcaacactgttattgtaaacaaagatccggagttaggtgttggcacgctaccagaacatgacagccaggatgcagggccgattgtccccaagatatcgggtctagagagaagccaggagaagagccaggactgttgcaaagagccaatctttgagcctgtggtgcttaaagacccctgccctcaggtcgcacagccaataccccagccgcagacggagccccaactccgagctccttctccggaccctgacttggtgcagcgcacagaggccccacctcaacccccacctctgagtacacagccaccacagggccctcctgaggcccagctccagcctgccccgcagcctcaggtgcagaggccacccaggccacagtcccccacccagctgctccatcagaacctcccacctgtgcaggcccacccctctgctcagagcctctcccagccattgtcagcctacaacagcagtagcttaagcctcaacagtttaagcagcagcagaagcagcactccagcgaagactcagcccgccccacctcacatctcccaccacccctctgcctccccgttccccctctccctgcccaaccacagccccctgcacagcttcacacccaccctccagccccccgcacactcacatcaccccaatatgtttgcccctcccactgctctgcctcctccaccaccactgacatcaggaagtctgcaggtggccggacacccggccgggagcacttactcagagcaagacatcttgcgacaggaactgaacactcgttttttggcctctcagagtgctgaccgcggggcttccctgggccctccgccctacctgcggaccgagttccatcagcaccagcaccagcaccagcacacccaccagcacacgcaccagcacaccttcacgccgttcccccacgccatcccacccaccgccatcatgccgacgccagcacctcccatgtttgacaaataccctacaaaagttgacccattctaccggcacagtctcttccattcctatcctcctgcagtgtcgggcatcccccctatgatcccacccactggcccttttggttcactacaaggagcatttcagccgaagacatccaaccctatcgatgtcgctgctcggcctgggacagtcccacacactttactccaaaaggacccgaggttgacagatcctttcagacctatgttaaggaaaccagggaagtggtgtgctatgcatgttcacatcgcctggcagatttaccaccaccaacagaaagtcaagaaacagatgcagtcagacccacataagctggactttggactgaaacctgagttcctgagccgccctccaggccccagtctttttggagccatccaccacccccatgacctggcacggccttcaactttgttctctgccgctggtgctgcacacccaactgggaccccttttgggccacctcctcatcacagcaacttcctcaaccctgctgcccacctagagccttttaatcggccgtctacattcacaggcctagcagcagttggtggcaatgccttcgggggacttggaaatccttccgttacacccaactcaatgttcggccacaaggatggccccagtgtgcagaactttagcaaccctcacgaaccctggaaccggctgcaccgaacgcctccgtcgttcccgacccctccgccctggctgaagccaggggagctggagcgcagcgcgtccgctgcagctcatgacagagatagagatgtagataaacgagactcatctgttagtaaagatgacaaagaaagggaaagcgtcgagaagagacactccagccacccttcaccagcacctgtcctcccggtgaatgccctgggacatacccgcagctccactgaacagatccgggctcatctgaacactgaggctcgggagaaggacaaacccaaagagagggagagagaccactcggaatcccgcaaggacctggccgccgacgagcacaaggcgaaagagggccacctgcccgagaaggacgggcacggccacgaggggcgcgccgcgggcgaagaggccaagcagctggcccgggtgccgtctccctacgtgcggaccccggtggtggagagtgccaggcccaacagcacctcgagccgggaggccgagccgcgcaagggtgagccggcctacgagaaccccaagaagagctccgaggtcaaggtgaaggaggagcggaaggaagaccatgacctgcctccagaggccccgcagacccaccgggcctcggagccgccgcctcccaactcctcgtccagcgtgcacccggggcccctggcctcgatgcccatgacggtgggggtgacgggcattcaccccatgaacagcatcagcagcctggacaggactcgcatgatgacccccttcatgggcatcagccccctcccgggcggagagcgcttcccgtacccttctttccactgggaccccatccgggaccccttgagggatccttaccgagaacttgacattcaccggagagacccgctgggcagggacttcctgctaaggaacgacccgctccaccggctctcgactccccggctgtacgaagccgaccgctccttcagggaccgggagcctcacgactacagccaccaccaccaccaccaccaccacccgctgtctgtggaccctcggcgggagcacgagcggggaggccacctggacgagcgggagcgcttgcacatgctcagagaagactacgagcacacgcggctccactccgtgcaccccgcctccctcgacggacacctcccccaccccagcctcatcaccccgggactccccagcatgcactatccccgcatcagccccaccgcgggcaaccagaacggactcctcaacaagacccctccgacagcagcgctgagcgcacctcccccgctcatctccacgctggggggccgcccggtctctcccagaaggacgactcctctgtccgcagagataagggagaggcccccttcccacacgctgaaggatatcgaggcccgataagccgagaacaggagcaagaacgaggaagaagaaaccctaggcagacaccaggccaggcttgagagacagaactcctgcatggctcacacagactgggggggaaagccccaccccttccccttgtaaaaaatgtatagactcagtgcacattttgaaatgttttgtatattatatgttgagatttttcagatcttttagcccagtcatatgttctcacgtctcctactttttgtttctcgtataaaactttttgatttgaaccaaaacagtgaagatgacaacacacaccaattggatgataattgtagcgggggcggtgggggggagaagtccacgccatccatcatgcaaaattctttcagatgaggtgggaaggccgtgtacatagttatgtaaaaagagattgcttcatgagctaatggttcatatatgcaaaagggtaagatgaaagctttactttgtacaaatgtaaatagataaagtaacataatacattaatacttcttaaaatgtgctatttgcaaacttacttaatatcagtgaacacagtcggctaaagctgtgttcccatatattgttatagacagctaaacccttcaactatgcaatgaatgttcgggcttttcacaaaagcccgcctaactcaaaggagccttttcaaatccatttacagcatacttaaggtcatattttccctgaacaagcgcttacgtgatatgactctgttttccttgcttgttttttttcaaacggagaaacatcctgttttgcaaattggaccccaggctggaacttagcatctgaagttgccgcttgtgggctctgggggaaagtgtagccccggagaggtaactgaggacatgagcaaccagtgccagggagggtgggatttgccagatgccaaaatcaggggacgggtggtggtgtctgtcagacacacacaggtcgccagtgacttcacacacacctcatgtgagaaccatgccttttttagtgtgtcctatttcatacctgtacacacttcctcgttttgtaatgagatttacttacacccaaacagatcctgaaagaaagcttcaagttttctcagatgatggatatgttttcactgtattcaataactgacggatgtaaggtgcacgtttcctgatgtgacgcactgtattccagctggtgatcaagtctgggaacagccgtaacaggtcaaccttgtggagccatcgcgagttagagggtgaaagatggcagaaaaaaaagtcttgtgtgtgagtgtgttttttgagtttgcatcaatcttaatgtctcttcataatacttttataatacattaagcctcttgtctacatatttggagagaatatgactttactagcagagaaatacaatatatcttgtctactggactgtaaaatatatgtatgaaataaaattagttccatttggtcttctagtatattaaagtgctatctgacgttgttatcctgtttttgcaaaaaaaaaaaaaaaaaaaagttaactacagaccattgtttctaataagcagagagatctattttagtagtaaactgaaggtttagttgtgagcttcagattttgtgaactccagatgttgtgcggtgtttttttttttttttaagacaacaactaaaaaaaatgcaaggaatatgtacactggaactgtagtggtagctttcagtattgtaaagagattgttctatacggacctttttgctgtttatcctgtatgtaataaagtcctttctagatcctatgtgaaaagaaaagtgaagcaactgaatcttcagcatgttctcatcggcggagccttcttgtgtaatgtaaactgtgccatgttattaaaaaatgtgaactaagcttccagctgcttgtttgtgtgaggtgaccatcattaccttagggaagaagccatacctgtacaagaccgggctcttgaaaagaaacacctcgaacccagcccgtgtaagaacagaaggctcacctgcagtggctgaccaccctacccaactcggttagtgtctcaccaatttgttactataaacatttgcaccccaca

SEQ ID NO: 6318 - protein, 1259 aa, Homo sapiens; identical to SEQ ID NO: 876

SEQ ID NO: 6319 - DNA, 3915 bp, Homo sapiens
aattgagacttgagcgtgactgcggagcctggaggatgcgggctccccgagcgggcttcccctctgcccggcgcgatggagcgggtcggtgagcggaacaaaggcgcctgcccgggggagcgggtcttccgctgaagagcgcgggtggcgcgccgcgacggccgcctgcgggccaaggtgggaggctgtgcggccccaggcgcggcgcgctccgccgtgggcgggcggcgatccctgagtccggcacctgtgcgccgctccctctgtgcctcccgggcagccccgcctgccggcctcggagtccgcggcgccggcggctagaggtccagaggcgaaccacttgctggtgcagaagagaaaccctcaaatccctggcctttcgcggagacgcctggacggggccgtgcgccgtggactgagcaggcgtctcggggagcacttctgcagagcgaggacttccatgtgagcgattccgttctccccaccaccaatccgacctcccagccgtctccgccgcccgagcatccttgaggtgggacgagcaggggcttggatccctgccggccgtctggtgtgtgaggcttgcacggcccctggctgccccgcgcctcgccggagcccgagggggcgcaggtccggggcgagggccggccgggctgtttgatggcttcactgagaagagtcaaagtgctgttggtgttgaacttgatcgcggtagccggcttcgtgctcttcctggccaagtgccggcccatcgcggtgcgcagcggagacgccttccacgagatccggccgcgcgccgaggtggccaacctcagcgcgcacagcgccagccccatccaggatgcggtcctgaagcgcctgtcgctgctggaggacatcgtgtaccggcagctgaatggcttatccaaatcccttgggctcattgaaggttatggtgggcggggtaaagggggccttccggctactctttccccggctgaagaagaaaaggctaagggaccccatgagaagtatggctacaattcatacctcagtgaaaaaatttcactggaccgttccattccggattatcgtcccaccaagtgtaaggagctcaagtactccaaggacctgccccagatatccatcatattcatcttcgtgaacgaggccctgtcggtgatcctgcggtccgtgcacagtgccgtcaatcacacgcccacacacctgctgaaggaaatcattctggtggatgacaacagcgacgaagaggagctgaaggtccccctagaggagtatgtccacaaacgctaccccgggctggtgaaggtggtaagaaatcagaagagggaaggcctgatccgcgctcgcattgagggctggaaggtggctaccgggcaggtcactggcttctttgatgcccacgtggaattcaccgctggctgggctgagccggttctatcccgcatccaggaaaaccggaagcgtgtgatcctcccctccattgacaacatcaaacaggacaactttgaggtgcagcggtacgagaactcggcccacgggtacagctgggagctgtggtgcatgtacatcagccccccaaaagactggtgggacgccggagacccttctctccccatcaggaccccagccatgataggctgctcgttcgtggtcaacaggaagttcttcggtgaaattggtcttctggatcctggcatggatgtatacggaggagaaaatattgaactgggaatcaaggtatggctctgtgggggcagcatggaggtccttccttgctcacgggtggcccacattgagcggaagaagaagccatataatagcaacattggcttctacaccaagaggaatgctcttcgcgttgctgaggtctggatggacgattacaagtctcatgtgtacatagcgtggaacctgccgctggagaatccgggaattgacatcggtgatgtctccgaaagaagagcattaaggaaaagtttaaagtgtaagaatttccagtggtacctggaccatgtttacccagaaatgagaagatacaataataccgttgcttacggggagcttcgcaacaacaaggcaaaagacgtctgcttggaccaggggccgctggagaaccacacagcaatattgtatccgtgccatggctggggaccacagcttgcccgctacaccaaggaaggcttcctgcacttgggtgccctggggaccaccacactcctccctgacacccgctgcctggtggacaactccaagagtcggctgccccagctcctggactgcgacaaggtcaagagcagcctgtacaagcgctggaacttcatccagaatggagccatcatgaacaagggcacgggacgctgcctggaggtggagaaccggggcctggctggcatcgacctcatcctccgcagctgcacaggtcagaggtggaccattaagaactccatcaagtagagggagggagctggggcactggagcctggcccccaggacatggctgctccccccaacatctggaccagctgccctggcggagagacagcaaggggccggcaggtgctcgatgggccccccagggcttctccagggcagcacagggaccccggatgaagactctgtcccccctcaggcattcagctgcccacaagtttcctgcaccctggaaaagccccccacccttcctctgggaaactgacagctgtcttccacagcctctgatgtggacctggtactgaggagcaagactgtccagttctcctccacatctcccatcccagaatcaggatctgggactggcagggtcccctcctgtgtctcatctcttgcagcagcagctgctgaactccagccatcaacacggtgggaggcagcgggggcttcagccatgtcctagctccccgccctaaaaggaggcagtgaggaccaggcactatttcctccgaggttacttctacccagatgacacctgcctgttcacgccccaaggcagctactgcccctaacccttcccaccagggtagctttgggcactgcagctctggacttttctggcccctcctgagatgacctgatggagctgatgctttctctcctaatccctgggcactaggctcttatcagtgtgcttgggccagctctcctgcctgtgtctagaggaagccagagacagaaataggctaagcctgcagtaggatctcagccacaagggccccgcaggatggagctgggtcaaggaccagggagccctgactcccagaggctgccaccggggagaagcagcggtcctccatccagaacctaagggctgaagcaaaggctgccaggacccttgaagatgcttttggctcacctcatttcaccccacgctctgctggctggcagaggagaaggcagtcgtttcctctctgaagagtatttttttcgattgccctctggttagggtgcacatataaatcagagttaatatatgaacgcgtgtgcatgcacaagtgtgtgtgtgcctgcgtgctgtgcgtggcagggtgtgtgtgtgtgtgtctggctgtgcgttccggagtgtgtgacgatgctgacctagctgtgtggccttgggcttgctgcttcattactcacctggatggggacgagggatgagaagggtgtgggtttggccccatgtcactggccggaaggatgtgtctcagccctgccctgtggggtgcccccgatgggaggctgtcccatctcccagtccccatctctttttccccacactgtccctggccaagccctgcccagagctgaaccctgtagctgcccccttgccctgtgtgggattcgcagtgtctcatttggtgacgtcttactggtgatcatctcctcaccccatctcccaccttgtggaataaatacatgttagcacttcccaga

SEQ ID NO: 6320 - protein, 598 aa, Homo sapiens; identical to SEQ ID NO: 878

SEQ ID NO: 6321 - DNA, 3654 bp, Homo sapiens
aggacatgggcggggacaaataagggaataaaagctggcggcagggaagcccgcagctgcaaccggctctggttcttttcggtgctgtggaagctttgttttttcgctcttcacagtaaatcttgctgctgtatattctttgggtccacgccgcctttgagatgtaacactcataacactcaccctgaaagtccgtggcttcattcttgaagtcagcgagaccacgaacccaccggaaggaaccaactctggacacagtggcatgatctcggctctctgcagcctctgcctcttgggttcaaacgattctcctgcctcagcctcccaagtagctgggactacaggtgtgtgctagcacacccggctaagttttgtatgtttagtagaaacgggtttcaccatattggccaggctggtcttgaactccagacctcaactgatccaccggcctcagcaccccaaagtgctgggattacaggcgtgagccaccacaccaggctgagatctgacggttttataaggggcttttcccccttctgcttggcacttctccttagtgccaccatgtgaagaaggatgtgtttgcttttccctccgccatgattgtaagtttcctgaggcctcccagccctgcagaactgcttatccaaatcccttgggctcattgaaggttatggtgggcggggtaaagggggccttccggctactctttccccggctgaagaagaaaaggctaagggaccccatgagaagtatggctacaattcatacctcagtgaaaaaatttcactggaccgttccattccggattatcgtcccaccaagtgtaaggagctcaagtactccaaggacctgccccagatatccatcatattcatcttcgtgaacgaggccctgtcggtgatcctgcggtccgtgcacagtgccgtcaatcacacgcccacacacctgctgaaggaaatcattctggtggatgacaacagcgacgaagaggagctgaaggtccccctagaggagtatgtccacaaacgctaccccgggctggtgaaggtggtaagaaatcagaagagggaaggcctgatccgcgctcgcattgagggctggaaggtggctaccgggcaggtcactggcttctttgatgcccacgtggaattcaccgctggctgggctgagccggttctatcccgcatccaggaaaaccggaagcgtgtgatcctcccctccattgacaacatcaaacaggacaactttgaggtgcagcggtacgagaactcggcccacgggtacagctgggagctgtggtgcatgtacatcagccccccaaaagactggtgggacgccggagacccttctctccccatcaggaccccagccatgataggctgctcgttcgtggtcaacaggaagttcttcggtgaaattggtcttctggatcctggcatggatgtatacggaggagaaaatattgaactgggaatcaaggtatggctctgtgggggcagcatggaggtccttccttgctcacgggtggcccacattgagcggaagaagaagccatataatagcaacattggcttctacaccaagaggaatgctcttcgcgttgctgaggtctggatggacgattacaagtctcatgtgtacatagcgtggaacctgccgctggagaatccgggaattgacatcggtgatgtctccgaaagaagagcattaaggaaaagtttaaagtgtaagaatttccagtggtacctggaccatgtttacccagaaatgagaagatacaataataccgttgcttacggggagcttcgcaacaacaaggcaaaagacgtctgcttggaccaggggccgctggagaaccacacagcaatattgtatccgtgccatggctggggaccacagcttgcccgctacaccaaggaaggcttcctgcacttgggtgccctggggaccaccacactcctccctgacacccgctgcctggtggacaactccaagagtcggctgccccagctcctggactgcgacaaggtcaagagcagcctgtacaagcgctggaacttcatccagaatggagccatcatgaacaagggcacgggacgctgcctggaggtggagaaccggggcctggctggcatcgacctcatcctccgcagctgcacaggtcagaggtggaccattaagaactccatcaagtagagggagggagctggggcactggagcctggcccccaggacatggctgctccccccaacatctggaccagctgccctggcggagagacagcaaggggccggcaggtgctcgatgggccccccagggcttctccagggcagcacagggaccccggatgaagactctgtcccccctcaggcattcagctgcccacaagtttcctgcaccctggaaaagccccccacccttcctctgggaaactgacagctgtcttccacagcctctgatgtggacctggtactgaggagcaagactgtccagttctcctccacatctcccatcccagaatcaggatctgggactggcagggtcccctcctgtgtctcatctcttgcagcagcagctgctgaactccagccatcaacacggtgggaggcagcgggggcttcagccatgtcctagctccccgccctaaaaggaggcagtgaggaccaggcactatttcctccgaggttacttctacccagatgacacctgcctgttcacgccccaaggcagctactgcccctaacccttcccaccagggtagctttgggcactgcagctctggacttttctggcccctcctgagatgacctgatggagctgatgctttctctcctaatccctgggcactaggctcttatcagtgtgcttgggccagctctcctgcctgtgtctagaggaagccagagacagaaataggctaagcctgcagtaggatctcagccacaagggccccgcaggatggagctgggtcaaggaccagggagccctgactcccagaggctgccaccggggagaagcagcggtcctccatccagaacctaagggctgaagcaaaggctgccaggacccttgaagatgcttttggctcacctcatttcaccccacgctctgctggctggcagaggagaaggcagtcgtttcctctctgaagagtatttttttcgattgccctctggttagggtgcacatataaatcagagttaatatatgaacgcgtgtgcatgcacaagtgtgtgtgtgcctgcgtgctgtgcgtggcagggtgtgtgtgtgtgtgtctggctgtgcgttccggagtgtgtgacgatgctgacctagctgtgtggccttgggcttgctgcttcattactcacctggatggggacgagggatgagaagggtgtgggtttggccccatgtcactggccggaaggatgtgtctcagccctgccctgtggggtgcccccgatgggaggctgtcccatctcccagtccccatctctttttccccacactgtccctggccaagccctgcccagagctgaaccctgtagctgcccccttgccctgtgtgggattcgcagtgtctcatttggtgacgtcttactggtgatcatctcctcaccccatctcccaccttgtggaataaatacatgttagcacttcccaga

SEQ ID NO: 6322 - protein, 297 aa, Homo sapiens
MYISPPKDWWDAGDPSLPIRTPAMIGCSFVVNRKFFGEIGLLDPGMDVYGGENIELGIKVWLCGGSMEVLPCSRVAHIERKKKPYNSNIGFYTKRNALRVAEVWMDDYKSHVYIAWNLPLENPGIDIGDVSERRALRKSLKCKNFQWYLDHVYPEMRRYNNTVAYGELRNNKAKDVCLDQGPLENHTAILYPCHGWGPQLARYTKEGFLHLGALGTTTLLPDTRCLVDNSKSRLPQLLDCDKVKSSLYKRWNFIQNGAIMNKGTGRCLEVENRGLAGIDLILRSCTGQRWTIKNSIK

SEQ ID NO: 6323 - DNA, 3186 bp, Homo sapiens
gtctcctctcagctaggactttctgtttgcacagccgaggcctgcagggtacattccagaggtggacttggggctggccttgaacttccagaccctctctcccctctctggccggggctggggaaatgtcagctattctgagggccttggaagctggactcagttattttcggcttatccaaatcccttgggctcattgaaggttatggtgggcggggtaaagggggccttccggctactctttccccggctgaagaagaaaaggctaagggaccccatgagaagtatggctacaattcatacctcagtgaaaaaatttcactggaccgttccattccggattatcgtcccaccaagtgtaaggagctcaagtactccaaggacctgccccagatatccatcatattcatcttcgtgaacgaggccctgtcggtgatcctgcggtccgtgcacagtgccgtcaatcacacgcccacacacctgctgaaggaaatcattctggtggatgacaacagcgacgaagaggagctgaaggtccccctagaggagtatgtccacaaacgctaccccgggctggtgaaggtggtaagaaatcagaagagggaaggcctgatccgcgctcgcattgagggctggaaggtggctaccgggcaggtcactggcttctttgatgcccacgtggaattcaccgctggctgggctgagccggttctatcccgcatccaggaaaaccggaagcgtgtgatcctcccctccattgacaacatcaaacaggacaactttgaggtgcagcggtacgagaactcggcccacgggtacagctgggagctgtggtgcatgtacatcagccccccaaaagactggtgggacgccggagacccttctctccccatcaggaccccagccatgataggctgctcgttcgtggtcaacaggaagttcttcggtgaaattggtcttctggatcctggcatggatgtatacggaggagaaaatattgaactgggaatcaaggtatggctctgtgggggcagcatggaggtccttccttgctcacgggtggcccacattgagcggaagaagaagccatataatagcaacattggcttctacaccaagaggaatgctcttcgcgttgctgaggtctggatggacgattacaagtctcatgtgtacatagcgtggaacctgccgctggagaatccgggaattgacatcggtgatgtctccgaaagaagagcattaaggaaaagtttaaagtgtaagaatttccagtggtacctggaccatgtttacccagaaatgagaagatacaataataccgttgcttacggggagcttcgcaacaacaaggcaaaagacgtctgcttggaccaggggccgctggagaaccacacagcaatattgtatccgtgccatggctggggaccacagcttgcccgctacaccaaggaaggcttcctgcacttgggtgccctggggaccaccacactcctccctgacacccgctgcctggtggacaactccaagagtcggctgccccagctcctggactgcgacaaggtcaagagcagcctgtacaagcgctggaacttcatccagaatggagccatcatgaacaagggcacgggacgctgcctggaggtggagaaccggggcctggctggcatcgacctcatcctccgcagctgcacaggtcagaggtggaccattaagaactccatcaagtagagggagggagctggggcactggagcctggcccccaggacatggctgctccccccaacatctggaccagctgccctggcggagagacagcaaggggccggcaggtgctcgatgggccccccagggcttctccagggcagcacagggaccccggatgaagactctgtcccccctcaggcattcagctgcccacaagtttcctgcaccctggaaaagccccccacccttcctctgggaaactgacagctgtcttccacagcctctgatgtggacctggtactgaggagcaagactgtccagttctcctccacatctcccatcccagaatcaggatctgggactggcagggtcccctcctgtgtctcatctcttgcagcagcagctgctgaactccagccatcaacacggtgggaggcagcgggggcttcagccatgtcctagctccccgccctaaaaggaggcagtgaggaccaggcactatttcctccgaggttacttctacccagatgacacctgcctgttcacgccccaaggcagctactgcccctaacccttcccaccagggtagctttgggcactgcagctctggacttttctggcccctcctgagatgacctgatggagctgatgctttctctcctaatccctgggcactaggctcttatcagtgtgcttgggccagctctcctgcctgtgtctagaggaagccagagacagaaataggctaagcctgcagtaggatctcagccacaagggccccgcaggatggagctgggtcaaggaccagggagccctgactcccagaggctgccaccggggagaagcagcggtcctccatccagaacctaagggctgaagcaaaggctgccaggacccttgaagatgcttttggctcacctcatttcaccccacgctctgctggctggcagaggagaaggcagtcgtttcctctctgaagagtatttttttcgattgccctctggttagggtgcacatataaatcagagttaatatatgaacgcgtgtgcatgcacaagtgtgtgtgtgcctgcgtgctgtgcgtggcagggtgtgtgtgtgtgtgtctggctgtgcgttccggagtgtgtgacgatgctgacctagctgtgtggccttgggcttgctgcttcattactcacctggatggggacgagggatgagaagggtgtgggtttggccccatgtcactggccggaaggatgtgtctcagccctgccctgtggggtgcccccgatgggaggctgtcccatctcccagtccccatctctttttccccacactgtccctggccaagccctgcccagagctgaaccctgtagctgcccccttgccctgtgtgggattcgcagtgtctcatttggtgacgtcttactggtgatcatctcctcaccccatctcccaccttgtggaataaatacatgttagcacttcccaga

SEQ ID NO: 6324 - protein, 297 aa, Homo sapiens; identical to SEQ ID NO: 6322

SEQ ID NO: 6325 - DNA, 1518 bp, Homo sapiens
aataaatcagggaggaaaccgagagggagagcgagagcgcgcgagcgccggcgggctcgccgaggtctgtttccaaagtcgcccttgatggcggcggaggcaaggcggccgcggcgcggagcagccgacgcacgctagtgggtccgcccgccaccgccccttcctcggcgtccgctcccgcccttgccgtcccccgcgcggctccgcgcctcgggccccgggcgcagccagccctccagacgcccgcggtcccggcggcgtgtgctgctcttcctccgcccgcggtttccagcgccgctccttcccccgcttgggcagggagggggcattgatcttcgatcgcgaagatggctgctggctgcctgctggccttgactctgacacttttccaatctttgctcatcggcccctcgtcggaggagccgttcccttcggccgtcactatcaaatcatgggtggataagatgcaagaagaccttgtcacactggcaaaaacagcaagtggagtcaatcagcttgttgatatttatgagaaatatcaagatttgtatactgtggaaccaaataatgcacgccagctggtagaaattgcagccagggatattgagaaacttctgagcaacagatctaaagccctggtgcgcctggcattggaagcggagaaagttcaagcagctcaccagtggagagaagattttgcaagcaatgaagttgtctactacaatgcaaaggatgatctcgatcctgagaaaaatgacagtgagccaggcagccagaggataaaacctgttttcattgaagatgctaattttggacgacaaatatcttatcagcacgcagcagtccatattcctactgacatctatgagggctcaacaattgtgttaaatgaactcaactggacaagtgccttagatgaagttttcaaaaagaatcgcgaggaagacccttcattattgtggcaggtttttggcagtgccactggcctagctcgatattatccagcttcaccatgggttgataatagtagaactccaaataagattgacctttatgatgtacgcagaagaccatggtacatccaaggagctgcatctcctaaagacatgcttattctggtggatgtgagtggaagtgttagtggattgacacttaaactgatccgaacatctgtctccgaaatgttagaaaccctctcagatgatgatttcgtgaatgtagcttcagatagtaaagagatttctccttctcccgaagagattttcaatgcagagtaattaaactattgtgtctctctggaggggaggatgagtgtgggccatcagaagcccctgtataagatcagggacttcctcatcttgggactcctggctggaaacccatctcactacctatgcaggtgacccctggctgtcctcctgtcatcctgtgggaattgaggtttgggcagcttgtgcaaacaaagatgttactctgctcctctgttgctatgagtaataaactctttgtctctgactc

SEQ ID NO: 6326 - protein, 309 aa, Homo sapiens
MAAGCLLALTLTLFQSLLIGPSSEEPFPSAVTIKSWVDKMQEDLVTLAKTASGVNQLVDIYEKYQDLYTVEPNNARQLVEIAARDIEKLLSNRSKALVRLALEAEKVQAAHQWREDFASNEVVYYNAKDDLDPEKNDSEPGSQRIKPVFIEDANFGRQISYQHAAVHIPTDIYEGSTIVLNELNWTSALDEVFKKNREEDPSLLWQVFGSATGLARYYPASPWVDNSRTPNKIDLYDVRRRPWYIQGAASPKDMLILVDVSGSVSGLTLKLIRTSVSEMLETLSDDDFVNVASDSKEISPSPEEIFNAE

SEQ ID NO: 6327 - DNA, 467 bp, Homo sapiens
cgaggaagacccttcattattgtggcaggtttttggcagtgccactggcctagctcgatattatccagcttcaccatgggttgataatagtagaactccaaataagattgacctttatgatgtacgcagaagaccatggtacatccaaggagctgcatctcctaaagacatgcttattctggtggatgtgagtggaagtgttagtggattgacacttaaactgatccgaacatctgtctccgaaatgttagaaaccctctcagatgatgatttcgtgaatgtagcttcatatgcggttcaaggagccaatatatgttggtttatatcaagtaaagagcaacgcgatggaatgatcctgccaacacgttatccctgcatggacagtgttagtaagctcacatctggtttgactcattcttcacaggcaaccctgtctcttagatggactggtagaattgcataggaat

SEQ ID NO: 6328 - protein, 97 aa, Homo sapiens
MLILVDVSGSVSGLTLKLIRTSVSEMLETLSDDDFVNVASYAVQGANICWFISSKEQRDGMILPTRYPCMDSVSKLTSGLTHSSQATLSLRWTGRIA

SEQ ID NO: 6329 - DNA, 5921 bp, Homo sapiens
attaaattaacaccatttgaaagagaacattgttttcatcatgaatgctaataaagatgaaagacttaaagccagaagccaagattttcacctttttcctgctttgatgatgctaagcatgaccatgttgtttcttccagtcactggcactttgaagcaaaatattccaagactcaagctaacctacaaagacagaatgtgcaaatttcatcagagtacttcagccctataacaaaactcacatatatgtgtgtggaactggagcatttcatccaatatgtgggtatattgatcttggagtctacaaggaggatattatattcaaactagacacacataatttggagtctggcagactgaaatgtcctttcgatcctcagcagccttttgcttcagtaatgacagatgagtacctctactctggaacagcttctgatttccttggcaaagatactgcattcactcgatcccttgggcctactcatgaccaccactacatcagaactgacatttcagagcactactggctcaatggagcaaaatttattggaactttcttcataccagacacctacaatccagatgatgataaaatatatttcttctttcgtgaatcatctcaagaaggcagtacctccgataaaaccatcctttctcgagttggaagagtttgtaagaatgatgtaggaggacaacgcagcctgataaacaagtggacgacttttcttaaggccagactgatttgctcaattcctggaagtgatggggcagatacttactttgatgagcttcaagatatttatttactccccacaagagatgaaagaaatcctgtagtatatggagtctttactacaaccagctccatcttcaaaggctctgctgtttgtgtgtatagcatggctgacatcagagcagtttttaatggtccatatgctcataaggaaagtgcagaccatcgttgggtgcagtatgatgggagaattccttatccacggcctggtacatgtccaagcaaaacctatgacccactgattaagtccacccgagattttccagatgatgtcatcagtttcataaagcggcactctgtgatgtataagtccgtatacccagttgcaggaggaccaacgttcaagagaatcaatgtggattacagactgacacagatagtggtggatcatgtcattgcagaagatggccagtacgatgtaatgtttcttggaacagacattggaactgtcctcaaagttgtcagcatttcaaaggaaaagtggaatatggaagaggtagtgctggaggagttgcagatattcaagcactcatcaatcatcttgaacatggaattgtctctgaagcagcaacaattgtacattggttcccgagatggattggttcagctctccttgcacagatgcgacacttatgggaaagcttgcgcagactgttgtcttgccagagacccctactgtgcctgggatggaaatgcatgctctcgatatgctcctacttctaaaaggagagctagacgccaagatgtaaaatatggcgacccaatcacccagtgctgggacatcgaagacagcattagtcatgaaactgctgatgaaaaggtgatttttggcattgaatttaactcaacctttctggaatgtatacctaaatcccaacaagcaactattaaatggtatatccagaggtcaggggatgagcatcgagaggagttgaagcccgatgaaagaatcatcaaaacggaatatgggctactgattcgaagtttgcagaagaaggattctgggatgtattactgcaaagcccaggagcacactttcatccacaccatagtgaagctgactttgaatgtcattgagaatgaacagatggaaaatacccagagggcagagcatgaggaggggaaggtcaaggatctattggctgagtcacggttgagatacaaagactacatccaaatccttagcagcccaaacttcagcctcgaccagtactgcgaacagatgtggcacagggagaagcggagacagagaaacaaggggggcccaaagtggaagcacatgcaggaaatgaagaagaaacgaaatcgaagacatcacagagacctggatgagctccctagagctgtagccacgtagttttctacttaatttaaagaaaagaattccttacctataaaaacattgccttctgttttgtatatcccttatagtaattcataaatgcttcccatggagttttgctaaggcacaagacaataatctgaataagacaatatgtgatgaatataagaaagggcaaaaaattcatttgaaccagttttccaagaacaaatcttgcacaagcaaagtataagaattatcctaaaaatagggggtttacagttgtaaatgttttatgttttgagttttggaatttattgtcatgtaaatagttgagctaagcaagccccgaatttgatagtgtataaggtgctttattccctcgaatgtccattaagcatggaatttaccatgcagttgtgctatgttcttatgaacagatatatcattcctattgagaaccagctaccttgtggtagggaataagaggtcagacacaaattaagacaactcccattatcaacaggaactttctcagtgagccattcactcctggagaatggtataggaatttggagaggtgcattatttctttctggccactggggttaaatttagtgtactacaacattgatttactgaagggcactaatgtttcccccaggatttctattgactagtcaggagtaacaggttcacagagagaagttggtgcttagttatgtgttttttagagtatatactaagctctacagggacagaatgcttaataaatactttaataagatatgggaaaatattttaataaaacaaggaaaacataatgatgtataatgcatcctgatgggaaggcatgcagatgggatttgttagaagacagaaggaaagacagccataaattctggctttggggaaaactcatatccccatgaaaaggaagaacaatcacaaataaagtgagagtaatgtaatggagctcttttcactagggtataagtagctgccaatttgtaattcatctgttaaaaaaaatctagattataacaaactgctagcaaaatctgaggaaacataaattcttctgaagaatcataggaagagtagacattttatttataaccaatgatatttcagtatatattttctctcttttaaaaaatatttatcatactctgtatattatttctttttactgcctttattctctcctgtatattggattttgtgattatatttgagtgaataggagaaaacaatatataacacacagagaattaagaaaatgacatttctggggagtggggatatatatttgttgaataacagaacgagtgtaaaattttaacaacggaaagggttaaattaactctttgacatcttcactcaaccttttctcattgctgagttaatctgttgtaattgtagtattgtttttgtaatttaacaataaataagcctgctacatgtaaaaagaaccaaactcacaatattaacataaacatctttcatattttgttagtactttcaaatgttttcaatttgactttccctctgaatatgcatggtgtgtttcctgtctgtttaagcagaactcacctttccttcttgtaacacagaacccttagccttcttctgttttgccttttcacgccctttatagtgtgaaatgaaaaattagtcacttcctcacatggaaggcagcttttcagaaaataacagacattgctcgtttctcatgcattctacatatcttgaaagaaaagtctgtgagaaaaccctgtgattagagggcaacttaatgcaagatctgtggctctatgttgagagcattctctctctgttatttttattttatttgcattgcttacctatctcaaagtagtcaaactgatatatgagattgagtactcccttttgatattatactgatgaatatttgtaggtgtttcactataaggaacagctaaggaataattttaataaaagtgaaccagaacaaatcactcatttaaaaagtaattcagaagaacagtgtggcatgatcagacttctaattgaatagcgtaacaacagtgtttgtaattatagatttgcttggacaaaatattccaggaactcatagcgagctcaaagcaattaagtgggaacatttttaatttaaaaaaaatttccaaatatttgtgggtccgacagtaatgatcaaaatatgaatgactttggaaaatttacatgaagctcaagtgttaggattgacttatgaaaataaattttatttctatccaaatttgaatgtccaaaccattttttagttacttctttctaatcctagttattcagacaaaatttggaaacttattttatgaccacatctaatattctggctgctttggatacaatactcttgatttatgataattagttaaaatatattaaaaatattattagtaaaataaaatttcacacaataaaaaacaacatagagtacacatatttatatgtatttttaaagataaagaatatctaaaatgtgtttttttcttagctttttagttgtctagaacatttagagaaagagtatgaatatattaaatccacaaacacactatatacttcctcaccactgactattttatcaaatttgccttaaaataatgaaaaagaaaagtatagttaatggtttcaaatatgctaagaaattgactctgcggaggggatcttaaaatgcctgtttactcatgttttcgtatttttcttgtctctaatacttttgtctttgtctgccttgtgtgttcttttctgaatttcatttcagcaatttatgctgctaaatagaatcccgcatgtctgcattcatttacattcaacttattgtaaattttgagattttatttagaaatgaattgtctaattaatttatgtagagtccttttttccaaagagctcaaaacactacatccacattattgacttttggaaaccaaccaaattacttaagaaatggctacaaaatggtcttactcttgaattttgcttttggttcatattttggttcttcatattctagtatgttttgttcctgctgaattttacagactcagctaaacaataagttattagtagtcacttgttttcattatcataattgaatttccaagaacaacttgatatcattcagctgtccaaaaaataataagagcattcattaaatactgattttcttaaacttaaatgttgtatttcatatttatttatataatacaaatggaaatcaaaactgaaatagcctccctttagaatgtcacatttttcttagaaaacattttggaattggttaaccttattgggaatggataatttagaaacaaaccaaaaaaaaaaaaagatatttgaagtgtttttataggagatgtatttttatcatagtaaatgatcacaattttaaataattcatcttacaagtcaggtaaaataaaatcgattcccagattccatacattaggagtgcaaagacaggatcatacacatgacttatacctctcatttaaatattttatagtataaagtatttatggaaagggtttgagatagatgatttttgggaaagggcaaaatgtgtcagatgccctagttaatcatgtaatttaattctggtattgtgagtggttagcaatcaattttgaatttataattctgctattttaaaagaaatgtagtcttgtagtatgaaataattaaaaattgttaaatgtatattttggttgtattataataaaatgcaaacatgactgttctatgattataaaaact

SEQ ID NO: 6330 - protein, 583 aa, Homo sapiens
MTDEYLYSGTASDFLGKDTAFTRSLGPTHDHHYIRTDISEHYWLNGAKFIGTFFIPDTYNPDDDKIYFFFRESSQEGSTSDKTILSRVGRVCKNDVGGQRSLINKWTTFLKARLICSIPGSDGADTYFDELQDIYLLPTRDERNPVVYGVFTTTSSIFKGSAVCVYSMADIRAVFNGPYAHKESADHRWVQYDGRIPYPRPGTCPSKTYDPLIKSTRDFPDDVISFIKRHSVMYKSVYPVAGGPTFKRINVDYRLTQIVVDHVIAEDGQYDVMFLGTDIGTVLKVVSISKEKWNMEEVVLEELQIFKHSSIILNMELSLKQQQLYIGSRDGLVQLSLHRCDTYGKACADCCLARDPYCAWDGNACSRYAPTSKRRARRQDVKYGDPITQCWDIEDSISHETADEKVIFGIEFNSTFLECIPKSQQATIKWYIQRSGDEHREELKPDERIIKTEYGLLIRSLQKKDSGMYYCKAQEHTFIHTIVKLTLNVIENEQMENTQRAEHEEGKVKDLLAESRLRYKDYIQILSSPNFSLDQYCEQMWHREKRRQRNKGGPKWKHMQEMKKKRNRRHHRDLDELPRAVAT

SEQ ID NO: 6331 - DNA, 3177 bp, Homo sapiens
ctgggctgaggcggaggcaggggagttgcagcgcgcgaggctccgtgagtgtgtctcctgcgcgctgagaggcggggggaggcggaggaccaggaggaggaggaggaggaggaggagggggagaatgcccggagccgccgccgctgccgccgccgccgccgccgcgatgctcccggctcaggaggctgccaagctgtaccacaccaactatgtgcggaactcgcgggccatcggcgtgctgtgggccatcttcaccatctgctttgccatcgtcaacgtggtgtgcttcatccagccctactggataggcgacggcgtggacaccccgcaagccggctatttcgggctcttccactactgcatcggcaacggcttctcccgggagctgacctgcaggggcagcttcacggacttctccacgctgccctcgggcgccttcaaagccgcctccttctttatcggcctctccatgatgctcatcattgcctgcatcatttgctttaccctcttcttcttctgcaacacggccactgtgtacaagatatgtgcctggatgcagctcacctccgctgcctgccttgtgcttggctgtatgattttccctgatggctgggactcagatgaagtaaaacggatgtgtggagaaaagacagacaagtacactcttggggcttgctcagtccgctgggcatacatcctggctattattggaattttggatgccctgatcctctcatttctagcatttgtgcttggtaatcgacaagacagcttgatggcagaggaactgaaggcagaaaacaaagttctgctaagccaatattctctagaatgagcacaaaacaaatcgaataacagctaaacaaatcgaataacagctaaacgaatcgaataacagcttttgtacatcaacatcaagaaggaatacgcctgagagagatcagagtatatagatgaatatgaacaagaatggaacattcacttgtcaacgcactttctaaatctagatcagcagagatgggagtgattttctggaaagagatgtgatcatggattaaacaccagctcattggaaactcattggatgagatcagaaaacgttcatgaaaaatcatattcaggaaataaggaagaggaatataaatgctctagagttaacatgtaaaatatatacgtactgaggtttgtaaactgtcctttttaaatcaaactgaaaacaaaaagctttaacctttcaacagaatttttaaaaaggcagttagttctaaattattcctatctcaatagccaagaggctgatcaagcgtcatttattgaggaagcatcttagaaaatgcctctgaatgttttcataggagccgtgacctttggttcttcatctctaccattcatttacttcactgtgtaattagttacaaccactcagttattaagagacgtaacgcttcaaactttttaccaagtctgtgttctgtttaatctgtccatacaagttattactgagaaagtgtttatgccatatactattactccatcaagctgtatattacaggaagtacatctttacatcataggttcccaagcaacatagatttccctatctttcaggaaacagcatcaaggaactctgaaaaatatagaaaaagttcattttcaccttggaagctcacgtgtaatattataggctactatcaaataaacactttttttctaattctccctagtatatgcataggaatttaatatactttataaataagtatctaaaatgtctcctacttttttcctatttctttgccatacatgttatcagaaatccatgtcttctatttcccttactgatgggcactcatttttatttttttaaaaatcattccattaaacatatttctaaataatagtaagtggtactaacaaaataaataataatttaatagccttagaaataaatgactgtatacttatacaggttgaaaaaaactcggtaggaataagttacctttttgtttactaatgttggtttcaaaaatactcagattcattttagttggctgacatctggaagtagttaacaactaaccagtggacttcaacaatcatttgctcccaggcttcccccatcatcaccctcaccacatatcctgctaatatccaacaacaaacaaatatttaatattgaaatagcccattgcctgagaatgaacacaagctaaaatacatgcaagggtacttaatggaagccaaaccatgttctatacctaaggagaaaacatggacatgtagaatgcttttattcatgtattcaaaatcagaacaaatcagtgtatatcactagaacatcagatggaggataacacaagaagtgatacagatcagggttcacttctcttaccctctctctgttaggaccacattcctattttagccaaatgtttctggtacgggccatcttttcaccataaatggcattatgtttcaaatggctaaaagcatattatgggtatgctcaaaggagtaaaacccaattcacagagatgtggcttttctaaagaaccaaattaagggaatacttagtatctacaactaaagtattagtcattctgaggattatttgttgctttaagtattagctccctactacatccataacaccctacttactaaatttaattacacacaacttttcaagaattcgtattttatttgaagggaggtacctgtctactttatctacaataaaaacaaagggtattggctttctctaatccatgcaaactacaaattccatcgggagtcctacatcactaacagtggtatgaacaaaactaagaaagtacttcctatccacatgtgaatgttttaaaaaagtttttgccataaaacctaagtgtaatttagcataccacagtgctctgaagatgggtcattgacgatgtaccatttgtatataggtaatacacatgtaaatcactaattgttaattaaatataagaagtaggtttttatctttttaaaaaaaaaacaaaaaaggtgactccctttctcattctgttctgttgtattgcgtccaaaagttgtgtgtaatttttttaaggtccaagaaatgtaaagaaatttgttggaatacctgaatttctgtaaaaaaataaaaataaaaataagattttgttacttaaa

SEQ ID NO: 6332 - protein, 236 aa, Homo sapiens; identical to SEQ ID NO: 886

SEQ ID NO: 6333 - DNA, 732 bp, Homo sapiens
gaatgcccggagccgccgccgctgccgccgccgccgccgccgcgatgctcccggctcaggaggctgccaagctgtaccacaccaactatgtgcggaactcgcgggccatcggcgtgctgtgggccatcttcaccatctgctttgccatcgtcaacgtggtgtgcttcatccagccctactggataggcgacggcgtggacaccccgcaagccggctatttcgggctcttccactactgcatcggcaacggcttctcccgggagctgacctgcaggggcagcttcacggacttctccacgctgccctcgggcgccttcaaagccgcctccttctttatcggcctctccatgatgctcatcattgcctgcatcatttgctttaccctcttcttcttctgcaacacggccactgtgtacaagatatgtgcctggatgcagctcacctccgctgcctgccttgtgcttggctgtatgattttccctgatggctgggactcagatgaagtaaaacggatgtgtggagaaaagacagacaagtacactcttggggcttgctcagtccgctgggcatacatcctggctattattggaattttggatgccctgatcctctcatttctagcatttgtgcttggtaatcgacaagacagcttgatggcagaggaactgaaggcagaaaacaaagatgatggaaatgcttaaggcaaactaaggtagtgtgagaccacaccat

SEQ ID NO: 6334 - protein, 232 aa, Homo sapiens
MPGAAAAAAAAAAAMLPAQEAAKLYHTNYVRNSRAIGVLWAIFTICFAIVNVVCFIQPYWIGDGVDTPQAGYFGLFHYCIGNGFSRELTCRGSFTDFSTLPSGAFKAASFFIGLSMMLIIACIICFTLFFFCNTATVYKICAWMQLTSAACLVLGCMIFPDGWDSDEVKRMCGEKTDKYTLGACSVRWAYILAIIGILDALILSFLAFVLGNRQDSLMAEELKAENKDDGNA

SEQ ID NO: 6335 - DNA, 1208 bp, Homo sapiens
agagaggatctaggaactggagctgctgcctctgtctgctaagatgtgaagtccaagactgaaagtaacatagcagaaggagaaccaaaagatatgttgagtcttgatgctatttgttgaaccagtcctgaatccagctgtgtcggagtcagcgcagcttttgaagctggagagcatcatattttagaaagatcaagcaatgtggatgaggacacattaaaaagagaagaccgagaggaggggacaccactcaggcttataacctccagctcacatttcagcaccaaaggaccaaagcctagacctgagatctggcacttgcaaaaagaaagatcacctggaagaacaaaatagaagactcctgctcccaataggcttgggtcaggaagaaggctgttggcataattgtggagtaggaagatggaaaacaactcctagagatcccaacagctgaacgcgtgcttgggcagtggctgcgggtgaagtcatgggaaggcaagtcatgaagggcattaatcaaggtctgttgtggggaaagtcagatgatgtgagtccttgttcacacagtaagtgcccagaaaaccttggtgcttttcctcttcccttccctgaagctgaacttctgcggaaaaatccaagagggtgaaggtacactcgagcgtggtcattgaggacaagtcgacgagagatcccgagtacgtctacagtcagccttacgagtggactgatcaagttgaaagcaacagaacaagcatctataagaattgattatatgtcccagcactttggaaggctgaggcaagtggatcccttgggcctaggacttcgcgagaccagttgggcaacatgaacaagatggaagaaactacggtcacatatgcaaatggagaagatgatgaacacagaaaaattatgcaaagataatccctaaaccttctttctcatcaaaagttatagcaaggtggtttaatatatcactgacggaacacgatgctttgtttaatgaagactcagacggaaaggatcagacatcaacctataaatgcatcaaccagaaggaaagaccaattttgaaaactgttgagcattattctatacctctaagctgttcttttctgaaccatgaatcgggagaattattgtcactcatacatgagtatgagttgtaattctcaattcccaagtaaaaatcttcctgcttttgttat

SEQ ID NO: 6336 - protein, 52 aa, Homo sapiens
MGRQVMKGINQGLLWGKSDDVSPCSHSKCPENLGAFPLPFPEAELLRKNPRG

SEQ ID NO: 6337 - DNA, 827 bp, Homo sapiens
agagaggatctaggaactggagctgctgcctctgtctgctaagatgtgaagtccaagactgaaagtaacatagcagaaggagaaccaaaagatatgttgagtcttgatgctatttgttgaaccagtcctgaatccagctgtgtcggagtcagcgcagcttttgaagctggagagcatcatattttagaaagatcaagcaatgtggatgaggacacattaaaaagagaagaccgagaggaggggacaccactcaggcttataacctccagctcacatttcagcaccaaaggaccaaagcctagacctgagatctggcacttgcaaaaagaaagatcacctggaagaacaaaatagaagactcctgctcccaataggcttgggtcaggaagaaggctgttggcataattgtggagtaggaagatggaaaacaactcctagagatcccaacagctgaacgcgtgcttgggcagtggctgcgggtgaagtcatgggaaggcaagtcatgaagggcattaatcaagagggaaatctggtttctggattaactactgaatagcaactgcagtcaacagctgatggaatcttgcaggaagactaagctggtgttcagagaagttttgttcaggcatcccattttatttcactcatactatccaatggctgtgtttgcatgtggatatgaaagtatctgaatattctgattaacatttgtatgaaggatttctgtctactaaagagtgcaacagaatagaccatctggagagagggctgtttcattccgatggaaggtggcaacaaagttgtcatctaaaaggaggatgctggga

SEQ ID NO: 6338 - protein, 38 aa, Homo sapiens
MESCRKTKLVFREVLFRHPILFHSYYPMAVFACGYESI

SEQ ID NO: 6339 - DNA, 802 bp, Homo sapiens
ttaaaactagagaggatctaggaactggagctgctgcctctgtctgctaagatgtgaagtccaagactgaaagtaacatagcagaaggagaaccaaaagatatgttgagtcttgatgctatttgttgaaccagtcctgaatccagctgtgtcggagtcagcgcagcttttgaagctggagagcatcatattttagaaagatcaagcaatgtggatgaggacacattaaaaagagaagaccgagaggaggggacaccactcaggcttataacctccagctcacatttcagcaccaaaggaccaaagcctagacctgagatctggcacttgcaaaaagaaagatcacctggaagaacaaaatagaagactcctgctcccaataggcttgggtcaggaagaaggctgttggcataattgtggagtaggaagatggaaaacaactcctagagatcccaacagctgaacgcgtgcttgggcagtggctgcgggtgaagtcatgggaaggcaagtcatgaagggcattaatcaaggttattttttccacagatgaatttctaatcctaaataatcatttacatgaattcagatttttttgatccagggaattataccggtggcactagagatgtaaatgagatctgttagtgagcagtgagaatgcatggaaagaaaaatctgacactagtgtggagaatgaacttcttggacgagcaaacagagaccggaagtagagcagtgaacgacagtcaactgcacctatggagatggctggcaaagctggagaagtggctgaagtccttggg

SEQ ID NO: 6340 - protein, 47 aa, Homo sapiens
MHGKKNLTLVWRMNFLDEQTETGSRAVNDSQLHLWRWLAKLEKWLKS

SEQ ID NO: 6341 - DNA, 965 bp, Homo sapiens
agagaggatctaggaactggagctgctgcctctgtctgctaagatgtgaagtccaagactgaaagtaacatagcagaaggagaaccaaaagatatgttgagtcttgatgctatttgttgaaccagtcctgaatccagctgtgtcggagtcagcgcagcttttgaagctggagagcatcatattttagaaagatcaagcaatgtggatgaggacacattaaaaagagaagaccgagaggaggggacaccactcaggcttataacctccagctcacatttcagcaccaaaggaccaaagcctagacctgagatctggcacttgcaaaaagaaagatcacctggaagaacaaaatagaagactcctgctcccaataggcttgggtcaggaagaaggctgttggcataattgtggagtaggaagatggaaaacaactcctagagatcccaacagctgaacgcgtgcttgggcagtggctgcgggtgaagtcatgggaaggcaagtcatgaagggcattaatcaaggatatgttctgggagtaactcccctgctttccctggatgtgtgcgagaaagcataggcatccactttctgaccaacaggagacccagtctcaggatggagcagacaccatgcatggtagagcagagagacagatacaacctaggtccttgatgaaatgattggccactggatcagccacagttaaagactgcctacctttggacttctggttatcttaggccaaaaatgtcctttttgtttaaggcactttgagccgggttttctaagacctagcagtctcaaccatccaaactaataagctgaattaactagatttcctgtcatgtccttcctgcctgattggtagcccttgactccaatttggcctcattttccgtaccttactggctgccttttcctctactcataggtcacttggaaataaaatatagatttacttcaaa

SEQ ID NO: 6342 - protein, 40 aa, Homo sapiens
MCARKHRHPLSDQQETQSQDGADTMHGRAERQIQPRSLMK

SEQ ID NO: 6343 - DNA, 1038 bp, Homo sapiens
tgacttaaaactagagaggatctaggaactggagctgctgcctctgtctgctaagatgtgaagtccaagactgaaagtaacatagcagaaggagaaccaaaagatatgttgagtcttgatgctatttgttgaaccagtcctgaatccagctgtgtcggagtcagcgcagcttttgaagctggagagcatcatattttagaaagatcaagcaatgtggatgaggacacattaaaaagagaagaccgagaggaggggacaccactcaggcttataacctccagctcacatttcagcaccaaaggaccaaagcctagacctgagatctggcacttgcaaaaagaaagatcacctggaagaacaaaatagaagactcctgctcccaataggcttgggtcaggaagaaggctgttggcataattgtggagtaggaagatggaaaacaactcctagagatcccaacagctgaacgcgtgcttgggcagtggctgcgggtgaagtcatgggaaggcaagtcatgaagggcattaatcaaggttattttttccacagatgaatttctaatcctaaataatcatttacatgaattcagatttttttgatccaggatatgttctgggagtaactcccctgctttccctggatgtgtgcgagaaagcataggcatccactttctgaccaacaggagacccagtctcaggatggagcagacaccatgcatggtagagcagagagacagatacaacctaggtccttgatgaaatgattggccactggatcagccacagttaaagactgcctacctttggacttctggttatcttaggccaaaaatgtcctttttgtttaaggcactttgagccgggttttctaagacctagcagtctcaaccatccaaactaataagctgaattaactagatttcctgtcatgtccttcctgcctgattggtagcccttgactccaatttggcctcattttccgtaccttactggctgccttttcctctactcataggtcacttggaaataaaatatagat

SEQ ID NO: 6344 - protein, 40 aa, Homo sapiens; identical to SEQ ID NO: 6342

SEQ ID NO: 6345 - DNA, 595 bp, Homo sapiens
agattaggaagaggcttctgggacaagctttggagtttcaatatccctttattcacagggagtcagcgcagcttttgaagctggagagcatcatattttagaaagatcaagcaatgtggatgaggacacattaaaaagagaagaccgagaggaggggacaccactcaggcttataacctccagctcacatttcagcaccaaaggaccaaagcctagacctgagatctggcacttgcaaaaagaaagatcacctggaagaacaaaatagaagactcctgctcccaataggcttgggtcaggaagaaggctgttggcataattgtggagtaggaagatggaaaacaactcctagagatcccaacagctgaacgcgtgcttgggcagtggctgcgggtgaagtcatgggaaggcaagtcatgaagggcattaatcaaggatatgttctgggagtaactcccctgctttccctggatgtgtgcgagaaagcataggcatccactttctgaccaacaggagacccagtctcaggatggagcagacaccatgcatggtagagcagagagacagatacaacctaggtccttgatgaaatgat

SEQ ID NO: 6346 - protein, 40 aa, Homo sapiens; identical to SEQ ID NO: 6342

SEQ ID NO: 6347 - DNA, 1309 bp, Homo sapiens
ggaaggagtgagcatggtagaaagatgtggctacaaagaggaacacacatgtggttcttgccctttaggagtttaattcaagtatgggggagtcagcgcagcttttgaagctggagagcatcatattttagaaagatcaagcaatgtggatgaggacacattaaaaagagaagaccgagaggaggggacaccactcaggcttataacctccagctcacatttcagcaccaaaggaccaaagcctagacctgagatctggcacttgcaaaaagaaagatcacctggaagaacaaaatagaagactcctgctcccaataggcttgggtcaggaagaaggctgttggcataattgtggagtaggaagatggaaaacaactcctagagatcccaacagctgaacgcgtgcttgggcagtggctgcgggtgaagtcatgggaaggcaagtcatgaagggcattaatcaaggtaaaagcaaaaggaaaatgaggttcttcagggcacagtgtgtgggaagcaacagcatgatggaatcattaggagagatgcccatgactcctgcgcccagcaggagttgtttctgcaggggtccctgcttccatctcctaagttgcaggcagagagggcagaagccaggatcatcaatacccaagagggagcatcgaagagtgcatgcttcctctactatgtcgtgatatagatggaggccaggatttgggagctttggaacacatctctcccaggcctgattgttaggagaggacttaggcaaggtgtgggcaatgctggtgcttcacctttccttgttgaccagacagacccagaagggtcatttgtcaaaacaaagaaaatctcttccaggggtgaggcaggtgtggctgcctgtatgtgaatgtgctgcacacctttcccatcagcaggtgtctgagaccctactctcctcctgactttgttggcccgagcatcagcctgtgaggtccagcacccagagcccaaatcttctggctcctaggctggcacacaacctaacaacaattcctgtgccttcatattttcatctctgcaaggaggatagtagaaatagctctcaagtagggaatgatgactgcatttgagaacagggcaaaaataaaatctgaaaattgaacatcttgtcactaggcagttgtaacacattttgaagattatgagctaatcaaaattacacaggtattctgctctggaaatgctcaacaaccggacaggatgtttttgaatgcggtaataaaaattatctctaggagcaaaacctactgaatcttaaacattcccg

SEQ ID NO: 6348 - protein, 86 aa, Homo sapiens
MGRQVMKGINQGKSKRKMRFFRAQCVGSNSMMESLGEMPMTPAPSRSCFCRGPCFHLLSCRQRGQKPGSSIPKREHRRVHASSTMS

SEQ ID NO: 6349 - DNA, 1373 bp, Homo sapiens
ttaaaactagagaggatctaggaactggagctgctgcctctgtctgctaagatgtgaagtccaagactgaaagtaacatagcagaaggagaaccaaaagatatgttgagtcttgatgctatttgttgaaccagtcctgaatccagctgtgtcggagtcagcgcagcttttgaagctggagagcatcatattttagaaagatcaagcaatgtggatgaggacacattaaaaagagaagaccgagaggaggggacaccactcaggcttataacctccagctcacatttcagcaccaaaggaccaaagcctagacctgagatctggcacttgcaaaaagaaagatcacctggaagaacaaaatagaagactcctgctcccaataggcttgggtcaggaagaaggctgttggcataattgtggagtaggaagatggaaaacaactcctagagatcccaacagctgaacgcgtgcttgggcagtggctgcgggtgaagtcatgggaaggcaagtcatgaagggcattaatcaaggtaaaagcaaaaggaaaatgaggttcttcagggcacagtgtgtgggaagcaacagcatgatggaatcattaggagagatgcccatgactcctgcgcccagcaggagttgtttctgcaggggtccctgcttccatctcctaagttgcaggcagagagggcagaagccaggatcatcaatacccaagagggagcatcgaagagtgcatgcttcctctactatgtcgtgatatagatggaggccaggatttgggagctttggaacacatctctcccaggcctgattgttaggagaggacttaggcaaggtgtgggcaatgctggtgcttcacctttccttgttgaccagacagacccagaagggtcatttgtcaaaacaaagaaaatctcttccaggggtgaggcaggtgtggctgcctgtatgtgaatgtgctgcacacctttcccatcagcaggtgtctgagaccctactctcctcctgactttgttggcccgagcatcagcctgtgaggtccagcacccagagcccaaatcttctggctcctaggctggcacacaacctaacaacaattcctgtgccttcatattttcatctctgcaaggaggatagtagaaatagctctcaagtagggaatgatgactgcatttgagaacagggcaaaaataaaatctgaaaattgaacatcttgtcactaggcagttgtaacacattttgaagattatgagctaatcaaaattacacaggtattctgctctggaaatgctcaacaaccggacaggatgtttttgaatgcggtaataaaaattatctctaggagcaaaacctactgaatcttaaacattcccg

SEQ ID NO: 6350 - protein, 86 aa, Homo sapiens; identical to SEQ ID NO: 6348

SEQ ID NO: 6351 - DNA, 3433 bp, Homo sapiens
gccgcggctggagcgggaggagcaggagatgctgccagccctcccggggccgcgctcgctcagccgccgccaccacacggagcagacgcgcgccgggagccgcgggccgggccagccgggccgccggggcccagtgcgccgcgctcgcagccggtagcgcgccagcgccgtaggcgctcgctcggcagccgcggggccctaggccgtgccggggagggggcgagggcggcgcccaggcgcctgccgccccggaggcaggatgagcatcgagatcccggcgggactgacggagctgctgcagggcttcacggtggaggtgctgaggcaccagcccgcggacctgctggagttcgcgctgcagcacttcacccgcctgcagcaggagaacgagcgcaaaggcaccgcgcgcttcggccatgagggcaggacctggggggacctgggcgccgctgccgggggcggcacccccagcaagggggtcaacttcgccgaggagcccatgcagtccgactccgaggacggggaggaggaggaggcggcgcccgcggacgcaggggcgttcaatgctccagtaataaaccgattcacaaggcgtgcctcagtatgtgcagaagcttataatcctgatgaagaagaagatgatgcagagtccaggattatacatccaaaaactgatgatcaaagaaataggttgcaagaggcttgcaaagacatcctgctgtttaagaatctggatccggagcagatgtctcaagtattagatgccatgtttgaaaaattggtcaaagatggggagcatgtaattgatcaaggtgacgatggtgacaacttttatgtaattgatagaggcacatttgatatttatgtgaaatgtgatggtgttggaagatgtgttggtaactatgataatcgtgggagtttcggcgaactggccttaatgtacaatacacccagagcagctacaatcactgctacctctcctggtgctctgtggggtttggacagggtaaccttcaggagaataattgtgaaaaacaatgccaaaaagagaaaaatgtatgaaagctttattgagtcactgccattccttaaatctttggagttttctgaacgcctgaaagtagtagatgtgataggcaccaaagtatacaacgatggagaacaaatcattgctcagggagattcggctgattcttttttcattgtagaatctggagaagtgaaaattactatgaaaagaaagggtaaatcagaagtggaagagaatggtgcagtagaaatcgctcgatgctcgcggggacagtactttggagagcttgccctggtaactaacaaacctcgagcagcttctgcccacgccattgggactgtcaaatgtttagcaatggatgtgcaagcatttgaaaggcttctgggaccttgcatggaaattatgaaaaggaacatcgctacctatgaagaacagttagttgccctgtttggaacgaacatggatattgttgaacccactgcatgaagcaaaagtatggagcaagacctgtagtgacaaaattacacagtagtggttagtccactgagaatgtgtttgtgtagatgccaagcattttctgtgatttcaggttttttcctttttttacatttacaacgtatcaataaacagtagtgatttaatagtcaataggctttaacatcactttctaaagagtagttcataaaaaaatcaacatactgataaaatgactttgtactccacaaaattatgactgaaaggtttattaaaatgattgtaatatatagaaagtatctgtgtttaagaagataattaaaggatgttatcataggctatatgtgttttacttattcagactgataatcatattagtgactatccccatgtaagagggcacttggcaattaaacatgctacacagcatggcatcacttttttttataactcattaaacacagtaaaattttaatcatttttgttttaaagttttctagcttgataagttatgtgctggccttggcctattggtgaaatggtataaaatatcatatgcagttttaaaactttttatatttttgcaataaagtacattttgactttgttggcataatgtcagtaacatacatattccagtggttttatggacaggcaatttagtcattatgataataaggaaaacagtgttttagatgagagatcattaatgcatttttccctcatcaagcatatatctgcttttttttattttgcaattctctgtattctatgtctttaaaaatttgatcttgacatttaatgtcacaaagttttgtttttttaaaaagtgatttaaacttaagatccgacattttttgtattctttaagattttacacctaaaaaatctctcctatcccaaaaataatgtgggatccttatcagcatgcccacagtttatttctttgttcttcactaggcctgcataatacagtcctatgtagacatctgttcccttgggtttccgttctttcttaggatggttgccaacccacaatctcattgatcagcagccaatatgggtttgtttggtttttttaattcttaaaaacatcctctagaggaatagaaacaaatttttatgagcataaccctatataaagacaaaatgaatttctgaccttaccatatataccattaggccttgccattgctttaatgtagactcatagttgaaattagtgcagaaagaactcagatgtactagattttcattgttcattgatatgctcagtatgctgccacataagatgaatttaattatattcaaccaaagcaatatactcttacatgatttctaggccccatgacccagtgtctagagacattaattctaaccagttgtttgcttttaaatgagtgatttcattttgggaaacaggtttcaaatgaatatatatacatgggtaaaattactctgtgctagtgtagtcttactagagaatgtttatggtcccacttgtatatgaaaatgtggttagaatgttaattggataatgtatatataagaagttaaagtatgtaaagtataacttcagccacatttttagaacactgtttaacatttttgcaaaaccttcttgtaggaaaagagagctctctacatgaagatgacttgttttatatttcagattttattttaaaagccatgtctgttaaacaagaaaaaacacaaaagaactccagattcctggttcatcattctgtattcttactcactttttcaagttatctattttgttgcataaactaattgttaactattcatggaacagcaaacgcctgtttaataaagaactttgaccaaggctataaatgccacgtacattattttcagtattgttggttatatttaaattttccttacaataaagcacacttttataat

SEQ ID NO: 6352 - protein, 418 aa, Homo sapiens; identical to SEQ ID NO: 888

SEQ ID NO: 6353 - DNA, 3744 bp, Homo sapiens
gccgcggctggagcgggaggagcaggagatgctgccagccctcccggggccgcgctcgctcagccgccgccaccacacggagcagacgcgcgccgggagccgcgggccgggccagccgggccgccggggcccagtgcgccgcgctcgcagccggtagcgcgccagcgccgtaggcgctcgctcggcagccgcggggccctaggccgtgccggggagggggcgagggcggcgcccaggcgcctgccgccccggaggcaggatgagcatcgagatcccggcgggactgacggagctgctgcagggcttcacggtggaggtgctgaggcaccagcccgcggacctgctggagttcgcgctgcagcacttcacccgcctgcagcaggagaacgagcgcaaaggcaccgcgcgcttcggccatgagggcaggacctggggggacctgggcgccgctgccgggggcggcacccccagcaagggggtcaacttcgccgaggagcccatgcagtccgactccgaggacggggaggaggaggaggcggcgcccgcggacgcaggggcgttcaatgctccagtaataaaccgattcacaaggcgtgcctcagtatgtgcagaagcttataatcctgatgaagaagaagatgatgcagagtccaggattatacatccaaaaactgatgatcaaagaaataggttgcaagaggcttgcaaagacatcctgctgtttaagaatctggatccggagcagatgtctcaagtattagatgccatgtttgaaaaattggtcaaagatggggagcatgtaattgatcaaggtgacgatggtgacaacttttatgtaattgatagaggcacatttgatatttatgtgaaatgtgatggtgttggaagatgtgttggtaactatgataatcgtgggagtttcggcgaactggccttaatgtacaatacacccagagcagctacaatcactgctacctctcctggtgctctgtggggtttggacagggtaaccttcaggagaataattgtgaaaaacaatgccaaaaagagaaaaatgtatgaaagctttattgagtcactgccattccttaaatctttggagttttctgaacgcctgaaagtagtagatgtgataggcaccaaagtatacaacgatggagaacaaatcattgctcagggagattcggctgattcttttttcattgtagaatctggagaagtgaaaattactatgaaaagaaagggtaaatcagaagtggaagagaatggtgcagtagaaatcgctcgatgctcgcggggacagtactttggagagcttgccctggtaactaacaaacctcgagcagcttctgcccacgccattgggactgtcaaatgtttagcaatggatgtgcaagcatttgaaaggcttctgggaccttgcatggaaattatgaaaaggaacatcgctacctatgaagaacagttagttgccctgtttggaacgaacatggatattgttgaacccactgcatgaagcaaaagtatggagcaagacctgtagtgacaaaattacacagtagtggttagtccactgagaatgtgtttgtgtagatgccaagcattttctgtgatttcaggttttttcctttttttacatttacaacgtatcaataaacagtagtgatttaatagtcaataggctttaacatcactttctaaagagtagttcataaaaaaatcaacatactgataaaatgactttgtactccacaaaattatgactgaaaggtttattaaaatgattgtaatatatagaaagtatctgtgtttaagaagataattaaaggatgttatcataggctatatgtgttttacttattcagactgataatcatattagtgactatccccatgtaagagggcacttggcaattaaacatgctacacagcatggcatcacttttttttataactcattaaacacagtaaaattttaatcatttttgttttaaagttttctagcttgataagttatgtgctggccttggcctattggtgaaatggtataaaatatcatatgcagttttaaaactttttatatttttgcaataaagtacattttgactttgttggcataatgtcagtaacatacatattccagtggttttatggacaggcaatttagtcattatgataataaggaaaacagtgttttagatgagagatcattaatgcatttttccctcatcaagcatatatctgcttttttttattttgcaattctctgtattctatgtctttaaaaatttgatcttgacatttaatgtcacaaagttttgtttttttaaaaagtgatttaaacttaagatccgacattttttgtattctttaagattttacacctaaaaaatctctcctatcccaaaaataatgtgggatccttatcagcatgcccacagtttatttctttgttcttcactaggcctgcataatacagtcctatgtagacatctgttcccttgggtttccgttctttcttaggatggttgccaacccacaatctcattgatcagcagccaatatgggtttgtttggtttttttaattcttaaaaacatcctctagaggaatagaaacaaatttttatgagcataaccctatataaagacaaaatgaatttctgaccttaccatatataccattaggccttgccattgctttaatgtagactcatagttgaaattagtgcagaaagaactcagatgtactagattttcattgttcattgatatgctcagtatgctgccacataagatgaatttaattatattcaaccaaagcaatatactcttacatgatttctaggccccatgacccagtgtctagagacattaattctaaccagttgtttgcttttaaatgagtgatttcattttgggaaacaggtttcaaatgaatatatatacatgggtaaaattactctgtgctagtgtagtcttactagagaatgtttatggtcccacttgtatatgaaaatgtggttagaatgttaattggataatgtatatataagaagttaaagtatgtaaagtataacttcagccacatttttagaacactgtttaacatttttgcaaaaccttcttgtaggaaaagagagctctctacatgaagatgacttgttttatatttcagattttattttaaaagccatgtctgttaaacaagaaaaaacacaaaagaactccagattcctggttcatcattctgtattcttactcactttttcaagttatctattttgttgcataaactaattgttaactattcatggaacagcaaacgcctgtttaataaagaactttgaccaaggctataaatgccacgtacattattttcagtattgttggttatatttaaattttccttacaataaagcacacttttataataaaatacatgaattattgtttttcatacttttttgcttgtttctttaaagttttctgacgtgcataatgcataattcattgaaaagcatgatagcaatgtggcatgtggaagcgaacccccagggcataacatagtaagaaagtatggttctgtatggcaataggtttttaaaattattagctattcatcatgtgtgggagaaataattgtggtgtgttgcagatttatttggccatttagaataaccaaatcaatctggctaactaggaatttatgtgtaaaattatctgattaaaacagctcaagtttg

SEQ ID NO: 6354 - protein, 418 aa, Homo sapiens; identical to SEQ ID NO: 888

SEQ ID NO: 6355 - DNA, 577 bp, Homo sapiens
gaatatgagcaggcatacatggaggcagaacgcaggcacgccacgggcctgaagcagggctgccacacgccaccattcgacaactcaagggcaccattcattcatgcaggctgtcctgacaaaatgccaagttagcaaaataagatcacacagtcactcttcatcacagctggagaatctgaatttacgagtatcttgcatcaaaacgctgcctcagagagaacagaaagtgaaaatacagattcctgaaatcatacaataagagcaaagaagcacagagatcaggtgtccaacccactcagacacgtggattacggctggaggtggggcagagtaagacgaaatatcgatgctccttctgcttttacaaagtgccaacttcaaagactttctttatatttactaaccgaattcctcaaaatataactgacactttagaacatgaaagtaatagaatgattaaattagaaaaaaacatatttttgcttgtgaatgaacatgagtctccagttcttaattcatgaggattttaccaacaatgccctcttagaaaaagagagaaaaatacagtttcagc

SEQ ID NO: 6356 - protein, 52 aa, Homo sapiens
MQAVLTKCQVSKIRSHSHSSSQLENLNLRVSCIKTLPQREQKVKIQIPEIIQ

SEQ ID NO: 6357 - DNA, 587 bp, Homo sapiens
gaatatgagcaggcatacatggaggcagaacgcaggcacgccacgggcctgaagcagggctgccacacgccaccattcgacaactcaagggcaccattcattcatgcaggctgtcctgacaaaatgccaagttagcaaaataagatcacacagtcactcttcatcacagctggagaatctgaatttacgagtatcttgcatcaaaacgctgcctcagagagaacagaaagtgaaaatacagattcctgaaatcatacaataagaggtgaatattatcttccttcatgatcttcattatgattaaagattaactttgtgaaataattcataaacccaattatcaagatattatcatttataacaaaattatatcctccaaagtgactgaaagacatacaatatttactatttatataccacaatactttagtcatatacttgcacagtcacaaattacttattaaaaacttgcatcagataaattgtgttatatatattttactacacatacacacaaaggcccatcagttttcaaaccccttttttgcaactattaaagttagtctaaagagtgccaccccagcaag

SEQ ID NO: 6358 - protein, 52 aa, Homo sapiens; identical to SEQ ID NO: 6356

SEQ ID NO: 6359 - DNA, 342 bp, Homo sapiens
ctaagaaaaacttttggaagaatgatggtgatgggtttgcaggaagcagttttcgtcccctccttgggtccctgtgtgagctctggcatctttttgtggaacagcagccaaggttgaagatgaagccaagggcatcaccaaaaacttgaagatgttgagtttgaccaaataaaaaagtcgaggatattacggcatttactacactatgagtcatcatcagcttccctgctagactgcgcacttcgtaagaactgtatcttattattcgtggcatccccagcactgtacctgacacacaagagggactcggtaaatgtttgctgaataaactagtatattaat

SEQ ID NO: 6360 - protein, 31 aa, Homo sapiens
MMVMGLQEAVFVPSLGPCVSSGIFLWNSSQG

SEQ ID NO: 6361 - DNA, 527 bp, Homo sapiens
gacctttacacattgctaagtattatgaatctcaatttttctcatgtgtaaaatgtgactatttttttgtttgtttgtttttgagatggagtctcgctcttgtctcgaaataaaataaaatataaaataaaataaaagccaactgtatgagaatcacatgaggagtaaatctcaaaaaatagattgatatatttggcttaagctgccaaaagacgtaagaatgatgtcaaaaagataaacattcacactgctgacaaatgagggaataagctccagacctttacacacaacatctcctttccctggaatgctctcctttcccctcaccctccaccctgtacttcccaggccttggctgaaatgtcagctcctgagagaggcattctctgaccatgtaaataggtgctaggcatcactcactagataaataaatcaccccacagattctgattcaagataactgcataggatacctgaacgaggtttccgcccctatgaaagaccatgctgaagaacccacctccaac

SEQ ID NO: 6362 - protein, 33 aa, Homo sapiens
MLSFPLTLHPVLPRPWLKCQLLREAFSDHVNRC

SEQ ID NO: 6363 - DNA, 219 bp, Homo sapiens
aaaacttttggaagaatgatggtgatgggtttgcaggaagcagttttcgtcccctccttgggtccctgtgtgagctctggcatctttttgtggaacagcagccaaggttgaagatgaagccaagactcaccctgaattcatttttgtgcgagatccaagaaccctctcttggggtctggatgaggacctctttcctgtaacaaaaggataacttaaagc

SEQ ID NO: 6364 - protein, 31 aa, Homo sapiens; identical to SEQ ID NO: 6360

SEQ ID NO: 6365 - DNA, 939 bp, Homo sapiens
ggggagggggaagacgaagcttgaaagacttggtaatggcgacgggtttgtcagagcaccataacatggtgtgggaagtgaagacaaatcagatgcctaatgcagtacagaaactcctgttggtgatggacaagagagcctcaggaatgaatgactcattggagttgctgcagtgtaatgagaatttgccatcttcacctggatataactcctgtgatgaacacatggagcttgatgaccttcctgaacttcaggcagttcaaagtgatcctacccaatctggcatgtaccagctgagttcagatgtttcacatcaagaatacccaagatcatcttggaaccaaaatacctcagacataccagaaactacttaccgtgaaatgtaagctggaccaccctttctatgttaaaaataaaggtagggcttgaattgcatttgtagtaactttttttaaacaaagcttcttaaatctgtaattatgtctgtagctttgatgattaagaaaaaatttgaggggaaaacgtctttcaaactaaataaaaaactaccatagggaatgcttataataatacctaatggtgcgtaagtatcttagcagtcaggtggaactttatttcctgtatgagaaatttttagattcatgtagcatagtataataagctttctattatcttggtatagtttgggtaatgtagtgatctagtaatcacattttcattaagagttaccaaatatgatataaacctgagtcactcttcagagccttattacagtaacaccatgttaaagatgattttataattcagagactatttcatggtctcagtcatttatcacttattgtcattgtagactgatggaagtgctcattgtcattgtagacggatggaagtgctgattgatagaggagctctatatataataaaatgctgaacaat

SEQ ID NO: 6366 - protein, 116 aa, Homo sapiens
MATGLSEHHNMVWEVKTNQMPNAVQKLLLVMDKRASGMNDSLELLQCNENLPSSPGYNSCDEHMELDDLPELQAVQSDPTQSGMYQLSSDVSHQEYPRSSWNQNTSDIPETTYREM

SEQ ID NO: 6367 - DNA, 587 bp, Homo sapiens
gacgaagcttgaaagacttggtaatggcgacgggtttggagttttgggatggtggttgataactaagacaaagtgctgaagaaatgatagaagttgcaaagagacgttagtgtactatacttggtgaatgttggaaactgcaggacctgctgtagggaagaaaaaagttctagctggaaagaatgaggaaaccaaagagctctgcagagggagggggaagacaagacagactgcagctgtgcttctgtggaccccaagaacagcactgttcatacacagaggatagctctgaagagagatacctgtgtagtgcagcttctaaatttcataataaagtcagagcaccataacatggtgtgggaagtgaagacaaatcagatgcctaatgcagtacagaaactcctgttggtgatggacaagagagcctcaggaatgaatgactcattggagttgctgcagtgtaatgagaatttgccatcttcacctggatataactcctgtgatgaacacatggagcttgatgaccttcctgaacttcaggcagttcaaagtgatcctacccaatctggcatgtaccagctgagttc

SEQ ID NO: 6368 - protein, 77 aa, Homo sapiens
MVWEVKTNQMPNAVQKLLLVMDKRASGMNDSLELLQCNENLPSSPGYNSCDEHMELDDLPELQAVQSDPTQSGMYQL

SEQ ID NO: 6369 - DNA, 2844 bp, Homo sapiens
acttggtaatggcgacgggtttggtaagtaggaaagtttcggttgaggagtaagagctgccgcgggagcagtaacccgcgcgggggaggccgacgtcggtcggagagggggtacgagagctgctggtggtgttgtcgtggccggagcggcccgcgcctgggctgccggcacttcgcggcagtcagagcaccataacatggtgtgggaagtgaagacaaatcagatgcctaatgcagtacagaaactcctgttggtgatggacaagagagcctcaggaatgaatgactcattggagttgctgcagtgtaatgagaatttgccatcttcacctggatataactcctgtgatgaacacatggagcttgatgaccttcctgaacttcaggcagttcaaagtgatcctacccaatctggcatgtaccagctgagttcagatgtttcacatcaagaatacccaagatcatcttggaaccaaaatacctcagacataccagaaactacttaccgtgaaaatgaggtggactggctaacagaattggcaaatatcgcgaccagtccacaaagtccactgatgcagtgctcattttacaatagatcatctcctgtacacatcatagccactagcaaaagtttacattcctatgcacgccctccaccagtgtcctcttcttcgaagagtgaaccagccttccctcatcaccattggaaggaggaaacaccagtaagacacgaaagggcaaatagtgagtcagaatctggcattttctgcatgtcctccctgtcagatgatgatgatttgggatggtgcaattcctggccttcaactgtctggcactgttttttgaaaggcacacgactgtgctttcataagggaagcaataaggaatggcaagatgttgaagattttgctagagctgaaggctgtgataatgaggaagatcttcaaatgggcattcacaagggctatggttctgatggtctaaagttgttatcacatgaagaaagtgtatcatttggcgagtctgtactgaagttgacttttgatcctggtacagtagaagatggtttacttaccgtagagtgtaagctggaccaccctttctatgttaaaaataaaggttggtcatcattttatccaagcttgactgtggtacagcatggcattccatgttgtgaagttcatattggcgatgtatgtctacctcctggacaccccgatgccattaattttgatgattcaggtgtttttgatacatttaaaagctatgacttcacacctatggattcttctgcagtttatgtgttaagtagtatggctcgccagcgtcgtgcatctttgtcttgtggaggacctggtggtcaagactttgcaagatctggattcagtaaaaactgtggctcacctggatcatcacagctctcttccaattctttgtatgctaaagctgtcaaaaaccacagctcagggactgtgagtgccacttctcctaataagtgcaaaagaccaatgaatgccttcatgctttttgccaaaaaatacagagttgaatatactcagatgtatccagggaaagataacagagccataagtgtgatccttggtgacaggtggaagaaaatgaagaatgaagagagaagaatgtacacattagaagcaaaggctttggctgaagaacagaaacgtttaaatcctgactgttggaagaggaaaagaaccaattcaggctcacaacaacattaaaccaggatgcttatgttcttaagtctatatttgcatatacattgactcttgatggaaagacttaagaagatcaaggtctcaccatttgtcctcaattcgtgtgaccataagatactgatagcattgagtcttgaaatgatttaataatatgagtgaggatttgctttctccattagagcattaagctaaaactatcaacattttaaaccaaattgccttatttttcttccaaacttcatatatgtctatcaggtaataataggcttgaaaattgatatcctgtggtgctaaagtacagtagaaagagaggagaagtgtatacatgttttattttaaattgtacgaaaggggaatttaaaaaatatgtaactgctgtttatacattggctccttactgcttattaatctgtattgtacacatgatgaaatgaagcagaagctgggagtcggcctttcctctagtaaccaccacatggctcagcatctgtgccaaacataggcgctcctagtctggtcagtgccaagaggctaccagaacatggggcaggtggctggtgttggtgtcccagcctaagagccacctgctgcagttaccatggcatgctgagttgatgcaccaggtggcagcagccatccgttattatttccaatggagacctagcccaggccaaggtaaagttagttaatagcattgggatatagtcactgtaatggtgctattaacaaacagtcaacaccattgtattttttaacttcgtgttctgtatctcctcagccatgtatcttaaatatattttgtcatcataatctttatggtgggggcagactttgcacttactgcagtgcaacacttgcactttaattttcctccaactgtctaaaattagagcaaatacattggcaatacagctgcttttgctctgagctacaatcatggcttttcatgttacttaccaagtggtgtttctggttaggaatcacagctgtaaaattgatttcagttcatcacacttcttcatgatgttgcccctaaattttgcacactatattcttgtatattatttcaaataaatggaaaaaaaagttgcttatctctgacgtct

SEQ ID NO: 6370 - protein, 514 aa, Homo sapiens; identical to SEQ ID NO: 890

SEQ ID NO: 6371 - DNA, 586 bp, Homo sapiens
atggcgacgggtttggtaagtaggaaagtttcggttgaggagtaagagctgccgcgggagcagtaacccgcgcgggggaggccgacgtcggtcggagagggggtacgagagctgctggtggtgttgtcgtggccggagcggcccgcgcctgggctgccggcacttcgcggcagtcagagcaccataacatggtgtgggaagtgaagacaaatcagatgcctaatgcagtacagaaactcctgttggtgatggacaagagagcctcaggaatgaatgactcattggagttgctgcagtgtaatgagaatttgccatcttcacctggatataactcctgtgatgaacacatggagcttgatgaccttcctgaacttcaggcagttcaaagtgatcctacccaatctggcatgtaccagctgagttcagatgtttcacatcaagaatacccaagatcatcttggaaccaaaatacctcagacataccagaaactacttaccgtgaaaatgaggtggactggctaacagaattggcaaatatcgcgaccagtccacaaagtccactgatgcagtgctcattttacaatag

SEQ ID NO: 6372 - protein, 131 aa, Homo sapiens
MVWEVKTNQMPNAVQKLLLVMDKRASGMNDSLELLQCNENLPSSPGYNSCDEHMELDDLPELQAVQSDPTQSGMYQLSSDVSHQEYPRSSWNQNTSDIPETTYRENEVDWLTELANIATSPQSPLMQCSFY

SEQ ID NO: 6373 - DNA, 3325 bp, Homo sapiens
gaggggaaaaacaagcccggagtccgggctgcggtcacatgatggggggaagggaggggaacgcgatgaatggcgaaagagggtgggggatggacttggcgtgaaccgggaggcaccgctctgtgtgacccaaagaggaggcttggcaggcgattccagtctccgcctttcaacctatgctgccaccgcaggccgattgaaacaaaacaaaacaaaccaggcgaagtggacagccaggtttttgtagctttaaatgctgcgtgctgtctagggtgtttcactctccgctgtgcactctacactcgagttcattcttagggagttttcagctacagtcgtttttagaaggagcactgacagcgaggagttttgggatggtggttgataactaagacaaagtgctgaagaaatgatagaagttgcaaagagacgttagtgtactatacttggtgaatgttggaaactgcaggacctgctgtagggaagaaaaaagttctagctggaaagaatgaggaaaccaaagagctctgcagagggagggggaagacaagacagactgcagctgtgcttctgtggaccccaagaacagcactgttcatacacagaggatagctctgaagagagatacctgtgtagtgcagcttctaaatttcataataaagtcagagcaccataacatggtgtgggaagtgaagacaaatcagatgcctaatgcagtacagaaactcctgttggtgatggacaagagagcctcaggaatgaatgactcattggagttgctgcagtgtaatgagaatttgccatcttcacctggatataactcctgtgatgaacacatggagcttgatgaccttcctgaacttcaggcagttcaaagtgatcctacccaatctggcatgtaccagctgagttcagatgtttcacatcaagaatacccaagatcatcttggaaccaaaatacctcagacataccagaaactacttaccgtgaaaatgaggtggactggctaacagaattggcaaatatcgcgaccagtccacaaagtccactgatgcagtgctcattttacaatagatcatctcctgtacacatcatagccactagcaaaagtttacattcctatgcacgccctccaccagtgtcctcttcttcgaagagtgaaccagccttccctcatcaccattggaaggaggaaacaccagtaagacacgaaagggcaaatagtgagtcagaatctggcattttctgcatgtcctccctgtcagatgatgatgatttgggatggtgcaattcctggccttcaactgtctggcactgttttttgaaaggcacacgactgtgctttcataagggaagcaataaggaatggcaagatgttgaagattttgctagagctgaaggctgtgataatgaggaagatcttcaaatgggcattcacaagggctatggttctgatggtctaaagttgttatcacatgaagaaagtgtatcatttggcgagtctgtactgaagttgacttttgatcctggtacagtagaagatggtttacttaccgtagagtgtaagctggaccaccctttctatgttaaaaataaaggttggtcatcattttatccaagcttgactgtggtacagcatggcattccatgttgtgaagttcatattggcgatgtatgtctacctcctggacaccccgatgccattaattttgatgattcaggtgtttttgatacatttaaaagctatgacttcacacctatggattcttctgcagtttatgtgttaagtagtatggctcgccagcgtcgtgcatctttgtcttgtggaggacctggtggtcaagactttgcaagatctggattcagtaaaaactgtggctcacctggatcatcacagctctcttccaattctttgtatgctaaagctgtcaaaaaccacagctcagggactgtgagtgccacttctcctaataagtgcaaaagaccaatgaatgccttcatgctttttgccaaaaaatacagagttgaatatactcagatgtatccagggaaagataacagagccataagtgtgatccttggtgacaggtggaagaaaatgaagaatgaagagagaagaatgtacacattagaagcaaaggctttggctgaagaacagaaacgtttaaatcctgactgttggaagaggaaaagaaccaattcaggctcacaacaacattaaaccaggatgcttatgttcttaagtctatatttgcatatacattgactcttgatggaaagacttaagaagatcaaggtctcaccatttgtcctcaattcgtgtgaccataagatactgatagcattgagtcttgaaatgatttaataatatgagtgaggatttgctttctccattagagcattaagctaaaactatcaacattttaaaccaaattgccttatttttcttccaaacttcatatatgtctatcaggtaataataggcttgaaaattgatatcctgtggtgctaaagtacagtagaaagagaggagaagtgtatacatgttttattttaaattgtacgaaaggggaatttaaaaaatatgtaactgctgtttatacattggctccttactgcttattaatctgtattgtacacatgatgaaatgaagcagaagctgggagtcggcctttcctctagtaaccaccacatggctcagcatctgtgccaaacataggcgctcctagtctggtcagtgccaagaggctaccagaacatggggcaggtggctggtgttggtgtcccagcctaagagccacctgctgcagttaccatggcatgctgagttgatgcaccaggtggcagcagccatccgttattatttccaatggagacctagcccaggccaaggtaaagttagttaatagcattgggatatagtcactgtaatggtgctattaacaaacagtcaacaccattgtattttttaacttcgtgttctgtatctcctcagccatgtatcttaaatatattttgtcatcataatctttatggtgggggcagactttgcacttactgcagtgcaacacttgcactttaattttcctccaactgtctaaaattagagcaaatacattggcaatacagctgcttttgctctgagctacaatcatggcttttcatgttacttaccaagtggtgtttctggttaggaatcacagctgtaaaattgatttcagttcatcacacttcttcatgatgttgcccctaaattttgcacactatattcttgtatattatttcaaataaatggaaaaaaaagttgcttatctctgacgtct

SEQ ID NO: 6374 - protein, 514 aa, Homo sapiens; identical to SEQ ID NO: 890

SEQ ID NO: 6375 - DNA, 4423 bp, Homo sapiens
gaggggaaaaacaagcccggagtccgggctgcggtcacatgatggggggaagggaggggaacgcgatgaatggcgaaagagggtgggggatggacttggcgtgaaccgggaggcaccgctctgtgtgacccaaagaggaggcttggcaggcgattccagtctccgcctttcaacctatgctgccaccgcaggccgattgaaacaaaacaaaacaaaccaggcgaagtggacagccaggtttttgtagctttaaatgctgcgtgctgtctagggtgtttcactctccgctgtgcactctacactcgagttcattcttagggagttttcagctacagtcgtttttagaaggagcactgacagcgaggagttttgggatggtggttgataactaagacaaagtgctgaagaaatgatagaagttgcaaagagacgttagtgtactatacttggtgaatgttggaaactgcaggacctgctgtagggaagaaaaaagttctagctggaaagaatgaggaaaccaaagagctctgcagagggagggggaagacaagacagactgcagctgtgcttctgtggaccccaagaacagcactgttcatacacagaggatagctctgaagagagatacctgtgtagtgcagcttctaaatttcataataaagtcagagcaccataacatggtgtgggaagtgaagacaaatcagatgcctaatgcagtacagaaactcctgttggtgatggacaagagagcctcaggaatgaatgactcattggagttgctgcagtgtaatgagaatttgccatcttcacctggatataactcctgtgatgaacacatggagcttgatgaccttcctgaacttcaggcagttcaaagtgatcctacccaatctggcatgtaccagctgagttcagatgtttcacatcaagaatacccaagatcatcttggaaccaaaatacctcagacataccagaaactacttaccgtgaaaatgaggtggactggctaacagaattggcaaatatcgcgaccagtccacaaagtccactgatgcagtgctcattttacaatagatcatctcctgtacacatcatagccactagcaaaagtttacattcctatgcacgccctccaccagtgtcctcttcttcgaagagtgaaccagccttccctcatcaccattggaaggaggaaacaccagtaagacacgaaagggcaaatagtgagtcagaatctggcattttctgcatgtcctccctgtcagatgatgatgatttgggatggtgcaattcctggccttcaactgtctggcactgttttttgaaaggcacacgactgtgctttcataagggaagcaataaggaatggcaagatgttgaagattttgctagagctgaaggctgtgataatgaggaagatcttcaaatgggcattcacaagggctatggttctgatggtctaaagttgttatcacatgaagaaagtgtatcatttggcgagtctgtactgaagttgacttttgatcctggtacagtagaagatggtttacttaccgtagagtgtaagctggaccaccctttctatgttaaaaataaaggttggtcatcattttatccaagcttgactgtggtacagcatggcattccatgttgtgaagttcatattggcgatgtatgtctacctcctggacaccccgatgccattaattttgatgattcaggtgtttttgatacatttaaaagctatgacttcacacctatggattcttctgcagtttatgtgttaagtagtatggctcgccagcgtcgtgcatctttgtcttgtggaggacctggtggtcaagactttgcaagatctggattcagtaaaaactgtggctcacctggatcatcacagctctcttccaattctttgtatgctaaagctgtcaaaaaccacagctcagggactgtgagtgccacttctcctaataagtgcaaaagaccaatgaatgccttcatgctttttgccaaaaaatacagagttgaatatactcagatgtatccagggaaagataacagagccataagtgtgatccttggtgacaggtggaagaaaatgaagaatgaagagagaagaatgtacacattagaagcaaaggctttggctgaagaacagaaacgtttaaatcctgactgttggaagaggaaaagaaccaattcaggctcacaacaacattaaaccaggatgcttatgttcttaagtctatatttgcatatacattgactcttgatggaaagacttaagaagatcaaggtctcaccatttgtcctcaattcgtgtgaccataagatactgatagcattgagtcttgaaatgatttaataatatgagtgaggatttgctttctccattagagcattaagctaaaactatcaacattttaaaccaaattgccttatttttcttccaaacttcatatatgtctatcaggtaataataggcttgaaaattgatatcctgtggtgctaaagtacagtagaaagagaggagaagtgtatacatgttttattttaaattgtacgaaaggggaatttaaaaaatatgtaactgctgtttatacattggctccttactgcttattaatctgtattgtacacatgatgaaatgaagcagaagctgggagtcggcctttcctctagtaaccaccacatggctcagcatctgtgccaaacataggcgctcctagtctggtcagtgccaagaggctaccagaacatggggcaggtggctggtgttggtgtcccagcctaagagccacctgctgcagttaccatggcatgctgagttgatgcaccaggtggcagcagccatccgttattatttccaatggagacctagcccaggccaaggtaaagttagttaatagcattgggatatagtcactgtaatggtgctattaacaaacagtcaacaccattgtattttttaacttcgtgttctgtatctcctcagccatgtatcttaaatatattttgtcatcataatctttatggtgggggcagactttgcacttactgcagtgcaacacttgcactttaattttcctccaactgtctaaaattagagcaaatacattggcaatacagctgcttttgctctgagctacaatcatggcttttcatgttacttaccaagtggtgtttctggttaggaatcacagctgtaaaattgatttcagttcatcacacttcttcatgatgttgcccctaaattttgcacactatattcttgtatattatttcaaataaatggaaaaaaaagttgcttatctctgacgtctactgattgattgattgattgattaatcttggctgaattttatttatgagttctcagaataacaggttcaggagatgagatggaaaacataaggcaaattcctaacactgctaattaggaggctgctgataggattttaaaaattaaaaacaatgttaatagtggaacaagagccatcagaaaataaggacttagattatctactatttatagagaattgctatacaataaaaatttttatttttcacgtggcatttttgttacacggttaaacagcccaaaggtctgcttttaataacatgacaaagtgtaacaaaagccttgctttatttaaagatccagtatgacatacttaaaaaggccatttaaccttgtatcttagcttgggatgtgccagtggttcctcaactttgttgtctattggaatcattttggggattttttttttttttaatagtggtgtctgtcaggctcccactcctagacatgttaattaatgtggagtgcaagttgggcatcaggattttaaaaaaatcccctggtgattggtatgaatgtgcagccaaatttggaaaccactgagctacatgcttatttagtgaagaaggcagggttgggggaagcagggtacatgttataacttgatcatatccctttaaaagaagtggggactttgggtttatgtacccataggaggacttggttatggatgggaaagacattttagccttgtacaaaaatctgaaagaggaaaacatctttctggaaaaatcaggtccatggaattgaaaggtggtgataactcaacattttttatgctaaagtataagtgctaaagaggtaaataaacgtcgataggaaataccgaacaatcaattacattcttaaaatagtagatagtagcagtcttttggagtatgtgtttaactgccaactatgaatgggttagcacaaagtggagatgaacaaagatttcatgtcattactgaagagcagacatagccttttgaagcagctgaaccattatgggataaactggtgcaaattctttgccttctctacttctcactgattgaacataagcttccagggctcccct

SEQ ID NO: 6376 - protein, 514 aa, Homo sapiens; identical to SEQ ID NO: 890

SEQ ID NO: 6377 - DNA, 713 bp, Homo sapiens
gaaaaacaagcccggagtccgggctgcggtcacatgatggggggaagggaggggaacgcgatgaatggcgaaagagggtgggggatggacttggcgtgaaccgggaggcaccgctctgtgtgacccaaagaggaggcttggcaggcgattccagtctccgcctttcaacctatgctgccaccgcaggccgattgaaacaaaacaaaacaaaccaggcgaagtggacagccaggtttttgtagctttaaatgctgcgtgctgtctagggtgtttcactctccgctgtgcactctacactcgagttcattcttagggagttttcagctacagtcgtttttagaaggagcactgacagcgagtcagagcaccataacatggtgtgggaagtgaagacaaatcagatgcctaatgcagtacagaaactcctgttggtgatggacaagagagcctcaggaatgaatgactcattggagttgctgcagtgtaatgagaatttgccatcttcacctggatataactcctgtgatgaacacatggagcttgatgaccttcctgaacttcaggcagttcaaagtgatcctacccaatctggcatgtaccagctgagttcagatgtttcacatcaagaatacccaagatcatcttggaaccaaaatacctcagacataccagaaactacttaccgtgaaaatgaggtggactggctaacagaa

SEQ ID NO: 6378 - protein, 112 aa, Homo sapiens
MVWEVKTNQMPNAVQKLLLVMDKRASGMNDSLELLQCNENLPSSPGYNSCDEHMELDDLPELQAVQSDPTQSGMYQLSSDVSHQEYPRSSWNQNTSDIPETTYRENEVDWLT

SEQ ID NO: 6379 - DNA, 601 bp, Homo sapiens
gctcggcgtggtggcatgtgcctgtaatcccccctacttaggtggctgaggcgggagaatcgcttgaacccaggaggtggagtttgcagtgagccgagatcacgccactgcactgcagtctgggtgacagagtgtgactatgtctcaaaaaaaaaacaaaacaacattgtcatgtctctgatttattttaggtttgtgtactgcccaaattgcatggcttgacatcatttcttaatgtcgtttttattttaagtcagagcaccataacatggtgtgggaagtgaagacaaatcagatgcctaatgcagtacagaaactcctgttggtgatggacaagagagcctcaggaatgaatgactcattggagttgctgcagtgtaatgagaatttgccatcttcacctggatataactcctgtgatgaacacatggagcttgatgaccttcctgaacttcaggcagttcaaagtgatcctacccaatctggcatgtaccagctgagttcagatgtttcacatcaagaatacccaagatcatcttggaaccaaaatacctcagacataccagaaactacttaccgtgaaaatgaggtggactggcta

SEQ ID NO: 6380 - protein, 110 aa, Homo sapiens
MVWEVKTNQMPNAVQKLLLVMDKRASGMNDSLELLQCNENLPSSPGYNSCDEHMELDDLPELQAVQSDPTQSGMYQLSSDVSHQEYPRSSWNQNTSDIPETTYRENEVDW

SEQ ID NO: 6381 - DNA, 542 bp, Homo sapiens
gtcagagcaccataacatggtgtgggaagtgaagacaaatcagatgcctaatgcagtacagaaactcctgttggtgatggacaagagagcctcaggaatgaatgactcattggagttgctgcagtgtaatgagaatttgccatcttcacctggatataactcctgtgatgaacacatggagcttgatgaccttcctgaacttcaggcagttcaaagtgatcctacccaatctggcatgtaccagctgagttcagatgtttcacatcaagaatacccaagatcatcttggaaccaaaatacctcagacataccagaaactacttaccgtgaaaatgaggtggactggctaacagaattggcaaatatcgcgaccagtccacaaagtccactgatgcagtgctcattttacaataggtaggagcatttaatgtacacattagaagcaaaggctttggctgaagaacagaaacgtttaaatcctgactgttggaagaggaaaagaaccaattcagtatgtttcaataaatagtgtttaaaattat

SEQ ID NO: 6382 - protein, 133 aa, Homo sapiens
MVWEVKTNQMPNAVQKLLLVMDKRASGMNDSLELLQCNENLPSSPGYNSCDEHMELDDLPELQAVQSDPTQSGMYQLSSDVSHQEYPRSSWNQNTSDIPETTYRENEVDWLTELANIATSPQSPLMQCSFYNR

SEQ ID NO: 6383 - DNA, 1901 bp, Homo sapiens
tccattttaattttctaggtctgggtgcctataggccaagaaaccatattgtcacatttgtccagaaatgaatttaaagtaagaataagtgggttgtgtaggatttggaggagttacttgctatgaataaagtatgctgattataacattcctttggggggttcaaagtcttttttaagcttttgtattatctgcagaggttttttaaaaaaattaatttcagttagcacatatacagatttcattttataagcaactatcagtggcaaaagttgttagtgttggtaacatgatatagggggaaatgcactgaaatttccaatcagatgttttcttttttttttttttaacctgctttttagaaatcagagaattcaaaattgaattaaaatattattattttttttaattttatagctatgacttcacacctatggattcttctgcagtttatgtgttaagtagtatggctcgccagcgtcgtgcatctttgtcttgtggaggacctggtggtcaagactttgcaagatctggattcagtaaaaactgtggctcacctggatcatcacagctctcttccaattctttgtatgctaaagctttgaatatactcagatgtatccagggaaagataacagagccataagtgtgatccttggtgacaggtggaagaaaatgaagaatgaagagagaagaatgtacacattagaagcaaaggctttggctgaagaacagaaacgtttaaatcctgactgttggaagaggaaaagaaccaattcaggctcacaacaacattaaaccaggatgcttatgttcttaagtctatatttgcatatacattgactcttgatggaaagacttaagaagatcaaggtctcaccatttgtcctcaattcgtgtgaccataagatactgatagcattgagtcttgaaatgatttaataatatgagtgaggatttgctttctccattagagcattaagctaaaactatcaacattttaaaccaaattgccttatttttcttccaaacttcatatatgtctatcaggtaataataggcttgaaaattgatatcctgtggtgctaaagtacagtagaaagagaggagaagtgtatacatgttttattttaaattgtacgaaaggggaatttaaaaaatatgtaactgctgtttatacattggctccttactgcttattaatctgtattgtacacatgatgaaatgaagcagaagctgggagtcggcctttcctctagtaaccaccacatggctcagcatctgtgccaaacataggcgctcctagtctggtcagtgccaagaggctaccagaacatggggcaggtggctggtgttggtgtcccagcctaagagccacctgctgcagttaccatggcatgctgagttgatgcaccaggtggcagcagccatccgttattatttccaatggagacctagcccaggccaaggtaaagttagttaatagcattgggatatagtcactgtaatggtgctattaacaaacagtcaacaccattgtattttttaacttcgtgttctgtatctcctcagccatgtatcttaaatatattttgtcatcataatctttatggtgggggcagactttgcacttactgcagtgcaacacttgcactttaattttcctccaactgtctaaaattagagcaaatacattggcaatacagctgcttttgctctgagctacaatcatggcttttcatgttacttaccaagtggtgtttctggttaggaatcacagctgtaaaattgatttcagttcatcacacttcttcatgatgttgcccctaaattttgcacactatattcttgtatattatttcaaataaatggaaaaaaaagttgcttatctctgacgtct

SEQ ID NO: 6384 - protein, 70 aa, Homo sapiens
MDSSAVYVLSSMARQRRASLSCGGPGGQDFARSGFSKNCGSPGSSQLSSNSLYAKALNILRCIQGKITEP

SEQ ID NO: 6385 - DNA, 2999 bp, Homo sapiens
tccattttaattttctaggtctgggtgcctataggccaagaaaccatattgtcacatttgtccagaaatgaatttaaagtaagaataagtgggttgtgtaggatttggaggagttacttgctatgaataaagtatgctgattataacattcctttggggggttcaaagtcttttttaagcttttgtattatctgcagaggttttttaaaaaaattaatttcagttagcacatatacagatttcattttataagcaactatcagtggcaaaagttgttagtgttggtaacatgatatagggggaaatgcactgaaatttccaatcagatgttttcttttttttttttttaacctgctttttagaaatcagagaattcaaaattgaattaaaatattattattttttttaattttatagctatgacttcacacctatggattcttctgcagtttatgtgttaagtagtatggctcgccagcgtcgtgcatctttgtcttgtggaggacctggtggtcaagactttgcaagatctggattcagtaaaaactgtggctcacctggatcatcacagctctcttccaattctttgtatgctaaagctttgaatatactcagatgtatccagggaaagataacagagccataagtgtgatccttggtgacaggtggaagaaaatgaagaatgaagagagaagaatgtacacattagaagcaaaggctttggctgaagaacagaaacgtttaaatcctgactgttggaagaggaaaagaaccaattcaggctcacaacaacattaaaccaggatgcttatgttcttaagtctatatttgcatatacattgactcttgatggaaagacttaagaagatcaaggtctcaccatttgtcctcaattcgtgtgaccataagatactgatagcattgagtcttgaaatgatttaataatatgagtgaggatttgctttctccattagagcattaagctaaaactatcaacattttaaaccaaattgccttatttttcttccaaacttcatatatgtctatcaggtaataataggcttgaaaattgatatcctgtggtgctaaagtacagtagaaagagaggagaagtgtatacatgttttattttaaattgtacgaaaggggaatttaaaaaatatgtaactgctgtttatacattggctccttactgcttattaatctgtattgtacacatgatgaaatgaagcagaagctgggagtcggcctttcctctagtaaccaccacatggctcagcatctgtgccaaacataggcgctcctagtctggtcagtgccaagaggctaccagaacatggggcaggtggctggtgttggtgtcccagcctaagagccacctgctgcagttaccatggcatgctgagttgatgcaccaggtggcagcagccatccgttattatttccaatggagacctagcccaggccaaggtaaagttagttaatagcattgggatatagtcactgtaatggtgctattaacaaacagtcaacaccattgtattttttaacttcgtgttctgtatctcctcagccatgtatcttaaatatattttgtcatcataatctttatggtgggggcagactttgcacttactgcagtgcaacacttgcactttaattttcctccaactgtctaaaattagagcaaatacattggcaatacagctgcttttgctctgagctacaatcatggcttttcatgttacttaccaagtggtgtttctggttaggaatcacagctgtaaaattgatttcagttcatcacacttcttcatgatgttgcccctaaattttgcacactatattcttgtatattatttcaaataaatggaaaaaaaagttgcttatctctgacgtctactgattgattgattgattgattaatcttggctgaattttatttatgagttctcagaataacaggttcaggagatgagatggaaaacataaggcaaattcctaacactgctaattaggaggctgctgataggattttaaaaattaaaaacaatgttaatagtggaacaagagccatcagaaaataaggacttagattatctactatttatagagaattgctatacaataaaaatttttatttttcacgtggcatttttgttacacggttaaacagcccaaaggtctgcttttaataacatgacaaagtgtaacaaaagccttgctttatttaaagatccagtatgacatacttaaaaaggccatttaaccttgtatcttagcttgggatgtgccagtggttcctcaactttgttgtctattggaatcattttggggattttttttttttttaatagtggtgtctgtcaggctcccactcctagacatgttaattaatgtggagtgcaagttgggcatcaggattttaaaaaaatcccctggtgattggtatgaatgtgcagccaaatttggaaaccactgagctacatgcttatttagtgaagaaggcagggttgggggaagcagggtacatgttataacttgatcatatccctttaaaagaagtggggactttgggtttatgtacccataggaggacttggttatggatgggaaagacattttagccttgtacaaaaatctgaaagaggaaaacatctttctggaaaaatcaggtccatggaattgaaaggtggtgataactcaacattttttatgctaaagtataagtgctaaagaggtaaataaacgtcgataggaaataccgaacaatcaattacattcttaaaatagtagatagtagcagtcttttggagtatgtgtttaactgccaactatgaatgggttagcacaaagtggagatgaacaaagatttcatgtcattactgaagagcagacatagccttttgaagcagctgaaccattatgggataaactggtgcaaattctttgccttctctacttctcactgattgaacataagcttccagggctcccct

SEQ ID NO: 6386 - protein, 70 aa, Homo sapiens; identical to SEQ ID NO: 6384

SEQ ID NO: 6387 - DNA, 563 bp, Homo sapiens
gtggctcatgcctgtaatcccagcattttgggaggccaaggcaggagaatcgcttgaacccacaaggcagaagttgcagtgagccaagatcctgccactacactccagcctggatgacagtgagactccgcctcaaacaaacaaaaaaagactcttagaattcttgactcactaattacacacttatgtgtctaaaggaactaggacaaagctattcattactgtggtaacacagtaatgacttttctcatgatatcaagataaagcaaatggtagttttgatcctcagggtacaaagactggaagaagacagcgttattaatatatggagaacttgactggtttgagagggattcagcagtagaggactcggagatgagtaagggtacaggcaacagagtaggaaggacttgagttgatttttatttccagcttctactgaggacagctcttaagttcaccgttttgacaactctggcagcttgctacaaattgccagttccccgtacaatccatagttgactcaggtgaaaagctgttccataaagatagaactgttaatt

SEQ ID NO: 6388 - protein, 35 aa, Homo sapiens
VDFYFQLLLRTALKFTVLTTLAACYKLPVPRTIHS

SEQ ID NO: 6389 - DNA, 6483 bp, Homo sapiens
ctcatgggaaggaaggagggtagagacagtgagttttattggtccttttatggttcagacttccttcttcatcgactctccctaattctcttcactgttcatccccagcaacttttcttcccaagcatttcctgcgggcttttattaccccaggagtgccaatcaaggcgtggaacagataaagctgtgtagcaactaacgcgtgactcttgtgagtgtggagggcaaacgaagctccctgaaacctccgctctgctctcctgccttacgccgcgcggcccctgttctgaggtttaatacttgcttcacagataagcgctgcggccacgttccggtgcccaccttctccttggctagggcacgacgccagcccagggggcgcggccctgagctgctgcgagagacagctgaaagcgccggcccgacggccttggctccctcggtgcgctgggcgcagagcactcggaccctgggcgcccactgctcgagtacctgcgcggctcctagccaggcttagcccaggcgcgggctgagagtcagttcgccaggtgggcctggagccatgggctgggtgggcgggcggcgccgggattctgcgtcaccacctgggcggagccgttctgctgctgacgacatcaacccggcacctgccaacatggaaggtggcggcggcagcgtcgctgtagctggcctcggagctcgaggctctggagcggctgcagctacagtccgggaacttctgcaggacgggtgttatagtgactttttaaacgaagactttgatgtaaagacttatacttctcaatctattcatcaagctgtaattgctgaacaactagcaaaacttgcccaaggaatcagtcagttggacagagaactacacttacaggttgttgcaagacatgaagatttactggcacaagcaactgggattgagtcgttggaaggtgttcttcagatgatgcagacgagaattggggctttacagggagctgttgataggataaaagcaaaaattgttgaaccatacaataagatagttgcccggactgcacaactagcaagacttcaggttgcctgtgatttgcttcggaggattattcgtatcttgaatctcagtaagagactccaaggacaactgcaagggggaagtagagagataacaaaagctgctcagagtctcaatgaacttgattatctttctcaaggaatagatctttctggaatagaagtgatagaaaatgatctactttttattgcaagagcccgacttgaagtggaaaatcaagctaagcgcctactagagcagggtttggagactcagaatccaactcaagtcggaacagctcttcaggttttctataatcttggaactttgaaggatactattaccagtgttgtggatggatattgtgctactttagaagaaaatatcaacagtgcattagacataaaagttttgactcagccttcccagtcagctgtgagagggggacctggacgatctaccatgccaaccccaggaaatactgcagctttgcgtgcctcattctggaccaatatggagaaacttatggatcatatttatgctgtttgtggacaggtacaacatctacaaaaagtattggccaagaagagagatcctgtttctcacatttgtttcattgaagaaatagttaaggatggacaaccggaaattttctacacattttggaattcagttactcaggcactttcttctcaatttcatatggcaacaaactcttcgatgtttttgaagcaggcatttgaaggagaataccctaaattattacgtctttataatgacttatggaagcgtcttcaacaatacagtcagcatatccaagggaattttaatgcaagtggaactacagacctctatgttgacctacaacacatggaagatgatgcacaagatatattcataccaaaaaagccagattatgatccagaaaaggctttgaaagactcactacaaccctatgaggctgcttatctatcaaaatccttatctcgactcttcgatcctatcaacttggtttttcccccgggtggtcgtaatcctccttcctctgatgaacttgatggtattattaaaactatagcaagtgaactaaatgttgctgctgttgatacaaacctcacattagctgtgtcaaaaaatgtggcaaagaccatccagttatacagtgtaaaatcagagcagcttctctccacacaaggagatgcaagtcaggtgattgggcctcttactgaaggacagagaagaaatgtggcagtagtgaattcattgtataagttgcaccaatcagtaacaaaggttgtttccagtcagagctcattcccactggcagctgagcaaactataatttcagctctaaaggctattcatgctcttatggaaaatgctgtgcaacccttactcacttctgtgggagatgctatagaggccataatcatcaccatgcatcaagaagacttttctgggtcattatccagctcaggaaaacctgatgttccttgttctctgtacatgaaggagctacaaggtttcattgccagagttatgagtgactattttaaacactttgaatgcttggattttgtctttgacaacactgaggctattgcccaaagagctgttgaactttttatccgccatgccagtctcataagacctcttggtgaaggtgggaaaatgcgacttgctgctgattttgcacagatggagttggctgtgggtccattctgtagacgagtatctgatttaggaaagtcctatcggatgctgagatcattcagacctctgctcttccaggcaagtgaacatgtagccagtagtcctgcattgggggatgtgattccgttcagcatcattattcagtttttgttcacgagagcacccgctgaactgaaatctcctttccagagggcagagtggtcccacacacgcttctctcagtggctggatgaccatccatctgaaaaggacaggctcctcctcatcaggggagccctggaagcttatgttcaatcagtgagaagtagagaaggcaaagaatttgcaccagtttatcccataatggttcagctgcttcaaaaggctatgtctgctcttcagtaatgacatgaaatctttgttcatctccactttgtgctaacccattcatagttggcagttaaacacatactccaaaagactgctactatctactattttaagaatgtaattgattgttcggtatttcctatcgacgtttatttacctctttagcacttatactttagcataaaaaatgttgagttatcaccacctttcaattccatggacctgatttttccagaaagatgttttcctctttcagatttttgtacaaggctaaaatgtctttcccatccataaccaagtcctcctatgggtacataaacccaaagtccccacttcttttaaagggatatgatcaagttataacatgtaccctgcttcccccaaccctgccttcttcactaaataagcatgtagctcagtggtttccaaatttggctgcacattcataccaatcaccaggggatttttttaaaatcctgatgcccaacttgcactccacattaattaacatgtctaggagtgggagcctgacagacaccactattaaaaaaaaaaaaaatccccaaaatgattccaatagacaacaaagttgaggaaccactggcacatcccaagctaagatacaaggttaaatggcctttttaagtatgtcatactggatctttaaataaagcaaggcttttgttacactttgtcatgttattaaaagcagacctttgggctgtttaaccgtgtaacaaaaatgccacgtgaaaaataaaaatttttattgtatagcaattctctataaatagtagataatctaagtccttattttctgatggctcttgttccactattaacattgtttttaatttttaaaatcctatcagcagcctcctaattagcagtgttaggaatttgccttatgttttccatctcatctcctgaacctgttattctgagaactcataaataaaattcagccaagattaatcaatcaatcaatcaatcagtagacgtcagagataagcaacttttttttccatttatttgaaataatatacaagaatatagtgtgcaaaatttaggggcaacatcatgaagaagtgtgatgaactgaaatcaattttacagctgtgattcctaaccagaaacaccacttggtaagtaacatgaaaagccatgattgtagctcagagcaaaagcagctgtattgccaatgtatttgctctaattttagacagttggaggaaaattaaagtgcaagtgttgcactgcagtaagtgcaaagtctgcccccaccataaagattatgatgacaaaatatatttaagatacatggctgaggagatacagaacacgaagttaaaaaatacaatggtgttgactgtttgttaatagcaccattacagtgactatatcccaatgctattaactaactttaccttggcctgggctaggtctccattggaaataataacggatggctgctgccacctggtgcatcaactcagcatgccatggtaactgcagcaggtggctcttaggctgggacaccaacaccagccacctgccccatgttctggtagcctcttggcactgaccagactaggagcgcctatgtttggcacagatgctgagccatgtggtggttactagaggaaaggccgactcccagcttctgcttcatttcatcatgtgtacaatacagattaataagcagtaaggagccaatgtataaacagcagttacatattttttaaattcccctttcgtacaatttaaaataaaacatgtatacacttctcctctctttctactgtactttagcaccacaggatatcaattttcaagcctattattacctgatagacatatatgaagtttggaagaaaaataaggcaatttggtttaaaatgttgatagttttagcttaatgctctaatggagaaagcaaatcctcactcatattattaaatcatttcaagactcaatgctatcagtatcttatggtcacacgaattgaggacaaatggtgagaccttgatcttcttaagtctttccatcaagagtcaatgtatatgcaaatatagacttaagaacataagcatcctggtttaatgttgttgtgagccctgtggaaataaaattaaactcagtgaatgtttacaaatcaatacatagtaatcctatatatgaaagctaagatgtataagatgtttataaatttactattagaaaatactgctttcttaaaggtgattttaaaaagctagctgatatctgatggctcaagcatccagaaaatgtatgcaatgataagacattgactaggatgaacagaaaagggatacaggaaaagtccgaacacatgaaattctaaattaaccaagaactgccaaaattcagttcagccaccctctcatctgactactgactgaccactatttttaaagaaattgtgaaaaatttaaacagatatgacctgcattttactaagaaacaggcacatgtacacaatgaatttaaaacatctttggccagccctcctactataaaaatattgatatcttcccttcatctttcaatgatacttcaaattgaccccactatatcacatgtaatttttttgcaattaatctaaaaacgctgaacctaaaagatgctagtttagtaatggaaaagttataagaaacaagtctatccaagatagcttatcatatagacttgtttgccaccattcctgggcctatttcttctcctccttgaaatttttcaatctagaaattctgtgccaatggcacaagtccccatgaatgacagctaacataccccaacacctccagccttattggtccctcaccaattaaggaaaaaaagctgttgagacaatcccaaaattattagagaaattttctactgtgatattaatggattaataatgcttatctttcaacccaactagaaacactgcattccaaaattatttttccaactcaatgtttagaacaaacattcttttgaagtttgcctgagatttcgacttgccatgctatgagagtaaatgacccttgaggaaaggcagtctttatatgatgatgtgataacattattaggttttgaagtataaaaatgctagagacagcatcaacacaacctcttaaaggttgtaacaactgctccaacatgccagtacacctgcacggataaggcaagataattttaaacactatttattgaaacatactgaattggttcttttcctcttccaacagtcaggatttaaacgtttctgttcttcagccaaagcctttgcttctaatgtgtacattcttctctcttcattcttcattttcttccacctgtcacca

SEQ ID NO: 6390 - protein, 860 aa, Homo sapiens
MGWVGGRRRDSASPPGRSRSAADDINPAPANMEGGGGSVAVAGLGARGSGAAAATVRELLQDGCYSDFLNEDFDVKTYTSQSIHQAVIAEQLAKLAQGISQLDRELHLQVVARHEDLLAQATGIESLEGVLQMMQTRIGALQGAVDRIKAKIVEPYNKIVARTAQLARLQVACDLLRRIIRILNLSKRLQGQLQGGSREITKAAQSLNELDYLSQGIDLSGIEVIENDLLFIARARLEVENQAKRLLEQGLETQNPTQVGTALQVFYNLGTLKDTITSVVDGYCATLEENINSALDIKVLTQPSQSAVRGGPGRSTMPTPGNTAALRASFWTNMEKLMDHIYAVCGQVQHLQKVLAKKRDPVSHICFIEEIVKDGQPEIFYTFWNSVTQALSSQFHMATNSSMFLKQAFEGEYPKLLRLYNDLWKRLQQYSQHIQGNFNASGTTDLYVDLQHMEDDAQDIFIPKKPDYDPEKALKDSLQPYEAAYLSKSLSRLFDPINLVFPPGGRNPPSSDELDGIIKTIASELNVAAVDTNLTLAVSKNVAKTIQLYSVKSEQLLSTQGDASQVIGPLTEGQRRNVAVVNSLYKLHQSVTKVVSSQSSFPLAAEQTIISALKAIHALMENAVQPLLTSVGDAIEAIIITMHQEDFSGSLSSSGKPDVPCSLYMKELQGFIARVMSDYFKHFECLDFVFDNTEAIAQRAVELFIRHASLIRPLGEGGKMRLAADFAQMELAVGPFCRRVSDLGKSYRMLRSFRPLLFQASEHVASSPALGDVIPFSIIIQFLFTRAPAELKSPFQRAEWSHTRFSQWLDDHPSEKDRLLLIRGALEAYVQSVRSREGKEFAPVYPIMVQLLQKAMSALQ

SEQ ID NO: 6391 - DNA, 6420 bp, Homo sapiens
ctcatgggaaggaaggagggtagagacagtgagttttattggtccttttatggttcagacttccttcttcatcgactctccctaattctcttcactgttcatccccagcaacttttcttcccaagcatttcctgcgggcttttattaccccaggagtgccaatcaaggcgtggaacagataaagctgtgtagcaactaacgcgtgactcttgtgagtgtggagggcaaacgaagctccctgaaacctccgctctgctctcctgccttacgccgcgcggcccctgttctgaggtttaatacttgcttcacagataagcgctgcggccacgttccggtgcccaccttctccttggctagggcacgacgccagcccagggggcgcggccctgagctgctgcgagagacagctgaaagcgccggcccgacggccttggctccctcggtgcgctgggcgcagagcactcggaccctgggcgcccactgctcgagtacctgcgcggctcctagccaggcttagcccaggcgcgggctgagagtcagttcgccaggtgggcctggagccatgggctgggtgggcgggcggcgccgggattctgcgtcaccacctgggcggagccgttctgctgctgacgacatcaacccggcacctgccaacatggaaggtggcggcggcagcgtcgctgtagctggcctcggagctcgaggctctggagcggctgcagctacagtccgggaacttctgcaggacgggtgttatagtgactttttaaacgaagactttgatgtaaagacttatacttctcaatctattcatcaagctgtaattgctgaacaactagcaaaacttgcccaaggaatcagtcagttggacagagaactacacttacaggttgttgcaagacatgaagatttactggcacaagcaactgggattgagtcgttggaaggtgttcttcagatgatgcagacgagaattggggctttacagggagctgttgataggataaaagcaaaaattgttgaaccatacaataagatagttgcccggactgcacaactagcaagacttcaggttgcctgtgatttgcttcggaggattattcgtatcttgaatctcagtaagagactccaaggacaactgcaagggggaagtagagagataacaaaagctgctcagagtctcaatgaacttgattatctttctcaaggaatagatctttctggaatagaagtgatagaaaatgatctactttttattgcaagagcccgacttgaagtggaaaatcaagctaagcgcctactagagcagggtttggagactcagaatccaactcaagtcggaacagctcttcaggttttctataatcttggaactttgaaggatactattaccagtgttgtggatggatattgtgctactttagaagaaaatatcaacagtgcattagacataaaagttttgactcagccttcccagtcagctgtgagagggggacctggacgatctaccatgccaaccccaggaaatactgcagctttgcgtgcctcattctggaccaatatggagaaacttatggatcatatttatgctgtttgtggacaggtacaacatctacaaaaagtattggccaagaagagagatcctgtttctcacatttgtttcattgaagaaatagttaaggatggacaaccggaaattttctacacattttggaattcagttactcaggcactttcttctcaatttcatatggcaacaaactcttcgatgtttttgaagcaggcatttgaaggagaataccctaaattattacgtctttataatgacttatggaagcgtcttcaacaatacagtcagcatatccaagggaattttaatgcaagtggaactacagacctctatgttgacctacaacacatggaagatgatgcacaagatatattcataccaaaaaagccagattatgatccagaaaaggctttgaaagactcactacaaccctatgaggctgcttatctatcaaaatccttatctcgactcttcgatcctatcaacttggtttttcccccgggtggtcgtaatcctccttcctctgatgaacttgatggtattattaaaactatagcaagtgaactaaatgttgctgctgttgatacaaacctcacattagctgtgtcaaaaaatgtggcaaagaccatccagttatacagtgtaaaatcagagcagcttctctccacacaaggagatgcaagtcaggtgattgggcctcttactgaaggacagagaagaaatgtggcagtagtgaattcattgtataagttgcaccaatcagtaacaaaggctattcatgctcttatggaaaatgctgtgcaacccttactcacttctgtgggagatgctatagaggccataatcatcaccatgcatcaagaagacttttctgggtcattatccagctcaggaaaacctgatgttccttgttctctgtacatgaaggagctacaaggtttcattgccagagttatgagtgactattttaaacactttgaatgcttggattttgtctttgacaacactgaggctattgcccaaagagctgttgaactttttatccgccatgccagtctcataagacctcttggtgaaggtgggaaaatgcgacttgctgctgattttgcacagatggagttggctgtgggtccattctgtagacgagtatctgatttaggaaagtcctatcggatgctgagatcattcagacctctgctcttccaggcaagtgaacatgtagccagtagtcctgcattgggggatgtgattccgttcagcatcattattcagtttttgttcacgagagcacccgctgaactgaaatctcctttccagagggcagagtggtcccacacacgcttctctcagtggctggatgaccatccatctgaaaaggacaggctcctcctcatcaggggagccctggaagcttatgttcaatcagtgagaagtagagaaggcaaagaatttgcaccagtttatcccataatggttcagctgcttcaaaaggctatgtctgctcttcagtaatgacatgaaatctttgttcatctccactttgtgctaacccattcatagttggcagttaaacacatactccaaaagactgctactatctactattttaagaatgtaattgattgttcggtatttcctatcgacgtttatttacctctttagcacttatactttagcataaaaaatgttgagttatcaccacctttcaattccatggacctgatttttccagaaagatgttttcctctttcagatttttgtacaaggctaaaatgtctttcccatccataaccaagtcctcctatgggtacataaacccaaagtccccacttcttttaaagggatatgatcaagttataacatgtaccctgcttcccccaaccctgccttcttcactaaataagcatgtagctcagtggtttccaaatttggctgcacattcataccaatcaccaggggatttttttaaaatcctgatgcccaacttgcactccacattaattaacatgtctaggagtgggagcctgacagacaccactattaaaaaaaaaaaaaatccccaaaatgattccaatagacaacaaagttgaggaaccactggcacatcccaagctaagatacaaggttaaatggcctttttaagtatgtcatactggatctttaaataaagcaaggcttttgttacactttgtcatgttattaaaagcagacctttgggctgtttaaccgtgtaacaaaaatgccacgtgaaaaataaaaatttttattgtatagcaattctctataaatagtagataatctaagtccttattttctgatggctcttgttccactattaacattgtttttaatttttaaaatcctatcagcagcctcctaattagcagtgttaggaatttgccttatgttttccatctcatctcctgaacctgttattctgagaactcataaataaaattcagccaagattaatcaatcaatcaatcaatcagtagacgtcagagataagcaacttttttttccatttatttgaaataatatacaagaatatagtgtgcaaaatttaggggcaacatcatgaagaagtgtgatgaactgaaatcaattttacagctgtgattcctaaccagaaacaccacttggtaagtaacatgaaaagccatgattgtagctcagagcaaaagcagctgtattgccaatgtatttgctctaattttagacagttggaggaaaattaaagtgcaagtgttgcactgcagtaagtgcaaagtctgcccccaccataaagattatgatgacaaaatatatttaagatacatggctgaggagatacagaacacgaagttaaaaaatacaatggtgttgactgtttgttaatagcaccattacagtgactatatcccaatgctattaactaactttaccttggcctgggctaggtctccattggaaataataacggatggctgctgccacctggtgcatcaactcagcatgccatggtaactgcagcaggtggctcttaggctgggacaccaacaccagccacctgccccatgttctggtagcctcttggcactgaccagactaggagcgcctatgtttggcacagatgctgagccatgtggtggttactagaggaaaggccgactcccagcttctgcttcatttcatcatgtgtacaatacagattaataagcagtaaggagccaatgtataaacagcagttacatattttttaaattcccctttcgtacaatttaaaataaaacatgtatacacttctcctctctttctactgtactttagcaccacaggatatcaattttcaagcctattattacctgatagacatatatgaagtttggaagaaaaataaggcaatttggtttaaaatgttgatagttttagcttaatgctctaatggagaaagcaaatcctcactcatattattaaatcatttcaagactcaatgctatcagtatcttatggtcacacgaattgaggacaaatggtgagaccttgatcttcttaagtctttccatcaagagtcaatgtatatgcaaatatagacttaagaacataagcatcctggtttaatgttgttgtgagccctgtggaaataaaattaaactcagtgaatgtttacaaatcaatacatagtaatcctatatatgaaagctaagatgtataagatgtttataaatttactattagaaaatactgctttcttaaaggtgattttaaaaagctagctgatatctgatggctcaagcatccagaaaatgtatgcaatgataagacattgactaggatgaacagaaaagggatacaggaaaagtccgaacacatgaaattctaaattaaccaagaactgccaaaattcagttcagccaccctctcatctgactactgactgaccactatttttaaagaaattgtgaaaaatttaaacagatatgacctgcattttactaagaaacaggcacatgtacacaatgaatttaaaacatctttggccagccctcctactataaaaatattgatatcttcccttcatctttcaatgatacttcaaattgaccccactatatcacatgtaatttttttgcaattaatctaaaaacgctgaacctaaaagatgctagtttagtaatggaaaagttataagaaacaagtctatccaagatagcttatcatatagacttgtttgccaccattcctgggcctatttcttctcctccttgaaatttttcaatctagaaattctgtgccaatggcacaagtccccatgaatgacagctaacataccccaacacctccagccttattggtccctcaccaattaaggaaaaaaagctgttgagacaatcccaaaattattagagaaattttctactgtgatattaatggattaataatgcttatctttcaacccaactagaaacactgcattccaaaattatttttccaactcaatgtttagaacaaacattcttttgaagtttgcctgagatttcgacttgccatgctatgagagtaaatgacccttgaggaaaggcagtctttatatgatgatgtgataacattattaggttttgaagtataaaaatgctagagacagcatcaacacaacctcttaaaggttgtaacaactgctccaacatgccagtacacctgcacggataaggcaagataattttaaacactatttattgaaacatactgaattggttcttttcctcttccaacagtcaggatttaaacgtttctgttcttcagccaaagcctttgcttctaatgtgtacattcttctctcttcattcttcattttcttccacctgtcacca

SEQ ID NO: 6392 - protein, 839 aa, Homo sapiens
MGWVGGRRRDSASPPGRSRSAADDINPAPANMEGGGGSVAVAGLGARGSGAAAATVRELLQDGCYSDFLNEDFDVKTYTSQSIHQAVIAEQLAKLAQGISQLDRELHLQVVARHEDLLAQATGIESLEGVLQMMQTRIGALQGAVDRIKAKIVEPYNKIVARTAQLARLQVACDLLRRIIRILNLSKRLQGQLQGGSREITKAAQSLNELDYLSQGIDLSGIEVIENDLLFIARARLEVENQAKRLLEQGLETQNPTQVGTALQVFYNLGTLKDTITSVVDGYCATLEENINSALDIKVLTQPSQSAVRGGPGRSTMPTPGNTAALRASFWTNMEKLMDHIYAVCGQVQHLQKVLAKKRDPVSHICFIEEIVKDGQPEIFYTFWNSVTQALSSQFHMATNSSMFLKQAFEGEYPKLLRLYNDLWKRLQQYSQHIQGNFNASGTTDLYVDLQHMEDDAQDIFIPKKPDYDPEKALKDSLQPYEAAYLSKSLSRLFDPINLVFPPGGRNPPSSDELDGIIKTIASELNVAAVDTNLTLAVSKNVAKTIQLYSVKSEQLLSTQGDASQVIGPLTEGQRRNVAVVNSLYKLHQSVTKAIHALMENAVQPLLTSVGDAIEAIIITMHQEDFSGSLSSSGKPDVPCSLYMKELQGFIARVMSDYFKHFECLDFVFDNTEAIAQRAVELFIRHASLIRPLGEGGKMRLAADFAQMELAVGPFCRRVSDLGKSYRMLRSFRPLLFQASEHVASSPALGDVIPFSIIIQFLFTRAPAELKSPFQRAEWSHTRFSQWLDDHPSEKDRLLLIRGALEAYVQSVRSREGKEFAPVYPIMVQLLQKAMSALQ

SEQ ID NO: 6393 - DNA, 4857 bp, Homo sapiens
ctcatgggaaggaaggagggtagagacagtgagttttattggtccttttatggttcagacttccttcttcatcgactctccctaattctcttcactgttcatccccagcaacttttcttcccaagcatttcctgcgggcttttattaccccaggagtgccaatcaaggcgtggaacagataaagctgtgtagcaactaacgcgtgactcttgtgagtgtggagggcaaacgaagctccctgaaacctccgctctgctctcctgccttacgccgcgcggcccctgttctgaggtttaatacttgcttcacagataagcgctgcggccacgttccggtgcccaccttctccttggctagggcacgacgccagcccagggggcgcggccctgagctgctgcgagagacagctgaaagcgccggcccgacggccttggctccctcggtgcgctgggcgcagagcactcggaccctgggcgcccactgctcgagtacctgcgcggctcctagccaggcttagcccaggcgcgggctgagagtcagttcgccaggtgggcctggagccatgggctgggtgggcgggcggcgccgggattctgcgtcaccacctgggcggagccgttctgctgctgacgacatcaacccggcacctgccaacatggaaggtggcggcggcagcgtcgctgtagctggcctcggagctcgaggctctggagcggctgcagctacagtccgggaacttctgcaggacgggtgttatagtgactttttaaacgaagactttgatgtaaagacttatacttctcaatctattcatcaagctgtaattgctgaacaactagcaaaacttgcccaaggaatcagtcagttggacagagaactacacttacaggttgttgcaagacatgaagatttactggcacaagcaactgggattgagtcgttggaaggtgttcttcagatgatgcagacgagaattggggctttacagggagctgttgataggataaaagcaaaaattgttgaaccatacaataagatagttgcccggactgcacaactagcaagacttcaggttgcctgtgatttgcttcggaggattattcgtatcttgaatctcagtaagagactccaaggacaactgcaagggggaagtagagagataacaaaagctgctcagagtctcaatgaacttgattatctttctcaaggaatagatctttctggaatagaagtgatagaaaatgatctactttttattgcaagagcccgacttgaagtggaaaatcaagctaagcgcctactagagcagggtttggagactcagaatccaactcaagtcggaacagctcttcaggttttctataatcttggaactttgaaggatactattaccagtgttgtggatggatattgtgctactttagaagaaaatatcaacagtgcattagacataaaagttttgactcagccttcccagtcagctgtgagagggggacctggacgatctaccatgccaaccccaggaaatactgcagctttgcgtgcctcattctggaccaatatggagaaacttatggatcatatttatgctgtttgtggacaggtacaacatctacaaaaagtattggccaagaagagagatcctgtttctcacatttgtttcattgaagaaatagttaaggatggacaaccggaaattttctacacattttggaattcagttactcaggcactttcttctcaatttcatatggcaacaaactcttcgatgtttttgaagcaggcatttgaaggagaataccctaaattattacgtctttataatgacttatggaagcgtcttcaacaatacagtcagcatatccaagggaattttaatgcaagtggaactacagacctctatgttgacctacaacacatggaagatgatgcacaagatatattcataccaaaaaagccagattatgatccagaaaaggctttgaaagactcactacaaccctatgaggctgcttatctatcaaaatccttatctcgactcttcgatcctatcaacttggtttttcccccgggtggtcgtaatcctccttcctctgatgaacttgatggtattattaaaactatagcaagtgaactaaatgttgctgctgttgatacaaacctcacattagctgtgtcaaaaaatgtggcaaagaccatccagttatacagtgtaaaatcagagcagcttctctccacacaaggagatgcaagtcaggtgattgggcctcttactgaaggacagagaagaaatgtggcagtagtgaattcattgtataagttgcaccaatcagtaacaaaggctattcatgctcttatggaaaatgctgtgcaacccttactcacttctgtgggagatgctatagaggccataatcatcaccatgcatcaagaagacttttctgggtcattatccagctcaggaaaacctgatgttccttgttctctgtacatgaaggagctacaaggtttcattgccagagttatgagtgactattttaaacactttgaatgcttggattttgtctttgacaacactgaggctattgcccaaagagctgttgaactttttatccgccatgccagtctcataagacctcttggtgaaggtgggaaaatgcgacttgctgctgattttgcacagatggagttggctgtgggtccattctgtagacgagtatctgatttaggaaagtcctatcggatgctgagatcattcagacctctgctcttccaggcaagtgaacatgtagccagtagtcctgcattgggggatgtgattccgttcagcatcattattcagtttttgttcacgagagcacccgctgaactgaaatctcctttccagagggcagagtggtcccacacacgcttctctcagtggctggatgaccatccatctgaaaaggacaggctcctcctcatcaggggagccctggaagcttatgttcaatcagtgagaagtagagaaggcaaagaatttgcaccagtttatcccataatggttcagctgcttcaaaaggctatgtctgctcttcagtaatgacatgaaatctttgttcatctccactttgtgctaacccattcatagttggcagttaaacacatactccaaaagactgctactatctactattttaagaatgtaattgattgttcggtatttcctatcgacgtttatttacctctttagcacttatactttagcataaaaaatgttgagttatcaccacctttcaattccatggacctgatttttccagaaagatgttttcctctttcagatttttgtacaaggctaaaatgtctttcccatccataaccaagtcctcctatgggtacataaacccaaagtccccacttcttttaaagggatatgatcaagttataacatgtaccctgcttcccccaaccctgccttcttcactaaataagcatgtagctcagtggtttccaaatttggctgcacattcataccaatcaccaggggatttttttaaaatcctgatgcccaacttgcactccacattaattaacatgtctaggagtgggagcctgacagacaccactattaaaaaaaaaaaaaatccccaaaatgattccaatagacaacaaagttgaggaaccactggcacatcccaagctaagatacaaggttaaatggcctttttaagtatgtcatactggatctttaaataaagcaaggcttttgttacactttgtcatgttattaaaagcagacctttgggctgtttaaccgtgtaacaaaaatgccacgtgaaaaataaaaatttttattgtatagcaattctctataaatagtagataatctaagtccttattttctgatggctcttgttccactattaacattgtttttaatttttaaaatcctatcagcagcctcctaattagcagtgttaggaatttgccttatgttttccatctcatctcctgaacctgttattctgagaactcataaataaaattcagccaagattaatcaatcaatcaatcaatcagtagacgtcagagataagcaacttttttttccatttatttgaaataatatacaagaatatagtgtgcaaaatttaggggcaacatcatgaagaagtgtgatgaactgaaatcaattttacagctgtgattcctaaccagaaacaccacttggtaagtaacatgaaaagccatgattgtagctcagagcaaaagcagctgtattgccaatgtatttgctctaattttagacagttggaggaaaattaaagtgcaagtgttgcactgcagtaagtgcaaagtctgcccccaccataaagattatgatgacaaaatatatttaagatacatggctgaggagatacagaacacgaagttaaaaaatacaatggtgttgactgtttgttaatagcaccattacagtgactatatcccaatgctattaactaactttaccttggcctgggctaggtctccattggaaataataacggatggctgctgccacctggtgcatcaactcagcatgccatggtaactgcagcaggtggctcttaggctgggacaccaacaccagccacctgccccatgttctggtagcctcttggcactgaccagactaggagcgcctatgtttggcacagatgctgagccatgtggtggttactagaggaaaggccgactcccagcttctgcttcatttcatcatgtgtacaatacagattaataagcagtaaggagccaatgtataaacagcagttacatattttttaaattcccctttcgtacaatttaaaataaaacatgtatacacttctc

SEQ ID NO: 6394 - protein, 839 aa, Homo sapiens; identical to SEQ ID NO: 6392

SEQ ID NO: 6395 - DNA, 4920 bp, Homo sapiens
ctcatgggaaggaaggagggtagagacagtgagttttattggtccttttatggttcagacttccttcttcatcgactctccctaattctcttcactgttcatccccagcaacttttcttcccaagcatttcctgcgggcttttattaccccaggagtgccaatcaaggcgtggaacagataaagctgtgtagcaactaacgcgtgactcttgtgagtgtggagggcaaacgaagctccctgaaacctccgctctgctctcctgccttacgccgcgcggcccctgttctgaggtttaatacttgcttcacagataagcgctgcggccacgttccggtgcccaccttctccttggctagggcacgacgccagcccagggggcgcggccctgagctgctgcgagagacagctgaaagcgccggcccgacggccttggctccctcggtgcgctgggcgcagagcactcggaccctgggcgcccactgctcgagtacctgcgcggctcctagccaggcttagcccaggcgcgggctgagagtcagttcgccaggtgggcctggagccatgggctgggtgggcgggcggcgccgggattctgcgtcaccacctgggcggagccgttctgctgctgacgacatcaacccggcacctgccaacatggaaggtggcggcggcagcgtcgctgtagctggcctcggagctcgaggctctggagcggctgcagctacagtccgggaacttctgcaggacgggtgttatagtgactttttaaacgaagactttgatgtaaagacttatacttctcaatctattcatcaagctgtaattgctgaacaactagcaaaacttgcccaaggaatcagtcagttggacagagaactacacttacaggttgttgcaagacatgaagatttactggcacaagcaactgggattgagtcgttggaaggtgttcttcagatgatgcagacgagaattggggctttacagggagctgttgataggataaaagcaaaaattgttgaaccatacaataagatagttgcccggactgcacaactagcaagacttcaggttgcctgtgatttgcttcggaggattattcgtatcttgaatctcagtaagagactccaaggacaactgcaagggggaagtagagagataacaaaagctgctcagagtctcaatgaacttgattatctttctcaaggaatagatctttctggaatagaagtgatagaaaatgatctactttttattgcaagagcccgacttgaagtggaaaatcaagctaagcgcctactagagcagggtttggagactcagaatccaactcaagtcggaacagctcttcaggttttctataatcttggaactttgaaggatactattaccagtgttgtggatggatattgtgctactttagaagaaaatatcaacagtgcattagacataaaagttttgactcagccttcccagtcagctgtgagagggggacctggacgatctaccatgccaaccccaggaaatactgcagctttgcgtgcctcattctggaccaatatggagaaacttatggatcatatttatgctgtttgtggacaggtacaacatctacaaaaagtattggccaagaagagagatcctgtttctcacatttgtttcattgaagaaatagttaaggatggacaaccggaaattttctacacattttggaattcagttactcaggcactttcttctcaatttcatatggcaacaaactcttcgatgtttttgaagcaggcatttgaaggagaataccctaaattattacgtctttataatgacttatggaagcgtcttcaacaatacagtcagcatatccaagggaattttaatgcaagtggaactacagacctctatgttgacctacaacacatggaagatgatgcacaagatatattcataccaaaaaagccagattatgatccagaaaaggctttgaaagactcactacaaccctatgaggctgcttatctatcaaaatccttatctcgactcttcgatcctatcaacttggtttttcccccgggtggtcgtaatcctccttcctctgatgaacttgatggtattattaaaactatagcaagtgaactaaatgttgctgctgttgatacaaacctcacattagctgtgtcaaaaaatgtggcaaagaccatccagttatacagtgtaaaatcagagcagcttctctccacacaaggagatgcaagtcaggtgattgggcctcttactgaaggacagagaagaaatgtggcagtagtgaattcattgtataagttgcaccaatcagtaacaaaggttgtttccagtcagagctcattcccactggcagctgagcaaactataatttcagctctaaaggctattcatgctcttatggaaaatgctgtgcaacccttactcacttctgtgggagatgctatagaggccataatcatcaccatgcatcaagaagacttttctgggtcattatccagctcaggaaaacctgatgttccttgttctctgtacatgaaggagctacaaggtttcattgccagagttatgagtgactattttaaacactttgaatgcttggattttgtctttgacaacactgaggctattgcccaaagagctgttgaactttttatccgccatgccagtctcataagacctcttggtgaaggtgggaaaatgcgacttgctgctgattttgcacagatggagttggctgtgggtccattctgtagacgagtatctgatttaggaaagtcctatcggatgctgagatcattcagacctctgctcttccaggcaagtgaacatgtagccagtagtcctgcattgggggatgtgattccgttcagcatcattattcagtttttgttcacgagagcacccgctgaactgaaatctcctttccagagggcagagtggtcccacacacgcttctctcagtggctggatgaccatccatctgaaaaggacaggctcctcctcatcaggggagccctggaagcttatgttcaatcagtgagaagtagagaaggcaaagaatttgcaccagtttatcccataatggttcagctgcttcaaaaggctatgtctgctcttcagtaatgacatgaaatctttgttcatctccactttgtgctaacccattcatagttggcagttaaacacatactccaaaagactgctactatctactattttaagaatgtaattgattgttcggtatttcctatcgacgtttatttacctctttagcacttatactttagcataaaaaatgttgagttatcaccacctttcaattccatggacctgatttttccagaaagatgttttcctctttcagatttttgtacaaggctaaaatgtctttcccatccataaccaagtcctcctatgggtacataaacccaaagtccccacttcttttaaagggatatgatcaagttataacatgtaccctgcttcccccaaccctgccttcttcactaaataagcatgtagctcagtggtttccaaatttggctgcacattcataccaatcaccaggggatttttttaaaatcctgatgcccaacttgcactccacattaattaacatgtctaggagtgggagcctgacagacaccactattaaaaaaaaaaaaaatccccaaaatgattccaatagacaacaaagttgaggaaccactggcacatcccaagctaagatacaaggttaaatggcctttttaagtatgtcatactggatctttaaataaagcaaggcttttgttacactttgtcatgttattaaaagcagacctttgggctgtttaaccgtgtaacaaaaatgccacgtgaaaaataaaaatttttattgtatagcaattctctataaatagtagataatctaagtccttattttctgatggctcttgttccactattaacattgtttttaatttttaaaatcctatcagcagcctcctaattagcagtgttaggaatttgccttatgttttccatctcatctcctgaacctgttattctgagaactcataaataaaattcagccaagattaatcaatcaatcaatcaatcagtagacgtcagagataagcaacttttttttccatttatttgaaataatatacaagaatatagtgtgcaaaatttaggggcaacatcatgaagaagtgtgatgaactgaaatcaattttacagctgtgattcctaaccagaaacaccacttggtaagtaacatgaaaagccatgattgtagctcagagcaaaagcagctgtattgccaatgtatttgctctaattttagacagttggaggaaaattaaagtgcaagtgttgcactgcagtaagtgcaaagtctgcccccaccataaagattatgatgacaaaatatatttaagatacatggctgaggagatacagaacacgaagttaaaaaatacaatggtgttgactgtttgttaatagcaccattacagtgactatatcccaatgctattaactaactttaccttggcctgggctaggtctccattggaaataataacggatggctgctgccacctggtgcatcaactcagcatgccatggtaactgcagcaggtggctcttaggctgggacaccaacaccagccacctgccccatgttctggtagcctcttggcactgaccagactaggagcgcctatgtttggcacagatgctgagccatgtggtggttactagaggaaaggccgactcccagcttctgcttcatttcatcatgtgtacaatacagattaataagcagtaaggagccaatgtataaacagcagttacatattttttaaattcccctttcgtacaatttaaaataaaacatgtatacacttctc

SEQ ID NO: 6396 - protein, 860 aa, Homo sapiens; identical to SEQ ID NO: 6390

SEQ ID NO: 6397 - DNA, 3845 bp, Homo sapiens
ctcatgggaaggaaggagggtagagacagtgagttttattggtccttttatggttcagacttccttcttcatcgactctccctaattctcttcactgttcatccccagcaacttttcttcccaagcatttcctgcgggcttttattaccccaggagtgccaatcaaggcgtggaacagataaagctgtgtagcaactaacgcgtgactcttgtgagtgtggagggcaaacgaagctccctgaaacctccgctctgctctcctgccttacgccgcgcggcccctgttctgaggtttaatacttgcttcacagataagcgctgcggccacgttccggtgcccaccttctccttggctagggcacgacgccagcccagggggcgcggccctgagctgctgcgagagacagctgaaagcgccggcccgacggccttggctccctcggtgcgctgggcgcagagcactcggaccctgggcgcccactgctcgagtacctgcgcggctcctagccaggcttagcccaggcgcgggctgagagtcagttcgccaggtgggcctggagccatgggctgggtgggcgggcggcgccgggattctgcgtcaccacctgggcggagccgttctgctgctgacgacatcaacccggcacctgccaacatggaaggtggcggcggcagcgtcgctgtagctggcctcggagctcgaggctctggagcggctgcagctacagtccgggaacttctgcaggacgggtgttatagtgactttttaaacgaagactttgatgtaaagacttatacttctcaatctattcatcaagctgtaattgctgaacaactagcaaaacttgcccaaggaatcagtcagttggacagagaactacacttacaggttgttgcaagacatgaagatttactggcacaagcaactgggattgagtcgttggaaggtgttcttcagatgatgcagacgagaattggggctttacagggagctgttgataggataaaagcaaaaattgttgaaccatacaataagatagttgcccggactgcacaactagcaagacttcaggttgcctgtgatttgcttcggaggattattcgtatcttgaatctcagtaagagactccaaggacaactgcaagggggaagtagagagataacaaaagctgctcagagtctcaatgaacttgattatctttctcaaggaatagatctttctggaatagaagtgatagaaaatgatctactttttattgcaagagcccgacttgaagtggaaaatcaagctaagcgcctactagagcagggtttggagactcagaatccaactcaagtcggaacagctcttcaggttttctataatcttggaactttgaaggatactattaccagtgttgtggatggatattgtgctactttagaagaaaatatcaacagtgcattagacataaaagttttgactcagccttcccagtcagctgtgagagggggacctggacgatctaccatgccaaccccaggaaatactgcagctttgcgtgcctcattctggaccaatatggagaaacttatggatcatatttatgctgtttgtggacaggtacaacatctacaaaaagtattggccaagaagagagatcctgtttctcacatttgtttcattgaagaaatagttaaggatggacaaccggaaattttctacacattttggaattcagttactcaggcactttcttctcaatttcatatggcaacaaactcttcgatgtttttgaagcaggcatttgaaggagaataccctaaattattacgtctttataatgacttatggaagcgtcttcaacaatacagtcagcatatccaagggaattttaatgcaagtggaactacagacctctatgttgacctacaacacatggaagatgatgcacaagatatattcataccaaaaaagccagattatgatccagaaaaggctttgaaagactcactacaaccctatgaggctgcttatctatcaaaatccttatctcgactcttcgatcctatcaacttggtttttcccccgggtggtcgtaatcctccttcctctgatgaacttgatggtattattaaaactatagcaagtgaactaaatgttgctgctgttgatacaaacctcacattagctgtgtcaaaaaatgtggcaaagaccatccagttatacagtgtaaaatcagagcagcttctctccacacaaggagatgcaagtcaggtgattgggcctcttactgaaggacagagaagaaatgtggcagtagtgaattcattgtataagttgcaccaatcagtaacaaaggctattcatgctcttatggaaaatgctgtgcaacccttactcacttctgtgggagatgctatagaggccataatcatcaccatgcatcaagaagacttttctgggtcattatccagctcaggaaaacctgatgttccttgttctctgtacatgaaggagctacaaggtttcattgccagagttatgagtgactattttaaacactttgaatgcttggattttgtctttgacaacactgaggctattgcccaaagagctgttgaactttttatccgccatgccagtctcataagacctcttggtgaaggtgggaaaatgcgacttgctgctgattttgcacagatggagttggctgtgggtccattctgtagacgagtatctgatttaggaaagtcctatcggatgctgagatcattcagacctctgctcttccaggcaagtgaacatgtagccagtagtcctgcattgggggatgtgattccgttcagcatcattattcagtttttgttcacgagagcacccgctgaactgaaatctcctttccagagggcagagtggtcccacacacgcttctctcagtggctggatgaccatccatctgaaaaggacaggctcctcctcatcaggggagccctggaagcttatgttcaatcagtgagaagtagagaaggcaaagaatttgcaccagtttatcccataatggttcagctgcttcaaaaggctatgtctgctcttcagtaatgacatgaaatctttgttcatctccactttgtgctaacccattcatagttggcagttaaacacatactccaaaagactgctactatctactattttaagaatgtaattgattgttcggtatttcctatcgacgtttatttacctctttagcacttatactttagcataaaaaatgttgagttatcaccacctttcaattccatggacctgatttttccagaaagatgttttcctctttcagatttttgtacaaggctaaaatgtctttcccatccataaccaagtcctcctatgggtacataaacccaaagtccccacttcttttaaagggatatgatcaagttataacatgtaccctgcttcccccaaccctgccttcttcactaaataagcatgtagctcagtggtttccaaatttggctgcacattcataccaatcaccaggggatttttttaaaatcctgatgcccaacttgcactccacattaattaacatgtctaggagtgggagcctgacagacaccactattaaaaaaaaaaaaaatccccaaaatgattccaatagacaacaaagttgaggaaccactggcacatcccaagctaagatacaaggttaaatggcctttttaagtatgtcatactggatctttaaataaagcaaggcttttgttacactttgtcatgttattaaaagcagacctttgggctgtttaaccgtgtaacaaaaatgccacgtgaaaaataaaaatttttattgtatagc

SEQ ID NO: 6398 - protein, 839 aa, Homo sapiens; identical to SEQ ID NO: 6392

SEQ ID NO: 6399 - DNA, 3713 bp, Homo sapiens
attccccaagatgctctcttctcttcctatttcatatttttcctaagtgggaaacctcacccagcaataaagttttctatgtaaaccaccatatcttatgcaaatagggatttttatttcttactttctgatctttatgcctgtttttccatgccttgtttcactgtccaggatctgcagtacagtgttgaatagaactggctattcatgctcttatggaaaatgctgtgcaacccttactcacttctgtgggagatgctatagaggccataatcatcaccatgcatcaagaagacttttctgggtcattatccagctcaggaaaacctgatgttccttgttctctgtacatgaaggagctacaaggtttcattgccagagttatgagtgactattttaaacactttgaatgcttggattttgtctttgacaacactgaggctattgcccaaagagctgttgaactttttatccgccatgccagtctcataagacctcttggtgaaggtgggaaaatgcgacttgctgctgattttgcacagatggagttggctgtgggtccattctgtagacgagtatctgatttaggaaagtcctatcggatgctgagatcattcagacctctgctcttccaggcaagtgaacatgtagccagtagtcctgcattgggggatgtgattccgttcagcatcattattcagtttttgttcacgagagcacccgctgaactgaaatctcctttccagagggcagagtggtcccacacacgcttctctcagtggctggatgaccatccatctgaaaaggacaggctcctcctcatcaggtaaagccaggtgctctgggggcacccatctggtctggaagcccaaggagggtggggatgcaagagaggatgaaggagcagtgcctgggggcatggacatgtgactgcaccttccagtggcgggccacctcactgcctaggcacgggtgctggagcaaccagcagttggaaatgttggccacaacatcttttgctttctttcattccaaaccttcatatccctgatgtgcaatcctgtgtcccatgcaaccctaaggaccatgcatttgtacctttgaaaatcatcatttgctatgaaaagttttgccctagctccgcatcttttacttcatttttatgtgctgcagttactgaattggtggaacacagatgtgagtgaatttttaaaaatacccaagtgcgaaacagttctgaggaggaaacaagaacaacccagcagccacttggataccatggccctccagtagtgccccatgaatgcattcacatacatacgcatgtgctcttgcccacacgtgcacacacccccatgtaccccaaccatgcccagggtggggtgctttaactgtcatacatggcttattaagcaacactcttccctgcaactgctctcaccatcaccagagacctctcagccaccaaacattcccatttttaccttaccactctgtagctttagctacagttgaccgccatttccttctgtaaactcataaactgggactcagcacatttttattgatgctgagctcacattttatcagcatggtaggccctgggccaggaaccgaggatacgaagtaagccgagatatggccctgtcctctcagagcttgcattacaccacagccatctgtttctgttctaacttctctggccatttttttttgtgtgtcatttgctgaattatcttcttctagccattccttaaatgctatcatttcccatattttcttcttctcatcctgcctctgccttggttcccaggtgagcttgtccagacccatgcctctagtgccccttctatacttaagagccctcaggtctgtgactgcctctggatggggccttggcccagtaaacttgctatcatatgtcaccacccacagaaatctcaaccccagaatggtcaaaataattctaatcttttctctcaaaccttctcattctcttatactccctgtcttggttgggaggtcacaatcacctaactagccaagccggaaaacctttacatcatcattcaactcctctgtcatccttattcctcaaacccactctgttgcgtctctaaaatagctcttgaagtcattctcaactctcccaggggatcccaattctgttggtctgggcccactgcacccagtgatcctttgttagcctgtgtcaggtgatgagttgagttccctaaagccagagtggggctgacatgatgaggtggttctaaaccacatgtgcacacaagaatcatttacatagcttggaaaattcctagtgcccaggtctctcacccttgcctacctcagaatctccagggtaggcctgctatcaggatttctctatagctccccaagaaggtccagggtgcagccaagggcgtgaacccctgccatagtgggtcatatttcagttaggatgaaagactgctgaggaagctatgacaggtcagtaagaaccatcagcctgtcagctttgtttccagaagtgaccctgagccctcaagcttggtacccacatcccacatgagccactggccctctgggcgtatgtgtggataaagattagctcggaccctgctctttttccttgcttatctgttactcagctatgaacatctgacacagaaatgggagaggttaccagccccggtgaatgttcctggtaaaatctgccctcgggaaaggctttggatttgggtgaggagtttgggcctgggctaacacagggatttgcaatgtctgtgtggattatttttcccgagtcccaaagattcactcagctgcaacacactcagtcgtcttaaaaagaggattcagttaattgaacacgttcatttttctcatcttaacaagttggtcatttttgtcgtcttaacaagttggaatgagttcatccaaaacagttgtcctgctgtgtgtacatcacaaatctgttttcttttgcttctctttaaaaatgtctcctgagtgatttcatcagcagtgctgttgctaagcctatatttagcaactgaaaatcatgctcagaaatactgtcatgcttttttaaaaaggcatatccatccctccacacatggctgattccagaaccttcatgcccttagcaaaaaattgagctgtccttcagggtttcaaaaaaagtactgtactcctgctgcaccccaggctcttggcaaggaggggacttttgtcctagagaatgttctttcttatgtattattgcaaaacaattttgttcttgcatactgaagcatcactggatgaatttctttcccctgtagacaaaccgagggtgagtattgctctttaaatgtcagtaaatttgttttagcttctggggcaaaccttgttgtatactcattctgttcctcccagcataatatgttaggttgtcataaaatagggcaaattgaggatagtgtaactactgctgctgaataaatgggaaatagtgaaccatcctgccttcctgttttcttctgacaccagatgctttctggagcttaaatgaatactagtcaagttcatttgaaaatcagagtaataacttactcatgggaccaagtggtgtaaatgggggcagttgtatgtgttcagcctgcatcaggcaggtgctccagacacgtgtgctccctcagatgcagaggcagccgcctggctcgtgcctg

SEQ ID NO: 6400 - protein, 204 aa, Homo sapiens
MENAVQPLLTSVGDAIEAIIITMHQEDFSGSLSSSGKPDVPCSLYMKELQGFIARVMSDYFKHFECLDFVFDNTEAIAQRAVELFIRHASLIRPLGEGGKMRLAADFAQMELAVGPFCRRVSDLGKSYRMLRSFRPLLFQASEHVASSPALGDVIPFSIIIQFLFTRAPAELKSPFQRAEWSHTRFSQWLDDHPSEKDRLLLIR

SEQ ID NO: 6401 - DNA, 3339 bp, Homo sapiens
ctcatgggaaggaaggagggtagagacagtgagttttattggtccttttatggttcagacttccttcttcatcgactctccctaattctcttcactgttcatccccagcaacttttcttcccaagcatttcctgcgggcttttattaccccaggagtgccaatcaaggcgtggaacagataaagctgtgtagcaactaacgcgtgactcttgtgagtgtggagggcaaacgaagctccctgaaacctccgctctgctctcctgccttacgccgcgcggcccctgttctgaggtttaatacttgcttcacagataagcgctgcggccacgttccggtgcccaccttctccttggctagggcacgacgccagcccagggggcgcggccctgagctgctgcgagagacagctgaaagcgccggcccgacggccttggctccctcggtgcgctgggcgcagagcactcggaccctgggcgcccactgctcgagtacctgcgcggctcctagccaggcttagcccaggcgcgggctgagagtcagttcgccaggtgggcctggagccatgggctgggtgggcgggcggcgccgggattctgcgtcaccacctgggcggagccgttctgctgctgacgacatcaacccggcacctgccaacatggaaggtggcggcggcagcgtcgctgtagctggcctcggagctcgaggctctggagcggctgcagctacagtccgggaacttctgcaggacgggtgttatagtgactttttaaacgaagactttgatgtaaagacttatacttctcaatctattcatcaagctgtaattgctgaacaactagcaaaacttgcccaaggaatcagtcagttggacagagaactacacttacaggttgttgcaagacatgaagatttactggcacaagcaactgggattgagtcgttggaaggtgttcttcagatgatgcagacgagaattggggctttacagggagctgttgataggataaaagcaaaaattgttgaaccatacaataagatagttgcccggactgcacaactagcaagacttcaggttgcctgtgatttgcttcggaggattattcgtatcttgaatctcagtaagagactccaaggacaactgcaagggggaagtagagagataacaaaagctgctcagagtctcaatgaacttgattatctttctcaaggaatagatctttctggaatagaagtgatagaaaatgatctactttttattgcaagagcccgacttgaagtggaaaatcaagctaagcgcctactagagcagggtttggagactcagaatccaactcaagtcggaacagctcttcaggttttctataatcttggaactttgaaggatactattaccagtgttgtggatggatattgtgctactttagaagaaaatatcaacagtgcattagacataaaagttttgactcagccttcccagtcagctgtgagagggggacctggacgatctaccatgccaaccccaggaaatactgcagctttgcgtgcctcattctggaccaatatggagaaacttatggatcatatttatgctgtttgtggacaggtacaacatctacaaaaagtattggccaagaagagagatcctgtttctcacatttgtttcattgaagaaatagttaaggatggacaaccggaaattttctacacattttggaattcagttactcaggcactttcttctcaatttcatatggcaacaaactcttcgatgtttttgaagcaggcatttgaaggagaataccctaaattattacgtctttataatgacttatggaagcgtcttcaacaatacagtcagcatatccaagggaattttaatgcaagtggaactacagacctctatgttgacctacaacacatggaagatgatgcacaagatatattcataccaaaaaagccagattatgatccagaaaaggctttgaaagactcactacaaccctatgaggctgcttatctatcaaaatccttatctcgactcttcgatcctatcaacttggtttttcccccgggtggtcgtaatcctccttcctctgatgaacttgatggtattattaaaactatagcaagtgaactaaatgttgctgctgttgatacaaacctcacattagctgtgtcaaaaaatgtggcaaagaccatccagttatacagtgtaaaatcagagcagcttctctccacacaaggagatgcaagtcaggtgattgggcctcttactgaaggacagagaagaaatgtggcagtagtgaattcattgtataagttgcaccaatcagtaacaaaggttgtttccagtcagagctcattcccactggcagctgagcaaactataatttcagctctaaaggctattcatgctcttatggaaaatgctgtgcaacccttactcacttctgtgggagatgctatagaggccataatcatcaccatgcatcaagaagacttttctgggtcattatccagctcaggaaaacctgatgttccttgttctctgtacatgaaggagctacaaggtttcattgccagagttatgagtgactattttaaacactttgaatgcttggattttgtctttgacaacactgaggctattgcccaaagagctgttgaactttttatccgccatgccagtctcataagacctcttggtgaaggtgggaaaatgcgacttgctgctgattttgcacagatggagttggctgtgggtccattctgtagacgagtatctgatttaggaaagtcctatcggatgctgagatcattcagacctctgctcttccaggcaagtgaacatgtagccagtagtcctgcattgggggatgtgattccgttcagcatcattattcagtttttgttcacgagagcacccgctgaactgaaatctcctttccagagggcagagtggtcccacacacgcttctctcagtggctggatgaccatccatctgaaaaggacaggctcctcctcatcaggtaaagccaggtgctctgggggcacccatctggtctggaagcccaaggagggtggggatgcaagagaggatgaaggagcagtgcctgggggcatggacatgtgactgcaccttccagtggcgggccacctcactgcctaggcacgggtgctggagcaaccagcagttggaaatgttggccacaacatcttttgctttctttcattccaaaccttcatatccctgatgtgcaatcctgtgtcccatgcaaccctaaggaccatgcatttgtacctttgaaaatcatcatttgctatgaaaagttttgccc

SEQ ID NO: 6402 - protein, 823 aa, Homo sapiens
MGWVGGRRRDSASPPGRSRSAADDINPAPANMEGGGGSVAVAGLGARGSGAAAATVRELLQDGCYSDFLNEDFDVKTYTSQSIHQAVIAEQLAKLAQGISQLDRELHLQVVARHEDLLAQATGIESLEGVLQMMQTRIGALQGAVDRIKAKIVEPYNKIVARTAQLARLQVACDLLRRIIRILNLSKRLQGQLQGGSREITKAAQSLNELDYLSQGIDLSGIEVIENDLLFIARARLEVENQAKRLLEQGLETQNPTQVGTALQVFYNLGTLKDTITSVVDGYCATLEENINSALDIKVLTQPSQSAVRGGPGRSTMPTPGNTAALRASFWTNMEKLMDHIYAVCGQVQHLQKVLAKKRDPVSHICFIEEIVKDGQPEIFYTFWNSVTQALSSQFHMATNSSMFLKQAFEGEYPKLLRLYNDLWKRLQQYSQHIQGNFNASGTTDLYVDLQHMEDDAQDIFIPKKPDYDPEKALKDSLQPYEAAYLSKSLSRLFDPINLVFPPGGRNPPSSDELDGIIKTIASELNVAAVDTNLTLAVSKNVAKTIQLYSVKSEQLLSTQGDASQVIGPLTEGQRRNVAVVNSLYKLHQSVTKVVSSQSSFPLAAEQTIISALKAIHALMENAVQPLLTSVGDAIEAIIITMHQEDFSGSLSSSGKPDVPCSLYMKELQGFIARVMSDYFKHFECLDFVFDNTEAIAQRAVELFIRHASLIRPLGEGGKMRLAADFAQMELAVGPFCRRVSDLGKSYRMLRSFRPLLFQASEHVASSPALGDVIPFSIIIQFLFTRAPAELKSPFQRAEWSHTRFSQWLDDHPSEKDRLLLIR

SEQ ID NO: 6403 - DNA, 602 bp, Homo sapiens
tttgataaatttaacagtccaggagataactaagaatgaagaaggcaatgaaatcattctctgaactgctagattgatgttacagtgtccatatactaaagcacacacacataactcataggaaagtctcccggctttaacatggttagtcctctggtttcccacttcaaagcaagttagaccaagatgagggaagagtatcaaaaaaagatcaaaaaagagaaagtttacaccctaggaataactcgtattcctacgagttattaaacaagaaagtttacaacctaggaaggactcgtaaaatcaccaaaatttaaagaagaataggaaacaccaaatatcaaaagagaataaaataaaaattaattatttttgtctgtgtcacagatcggtagattaaaaagtaccttgatgagattatcttttcccaaatccttcctttggtcaagtaaacaataaccaaagcagtttatcttgtcgtattatcttaaatctttcagagatagagattgcatccttttaatgtttataatttatgaaattatattgtataacaatttctaagtatattctacaagtaaaccttttagatactttatgga

SEQ ID NO: 6404 - protein, 32 aa, Homo sapiens
NHQNLKKNRKHQISKENKIKINYFCLCHRSVD

SEQ ID NO: 6405 - DNA, 2946 bp, Homo sapiens
gtcattctgcaaaagctgcccgaacaggctttcctctgaaaagcagtgccgttcctttttagaaagactgaatctaaatgttgtctctggagacaagaagccttcagtatgttaaattactttcattatgtattttcagatgcttattgattccacagtaggaagagtgagagactgcagcagcctctaagcagcactacatgttccatacattagcagtactgctgaaacaatggcacactacagacacatattttcattaaggtcattttcgaagagatgtttatgaccctcttcccccagtcctctactaacaagtgaacaaaatgaatcaatccaaactggaaatgcttcaactacatcaagaatttatcaaatctttagcagagggccaatagcagctaattcagtatttacaactgacaatatgaagaatgcaattgactgagcatctccctagctgtctgaactacgaactgcaagatgttcttgtaacacgactttaagacattaaggagttaaaaccagggaataggtctacattactgatggaatataaaaaatcaactgtatcctaagaagatgctacataaaataaccacaaaaagaaaaacaatataactgtaaaagcctgaaaagaatttttaaaaggggaagtttatactttcatataccagaattgtggaagttactgattctggaagacataatgaaacatgaatttccaaaaagaaaagaaaatactttatcagcacacaaaaggaagatttaggaagtgttttctgcactaaatattcagatattcatatcaattggtatgactaatggatttttctatctgacttttatgaccaattatgtatcctcttctaatgaaaacaaacaaaattaaacagcagatggtttttatcaaaaggacatggcctggatttataatataaagcaagttatgtgatcaagaaatcatttcaaaatagtgagcactgctattaaaaacagatttacaatggtaacaaaaggatgtctaaatatattttagaagctacaaacgttatgtttccttttttgttttcacatattctggaaaataaagaaatattatcatgtactccatcaaagggaaacataattcctatcatctgaggaaattcctcttggccgtgactttttaaagcaaaacaaatacaaatattatgtactgttctttagaaatccatcagccaactaaatctcataatgcatgcagttgaagtattggagagaaaacgaaagaattcctacaagacatgaaataaaacacagctacttcactgttgtcagggaaaaaaaccaactgctccaaaagaatgtgtttttctcccattctggaaatcaacatgcagtctgaatctaacattacagtgcgagatgacattgatgacatcaacaccaatatgtaccaaccactatcatatccgttaagctttcaagtgtctctcaccggatttcttatgttagaaattgtgttgggacttggcagcaacctcactgtattggtactttactgcatgaaatccaacttaatcaactctgtcagtaacattattacaatgaatcttcatgtacttgatgtaataatttgtgtgggatgtattcctctaactatagttatccttctgctttcactggagagtaacactgctctcatttgctgtttccatgaggcttgtgtatcttttgcaagtgtctcaacagcaatcaacgtttttgctatcactttggacagatatgacatctctgtaaaacctgcaaaccgaattctgacaatgggcagagctgtaatgttaatgatatccatttggattttttcttttttctctttcctgattccttttattgaggtaaattttttcagtcttcaaagtggaaatacctgggaaaacaagacacttttatgtgtcagtacaaatgaatactacactgaactgggaatgtattatcacctgttagtacagatcccaatattctttttcactgttgtagtaatgttaatcacatacaccaaaatacttcaggctcttaatattcgaataggcacaagattttcaacagggcagaagaagaaagcaagaaagaaaaagacaatttctctaaccacacaacatgaggctacagacatgtcacaaagcagtggtgggagaaatgtagtctttggtgtaagaacttcagtttctgtaataattgccctccggcgagctgtgaaacgacaccgtgaacgacgagaaagacaaaagagagtcttcaggatgtctttattgattatttctacatttcttctctgctggacaccaatttctgttttaaataccaccattttatgtttaggcccaagtgaccttttagtaaaattaagattgtgttttttagtcatggcttatggaacaactatatttcaccctctattatatgcattcactagacaaaaatttcaaaaggtcttgaaaagtaaaatgaaaaagcgagttgtttctatagtagaagctgatcccctgcctaataatgctgtaatacacaactcttggatagatcctaaaagaaacaaaaaaattacctttgaagatagtgaaataagagaaaaatgtttagtgcctcaggttgtcacagactagagaaaagtctcagtttcaccaaatccacattcaaatgagttttaaatttaaattgtaaaaactgatattactgccaaatataagaaaaatattttaagtattggttatgttgtaaattttcaatgtgaatgtcaattagataggtcatatatattcaatttcttcattacttaatgtatttgttgcatggcagtttgttaaagtactatcatgtgtatattttgtcaatattatgtccaacagaaaatattcatgtaagtcatattttttaaggaataaatacatagccttaaaacag

SEQ ID NO: 6406 - protein, 48 aa, Homo sapiens
MQLKYWRENERIPTRHEIKHSYFTVVREKNQLLQKNVFFSHSGNQHAV

SEQ ID NO: 6407 - DNA, 3469 bp, Homo sapiens
gtcattctgcaaaagctgcccgaacaggctttcctctgaaaagcagtgccgttcctttttagaaagactgaatctaaatgttgtctctggagacaagaagccttcagtatgttaaattactttcattatgtattttcagatgcttattgattccacagtaggaagagtgagagactgcagcagcctctaagcagcactacatgttccatacattagcagtactgctgaaacaatggcacactacagacacatattttcattaaggtcattttcgaagagatgtttatgaccctcttcccccagtcctctactaacaagtgaacaaaatgaatcaatccaaactggaaatgcttcaactacatcaagaatttatcaaatctttagcagagggccaatagcagctaattcagtatttacaactgacaatatgaagaatgcaattgactgagcatctccctagctgtctgaactacgaactgcaagatgttcttgtaacacgactttaagacattaaggagttaaaaccagggaataggtctacattactgatggaatataaaaaatcaactgtatcctaagaagatgctacataaaataaccacaaaaagaaaaacaatataactgtaaaagcctgaaaagaatttttaaaaggggaagtttatactttcatataccagaattgtggaagttactgattctggaagacataatgaaacatgaatttccaaaaagaaaagaaaatactttatcagcacacaaaaggaagatttaggaagtgttttctgcactaaatattcagatattcatatcaattggtatgactaatggatttttctatctgacttttatgaccaattatgtatcctcttctaatgaaaacaaacaaaattaaacagcagatggtttttatcaaaaggacatggcctggatttataatataaagcaagttatgtgatcaagaaatcatttcaaaatagtgagcactgctattaaaaacagatttacaatggtaacaaaaggatgtctaaatatattttagaagctacaaacgttatgtttccttttttgttttcacatattctggaaaataaagaaatattatcatgtactccatcaaagggaaacataattcctatcatctgaggaaattcctcttggccgtgactttttaaagcaaaacaaatacaaatattatgtactgttctttagaaatccatcagccaactaaatctcataatgcatgcagttgaagtattggagagaaaacgaaagaattcctacaagacatgaaataaaacacagctacttcactgttgtcagggaaaaaaaccaactgctccaaaagaatgtgtttttctcccattctggaaatcaacatgcagtctgaatctaacattacagtgcgagatgacattgatgacatcaacaccaatatgtaccaaccactatcatatccgttaagctttcaagtgtctctcaccggatttcttatgttagaaattgtgttgggacttggcagcaacctcactgtattggtactttactgcatgaaatccaacttaatcaactctgtcagtaacattattacaatgaatcttcatgtacttgatgtaataatttgtgtgggatgtattcctctaactatagttatccttctgctttcactggagagtaacactgctctcatttgctgtttccatgaggcttgtgtatcttttgcaagtgtctcaacagcaatcaacgtttttgctatcactttggacagatatgacatctctgtaaaacctgcaaaccgaattctgacaatgggcagagctgtaatgttaatgatatccatttggattttttcttttttctctttcctgattccttttattgaggtaaattttttcagtcttcaaagtggaaatacctgggaaaacaagacacttttatgtgtcagtacaaatgaatactacactgaactgggaatgtattatcacctgttagtacagatcccaatattctttttcactgttgtagtaatgttaatcacatacaccaaaatacttcaggctcttaatattcgaataggcacaagattttcaacagggcagaagaagaaagcaagaaagaaaaagacaatttctctaaccacacaacatgaggctacagacatgtcacaaagcagtggtgggagaaatgtagtctttggtgtaagaacttcagtttctgtaataattgccctccggcgagctgtgaaacgacaccgtgaacgacgagaaagacaaaagagagtcttcaggatgtctttattgattatttctacatttcttctctgctggacaccaatttctgttttaaataccaccattttatgtttaggcccaagtgaccttttagtaaaattaagattgtgttttttagtcatggcttatggaacaactatatttcaccctctattatatgcattcactagacaaaaatttcaaaaggtcttgaaaagtaaaatgaaaaagcgagttgtttctatagtagaagctgatcccctgcctaataatgctgtaatacacaactcttggatagatcctaaaagaaacaaaaaaattacctttgaagatagtgaaataagagaaaaatgtttagtgcctcaggttgtcacagactagagaaaagtctcagtttcaccaaatccacattcaaatgagttttaaatttaaattgtaaaaactgatattactgccaaatataagaaaaatattttaagtattggttatgttgtaaattttcaatgtgaatgtcaattagataggtcatatatattcaatttcttcattacttaatgtatttgttgcatggcagtttgttaaagtactatcatgtgtatattttgtcaatattatgtccaacagaaaatattcatgtaagtcatattttttaaggaataaatacatagccttaaaacagtgtataactttaaaatgtaactgacataggtatccttgctttattttttaagttaaaatgcattgtttctaagccacaaactacagatatatttagattacaactggagtagcattttaatctaaaaaccaaaattatgggctcaaaacaatccagtattttccataccactatgctatgtttcctggtatagtgtatttgctatatttgatgcatcacaaataattaagtacgtatgaagctttattcttttaaatgtaaaaaatcatagaatttatcaaaattttaaaattaatgaaccaaaaaaacctctgtatacacaccaaaatagagaaactttaaaattcatgcttactaggaaaaaaaagattgattttctaagttcaaggacagtatgcctataatatacaaatgaaatgaaactaaagggaaggaagaatactaaaacaccagcctctttcttccttcctcactttgcttaagtctaagccaaatgctctggattaatatagtgcaatgattt

SEQ ID NO: 6408 - protein, 48 aa, Homo sapiens; identical to SEQ ID NO: 6406

SEQ ID NO: 6409 - DNA, 1841 bp, Homo sapiens
ctctaagcagcactacatgttccatacattagcagtactgctgaaacaatggcacactacagacacatattttcattaaggtcattttcgaagagatgtttatgaccctcttcccccagtcctctactaacaagtgaacaaaatgaatcaatccaaactggaaatgcttcaactacatcaagaatttatcaaatctttagcagagggccaatagcagctaattcagtatttacaactgacaatatgaagaatgcaattgactgagcatctccctagctgtctgaactacgaactgcaagatgttcttgtaacacgactttaagacattaaggagttaaaaccagggaataggtctacattactgatggaatataaaaaatcaactgtatcctaagaagatgctacataaaataaccacaaaaagaaaaacaatataactgtaaaagcctgaaaagaatttttaaaaggggaagtttatactttcatataccagaattgtggaagttactgattctggaagacataatgaaacatgaatttccaaaaagaaaagaaaatactttatcagcacacaaaaggaagatttaggaagtgttttctgcactaaatattcagatattcatatcaattggtatgactaatggatttttctatctgacttttatgaccaattatgtatcctcttctaatgaaaacaaacaaaattaaacagcagatggtttttatcaaaaggacatggcctggatttataatataaagcaagttatgtgatcaagaaatcatttcaaaatagtgagcactgctattaaaaacagatttacaatggtaacaaaaggatgtctaaatatattttagaagctacaaacgttatgtttccttttttgttttcacatattctggaaaataaagaaatattatcatgtactccatcaaagggaaacataattcctatcatctgaggaaattcctcttggccgtgactttttaaagcaaaacaaatacaaatattatgtactgttctttagaaatccatcagccaactaaatctcataatgcatgcagttgaagtattggagagaaaacgaaagaattcctacaagacatgaaataaaacacagctacttcactgttgtcaggtaaaaattcatgtcaaaatctgtcaatgatatcatgtatcaatttgccaaaaactgtcatagtgaaccaaaaggcccataaggcaacagcaaacaggtaggtcagaagatgcatgcaccccaccacactgtttaacatttacgaaagaacagaatcttgctctagagaaaatgtatttttcttaatcatcatttaacttgacatttctgctttatttaattataaatctaactgatgtgacaaagacctgatgtttaatctgtcagttcagaaaatttggcacacttaaaattttccatttttataggatttcaatgttagctaagaccttaacttactcgaataaatatacctctagtaatacttcatactaattcaaaagaaataatgttaccatttgtgtttctgcaatattattcccaaaaaagttcataaataaaactgtattctaaaacttgtcaaatataacattaagtgaaagttaacatgaattttgaaaattattagcttttataatttatgttgaatatgattttgcagttgaaatgctgtatttgaaatgtgaaatatagttggttgtatgagttcatattttaaaatgaatatactgattaactgacattttagcccagaacattagacattattttttacaaattattctaaacccctatatattaaaatatagatttgcatgaattagc

SEQ ID NO: 6410 - protein, 40 aa, Homo sapiens
MSKYILEATNVMFPFLFSHILENKEILSCTPSKGNIIPII

SEQ ID NO: 6411 - DNA, 1858 bp, Homo sapiens
acagaggaacaatttccatagttatttcttcaaaaggaaaacacaattttcttttatatcaaaacaatgcaaacttgatggttcttaattctacattttctattaatagtttacaaacttaaaaattaaactaagtacacaattgaaagattttttttcttacaaagaacacgttatacgtcatttaaattgccaaatatcaaatagtttattctatttcactttctagggaaaaaaaccaactgctccaaaagaatgtgtttttctcccattctggaaatcaacatgcagtctgaatctaacattacagtgcgagatgacattgatgacatcaacaccaatatgtaccaaccactatcatatccgttaagctttcaagtgtctctcaccggatttcttatgttagaaattgtgttgggacttggcagcaacctcactgtattggtactttactgcatgaaatccaacttaatcaactctgtcagtaacattattacaatgaatcttcatgtacttgatgtaataatttgtgtgggatgtattcctctaactatagttatccttctgctttcactggagagtaacactgctctcatttgctgtttccatgaggcttgtgtatcttttgcaagtgtctcaacagcaatcaacgtttttgctatcactttggacagatatgacatctctgtaaaacctgcaaaccgaattctgacaatgggcagagctgtaatgttaatgatatccatttggattttttcttttttctctttcctgattccttttattgaggtaaattttttcagtcttcaaagtggaaatacctgggaaaacaagacacttttatgtgtcagtacaaatgaatactacactgaactgggaatgtattatcacctgttagtacagatcccaatattctttttcactgttgtagtaatgttaatcacatacaccaaaatacttcaggctcttaatattcgaataggcacaagattttcaacagggcagaagaagaaagcaagaaagaaaaagacaatttctctaaccacacaacatgaggctacagacatgtcacaaagcagtggtgggagaaatgtagtctttggtgtaagaacttcagtttctgtaataattgccctccggcgagctgtgaaacgacaccgtgaacgacgagaaagacaaaagagagtcttcaggatgtctttattgattatttctacatttcttctctgctggacaccaatttctgttttaaataccaccattttatgtttaggcccaagtgaccttttagtaaaattaagattgtgttttttagtcatggcttatggaacaactatatttcaccctctattatatgcattcactagacaaaaatttcaaaaggtcttgaaaagtaaaatgaaaaagcgagttgtttctatagtagaagctgatcccctgcctaataatgctgtaatacacaactcttggatagatcctaaaagaaacaaaaaaattacctttgaagatagtgaaataagagaaaaatgtttagtgcctcaggttgtcacagactagagaaaagtctcagtttcaccaaatccacattcaaatgagttttaaatttaaattgtaaaaactgatattactgccaaatataagaaaaatattttaagtattggttatgttgtaaattttcaatgtgaatgtcaattagataggtcatatatattcaatttcttcattacttaatgtatttgttgcatggcagtttgttaaagtactatcatgtgtatattttgtcaatattatgtccaacagaaaatattcatgtaagtcatattttttaaggaataaatacatagccttaaaacagtgt

SEQ ID NO: 6412 - protein, 433 aa, Homo sapiens; identical to SEQ ID NO: 896

SEQ ID NO: 6413 - DNA, 2072 bp, Homo sapiens
aacgctacaccccttcgtcaagaactgcggcagcagccggtggctgccaacgcggtccacagggtttgggctcccgaaacttcagggaagctggaggcatggggggggggggggtcgagttgaaatgaggaacacacagaaaccaagtgtccccaagactccagaaaagagggagccagtcccagagtaaataggttggctagaacagtacccaagccagggggccgggcggaggggagtggtcacgtccagactggaaaactttctgcaaagcaacgggttgggtccacctcgctgtccaggtgcggagcagcgcagacccccaaccccacgacctggtcagaccccgtctccttaccgtcctgcagaagttcccggactgtagctgcagccgctccagagcctcgagctccgaggccagctacagcgacgctgccgccgccaccttccatgttggcaggtgccgggttgatgtcgtcagcagcagaacggctccgcccaggtggtgacgcagaatcccggcgccgcccgcccacccagcccatggctccaggcccacctggcgaactgactctcagcccgcgcctgggctaagcctggctaggagccgcgcaggtactcgagcagtgggcgcccagggtccgagtgctctgcgcccagcgcaccgagggagccaaggccgtcgggccggcgctttcagctgtctctcgcagcagctcagggccgcgccccctgggctggcgtcgtgccctagccaaggagaagtttcagtcacgtgccagactttttcttaattacaaactgatagatggtccacatctcaactaacagtattgacgctgtaagagcatcagatttgaaacatatctgtattaatgaagagtgactgcatgcaaacgacaatatgtcaggaaagaaaaaaagatcccatagaaatgtttcattctggacagctggtaaaagtctgtgccccaatggttcgatattcaaagttggcttttaggacactagtaagaaaatatagttgtgatctgtgttacacaccaatgattgttgccgctgattttgtcaaatctataaaagccagagacagcgaatttaccacaaatcaaggtgggcaatggcagaaggttatggggcttgcttaataaacaagccagagcttgttcaagacatggtgaaacaagtaagaaatcaagtggaaacccctggattttcagtttctattaaaataaggatccatgatgaccttaaaagaactgtagatctttgtcaaaaggctgaagcaacaggagtttcatggattacagtccatggaagaactgctgaagaaagacatcagccagtgcactatgattccattaaaataattaaggaaaatatgtctatacctgtaattgctaatggagacatcagaagcttaaaggaagcagaaaatgtgtggcggattactgggacagatggtgtgatggttgcaagaggactcttagcaaacccggccatgtttgctggatatgaggaaaccccactgaaatgcatctgggactgggttgacattgctcttgaactcgggactccttacatgtgtttccatcaacatttaatgtacatgatggaaaagataacttcaaggcaggaaaaaagggtatttaatgctctgtcaagcacatcagcaatcatagattaccttacagaccattatggcatttgactagacttcccaaataattttaatatatacttttagacccacagtgaaaccacagaaggtcatattttgtaccttaaaccagtagctctcaaattttagtataaaaacaattcctgggagcgttttttaaaaatcagttgtagacaccaccctcagagattctgattaggtagatctggagtagacccagaaatacacagtttaaagaaaactcccagtggttcaaacatcctgatcatcctaggcaaacattgacaaatactgctctgaatcctgttctatagatattggggggatgggtagagtgggaattttttcctaatcatgtttttaacattttaaaataaaatttaatactaag

SEQ ID NO: 6414 - protein, 196 aa, Homo sapiens
MAEGYGACLINKPELVQDMVKQVRNQVETPGFSVSIKIRIHDDLKRTVDLCQKAEATGVSWITVHGRTAEERHQPVHYDSIKIIKENMSIPVIANGDIRSLKEAENVWRITGTDGVMVARGLLANPAMFAGYEETPLKCIWDWVDIALELGTPYMCFHQHLMYMMEKITSRQEKRVFNALSSTSAIIDYLTDHYGI

SEQ ID NO: 6415 - DNA, 2568 bp, Homo sapiens
aacgctacaccccttcgtcaagaactgcggcagcagccggtggctgccaacgcggtccacagggtttgggctcccgaaacttcagggaagctggaggcatggggggggggggggtcgagttgaaatgaggaacacacagaaaccaagtgtccccaagactccagaaaagagggagccagtcccagagtaaataggttggctagaacagtacccaagccagggggccgggcggaggggagtggtcacgtccagactggaaaactttctgcaaagcaacgggttgggtccacctcgctgtccaggtgcggagcagcgcagacccccaaccccacgacctggtcagaccccgtctccttaccgtcctgcagaagttcccggactgtagctgcagccgctccagagcctcgagctccgaggccagctacagcgacgctgccgccgccaccttccatgttggcaggtgccgggttgatgtcgtcagcagcagaacggctccgcccaggtggtgacgcagaatcccggcgccgcccgcccacccagcccatggctccaggcccacctggcgaactgactctcagcccgcgcctgggctaagcctggctaggagccgcgcaggtactcgagcagtgggcgcccagggtccgagtgctctgcgcccagcgcaccgagggagccaaggccgtcgggccggcgctttcagctgtctctcgcagcagctcagggccgcgccccctgggctggcgtcgtgccctagccaaggagaagtttcagtcacgtgccagactttttcttaattacaaactgatagatggtccacatctcaactaacagtattgacgctgtaagagcatcagatttgaaacatatctgtattaatgaagagtgactgcatgcaaacgacaatatgtcaggaaagaaaaaaagatcccatagaaatgtttcattctggacagctggtaaaagtctgtgccccaatggttcgatattcaaagttggcttttaggacactagtaagaaaatatagttgtgatctgtgttacacaccaatgattgttgccgctgattttgtcaaatctataaaagccagagacagcgaatttaccacaaatcaaggtgggcaatggcagaaggttatggggcttgcttaataaacaagccagagcttgttcaagacatggtgaaacaagtaagaaatcaagtggaaacccctggattttcagtttctattaaaataaggatccatgatgaccttaaaagaactgtagatctttgtcaaaaggctgaagcaacaggagtttcatggattacagtccatggaagaactgctgaagaaagacatcagccagtgcactatgattccattaaaataattaaggaaaatatgtctatacctgtaattgctaatggagacatcagaagcttaaaggaagcagaaaatgtgtggcggattactgggacagatggtgtgatggttgcaagaggactcttagcaaacccggccatgtttgctggatatgaggaaaccccactgaaatgcatctgggactgggttgacattgctcttgaactcgggactccttacatgtgtttccatcaacatttaatgtacatgatggaaaagataacttcaaggcaggaaaaaagggtatttaatgctctgtcaagcacatcagcaatcatagattaccttacagaccattatggcatttgactagacttcccaaataattttaatatatacttttagacccacagtgaaaccacagaaggtcatattttgtaccttaaaccagtagctctcaaattttagtataaaaacaattcctgggagcgttttttaaaaatcagttgtagacaccaccctcagagattctgattaggtagatctggagtagacccagaaatacacagtttaaagaaaactcccagtggttcaaacatcctgatcatcctaggcaaacattgacaaatactgctctgaatcctgttctatagatattggggggatgggtagagtgggaattttttcctaatcatgtttttaacattttaaaataaaatttaatactaagaaattatggcttatagtatctataaattaacaagaagtatgcaggtgcaaaaaagtggtggaacaaataccaacatccatccaaaatgaaaaagaacaggaaattctgaatagaattgcactcagaacttatattaaaaattccatttggttaatgacattaaatttggtacatttcaaaacttctaggtcctccaaagattgaaagcttaataatctcctacctaaaaagataaaattaattgcaatctaccatatcttaagtataggaaatttggtgtccaacctggagatgattatatatttgaaatatttcctagagaatagtaaccaggttttgtttttaactttaaaacctaattacttttgtgcctctcagccgttgattgtaactttaaagtcccatggttttggagtgttattaatagattttgttatcggtgggcatgcactgcaagaattaagtatctcagactgaaataaaaccgttcataatt

SEQ ID NO: 6416 - protein, 196 aa, Homo sapiens; identical to SEQ ID NO: 6414

SEQ ID NO: 6417 - DNA, 2790 bp, Homo sapiens
aacgctacaccccttcgtcaagaactgcggcagcagccggtggctgccaacgcggtccacagggtttgggctcccgaaacttcagggaagctggaggcatggggggggggggggtcgagttgaaatgaggaacacacagaaaccaagtgtccccaagactccagaaaagagggagccagtcccagagtaaataggttggctagaacagtacccaagccagggggccgggcggaggggagtggtcacgtccagactggaaaactttctgcaaagcaacgggttgggtccacctcgctgtccaggtgcggagcagcgcagacccccaaccccacgacctggtcagaccccgtctccttaccgtcctgcagaagttcccggactgtagctgcagccgctccagagcctcgagctccgaggccagctacagcgacgctgccgccgccaccttccatgttggcaggtgccgggttgatgtcgtcagcagcagaacggctccgcccaggtggtgacgcagaatcccggcgccgcccgcccacccagcccatggctccaggcccacctggcgaactgactctcagcccgcgcctgggctaagcctggctaggagccgcgcaggtactcgagcagtgggcgcccagggtccgagtgctctgcgcccagcgcaccgagggagccaaggccgtcgggccggcgctttcagctgtctctcgcagcagctcagggccgcgccccctgggctggcgtcgtgccctagccaaggagaagtttcagtcacgtgccagactttttcttaattacaaactgatagatggtccacatctcaactaacagtattgacgctgtaagagcatcagatttgaaacatatctgtattaatgaagagtgactgcatgcaaacgacaatatgtcaggaaagaaaaaaagatcccatagaaatgtttcattctggacagctggtaaaagtctgtgccccaatggttcgatattcaaagttggcttttaggacactagtaagaaaatatagttgtgatctgtgttacacaccaatgattgttgccgctgattttgtcaaatctataaaagccagagacagcgaatttaccacaaatcaaggtgattgcccattgattgttcagtttgctgctaacgatgcaagacttttatctgatgctgctcgtatagtctgtccttatgcgaatggaatagacattaactgtggttgccctcagaggtgggcaatggcagaaggttatggggcttgcttaataaacaagccagagcttgttcaagacatggtgaaacaagtaagaaatcaagtggaaacccctggattttcagtttctattaaaataaggatccatgatgaccttaaaagaactgtagatctttgtcaaaaggctgaagcaacaggagtttcatggattacagtccatggaagaactgctgaagaaagacatcagccagtgcactatgattccattaaaataattaaggaaaatatgtctatacctgtaattgctaatggagacatcagaagcttaaaggaagcagaaaatgtgtggcggattactgggacagatggtgtgatggttgcaagaggactcttagcaaacccggccatgtttgctggatatgaggaaaccccactgaaatgcatctgggactgggttgacattgctcttgaactcgggactccttacatgtgtttccatcaacatttaatgtacatgatggaaaagataacttcaaggcaggaaaaaagggtatttaatgctctgtcaagcacatcagcaatcatagattaccttacagaccattatggcatttgactagacttcccaaataattttaatatatacttttagacccacagtgaaaccacagaaggtcatattttgtaccttaaaccagtagctctcaaattttagtataaaaacaattcctgggagcgttttttaaaaatcagttgtagacaccaccctcagagattctgattaggtagatctggagtagacccagaaatacacagtttaaagaaaactcccagtggttcaaacatcctgatcatcctaggcaaacattgacaaatactgctctgaatcctgttctatagatattggggggatgggtagagtgggaattttttcctaatcatgtttttaacattttaaaataaaatttaatactaagaaattatggcttatagtatctataaattaacaagaagtatgcaggtgcaaaaaagtggtggaacaaataccaacatccatccaaaatgaaaaagaacaggaaattctgaatagaattgcactcagaacttatattaaaaattccatttggttaatgacattaaatttggtacatttcaaaacttctaggtcctccaaagattgaaagcttaataatctcctacctaaaaagataaaattaattgcaatctaccatatcttaagtataggaaatttggtgtccaacctggagatgattatatatttgaaatatttcctagagaatagtaaccaggttttgtttttaactttaaaacctaattacttttgtgcctctcagccgttgattgtaactttaaagtcccatggttttggagtgttattaatagattttgttatcggtgggcatgcactgcaagaattaagtatctcagactgaaataaaaccgttcataattaaagtattattttgttttgccaacatgaaaactgttataaggaaacaattatgtaaaactgtttaattcacgtttgggaatattgaatgaatccattttaacat

SEQ ID NO: 6418 - protein, 317 aa, Homo sapiens; identical to SEQ ID NO: 898

SEQ ID NO: 6419 - DNA, 2434 bp, Homo sapiens
agaatcccggcgccgcccgcccacccagcccatggctccaggcccacctggcgaactgactctcagcccgcgcctgggctaagcctggctaggagccgcgcaggtactcgagcagtgggcgcccagggtccgagtgctctgcgcccagcgcaccgagggagccaaggccgtcgggccggcgctttcagctgtctctcgcagcagctcagggccgcgccccctgggctggcgtcgtgccctagccaaggagaaggtgggcaccggaacgtggccgcagcgcttatctgtgaagcaagtattaaacctcagaacaggggccgcgcggcgtaaggcaggagagcagagcggaggtttcagggagcttcgtttgccctccacactcacaagagtcacgcgttagttgctacacagctttatctgttccacgccttgattggcactcctggggtaataaaagcccgcaggaaatgcttgggaagaaaagttgctggggatgaacagtgaagagaattagggagagtcgatgaagaaggaagtctgaaccataaaaggaccaataaaactcactgtctctaccctccttccttcccatgagacctttgaccttttgccttttctacttcttcctcagtttcagtcacgtgccagactttttcttaattacaaactgatagatggtccacatctcaactaacagtattgacgctgtaagagcatcagatttgaaacatatctgtattaatgaagagtgactgcatgcaaacgacaatatgtcaggaaagaaaaaaagatcccatagaaatgtttcattctggacagctggtaaaagtctgtgccccaatggttcgatattcaaagttggcttttaggacactagtaagaaaatatagttgtgatctgtgttacacaccaatgattgttgccgctgattttgtcaaatctataaaagccagagacagcgaatttaccacaaatcaaggtgggcaatggcagaaggttatggggcttgcttaataaacaagccagagcttgttcaagacatggtgaaacaagtaagaaatcaagtggaaacccctggattttcagtttctattaaaataaggatccatgatgaccttaaaagaactgtagatctttgtcaaaaggctgaagcaacaggagtttcatggattacagtccatggaagaactgctgaagaaagacatcagccagtgcactatgattccattaaaataattaaggaaaatatgtctatacctgtaattgctaatggagacatcagaagcttaaaggaagcagaaaatgtgtggcggattactgggacagatggtgtgatggttgcaagaggactcttagcaaacccggccatgtttgctggatatgaggaaaccccactgaaatgcatctgggactgggttgacattgctcttgaactcgggactccttacatgtgtttccatcaacatttaatgtacatgatggaaaagataacttcaaggcaggaaaaaagggtatttaatgctctgtcaagcacatcagcaatcatagattaccttacagaccattatggcatttgactagacttcccaaataattttaatatatacttttagacccacagtgaaaccacagaaggtcatattttgtaccttaaaccagtagctctcaaattttagtataaaaacaattcctgggagcgttttttaaaaatcagttgtagacaccaccctcagagattctgattaggtagatctggagtagacccagaaatacacagtttaaagaaaactcccagtggttcaaacatcctgatcatcctaggcaaacattgacaaatactgctctgaatcctgttctatagatattggggggatgggtagagtgggaattttttcctaatcatgtttttaacattttaaaataaaatttaatactaagaaattatggcttatagtatctataaattaacaagaagtatgcaggtgcaaaaaagtggtggaacaaataccaacatccatccaaaatgaaaaagaacaggaaattctgaatagaattgcactcagaacttatattaaaaattccatttggttaatgacattaaatttggtacatttcaaaacttctaggtcctccaaagattgaaagcttaataatctcctacctaaaaagataaaattaattgcaatctaccatatcttaagtataggaaatttggtgtccaacctggagatgattatatatttgaaatatttcctagagaatagtaaccaggttttgtttttaactttaaaacctaattacttttgtgcctctcagccgttgattgtaactttaaagtcccatggttttggagtgttattaatagattttgttatcggtgggcatgcactgcaagaattaagtatctcagactgaaataaaaccgttcataatt

SEQ ID NO: 6420 - protein, 196 aa, Homo sapiens; identical to SEQ ID NO: 6414

SEQ ID NO: 6421 - DNA, 573 bp, Homo sapiens
acccagcccatggctccaggcccacctggcgaactgactctcagcccgcgcctgggctaagcctggctaggagccgcgcaggtactcgagcagtgggcgcccagggtccgagtgctctgcgcccagcgcaccgagggagccaaggccgtcgggccggcgctttcagctgtctctcgcagcagctcagggccgcgccccctgggctggcgtcgtgccctagccaaggagaagtttcagtcacgtgccagactttttcttaattacaaactgatagatggtccacatctcaactaacagtattgacgctgtaagagcatcagatttgaaacatatctgtattaatgaagagtgactgcatgcaaacgacaatatgtcaggaaagaaaaaaagatcccatagaaatgtttcattctggacagctggtaaaagtctgtgccccaatggttcgatattcaaagtaagtgttgcaaaatgattaatgaactaagatgaaatttcccttttatgctctgactttttaaaagtactgtaagaccacccaccatatgggaacttcaaactcttagctttgga

SEQ ID NO: 6422 - protein, 39 aa, Homo sapiens
MKSDCMQTTICQERKKDPIEMFHSGQLVKVCAPMVRYSK

SEQ ID NO: 6423 - DNA, 1387 bp, Homo sapiens
cccagcccatggctccaggcccacctggcgaactgactctcagcccgcgcctgggctaagcctggctaggagccgcgcagtttcagtcacgtgccagactttttcttaattacaaactgatagatggtccacatctcaactaacagtattgacgctgtaagagcatcagatttgaaacatatctgtattaatgaagagtgactgcatgcaaacgacaatatgtcaggaaagaaaaaaagatcccatagaaatgtttcattctggacagctggtaaaagtctgtgccccaatggttcgatattcaaagttggcttttaggacactagtaagaaaatatagttgtgatctgtgttacacaccaatgattgttgccgctgattttgtcaaatctataaaagccagagacagcgaatttaccacaaatcaaggtgggcaatggcagaaggttatggggcttgcttaataaacaagccagagcttgttcaagacatggtgaaacaagtaagaaatcaagtggaaacccctggattttcagtttctattaaaataaggatccatgatgaccttaaaagaactgtagatctttgtcaaaaggctgaagcaacaggagtttcatggattacagtccatggaagaactgctgaagaaagacatcagccagtgcactatgattccattaaaataattaaggaaaatatgtctatacctgtaattgctaatggagacatcagaagcttaaaggaagcagaaaatgtgtggcggattactgggacagatggtgtgatggttgcaagaggactcttagcaaacccggccatgtttgctggatatgaggaaaccccactgaaatgcatctgggactgggttgacattgctcttgaactcgggactccttacatgtgtttccatcaacatttaatgtacatgatggaaaagataacttcaaggcaggaaaaaagggtatttaatgctctgtcaagcacatcagcaatcatagattaccttacagaccattatggcatttgactagacttcccaaataattttaatatatacttttagacccacagtgaaaccacagaaggtcatattttgtaccttaaaccagtagctctcaaattttagtataaaaacaattcctgggagcgttttttaaaaatcagttgtagacaccaccctcagagattctgattaggtagatctggagtagacccagaaatacacagtttaaagaaaactcccagtggttcaaacatcctgatcatcctaggcaaacattgacaaatactgctctgaatcctgttctatagatattggggggatgggtagagtgggaattttttcctaatcatgtttttaacattttaaaataaaatttaatactaag

SEQ ID NO: 6424 - protein, 196 aa, Homo sapiens; identical to SEQ ID NO: 6414

SEQ ID NO: 6425 - DNA, 1883 bp, Homo sapiens
cccagcccatggctccaggcccacctggcgaactgactctcagcccgcgcctgggctaagcctggctaggagccgcgcagtttcagtcacgtgccagactttttcttaattacaaactgatagatggtccacatctcaactaacagtattgacgctgtaagagcatcagatttgaaacatatctgtattaatgaagagtgactgcatgcaaacgacaatatgtcaggaaagaaaaaaagatcccatagaaatgtttcattctggacagctggtaaaagtctgtgccccaatggttcgatattcaaagttggcttttaggacactagtaagaaaatatagttgtgatctgtgttacacaccaatgattgttgccgctgattttgtcaaatctataaaagccagagacagcgaatttaccacaaatcaaggtgggcaatggcagaaggttatggggcttgcttaataaacaagccagagcttgttcaagacatggtgaaacaagtaagaaatcaagtggaaacccctggattttcagtttctattaaaataaggatccatgatgaccttaaaagaactgtagatctttgtcaaaaggctgaagcaacaggagtttcatggattacagtccatggaagaactgctgaagaaagacatcagccagtgcactatgattccattaaaataattaaggaaaatatgtctatacctgtaattgctaatggagacatcagaagcttaaaggaagcagaaaatgtgtggcggattactgggacagatggtgtgatggttgcaagaggactcttagcaaacccggccatgtttgctggatatgaggaaaccccactgaaatgcatctgggactgggttgacattgctcttgaactcgggactccttacatgtgtttccatcaacatttaatgtacatgatggaaaagataacttcaaggcaggaaaaaagggtatttaatgctctgtcaagcacatcagcaatcatagattaccttacagaccattatggcatttgactagacttcccaaataattttaatatatacttttagacccacagtgaaaccacagaaggtcatattttgtaccttaaaccagtagctctcaaattttagtataaaaacaattcctgggagcgttttttaaaaatcagttgtagacaccaccctcagagattctgattaggtagatctggagtagacccagaaatacacagtttaaagaaaactcccagtggttcaaacatcctgatcatcctaggcaaacattgacaaatactgctctgaatcctgttctatagatattggggggatgggtagagtgggaattttttcctaatcatgtttttaacattttaaaataaaatttaatactaagaaattatggcttatagtatctataaattaacaagaagtatgcaggtgcaaaaaagtggtggaacaaataccaacatccatccaaaatgaaaaagaacaggaaattctgaatagaattgcactcagaacttatattaaaaattccatttggttaatgacattaaatttggtacatttcaaaacttctaggtcctccaaagattgaaagcttaataatctcctacctaaaaagataaaattaattgcaatctaccatatcttaagtataggaaatttggtgtccaacctggagatgattatatatttgaaatatttcctagagaatagtaaccaggttttgtttttaactttaaaacctaattacttttgtgcctctcagccgttgattgtaactttaaagtcccatggttttggagtgttattaatagattttgttatcggtgggcatgcactgcaagaattaagtatctcagactgaaataaaaccgttcataatt

SEQ ID NO: 6426 - protein, 196 aa, Homo sapiens; identical to SEQ ID NO: 6414

SEQ ID NO: 6427 - DNA, 1487 bp, Homo sapiens
gcccacctggcgaactgactctcagcccgcgcctgggctaagcctggctaggagccgcgcagtttcagtcacgtgccagactttttcttaattacaaactgatagatggtccacatctcaactaacagtattgacgctgtaagagcatcagatttgaaacatatctgtattaatgaagagtgactgcatgcaaacgacaatatgtcaggaaagaaaaaaagatcccatagaaatgtttcattctggacagctggtaaaagtctgtgccccaatggttcgatattcaaagttggcttttaggacactagtaagaaaatatagttgtgatctgtgttacacaccaatgattgttgccgctgattttgtcaaatctataaaagccagagacagcgaatttaccacaaatcaaggtgattgcccattgattgttcagtttgctgctaacgatgcaagacttttatctgatgctgctcgtatagtctgtccttatgcgaatggaatagacattaactgtggttgccctcagaggtgggcaatggcagaaggttatggggcttgcttaataaacaagccagagcttgttcaagacatggtgaaacaagtaagaaatcaagtggaaacccctggattttcagtttctattaaaataaggatccatgatgaccttaaaagaactgtagatctttgtcaaaaggctgaagcaacaggagtttcatggattacagtccatggaagaactgctgaagaaagacatcagccagtgcactatgattccattaaaataattaaggaaaatatgtctatacctgtaattgctaatggagacatcagaagcttaaaggaagcagaaaatgtgtggcggattactgggacagatggtgtgatggttgcaagaggactcttagcaaacccggccatgtttgctggatatgaggaaaccccactgaaatgcatctgggactgggttgacattgctcttgaactcgggactccttacatgtgtttccatcaacatttaatgtacatgatggaaaagataacttcaaggcaggaaaaaagggtatttaatgctctgtcaagcacatcagcaatcatagattaccttacagaccattatggcatttgactagacttcccaaataattttaatatatacttttagacccacagtgaaaccacagaaggtcatattttgtaccttaaaccagtagctctcaaattttagtataaaaacaattcctgggagcgttttttaaaaatcagttgtagacaccaccctcagagattctgattaggtagatctggagtagacccagaaatacacagtttaaagaaaactcccagtggttcaaacatcctgatcatcctaggcaaacattgacaaatactgctctgaatcctgttctatagatattggggggatgggtagagtgggaattttttcctaatcatgtttttaacattttaaaataaaatttaatactaag

SEQ ID NO: 6428 - protein, 317 aa, Homo sapiens; identical to SEQ ID NO: 898

SEQ ID NO: 6429 - DNA, 1983 bp, Homo sapiens
gcccacctggcgaactgactctcagcccgcgcctgggctaagcctggctaggagccgcgcagtttcagtcacgtgccagactttttcttaattacaaactgatagatggtccacatctcaactaacagtattgacgctgtaagagcatcagatttgaaacatatctgtattaatgaagagtgactgcatgcaaacgacaatatgtcaggaaagaaaaaaagatcccatagaaatgtttcattctggacagctggtaaaagtctgtgccccaatggttcgatattcaaagttggcttttaggacactagtaagaaaatatagttgtgatctgtgttacacaccaatgattgttgccgctgattttgtcaaatctataaaagccagagacagcgaatttaccacaaatcaaggtgattgcccattgattgttcagtttgctgctaacgatgcaagacttttatctgatgctgctcgtatagtctgtccttatgcgaatggaatagacattaactgtggttgccctcagaggtgggcaatggcagaaggttatggggcttgcttaataaacaagccagagcttgttcaagacatggtgaaacaagtaagaaatcaagtggaaacccctggattttcagtttctattaaaataaggatccatgatgaccttaaaagaactgtagatctttgtcaaaaggctgaagcaacaggagtttcatggattacagtccatggaagaactgctgaagaaagacatcagccagtgcactatgattccattaaaataattaaggaaaatatgtctatacctgtaattgctaatggagacatcagaagcttaaaggaagcagaaaatgtgtggcggattactgggacagatggtgtgatggttgcaagaggactcttagcaaacccggccatgtttgctggatatgaggaaaccccactgaaatgcatctgggactgggttgacattgctcttgaactcgggactccttacatgtgtttccatcaacatttaatgtacatgatggaaaagataacttcaaggcaggaaaaaagggtatttaatgctctgtcaagcacatcagcaatcatagattaccttacagaccattatggcatttgactagacttcccaaataattttaatatatacttttagacccacagtgaaaccacagaaggtcatattttgtaccttaaaccagtagctctcaaattttagtataaaaacaattcctgggagcgttttttaaaaatcagttgtagacaccaccctcagagattctgattaggtagatctggagtagacccagaaatacacagtttaaagaaaactcccagtggttcaaacatcctgatcatcctaggcaaacattgacaaatactgctctgaatcctgttctatagatattggggggatgggtagagtgggaattttttcctaatcatgtttttaacattttaaaataaaatttaatactaagaaattatggcttatagtatctataaattaacaagaagtatgcaggtgcaaaaaagtggtggaacaaataccaacatccatccaaaatgaaaaagaacaggaaattctgaatagaattgcactcagaacttatattaaaaattccatttggttaatgacattaaatttggtacatttcaaaacttctaggtcctccaaagattgaaagcttaataatctcctacctaaaaagataaaattaattgcaatctaccatatcttaagtataggaaatttggtgtccaacctggagatgattatatatttgaaatatttcctagagaatagtaaccaggttttgtttttaactttaaaacctaattacttttgtgcctctcagccgttgattgtaactttaaagtcccatggttttggagtgttattaatagattttgttatcggtgggcatgcactgcaagaattaagtatctcagactgaaataaaaccgttcataatt

SEQ ID NO: 6430 - protein, 317 aa, Homo sapiens; identical to SEQ ID NO: 898

SEQ ID NO: 6431 - DNA, 4588 bp, Homo sapiens
agaagtttgttataaaatatacgtaacataaaatttacctctcgatcatttttaagtatacagttcagcagtgttaattacattcacattgttgtgcatctgatctctaaaactcttttcatcttagaagatggaaattctatcacattaaactgtgactccccattccactgttcctcacagcagcccctggcaaccattattctactttctccctctatgaacttcactactctaggtacctcatataagtcttatacgtatttgttcagaactggatttattttgctaatattttatgcagcataacatcctcaaggttcattcatgttgtagcatatatcagacttgttcctttttaaggctgaataatattccattttatgtatattttgttcattcatctgttgatatccattcatatattgatagaacacaagataacttccaccttttggctactgcaaataatactgtcatgaactatgggtgtacaaatacccatatacaaatacccatggttcgtaacaggtctctgagaccctgctttcaattctttttgactatgtacccagatgtagaattgctggatcatatggtgattctatgtttaattttttgagcaactactgtactgctttccatagcagctgcaccatgttaccttaccaccagcagtgaacaagagttttaatttctccacatcctcatcaacacttgttatgttctgggagtttttattttattattataatcatcctaatgggtgtgaagtggtatctcattgcagttttaatttgcatttccctaatgattaatgatgctgaacatctttttgtgtgtttattggccatttgtatgttgtctttgtagaagtatctattcaagtgcttttgtccatttgtttgttttcttgttttctattatactctagatatatattctgctttgtcagatgtgtgatttgcacgtattttctccctgtatatggcttgtctttcatgctcctaacaggatcttttgcagaacaaaagtttcattttaatgaagtctaacatcaatttttccttttgtaaattgtgctttcgatgtcaagtataagaaacctttatgtagctccagatcctgaatattttctcctaagtttttttccctaaaagttttatagttttatgttttgcatttaagtccatgatcaattttgcattaacttttatgtaagtgtgaggcttaggttaggttgcctatggatgtccaattactccagcatcatttttgaaaggctatcagccaggcacagtggctcacgccatcaaatcctaatcccagcactttgggaggccgaggtgggcagatcatttgaggtcaggagttcgagaccagcctggccaacatggtgaaaccccatctctactaaaaatacaaaaattagtcagcgtggtggcgcatgccaatagtcccagctgctgggaggctgaggcaggaaaatcgcttgaacctgggaggtgaaggttgcagtgagccaagatcgcaccactgcactccagcctgggcaacaagagtaaaactccgtctcaaaaataataataaaaaaagaaaggctatctctccgctaattctttgcttctttgtgagaaatcagcattttctgttttgttccattgatcttgtatctttttccccaccaataccacacagttttactatatagctctataatatgtcttgaaatcaggtagactggttcttcccaatttatttactttttcaaaattgttttagctattctagttcccttgctttacaaataaattttagaatgaccttgtctatctctgcaaaaaaccctgctggaattttcataagaactgtgtgaaacctatacctcaacttgggaagaactgactttcttactaggttgagtctcccaatccatgaacacagtatatctttccattgattgagattttctttgatttctatcatcagtattgtgtagttttcagcatacaagttctgcacatgttttgtaagacacccaggttttgagcatgtttgtaaatagaatttttaatttttggtgttcacatgtttattgctagcacatagaaatagatttttgtatgttgatcttatatcctgaaaacttgctaaactcacttgttggttctagtttttttgtaaattccttcagagtctatatgaacaaccatgtcatctacaaataaggacagttggatttcttccttttgatcatatgccttttgtttctttatcatgccttattgcactgactagaagtttcagcgccgtgttgaataagggtgataagagcagacttccttaccttgttcctaaggcaaaagtgttctgtaggaattttgtggatatactttatcaaactgaggcaggttccctctacttctggttttccaagagttagctttttttttttttaactatgtatgagtgtattttgtcaaatgccttttctgcatctatatgatcatgtgatttttattatttagcctgttaatatgatggattacattaattgattttgactattgcaccttctgttttaaccggctttttctgacaacactccagcagggaatgatgtaggggagtggtgccacctcattgctatctgatagaaatccaagttctccacttggcctccttcgacatctggtgggtgaggagctcctcattactgcggggcagtgatgagagttccagttccccatagtgagggtagcctcatatgtgctgggcaataatgaaagtcctggctctccactatgcctcctctgacaccacaccaagcagggagggagaagagtgcttcattactgctggcaggcatggaagtccaggctccccttgtggcctccactgataccactgggctgggagtgacctcagtggccaccagagatgaaagtttcagatccttacctggccttggtatcaatagaatgttggagcaccttgttacagcctttggagggtagaagtctaggattcccacttggcctttgctaatggagataaagccatagctttttctacagtatttggctggagtagaactgtctaaaagttttctgtcttactaggtcagacagaacattttcctggtcctttggttagagaaggcttttgttggggctggttttgtctgcatccattgttgtttccaggtggccagcttcttcaagtctaggatatttgagacaaaaataaaacccagagaactcaccaccctgtcattcctcaggtcctgaggtcactagcctatctggacatcttttcttcacctttcaaaattttcttgtgtttgttttatatataatatccaaggtttttagtaatacttaacaggaataatagggaaaagtaaatctcctccatctccccataggtagaactttctctgataaatatttaacaatgcactaaaatatgtttgtggtgtttctaaatgcataattaaggttttatatgctcacaggttggcttttaggacactagtaagaaaatatagttgtgatctgtgttacacaccaatgattgttgccgctgattttgtcaaatctataaaagccagagacagcgaatttaccacaaatcaaggtgggcaatggcagaaggttatggggcttgcttaataaacaagccagagcttgttcaagacatggtgaaacaagtaagaaatcaagtggaaacccctggattttcagtttctattaaaataaggatccatgatgaccttaaaagaactgtagatctttgtcaaaaggctgaagcaacaggagtttcatggattacagtccatggaagaactgctgaagaaagacatcagccagtgcactatgattccattaaaataattaaggaaaatatgtctatacctgtaattgctaatggagacatcagaagcttaaaggaagcagaaaatgtgtggcggattactgggacagatggtaagaaataagtacttgggttcttttaattggggggggaagaaatgagagtggggaagtaatgttaatttgattttcatttgttttgtttaacattaagccatattttcccattgtactgttttaagctaagcgatttattaaaatgatgttaagttttctacctagaaaaacatggattatcttaactgggataaattaattcagttacttttctgacaccatcatatctagtgaccagtgaagaattttccagatagcctactagtaaaataaagcacctagaaataagagtaagtgaactcgagaatgataagagctaaaggaatcccagaactgctatgcagtttcattattcccttaaattattggcatgccaagccctataattgctagatgggagaatatagataaactgaactttaagcagcccaatttatgacaatccagatttaccctaaagaaaaactaaagactaatggtttaatgtagaaatctttaaaaaataaagatttctgtacgtacatttaaactttcctggtttacaaaaggtaccaaaattaattcttttgtaatcggattaaacatattaatgcaat

SEQ ID NO: 6432 - protein, 117 aa, Homo sapiens [sequence omitted]

SEQ ID NO: 6433 - DNA, 922 bp, Homo sapiens
ttgcttaataaacaagccagagcttgttcaagacatggtgaaacaagtaagaaatcaagtggaaacccctggattttcagtttctattaaaataaggatccatgatgaccttaaaagaactgtagatctttgtcaaaaggctgaagcaacaggagtttcatggattacagtccatggaagaactgctgaagaaagacatcagccagtgcactatgattccattaaaataattaaggaaaatatgtctatacctgtaattgctaatggagacatcagaagcttaaaggaagcagaaaatgtgtggcggattactgggacagatggtaagaaataagtacttgggttcttttaattggggggggaagaaatgagagtggggaagtaatgttaatttgattttcatttgttttgtttaacattaagccatattttcccattgtactgttttaagctaagcgatttattaaaatgatgttaagttttctacctagaaaaacatggattatcttaactgggataaattaattcagttacttttctgacaccatcatatctagtgaccagtgaagaattttccagatagcctactagtaaaataaagcacctagaaataagagtaagtgaactcgagaatgataagagctaaaggaatcccagaactgctatgcagtttcattattcccttaaattattggcatgccaagccctataattgctagatgggagaatatagataaactgaactttaagcagcccaatttatgacaatccagatttaccctaaagaaaaactaaagactaatggtttaatgtagaaatctttaaaaaataaagatttctgtacgtacatttaaactttcctggtttacaaaaggtaccaaaattaattcttttgtaatcggattaaacatattaatgcaat

SEQ ID NO: 6434 - protein, 99 aa, Homo sapiens
MVKQVRNQVETPGFSVSIKIRIHDDLKRTVDLCQKAEATGVSWITVHGRTAEERHQPVHYDSIKIIKENMSIPVIANGDIRSLKEAENVWRITGTDGKK

SEQ ID NO: 6435 - DNA, 1375 bp, Homo sapiens
catacccacctttcgtaccagtccccaaacatcacggtaaagtttactgtctcttcccagcccatggacgggaacgggaacgcctacggaatatgttgtgacatacagttgatcctaggttctccagaacaaaatgctgcacgaccacctcatcctggccctttattaaatatagcttaattctggacacaaacagttcccaccatgaagagagagtaggtgaccggaaaggagtgcgtcttaagcgcgttcgctgaatttgcaccacccaatccagccccgccgcccggcgccgctccttagacctggaccccggcaccctcccgccggggccgcacttagcagtggaaagtctgtcctcctgaagaagttgcgctccgacctccaagcatcaggtcaaaagtctaactcattctctgacctgccgccaattagaaaacaactgttgccaataaacgtggtcgcgccgcctgtgacctcagccgggacggacccgcgggcgggagcctgcggggcgtgaggcggggtggggccctggctcccctcccccgcccagccgcggcgtctgacgtcccgcgcgtcggcggccgcggagcagcgcagggagccaggcgggctgccggcgggtgtgaagaaaaaaatgacactccaatgggctgcagtggcaacctttctttatgccgaaataggactcattttaatcttctgcctaccttttattcctcctcagagatggcagaagattttttcatttaatgtctggggtaaaattgcaactttttggaacaaggctttccttaccattatcatcctattgattgttctatttctagcttttctgcataatggattcaggagtattattcccatttaattaccaaggaagatgaatcacgaagcataatgatccttcatagtactcactatttgcctatttaaaataagtcgtaaatatatattatctttgttggttttttggtagtggttggcatgctcttactatattattgaggcaatctgagaaatgacaaaggggaaatagccattaagatacaggaaattttctaaagatcatttaagagactactttatataactatgcaaataaattggaaaacctagataaaatgtataattttgtagaaaaatatgatttaccaaatgaacaccagtagatatagaaaatttaagcagactaatttatatagaaaaattatagaaagttatcaaaaaggacccctatttgaaaaaaaaagcaaaaaaccagatagttttataagaaaccctactgctttcagaaaacagatattactactgcttcttaaactgttctagaatttaaacttcaaattgtacagagctagaaaaaagcaag

SEQ ID NO: 6436 - protein, 77 aa, Homo sapiens
MTLQWAAVATFLYAEIGLILIFCLPFIPPQRWQKIFSFNVWGKIATFWNKAFLTIIILLIVLFLAFLHNGFRSIIPI

SEQ ID NO: 6437 - DNA, 1087 bp, Homo sapiens
catacccacctttcgtaccagtccccaaacatcacggtaaagtttactgtctcttcccagcccatggacgggaacgggaacgcctacggaatatgttgtgacatacagttgatcctaggttctccagaacaaaatgctgcacgaccacctcatcctggccctttattaaatatagcttaattctggacacaaacagttcccaccatgaagagagagtaggtgaccggaaaggagtgcgtcttaagcgcgttcgctgaatttgcaccacccaatccagccccgccgcccggcgccgctccttagacctggaccccggcaccctcccgccggggccgcacttagcagtggaaagtctgtcctcctgaagaagttgcgctccgacctccaagcatcaggtcaaaagtctaactcattctctgacctgccgccaattagaaaacaactgttgccaataaacgtggtcgcgccgcctgtgacctcagccgggacggacccgcgggcgggagcctgcggggcgtgaggcggggtggggccctggctcccctcccccgcccagccgcggcgtctgacgtcccgcgcgtcggcggccgcggagcagcgcagggagccaggcgggctgccggcgggtgtgaagaaaaaaatgacactccaatgggctgcagtggcaacctttctttatgccgaaataggactcattttaatcttctgcctaccttttattcctcctcagagatggcagaagattttttcatttaatgtctggggtaaaattgcaactttttggaacaaggctttccttaccattatcatcctattgattgttctatttctagatgctgtgagagaagtaaggaaatattcctcagttcataccattgagaagagctccaccagcagacctgatgcctatgaacacacacagatgaaactttttaggtctcaaagaaatctttacatttctggattttccctatttttttggctgtaagtaaaaaataataatagaagcacaatttaaaaacatgacttatgctttcctttctcattttgtccacctttactgtagattttttttttttttaagaga

SEQ ID NO: 6438 - protein, 115 aa, Homo sapiens
MTLQWAAVATFLYAEIGLILIFCLPFIPPQRWQKIFSFNVWGKIATFWNKAFLTIIILLIVLFLDAVREVRKYSSVHTIEKSSTSRPDAYEHTQMKLFRSQRNLYISGFSLFFWL

SEQ ID NO: 6439 - DNA, 1660 bp, Homo sapiens
catacccacctttcgtaccagtccccaaacatcacggtaaagtttactgtctcttcccagcccatggacgggaacgggaacgcctacggaatatgttgtgacatacagttgatcctaggttctccagaacaaaatgctgcacgaccacctcatcctggccctttattaaatatagcttaattctggacacaaacagttcccaccatgaagagagagtaggtgaccggaaaggagtgcgtcttaagcgcgttcgctgaatttgcaccacccaatccagccccgccgcccggcgccgctccttagacctggaccccggcaccctcccgccggggccgcacttagcagtggaaagtctgtcctcctgaagaagttgcgctccgacctccaagcatcaggtcaaaagtctaactcattctctgacctgccgccaattagaaaacaactgttgccaataaacgtggtcgcgccgcctgtgacctcagccgggacggacccgcgggcgggagcctgcggggcgtgaggcggggtggggccctggctcccctcccccgcccagccgcggcgtctgacgtcccgcgcgtcggcggccgcggagcagcgcagggagccaggcgggctgccggcgggtgtgaagaaaaaaatgacactccaatgggctgcagtggcaacctttctttatgccgaaataggactcattttaatcttctgcctaccttttattcctcctcagagatggcagaagattttttcatttaatgtctggggtaaaattgcaactttttggaacaaggctttccttaccattatcatcctattgattgttctatttctagatgctgtgagagaagtaaggaaatattcctcagttcataccattgagaagagctccaccagcagacctgatgcctatgaacacacacagatgaaactttttaggtctcaaagaaatctttacatttctggattttccctatttttttggctagttttgagacgtctggttacgcttattactcaactggcaaaagaactgtcaaacaaaggtgtacttaaaactcaagcagaaaatactaacaaggctgccaaaaaatttatggaagaaaacgaaaaactaaaaaggattttgaaaagccatggtaaagatgaagaatgtgttttggaagcagaaaataaaaaactagtagaagaccaggagaaactgaaaactgaattaaggaagacttcagatgccctttctaaggcacaaaatgatgtgatggaaatgaagatgcagtcagagagactttcgaaagaatatgatcaactcctgaaagaacactctgaacttcaggatcgtttagaaagaggcaacaagaaaagactgtgaactttataaaagacacttgcaatatactgtgtcaaaatgataattttgttatgttagcctctagaaaatttaagttcagaaaaatgcactatgaccggttcgtaatttttttaatgccacacataggttgtattgtaatggcattatcaaaatatttgatgatgtttcagatatattgcaaagtctgtattccagctcttaagaaaaatataagcatgttaaataccatatttacatattgataatgtcattggtatatggtggctgtttaccaataaaaggaaaaaattcatt

SEQ ID NO: 6440 - protein, 241 aa, Homo sapiens; identical to SEQ ID NO: 908

SEQ ID NO: 6441 - DNA, 1739 bp, Homo sapiens
catacccacctttcgtaccagtccccaaacatcacggtaaagtttactgtctcttcccagcccatggacgggaacgggaacgcctacggaatatgttgtgacatacagttgatcctaggttctccagaacaaaatgctgcacgaccacctcatcctggccctttattaaatatagcttaattctggacacaaacagttcccaccatgaagagagagtaggtgaccggaaaggagtgcgtcttaagcgcgttcgctgaatttgcaccacccaatccagccccgccgcccggcgccgctccttagacctggaccccggcaccctcccgccggggccgcacttagcagtggaaagtctgtcctcctgaagaagttgcgctccgacctccaagcatcaggtcaaaagtctaactcattctctgacctgccgccaattagaaaacaactgttgccaataaacgtggtcgcgccgcctgtgacctcagccgggacggacccgcgggcgggagcctgcggggcgtgaggcggggtggggccctggctcccctcccccgcccagccgcggcgtctgacgtcccgcgcgtcggcggccgcggagcagcgcagggagccaggcgggctgccggcgggtgtgaagaaaaaaatgacactccaatgggctgcagtggcaacctttctttatgccgaaataggactcattttaatcttctgcctaccttttattcctcctcagagatggcagaagattttttcatttaatgtctggggtaaaattgcaactttttggaacaaggctttccttaccattatcatcctattgattgttctatttctagatgctgtgagagaagtaaggaaatattcctcagttcataccattgagaagagctccaccagcagacctgatgcctatgaacacacacagatgaaactttttaggtctcaaagaaatctttacatttctggattttccctatttttttggctagttttgagacgtctggttacgcttattactcaactggcaaaagaactgtcaaacaaaggtgtacttaaaactcaagcagaaaatactaacaaggctgccaaaaaatttatggaagaaaacgaaaaactaaaaaggattttgaaaagccatggtaaagatgaagaatgtgttttggaagcagaaaataaaaaactagtagaagaccaggagaaactgaaaactgaattaaggaagacttcagatgccctttctaaggcacaaaatgatgtgatggaaatgaagatgcagtcagagagactttcgaaagaatatgatcaactcctgaaagaacactctgaacttcagcattccagttttggtgaatttttaagcaaaagaagccacaaaaatggcagcattggaaaacagactggttctagaaaaggatcgtttagaaagaggcaacaagaaaagactgtgaactttataaaagacacttgcaatatactgtgtcaaaatgataattttgttatgttagcctctagaaaatttaagttcagaaaaatgcactatgaccggttcgtaatttttttaatgccacacataggttgtattgtaatggcattatcaaaatatttgatgatgtttcagatatattgcaaagtctgtattccagctcttaagaaaaatataagcatgttaaataccatatttacatattgataatgtcattggtatatggtggctgtttaccaataaaaggaaaaaattcatt

SEQ ID NO: 6442 - protein, 348 aa, Homo sapiens; identical to SEQ ID NO: 902

SEQ ID NO: 6443 - DNA, 3480 bp, Homo sapiens
catacccacctttcgtaccagtccccaaacatcacggtaaagtttactgtctcttcccagcccatggacgggaacgggaacgcctacggaatatgttgtgacatacagttgatcctaggttctccagaacaaaatgctgcacgaccacctcatcctggccctttattaaatatagcttaattctggacacaaacagttcccaccatgaagagagagtaggtgaccggaaaggagtgcgtcttaagcgcgttcgctgaatttgcaccacccaatccagccccgccgcccggcgccgctccttagacctggaccccggcaccctcccgccggggccgcacttagcagtggaaagtctgtcctcctgaagaagttgcgctccgacctccaagcatcaggtcaaaagtctaactcattctctgacctgccgccaattagaaaacaactgttgccaataaacgtggtcgcgccgcctgtgacctcagccgggacggacccgcgggcgggagcctgcggggcgtgaggcggggtggggccctggctcccctcccccgcccagccgcggcgtctgacgtcccgcgcgtcggcggccgcggagcagcgcagggagccaggcgggctgccggcgggtgtgaagaaaaaaatgacactccaatgggctgcagtggcaacctttctttatgccgaaataggactcattttaatcttctgcctaccttttattcctcctcagagatggcagaagattttttcatttaatgtctggggtaaaattgcaactttttggaacaaggctttccttaccattatcatcctattgattgttctatttctagatgctgtgagagaagtaaggaaatattcctcagttcataccattgagaagagctccaccagcagacctgatgcctatgaacacacacagatgaaactttttaggtctcaaagaaatctttacatttctggattttccctatttttttggctagttttgagacgtctggttacgcttattactcaactggcaaaagaactgtcaaacaaaggtgtacttaaaactcaagcagaaaatactaacaaggctgccaaaaaatttatggaagaaaacgaaaaactaaaaaggattttgaaaagccatggtaaagatgaagaatgtgttttggaagcagaaaataaaaaactagtagaagaccaggagaaactgaaaactgaattaaggaagacttcagatgccctttctaaggcacaaaatgatgtgatggaaatgaagatgcagtcagagagactttcgaaagaatatgatcaactcctgaaagaacactctgaacttcaggatcgtttagaaagaggcaacaagaaaagactgtgaactttataaaagacacttgcaatatactgtgtcaaaatgataattttgttatgttagcctctagaaaatttaagttcagaaaaatgcactatgaccggttcgtaatttttttaatgccacacataggttgtattgtaatggcattatcaaaatatttgatgatgtttcagatatattgcaaagtctgtattccagctcttaagaaaaatataagcatgttaaataccatatttacatattgataatgtcattggtatatggtggctgtttaccaataaaaggaaaaaattcattaaccggttgcttccaaaattagaagttttaagttgcatgaaaccattaatagccttgaaagctttgataagttttcagtaataataacctatttaatcagatgatgatgtgtttgaaaatagtgttcaatatcagcaaatttgtacacagggaatgtaaataaggataactgatcagagttatccactgtatttataaggaagagtcggaaaaaacaatgaccttagttttttttaagcctgatgatactatggtttactctaataagatagctatattgataattatatttttgttactgtgcccttgcacattttggtctttttgttaatatttttattaataacacataattagtaaccactctactgtttcaagttaatctagtaatagagcttacatatatttgtataactgctataccactgaactgaatttattttacaacagtgtagaattcttgaaaagttaacgtagaaaatatccaaaaagcagtatttctagaaagtgtccaaaaagcagtatttctttcccttggttgtgagagtaactaattatataaatattacctcaaaaatacatacactggtatcacacagtctttctacaatgtttctgtattctgaaagctaaatattaagtactatttttccattcaaatattcatttagaatttcctttagaagatggcagtgattataatattaatatgatttcatttgttccagtgtttagacatgaaatcatcttccttgtctcatgaaaacctaaatataaaaaaaaggaaaatactggagtttttatttctcttgtctttgttacatcctctgtttattataattttagcaccaacttcacacctagctaatttttttcatcataaagtggatgaaatgagcaagtacctaaaaattttatttcagataaaagtcaggagttactgctaaaaaacagacatgtaggagacattcaacaggagtatgaaatgagagttagaccatatgggctgacaacaccataaataacaagaaaagggagtgctgaaataggagagaacagagcaaatgttagctcaaagtatagacttagaaatatcaaagtaagagctatctggataaatatatagatattgagtgcttggaatcctagcctactatgtgaaaattaagtctaatgtcagaataacttacagaaaaatagaaaatgcacagctttaaaatgggcagagttaaaatctattcccagctttatcacttatttagccatgctagcctaggcctctatttccttgtctccaaaatgagaataataaaatttaggtcaggattactatataaactaagataatacagtgattctcaaagttgttcagactgtatagtaaggagaaagtctggttgcactttgaagagcttgaagatttgaaagattcccaaaaaagcattttaaagtttacatttaagggaccttggacctcaaccctctcaagtttacaagtctgaaactttagacatcaaaagtttgagcagtttttccaaggcaacattgatagttagattcagggccaggctgtaagtctagaatttagatatcctgatcccccagataccgctcttctggttatacacagaccagctataatttgctaaacataaaatattgcagtgtattagccggctgtggctccagagtctgtgccctttaccaccgtgcccaactgtttcacatgctgtgtttggtagtttttcctagtactctccttaataatggtggtgtttagcaaattgtattacataaataaatatttatttcatggattg

SEQ ID NO: 6444 - protein, 241 aa, Homo sapiens; identical to SEQ ID NO: 908

SEQ ID NO: 6445 - DNA, 3503 bp, Homo sapiens
catacccacctttcgtaccagtccccaaacatcacggtaaagtttactgtctcttcccagcccatggacgggaacgggaacgcctacggaatatgttgtgacatacagttgatcctaggttctccagaacaaaatgctgcacgaccacctcatcctggccctttattaaatatagcttaattctggacacaaacagttcccaccatgaagagagagtaggtgaccggaaaggagtgcgtcttaagcgcgttcgctgaatttgcaccacccaatccagccccgccgcccggcgccgctccttagacctggaccccggcaccctcccgccggggccgcacttagcagtggaaagtctgtcctcctgaagaagttgcgctccgacctccaagcatcaggtcaaaagtctaactcattctctgacctgccgccaattagaaaacaactgttgccaataaacgtggtcgcgccgcctgtgacctcagccgggacggacccgcgggcgggagcctgcggggcgtgaggcggggtggggccctggctcccctcccccgcccagccgcggcgtctgacgtcccgcgcgtcggcggccgcggagcagcgcagggagccaggcgggctgccggcggatggcagaagattttttcatttaatgtctggggtaaaattgcaactttttggaacaaggctttccttaccattatcatcctattgattgttctatttctagatgctgtgagagaagtaaggaaatattcctcagttcataccattgagaagagctccaccagcagacctgatgcctatgaacacacacagatgaaactttttaggtctcaaagaaatctttacatttctggattttccctatttttttggctagttttgagacgtctggttacgcttattactcaactggcaaaagaactgtcaaacaaaggtgtacttaaaactcaagcagaaaatactaacaaggctgccaaaaaatttatggaagaaaacgaaaaactaaaaaggattttgaaaagccatggtaaagatgaagaatgtgttttggaagcagaaaataaaaaactagtagaagaccaggagaaactgaaaactgaattaaggaagacttcagatgccctttctaaggcacaaaatgatgtgatggaaatgaagatgcagtcagagagactttcgaaagaatatgatcaactcctgaaagaacactctgaacttcaggtcccactgggcagcttctacatactggccttcgcacctgggctccataaccctcatccctccagcccaagaagtggtggtggcttttctgctattgataatcccagaggtgccttaccaccctgtttggatcgtttagaaagaggcaacaagaaaagactgtgaactttataaaagacacttgcaatatactgtgtcaaaatgataattttgttatgttagcctctagaaaatttaagttcagaaaaatgcactatgaccggttcgtaatttttttaatgccacacataggttgtattgtaatggcattatcaaaatatttgatgatgtttcagatatattgcaaagtctgtattccagctcttaagaaaaatataagcatgttaaataccatatttacatattgataatgtcattggtatatggtggctgtttaccaataaaaggaaaaaattcattaaccggttgcttccaaaattagaagttttaagttgcatgaaaccattaatagccttgaaagctttgataagttttcagtaataataacctatttaatcagatgatgatgtgtttgaaaatagtgttcaatatcagcaaatttgtacacagggaatgtaaataaggataactgatcagagttatccactgtatttataaggaagagtcggaaaaaacaatgaccttagttttttttaagcctgatgatactatggtttactctaataagatagctatattgataattatatttttgttactgtgcccttgcacattttggtctttttgttaatatttttattaataacacataattagtaaccactctactgtttcaagttaatctagtaatagagcttacatatatttgtataactgctataccactgaactgaatttattttacaacagtgtagaattcttgaaaagttaacgtagaaaatatccaaaaagcagtatttctagaaagtgtccaaaaagcagtatttctttcccttggttgtgagagtaactaattatataaatattacctcaaaaatacatacactggtatcacacagtctttctacaatgtttctgtattctgaaagctaaatattaagtactatttttccattcaaatattcatttagaatttcctttagaagatggcagtgattataatattaatatgatttcatttgttccagtgtttagacatgaaatcatcttccttgtctcatgaaaacctaaatataaaaaaaaggaaaatactggagtttttatttctcttgtctttgttacatcctctgtttattataattttagcaccaacttcacacctagctaatttttttcatcataaagtggatgaaatgagcaagtacctaaaaattttatttcagataaaagtcaggagttactgctaaaaaacagacatgtaggagacattcaacaggagtatgaaatgagagttagaccatatgggctgacaacaccataaataacaagaaaagggagtgctgaaataggagagaacagagcaaatgttagctcaaagtatagacttagaaatatcaaagtaagagctatctggataaatatatagatattgagtgcttggaatcctagcctactatgtgaaaattaagtctaatgtcagaataacttacagaaaaatagaaaatgcacagctttaaaatgggcagagttaaaatctattcccagctttatcacttatttagccatgctagcctaggcctctatttccttgtctccaaaatgagaataataaaatttaggtcaggattactatataaactaagataatacagtgattctcaaagttgttcagactgtatagtaaggagaaagtctggttgcactttgaagagcttgaagatttgaaagattcccaaaaaagcattttaaagtttacatttaagggaccttggacctcaaccctctcaagtttacaagtctgaaactttagacatcaaaagtttgagcagtttttccaaggcaacattgatagttagattcagggccaggctgtaagtctagaatttagatatcctgatcccccagataccgctcttctggttatacacagaccagctataatttgctaaacataaaatattgcagtgtattagccggctgtggctccagagtctgtgccctttaccaccgtgcccaactgtttcacatgctgtgtttggtagtttttcctagtactctccttaataatggtggtgtttagcaaattgtattacataaataaatatttatttcatggattg

SEQ ID NO: 6446 - protein, 190 aa, Homo sapiens
MKLFRSQRNLYISGFSLFFWLVLRRLVTLITQLAKELSNKGVLKTQAENTNKAAKKFMEENEKLKRILKSHGKDEECVLEAENKKLVEDQEKLKTELRKTSDALSKAQNDVMEMKMQSERLSKEYDQLLKEHSELQVPLGSFYILAFAPGLHNPHPSSPRSGGGFSAIDNPRGALPPCLDRLERGNKKRL

SEQ ID NO: 6447 - DNA, 3559 bp, Homo sapiens
catacccacctttcgtaccagtccccaaacatcacggtaaagtttactgtctcttcccagcccatggacgggaacgggaacgcctacggaatatgttgtgacatacagttgatcctaggttctccagaacaaaatgctgcacgaccacctcatcctggccctttattaaatatagcttaattctggacacaaacagttcccaccatgaagagagagtaggtgaccggaaaggagtgcgtcttaagcgcgttcgctgaatttgcaccacccaatccagccccgccgcccggcgccgctccttagacctggaccccggcaccctcccgccggggccgcacttagcagtggaaagtctgtcctcctgaagaagttgcgctccgacctccaagcatcaggtcaaaagtctaactcattctctgacctgccgccaattagaaaacaactgttgccaataaacgtggtcgcgccgcctgtgacctcagccgggacggacccgcgggcgggagcctgcggggcgtgaggcggggtggggccctggctcccctcccccgcccagccgcggcgtctgacgtcccgcgcgtcggcggccgcggagcagcgcagggagccaggcgggctgccggcgggtgtgaagaaaaaaatgacactccaatgggctgcagtggcaacctttctttatgccgaaataggactcattttaatcttctgcctaccttttattcctcctcagagatggcagaagattttttcatttaatgtctggggtaaaattgcaactttttggaacaaggctttccttaccattatcatcctattgattgttctatttctagatgctgtgagagaagtaaggaaatattcctcagttcataccattgagaagagctccaccagcagacctgatgcctatgaacacacacagatgaaactttttaggtctcaaagaaatctttacatttctggattttccctatttttttggctagttttgagacgtctggttacgcttattactcaactggcaaaagaactgtcaaacaaaggtgtacttaaaactcaagcagaaaatactaacaaggctgccaaaaaatttatggaagaaaacgaaaaactaaaaaggattttgaaaagccatggtaaagatgaagaatgtgttttggaagcagaaaataaaaaactagtagaagaccaggagaaactgaaaactgaattaaggaagacttcagatgccctttctaaggcacaaaatgatgtgatggaaatgaagatgcagtcagagagactttcgaaagaatatgatcaactcctgaaagaacactctgaacttcagcattccagttttggtgaatttttaagcaaaagaagccacaaaaatggcagcattggaaaacagactggttctagaaaaggatcgtttagaaagaggcaacaagaaaagactgtgaactttataaaagacacttgcaatatactgtgtcaaaatgataattttgttatgttagcctctagaaaatttaagttcagaaaaatgcactatgaccggttcgtaatttttttaatgccacacataggttgtattgtaatggcattatcaaaatatttgatgatgtttcagatatattgcaaagtctgtattccagctcttaagaaaaatataagcatgttaaataccatatttacatattgataatgtcattggtatatggtggctgtttaccaataaaaggaaaaaattcattaaccggttgcttccaaaattagaagttttaagttgcatgaaaccattaatagccttgaaagctttgataagttttcagtaataataacctatttaatcagatgatgatgtgtttgaaaatagtgttcaatatcagcaaatttgtacacagggaatgtaaataaggataactgatcagagttatccactgtatttataaggaagagtcggaaaaaacaatgaccttagttttttttaagcctgatgatactatggtttactctaataagatagctatattgataattatatttttgttactgtgcccttgcacattttggtctttttgttaatatttttattaataacacataattagtaaccactctactgtttcaagttaatctagtaatagagcttacatatatttgtataactgctataccactgaactgaatttattttacaacagtgtagaattcttgaaaagttaacgtagaaaatatccaaaaagcagtatttctagaaagtgtccaaaaagcagtatttctttcccttggttgtgagagtaactaattatataaatattacctcaaaaatacatacactggtatcacacagtctttctacaatgtttctgtattctgaaagctaaatattaagtactatttttccattcaaatattcatttagaatttcctttagaagatggcagtgattataatattaatatgatttcatttgttccagtgtttagacatgaaatcatcttccttgtctcatgaaaacctaaatataaaaaaaaggaaaatactggagtttttatttctcttgtctttgttacatcctctgtttattataattttagcaccaacttcacacctagctaatttttttcatcataaagtggatgaaatgagcaagtacctaaaaattttatttcagataaaagtcaggagttactgctaaaaaacagacatgtaggagacattcaacaggagtatgaaatgagagttagaccatatgggctgacaacaccataaataacaagaaaagggagtgctgaaataggagagaacagagcaaatgttagctcaaagtatagacttagaaatatcaaagtaagagctatctggataaatatatagatattgagtgcttggaatcctagcctactatgtgaaaattaagtctaatgtcagaataacttacagaaaaatagaaaatgcacagctttaaaatgggcagagttaaaatctattcccagctttatcacttatttagccatgctagcctaggcctctatttccttgtctccaaaatgagaataataaaatttaggtcaggattactatataaactaagataatacagtgattctcaaagttgttcagactgtatagtaaggagaaagtctggttgcactttgaagagcttgaagatttgaaagattcccaaaaaagcattttaaagtttacatttaagggaccttggacctcaaccctctcaagtttacaagtctgaaactttagacatcaaaagtttgagcagtttttccaaggcaacattgatagttagattcagggccaggctgtaagtctagaatttagatatcctgatcccccagataccgctcttctggttatacacagaccagctataatttgctaaacataaaatattgcagtgtattagccggctgtggctccagagtctgtgccctttaccaccgtgcccaactgtttcacatgctgtgtttggtagtttttcctagtactctccttaataatggtggtgtttagcaaattgtattacataaataaatatttatttcatggattg

SEQ ID NO: 6448 - protein, 348 aa, Homo sapiens; identical to SEQ ID NO: 902

SEQ ID NO: 6449 - DNA, 6399 bp, Homo sapiens
catacccacctttcgtaccagtccccaaacatcacggtaaagtttactgtctcttcccagcccatggacgggaacgggaacgcctacggaatatgttgtgacatacagttgatcctaggttctccagaacaaaatgctgcacgaccacctcatcctggccctttattaaatatagcttaattctggacacaaacagttcccaccatgaagagagagtaggtgaccggaaaggagtgcgtcttaagcgcgttcgctgaatttgcaccacccaatccagccccgccgcccggcgccgctccttagacctggaccccggcaccctcccgccggggccgcacttagcagtggaaagtctgtcctcctgaagaagttgcgctccgacctccaagcatcaggtcaaaagtctaactcattctctgacctgccgccaattagaaaacaactgttgccaataaacgtggtcgcgccgcctgtgacctcagccgggacggacccgcgggcgggagcctgcggggcgtgaggcggggtggggccctggctcccctcccccgcccagccgcggcgtctgacgtcccgcgcgtcggcggccgcggagcagcgcagggagccaggcgggctgccggcgggtgtgaagaaaaaaatgacactccaatgggctgcagtggcaacctttctttatgccgaaataggactcattttaatcttctgcctaccttttattcctcctcagagatggcagaagattttttcatttaatgtctggggtaaaattgcaactttttggaacaaggctttccttaccattatcatcctattgattgttctatttctagatgctgtgagagaagtaaggaaatattcctcagttcataccattgagaagagctccaccagcagacctgatgcctatgaacacacacagatgaaactttttaggtctcaaagaaatctttacatttctggattttccctatttttttggctagttttgagacgtctggttacgcttattactcaactggcaaaagaactgtcaaacaaaggtgtacttaaaactcaagcagaaaatactaacaaggctgccaaaaaatttatggaagaaaacgaaaaactaaaaaggattttgaaaagccatggtaaagatgaagaatgtgttttggaagcagaaaataaaaaactagtagaagaccaggagaaactgaaaactgaattaaggaagacttcagatgccctttctaaggcacaaaatgatgtgatggaaatgaagatgcagtcagagagactttcgaaagaatatgatcaactcctgaaagaacactctgaacttcagcattccagttttggtgaatttttaagcaaaagaagccacaaaaatggcagcattggaaaacagactggttctagaaaaggatcgtttagaaagaggcaacaagaaaagactgtgaactttataaaagacacttgcaatatactgtgtcaaaatgataattttgttatgttagcctctagaaaatttaagttcagaaaaatgcactatgaccggttcgtaatttttttaatgccacacataggttgtattgtaatggcattatcaaaatatttgatgatgtttcagatatattgcaaagtctgtattccagctcttaagaaaaatataagcatgttaaataccatatttacatattgataatgtcattggtatatggtggctgtttaccaataaaaggaaaaaattcattaaccggttgcttccaaaattagaagttttaagttgcatgaaaccattaatagccttgaaagctttgataagttttcagtaataataacctatttaatcagatgatgatgtgtttgaaaatagtgttcaatatcagcaaatttgtacacagggaatgtaaataaggataactgatcagagttatccactgtatttataaggaagagtcggaaaaaacaatgaccttagttttttttaagcctgatgatactatggtttactctaataagatagctatattgataattatatttttgttactgtgcccttgcacattttggtctttttgttaatatttttattaataacacataattagtaaccactctactgtttcaagttaatctagtaatagagcttacatatatttgtataactgctataccactgaactgaatttattttacaacagtgtagaattcttgaaaagttaacgtagaaaatatccaaaaagcagtatttctagaaagtgtccaaaaagcagtatttctttcccttggttgtgagagtaactaattatataaatattacctcaaaaatacatacactggtatcacacagtctttctacaatgtttctgtattctgaaagctaaatattaagtactatttttccattcaaatattcatttagaatttcctttagaagatggcagtgattataatattaatatgatttcatttgttccagtgtttagacatgaaatcatcttccttgtctcatgaaaacctaaatataaaaaaaaggaaaatactggagtttttatttctcttgtctttgttacatcctctgtttattataattttagcaccaacttcacacctagctaatttttttcatcataaagtggatgaaatgagcaagtacctaaaaattttatttcagataaaagtcaggagttactgctaaaaaacagacatgtaggagacattcaacaggagtatgaaatgagagttagaccatatgggctgacaacaccataaataacaagaaaagggagtgctgaaataggagagaacagagcaaatgttagctcaaagtatagacttagaaatatcaaagtaagagctatctggataaatatatagatattgagtgcttggaatcctagcctactatgtgaaaattaagtctaatgtcagaataacttacagaaaaatagaaaatgcacagctttaaaatgggcagagttaaaatctattcccagctttatcacttatttagccatgctagcctaggcctctatttccttgtctccaaaatgagaataataaaatttaggtcaggattactatataaactaagataatacagtgattctcaaagttgttcagactgtatagtaaggagaaagtctggttgcactttgaagagcttgaagatttgaaagattcccaaaaaagcattttaaagtttacatttaagggaccttggacctcaaccctctcaagtttacaagtctgaaactttagacatcaaaagtttgagcagtttttccaaggcaacattgatagttagattcagggccaggctgtaagtctagaatttagatatcctgatcccccagataccgctcttctggttatacacagaccagctataatttgctaaacataaaatattgcagtgtattagccggctgtggctccagagtctgtgccctttaccaccgtgcccaactgtttcacatgctgtgtttggtagtttttcctagtactctccttaataatggtggtgtttagcaaattgtattacataaataaatatttatttcatggattgagttatgttgcatattaaattactttccttcccattgtcaataatgacttctttatgtcttaggctgtattataaattcaaacacaggaatgttattcttgcctttttccatcagaattacctaaagttttattagactttccccctacttgcaaatctgcctggaggttctggtctttaggaagtagcacttagcaagttctggataagcactccagaatttgggatgagttatccttgttgtttgtccagctctatcttggaccccagtgctgctaattagattcatgccttgttctttagggcataagttcctctcttggctatttttcctagtatgctgagaactaggattccctttcagtgacagagtcctgccctggaaccccaatcaagagcctaaagtttaactactctctgagatattagcctgatgccagcagcctgcctggatctctaaatattacccattctgggagttgttagtggtctctgctttcctgcagtgtcactcctgcttcctcattgggcctgctagccacagctacttggatgtacccgaacctgttgccttgccctacctctgtgggctggttcagttctgcattcccattccagtgtccactgccttctcgctatccctcccatctgtgcgccaccaccagcttatccccagccctgctaacatgacaaactattgtgcatttgagtgcccactatacaatgtgtgaatataaccgtgcttttaagcattgactttaatgtctgggatgatccgtctagagtccatggaaccctcctgtgttttttcatccctttcttagtaatcttggaaatccacttatgaaattctttttctaacatttctttgctgaacggcatttttaaaattactttcacggtgtttctttccagtttgatctctacacaaacacaactttattacttgcaccagaaatgatttcaaacactttaggaactgtggtaggcttaattatgacttcccaaaagatatccctataccaatccctggaacctggaaatgttctcttctatagcaaaagatatgattaagttaaagtcttgagatggagagattattctgggtaatctgggagtgccctaaatgcagctacatctatgcttatatagaagcaaagggagatattaccacacagaagaggagaaagcacagtgaccacagaggcagagattggagtgatggagccgcagcaaaggaatgctgacagccaccagaagctggaggaggcaaagaacagattcttccccagagcctcttccagcaggagcatggccctacagataccgataaaactgatattggacttcctggcctccagaactatgggaataaatttattgtttcaagctatcaagtttgtgattatttgttactgctgccatagtaaattaatacaggagcatgcaggacagatctgtaatggcctgaactgaatttcaaggggtgtggaaaacagttactctttaacaccactccgtcttccccattagccatttggataagtcaaagatagccttagccatctcctatcttagttacttttctccttcaactgtattttgccattgtcgttgccattgcctctgcctaactgcaagccatcatcatctctcacatggactatgacgacctcctcatctccctgtatcttctctaatgcttctctcatatacatgctctcagcagccacctggtttaaaacaaaaacaaaaaaaacactaatcatgtcattccctgcttgtcttcccgttctttccaactgtcattccctgcttgtcttccaattctttccaactgcagttaagatcaaaccaccaagacctcaccaggctcccatctacttttcagcctcaactcagtccacctgctctgccaatcacacctgtttctttttgttgttctttccctaggatatagatcctggcatacctgcattctgattcttcttggaacaagccaaattctttcccctgtcagtacgtttgcatgtgtagtacatgttgcatcccaggcctgtctgccttcttaccctattttattttcatcatagcacttactaccatctgaaatgatctcatttatggtttgtctcctcagtgattaacacagttcctgcacacagtaaatcagtagttctcaacaggaagtgaagaggtcatcctgaggggaacatttagcaatacctagagacatttctggttgtcataaccaggggaatgctcctagtggatagaagtcagggaggctgttaaacccattccacaatgcacaggactggaacaaagaatgatctctcactcagaatgtcagtgttgccaaggtggagacatcctgcagtagatgcttgtggcagagggtactggttgtaccccagtatccattctttcattcacctgtgttaatacatgctccagttttgtatttttttttataaacagctgtcaagcataaagataacattttccatctccttgtatgtaagtggaaataggactgtcatgtggggccagtttcttttttttcttcctctgtcctgctgcttgaaacatatgctgctatcttagatcatgaggtcgaggccatgcaaagtggagcaacaaggagctgtgtccctgacgccataagcaccacacctgtcctgaattgctgtgaatgacaccagctaactacaatgcattgtctcaacatcctagacataataaaaagccataaatatgtttgtcctatgcagcacaaaacctttgtatctttgccttttatgttgggatcttaattaaaaattacatcctctactgtc

SEQ ID NO: 6450 - protein, 348 aa, Homo sapiens; identical to SEQ ID NO: 902

SEQ ID NO: 6451 - DNA, 6320 bp, Homo sapiens
catacccacctttcgtaccagtccccaaacatcacggtaaagtttactgtctcttcccagcccatggacgggaacgggaacgcctacggaatatgttgtgacatacagttgatcctaggttctccagaacaaaatgctgcacgaccacctcatcctggccctttattaaatatagcttaattctggacacaaacagttcccaccatgaagagagagtaggtgaccggaaaggagtgcgtcttaagcgcgttcgctgaatttgcaccacccaatccagccccgccgcccggcgccgctccttagacctggaccccggcaccctcccgccggggccgcacttagcagtggaaagtctgtcctcctgaagaagttgcgctccgacctccaagcatcaggtcaaaagtctaactcattctctgacctgccgccaattagaaaacaactgttgccaataaacgtggtcgcgccgcctgtgacctcagccgggacggacccgcgggcgggagcctgcggggcgtgaggcggggtggggccctggctcccctcccccgcccagccgcggcgtctgacgtcccgcgcgtcggcggccgcggagcagcgcagggagccaggcgggctgccggcgggtgtgaagaaaaaaatgacactccaatgggctgcagtggcaacctttctttatgccgaaataggactcattttaatcttctgcctaccttttattcctcctcagagatggcagaagattttttcatttaatgtctggggtaaaattgcaactttttggaacaaggctttccttaccattatcatcctattgattgttctatttctagatgctgtgagagaagtaaggaaatattcctcagttcataccattgagaagagctccaccagcagacctgatgcctatgaacacacacagatgaaactttttaggtctcaaagaaatctttacatttctggattttccctatttttttggctagttttgagacgtctggttacgcttattactcaactggcaaaagaactgtcaaacaaaggtgtacttaaaactcaagcagaaaatactaacaaggctgccaaaaaatttatggaagaaaacgaaaaactaaaaaggattttgaaaagccatggtaaagatgaagaatgtgttttggaagcagaaaataaaaaactagtagaagaccaggagaaactgaaaactgaattaaggaagacttcagatgccctttctaaggcacaaaatgatgtgatggaaatgaagatgcagtcagagagactttcgaaagaatatgatcaactcctgaaagaacactctgaacttcaggatcgtttagaaagaggcaacaagaaaagactgtgaactttataaaagacacttgcaatatactgtgtcaaaatgataattttgttatgttagcctctagaaaatttaagttcagaaaaatgcactatgaccggttcgtaatttttttaatgccacacataggttgtattgtaatggcattatcaaaatatttgatgatgtttcagatatattgcaaagtctgtattccagctcttaagaaaaatataagcatgttaaataccatatttacatattgataatgtcattggtatatggtggctgtttaccaataaaaggaaaaaattcattaaccggttgcttccaaaattagaagttttaagttgcatgaaaccattaatagccttgaaagctttgataagttttcagtaataataacctatttaatcagatgatgatgtgtttgaaaatagtgttcaatatcagcaaatttgtacacagggaatgtaaataaggataactgatcagagttatccactgtatttataaggaagagtcggaaaaaacaatgaccttagttttttttaagcctgatgatactatggtttactctaataagatagctatattgataattatatttttgttactgtgcccttgcacattttggtctttttgttaatatttttattaataacacataattagtaaccactctactgtttcaagttaatctagtaatagagcttacatatatttgtataactgctataccactgaactgaatttattttacaacagtgtagaattcttgaaaagttaacgtagaaaatatccaaaaagcagtatttctagaaagtgtccaaaaagcagtatttctttcccttggttgtgagagtaactaattatataaatattacctcaaaaatacatacactggtatcacacagtctttctacaatgtttctgtattctgaaagctaaatattaagtactatttttccattcaaatattcatttagaatttcctttagaagatggcagtgattataatattaatatgatttcatttgttccagtgtttagacatgaaatcatcttccttgtctcatgaaaacctaaatataaaaaaaaggaaaatactggagtttttatttctcttgtctttgttacatcctctgtttattataattttagcaccaacttcacacctagctaatttttttcatcataaagtggatgaaatgagcaagtacctaaaaattttatttcagataaaagtcaggagttactgctaaaaaacagacatgtaggagacattcaacaggagtatgaaatgagagttagaccatatgggctgacaacaccataaataacaagaaaagggagtgctgaaataggagagaacagagcaaatgttagctcaaagtatagacttagaaatatcaaagtaagagctatctggataaatatatagatattgagtgcttggaatcctagcctactatgtgaaaattaagtctaatgtcagaataacttacagaaaaatagaaaatgcacagctttaaaatgggcagagttaaaatctattcccagctttatcacttatttagccatgctagcctaggcctctatttccttgtctccaaaatgagaataataaaatttaggtcaggattactatataaactaagataatacagtgattctcaaagttgttcagactgtatagtaaggagaaagtctggttgcactttgaagagcttgaagatttgaaagattcccaaaaaagcattttaaagtttacatttaagggaccttggacctcaaccctctcaagtttacaagtctgaaactttagacatcaaaagtttgagcagtttttccaaggcaacattgatagttagattcagggccaggctgtaagtctagaatttagatatcctgatcccccagataccgctcttctggttatacacagaccagctataatttgctaaacataaaatattgcagtgtattagccggctgtggctccagagtctgtgccctttaccaccgtgcccaactgtttcacatgctgtgtttggtagtttttcctagtactctccttaataatggtggtgtttagcaaattgtattacataaataaatatttatttcatggattgagttatgttgcatattaaattactttccttcccattgtcaataatgacttctttatgtcttaggctgtattataaattcaaacacaggaatgttattcttgcctttttccatcagaattacctaaagttttattagactttccccctacttgcaaatctgcctggaggttctggtctttaggaagtagcacttagcaagttctggataagcactccagaatttgggatgagttatccttgttgtttgtccagctctatcttggaccccagtgctgctaattagattcatgccttgttctttagggcataagttcctctcttggctatttttcctagtatgctgagaactaggattccctttcagtgacagagtcctgccctggaaccccaatcaagagcctaaagtttaactactctctgagatattagcctgatgccagcagcctgcctggatctctaaatattacccattctgggagttgttagtggtctctgctttcctgcagtgtcactcctgcttcctcattgggcctgctagccacagctacttggatgtacccgaacctgttgccttgccctacctctgtgggctggttcagttctgcattcccattccagtgtccactgccttctcgctatccctcccatctgtgcgccaccaccagcttatccccagccctgctaacatgacaaactattgtgcatttgagtgcccactatacaatgtgtgaatataaccgtgcttttaagcattgactttaatgtctgggatgatccgtctagagtccatggaaccctcctgtgttttttcatccctttcttagtaatcttggaaatccacttatgaaattctttttctaacatttctttgctgaacggcatttttaaaattactttcacggtgtttctttccagtttgatctctacacaaacacaactttattacttgcaccagaaatgatttcaaacactttaggaactgtggtaggcttaattatgacttcccaaaagatatccctataccaatccctggaacctggaaatgttctcttctatagcaaaagatatgattaagttaaagtcttgagatggagagattattctgggtaatctgggagtgccctaaatgcagctacatctatgcttatatagaagcaaagggagatattaccacacagaagaggagaaagcacagtgaccacagaggcagagattggagtgatggagccgcagcaaaggaatgctgacagccaccagaagctggaggaggcaaagaacagattcttccccagagcctcttccagcaggagcatggccctacagataccgataaaactgatattggacttcctggcctccagaactatgggaataaatttattgtttcaagctatcaagtttgtgattatttgttactgctgccatagtaaattaatacaggagcatgcaggacagatctgtaatggcctgaactgaatttcaaggggtgtggaaaacagttactctttaacaccactccgtcttccccattagccatttggataagtcaaagatagccttagccatctcctatcttagttacttttctccttcaactgtattttgccattgtcgttgccattgcctctgcctaactgcaagccatcatcatctctcacatggactatgacgacctcctcatctccctgtatcttctctaatgcttctctcatatacatgctctcagcagccacctggtttaaaacaaaaacaaaaaaaacactaatcatgtcattccctgcttgtcttcccgttctttccaactgtcattccctgcttgtcttccaattctttccaactgcagttaagatcaaaccaccaagacctcaccaggctcccatctacttttcagcctcaactcagtccacctgctctgccaatcacacctgtttctttttgttgttctttccctaggatatagatcctggcatacctgcattctgattcttcttggaacaagccaaattctttcccctgtcagtacgtttgcatgtgtagtacatgttgcatcccaggcctgtctgccttcttaccctattttattttcatcatagcacttactaccatctgaaatgatctcatttatggtttgtctcctcagtgattaacacagttcctgcacacagtaaatcagtagttctcaacaggaagtgaagaggtcatcctgaggggaacatttagcaatacctagagacatttctggttgtcataaccaggggaatgctcctagtggatagaagtcagggaggctgttaaacccattccacaatgcacaggactggaacaaagaatgatctctcactcagaatgtcagtgttgccaaggtggagacatcctgcagtagatgcttgtggcagagggtactggttgtaccccagtatccattctttcattcacctgtgttaatacatgctccagttttgtatttttttttataaacagctgtcaagcataaagataacattttccatctccttgtatgtaagtggaaataggactgtcatgtggggccagtttcttttttttcttcctctgtcctgctgcttgaaacatatgctgctatcttagatcatgaggtcgaggccatgcaaagtggagcaacaaggagctgtgtccctgacgccataagcaccacacctgtcctgaattgctgtgaatgacaccagctaactacaatgcattgtctcaacatcctagacataataaaaagccataaatatgtttgtcctatgcagcacaaaacctttgtatctttgccttttatgttgggatcttaattaaaaattacatcctctactgtc

SEQ ID NO: 6452 - protein, 241 aa, Homo sapiens; identical to SEQ ID NO: 908

SEQ ID NO: 6453 - DNA, 6343 bp, Homo sapiens
catacccacctttcgtaccagtccccaaacatcacggtaaagtttactgtctcttcccagcccatggacgggaacgggaacgcctacggaatatgttgtgacatacagttgatcctaggttctccagaacaaaatgctgcacgaccacctcatcctggccctttattaaatatagcttaattctggacacaaacagttcccaccatgaagagagagtaggtgaccggaaaggagtgcgtcttaagcgcgttcgctgaatttgcaccacccaatccagccccgccgcccggcgccgctccttagacctggaccccggcaccctcccgccggggccgcacttagcagtggaaagtctgtcctcctgaagaagttgcgctccgacctccaagcatcaggtcaaaagtctaactcattctctgacctgccgccaattagaaaacaactgttgccaataaacgtggtcgcgccgcctgtgacctcagccgggacggacccgcgggcgggagcctgcggggcgtgaggcggggtggggccctggctcccctcccccgcccagccgcggcgtctgacgtcccgcgcgtcggcggccgcggagcagcgcagggagccaggcgggctgccggcggatggcagaagattttttcatttaatgtctggggtaaaattgcaactttttggaacaaggctttccttaccattatcatcctattgattgttctatttctagatgctgtgagagaagtaaggaaatattcctcagttcataccattgagaagagctccaccagcagacctgatgcctatgaacacacacagatgaaactttttaggtctcaaagaaatctttacatttctggattttccctatttttttggctagttttgagacgtctggttacgcttattactcaactggcaaaagaactgtcaaacaaaggtgtacttaaaactcaagcagaaaatactaacaaggctgccaaaaaatttatggaagaaaacgaaaaactaaaaaggattttgaaaagccatggtaaagatgaagaatgtgttttggaagcagaaaataaaaaactagtagaagaccaggagaaactgaaaactgaattaaggaagacttcagatgccctttctaaggcacaaaatgatgtgatggaaatgaagatgcagtcagagagactttcgaaagaatatgatcaactcctgaaagaacactctgaacttcaggtcccactgggcagcttctacatactggccttcgcacctgggctccataaccctcatccctccagcccaagaagtggtggtggcttttctgctattgataatcccagaggtgccttaccaccctgtttggatcgtttagaaagaggcaacaagaaaagactgtgaactttataaaagacacttgcaatatactgtgtcaaaatgataattttgttatgttagcctctagaaaatttaagttcagaaaaatgcactatgaccggttcgtaatttttttaatgccacacataggttgtattgtaatggcattatcaaaatatttgatgatgtttcagatatattgcaaagtctgtattccagctcttaagaaaaatataagcatgttaaataccatatttacatattgataatgtcattggtatatggtggctgtttaccaataaaaggaaaaaattcattaaccggttgcttccaaaattagaagttttaagttgcatgaaaccattaatagccttgaaagctttgataagttttcagtaataataacctatttaatcagatgatgatgtgtttgaaaatagtgttcaatatcagcaaatttgtacacagggaatgtaaataaggataactgatcagagttatccactgtatttataaggaagagtcggaaaaaacaatgaccttagttttttttaagcctgatgatactatggtttactctaataagatagctatattgataattatatttttgttactgtgcccttgcacattttggtctttttgttaatatttttattaataacacataattagtaaccactctactgtttcaagttaatctagtaatagagcttacatatatttgtataactgctataccactgaactgaatttattttacaacagtgtagaattcttgaaaagttaacgtagaaaatatccaaaaagcagtatttctagaaagtgtccaaaaagcagtatttctttcccttggttgtgagagtaactaattatataaatattacctcaaaaatacatacactggtatcacacagtctttctacaatgtttctgtattctgaaagctaaatattaagtactatttttccattcaaatattcatttagaatttcctttagaagatggcagtgattataatattaatatgatttcatttgttccagtgtttagacatgaaatcatcttccttgtctcatgaaaacctaaatataaaaaaaaggaaaatactggagtttttatttctcttgtctttgttacatcctctgtttattataattttagcaccaacttcacacctagctaatttttttcatcataaagtggatgaaatgagcaagtacctaaaaattttatttcagataaaagtcaggagttactgctaaaaaacagacatgtaggagacattcaacaggagtatgaaatgagagttagaccatatgggctgacaacaccataaataacaagaaaagggagtgctgaaataggagagaacagagcaaatgttagctcaaagtatagacttagaaatatcaaagtaagagctatctggataaatatatagatattgagtgcttggaatcctagcctactatgtgaaaattaagtctaatgtcagaataacttacagaaaaatagaaaatgcacagctttaaaatgggcagagttaaaatctattcccagctttatcacttatttagccatgctagcctaggcctctatttccttgtctccaaaatgagaataataaaatttaggtcaggattactatataaactaagataatacagtgattctcaaagttgttcagactgtatagtaaggagaaagtctggttgcactttgaagagcttgaagatttgaaagattcccaaaaaagcattttaaagtttacatttaagggaccttggacctcaaccctctcaagtttacaagtctgaaactttagacatcaaaagtttgagcagtttttccaaggcaacattgatagttagattcagggccaggctgtaagtctagaatttagatatcctgatcccccagataccgctcttctggttatacacagaccagctataatttgctaaacataaaatattgcagtgtattagccggctgtggctccagagtctgtgccctttaccaccgtgcccaactgtttcacatgctgtgtttggtagtttttcctagtactctccttaataatggtggtgtttagcaaattgtattacataaataaatatttatttcatggattgagttatgttgcatattaaattactttccttcccattgtcaataatgacttctttatgtcttaggctgtattataaattcaaacacaggaatgttattcttgcctttttccatcagaattacctaaagttttattagactttccccctacttgcaaatctgcctggaggttctggtctttaggaagtagcacttagcaagttctggataagcactccagaatttgggatgagttatccttgttgtttgtccagctctatcttggaccccagtgctgctaattagattcatgccttgttctttagggcataagttcctctcttggctatttttcctagtatgctgagaactaggattccctttcagtgacagagtcctgccctggaaccccaatcaagagcctaaagtttaactactctctgagatattagcctgatgccagcagcctgcctggatctctaaatattacccattctgggagttgttagtggtctctgctttcctgcagtgtcactcctgcttcctcattgggcctgctagccacagctacttggatgtacccgaacctgttgccttgccctacctctgtgggctggttcagttctgcattcccattccagtgtccactgccttctcgctatccctcccatctgtgcgccaccaccagcttatccccagccctgctaacatgacaaactattgtgcatttgagtgcccactatacaatgtgtgaatataaccgtgcttttaagcattgactttaatgtctgggatgatccgtctagagtccatggaaccctcctgtgttttttcatccctttcttagtaatcttggaaatccacttatgaaattctttttctaacatttctttgctgaacggcatttttaaaattactttcacggtgtttctttccagtttgatctctacacaaacacaactttattacttgcaccagaaatgatttcaaacactttaggaactgtggtaggcttaattatgacttcccaaaagatatccctataccaatccctggaacctggaaatgttctcttctatagcaaaagatatgattaagttaaagtcttgagatggagagattattctgggtaatctgggagtgccctaaatgcagctacatctatgcttatatagaagcaaagggagatattaccacacagaagaggagaaagcacagtgaccacagaggcagagattggagtgatggagccgcagcaaaggaatgctgacagccaccagaagctggaggaggcaaagaacagattcttccccagagcctcttccagcaggagcatggccctacagataccgataaaactgatattggacttcctggcctccagaactatgggaataaatttattgtttcaagctatcaagtttgtgattatttgttactgctgccatagtaaattaatacaggagcatgcaggacagatctgtaatggcctgaactgaatttcaaggggtgtggaaaacagttactctttaacaccactccgtcttccccattagccatttggataagtcaaagatagccttagccatctcctatcttagttacttttctccttcaactgtattttgccattgtcgttgccattgcctctgcctaactgcaagccatcatcatctctcacatggactatgacgacctcctcatctccctgtatcttctctaatgcttctctcatatacatgctctcagcagccacctggtttaaaacaaaaacaaaaaaaacactaatcatgtcattccctgcttgtcttcccgttctttccaactgtcattccctgcttgtcttccaattctttccaactgcagttaagatcaaaccaccaagacctcaccaggctcccatctacttttcagcctcaactcagtccacctgctctgccaatcacacctgtttctttttgttgttctttccctaggatatagatcctggcatacctgcattctgattcttcttggaacaagccaaattctttcccctgtcagtacgtttgcatgtgtagtacatgttgcatcccaggcctgtctgccttcttaccctattttattttcatcatagcacttactaccatctgaaatgatctcatttatggtttgtctcctcagtgattaacacagttcctgcacacagtaaatcagtagttctcaacaggaagtgaagaggtcatcctgaggggaacatttagcaatacctagagacatttctggttgtcataaccaggggaatgctcctagtggatagaagtcagggaggctgttaaacccattccacaatgcacaggactggaacaaagaatgatctctcactcagaatgtcagtgttgccaaggtggagacatcctgcagtagatgcttgtggcagagggtactggttgtaccccagtatccattctttcattcacctgtgttaatacatgctccagttttgtatttttttttataaacagctgtcaagcataaagataacattttccatctccttgtatgtaagtggaaataggactgtcatgtggggccagtttcttttttttcttcctctgtcctgctgcttgaaacatatgctgctatcttagatcatgaggtcgaggccatgcaaagtggagcaacaaggagctgtgtccctgacgccataagcaccacacctgtcctgaattgctgtgaatgacaccagctaactacaatgcattgtctcaacatcctagacataataaaaagccataaatatgtttgtcctatgcagcacaaaacctttgtatctttgccttttatgttgggatcttaattaaaaattacatcctctactgtc

SEQ ID NO: 6454 - protein, 190 aa, Homo sapiens; identical to SEQ ID NO: 6446

SEQ ID NO: 6455 - DNA, 3018 bp, Homo sapiens
catacccacctttcgtaccagtccccaaacatcacggtaaagtttactgtctcttcccagcccatggacgggaacgggaacgcctacggaatatgttgtgacatacagttgatcctaggttctccagaacaaaatgctgcacgaccacctcatcctggccctttattaaatatagcttaattctggacacaaacagttcccaccatgaagagagagtaggtgaccggaaaggagtgcgtcttaagcgcgttcgctgaatttgcaccacccaatccagccccgccgcccggcgccgctccttagacctggaccccggcaccctcccgccggggccgcacttagcagtggaaagtctgtcctcctgaagaagttgcgctccgacctccaagcatcaggtcaaaagtctaactcattctctgacctgccgccaattagaaaacaactgttgccaataaacgtggtcgcgccgcctgtgacctcagccgggacggacccgcgggcgggagcctgcggggcgtgaggcggggtggggccctggctcccctcccccgcccagccgcggcgtctgacgtcccgcgcgtcggcggccgcggagcagcgcagggagccaggcgggctgccggcgggtgtgaagaaaaaaatgacactccaatgggctgcagtggcaacctttctttatgccgaaataggactcattttaatcttctgcctaccttttattcctcctcagagatggcagaagattttttcatttaatgtctggggtaaaattgcaactttttggaacaaggctttccttaccattatcatcctattgattgttctatttctagatgctgtgagagaagtaaggaaatattcctcagttcataccattgagaagagctccaccagcagacctgatgcctatgaacacacacagatgaaactttttaggtctcaaagaaatctttacatttctggattttccctatttttttggctagttttgagacgtctggttacgcttattactcaactggcaaaagaactgtcaaacaaaggtgtacttaaaactcaagcagaaaatactaacaaggctgccaaaaaatttatggaagaaaacgaaaaactaaaaaggattttgaaaagccatggtaaagatgaagaatgtgttttggaagcagaaaataaaaaactagtagaagaccaggagaaactgaaaactgaattaaggaagacttcagatgccctttctaaggcacaaaatgatgtgatggaaatgaagatgcagtcagagagactttcgaaagaatatgatcaactcctgaaagaacactctgaacttcagaagcaaagggagatattaccacacagaagaggagaaagcacagtgaccacagaggcagagattggagtgatggagccgcagcaaaggaatgctgacagccaccagaagctggaggaggcaaagaacagattcttccccagagcctcttccagcaggagcatggccctacagataccgataaaactgatattggacttcctggcctccagaactatgggaataaatttattgtttcaagctatcaagtttgtgattatttgttactgctgccatagtaaattaatacaggagcatgcaggacagatctgtaatggcctgaactgaatttcaaggggtgtggaaaacagttactctttaacaccactccgtcttccccattagccatttggataagtcaaagatagccttagccatctcctatcttagttacttttctccttcaactgtattttgccattgtcgttgccattgcctctgcctaactgcaagccatcatcatctctcacatggactatgacgacctcctcatctccctgtatcttctctaatgcttctctcatatacatgctctcagcagccacctggtttaaaacaaaaacaaaaaaaacactaatcatgtcattccctgcttgtcttcccgttctttccaactgtcattccctgcttgtcttccaattctttccaactgcagttaagatcaaaccaccaagacctcaccaggctcccatctacttttcagcctcaactcagtccacctgctctgccaatcacacctgtttctttttgttgttctttccctaggatatagatcctggcatacctgcattctgattcttcttggaacaagccaaattctttcccctgtcagtacgtttgcatgtgtagtacatgttgcatcccaggcctgtctgccttcttaccctattttattttcatcatagcacttactaccatctgaaatgatctcatttatggtttgtctcctcagtgattaacacagttcctgcacacagtaaatcagtagttctcaacaggaagtgaagaggtcatcctgaggggaacatttagcaatacctagagacatttctggttgtcataaccaggggaatgctcctagtggatagaagtcagggaggctgttaaacccattccacaatgcacaggactggaacaaagaatgatctctcactcagaatgtcagtgttgccaaggtggagacatcctgcagtagatgcttgtggcagagggtactggttgtaccccagtatccattctttcattcacctgtgttaatacatgctccagttttgtatttttttttataaacagctgtcaagcataaagataacattttccatctccttgtatgtaagtggaaataggactgtcatgtggggccagtttcttttttttcttcctctgtcctgctgcttgaaacatatgctgctatcttagatcatgaggtcgaggccatgcaaagtggagcaacaaggagctgtgtccctgacgccataagcaccacacctgtcctgaattgctgtgaatgacaccagctaactacaatgcattgtctcaacatcctagacataataaaaagccataaatatgtttgtcctatgcagcacaaaacctttgtatctttgccttttatgttgggatcttaattaaaaattacatcctctactgtc

SEQ ID NO: 6456 - protein, 337 aa, Homo sapiens; identical to SEQ ID NO: 904

SEQ ID NO: 6457 - DNA, 2152 bp, Homo sapiens
catacccacctttcgtaccagtccccaaacatcacggtaaagtttactgtctcttcccagcccatggacgggaacgggaacgcctacggaatatgttgtgacatacagttgatcctaggttctccagaacaaaatgctgcacgaccacctcatcctggccctttattaaatatagcttaattctggacacaaacagttcccaccatgaagagagagtaggtgaccggaaaggagtgcgtcttaagcgcgttcgctgaatttgcaccacccaatccagccccgccgcccggcgccgctccttagacctggaccccggcaccctcccgccggggccgcacttagcagtggaaagtctgtcctcctgaagaagttgcgctccgacctccaagcatcaggtcaaaagtctaactcattctctgacctgccgccaattagaaaacaactgttgccaataaacgtggtcgcgccgcctgtgacctcagccgggacggacccgcgggcgggagcctgcggggcgtgaggcggggtggggccctggctcccctcccccgcccagccgcggcgtctgacgtcccgcgcgtcggcggccgcggagcagcgcagggagccaggcgggctgccggcgggtgtgaagaaaaaaatgacactccaatgggctgcagtggcaacctttctttatgccgaaataggactcattttaatcttctgcctaccttttattcctcctcagagatggcagaagattttttcatttaatgtctggggtaaaattgcaactttttggaacaaggctttccttaccattatcatcctattgattgttctatttctagagttttgagacgtctggttacgcttattactcaactggcaaaagaactgtcaaacaaaggtgtacttaaaactcaagcagaaaatactaacaaggctgccaaaaaatttatggaagaaaacgaaaaactaaaaaggattttgaaaagccatggtaaagatgaagaatgtgttttggaagcagaaaataaaaaactagtagaagaccaggagaaactgaaaactgaattaaggaagacttcagatgccctttctaaggcacaaaatgatgtgatggaaatgaagatgcagtcagagagactttcgaaagaatatgatcaactcctgaaagaacactctgaacttcaggtttttgctaaactacttaactacctccttatgaggaagtggtgagccagcctccaactcctcccccagcatacagtgacttccagctacgcagcagcagcagctcctgcctccacagtgaggcctggcagatggcagtcccccagcgccaatcccaccaggggatccaagggaatcccttgtctgagcccagcagaagcatcacaagacccccaagcatcgctgatcctgagccctctgacctaccaggtgaccgagtagccaccaaagccctggggatgcagcccagtggctctgtagccagcctgggagagctggacccaggggccttcctggacaaggaggcagaatgtaaggaggagctgctgaaagatgacagttctgaacatggcagcgcaccgcccaacagcaaagagaagatgctcaggagacattgccacttcactggtgacgcgggcattgaagtgcgtatgtcagggccaccatgatcatagccttaaagagttcaacatgctcatcgctgatgcactggatgggcccctggacttctgcgacagctgccatgtgcagcctcctggtgatgaggaggaaggcctcttccagccctccaaggagcaggcttgacagcctgggcacctgcacctgccacagctacctgcatgcctgctgctaaacatcatcaatgagcagtactctcccaactcccagagcagcagctcccgcagctagatcaggctctgccagcacccaagaacttggcaaagcaaccagggtaggggagaaccacgagagaagcattaaatgactttcagagaaagtggtacagccacttgattcctttttttttttttctttctcctctcctgcattttcctccatctccaggtacagtttggggtgtggatgcctctcgccctacaaaggcacaatgttgtggagggctgagaagttggttctgtttctcgttcctcat

SEQ ID NO: 6458 - protein, 93 aa, Homo sapiens
MEENEKLKRILKSHGKDEECVLEAENKKLVEDQEKLKTELRKTSDALSKAQNDVMEMKMQSERLSKEYDQLLKEHSELQVFAKLLNYLLMRKW

SEQ ID NO: 6459 - DNA, 3229 bp, Homo sapiens
catacccacctttcgtaccagtccccaaacatcacggtaaagtttactgtctcttcccagcccatggacgggaacgggaacgcctacggaatatgttgtgacatacagttgatcctaggttctccagaacaaaatgctgcacgaccacctcatcctggccctttattaaatatagcttaattctggacacaaacagttcccaccatgaagagagagtaggtgaccggaaaggagtgcgtcttaagcgcgttcgctgaatttgcaccacccaatccagccccgccgcccggcgccgctccttagacctggaccccggcaccctcccgccggggccgcacttagcagtggaaagtctgtcctcctgaagaagttgcgctccgacctccaagcatcaggtcaaaagtctaactcattctctgacctgccgccaattagaaaacaactgttgccaataaacgtggtcgcgccgcctgtgacctcagccgggacggacccgcgggcgggagcctgcggggcgtgaggcggggtggggccctggctcccctcccccgcccagccgcggcgtctgacgtcccgcgcgtcggcggccgcggagcagcgcagggagccaggcgggctgccggcgggtgtgaagaaaaaaatgacactccaatgggctgcagtggcaacctttctttatgccgaaataggactcattttaatcttctgcctaccttttattcctcctcagagatggcagaagattttttcatttaatgtctggggtaaaattgcaactttttggaacaaggctttccttaccattatcatcctattgattgttctatttctagatgctgtgagagaagtaaggaaatattcctcagttcataccattgagaagagctccaccagcagacctgatgcctatgaacacacacagatgaaactttttaggtctcaaagaaatctttacatttctggattttccctatttttttggctagttttgagacgtctggttacgcttattactcaactggcaaaagaactgtcaaacaaaggtgtacttaaaactcaagcagaaaatactaacaaggctgccaaaaaatttatggaagaaaacgaaaaactaaaaaggattttgaaaagccatggtaaagatgaagaatgtgttttggaagcagaaaataaaaaactagtagaagaccaggagaaactgaaaactgaattaaggaagacttcagatgccctttctaaggcacaaaatgatgtgatggaaatgaagatgcagtcagagagactttcgaaagaatatgatcaactcctgaaagaacactctgaacttcaggtttttgctaaactacttaactacctccttatgaggaagtggtgagccagcctccaactcctcccccagcatacagtgacttccagctacgcagcagcagcagctcctgcctccacagtgaggcctggcagatggcagtcccccagcgccaatcccaccaggggatccaagggaatcccttgtctgagcccagcagaagcatcacaagacccccaagcatcgctgatcctgagccctctgacctaccaggtgaccgagtagccaccaaagccctggggatgcagcccagtggctctgtagccagcctgggagagctggacccaggggccttcctggacaaggaggcagaatgtaaggaggagctgctgaaagatgacagttctgaacatggcagcgcaccgcccaacagcaaagagaagatgctcaggagacattgccacttcactggtgacgcgggcattgaagtgcgtatgtcagggccaccatgatcatagccttaaagagttcaacatgctcatcgctgatgcactggatgggcccctggacttctgcgacagctgccatgtgcagcctcctggtgatgaggaggaaggcctcttccagccctccaaggagcaggcttgacagcctgggcacctgcacctgccacagctacctgcatgcctgctgctaaacatcatcaatgagcagtactctcccaactcccagagcagcagctcccgcagctagatcaggctctgccagcacccaagaacttggcaaagcaaccagggtaggggagaaccacgagagaagcattaaatgactttcagagaaagtggtacagccacttgattcctttttttttttttctttctcctctcctgcattttcctccatctccaggtacagtttggggtgtggatgcctctcgccctacaaaggcacaatgttgtggagggctgagaagttggttctgtttctcgttcctcataccccatccctatcccctttattctccctttaaagtcctatctcacctacctgtttgggtcagagagatgtgttttaaaggcccccaaggaaggaggctgggactgtgccctgagatgattcttggtgacgaagtggatttgtgctctgagtttagtttaagagaacgtcactgtgtctcagtcccggagaggcaacccatcttagacctgggtgaagaaggaagcctgcagaggcctaggctttgtcgcctgtggctcccagtgtctgcagagccagcattgagctaatcctgtgggaggatgagagctgatcggcagttgtatgataggttggtagggggcttgtgatctgtgaaattccaggtgatggatgcatccagtgtgcatcactaagaggccctttcccagtggcctctggctggctgcaggctggttccagtgtgaaagattatactgccttttcttttttttattttccttttgaaaacagacaacaaaagacaactgaaaataacttccccagtgagcaggcaagaattctcttctgaaaaatgacgtttgtagttctttcccaagttggccttcaaagagcctggctgcagttgagccagaaggagatgtcttgtgtgaaggctaaagtggaggctgtctctgaaatctccgtgagcaggtggccctaagccatggtggtggatagatgtgcagctttctgcatctctgccccttggtctgtgcccacaggtggccggcgtcagcctccatcccgagcacatgctccgcgggtctttatgtctcactgttcttcacacataggaggaaagagataggagactgaggaagggatggaccctgagaaagggcccctccagcctggctctcacacagtattttgtctttgattctgaataaatttttttttgtggtt

SEQ ID NO: 6460 - protein, 244 aa, Homo sapiens; identical to SEQ ID NO: 906

SEQ ID NO: 6461 - DNA, 600 bp, Homo sapiens; identical to SEQ ID NO: 899

SEQ ID NO: 6462 - protein, 199 aa, Homo sapiens; identical to SEQ ID NO: 900

SEQ ID NO: 6463 - DNA, 2686 bp, Homo sapiens
gagcgccgctgcctggtctggagaaccccgcggagctggcctggcccgacccggcccggcccggtccgcggcgcggtggtcgagggcccgcggcgccttctgggagcgggagggccgggaagccgggcgttggtggagggaggcgttgggcttctgtcgccgcgaagctggcggaaaaggcagtggccagcgagccgcctcgccagttcccacgactcccagggaggtggcgacacccgcttcccgggccacccttttccccttcctgaccggggtccgtgcttgccttcccaggtgtgaagaaaaaaatgacactccaatgggctgcagtggcaacctttctttatgccgaaataggactcattttaatcttctgcctaccttttattcctcctcagagatggcagaagattttttcatttaatgtctggggtaaaattgcaactttttggaacaaggctttccttaccattatcatcctattgattgttctatttctagatgctgtgagagaagtaaggaaatattcctcagttcataccattgagaagagctccaccagcagacctgatgcctatgaacacacacagatgaaactttttaggtctcaaagaaatctttacatttctggattttccctatttttttggctagttttgagacgtctggttacgcttattactcaactggcaaaagaactgtcaaacaaaggtgtacttaaaactcaagcagaaaatactaacaaggctgccaaaaaatttatggaagaaaacgaaaaactaaaaaggattttgaaaagccatggtaaagatgaagaatgtgttttggaagcagaaaataaaaaactagtagaagaccaggagaaactgaaaactgaattaaggaagacttcagatgccctttctaaggcacaaaatgatgtgatggaaatgaagatgcagtcagagagactttcgaaagaatatgatcaactcctgaaagaacactctgaacttcagaagcaaagggagatattaccacacagaagaggagaaagcacagtgaccacagaggcagagattggagtgatggagccgcagcaaaggaatgctgacagccaccagaagctggaggaggcaaagaacagattcttccccagagcctcttccagcaggagcatggccctacagataccgataaaactgatattggacttcctggcctccagaactatgggaataaatttattgtttcaagctatcaagtttgtgattatttgttactgctgccatagtaaattaatacaggagcatgcaggacagatctgtaatggcctgaactgaatttcaaggggtgtggaaaacagttactctttaacaccactccgtcttccccattagccatttggataagtcaaagatagccttagccatctcctatcttagttacttttctccttcaactgtattttgccattgtcgttgccattgcctctgcctaactgcaagccatcatcatctctcacatggactatgacgacctcctcatctccctgtatcttctctaatgcttctctcatatacatgctctcagcagccacctggtttaaaacaaaaacaaaaaaaacactaatcatgtcattccctgcttgtcttcccgttctttccaactgtcattccctgcttgtcttccaattctttccaactgcagttaagatcaaaccaccaagacctcaccaggctcccatctacttttcagcctcaactcagtccacctgctctgccaatcacacctgtttctttttgttgttctttccctaggatatagatcctggcatacctgcattctgattcttcttggaacaagccaaattctttcccctgtcagtacgtttgcatgtgtagtacatgttgcatcccaggcctgtctgccttcttaccctattttattttcatcatagcacttactaccatctgaaatgatctcatttatggtttgtctcctcagtgattaacacagttcctgcacacagtaaatcagtagttctcaacaggaagtgaagaggtcatcctgaggggaacatttagcaatacctagagacatttctggttgtcataaccaggggaatgctcctagtggatagaagtcagggaggctgttaaacccattccacaatgcacaggactggaacaaagaatgatctctcactcagaatgtcagtgttgccaaggtggagacatcctgcagtagatgcttgtggcagagggtactggttgtaccccagtatccattctttcattcacctgtgttaatacatgctccagttttgtatttttttttataaacagctgtcaagcataaagataacattttccatctccttgtatgtaagtggaaataggactgtcatgtggggccagtttcttttttttcttcctctgtcctgctgcttgaaacatatgctgctatcttagatcatgaggtcgaggccatgcaaagtggagcaacaaggagctgtgtccctgacgccataagcaccacacctgtcctgaattgctgtgaatgacaccagctaactacaatgcattgtctcaacatcctagacataataaaaagccataaatatgtttgtcctatgcagcacaaaacctttgtatctttgccttttatgttgggatcttaattaaaaattacatcctctactgtc

SEQ ID NO: 6464 - protein, 337 aa, Homo sapiens; identical to SEQ ID NO: 904

SEQ ID NO: 6465 - DNA, 5858 bp, Homo sapiens; identical to SEQ ID NO: 909

SEQ ID NO: 6466 - protein, 1761 aa, Homo sapiens; identical to SEQ ID NO: 910

SEQ ID NO: 6467 - DNA, 991 bp, Homo sapiens
caggacagatgaaaacaggttaaatgaagaagcagatggagcccaaaagcttttggtgaaggccaaagcagctgagaaagcagcaaatattctattaaatcttgacaaaacattgaaccagttacaacaagctcaaatcactcaaggacgggcaaactctaccattacacagctgactgccaatataacaaaaataaaaaagaatgtgctgcaggaatttgttgagctgaaaaaacaatatgctattctccaacgtaagacaagcactacaggactaacaaaggagacattaggaaaagttaaacagctaaaagatgcggcagaaaaattggctggagatacagaggccaagataagaagaataacagatttagaaaggaaaatccaagatttgaatctaagtagacaagcaaaagctgatcaactgagaatattggaagatcaagttgttgccattaaaaatgaaattgttgaacaagaaaaaaaatatgctaggtgctatagctaggcagagttaaagagcaaaagcttgtgcctttgtttctggtttctgatgtacaagcccctggggctctgttgaacctgtgaaatactgacaatgtcttctaccttccttccccacaccctgtccttattagacacctgctcagtgtggctggaggttgaaatgccaccaggaaaatgccacttcataattgaaaggggaaagtaatgaaattgtctctggtttcagaaacttttcctcttaccttcctttctctttcctaacttaaaaataacagtttccatataacaagtagaaatttaagtaagtactctactaactaataatcatttcagtcagataaacctaaacattaaataaatatctccaatattaggatggaatacatatgtatggcatgtactagattgtcctatattttatgtttatttggatttgcttttatttgtaaaattattcttttctgaataaactgcatacaattca

SEQ ID NO: 6468 - protein, 37 aa, Homo sapiens
MSSTFLPHTLSLLDTCSVWLEVEMPPGKCHFIIERGK

SEQ ID NO: 6469 - DNA, 2573 bp, Homo sapiens
aacaacatagatgtaaccgatccagagtcctgcagccgggtaacaggggagtgccttcgatgtttgcacaacactcagggcgcaaactgccagctctgcaaaccaggtcactatggatcagccctcaatcagacctgcagaagatgctcctgccatgcttccggcgtgagtcccatggagtgtccccctggtgggggagcttgcctctgtgaccctgtcactggtgcatgtccttgtctgccgaatgtcacaggcctggcctgtgaccgttgtgctgatggatactggaatctggtccctggcagaggatgtcagtcatgtgactgtgaccctaggacctctcaaagtagccactgtgaccagcttacaggccagtgtccgtgtaaattaggttacggcgggaaacgttgcagtgagtgccaggaaaattattatggtgatccacctgggcgatgcattccatgtgattgtaacagggcaggtacccagaagcccatctgtgatccagacacaggcatgtgccgctgccgggagggtgtcagcggccagagatgtgatcgctgtgcccggggacacagccaggaattccctacttgtcttcaatgtcacttgtgctttgatcagtgggaccacaccatttcttccctctccaaagcggtgcaagggttaatgagactggctgctaacatggaagataaaagagagaccctgcctgtctgtgaggcagacttcaaagacctcagagggaacgtgtctgaaatagaaaggattttgaaacatcctgttttcccatctgggaaattcttaaaagtcaaggattatcatgactctgttagaagacaaatcatgcagctaaatgaacaactgaaagcagtgtatgaatttcaagatctgaaagatacaatagaaagagcaaagaatgaagcagacctcttacttgaagaccttcaggaagaaattgatttgcaatccagtgtccttaatgcaagcattgcggactcctcagaaaacatcaagaaatattatcacatatcatcatctgctgaaaagaaaattaatgaaactagttccaccattaatacctctgcaaatacaaggaatgacttacttaccatcttagatacactaacctcaaaaggaaacttgtcattggaaagattaaagcagattaagataccagatatccaaatattgaatgaaaaggtgtgcggagatccaggaaatgtgccatgtgtgcccttgccctgtggcggtgctctctgcacgggccggaaggggcacaggaagtgtaggggtcccggctgtcacggctccctgaccctctcaacgaatgccctccaaaaagcccaggaagcaaaatccattattcgtaatttggacaaacaggttcgtgggttgaaaaatcagatcgaaagtataagtgaacaggcagaagtctccaaaaacaatgccttacagctgagggaaaaactgggaaatataagaaaccaaagtgactctgaagaagaaaacatcaatcttttcatcaaaaaagtgaaaaactttttgttagaggaaaacgtgcctccagaagacatcgagaaggttgcgaatggtgtgcttgacattcacctaccaattccatcccaaaatctaaccgatgaacttgtcaaaatacagaaacatatgcaactctgtgaggattacaggacagatgaaaacaggttaaatgaagaagcagatggagcccaaaagcttttggtgaaggccaaagcagctgagaaagcagcaaatattctattaaatcttgacaaaacattgaaccagttacaacaagctcaaatcactcaaggacgggcaaactctaccattacacagctgactgccaatataacaaaaataaaaaagaatgtgctgcaggctgaaaatcaaaccagggaaatgaagagtgagctggagttagcaaagcagcgatcagggctggaggatggactttccctgctgcagaccaagttgcaaaggcatcaagaccacgctgtcaatgcgaaagttcaggctgaatctgcccaacaccaggctgggagtcttgagaaggaatttgttgagctgaaaaaacaatatgctattctccaacgtaagacaagcactacaggactaacaaaggagacattaggaaaagttaaacagctaaaagatgcggcagaaaaattggctggagatacagaggccaagataagaagaataacaggctgttttcagaactcagcaagatagaaaaatgagacattgatttggctgtcttccccatgctgccacttgagaaggggcggaaccacaaggctgtgcctgttcctctctgttaggaagaggagcccctggatcccagtatggagcccttggcagcaacaatgttgagagagtggggaatggactctagtcttcagccagggtccttccacagaacttggtgtcagtcggggtcccagcaagaaacagaaagcatgcgtgggcataattttggataaagtatttagaagtggagttgtctcagtcatttattcactgcataataaattaccccaaaatgtaatggc

SEQ ID NO: 6470 - protein, 692 aa, Homo sapiens
MECPPGGGACLCDPVTGACPCLPNVTGLACDRCADGYWNLVPGRGCQSCDCDPRTSQSSHCDQLTGQCPCKLGYGGKRCSECQENYYGDPPGRCIPCDCNRAGTQKPICDPDTGMCRCREGVSGQRCDRCARGHSQEFPTCLQCHLCFDQWDHTISSLSKAVQGLMRLAANMEDKRETLPVCEADFKDLRGNVSEIERILKHPVFPSGKFLKVKDYHDSVRRQIMQLNEQLKAVYEFQDLKDTIERAKNEADLLLEDLQEEIDLQSSVLNASIADSSENIKKYYHISSSAEKKINETSSTINTSANTRNDLLTILDTLTSKGNLSLERLKQIKIPDIQILNEKVCGDPGNVPCVPLPCGGALCTGRKGHRKCRGPGCHGSLTLSTNALQKAQEAKSIIRNLDKQVRGLKNQIESISEQAEVSKNNALQLREKLGNIRNQSDSEEENINLFIKKVKNFLLEENVPPEDIEKVANGVLDIHLPIPSQNLTDELVKIQKHMQLCEDYRTDENRLNEEADGAQKLLVKAKAAEKAANILLNLDKTLNQLQQAQITQGRANSTITQLTANITKIKKNVLQAENQTREMKSELELAKQRSGLEDGLSLLQTKLQRHQDHAVNAKVQAESAQHQAGSLEKEFVELKKQYAILQRKTSTTGLTKETLGKVKQLKDAAEKLAGDTEAKIRRITGCFQNSAR

SEQ ID NO: 6471 - DNA, 8835 bp, Homo sapiens
agttcagtgaatcagaacaatgactgcgccgccgggtacccgggagcgcgtcggaggactgtgagcagccgccgccgggagagctgcgggcggcgcagtgtcaacgctgggctcgggagcctccagcgcagatcctgcccagcgcccgcagcccgcgcgaagccgctgggctccggcactgcagcgctgctcggggactgtgcattgttgtgagccggagaaggggcgcggggattacaaagcctgaagaccccggagcccctttagccatgtggatacctacggagcacgagaaatacggcgtggttattgccagtttccgaggaaccgttccatatggcctgtcattggaaattggagatacagttcagatcctggagaagtgtgatggctggtacagaggatttgccttaaaaaacccaaatatcaagggtatatttccttccagctacgttcacttgaaaaatgcctgtgtaaagaacaaaggacaatttgaaatggttattcccactgaagactctgttatcacagaaatgacatcaacattaagagactggggaaccatgtggaaacaactctatgtgcgtaatgaaggcgatctcttccaccggctgtggcacatcatgaatgaaatcctggacctgaggcggcaggtgctggtgggccacctcacccacgaccggatgaaggacgtgaagcgccacattactgcccggcttgactggggcaatgaacaactgggactggacctggtgcctaggaaagagtacgcaatggtggatccggaagacatcagcattactgagctctaccgattgatggaacatcgacatcggaagaaagacaccccggtgcaggccagcagtcaccacctctttgtccagatgaagagcctcatgtgttccaacctgggagaggagctggaggtcatcttctcactctttgacagtaaagagaaccggccaatcagtgagagatttttcttgaggctgaatagaaacgggcttcccaaagcccctgataaaccggaacgacattgctccctctttgtggatttgggcagcagtgagctaagaaaggacatttatatcaccgtgcacattatccgaatcggtcgaatgggagcaggagaaaaaaagaatgcctgtagtgtccagtaccgacgaccctttggctgtgcagttcttagcatcgctgacctgctaacaggagagacaaaggatgacctcattctgaaagtatacatgtgtaacacagagagtgagtggtaccaaatccatgagaacatcatcaaaaagctgaatgcacgttataacttgactggctccaatgcaggtttagcagtttccttacagctattgcacggagacattgaacaaatcagaagggaatattcatcagtattttctcatggagtatccataacaaggaagctgggattttcaaatattattatgcctggtgaaatgaggaatgatttatatatcactattgaaaggggagaatttgagaaaggagggaagagcgtggccagaaatgtggaagttacgatgttcattgtagacagtagtggccaaaccctgaaggattttatctccttcggctctggggagccaccagccagtgagtaccactcctttgtgctttaccataacaacagtcccaggtggtctgaactgctgaaacttcccattcctgtggataaattccggggtgcacacatccgcttcgagtttcggcattgttccacaaaggagaaaggagagaagaagttgtttgggttttcttttgtccctctgatgcaagaagatggtaggactcttccagatggcactcatgagctcatcgtgcataagtgtgaagaaaacacaaatcttcaggatactacccgctacctcaaacttcccttttccaagggcattttccttgggaataataatcaagccatgaaggccacaaaggagtccttttgtattacatcttttctctgttccacaaaactcacacaaaatggtgatatgcttgatcttttgaaatggagaacccacccagacaagatcactggctgtctctctaaattaaaagaaattgatggctcagagatagtaaagtttctgcaggatacactggataccttatttggaattttagatgaaaattcccaaaaatatgggtctaaagtgtttgattctttggttcacataataaatttgctgcaagatagcaaatttcatcattttaaacctgtaatggacacttacattgagagtcattttgctggggcacttgcatacagagatctcatcaaagtgctcaaatggtacgtggaccggatcacagaagcagagcggcaagagcatatccaggaggtgctgaaggcacaagaatacatttttaagtatatagttcaatctcgaaggctgttttcccttgccactggtgggcaaaacgaagaggagttccgctgctgcattcaggagcttctcatgtcagtccgtttctttctttcgcaagagagcaaagggtctggagcattatctcagtcacaggctgtgtttctgagctctttccctgccgtgtactcagaactgttgaagctctttgatgtccgggaagtagccaacttggtccaggacaccctgggcagtctgccgaccatcctgcatgtggatgattccctgcaggccatcaaactgcagtgcattggcaaaaccgtggaaagccagctttataccaacccagattcccgatacattcttctgcctgtcgtgttacatcacctccacattcacttgcaagaacagaaggacctgatcatgtgtgcacgtatccttagcaacgtattttgtcttatcaagaaaaatagctcagaaaaatctgtgctggaggaaatagatgtgatagtggccagcttgctggatattctgctgaggaccatattggagatcaccagccgacctcagccatccagctcagcaatgcggttccagttccaggatgtcactggggagtttgttgcttgtctcctgtccctattacgacaaatgacagatagacattatcaacagcttcttgatagttttaatacaaaggaagaactaagggatttcctgctgcagatatttactgtgttccgaatattgatacgcccggagatgtttccaaaggactggactgttatgcgcttggttgctaacaatgttattattacaacagttctatacctctcagatgcacttcgtaagaacttcttaaatgaaaactttgattataagatctgggattcctacttttacctcgcagtcatttttataaaccagttgtgtctgcagttggagatgttcacaccttccaagaagaaaaaggtgttagaaaagtatggtgacatgcgggtaacaatgggttgtgaaattttcagcatgtggcaaaacctaggagagcacaagcttcattttatccctgccctgattggccccttcctagaagtgaccttgataccccagccagatcttcggaatgtcatgattccaatttttcatgatatgatggactgggagcagaggcggagtggcaactttaaacaggtggaagccaagctaattgacaaactggatagcctgatgtcagaaggcaaaggtgacgaaacataccgcgagctcttcaacagtattctactaaagaaaattgagcgggaaacatggcgggaaagtggcgtttcattaattgctactgtaactcgtctaatggagaggttgttagattacagggactgcatgaaaatgggagaggtagatggcaaaaagattggctgcacagttagccttctgaacttctataagactgaactgaacaaggaggagatgtatatacgctacattcacaaactctatgatctgcatctcaaagcacagaactttacagaagctgcatataccctcctcttatatgacgagctactggaatggtctgatcggcccctcagggagttcctgacctaccccatgcaaacagaatggcagcgcaaagagcacctgcacctcaccatcatccagaactttgacagaggcaaatgttgggagaatggcattatcttgtgccggaagattgcagagcagtatgagagttattatgactacagaaacctgagcaagatgcggatgatggaagcctctttgtatgacaaaattatggaccagcaacgtcttgaaccagagttcttcagagttggattttatggaaaaaaatttccatttttcttaagaaataaggagtttgtgtgtcgagggcatgactacgagaggctggaagccttccaacagagaatgctgaacgagttcccccatgccatcgccatgcagcacgccaaccagcccgatgagaccatcttccaggcagaagctcagtatttgcagatatatgctgtgactcccattccagagagccaggaggtcctgcagagagagggtgttccggacaacatcaaaagcttctataaagtgaatcacatctggaaattccgctatgaccgaccatttcacaaaggcacaaaagataaagagaatgaattcaagagtctctgggtggagagaacgtcattatacttggtgcagagtttgcctggcatctctcgctggtttgaagtggaaaagcgtgaagtggtagaaatgagtcctctggaaaatgcaattgaagtgctagaaaataagaatcagcagctgaagactctgattagtcagtgtcagacaagacagatgcagaatattaatcccctgactatgtgcctgaatggagttatagatgctgcagttaatggtggcgtttccaggtatcaagaggcattctttgtcaaagaatatatcttaagtcaccctgaagatggggagaaaattgcacgattaagagagctgatgcttgagcaggcacagattctggaatttggtttggccgtgcatgagaagtttgtacctcaagatatgagaccccttcacaaaaagctggttgaccaattctttgtgatgaagtcgagcttagggatacaggagttctctgcttgtatgcaagccagtcctgtccattttcctaatggaagccctcgtgtgtgtagaaactcagcacctgcttctgtgagcccagatggtaccagggtaattcctagacgcagcccgttaagttacccagctgtcaaccgatattcttcctcctcactgtcctcacaagcttctgctgaagtaagcaatattacagggcaatcagaaagctctgatgaagtctttaacatgcagccaagtccatctacctcaagcttgagttctactcactcggcttcacctaatgtgacaagttctgctccatcgagtgccagagcttctcctttgttgtctgacaaacacaaacattcccgagaaaactcttgcctgtcaccaagagagagaccatgcagtgccatctatccaacacctgtggagccttcgcagaggatgctgtttaatcatattggagacggggccttgccacgcagtgacccaaatctctctgcacctgaaaaagctgtgaaccccacccctagcagctggagcctggacagtgggaaggaagccaagaacatgtcggatagtgggaaacttatctctccccctgtccctccaagacccacacagactgcttcaccagcaagacacacgacatcagtatccccctcgcctgccgggcgatctccattgaagggctctgtgcagtctttcaccccctctccagtggagtaccactcgccaggactcatctccaactcccctgtcttgtcgggcagctacagcagtgggatttcttctctcagccggtgcagcacgtcggaaacctcaggctttgaaaatcaggtgaatgaacagtcggcccccctgccggtgccagtgccggtgcccgtgccgagctacggcggggaggagccagtgcgcaaggagagcaagactccgcccccgtacagcgtctacgagcggactctgcggcgccccgtcccgctacctcacagcctctccatccccgtcacgtcggagccgcccgcgctgccccccaagcctctggcagcgcgatccagccacctggagaatggggcccggaggactgaccccggcccgcggcccaggcccctgccccgcaaggtctctcagttataagtcacttttctatgtacctgcgatgcattctttgcccgtttacaaaataagaagtatgatgagaagacatttagtgtaggcactttaataacttactcagctccttcgatgaatggaattaaaacttgcttattaaatatcatgttgcacaatattaaaagttgctgatctaaaacgccagatgttaaatgaagtatggctgaatttcattaaaacgtttctcatttggaagtggtaaatagtgataaagactccttttgtacctttttatgttcacttttttttatatagtttaatcttaaaaccaatacgatattgtcaaacgatacaatgtgtgacaatgttgtatcgtttttactgaatacttgatacttggagaaagcttattaagtcagtgcacatcctaacacagtggtccttattttagaagacttctgtaaataaggcaaggtttatcagtgcagatcatcagaattaaagttcaagcaggcgagcaagacagtatacttaaggggttgcaaagcttgggactggaaattgttttgttcttgaaacaaaatacttctttaaggttgcttttgctgtttgactgctgtctacattcgtaaaattctattttgtgaattggtagctaaatcccttactaccctgacaccgtggtatctactgtatttcttttcaaggtgcaatttgcttcagagttccaatcagctagattaagcaagaggctccagaagaaatgtttacttgaattttgcgcttcctttcttgatagtttcctatataaaatttgtcattgaacaagagcaaatgctgaagtattaatgaggcacaaatgactgtgccccattagcaagaattcaggaatcaatacagacagtattaaattaatagcttaagtgaagaaaaaaaaaacttagtgaaaatgtattagcacgattaaatggcaaaaggacttataaaaggcaagggcattaactttcagtcctgcacaaaataaaaaattcctcacgactctccacttttaccagtggagtttgtcttagctgacctgtcgtctttctcttgaaggaggattgctgtagacttctctagcttgaatattgcaacatagcatcttaggtctagatagggatgctaatgccagttgtagaagtgtgaaaaaagcaccttgtatgtagtaatgtattttatatctttgttttttcttttactgactgtttataacactcaattgacaatagatatgaactgtattttaaatcatactgttaaatattttccctcttttgttgggaagctcattttagtttaaccatgtttgttttgttggtagcttacctggaaggcagtgaccacttttttatattctcttaatgaaaccattcagcaggtatatgctgttgaggctggttatagaggttttctataataaatgttcaagtatttttgtatataactggttaattttaataagagataccattatgtgtaaaaaaaagtaaaaataaacgcaaacagttgttgatgcagtatgattgttataattatgccaaatactttacgtatggaaaaagaatatttgtacatatgtgcttttaacaattctgccatattgactttacaattttgaatgtcggaaaaattaatatatgttaaatatttatgtttagtgaaagtgttcataattgagaaaaggaacatatgcattttagctttgtatcttgcaagttttgcagtcagaaattttttgaactagcttttgcttttgataacacttcgtgtttgtaaccacattcatatatatatacatatatatgtgaagctccatatttctgttgctttaaagaagtaaaaccttccatttaaataagatgacatgcataagataacaaagcttccttgatttccttttcctgtgtaatttaatagatttgttgactagtgcttgggcacattataaatcagtgttatttgctcttggagccattttttaaaaaaaattttggcagtgagcagttgaatttatcttgaatttatcatgtgtgtgtatttctgaagcagctacatagcagaacattttaagagattctgttagcccacatgttcatgttggttgctgctgaatggtaaatattaaataaaattaccagattaatcttaatatttctgtctttactcctatcatcagcatgtctttacttgtaatagaagcggctcttgatcttattatagtgagatttccagacttctttttagatagatcctgtttgtgttgtcctgccacgtagatgcatttcacactcactacggctcacttatgccatagggaacaatcaccagaaaggtaacaaacagtatgggttaatatcccatagaaagggtaacatttacgtggttggctgaccattcattggcctaaccagagccaacttaacaagtcaaaccatcaaaatgtgtttgcatcagaaaacttgacataaaacagataacttccaagcatataagggcatggttaaatgctggttttgacagctgtggtaaaaatctatctgcatgccaactcttctccctggttttcataaaatgatagaaaatatacatgtgacatacactgaaaaacccactgactacaagatttcgattaataaagcctggcttttaa

SEQ ID NO: 6472 - protein, 1966 aa, Homo sapiens; identical to SEQ ID NO: 912

SEQ ID NO: 6473 - DNA, 8335 bp, Homo sapiens
agttcagtgaatcagaacaatgactgcgccgccgggtacccgggagcgcgtcggaggactgtgagcagccgccgccgggagagctgcgggcggcgcagtgtcaacgctgggctcgggagcctccagcgcagatcctgcccagcgcccgcagcccgcgcgaagccgctgggctccggcactgcagcgctgctcggggactgtgcattgttgtgagccggagaaggggcgcggggattacaaagcctgaagaccccggagcccctttagccatgtggatacctacggagcacgagaaatacggcgtggttattgccagtttccgaggaaccgttccatatggcctgtcattggaaattggagatacagttcagatcctggagaagtgtgatggctggtacagaggatttgccttaaaaaacccaaatatcaagggtatatttccttccagctacgttcacttgaaaaatgcctgtgtaaagaacaaaggacaatttgaaatggttattcccactgaagactctgttatcacagaaatgacatcaacattaagagactggggaaccatgtggaaacaactctatgtgcgtaatgaaggcgatctcttccaccggctgtggcacatcatgaatgaaatcctggacctgaggcggcaggtgctggtgggccacctcacccacgaccggatgaaggacgtgaagcgccacattactgcccggcttgactggggcaatgaacaactgggactggacctggtgcctaggaaagagtacgcaatggtggatccggaagacatcagcattactgagctctaccgattgatggaacatcgacatcggaagaaagacaccccggtgcaggccagcagtcaccacctctttgtccagatgaagagcctcatgtgttccaacctgggagaggagctggaggtcatcttctcactctttgacagtaaagagaaccggccaatcagtgagagatttttcttgaggctgaatagaaacgggcttcccaaagcccctgataaaccggaacgacattgctccctctttgtggatttgggcagcagtgagctaagaaaggacatttatatcaccgtgcacattatccgaatcggtcgaatgggagcaggagaaaaaaagaatgcctgtagtgtccagtaccgacgaccctttggctgtgcagttcttagcatcgctgacctgctaacaggagagacaaaggatgacctcattctgaaagtatacatgtgtaacacagagagtgagtggtaccaaatccatgagaacatcatcaaaaagctgaatgcacgttataacttgactggctccaatgcaggtttagcagtttccttacagctattgcacggagacattgaacaaatcagaagggaatattcatcagtattttctcatggagtatccataacaaggaagctgggattttcaaatattattatgcctggtgaaatgaggaatgatttatatatcactattgaaaggggagaatttgagaaaggagggaagagcgtggccagaaatgtggaagttacgatgttcattgtagacagtagtggccaaaccctgaaggattttatctccttcggctctggggagccaccagccagtgagtaccactcctttgtgctttaccataacaacagtcccaggtggtctgaactgctgaaacttcccattcctgtggataaattccggggtgcacacatccgcttcgagtttcggcattgttccacaaaggagaaaggagagaagaagttgtttgggttttcttttgtccctctgatgcaagaagatggtaggactcttccagatggcactcatgagctcatcgtgcataagtgtgaagaaaacacaaatcttcaggatactacccgctacctcaaacttcccttttccaagggcattttccttgggaataataatcaagccatgaaggccacaaaggagtccttttgtattacatcttttctctgttccacaaaactcacacaaaatggtgatatgcttgatcttttgaaatggagaacccacccagacaagatcactggctgtctctctaaattaaaagaaattgatggctcagagatagtaaagtttctgcaggatacactggataccttatttggaattttagatgaaaattcccaaaaatatgggtctaaagtgtttgattctttggttcacataataaatttgctgcaagatagcaaatttcatcattttaaacctgtaatggacacttacattgagagtcattttgctggggcacttgcatacagagatctcatcaaagtgctcaaatggtacgtggaccggatcacagaagcagagcggcaagagcatatccaggaggtgctgaaggcacaagaatacatttttaagtatatagttcaatctcgaaggctgttttcccttgccactggtgggcaaaacgaagaggagttccgctgctgcattcaggagcttctcatgtcagtccgtttctttctttcgcaagagagcaaagggtctggagcattatctcagtcacaggctgtgtttctgagctctttccctgccgtgtactcagaactgttgaagctctttgatgtccgggaagtagccaacttggtccaggacaccctgggcagtctgccgaccatcctgcatgtggatgattccctgcaggccatcaaactgcagtgcattggcaaaaccgtggaaagccagctttataccaacccagattcccgatacattcttctgcctgtcgtgttacatcacctccacattcacttgcaagaacagaaggacctgatcatgtgtgcacgtatccttagcaacgtattttgtcttatcaagaaaaatagctcagaaaaatctgtgctggaggaaatagatgtgatagtggccagcttgctggatattctgctgaggaccatattggagatcaccagccgacctcagccatccagctcagcaatgcggttccagttccaggatgtcactggggagtttgttgcttgtctcctgtccctattacgacaaatgacagatagacattatcaacagcttcttgatagttttaatacaaaggaagaactaagggatttcctgctgcagatatttactgtgttccgaatattgatacgcccggagatgtttccaaaggactggactgttatgcgcttggttgctaacaatgttattattacaacagttctatacctctcagatgcacttcgtaagaacttcttaaatgaaaactttgattataagatctgggattcctacttttacctcgcagtcatttttataaaccagttgtgtctgcagttggagatgttcacaccttccaagaagaaaaaggtgttagaaaagtatggtgacatgcgggtaacaatgggttgtgaaattttcagcatgtggcaaaacctaggagagcacaagcttcattttatccctgccctgattggccccttcctagaagtgaccttgataccccagccagatcttcggaatgtcatgattccaatttttcatgatatgatggactgggagcagaggcggagtggcaactttaaacaggtggaagccaagctaattgacaaactggatagcctgatgtcagaaggcaaaggtgacgaaacataccgcgagctcttcaacagtattctactaaagaaaattgagcgggaaacatggcgggaaagtggcgtttcattaattgctactgtaactcgtctaatggagaggttgttagattacagggactgcatgaaaatgggagaggtagatggcaaaaagattggctgcacagttagccttctgaacttctataagactgaactgaacaaggaggagatgtatatacgctacattcacaaactctatgatctgcatctcaaagcacagaactttacagaagctgcatataccctcctcttatatgacgagctactggaatggtctgatcggcccctcagggagttcctgacctaccccatgcaaacagaatggcagcgcaaagagcacctgcacctcaccatcatccagaactttgacagaggcaaatgttgggagaatggcattatcttgtgccggaagattgcagagcagtatgagagttattatgactacagaaacctgagcaagatgcggatgatggaagcctctttgtatgacaaaattatggaccagcaacgtcttgaaccagagttcttcagagttggattttatggaaaaaaatttccatttttcttaagaaataaggagtttgtgtgtcgagggcatgactacgagaggctggaagccttccaacagagaatgctgaacgagttcccccatgccatcgccatgcagcacgccaaccagcccgatgagaccatcttccaggcagaagctcagtatttgcagatatatgctgtgactcccattccagagagccaggaggtcctgcagagagagggtgttccggacaacatcaaaagcttctataaagtgaatcacatctggaaattccgctatgaccgaccatttcacaaaggcacaaaagataaagagaatgaattcaagagtctctgggtggagagaacgtcattatacttggtgcagagtttgcctggcatctctcgctggtttgaagtggaaaagcgtgaagtggtagaaatgagtcctctggaaaatgcaattgaagtgctagaaaataagaatcagcagctgaagactctgattagtcagtgtcagacaagacagatgcagaatattaatcccctgactatgtgcctgaatggagttatagatgctgcagttaatggtggcgtttccaggtatcaagaggcattctttgtcaaagaatatatcttaagtcaccctgaagatggggagaaaattgcacgattaagagagctgatgcttgagcaggcacagattctggaatttggtttggccgtgcatgagaagtttgtacctcaagatatgagaccccttcacaaaaagctggttgaccaattctttgtgatgaagtcgagcttagggatacaggagttctctgcttgtatgcaagccagtcctgtccattttcctaatggaagccctcgtgtgtgtagaaactcagcacctgcttctgtgagcccagatggtaccagggtaattcctagacgcagcccgttaagttacccagctgtcaaccgatattcttcctcctcactgtcctcacaagcttctgctgaagtaagcaatattacagggcaatcagaaagctctgatgaagtctttaacatgcagccaagtccatctacctcaagcttgagttctactcactcggcttcacctaatgtgacaagttctgctccatcgagtgccagagcttctcctttgttgtctgacaaacacaaacattcccgagaaaactcttgcctgtcaccaagagagagaccatgcagtgccatctatccaacacctgtggagccttcgcagaggatgctgtttaatcatattggagacggggccttgccacgcagtgacccaaatctctctgcacctgaaaaagctgtgaaccccacccctagcagctggagcctggacagtgggaaggaagccaagaacatgtcggatagtgggaaacttatctctccccctgtccctccaagacccacacagactgcttcaccagcaagacacacgacatcagtatccccctcgcctgccgggcgatctccattgaagggctctgtgcagtctttcaccccctctccagtggagtaccactcgccaggactcatctccaactcccctgtcttgtcgggcagctacagcagtgggatttcttctctcagccggtgcagcacgtcggaaacctcaggctttgaaaatcaggtgaatgaacagtcggcccccctgccggtgccagtgccggtgcccgtgccgagctacggcggggaggagccagtgcgcaaggagagcaagactccgcccccgtacagcgtctacgagcggactctgcggcgccccgtcccgctacctcacagcctctccatccccgtcacgtcggagccgcccgcgctgccccccaagcctctggcagcgcgatccagccacctggagaatggggcccggaggactgaccccggcccgcggcccaggcccctgccccgcaaggtctctcagttataagtcacttttctatgtacctgcgatgcattctttgcccgtttacaaaataagaagtatgatgagaagacatttagtgtaggcactttaataacttactcagctccttcgatgaatggaattaaaacttgcttattaaatatcatgttgcacaatattaaaagttgctgatctaaaacgccagatgttaaatgaagtatggctgaatttcattaaaacgtttctcatttggaagtggtaaatagtgataaagactccttttgtacctttttatgttcacttttttttatatagtttaatcttaaaaccaatacgatattgtcaaacgatacaatgtgtgacaatgttgtatcgtttttactgaatacttgatacttggagaaagcttattaagtcagtgcacatcctaacacagtggtccttattttagaagacttctgtaaataaggcaaggtttatcagtgcagatcatcagaattaaagttcaagcaggcgagcaagacagtatacttaaggggttgcaaagcttgggactggaaattgttttgttcttgaaacaaaatacttctttaaggttgcttttgctgtttgactgctgtctacattcgtaaaattctattttgtgaattggtagctaaatcccttactaccctgacaccgtggtatctactgtatttcttttcaaggtgcaatttgcttcagagttccaatcagctagattaagcaagaggctccagaagaaatgtttacttgaattttgcgcttcctttcttgatagtttcctatataaaatttgtcattgaacaagagcaaatgctgaagtattaatgaggcacaaatgactgtgccccattagcaagaattcaggaatcaatacagacagtattaaattaatagcttaagtgaagaaaaaaaaaacttagtgaaaatgtattagcacgattaaatggcaaaaggacttataaaaggcaagggcattaactttcagtcctgcacaaaataaaaaattcctcacgactctccacttttaccagtggagtttgtcttagctgacctgtcgtctttctcttgaaggaggattgctgtagacttctctagcttgaatattgcaacatagcatcttaggtctagatagggatgctaatgccagttgtagaagtgtgaaaaaagcaccttgtatgtagtaatgtattttatatctttgttttttcttttactgactgtttataacactcaattgacaatagatatgaactgtattttaaatcatactgttaaatattttccctcttttgttgggaagctcattttagtttaaccatgtttgttttgttggtagcttacctggaaggcagtgaccacttttttatattctcttaatgaaaccattcagcaggtatatgctgttgaggctggttatagaggttttctataataaatgttcaagtatttttgtatataactggttaattttaataagagataccattatgtgtaaaaaaaagtaaaaataaacgcaaacagttgttgatgcagtatgattgttataattatgccaaatactttacgtatggaaaaagaatatttgtacatatgtgcttttaacaattctgccatattgactttacaattttgaatgtcggaaaaattaatatatgttaaatatttatgtttagtgaaagtgttcataattgagaaaaggaacatatgcattttagctttgtatcttgcaagttttgcagtcagaaattttttgaactagcttttgcttttgataacacttcgtgtttgtaaccacattcatatatatatacatatatatgtgaagctccatatttctgttgctttaaagaagtaaaaccttccatttaaataagatgacatgcataagataacaaagcttccttgatttccttttcctgtgtaatttaatagatttgttgactagtgcttgggcacattataaatcagtgttatttgctcttggagccattttttaaaaaaaattttggcagtgagcagttgaatttatcttgaatttatcatgtgtgtgtatttctgaagcagctacatagcagaacattttaagagattctgttagcccacatgttcatgttggttgctgctgaatggtaaatattaaataaaattaccagattaatcttaat

SEQ ID NO: 6474 - protein, 1966 aa, Homo sapiens; identical to SEQ ID NO: 912

SEQ ID NO: 6475 - DNA, 3231 bp, Homo sapiens
agttcagtgaatcagaacaatgactgcgccgccgggtacccgggagcgcgtcggaggactgtgagcagccgccgccgggagagctgcgggcggcgcagtgtcaacgctgggctcgggagcctccagcgcagatcctgcccagcgcccgcagcccgcgcgaagccgctgggctccggcactgcagcgctgctcggggactgtgcattgttgtgagccggagaaggggcgcggggattacaaagcctgaagaccccggagcccctttagccatgtggatacctacggagcacgagaaatacggcgtggttattgccagtttccgaggaaccgttccatatggcctgtcattggaaattggagatacagttcagatcctggagaagtgtgatggctggtacagaggatttgccttaaaaaacccaaatatcaagggtatatttccttccagctacgttcacttgaaaaatgcctgtgtaaagaacaaaggacaatttgaaatggttattcccactgaagactctgttatcacagaaatgacatcaacattaagagactggggaaccatgtggaaacaactctatgtgcgtaatgaaggcgatctcttccaccggctgtggcacatcatgaatgaaatcctggacctgaggcggcaggtgctggtgggccacctcacccacgaccggatgaaggacgtgaagcgccacattactgcccggcttgactggggcaatgaacaactgggactggacctggtgcctaggaaagagtacgcaatggtggatccggaagacatcagcattactgagctctaccgattgatggaacatcgacatcggaagaaagacaccccggtgcaggccagcagtcaccacctctttgtccagatgaagagcctcatgtgttccaacctgggagaggagctggaggtcatcttctcactctttgacagtaaagagaaccggccaatcagtgagagatttttcttgaggctgaatagaaacgggcttcccaaagcccctgataaaccggaacgacattgctccctctttgtggatttgggcagcagtgagctaagaaaggacatttatatcaccgtgcacattatccgaatcggtcgaatgggagcaggagaaaaaaagaatgcctgtagtgtccagtaccgacgaccctttggctgtgcagttcttagcatcgctgacctgctaacaggagagacaaaggatgacctcattctgaaagtatacatgtgtaacacagagagtgagtggtaccaaatccatgagaacatcatcaaaaagctgaatgcacgttataacttgactggctccaatgcaggtttagcagtttccttacagctattgcacggagacattgaacaaatcagaagggaatattcatcagtattttctcatggagtatccataacaaggaagctgggattttcaaatattattatgcctggtgaaatgaggaatgatttatatatcactattgaaaggggagaatttgagaaaggagggaagagcgtggccagaaatgtggaagttacgatgttcattgtagacagtagtggccaaaccctgaaggattttatctccttcggctctggggagccaccagccagtgagtaccactcctttgtgctttaccataacaacagtcccaggtggtctgaactgctgaaacttcccattcctgtggataaattccggggtgcacacatccgcttcgagtttcggcattgttccacaaaggagaaaggagagaagaagttgtttgggttttcttttgtccctctgatgcaagaagatggtaggactcttccagatggcactcatgagctcatcgtgcataagtgtgaagaaaacacaaatcttcaggatactacccgctacctcaaacttcccttttccaagggcattttccttgggaataataatcaagccatgaaggccacaaaggagtccttttgtattacatcttttctctgttccacaaaactcacacaaaatggtgatatgcttgatcttttgaaatggagaacccacccagacaagatcactggctgtctctctaaattaaaagaaattgatggctcagagatagtaaagtttctgcaggatacactggataccttatttggaattttagatgaaaattcccaaaaatatgggtctaaagtgtttgattctttggttcacataataaatttgctgcaagatagcaaatttcatcattttaaacctgtaatggacacttacattgagagtcattttgctggggcacttgcatacagagatctcatcaaagtgctcaaatggtacgtggaccggatcacagaagcagagcggcaagagcatatccaggaggtgctgaaggcacaagaatacatttttaagtatatagttcaatctcgaaggctgttttcccttgccactggtgggcaaaacgaagaggagttccgctgctgcattcaggagcttctcatgtcagtccgtttctttctttcgcaagagagcaaagggtctggagcattatctcagtcacaggctgtgtttctgagctctttccctgccgtgtactcagaactgttgaagctctttgatgtccgggaagtagccaacttggtccaggacaccctgggcagtctgccgaccatcctgcatgtggatgattccctgcaggccatcaaactgcagtgcattggcaaaaccgtggaaagccagctttataccaacccaggtagggtgagtctcttggaggaaattgtgcctctgaaaagccattttgtatattttgtagccattggtcagcagatgcaattaaaaacaaaacactaaaaggcattttctcaaaaccattgtttatttggatggtaaatgtatttagtagtcaaatacaaaagtatggcaattaaaactttatttctggaaagaatgaaaactaatgattacattattgttttttatgtttaatgggatttaacactccttcagagatgcttacaggtacctgataggatccttatttttctcttttgtttttaaaagtttttcatcaatttatgttctgaagctatatgaaactttgcattattgttgttttttactttaccccaagagcaagtggtcagtgactcaaattaattttgttataataactgttagtaagttccattgcctcttgttttcttctgtttttttttcccgaataaataacagagtgagtact

SEQ ID NO: 6476 - protein, 856 aa, Homo sapiens
MWIPTEHEKYGVVIASFRGTVPYGLSLEIGDTVQILEKCDGWYRGFALKNPNIKGIFPSSYVHLKNACVKNKGQFEMVIPTEDSVITEMTSTLRDWGTMWKQLYVRNEGDLFHRLWHIMNEILDLRRQVLVGHLTHDRMKDVKRHITARLDWGNEQLGLDLVPRKEYAMVDPEDISITELYRLMEHRHRKKDTPVQASSHHLFVQMKSLMCSNLGEELEVIFSLFDSKENRPISERFFLRLNRNGLPKAPDKPERHCSLFVDLGSSELRKDIYITVHIIRIGRMGAGEKKNACSVQYRRPFGCAVLSIADLLTGETKDDLILKVYMCNTESEWYQIHENIIKKLNARYNLTGSNAGLAVSLQLLHGDIEQIRREYSSVFSHGVSITRKLGFSNIIMPGEMRNDLYITIERGEFEKGGKSVARNVEVTMFIVDSSGQTLKDFISFGSGEPPASEYHSFVLYHNNSPRWSELLKLPIPVDKFRGAHIRFEFRHCSTKEKGEKKLFGFSFVPLMQEDGRTLPDGTHELIVHKCEENTNLQDTTRYLKLPFSKGIFLGNNNQAMKATKESFCITSFLCSTKLTQNGDMLDLLKWRTHPDKITGCLSKLKEIDGSEIVKFLQDTLDTLFGILDENSQKYGSKVFDSLVHIINLLQDSKFHHFKPVMDTYIESHFAGALAYRDLIKVLKWYVDRITEAERQEHIQEVLKAQEYIFKYIVQSRRLFSLATGGQNEEEFRCCIQELLMSVRFFLSQESKGSGALSQSQAVFLSSFPAVYSELLKLFDVREVANLVQDTLGSLPTILHVDDSLQAIKLQCIGKTVESQLYTNPGRVSLLEEIVPLKSHFVYFVAIGQQMQLKTKH

SEQ ID NO: 6477 - DNA, 5339 bp, Homo sapiens
ctgcccggccccgggtggctgcgatgccgaggtcctctgctcccgccgggcgtgcagcgggcgcgcgcgcgtgtgtttatgtgtctgtgtgcgtgtgtgtgtgtgtctctctctgtgtgtgtgtgagatgaattggagtcatacgactgggtgtttccttccgagtggttttcatcagcaatccattaggaaatcatggaaactttttttttcctggctaaaaggatgaaaactgagtcatccacttttgactgtcatccatggaagagctcttattaaaagcctcagactttcgggacctatgattctttggcacaaccttttggaaaattcttaagcagggatgaagcaaacttgattggagttggggaaaaagaagacagattagtatttttcatgctgacaaaaaatagctgctatgacttttcccgcaacgtggacaggggccaagtgaagctgaactggtcatggtctgtcgcccagtgttcccttgtcgtcggcgattttgcccccgacccttcttggtgggcttagtggtggcaatctgtctcttctaccagactctgaccctccgagggtcgaggaagctcacagccgctgcccctggggctgtcccacacacatccactgaaacccaggcaagcagatgcaagaaaggattctctcaggacaaacagtgcttccttctctctggtaatgcccaggaaaccagaaaggtcaaagaatcaatggagacacactttggcagccatggccgaagggccatactctacaggcctcctttctacagcaaaacagagcttcagctacaccagcacattctgactcaacatggctatacggttgtcatcgctgaagaaaggctcaatgctggcctagggccggggctactagaacaaggtgatctgggctcttgggatctgctcatttgcctgtcttctaagaaagcagaaggaacaccctgtatatccaaggaagtcatgtgccagttaggtttacatcaaaaggcaaacagattaccagaaatacagcagccactttgcagaaaggaaggattatgtcaaatagttagaagattcccagaactgcaacttccagtgagtccctctgtgtgtctggatcagggaatgcaattaaagccgagtacttcgagtcaccttttaaaaacagtgaagccacgtgtgtggaaaccaggggactggagtcgtgaacagctgaatgaaacgacagtccttgctccacatgaaacaatctttcgagccgaagatctatctgtgattcttaaagcgtatgtgttggtgacgtccttaacccctttgcgtgcattcattcattcgacgggcacagtttggaatccaccaaagaaaaaacgcttcactgtcaagctgcaaacattttttgagacattcctgagagccagttcacctcaacaggcttttgacattatgaaggaagcaattggcaaactactgctagcggctgaagtattcagtgaaacatctactctgggaccaaagaccttccatagatgcagattctgctttcaacttctaacttttgatattggttatggcagtttcatgtaccctgtagtgctccaggtacacgagcatttaaattttcaagattatgataatatggattttgaggaccaaaatacagaagaattccttttaaatgacactttcaattttctcttccctaatgaatcatcactttccatattttctgagatatttcagagactttatagatcagatgttttcaagggtgaaaactatcaaaaggaactaaatcagtgtctgtccttagaagaaattaactcaattatgactttcataaaggaacttggaagtctgggacaattccaactgctcttcccatctactactcctgggattcagtcactgatgcatgaattttatgatgtggcaaatcctgtgggaaatcctggctcagtcctgacccaatactggtctcttttaaatgtatttgaacaatttcagttcatgaataaaaagacacagccacatccactggaatggaattctttcacagaagataagaacattgaaaaaccacaagtgccatttgatgcaatagaaaataaaaaagctgcagttccacaaattaaaaatgaaaataaagaaatacattgcagtgatgatgaaaacacaccatgtcatatcaagcagatcttcacacatccacatttggaactaaatcctgactttcatccaaagatcaaagattattactgtgaagtcccatttgatgtggtaacagtgacaattggagtggaaactcctaagtgtctgtgcaaggtgcacctgtacgagcaggcagggccaagctttgccagctaccctctgggcttaggaatgaacaaaatctcaatatttgttgtggatgaatctccagcacacggtgagactctgatcacgtacaaactcaccatctatagagaagaccgcccaagtctgcccttgtttgaggccttcacagcatgtggttttgtgcaggattgtggtttgctgattcatccagaggaaacctgtgggttacagcctatttcttctgactacattgaagccattttacagtctgaactaaaaagatgtccatctggggacatgaaaggccagtggattgtgccttgccttagttgttcggacaacaggacgtgtgactggagagaaataacctggcagccccacaactgccaatatggtgtcctaactaagcctcaactccagcagtgcctgggaggaaggaagattctgttcattggagattcaaccaacagagggatcatgtactatcttattgaaaggctgaatgaaacgttgcaggaatggcagaaagtacatggcactaaattctatcacaacgtcaatggtgggaagactttgatcagttattcctactatccccagttctggataagcccttcattgagaccaacatttgaaaatgcacttgaacacctcttgcaaagatcacgtcccctagagaatactggccagactgtattggttgttggtggtgttcagtggcttaattccaatcacctgcaaattattcacaaagttttgaagagggaaaatttactcaatatcctagtgatcatcaaaactttgggaattggatttcatctgccagtggatggagtacatttcttaacacagagtgaagtacagaacttatggaaagaaaatttgattattctggatactgcaaaaaaacatggctatgaagtagttgacacattcactataacaatggggcgttacaaagagtttctacaggggaagtgtggatgtcatttccatgaggtagtgaaatcaaagttatccaaagaatataactttattaaaatgaaaagatcaagaaatcatatcatgggaagatatttcagcaatcaaagcaaactacaacaaggcactgtaacaaattttcgatcgccatatcatgtcagaggtccaataaatcaggtttgttctgaaatccttctcagcaggatgtgtgcaaataaaaggactatgtaggctccctgcaggagagctgaatctggagctggagacgagctagtcacccggacaatggtctaggagccaagcgctgcacatcgcacacatttgggatcgaccacacacacttgtgcacaccagcacatgcatgcacaccagtacacacacagttaaataatgataacacttcttacagctttatgaattcaagatgtgaccttgaacaccagtccatttcacagtgaaagatatacctagagaaacgttacttgaagcataattattaaccagaaccactgtgggccaggtatggcattgtgataataaagagaaatatagacacttaaaattatgtgaaaaaaaggataatgctctttcatgttgtcttaccatatctataggtacatcaatattgaaaaggagaaaaaccaatgacattccactggcaagtagaagttgtcctttcattctttaccaggagaaaatgtgatgtttatgatggcttaggctttgtgaatctaatgcttatgaaaaacatttcttcctatactttttaaattttattactgaaaggaaaagaacaggaatgttccacaagggaatttgaagagattctgtgagagagatatgaaatattttatagttaaaacaccaatatattcaactttacacttcttgtgtttttcataaacattccctcttgtcttatctgtgtacttcgatgggtaactgcagtctgaattaatgaaatatgtaattttaaagtaagtaacaaaatgtagttcctcatgtattactgtactatgtttcattgatgatattacttaaatcttgtgtttgccattacagccctatgtaacttaaaattacaattatattttatgtaaatattttgcaaaggactatgcattctgaaatgcataggtgctttttcccaccaagcatttgcatatgtccacaaatagtattatgttactagtatctatattttgattttcctgagcaactgtatcaaatccaaatttagattagacaaaaaattattattttaattaaactgtggcatacatataatacatacctaattatagtagtgagaactatttcttttatctctttaggttcaaaatggtgaatttctttattatatgaatgctttgttgtgagataacatcacactgttacaatggattttagaggtttgtcttttttgggtggggtgggaagctgagagggttaattcaatacatggctgaaattaccaaatgtataaatacctcattttcactaccatacaagaaaaaaacacctattttgattgatcagttcttttgtatgaatatccacctcctttaaatactctatttttatatatatttttatatgaagataaacatgaatttatatttaactgtcttaaattatatttacataaatgcaaatatcacttgatataaacaatacaaatctgcatcttacagatgataatttttttagaagaatgatacagaattaactttaaaaataaaacttttctaatatacacttaaatgcaaacatcatttttaaattttcagtgatttttttaatgacataaaacgttaccaatgtgtgcagcctctccatcatgttttaacatactgtatactctatagcagtattacagtcagtatttcatataattttctttagacctaactgttaccatctgactgaggttactctggtatttatctcttcgctgctgaaataataatggattttagaaacaattgtaataatatcattaataaatgtcttactagtaat

SEQ ID NO: 6478 - protein, 1026 aa, Homo sapiens; identical to SEQ ID NO: 914

SEQ ID NO: 6479 - DNA, 1476 bp, Homo sapiens
catttgaggagaagctaagtgctgactgccagaggatggaataggaagacaatgaactgcaacttccagtacatcaatattgaaaaggagaaaaaccaatgacattccactggcaagtagaagttgtcctttcattctttaccaggagaaaatgtgatgtttatgatggcttaggctttgtgaatctaatgcttatgaaaaacatttcttcctatactttttaaattttattactgaaaggaaaagaacaggaatgttccacaagggaatttgaagagattctgtgagagagatatgaaatattttatagttaaaacaccaatatattcaactttacacttcttgtgtttttcataaacattccctcttgtcttatctgtgtacttcgatgggtaactgcagtctgaattaatgaaatatgtaattttaaagtaagtaacaaaatgtagttcctcatgtattactgtactatgtttcattgatgatattacttaaatcttgtgtttgccattacagccctatgtaacttaaaattacaattatattttatgtaaatattttgcaaaggactatgcattctgaaatgcataggtgctttttcccaccaagcatttgcatatgtccacaaatagtattatgttactagtatctatattttgattttcctgagcaactgtatcaaatccaaatttagattagacaaaaaattattattttaattaaactgtggcatacatataatacatacctaattatagtagtgagaactatttcttttatctctttaggttcaaaatggtgaatttctttattatatgaatgctttgttgtgagataacatcacactgttacaatggattttagaggtttgtcttttttgggtggggtgggaagctgagagggttaattcaatacatggctgaaattaccaaatgtataaatacctcattttcactaccatacaagaaaaaaacacctattttgattgatcagttcttttgtatgaatatccacctcctttaaatactctatttttatatatatttttatatgaagataaacatgaatttatatttaactgtcttaaattatatttacataaatgcaaatatcacttgatataaacaatacaaatctgcatcttacagatgataatttttttagaagaatgatacagaattaactttaaaaataaaacttttctaatatacacttaaatgcaaacatcatttttaaattttcagtgatttttttaatgacataaaacgttaccaatgtgtgcagcctctccatcatgttttaacatactgtatactctatagcagtattacagtcagtatttcatataattttctttagacctaactgttaccatctgactgaggttactctggtatttatctcttcgctgctgaaataataatggattttagaaacaattgtaataatatcattaataaatgtcttactagtaat

SEQ ID NO: 6480 - protein, 41 aa, Homo sapiens [sequence omitted]

SEQ ID NO: 6481 - DNA, 1776 bp, Homo sapiens
catttgaggagaagctaagtgctgactgccagaggatggaataggaagacaatgaactgcaacttccagtacatcaatattgaaaaggagaaaaaccaatgacattccactggcaagtagaagttgtcctttcattctttaccaggagaaaatgtgatgtttatgatggcttaggctttgtgaatctaatgcttatgaaaaacatttcttcctatactttttaaattttattactgaaaggaaaagaacaggaatgttccacaagggaatttgaagagattctgtgagagagatatgaaatattttatagttaaaacaccaatatattcaactttacacttcttgtgtttttcataaacattccctcttgtcttatctgtgtacttcgatgggtaactgcagtctgaattaatgaaatatgtaattttaaagtaagtaacaaaatgtagttcctcatgtattactgtactatgtttcattgatgatattacttaaatcttgtgtttgccattacagccctatgtaacttaaaattacaattatattttatgtaaatattttgcaaaggactatgcattctgaaatgcataggtgctttttcccaccaagcatttgcatatgtccacaaatagtattatgttactagtatctatattttgattttcctgagcaactgtatcaaatccaaatttagattagacaaaaaattattattttaattaaactgtggcatacatataatacatacctaattatagtagtgagaactatttcttttatctctttaggttcaaaatggtgaatttctttattatatgaatgctttgttgtgagataacatcacactgttacaatggattttagaggtttgtcttttttgggtggggtgggaagctgagagggttaattcaatacatggctgaaattaccaaatgtataaatacctcattttcactaccatacaagaaaaaaacacctattttgattgatcagttcttttgtatgaatatccacctcctttaaatactctatttttatatatatttttatatgaagataaacatgaatttatatttaactgtcttaaattatatttacataaatgcaaatatcacttgatataaacaatacaaatctgcatcttacagatgataatttttttagaagaatgatacagaattaactttaaaaataaaacttttctaatatacacttaaatgcaaacatcatttttaaattttcagtgatttttttaatgacataaaacgttaccaatgtgtgcagcctctccatcatgttttaacatactgtatactctatagcagtattacagtcagtatttcatataattttctttagacctaactgttaccatctgactgaggttactctggtatttatctcttcgctgctgaaataataatggattttagaaacaattgtaataatatcattaataaatgtcttactagtaatagtctgtgtttgtagagtatcttttattttcttttttactgaagatgtacatctatgcaaacagtgaccacttggcagggatattatcatgtggattcaagtattatagcatggttaaacacgattaactatatagttccttctaagcctaatattctttaagtttatgatcagatgaacttcccactgtgcaatgaccaaaatgtatgaagataatgtattgtagtgacaagctttttaaaaataataataataagacacttacttaaatgctaggaatcattttaattgctccttaac

SEQ ID NO: 6482 - protein, 41 aa, Homo sapiens [sequence omitted]

SEQ ID NO: 6483 - DNA, 625 bp, Homo sapiens
gctacccagcagagcagcagagccaacacaatgtgcaggagaattgggtcttcctagcttctgacagcatccagagaagtttctgattgtggtttgctgattcatccagaggaaacctgtgggttacagcctatttcttctgactacattgaagccattttacagtctgaactaaaaagatgtccatctggggacatgaaaggccagtggattgtgccttgccttagttgttcggacaacaggacgtgtgactggagagaaataacctggcagccccacaactgccaatatggtgtcctaactaagcctcaactccagcagtgcctgggaggaaggaagttgggtgtcgatgtccagagagttcctagaagccgtaattgaagacacaatccagtcatcctgggaccctaaatgacctccctgccccacccctgcacataaacctgacttgaatcacctggactatttttctgagagagtaataaactttaattgggtttgacctattccaagttttttgggctatctgttacagtgcttagcttatctcacctaatacagggactatgcaaccaagaaactggaaataaaaacaaagataattaaaccattttataataagcct

SEQ ID NO: 6484 - protein, 61 aa, Homo sapiens
MKGQWIVPCLSCSDNRTCDWREITWQPHNCQYGVLTKPQLQQCLGGRKLGVDVQRVPRSRN

SEQ ID NO: 6485 - DNA, 2875 bp, Homo sapiens
agcctgcaaaaaccacagagggcaaagccagaaagatggaaaggcacccatgcagctcaccacttgcctcagggagaccctcttcacaggggcttctcaaaagacctccctatggtggttgggcattgcctccttcggggttccagagaagctgggctgcgccaatttgccgctgaacagccgccagaaggagctgtgcaagaggaaaccgtacctgctgccgagcatccgagagggcgcccggctgggcattcaggagtgcgggagccagttcagacacgagagatggaactgcatgatcaccgccgccgccactaccgccccgatgggcgccagccccctctttggctacgagctgagcagcggcaccaaagagacagcatttatttatgctgtgatggctgcaggcctggtgcattctgtgaccaggtcatgcagtgcaggcaacatgacagagtgttcctgtgacaccaccttgcagaacggcggctcagcaagtgaaggctggcactgggggggctgctccgatgatgtccagtatggcatgtggttcagcagaaagttcctagatttccccatcggaaacaccacgggcaaagaaaacaaagtactattagcaatgaacctacataacaatgaagctggaaggcaggctgtcgccaagttgatgtcagtagactgccgctgccacggagtttccggctcctgtgctgtgaaaacatgctggaaaaccatgtcttcttttgaaaagattggccatttgttgaaggataaatatgaaaacagtatccagatatcagacaaaacaaagaggaaaatgcgcaggagagaaaaagatcagaggaaaataccaatccataaggatgatctgctctatgttaataagtctcccaactactgtgtagaagataagaaactgggaatcccagggacacaaggcagagaatgcaaccgtacatcagagggtgcagatggctgcaacctcctctgctgtggccgaggttacaacacccatgtggtcaggcacgtggagaggtgtgagtgtaagttcatctggtgctgctatgtccgttgcaggaggtgtgaaagcatgactgatgtccacacttgcaagtaaccactccatccagccttgggcaagatgcctcagcaatatacaatggcattgcaaccagagaggtgcccatccctgtgcagcgctagtaaagttgactcttgcagtggaatccctagaaccttggacctgagagtttcccttacctgatcgacatattttcctttatctgatcaacccatcaatcatgtggatttcttgggattctaatgttgaaaaggtttatattcaccttttgatgatttggggaatatatattgacatacaaggaagataatctgtttcctaagcaagaaataacaggaaagatcccttatgccaggaggcctgccatactcaggataagatccttgaatatggaacttagttacaggactcaataatggtgggtgaacattagtcatttttaaaagacacctcttatagcaataaggagacattaacatgaatctcatttattctctcagtattttaactgaagaaattatactgtttgtgtgtggatagaagatgttgaaaagttaacataagcattgggtgctgacttaccctttcatgtacttccaaagaaaggtaatcaaaaagaatcttcttaagtgatataatatccctaaaaaaatgatcattacagatgtttagtgacaaagaatcaatatgtaaaaagtataatgaatgatttagattttaagtgccttttcactgggagaatctggaaaaacctccataaggtatatagcaatctttgatctttagattcatacttttatcacagatcagtttcaactgttaaaaacccacctctgagatactggggggaggatcctgaaacatgcgggaaaaggagaggtaaacagtggaggtaaaaatataatttcatacattgtaaagaaaagcaccctttaaatgtgtaaagacagtgttttgtaaagaattttgtttaaaaagtttctattttgtaaatacagtacttaagttatatgatttatattaaaacatttattgacaaagcctaagagctaaggcagtaaaattatctcataaataatattagcttattttttttcatactattaatgctatttttttggacatcgaagagaatttaacttagcagttagttatatggatgtgtatttcttgctaaaatgacagttttatatgttatagattaaaatatgttgcaaaatatcaaaaatttgtgttatttcagcagtaagattaattgaattctcttttcacattagttatgcttaactcataaggttattataataaattatattagtaaaagtcttaactggaaaaaagaatctaaatcagaatagtgatcaatttgtggatttgatatcctggatatttattatattttatgtaatgctgcatttctatttgaatgttaagtggtctttcttgtttttaatattcatgcatgtatattcatcatattttacaaggttcctggtaaaaattacagggctctatttaaggatgtattttaatgtaaatgcttatgttttttatgaattgttaaatatttcagtattatatagaaaaaaatagatttttaaaattcagaatggacaaagagaatattcattttcttattaataagataaagaaatgtttccctgccccacagtcttcattctatttctctttaattttattcactgaggcagagaaacaatttttgaaaaagagcaaacccatggaaaatgtctcagatctaatattaaaatcaagactaagcatttaactgtg

SEQ ID NO: 6486 - protein, 355 aa, Homo sapiens; identical to SEQ ID NO: 916

SEQ ID NO: 6487 - DNA, 3113 bp, Homo sapiens
cccgcatctcctgcacatctccacccctgcgcaggaggagatccccaggctgctctctccatctctcctacagctccctgcaaacgagggggaagctgctgagagtccctatcactgctggccttttaatgttgtatgcaaggaggaagagggcgagggataacttggtgctggacaactgacctgcggcccgaagggcctctggggagggggtgcaaaagaggagcggctgggctgggggactccatgcgggggcgatggacagggcggcgctcctgggactggcccgcttgtgcgcgctgtgggcagccctgctcgtgctgttcccctacggagcccaaggaaactggatgtggttgggcattgcctccttcggggttccagagaagctgggctgcgccaatttgccgctgaacagccgccagaaggagctgtgcaagaggaaaccgtacctgctgccgagcatccgagagggcgcccggctgggcattcaggagtgcgggagccagttcagacacgagagatggaactgcatgatcaccgccgccgccactaccgccccgatgggcgccagccccctctttggctacgagctgagcagcggcaccaaagagacagcatttatttatgctgtgatggctgcaggcctggtgcattctgtgaccaggtcatgcagtgcaggcaacatgacagagtgttcctgtgacaccaccttgcagaacggcggctcagcaagtgaaggctggcactgggggggctgctccgatgatgtccagtatggcatgtggttcagcagaaagttcctagatttccccatcggaaacaccacgggcaaagaaaacaaagtactattagcaatgaacctacataacaatgaagctggaaggcaggctgtcgccaagttgatgtcagtagactgccgctgccacggagtttccggctcctgtgctgtgaaaacatgctggaaaaccatgtcttcttttgaaaagattggccatttgttgaaggataaatatgaaaacagtatccagatatcagacaaaacaaagaggaaaatgcgcaggagagaaaaagatcagaggaaaataccaatccataaggatgatctgctctatgttaataagtctcccaactactgtgtagaagataagaaactgggaatcccagggacacaaggcagagaatgcaaccgtacatcagagggtgcagatggctgcaacctcctctgctgtggccgaggttacaacacccatgtggtcaggcacgtggagaggtgtgagtgtaagttcatctggtgctgctatgtccgttgcaggaggtgtgaaagcatgactgatgtccacacttgcaagtaaccactccatccagccttgggcaagatgcctcagcaatatacaatggcattgcaaccagagaggtgcccatccctgtgcagcgctagtaaagttgactcttgcagtggaatccctagaaccttggacctgagagtttcccttacctgatcgacatattttcctttatctgatcaacccatcaatcatgtggatttcttgggattctaatgttgaaaaggtttatattcaccttttgatgatttggggaatatatattgacatacaaggaagataatctgtttcctaagcaagaaataacaggaaagatcccttatgccaggaggcctgccatactcaggataagatccttgaatatggaacttagttacaggactcaataatggtgggtgaacattagtcatttttaaaagacacctcttatagcaataaggagacattaacatgaatctcatttattctctcagtattttaactgaagaaattatactgtttgtgtgtggatagaagatgttgaaaagttaacataagcattgggtgctgacttaccctttcatgtacttccaaagaaaggtaatcaaaaagaatcttcttaagtgatataatatccctaaaaaaatgatcattacagatgtttagtgacaaagaatcaatatgtaaaaagtataatgaatgatttagattttaagtgccttttcactgggagaatctggaaaaacctccataaggtatatagcaatctttgatctttagattcatacttttatcacagatcagtttcaactgttaaaaacccacctctgagatactggggggaggatcctgaaacatgcgggaaaaggagaggtaaacagtggaggtaaaaatataatttcatacattgtaaagaaaagcaccctttaaatgtgtaaagacagtgttttgtaaagaattttgtttaaaaagtttctattttgtaaatacagtacttaagttatatgatttatattaaaacatttattgacaaagcctaagagctaaggcagtaaaattatctcataaataatattagcttattttttttcatactattaatgctatttttttggacatcgaagagaatttaacttagcagttagttatatggatgtgtatttcttgctaaaatgacagttttatatgttatagattaaaatatgttgcaaaatatcaaaaatttgtgttatttcagcagtaagattaattgaattctcttttcacattagttatgcttaactcataaggttattataataaattatattagtaaaagtcttaactggaaaaaagaatctaaatcagaatagtgatcaatttgtggatttgatatcctggatatttattatattttatgtaatgctgcatttctatttgaatgttaagtggtctttcttgtttttaatattcatgcatgtatattcatcatattttacaaggttcctggtaaaaattacagggctctatttaaggatgtattttaatgtaaatgcttatgttttttatgaattgttaaatatttcagtattatatagaaaaaaatagatttttaaaattcagaatggacaaagagaatattcattttcttattaataagataaagaaatgtttccctgccccacagtcttcattctatttctctttaattttattcactgaggcagagaaacaatttttgaaaaagagcaaacccatggaaaatgtctcagatctaatattaaaatcaagactaagcatttaactgtg

SEQ ID NO: 6488 - protein, 365 aa, Homo sapiens; identical to SEQ ID NO: 918

SEQ ID NO: 6489 - DNA, 2432 bp, Homo sapiens
actcaatgatgaggcacggcggctcattgctgatttggggagcacatctattactaatcttggttttagagacaactgggtcttctgtggtgggaagggcattaagacaaaaagcccttttgaacagcacataaagaacaataaggatacaaacaaatatgaaggatggcctgaagttgtagaaatggaaggatgcatcccccagaagcaagactaatggaaatgtggagagaattgaagaaagcgcactttcactcttaatgggagagctataaatggcagagctatgtgtaaatattttaagagcatgcagccatcttggtgtgtgcatgagtattgtctcttttgatatcaggattatttattgctaacgtaaatagatagcattgtaaataatcatcacaatgatcaaatcactgaaccatgtctccgcacatttccctaaaagtacaatgtttagactgctatggtaatacatattttaaattctaaaagcatacacaatgtgtaactgaatggtttgtgaaaaatatattgatatatatactagttgctatgaaaatatcatggaataatagggattttagggtggatactttattttcttttatgtttctatatgttgcgttgtgatgacattatcttttaaattaaaaagagatttggctagttgtgtgtgtaatgttactttacagtccgactctcctgatgtacctcttttcatgatctttttctttccttcccaagaaactgaggaatgtttaatatgaaaacatacatcggatatgtgaaaagcacaacaaaattcttaatgtacacagtaaaaaagtaaatatataaatgtagatggcatttaggaccacagcttgctggatttgtgttagctatgggaataacttgattttgtataagctatttagagtgaggctggaggtggcagcttcacagaactggagaaccaggccaagtcccctccccaacctaattaggtcattcaggacagctaagtcagtatatttagagcaatactagcatacgtttttcttaattgttatcagcattgaccaagtggtttggaaggaggcatgctttaatatcacaataattttgatttgtaaaccaagaaattaatcctgtgtttatctaacttcataatagcaattattgcccgaagctatagtggcatatttacaaaagttcttattactgggcggactgataacatttaaaaaataattgtgtttgaccccaaatgactttatacccaattctacataaaaatatagaagatctatctttttttgttaccttcagatgttcactaaataactcagtttttaagcagaagttttcagggcattaaatatatgttgtgtatgaagtatctcaaactggaacataaatttagtgatcaaactgccattcacagtgtaaggcagcacttaaatttcgaacctaaagtttagatgcattgtataaaaaaacctaaaagcagtatctgttatttagctgtaaaccaagttggaagctattcggataatttcttaaatattgatgaactttggagtactgtttcttccttcaaactgaatgtaattaattcatgaataaatgcaccttatatgtttaaacaatctttgtatacttttgggatttttggtgcttatatgctaaatcacattcagcatgtgtattttgacatttaaaatacttccctcaattctgtaaattaaaagaatagttattttacagttccagggattgtgaaataaatgttgcagttttttaaaataatgaaaataaatactcttggttttgctttgtgaatttttttttttttttgtattatctggcaaagtaatatacctacagaacttcacaaaaactcacacaaggtttttcaagcatttattatactgcctaacttggaaaaaaaattgttgctgtggttaaaaatagtaatatcctagatgtgtcttaacatgtaagaagctaagtatctagatggcggaaaaagcccttttattaagactgtaaaaggatagcttttccagatatataaaatgttaaaagaagacaaagattggttatgttaactggtgtggtttccttttgtctcagttcaatcttgtatagattgtgccaacttaactttgaaagcaataactttatactacattttcagatacctctttaaaatcggttttagacatgaaacagtgctcatttaatattaagaatgttctttattaaaatcaaattaacattgacatagtatttgaaatggtgcttatgggcttatcgatgcatattttttatttgtaatccgatgctgtcccagaataagtgtattgtaatgtgaatgttaaaattgaacaagagaaagcaggaaaataagtggtatttgggaaattaaaggaagattgaaccag

SEQ ID NO: 6490 - protein, 42 aa, Homo sapiens
MMRHGGSLLIWGAHLLLILVLETTGSSVVGRALRQKALLNST

SEQ ID NO: 6491 - DNA, 2879 bp, Homo sapiens
acatacagatttttgtcagcatttacctttattctggtcaaatgtaatttacagagggtttagtggagattcaaaaagattaattttataaaaatattgattgcttaagaccttggatagcctggataggcatctactaactgtggtatcccttatttatttgatgagtgtaatttaaaaagttaaatgaaggtgaattgttgtgaaataaaaacctaacaggtccttttaatagaataaacttaaaattaattgttggagttcatgtcttttgtcactaaagaattcaaccagtagaaatgtaactctgaaaaaaaattattttccaaaatgttctgttatttaaagtctcattttgtctcatgttttgtgttaatatcccagtgaaccagtattagcatacagttccctctgtttattgttgtattctttctctccctcttcaagactcaatgatgaggcacggcggctcattgctgatttggggagcacatctattactaatcttggttttagagacaactgggtcttctgtggtgggaagggcattaagacaaaaagcccttttgaacagcacataaagaacaataaggatacaaacaaatatgaaggatggcctgaagttgtagaaatggaaggatgcatcccccagaagcaagactaatggaaatgtggagagaattgaagaaagcgcactttcactcttaatgggagagctataaatggcagagctatgtgtaaatattttaagagcatgcagccatcttggtgtgtgcatgagtattgtctcttttgatatcaggattatttattgctaacgtaaatagatagcattgtaaataatcatcacaatgatcaaatcactgaaccatgtctccgcacatttccctaaaagtacaatgtttagactgctatggtaatacatattttaaattctaaaagcatacacaatgtgtaactgaatggtttgtgaaaaatatattgatatatatactagttgctatgaaaatatcatggaataatagggattttagggtggatactttattttcttttatgtttctatatgttgcgttgtgatgacattatcttttaaattaaaaagagatttggctagttgtgtgtgtaatgttactttacagtccgactctcctgatgtacctcttttcatgatctttttctttccttcccaagaaactgaggaatgtttaatatgaaaacatacatcggatatgtgaaaagcacaacaaaattcttaatgtacacagtaaaaaagtaaatatataaatgtagatggcatttaggaccacagcttgctggatttgtgttagctatgggaataacttgattttgtataagctatttagagtgaggctggaggtggcagcttcacagaactggagaaccaggccaagtcccctccccaacctaattaggtcattcaggacagctaagtcagtatatttagagcaatactagcatacgtttttcttaattgttatcagcattgaccaagtggtttggaaggaggcatgctttaatatcacaataattttgatttgtaaaccaagaaattaatcctgtgtttatctaacttcataatagcaattattgcccgaagctatagtggcatatttacaaaagttcttattactgggcggactgataacatttaaaaaataattgtgtttgaccccaaatgactttatacccaattctacataaaaatatagaagatctatctttttttgttaccttcagatgttcactaaataactcagtttttaagcagaagttttcagggcattaaatatatgttgtgtatgaagtatctcaaactggaacataaatttagtgatcaaactgccattcacagtgtaaggcagcacttaaatttcgaacctaaagtttagatgcattgtataaaaaaacctaaaagcagtatctgttatttagctgtaaaccaagttggaagctattcggataatttcttaaatattgatgaactttggagtactgtttcttccttcaaactgaatgtaattaattcatgaataaatgcaccttatatgtttaaacaatctttgtatacttttgggatttttggtgcttatatgctaaatcacattcagcatgtgtattttgacatttaaaatacttccctcaattctgtaaattaaaagaatagttattttacagttccagggattgtgaaataaatgttgcagttttttaaaataatgaaaataaatactcttggttttgctttgtgaatttttttttttttttgtattatctggcaaagtaatatacctacagaacttcacaaaaactcacacaaggtttttcaagcatttattatactgcctaacttggaaaaaaaattgttgctgtggttaaaaatagtaatatcctagatgtgtcttaacatgtaagaagctaagtatctagatggcggaaaaagcccttttattaagactgtaaaaggatagcttttccagatatataaaatgttaaaagaagacaaagattggttatgttaactggtgtggtttccttttgtctcagttcaatcttgtatagattgtgccaacttaactttgaaagcaataactttatactacattttcagatacctctttaaaatcggttttagacatgaaacagtgctcatttaatattaagaatgttctttattaaaatcaaattaacattgacatagtatttgaaatggtgcttatgggcttatcgatgcatattttttatttgtaatccgatgctgtcccagaataagtgtattgtaatgtgaatgttaaaattgaacaagagaaagcaggaaaataagtggtatttgggaaattaaaggaagattgaaccag

SEQ ID NO: 6492 - protein, 42 aa, Homo sapiens; identical to SEQ ID NO: 6490

SEQ ID NO: 6493 - DNA, 2272 bp, Homo sapiens
acatacagatttttgtcagcatttacctttattctggtcaaatgtaatttacagagggtttagtggagattcaaaaagattaattttataaaaatattgattgcttaagaccttggatagcctggataggcatctactaactgtggtatcccttatttatttgatgagtgtaatttaaaaagttaaatgaaggtgaattgttgtgaaataaaaacctaacaggtccttttaatagaataaacttaaaattaattgttggagttcatgtcttttgtcactaaagaattcaaccagtagaaatgtaactctgaaaaaaaattattttccaaaatgttctgttatttaaagtctcattttgtctcatgttttgtgttaatatcccagtgaaccagtattagcatacagttccctctgtttattgttgtattctttctctccctcttcaagactcaatgatgaggcacggcggctcattgctgatttggggagcacatctattactaatcttggttttagagacaactgggtcttctgtggtgggaagggcattaagacaaaaagcccttttgaacagcacataaagaacaataaggatacaaacaaatatgaaggatggcctgaagttgtagaaatggaaggatgcatcccccagaagcaagactaatggaaatgtggagagaattgaagaaagcgcactttcactcttaatgggagagctataaatggcagagctatgtgtaaatattttaagagcatgcagccatcttggtgtgtgcatgagtattgtctcttttgatatcaggattatttattgctaacgtaaatagatagcattgtaaataatcatcacaatgatcaaatcactgaaccatgtctccgcacatttccctaaaagtacaatgtttagactgctatggtaatacatattttaaattctaaaagcatacacaatgtgtaactgaatggtttgtgaaaaatatattgatatatatactagttgctatgaaaatatcatggaataatagggattttagggtggatactttattttcttttatgtttctatatgttgcgttgtgatgacattatcttttaaattaaaaagagatttggctagttgtgtgtgtaatgttactttacagtccgactctcctgatgtacctcttttcatgatctttttctttccttcccaagaaactgaggaatgtttaatatgaaaacatacatcggatatgtgaaaagcacaacaaaattcttaatgtacacagtaaaaaagtaaatatataaatgtagatggcatttaggaccacagcttgctggatttgtgttagctatgggaataacttgattttgtataagctatttagagtgaggctggaggtggcagcttcacagaactggagaaccaggccaagtcccctccccaacctaattaggtcattcaggacagctaagtcagtatatttagagcaatactagcatacgtttttcttaattgttatcagcattgaccaagtggtttggaaggaggcatgctttaatatcacaataattttgatttgtaaaccaagaaattaatcctgtgtttatctaacttcataatagcaattattgcccgaagctatagtggcatatttacaaaagttcttattactgggcggactgataacatttaaaaaataattgtgtttgaccccaaatgactttatacccaattctacataaaaatatagaagatctatctttttttgttaccttcagatgttcactaaataactcagtttttaagcagaagttttcagggcattaaatatatgttgtgtatgaagtatctcaaactggaacataaatttagtgatcaaactgccattcacagtgtaaggcagcacttaaatttcgaacctaaagtttagatgcattgtataaaaaaacctaaaagcagtatctgttatttagctgtaaaccaagttggaagctattcggataatttcttaaatattgatgaactttggagtactgtttcttccttcaaactgaatgtaattaattcatgaataaatgcaccttatatgtttaaacaatctttgtatacttttgggatttttggtgcttatatgctaaatcacattcagcatgtgtattttgacatttaaaatacttccctcaattctgtaaattaaaagaatagttattttacagttccagggattgtgaaataaatgttgcagttttttaaaataatgaaaataaatactcttggttttgctttgtg

SEQ ID NO: 6494 - protein, 42 aa, Homo sapiens; identical to SEQ ID NO: 6490

SEQ ID NO: 6495 - DNA, 2468 bp, Homo sapiens
gaggggcagccggaggagtccgagaggaagcggaggcgcgagctggaggcggcggctcccgtcggcctccggcaggactgagcgctgggaggccggaaggcgggcgcgcgcggcggagaggcgggcgggaggccggagcatattaatgaaaagtgccataaactgaaaaaccaaacatgagggtagcaggtgctgcaaagttggtggtagctgtggcagtgtttttactgacattttatgttatttctcaagtatttgaaataaaaatggatgcaagtttaggaaatctatttgcaagatcagcattggacacagctgcacgttctacaaagcctcccagatataagtgtgggatctcaaaagcttgccctgagaagcattttgcttttaaaatggcaagtggagcagccaacgtggtgggacccaaaatctgcctggaagataatgttttaatgagtggtgttaagaataatgttggaagagggatcaatgttgccttggcaaatggaaaaacaggagaagtattagacactaaatattttgacatgtggggaggagatgtggcaccatttattgagtttctgaaggccatacaagatggaacaatagttttaatgggaacatacgatgatggagcaaccaaactcaatgatgaggcacggcggctcattgctgatttggggagcacatctattactaatcttggttttagagacaactgggtcttctgtggtgggaagggcattaagacaaaaagcccttttgaacagcacataaagaacaataaggatacaaacaaatatgaaggatggcctgaagttgtagaaatggaaggatgcatcccccagaagcaagactaatggaaatgtggagagaattgaagaaagcgcactttcactcttaatgggagagctataaatggcagagctatgtgtaaatattttaagagcatgcagccatcttggtgtgtgcatgagtattgtctcttttgatatcaggattatttattgctaacgtaaatagatagcattgtaaataatcatcacaatgatcaaatcactgaaccatgtctccgcacatttccctaaaagtacaatgtttagactgctatggtaatacatattttaaattctaaaagcatacacaatgtgtaactgaatggtttgtgaaaaatatattgatatatatactagttgctatgaaaatatcatggaataatagggattttagggtggatactttattttcttttatgtttctatatgttgcgttgtgatgacattatcttttaaattaaaaagagatttggctagttgtgtgtgtaatgttactttacagtccgactctcctgatgtacctcttttcatgatctttttctttccttcccaagaaactgaggaatgtttaatatgaaaacatacatcggatatgtgaaaagcacaacaaaattcttaatgtacacagtaaaaaagtaaatatataaatgtagatggcatttaggaccacagcttgctggatttgtgttagctatgggaataacttgattttgtataagctatttagagtgaggctggaggtggcagcttcacagaactggagaaccaggccaagtcccctccccaacctaattaggtcattcaggacagctaagtcagtatatttagagcaatactagcatacgtttttcttaattgttatcagcattgaccaagtggtttggaaggaggcatgctttaatatcacaataattttgatttgtaaaccaagaaattaatcctgtgtttatctaacttcataatagcaattattgcccgaagctatagtggcatatttacaaaagttcttattactgggcggactgataacatttaaaaaataattgtgtttgaccccaaatgactttatacccaattctacataaaaatatagaagatctatctttttttgttaccttcagatgttcactaaataactcagtttttaagcagaagttttcagggcattaaatatatgttgtgtatgaagtatctcaaactggaacataaatttagtgatcaaactgccattcacagtgtaaggcagcacttaaatttcgaacctaaagtttagatgcattgtataaaaaaacctaaaagcagtatctgttatttagctgtaaaccaagttggaagctattcggataatttcttaaatattgatgaactttggagtactgtttcttccttcaaactgaatgtaattaattcatgaataaatgcaccttatatgtttaaacaatctttgtatacttttgggatttttggtgcttatatgctaaatcacattcagcatgtgtattttgacatttaaaatacttccctcaattctgtaaattaaaagaatagttattttacagttccagggattgtgaaataaatgttgcagttttttaaaataatgaaaataaatactcttggttttgctttgtg

SEQ ID NO: 6496 - protein, 227 aa, Homo sapiens; identical to SEQ ID NO: 920

SEQ ID NO: 6497 - DNA, 2079 bp, Homo sapiens
acatacagatttttgtcagcatttacctttattctggtcaaatgtaatttacagagggtttagtggagattcaaaaagattaattttataaaaatattgattgcttaagaccttggatagcctggataggcatctactaactgtggtatcccttatttatttgatgagtgtaatttaaaaagttaaatgaaggtgaattgttgtgaaataaaaacctaacaggtccttttaatagaataaacttaaaattaattgttggagttcatgtcttttgtcactaaagaattcaaccagtagaaatgtaactctgaaaaaaaattattttccaaaatgttctgttatttaaagtctcattttgtctcatgttttgtgttaatatcccagtgaaccagtattagcatacagttccctctgtttattgttgtattctttctctccctcttcaagactcaatgatgaggcacggcggctcattgctgatttggggagcacatctattactaatcttggttttagagacaactgggtcttctgtggtgggaagggcattaagacaaaaagcccttttgaacagcacataaagaacaataaggatacaaacaaatatgaaggatggcctgaagttgtagaaatggaaggatgcatcccccagaagcaagactaatggaaatgtggagagaattgaagaaagcgcactttcactcttaatgggagagctataaatggcagagctatgtgtaaatattttaagagcatgcagccatcttggtgtgtgcatgagtattgtctcttttgatatcaggattatttattgctaacgtaaatagatagcattgtaaataatcatcacaatgatcaaatcactgaaccatgtctccgcacatttccctaaaagtacaatgtttagactgctatggtaatacatattttaaattctaaaagcatacacaatgtgtaactgaatggtttgtgaaaaatatattgatatatatactagttgctatgaaaatatcatggaataatagggattttagggtggatactttattttcttttatgtttctatatgttgcgttgtgatgacattatcttttaaattaaaaagagatttggctagttgtgtgtgtaatgttactttacagtccgactctcctgatgtacctcttttcatgatctttttctttccttcccaagaaactgaggaatgtttaatatgaaaacatacatcggatatgtgaaaagcacaacaaaattcttaatgtacacagtaaaaaagtaaatatataaatgtagatggcatttaggaccacagcttgctggatttgtgttagctatgggaataacttgattttgtataagctatttagagtgaggctggaggtggcagcttcacagaactggagaaccaggccaagtcccctccccaacctaattaggtcattcaggacagctaagtcagtatatttagagcaatactagcatacgtttttcttaattgttatcagcattgaccaagtggtttggaaggaggcatgctttaatatcacaataattttgatttgtaaaccaagaaattaatcctgtgtttatctaacttcataatagcaattattgcccgaagctatagtggcatatttacaaaagttcttattactgggcggactgataacatttaaaaaataattgtgtttgaccccaaatgactttatacccaattctacataaaaatatagaagatctatctttttttgttaccttcagatgttcactaaataactcagtttttaagcagaagttttcagggcattaaatatatgttgtgtatgaagtatctcaaactggaacataaatttagtgatcaaactgccattcacagtgtaaggcagcacttaaatttcgaacctaaagtttagatgcattgtataaaaaaacctaaaagcagtatctgttatttagctgtaaaccaagttggaagctattcggataatttcttaaatattgatgaactttggagtactgtttcttccttcaaactgaatgtaattaattcatgaataaatgcaccttatatgtttaaac

SEQ ID NO: 6498 - protein, 42 aa, Homo sapiens; identical to SEQ ID NO: 6490

SEQ ID NO: 6499 - DNA, 2313 bp, Homo sapiens
agcggcgagctggctttctcctggccacttgccggggtgaggggcagccggaggagtccgagaggaagcggaggcgcgagctggaggcggcggctcccgtcggcctccggcaggactgagcgctgggaggccggaaggcgggcgcgcgcggcggagaggcgggcgggaggccggagcatattaatgaaaagtgccataaactgaaaaaccaaacatgagggtagcaggtgctgcaaagttggtggtagctgtggcagtgtttttactgacattttatgttatttctcaagtatttgaaataaaaatggatgcaagtttaggaaatctatttgcaagatcagcattggacacagctgcacgttctacaaagcctcccagatataagtgtgggatctcaaaagcttgccctgagaagcattttgcttttaaaatggcaagtggagcagccaacgtggtgggacccaaaatctgcctggaagataatgttttaatgagtggtgttaagaataatgttggaagagggatcaatgttgccttggcaaatggaaaaacaggagaagtattagacactaaatattttgacatgtggggaggagatgtggcaccatttattgagtttctgaaggccatacaagatggaacaatagttttaatgggaacatacgatgatggagcaaccaaactcaatgatgaggcacggcggctcattgctgatttggggagcacatctattactaatcttggttttagagacaactgggtcttctgtggtgggaagggcattaagacaaaaagcccttttgaacagcacataaagaacaataaggatacaaacaaatatgaaggatggcctgaagttgtagaaatggaaggatgcatcccccagaagcaagactaatggaaatgtggagagaattgaagaaagcgcactttcactcttaatgggagagctataaatggcagagctatgtgtaaatattttaagagcatgcagccatcttggtgtgtgcatgagtattgtctcttttgatatcaggattatttattgctaacgtaaatagatagcattgtaaataatcatcacaatgatcaaatcactgaaccatgtctccgcacatttccctaaaagtacaatgtttagactgctatggtaatacatattttaaattctaaaagcatacacaatgtgtaactgaatggtttgtgaaaaatatattgatatatatactagttgctatgaaaatatcatggaataatagggattttagggtggatactttattttcttttatgtttctatatgttgcgttgtgatgacattatcttttaaattaaaaagagatttggctagttgtgtgtgtaatgttactttacagtccgactctcctgatgtacctcttttcatgatctttttctttccttcccaagaaactgaggaatgtttaatatgaaaacatacatcggatatgtgaaaagcacaacaaaattcttaatgtacacagtaaaaaagtaaatatataaatgtagatggcatttaggaccacagcttgctggatttgtgttagctatgggaataacttgattttgtataagctatttagagtgaggctggaggtggcagcttcacagaactggagaaccaggccaagtcccctccccaacctaattaggtcattcaggacagctaagtcagtatatttagagcaatactagcatacgtttttcttaattgttatcagcattgaccaagtggtttggaaggaggcatgctttaatatcacaataattttgatttgtaaaccaagaaattaatcctgtgtttatctaacttcataatagcaattattgcccgaagctatagtggcatatttacaaaagttcttattactgggcggactgataacatttaaaaaataattgtgtttgaccccaaatgactttatacccaattctacataaaaatatagaagatctatctttttttgttaccttcagatgttcactaaataactcagtttttaagcagaagttttcagggcattaaatatatgttgtgtatgaagtatctcaaactggaacataaatttagtgatcaaactgccattcacagtgtaaggcagcacttaaatttcgaacctaaagtttagatgcattgtataaaaaaacctaaaagcagtatctgttatttagctgtaaaccaagttggaagctattcggataatttcttaaatattgatgaactttggagtactgtttcttccttcaaactgaatgtaattaattcatgaataaatgcaccttatatgtttaaac

SEQ ID NO: 6500 - protein, 227 aa, Homo sapiens; identical to SEQ ID NO: 920

SEQ ID NO: 6501 - DNA, 671 bp, Homo sapiens
actcaatgatgaggcacggcggctcattgctgatttggggagcacatctattactaatcttggttttagagacaactgggtcttctgtggtgggaagggcattaagacaaaaagcccttttgaacagcacataaagaacaataaggatacaaacaaatatgaaggatggcctgaagttgtagaaatggaaggatgcatcccccagaagcaagactaatggaaatgtggagagaattgaagaaagcgcactttcactcttaatgggagagctataaatggcagagctatgtgtaaatattttaagagcatgcagccatcttggtgtgtgcatgagtattgtctcttttgatatcaggattatttattgctaacgtaaatagatagcattgtaaataatcatcacaatgatcaaatcactgaaccatgtctccgcacatttccctaaaagtacaatgtttagactgctatggtaatacatattttaaattctaaaagcatacacaatgtgtaactgaatggtttgtgaaaaatatattgatatatatactagttgctatgaaaatatcatggaataatagggattttagggtggatactttattttcttttatgtttctatatgttgcgttgtgatgacattatcttttaaattaaaaagagatttggctagt

SEQ ID NO: 6502 - protein, 42 aa, Homo sapiens; identical to SEQ ID NO: 6490

SEQ ID NO: 6503 - DNA, 1118 bp, Homo sapiens
acatacagatttttgtcagcatttacctttattctggtcaaatgtaatttacagagggtttagtggagattcaaaaagattaattttataaaaatattgattgcttaagaccttggatagcctggataggcatctactaactgtggtatcccttatttatttgatgagtgtaatttaaaaagttaaatgaaggtgaattgttgtgaaataaaaacctaacaggtccttttaatagaataaacttaaaattaattgttggagttcatgtcttttgtcactaaagaattcaaccagtagaaatgtaactctgaaaaaaaattattttccaaaatgttctgttatttaaagtctcattttgtctcatgttttgtgttaatatcccagtgaaccagtattagcatacagttccctctgtttattgttgtattctttctctccctcttcaagactcaatgatgaggcacggcggctcattgctgatttggggagcacatctattactaatcttggttttagagacaactgggtcttctgtggtgggaagggcattaagacaaaaagcccttttgaacagcacataaagaacaataaggatacaaacaaatatgaaggatggcctgaagttgtagaaatggaaggatgcatcccccagaagcaagactaatggaaatgtggagagaattgaagaaagcgcactttcactcttaatgggagagctataaatggcagagctatgtgtaaatattttaagagcatgcagccatcttggtgtgtgcatgagtattgtctcttttgatatcaggattatttattgctaacgtaaatagatagcattgtaaataatcatcacaatgatcaaatcactgaaccatgtctccgcacatttccctaaaagtacaatgtttagactgctatggtaatacatattttaaattctaaaagcatacacaatgtgtaactgaatggtttgtgaaaaatatattgatatatatactagttgctatgaaaatatcatggaataatagggattttagggtggatactttattttcttttatgtttctatatgttgcgttgtgatgacattatcttttaaattaaaaagagatttggctagt

SEQ ID NO: 6504 - protein, 42 aa, Homo sapiens; identical to SEQ ID NO: 6490

SEQ ID NO: 6505 - DNA, 396 bp, Homo sapiens
gatcaatgttgccttggcaaatggaaaaacaggagaagtattagacactaaatattttgacatgtggggaggaggtaagcataaataacatgactgtgttcttttgctggcactgacttaatcacctcaatacaatgtagcccattaatgagagaatgatgatgctatttgcgttagttcattttgtttcccttactttctgttcactaaatgtccagctgtatttaagttatcattcatgttttatatactttcttcttcttagaaaaaaatttttgtggtgtataattgaagatagtaatatcaaaattgagatttttttaaaaaaagtcatcttgttttctacaggacaaccaattcaaaagttttgggctcctttaagtgtgtctaaaattt

SEQ ID NO: 6506 - protein, 79 aa, Homo sapiens
MMMLFALVHFVSLTFCSLNVQLYLSYHSCFIYFLLLRKKFLWCIIEDSNIKIEIFLKKVILFSTGQPIQKFWAPLSVSK

SEQ ID NO: 6507 - DNA, 514 bp, Homo sapiens
atgcacttactcaagcagctcgggaaacccattatgcactcggaaatccttagagtaacaatgctttataatagtgctgaagaggttgtttatgagtgcaccaaccagccacctctgtccctttcccggatgatcccgaaaatgaagcttcctggccaggaaaacaaaacggccgtggttgtgggaaccataacagatgacgtgtgggttcaggaggtgcccaaactgaaggtgtgtgcactgggcgtgaccagccgggcccgcagccacatcttcagggtggggggcaagaacctcactttcgaccagctggccctggactcccccaaggtctgcggcaccgtcctgctctcaggtcctcgcaagggtcgagaggtgtactggcatttcgacaaggccctgggaaccccacacagccacaccaaaccctacgtccgctccaagggccggaagttcgagtatgccagaggccaaggggccagccaaggctacaaaaactaaccctggatcctac

SEQ ID NO: 6508 - protein, 166 aa, Homo sapiens
MHLLKQLGKPIMHSEILRVTMLYNSAEEVVYECTNQPPLSLSRMIPKMKLPGQENKTAVVVGTITDDVWVQEVPKLKVCALGVTSRARSHIFRVGGKNLTFDQLALDSPKVCGTVLLSGPRKGREVYWHFDKALGTPHSHTKPYVRSKGRKFEYARGQGASQGYKN

SEQ ID NO: 6509 - DNA, 493 bp, Homo sapiens
atgtggtgtggaggtgggatgactgccatctgcagcccctacctctgtaatagtgctgaagaggttgtttatgagtgcaccaaccagccacctctgtccctttcccggatgatcccgaaaatgaagcttcctggccaggaaaacaaaacggccgtggttgtgggaaccataacagatgacgtgtgggttcaggaggtgcccaaactgaaggtgtgtgcactgggcgtgaccagccgggcccgcagccacatcttcagggtggggggcaagaacctcactttcgaccagctggccctggactcccccaaggtctgcggcaccgtcctgctctcaggtcctcgcaagggtcgagaggtgtactggcatttcgacaaggccctgggaaccccacacagccacaccaaaccctacgtccgctccaagggccggaagttcgagtatgccagaggccaaggggccagccaaggctacaaaaactaaccctggatcctac

SEQ ID NO: 6510 - protein, 159 aa, Homo sapiens
MWCGGGMTAICSPYLCNSAEEVVYECTNQPPLSLSRMIPKMKLPGQENKTAVVVGTITDDVWVQEVPKLKVCALGVTSRARSHIFRVGGKNLTFDQLALDSPKVCGTVLLSGPRKGREVYWHFDKALGTPHSHTKPYVRSKGRKFEYARGQGASQGYKN

SEQ ID NO: 6511 - DNA, 1193 bp, Homo sapiens
ggacaggaactgcattagggataaaaaccacttctctcctttgttcagtgtgctcttgcaatcgtaactgatgcaggcagcacccttctgcagaagcaaattgccttgctgagaaaaattttgcggaagggtctcagatcacctcttgtggggagatacatccagctgcctcattgtggtggtctcaggggtaaggaatcgagacccaaccagcgtgacaaataaacatggatcctcagcaacatgggaagaaaaggcctacagataccggggtgaccaggtaactctatgcacagaccaagaggcccataagtgggtaaatgttcctaaggacaaagatatctataaatctgcagagtgtacatctgtaagaatagaagactgattcctcgctcacatcctcactgatctaataactactctggcttccaagatgcttcaaaaactaaactcagcaaaaagtgcagaccaaatatgtggcagaagttgaactgagctcgttaagtttcatattatgtatatcctttaatatagccttttaatgccaataagtgtgtcatgcatagatgaaatgctaaactgtcttatggcttagcagtattggccttggtcttagatgggtatttaaaactcagcctctcttaagacttttcttctctgccaaaacctgcttagtcaccatctagggtaacccaaggttttcttgctgtccccatacaaattcacttgagaaggtattcactgtcctaggcaaagagctaagtaacaattaatctatttctgaggaaaagaacacataagttagtcatatagtgccagcatgtctgaggaaaatgcttttaatcaaataatactgaaatgtataataagaaatatgatgagaagagactgggattccactaagatgcttcccacccatcaaattattactaaaatatgatgatctaccaaagtgctttatgcttcaatcacagaaaccaattcaagcttagacccagacttaaggatggtccaaagattatgccactagccatatgtaaagttaaataaaagtacaaatcctgtttctcagttgcatgagctgtttccaatactcagtagtcacatgtggctgatagctaccatattagtgcagatatagaacattctgtcatcacagaaagttctactgggcagcactggtccaaaccatg

SEQ ID NO: 6512 - protein, 39 aa, Homo sapiens
MSEENAFNQIILKCIIRNMMRRDWDSTKMLPTHQIITKI

SEQ ID NO: 6513 - DNA, 576 bp, Homo sapiens
attcactaagttgcaagtgactttctcagtcttctttgcttttgtgcagagaagactgagaattcagccctagagaattcagctctggttgtgagtgcctcttttccagggcagagacttctggaaaagcagatggagccttgtggaatggggctctctgcctcatctggggagtgactctcgattcccctcacctgtccctcccatcacacctgggcttctttgcggtgacaggagatattacctcattgttctagttctttggcctggatatttggatagagtcagtaaacatgatcctgccttgggggaatccaggttcctcctctcctggaatcagacagaaaggaacagaatgaaagaagagcttttgatcaagaatgacccttcttcatcaactctgtccatgtggtgacccaggaccaagctacagtgaccatgcaatcagttcaaggaggcctatgtgacctggggttgatcaactagaatcctcagcattcttccaggactttgctgggaccagtggcagagactgggctctcatcaaacaagcaaagtatcggtatttgtccctgt

SEQ ID NO: 6514 - protein, 65 aa, Homo sapiens [sequence omitted]

SEQ ID NO: 6515 - DNA, 793 bp, Homo sapiens
ctctttctgctgctccccagctctcggatacagccgacaccatgggtttcggagacctgaaaagccccaccggcctccaggtgctcaacgattacctggcggacaagagctacatcaaggggtatggtgccatcacaagcagatgtggcagtatttgaagccgtgtccggcccaccacctgccgacttgtgtcatgccctacgttggtataatcacatcaagtcttacgaaaaggaaaaggccggcctgccaggagtgaagaaagctttgagcaagtatggtcctgccgatgtggaagacactacaggaagtggagctacagacagtaaagatgatgatgacattgatctctttggatccgattatgaggaggaaagtgaagaagcaaagaggctaagggaagaacatcttgcacaatatgaatcaaagaaagccaaaaaacctgcacttgttgccaagtcttccatcttactagatgtgaaaccttgggatgatgagacagatatggcgaaattagaggagtgtgtcagaagcattcaagcagacggcttagtctggggctcatctaaactagttccagtgggatacggaattaagaaacttcaaatacagtgtgtagttgaagatgataaagttggaacagatatgctggaggagcagatcactgcttttgaggactatgtgcagtccatggatgtggctgctttcaacaagatctaaaaatccatcctggatcatggcatttaaataaaagcttgaaagattaaagaaaaaagaaagaaagaaagaaact

SEQ ID NO: 6516 - protein, 198 aa, Homo sapiens [sequence omitted]

SEQ ID NO: 6517 - DNA, 207 bp, Homo sapiens; identical to SEQ ID NO: 926

SEQ ID NO: 6518 - protein, 68 aa, Homo sapiens [sequence omitted]

SEQ ID NO: 6519 - DNA, 10215 bp, Homo sapiens
gctttcaaacgaggccagggcagggcagaagggttttgacagccagaggggtacggtaaggaggaggaagaggaggaggaggcggaggaggaggaggagccgaggagggaaccgagaagggaagagaagggagggcttccctccgcctcgctcgccgcccgggctcacaggagctggcggcggcggcggcggcggcggcgtctcctgctctccgcggctgttgctgctgctcgcgctccgccgcccgggagatgcttcctcgcgcggcgcagcgctgaggccgtgcgtgcgccccggctgcgctgcgcgctccccacatacacaagctctccatgtgagctgacaggcgagtggaaacccctcgagtcacgctgcccggcggcggagggagcgctcgcccgcagtggcaacagctgcaccaccgtccccgtcgctctgccttcctcttctgcagcctctgctcttctgattacctccctcccccgtcctttggtgatttttttttttcaagaaggagagggcggggtaggtgtccgttccctcccctcttccccctcctttgccttcttggtttgaatttcctcccccggcgttgcactggcacacagtgcaagaggcaatacccgcacggagggagaacgaaggctgagactcccctgccgctccaagcccggaagaactggagcctggaggggggtgaggggagaagaggaagcgggaggggcttggcttcctcgcgtatttgaggacagcccatctcccttcaagaaccctacggagagtcggactgcatctccgcagcgagctcttggagcgccgccggccgggaggcgaaggatgcaggcggctccgcgcgccggctgcggggcagcgctcctgctgtggattgtcagcagctgcctctgcagagcctggacggctccctccacgtcccaaaaatgtgatgagccacttgtctctggactcccccatgtggctttcagcagctcctcctccatctctggtagctattctcccggctatgccaagataaacaagagaggaggtgctgggggatggtctccatcagacagcgaccattatcaatggcttcaggttgactttggcaatcggaagcagatcagtgccattgcaacccaaggaaggtatagcagctcagattgggtgacccaataccggatgctctacagcgacacagggagaaactggaaaccctatcatcaagatgggaatatctgggcatttcccggaaacattaactctgacggtgtggtccggcacgaattacagcatccgattattgcccgctatgtgcgcatagtgcctctggattggaatggagaaggtcgcattggactcagaattgaagtttatggctgttcttactgggctgatgttatcaactttgatggccatgttgtattaccatatagattcagaaacaagaagatgaaaacactgaaagatgtcattgccttgaactttaagacgtctgaaagtgaaggagtaatcctgcacggagaaggacagcaaggagattacattaccttggaactgaaaaaagccaagctggtcctcagtttaaacttaggaagcaaccagcttggccccatatatggccacacatcagtgatgacaggaagtttgctggatgaccaccactggcactctgtggtcattgagcgccaggggcggagcattaacctcactctggacaggagcatgcagcacttccgtaccaatggagagtttgactacctggacttggactatgagataacctttggaggcatccctttctctggcaagcccagctccagcagtagaaagaatttcaaaggctgcatggaaagcatcaactacaatggcgtcaacattactgatcttgccagaaggaagaaattagagccctcaaatgtgggaaatttgagcttttcttgtgtggaaccctatacggtgcctgtctttttcaacgctacaagttacctggaggtgcccggacggcttaaccaggacctgttctcagtcagtttccagtttaggacatggaaccccaatggtctcctggtcttcagtcactttgcggataatttgggcaatgtggagattgacctcactgaaagcaaagtgggtgttcacatcaacatcacacagaccaagatgagccaaatcgatatttcctcaggttctgggttgaatgatggacagtggcacgaggttcgcttcctagccaaggaaaattttgctattctcaccatcgatggagatgaagcatcagcagttcgaactaatagtccccttcaagttaaaactggcgagaagtacttttttggaggttttctgaaccagatgaataactcaagtcactctgtccttcagccttcattccaaggatgcatgcagctcattcaagtggacgatcaacttgtaaatttatacgaagtggcacaaaggaagccgggaagtttcgcgaatgtcagcattgacatgtgtgcgatcatagacagatgtgtgcccaatcactgtgagcatggtggaaagtgctcgcaaacatgggacagcttcaaatgcacttgtgatgagacaggatacagtggggccacctgccacaactctatctacgagccttcctgtgaagcctacaaacacctaggacagacatcaaattattactggatagatcctgatggcagcggacctctggggcctctgaaagtttactgcaacatgacagaggacaaagtgtggaccatagtgtctcatgacttgcagatgcagacgcctgtggtcggctacaacccagaaaaatactcagtgacacagctcgtttacagcgcctccatggaccagataagtgccatcactgacagtgccgagtactgcgagcagtatgtctcctatttctgcaagatgtcaagattgttgaacaccccagatggaagcccttacacttggtgggttggcaaagccaacgagaagcactactactggggaggctctgggcctggaatccagaaatgtgcctgcggcatcgaacgcaactgcacagatcccaagtactactgtaactgcgacgcggactacaagcaatggaggaaggatgctggtttcttatcatacaaagatcacctgccagtgagccaagtggtggttggagatactgaccgtcaaggctcagaagccaaattgagcgtaggtcctctgcgctgccaaggagacaggaattattggaatgccgcctctttcccaaacccatcctcctacctgcacttctctactttccaaggggaaactagcgctgacatttctttctacttcaaaacattaaccccctggggagtgtttcttgaaaatatgggaaaggaagatttcatcaagctggagctgaagtctgccacagaagtgtccttttcatttgatgtgggaaatgggccagtagagattgtagtgaggtcaccaacccctctcaacgatgaccagtggcaccgggtcactgcagagaggaatgtcaagcaggccagcctacaggtggaccggctaccgcagcagatccgcaaggccccaacagaaggccacacccgcctggagctctacagccagttatttgtgggtggtgctgggggccagcagggcttcctgggctgcatccgctccttgaggatgaatggggtgacacttgacctggaggaaagagcaaaggtcacatctgggttcatatccggatgctcgggccattgcaccagctatggaacaaactgtgaaaatggaggcaaatgcctagagagataccacggttactcctgcgattgctctaatactgcatatgatggaacattttgcaacaaagatgttggtgcattttttgaagaagggatgtggctacgatataactttcaggcaccagcaacaaatgccagagactccagcagcagagtagacaacgctcccgaccagcagaactcccacccggacctggcacaggaggagatccgcttcagcttcagcaccaccaaggcgccctgcattctcctctacatcagctccttcaccacagacttcttggcagtcctcgtcaaacccactggaagcttacagattcgatacaacctgggtggcacccgagagccatacaatattgacgtagaccacaggaacatggccaatggacagccccacagtgtcaacatcacccgccacgagaagaccatctttctcaagctcgatcattatccttctgtgagttaccatctgccaagttcatccgacaccctcttcaattctcccaagtcgctctttctgggaaaagttatagaaacagggaaaattgaccaagagattcacaaatacaacaccccaggattcactggttgcctctccagagtccagttcaaccagatcgcccctctcaaggccgccttgaggcagacaaacgcctcggctcacgtccacatccagggcgagctggtggagtccaactgcggggcctcgccgctgaccctctcccccatgtcgtccgccaccgacccctggcacctggatcacctggattcagccagtgcggattttccatataatccaggacaaggccaagctataagaaatggagtcaacagaaactcggctatcattggaggcgtcattgctgtggtgattttcaccatcctgtgcaccctggtcttcctgatccggtacatgttccgccacaagggcacctaccataccaacgaagcaaagggggcggagtcggcagagagcgcggacgccgccatcatgaacaacgaccccaacttcacagagaccattgatgaaagcaaaaaggaatggctcatttgaggggtggctacttggctatgggatagggaggagggaattactagggaggagagaaagggacaaaagcaccctgcttcatactcttgagcacatccttaaaatatcagcacaagttgggggaggcaggcaatggaatataatggaatattcttgagactgatcacaaaaaaaaaaacctttttaatatttctttatagctgagttttcccttctgtatcaaaacaaaataatacaaaaaatgcttttagagtttaagcaatggttgaaatttgtaggtactatctgtcttattttgtgtgtgtttagaggtgttctaaagacccgtggtaacagggcaagttttctacgtttttaagagcccttagaacgtgggtattttttttcttgagaaaagctaatgcacctacagatggcccccaacattctcttccttttgcttctagtcaaccttaatgggctgttacagaaactagttcgtgtttatatactatttcctttgatgtcctataagtcggaaaagaaaggggcaaagagaacctattatttgccagtttttaagcagagctcaatctatgccagctctctggcatctggggttcctgactgataccagcagttgaaggaagagagtgcatggcacctggtgtgtaacgacacaatcagcacaactggagagaggcattaaagaaccagggaaggtagtttgatttttcattgaattctacaagctaatattgttccacgtatgtagtcttagaccaatagctgtaactatcagctgcaataccatggtgaccagctgttacaaaagattttttcctgttttatctgaaacatactggatttatatatgtataagcgcctcaatggggaattagagccagatgttatgatttgtttgctctttttcttttatagtttagttatagcaaaaatatggataatttctagtgaatgcataaattaggttgcgtttcttattttgctttaaatctctggtagtttttccacccctgtgacacaatcctaatagacagtgtcctgtaaatggacacaacacaataaagtcaagttattattgctgttactctggatgatatggaaaacactgccatattttaaatcaactactccacgtgtttttccatccaatcacactgctgtgattcagggatctttcttctaagacggacacatttgaacctcaggttcatcacaaacctggtacctgttgcttcccagaggatggagaagtgtagttaatcacacctcttagtttaatctgaaatcttgacccagttatttaacaaataaatacctcattgattatatttaaaagtaatacacttcctgtaaacaaatggggacaatgcatccaaaaaatctttttaaacagattacacaaaaattatttccagaaaggctaccatttatcatcattatatttcaagcctcttatacttaataagcactttctaaaaagtcttgagatcccaccattctgaggaattcaatatgatcactttttccttctttgcctgggagaggttaagaggaggtttcgaaggtatagatgctattgttctgatggcccggctgaataaaatggaaattctagtttgttagaattatgcattctttttcaagattctcagtgtgcctaacttattggagcacatcagtttcttgggtaatggaaaacattacctagagttgccagtggcacattacaccagtacagagcacattccaaaggagacattggaccagttaattcccatacaagtcaaggtaacagaacaaaagggaatcctgatgcccttttaccattgctggttgagctcaggcactgtcatggacacccttaattttaaaaggttttaatcattcttctataaaatacatttaaaatggaaaaatacttaatatcactaaatatcagaacaatgtaacatttacaaatgacatattgaaagcaaaggctgttttatttagccaagatgattaccattaggagttactttatgtattgttgaaagcaaattttaaacatgatgttttagaagtgtttctgatttttaaacctggtttacaggtattacttctgcacttaccaaataatgccagatggaaatttattatttcttgcaattcccatgatagctctgttctttatgcattgtctcaacactttcccttttttcccaaaatgagtagagaattaaagccacccaaaacagcttctgctactaaaatgttctcatcctttctcctccctctccttttcctgccacaaaaggtgaaaaatgagatccaatcctctcaccaaaatttcaaacctaggacactggaatgactgcagggatcagtggttctcccatatcaccatcaattaagacatataggacactgtcttccttcaagagggttacaatgtggccatcagacaggaaaccaaacggtggataaagtattaagtaactaagtgccaaataaatgctggaaatcttgacctctccttgggattatgggtgtaacaaaaatccctacatctgtttatgaaggccatattcagtacattttaaatggtaaataatctgtttatgtgaagaaaaagaattaagtctttcttccaactctctccttggatagcctagcacagtgcagcctccataaccatgacattcccgcccaagctctcagtgcctaatcctgctttgtcattcacatctcacaaaatcttgacatcttacattccaatacattatcaagcaagcacaagtatgctggtagtagcctctttaaataatatgtatagacaacaacaacgacaaaaaatagactgttttaaagtttcagggaaagttggtggctgatttaaagttgtgcaggaaacatcttctgtgtatgaagcaaatgtcgatgttttgaaaaaagctaggagatgactttgaatgaatgcaaggttagtgagatcctaagctctcaaaatagcatattccctagagctcaagaaagctggtccaggaggttgaaaaagctattttgttgttaaattattttctggcccttcttaatatttaaaaatgtatttccccttgtggctttcaaccacctgctcaaaaaaagagacttgttacatgaaagttttcattaaagagctgaaaacaagaatttagagagccattcctagaaaatgtcctactgccctgcatttgacaaacaagcatcctttactaacaagagcaggaattcagaggcacaagaaaaagcattggcatgagccaaagagtctgtcttaatgttacttttgaaaatctgctgagcggccaccatatgcaggctgagagctgggcacaggcgaagccattggaagcacttcaggaacaagcacacagctgtgggacttgaacatgcaagtgttcaggttgtgtcaagaagcttttctttccttctatgatggaatctgttcttttctatcctacttttttctctcttcctctcctcaccacattataccctgctcttacgcagtaaacgttttaatggcccgtttatgtctcatgcctccaaacaacactgaatttgaaaccccccattttttcttttcaccaccctgttgagcaattttcccaaaaaaagggcagcaattattaaattgaattcaagtaagccagccaaagataggtcctaaattgctagtcccagtagaaccacctgatcctaaaccagtgcgaaacaaacagtaacaatgtccccagctgacttcagctaagaaccaatggctcctacccccgccccgcttttttttgttgttttttgttttgttttgagacggagtcttgctctgtcccccaggctggagtgcactggcgcaatctcgggctcactgcaacctcctcctcctcccacattgaggcgattctcctgcctcagcctcccaagtagctgggattacaggcacccgccatcacacccagctaatttttttttttttttgtattattagtagaagccaggtttcaccatgttggccagggtggtctcgaactcctgacctcaagtgatccgtccacctcggccttgcaaattgctgggattacaggtgtgagccaccgtgccgagccagccccattttttaaatgatgttttggttaagagtggaccatgagaattagctgacagcatcccctttctctctccctgccttggtgggaccctccctgtgtgaccttggtcaagtcctcgaacttttgtcccgtatttaagatggagctgttttacctacttcataagacagttgcgaggtgccattgattcttgactgcaaaataccttgaaacccttatataaagactgaagtcaacggagcctagtgaaagacttactttgtggcttgtggttgaaagtcacatcaaaagacaaatgtggccacgttcaggaattggagacttactggcatggctctacagctgctcagttattaatcatgcagactaacctgtcaacactgggagatgcaacatagcaaaaggacagagaaattagaattttttgtgcagaaagccctaaattcccacctgaatgtaacttacagctcccttacctactctcacacatgccctcaaacatgctagattggcttatacataggccaacacaaaatacaaacgtgacgtgttcatgtagcctagtggctatatgcctattctccatgtaccctgcatggtagtgctgcaaactttaaagtacatttctttcacagcagtattttttttcataagtggcatataaatgtcattcaatgaaatggggaaatcacgttgagaagttggtctgtcatctcccattgagcaaagactggcaggagataataaaaataaatatgggcacacatgtattaatatacagcacgcatttacaagtttattttccagataaaattgtgctataagaacagctctaccaagacagtctgcaccatttccaagtctcagttaatttacagcaactgctgctttcggagatggctgtgaaaatatggaagttcctctcaagtaggccaagaaacagttctagattttactaagttttattttgtcaggttttttaaattttttcagtgagcgtggtgactgcagaggttagtgctgtgaaaagctgggctaaatattctttctgtaaagtcaaacaggattccatcccctgtgaaataacacaaaatttcactctctaaaagcaacagcatgtaaactagaatgaaagaaggaaattatgtacgtatgcctaatattctttgtgaatgtctttcatttaactaaaattatattagaaaccagattgataaataaaaaattcaaagtagttttaattatcctaaaa

SEQ ID NO: 6520 - protein, 1331 aa, Homo sapiens; identical to SEQ ID NO: 929

SEQ ID NO: 6521 - DNA, 2143 bp, Homo sapiens
atagggaccgtttccctcatactgttctagtgggagtgaataagtctcacaacgtctgatggtttgataaagggaaacccgtttctcttggctctcattctttctcttgctgccgccatgttcaaggtcccctccaccttccgccatgatggtgaggcctccctagccatgaggaattatcactggaccagaggacaacttgtaaaaggatttcagaatggcataatgggaagaaacacgctaataaaacgatgagacatgaagagaatttaaaaatatacaatgatcagctgtgaagaattggccagacaagccttgattttactcattgggtgtccagtgtccatccagtcctcatataattcaagggaagcgactctcttttctctgcaagggagccagtcctgaactatccaagtcaaccgaggcaatcccatttccttgccgctacttggatgaaacatggggatgtgactcagctacagcgagagaggatgagaggcgtgctgagaacacctttgggaaggccgccgattcctgagaagaacatggcggcagagcagatggcctcaccctgcctctggaaattgcagtgtgtgtctgtgagaactgaaagggtgtggccatcttgaccccaagatgggagccaggctcaggacacgcagtgatgccggaatggctcccaaatggctcccaaagcatcaggtcagtgggtcaactaattcctgagatctgttccaccctgacacttccatcatataggaaactgaatttccttgctttttgaatcagtttgagtcagatcagaatttttagtaagaactaaagattaaaccttccttaaatgtatattttaaatttcctcttaaaaattatgacaattgtgatctttcaaagcacagaagaggaggaattctctcctccatttgtctaggggcgaggaagtaaatcgcacggcagagactgctagctgttcaatgaaagcgcaagcactcaatgaaaccattgtatttcctgcttgaacagaccaatgaataagtgatcaaggaccattctaaactgcagtcttccagttctataaacattattattcggatccaaaaaactattagctagagcctattgatcctctagctccctccttttcagagcaccagcatacaaatcgtctcatttgatttccttctagaagcacaagctgggcgtggaagactgtacagatgtagcaggaaggtatgaatggccaacggcacaagatgaaactgaaagtgacattcctgttttaatacttgctctttgaccaagcctttaagattaatgaatctcggccgggtgcggtggctcacgcctgtaatcccagcactttcagaggctgaggtgggcagatcacaaggtcaggagatcaatatcatcctggccaatatggtgaaaccccatctctattaaaaatacacacacacacacacacacacacacacacacacacacacacacaaattagccgggtgtggtggtgcgcctgtagtcccagctactcaggagtctgagggaggagaatcgcttgaacccgggaggcggagaaggtggtgagctgagattgcgccactgcactccagcctggcgacagagtgagactctgtctcagaaaaaaaaaaaaaaaagaatctcttagtttttaagtgatgagtggttgggattgccagttttggttttggcgtagactcaagagacaaaaatacaagctggcaggtcctatagtgaaatttggagtgaatcctgtagcagctgatgaggaactatgagacagtggcctgtgttgctggatagaggcatcccactgtccactcgttggtgtatgttctcataaattcacaatcattctttcaaatgtggctcaacaatccgatactaaggagcactacctgaaatcacaaagacagtttctttgtgaatattgcaccttcttcatagctgttggttcttagcactgttgtgtgttcaatctttcattagattatatactccttaagacaggatcaggagttatattttgttgaatatacactatgttgatgtcatatgaaataaaatttaagtgtatatttgtgtaccatatgaggagaaataaacaatattatgtgtg

SEQ ID NO: 6522 - protein, 45 aa, Homo sapiens
MFKVPSTFRHDGEASLAMRNYHWTRGQLVKGFQNGIMGRNTLIKR

SEQ ID NO: 6523 - DNA, 1305 bp, Homo sapiens
ccaccaccagcaaacaaggggcagcgtggaggagtggacacaatgtctgagggagcttaccagcgcctctgggagtcctcccacgcgaccctgcaggagctgctggaccaagagcagcttctgctcgaacctgcgcccgaccgggagcggcagtccttccagtacaggctcgcatcgctctacctgcactacctggggctgctgcgccgcttcgacaccgtctatgaccagatggtgcagccgcagaagcggcggctgctgcgacgcctgctggacggcgtggcgggccgcgtgctggagctcaaggacgagctggtgcgcgccgacctgtgtgagaaccactgcctggaccgcgtgctgcaggatttcaagctcaccccagctgacctggaggttccaatccccaaatacttcctgctggagcagtccaccactgtgcgggagcgagggctgatactggccgagatcctgtccagactggagccagtgtcctcccagaagagctttacaggaatgcaccggactgaggccataattctagtgcaaaaggcagagcgggcgaggcaaggccggcttcgagccaccttcatgcgagagattcgaagagatgaggagcaggatgggaggattcgggaggatggatggcacaagttcagtcagggccaagcagctgtcaccatacagaaggtgtggaaaggctatctgcagaggaaacgcactcagcaggaccggcgaatggagatggagttcattggcatgctcccctcacccaaccaggtagagcacctgagcatcatctcccagccatgcctcgtggaggatgtccagaggctccgccagatggagaaagaggaggagttccgggcagcaatggtgaaggcccatgattctctggtagagacagaggggcctgacatgaaggagaaaatgaaggagcaaatccgacagtggtttatcgagtgccatgaccttactggccggttccctgattatccagatgcgtcttcaggtggatcctactcaatctttgcagacaaaacgccagaacaggaagtggatgcggtgttgcaagtgttgccatccaaatgtatccctatgatctgtgccgggcatgaagaatacttaaatacatggaagaaccggtgtgagagcatacaccccagtcagaattatgactccgagaccctccgggaggagaagaggaaagaggtggagctggagatccggatacaggtggatgagctgatgcgtcaggagctgaggaagctccgtctggctgtggacaaggaggaaaaagacccctga

SEQ ID NO: 6524 - protein, 420 aa, Homo sapiens
MSEGAYQRLWESSHATLQELLDQEQLLLEPAPDRERQSFQYRLASLYLHYLGLLRRFDTVYDQMVQPQKRRLLRRLLDGVAGRVLELKDELVRADLCENHCLDRVLQDFKLTPADLEVPIPKYFLLEQSTTVRERGLILAEILSRLEPVSSQKSFTGMHRTEAIILVQKAERARQGRLRATFMREIRRDEEQDGRIREDGWHKFSQGQAAVTIQKVWKGYLQRKRTQQDRRMEMEFIGMLPSPNQVEHLSIISQPCLVEDVQRLRQMEKEEEFRAAMVKAHDSLVETEGPDMKEKMKEQIRQWFIECHDLTGRFPDYPDASSGGSYSIFADKTPEQEVDAVLQVLPSKCIPMICAGHEEYLNTWKNRCESIHPSQNYDSETLREEKRKEVELEIRIQVDELMRQELRKLRLAVDKEEKDP

SEQ ID NO: 6525 - DNA, 694 bp, Homo sapiens
agtccaggctcaggcgttttgctcatctgccttcagtccaagcctcattatactccgctcacactgattccactctacctttcacaccgtttctttctctcattcttcccaattaaaggatacatcctacaaggatacatcctacaatgggtatatgaaggatacccttcatatacccatttgtaccaagaagcggcctctagctactcgagccctcctcaccatgggtaccaccacttttagccccttcacccttctctggtggtttgatgtgaaccagtcttgtctcttcacctccactggggcgcagtgggggagggagcttgcattccttctggagtctgcagcactctgagctgtgctggcacctgtgtgctccgtgattacaggctggtgggctggagttgcctgaacttttaagaagtgcaccctgacattggcatctctgccaaggccatgagcatcatgaactcgtttgtaaacgacgtgtttgagcagctggcgtgtgaggctgcccggctggcccagtactcgggccggaccaccctgacatcccgagaagtccagacggctgtgcgtctgctgctgcctggggagctggccaagcacgctgtgtctgagggcaccaaggctgtcaccaagtacaccagctccaagtgacccagggcctgacaaaaataaagggtgaactgtt

SEQ ID NO: 6526 - protein, 67 aa, Homo sapiens
MSIMNSFVNDVFEQLACEAARLAQYSGRTTLTSREVQTAVRLLLPGELAKHAVSEGTKAVTKYTSSK

SEQ ID NO: 6527 - DNA, 2599 bp, Homo sapiens
gcctgagtcggttaggtagctctaaaaactcgtaactccacaacagctcaatggattttcgagaggtggggtaaagcctgaaggctcagccggtttatccaacgagcaatctgggatttgcagtttccagcgcccgaagtgcgcccgctagcagagagctcttggactctaatcccgccccctccccgagcctcgcgcatcctgatggcgtcacgcggccccgcgaggtctgtgggatacatagtagtcctcaaggcgggtctcactcttggccgctgcaacttgaggactacacttccaaggaggcagcgcggcgcgccgagaaccacccgaggccgtgattggctggtgagccggccgcacgcggaggatcctaaggagcagctctgttgcgacataggccgagcagcgaggcccagctccctgaaacaacagtaacctacccctgtgggtcatcatcatgccctccgacctggccaagaagaaggcagccaaaaagaaggaggctgccaaagctcgacagcggcccagaaaaggacatgaagaaaatggagatgttgtcacagaaccacaggtggcagagaagaatgaggccaatggcagagagaccacagaagtagatttgctgaccaaggagctagaggactttgagatgaagaaagctgctgctcgagctgtcactggcgtcctggcctctcaccccaacagtactgatgttcacatcatcaacctctcacttacctttcatggtcaagagctgctcagtgacaccaaactggaattaaactcaggccgtcgttatggcctcattggtttaaatggaattggaaagtccatgctgctctctgctattgggaagcgtgaagtgcccatccctgagcacatcgacatctaccatctgactcgagagatgccccctagtgacaagacacccttgcattgtgtgatggaagtcgacacagagcgggccatgctggagaaagaggcagagcggctggctcatgaggatgcggagtgtgagaagctcatggagctctacgagcgcctggaggagctggatgccgacaaggcagagatgagggcctcgcggatcttgcatggactgggtttcacacctgccatgcagcgcaagaagctaaaagacttcagtgggggctggaggatgagggttgcccttgccagagccctctttattcggcccttcatgctgctcctggatgagcctaccaaccacctggacctagatgcttgcgtgtggttggaagaagaactaaaaacttttaagcgcatcttggtcctcgtctcccattcccaggattttctgaatggtgtctgtaccaatatcattcacatgcacaacaagaaactgaagtattatacgggtaattatgatcagtacgtgaagacgcggctagagctggaggagaaccagatgaagaggtttcactgggagcaagatcagattgcacacatgaagaactacattgcgaggtttggtcatggcagtgccaagctggcccggcaggcccagagcaaggagaagacgctacagaaaatgatggcatcaggactgacagagagggtcgtgagcgataagacactgtcattttatttcccaccatgtggcaagatccctccacctgtcattatggtgcaaaatgtgagcttcaagtatacaaaagatgggccttgcatctacaataatctagaatttggaattgaccttgacacacgagtggctctggtagggcccaatggagcagggaagtcaactcttctgaagctgctaactggagagctactacccacagatggcatgatccgaaaacactctcatgtcaagatagggcgttaccatcagcatttacaagagcagctggacttagatctctcacctttggagtacatgatgaagtgctacccagagatcaaggagaaggaagaaatgaggaagatcattgggcgatacggtctcactgggaaacaacaggtgagcccaatccggaacttgtcagacgggcagaagtgccgagtgtgtctggcctggctggcctggcagaacccccacatgctcttcctggatgaacccaccaatcacctggatatcgagaccatcgacgccctggcagatgccatcaatgagtttgagggtggtatgatgctggtcagccatgacttcagactcattcagcaggttgcacaggaaatttgggtctgtgagaagcagacaatcaccaagtggcctggagacatcctggcttacaaggagcacctcaagtccaagctggtggatgaggagccccagctcaccaagaggacccacaacgtgtgcaccctgacattggcatctctgccaaggccatgagcatcatgaactcgtttgtaaacgacgtgtttgagcagctggcgtgtgaggctgcccggctggcccagtactcgggccggaccaccctgacatcccgagaagtccagacggctgtgcgtctgctgctgcctggggagctggccaagcacgctgtgtctgagggcaccaaggctgtcaccaagtacaccagctccaagtgacccagggcctgacaaaaataaagggtgaactgtt

SEQ ID NO: 6528 - protein, 634 aa, Homo sapiens; identical to SEQ ID NO: 931

SEQ ID NO: 6529 - DNA, 4902 bp, Homo sapiens
gcctgagtcggttaggtagctctaaaaactcgtaactccacaacagctcaatggattttcgagaggtggggtaaagcctgaaggctcagccggtttatccaacgagcaatctgggatttgcagtttccagcgcccgaagtgcgcccgctagcagagagctcttggactctaatcccgccccctccccgagcctcgcgcatcctgatggcgtcacgcggccccgcgaggtctgtgggatacatagtagtcctcaaggcgggtctcactcttggccgctgcaacttgaggactacacttccaaggaggcagcgcggcgcgccgagaaccacccgaggccgtgattggctggtgagccggccgcacgcggaggatcctaaggagcagctctgttgcgacataggccgagcagcgaggcccagctccctgaaacaacagtaacctacccctgtgggtcatcatcatgccctccgacctggccaagaagaaggcagccaaaaagaaggaggctgccaaagctcgacagcggcccagaaaaggacatgaagaaaatggagatgttgtcacagaaccacaggtggcagagaagaatgaggccaatggcagagagaccacagaagtagatttgctgaccaaggagctagaggactttgagatgaagaaagctgctgctcgagctgtcactggcgtcctggcctctcaccccaacagtactgatgttcacatcatcaacctctcacttacctttcatggtcaagagctgctcagtgacaccaaactggaattaaactcaggccgtcgttatggcctcattggtttaaatggaattggaaagtccatgctgctctctgctattgggaagcgtgaagtgcccatccctgagcacatcgacatctaccatctgactcgagagatgccccctagtgacaagacacccttgcattgtgtgatggaagtcgacacagagcgggccatgctggagaaagaggcagagcggctggctcatgaggatgcggagtgtgagaagctcatggagctctacgagcgcctggaggagctggatgccgacaaggcagagatgagggcctcgcggatcttgcatggactgggtttcacacctgccatgcagcgcaagaagctaaaagacttcagtgggggctggaggatgagggttgcccttgccagagccctctttattcggcccttcatgctgctcctggatgagcctaccaaccacctggacctagatgcttgcgtgtggttggaagaagaactaaaaacttttaagcgcatcttggtcctcgtctcccattcccaggattttctgaatggtgtctgtaccaatatcattcacatgcacaacaagaaactgaagtattatacgggtaattatgatcagtacgtgaagacgcggctagagctggaggagaaccagatgaagaggtttcactgggagcaagatcagattgcacacatgaagaactacattgcgaggtttggtcatggcagtgccaagctggcccggcaggcccagagcaaggagaagacgctacagaaaatgatggcatcaggactgacagagagggtcgtgagcgataagacactgtcattttatttcccaccatgtggcaagatccctccacctgtcattatggtgcaaaatgtgagcttcaagtatacaaaagatgggccttgcatctacaataatctagaatttggaattgaccttgacacacgagtggctctggtagggcccaatggagcagggaagtcaactcttctgaagctgctaactggagagctactacccacagatggcatgatccgaaaacactctcatgtcaagatagggcgttaccatcagcatttacaagagcagctggacttagatctctcacctttggagtacatgatgaagtgctacccagagatcaaggagaaggaagaaatgaggaagatcattgggcgatacggtctcactgggaaacaacaggtgagcccaatccggaacttgtcagacgggcagaagtgccgagtgtgtctggcctggctggcctggcagaacccccacatgctcttcctggatgaacccaccaatcacctggatatcgagaccatcgacgccctggcagatgccatcaatgagtttgagggtggtatgatgctggtcagccatgacttcagactcattcagcaggttgcacaggaaatttgggtctgtgagaagcagacaatcaccaagtggcctggagacatcctggcttacaaggagcacctcaagtccaagctggtggatgaggagccccagctcaccaagaggacccacaacgtgtgagccctctacctgggttcgggtcaggagctccatctgggaactaacagctgctaacctgaccagccgctcaggacaggaccctggggctacactcctgcattgctgcaatactgctcccccagcctctcccctgcccctcaacctgccttagctgcactctcttacctacagctggacagtacctgtctgtttcctgtcctccttccagttacatctgtccatgtctggactcggctggccgttccctccagccccttgctggttatcttactctgagtgtgatgcagtcagaggcacctgcgggttagcccaggggcccaagccctggatttggcctgcggaggagcttaggatcctcgttttctgggttttggtgatgttggaggagtaccccccagcccaccgccccgattcctttttgcttctggtttggagctccggaccaggaccttcgtcctggtcagtttttaaataattatttagcagtgtaacttttagacctgcgtgacatctacaaagcgcccaataaagaaagaggaagccacggtccctaccttccttctcgggtctctggggccttctcctccctgcagtgccaacatgcactgcccacagcaggagctggatccagcgtcagtgtgtcgatgggaactgaagactagtccataggagctggaagaactttgtccctttacttctgatttgaaattgtaccttttctcaggcctgtgattcacagactttaacatgaatcagaatcacctggagggctcatgcaatcagattgccagatctcgcctcagcgtttctggttcaataggttttgggggagaccaagaacgttaacatttctagcaagtttccaggtgatgctgttgttgctggtctagagactattttgagaaccactgtccaggagcgtggttttctgattgtgatctgaggttctgccccaactgcacagcagttgggctgcttgttaaaaatgcaggccaggtgcggtggctcacacctgtaatcccagcgctttgggaggctgaggcaggtggatcacttgagctcaggagttcaagaccagcttgggaaacatggcaaaacccgtctttatgtgcctggaatcccacctgctcaggtggctagggtggatggatcgcttgagcccaggaggtggaggttgcagtgagctgagattgcaccactgcattccagcctggatgacagagcaaaaccctgtctcaaaaaaatgcagactggccaggcacagtggctcacacctgtaatccgactgtaagctcatcaccttgggaggccactgtaggaggatcaattgagcctagaagttcaagaccagcctgggcaaagtagggagaccccttctctacaaatagtaataaaatgaaccgggcatagtagcatgtgcctgcggtcccagctgctctgataagaggaggctcacttgagcccaggaggttgaggctgcagtgagcagagcgtgccgctacactccagcctgatgacagaccgagacactgtctcaaaaaaataaaaaaattcagattgctgagcatcagacctattgattaatcgcatttggtagaatgagagaggtgcagagatggccaggagtttgcattttcacaccaacgtctgtgaacctctcttcctattgggatacaggaaattttgtatttttacctgtccacagccatagttatcatcactgttgaattcacttccagcccagggctctgcataccttatctgggtcttttgaacttcaatagcatttcaccagtggccatccttcctggtgtggattcatcactctgcctctgaaatcagccatccctatgggaagacacagccatgatttttcagtactcataatacagccaggactggcgggagcaactgtcccagatggtgcttaaaccccttaggagctcatgatcttcttggaaagccagtaagacagaaccatacaggacacaaattagatgctaaattgtgatttagataggagacagaagtattcaaaaaggagggaaatttcttgtgagtagctgcccagaaaggtggaattggtgtgctctcacttgaaaaatgagtaggatcttctcagatggccacaaagtccaggagctgccctgggcaacagggacaggagcctcccgtgagacactgcagctgagacagatgggagtcctctgaccccagagggtactggcttgactgctttatgccttaagtggggcctggagcaaaatggcccaggttagtctgtcctgagagtccagagccttggttcaggggagaatggcatctggagagtgggctgctgggataatggggacagtgagggacagagcccttgatacttaaggaagtgctggatattgctaagaattcaggtagtctcgggatctccagagtctccatactaggacaggagatcttcagaacctggaggaatggaaatagtctagtcagcttatttgtcaagaaaaatgtcaaccttggtaatttaaataatgctttaaaagtccacaaaatacatatttctaaaatta

SEQ ID NO: 6530 - protein, 623 aa, Homo sapiens; identical to SEQ ID NO: 933

SEQ ID NO: 6531 - DNA, 1805 bp, Homo sapiens
ttcaggcctcaagagactagtgggtctctctgagcctcactttttataaatggcgatgctaatggaggagtcagggagaaatgagggagagatgagctgtgctgtttggcggggataatgccaagttatatgtaggtcacggttctactcaggtgagcccaatccggaacttgtcagacgggcagaagtgccgagtgtgtctggcctggctggcctggcagaacccccacatgctcttcctggatgaacccaccaatcacctggatatcgagaccatcgacgccctggcagatgccatcaatgagtttgagggtggtatgatgctggtcagccatgacttcagactcattcagcaggttgcacaggaaatttgggtctgtgagaagcagacaatcaccaagtggcctggagacatcctggcttacaaggagcacctcaagtccaagctggtggatgaggagccccagctcaccaagaggacccacaacgtgtgagccctctacctgggttcgggtcaggagctccatctgggaactaacagctgctaacctgaccagccgctcaggacaggaccctggggctacactcctgcattgctgcaatactgctcccccagcctctcccctgcccctcaacctgccttagctgcactctcttacctacagctggacagtacctgtctgtttcctgtcctccttccagttacatctgtccatgtctggactcggctggccgttccctccagccccttgctggttatcttactctgagtgtgatgcagtcagaggcacctgcgggttagcccaggggcccaagccctggatttggcctgcggaggagcttaggatcctcgttttctgggttttggtgatgttggaggagtaccccccagcccaccgccccgattcctttttgcttctggtttggagctccggaccaggaccttcgtcctggtcagtttttaaataattatttagcagtgtaacttttagacctgcgtgacatctacaaagcgcccaataaagaaagaggaagccacggtccctaccttccttctcgggtctctggggccttctcctccctgcagtgccaacatgcactgcccacagcaggagctggatccagcgtcagtgtgtcgatgggaactgaagactagtccataggagctggaagaactttgtccctttacttctgatttgaaattgtaccttttctcaggcctgtgattcacagactttaacatgaatcagaatcacctggagggctcatgcaatcagattgccagatctcgcctcagcgtttctggttcaataggttttgggggagaccaagaacgttaacatttctagcaagtttccaggtgatgctgttgttgctggtctagagactattttgagaaccactgtccaggagcgtggttttctgattgtgatctgaggttctgccccaactgcacagcagttgggctgcttgttaaaaatgcaggccaggtgcggtggctcacacctgtaatcccagcgctttgggaggctgaggcaggtggatcacttgagctcaggagttcaagaccagcttgggaaacatggcaaaacccgtctttatgtgcctggaatcccacctgctcaggtggctagggtggatggatcgcttgagcccaggaggtggaggttgcagtgagctgagattgcaccactgcattccagcctggatgacagagcaaaaccctgtctcaaaaaaatgcagactggccaggcacagtggctcacacctgtaatccgactgtaagctcatcaccttgggaggcc

SEQ ID NO: 6532 - protein, 103 aa, Homo sapiens
MTSDSFSRLHRKFGSVRSRQSPSGLETSWLTRSTSSPSWWMRSPSSPRGPTTCEPSTWVRVRSSIWELTAANLTSRSGQDPGATLLHCCNTAPPASPLPLNLP

SEQ ID NO: 6533 - DNA, 1266 bp, Homo sapiens
gcctgagtcggttaggtagctctaaaaactcgtaactccacaacagctcaatggattttcgagaggtggggtaaagcctgaaggctcagccggtttatccaacgagcaatctgggatttgcagtttccagcgcccgaagtgcgcccgctagcagagagctcttggactctaatcccgccccctccccgagcctcgcgcatcctgatggcgtcacgcggccccgcgaggtctgtgggatacatagtagtcctcaaggcgggtctcactcttggccgctgcaacttgaggactacacttccaaggaggcagcgcggcgcgccgagaaccacccgaggccgtgattggctggtgagccggccgcacgcggaggatcctaaggagcagctctgttgcgacataggccgagcagcgaggcccagctccctgaaacaacagtaacctacccctgtgggtcatcatcatgccctccgacctggccaagaagaaggcagccaaaaagaaggaggctgccaaagctcgacagcggcccagaaaaggacatgaagaaaatggagatgttgtcacagaaccacaggtggcagagaagaatgaggccaatggcagagagaccacagaagtagatttgctgaccaaggagctagaggactttgagatgaagaaagctgctgctcgagctgtcactggcgtcctggcctctcaccccaacagtactgatgttcacatcatcaacctctcacttacctttcatggtcaagagctgctcagtgacaccaaactggaattaaactcaggccgtcgttatggcctcattggtttaaatggaattggaaagtccatgctgctctctgctattgggaagcgtgaagtgcccatccctgagcacatcgacatctaccatctgactcgagagatgccccctagtgacaagacacccttgcattgtgtgatggaagtcgacacagagcgggccatgctggagaaagaggcagagcggctggctcatgaggatgcggagtgtgagaagctcatggagctctacgagcgcctggaggagctggatgccgacaaggcagagatgagggcctcgcggatcttgcatggactgggtttcacacctgccatgcagcgcaagaagctaaaagacttcagtgggggctggaggatgagggttgcccttgccaggtgacagtgccaacatgcactgcccacagcaggagctggatccagcgtcagtgtgtcgatgggaactgaagactagtccatagg

SEQ ID NO: 6534 - protein, 241 aa, Homo sapiens
MPSDLAKKKAAKKKEAAKARQRPRKGHEENGDVVTEPQVAEKNEANGRETTEVDLLTKELEDFEMKKAAARAVTGVLASHPNSTDVHIINLSLTFHGQELLSDTKLELNSGRRYGLIGLNGIGKSMLLSAIGKREVPIPEHIDIYHLTREMPPSDKTPLHCVMEVDTERAMLEKEAERLAHEDAECEKLMELYERLEELDADKAEMRASRILHGLGFTPAMQRKKLKDFSGGWRMRVALAR

SEQ ID NO: 6535 - DNA, 2884 bp, Homo sapiens
gcctgagtcggttaggtagctctaaaaactcgtaactccacaacagctcaatggattttcgagaggtggggtaaagcctgaaggctcagccggtttatccaacgagcaatctgggatttgcagtttccagcgcccgaagtgcgcccgctagcagagagctcttggactctaatcccgccccctccccgagcctcgcgcatcctgatggcgtcacgcggccccgcgaggtctgtgggatacatagtagtcctcaaggcgggtctcactcttggccgctgcaacttgaggactacacttccaaggaggcagcgcggcgcgccgagaaccacccgaggccgtgattggctggtgagccggccgcacgcggaggatcctaaggagcagctctgttgcgacataggccgagcagcgaggcccagctccctgaaacaacagtaacctacccctgtgggtcatcatcatgccctccgacctggccaagaagaaggcagccaaaaagaaggaggctgccaaagctcgacagcggcccagaaaaggacatgaagaaaatggagatgttgtcacagaaccacaggtggcagagaagaatgaggccaatggcagagagaccacagaagtagatttgctgaccaaggagctagaggactttgagatgaagaaagctgctgctcgagctgtcactggcgtcctggcctctcaccccaacagtactgatgttcacatcatcaacctctcacttacctttcatggtcaagagctgctcagtgacaccaaactggaattaaactcaggccgtcgttatggcctcattggtttaaatggaattggaaagtccatgctgctctctgctattgggaagcgtgaagtgcccatccctgagcacatcgacatctaccatctgactcgagagatgccccctagtgacaagacacccttgcattgtgtgatggaagtcgacacagagcgggccatgctggagaaagaggcagagcggctggctcatgaggatgcggagtgtgagaagctcatggagctctacgagcgcctggaggagctggatgccgacaaggcagagatgagggcctcgcggatcttgcatggactgggtttcacacctgccatgcagcgcaagaagctaaaagacttcagtgggggctggaggatgagggttgcccttgccagagccctctttattcggcccttcatgctgctcctggatgagcctaccaaccacctggacctagatgcttgcgtgtggttggaagaagaactaaaaacttttaagcgcatcttggtcctcgtctcccattcccaggattttctgaatggtgtctgtaccaatatcattcacatgcacaacaagaaactgaagtattatacgggtaattatgatcagtacgtgaagacgcggctagagctggaggagaaccagatgaagaggtttcactgggagcaagatcagattgcacacatgaagaactacattgcgaggtttggtcatggcagtgccaagctggcccggcaggcccagagcaaggagaagacgctacagaaaatgatggcatcaggactgacagagagggtcgtgagcgataagacactgtcattttatttcccaccatgtggcaagatccctccacctgtcattatggtgcaaaatgtgagcttcaagtatacaaaagatgggccttgcatctacaataatctagaatttggaattgaccttgacacacgagtggctctggtagggcccaatggagcagggaagtcaactcttctgaagctgctaactggagagctactacccacagatggcatgatccgaaaacactctcatgtcaagatagggcgttaccatcagcatttacaagagcagctggacttagatctctcacctttggagtacatgatgaagtgctacccagagatcaaggagaaggaagaaatgaggaagatcattgggcgatacggtctcactgggaaacaacaggtgagcccaatccggaacttgtcagacgggcagaagtgccgagtgtgtctggcctggctggcctggcagaacccccacatgctcttcctggatgaacccaccaatcacctggatatcgagaccatcgacgccctggcagatgccatcaatgagtttgagggtggtatgatgctggtcagccatgacttcagactcattcagcaggttgcacaggaaatttgggtctgtgagaagcagacaatcaccaagtggcctggagacatcctggcttacaaggagcacctcaagtccaagctggtggatgaggagccccagctcaccaagaggacccacaacgtgtgagccctctacctgggttcgggtcaggagctccatctgggaactaacagctgctaacctgaccagccgctcaggacaggaccctggggctacactcctgcattgctgcaatactgctcccccagcctctcccctgcccctcaacctgccttagctgcactctcttacctacagctggacagtacctgtctgtttcctgtcctccttccagttacatctgtccatgtctggactcggctggccgttccctccagccccttgctggttatcttactctgagtgtgatgcagtcagaggcacctgcgggttagcccaggggcccaagccctggatttggcctgcggaggagcttaggatcctcgttttctgggttttggtgatgttggaggagtaccccccagcccaccgccccgattcctttttgcttctggtttggagctccggaccaggaccttcgtcctggtcagtttttaaataattatttagcagtgtaacttttagacctgcgtgacatctacaaagcgcccaataaagaaagaggaagccacggtccct

SEQ ID NO: 6536 - protein, 623 aa, Homo sapiens; identical to SEQ ID NO: 933

SEQ ID NO: 6537 - DNA, 4011 bp, Homo sapiens
gactgacaggcagcggaagaggaagctgcggacaggggctgtgaggtggcagcggctgcagcggcggagccggcgcctcagcgggcactggggtctgttcccccttccccgtccctgctccctgccaggcgcgtgcgggacgccgctcttggtccccacgcctccgccccgccccctcccgggacgccgggagaccccggccgtcctttatccggtgtccgccggcccccggccctgaaacccgggcctcctccccgagggccttgggcgtccctcctggtcctgcgctcgcggcctcgatgctgtctctggcgcggcctccgctcccgccgactggcctgagaacgaggtctgtgccccagtctcccagccgcgacctccgaccccgcctcgcagaacgacccgagctggtctcccgagcccccttctcagcagcccggtgacgtggccagtttatttctgttttgagacgaacggcgaagactcgcgtcgggtcttcgttctagggctagacttggtctctgatcgccgagaggtagcgcaggggctgtgggcccccggcaggggtcctgtcggaagctggccgcgcttctgtttgcgttcccaggaccctggcattgtctctagttgctgcttgtgctctctctttgcttttggtttgcttcatttggcccctggggccctggtaaaaccaggcaccgaatcgctcgcacacagagttccagtccccgcctgctgtctcctcagcagctggggttccgaggagaatgccctgcaagatggctccatcggccatggcgctcctgagaggctgtcagtgctgagtcaccgatctacctcattcgggtgggcagaacttatgtgtgccatgcgagtggctccagaccgctcctgagtgggaggaggggttcctgtagccgttgcgtcttctcaaacacggggagcagagtagaaagaggctctggccccttcccttgtgcccaccgggcctgccgcagtggctcagcagccccttcagtagcccgcctgaggaccgatgccagaggcaggcattcttccggaaaggcccactgaggcaggctccggctcctctggttggggctgttgttttgatggatcgtgtgcttttcccttacctcttatcacttgctgtcatctgttgacttaggcccagtctgcagatgtgtgtagtgttcctttttgggttagctttggcagtattgagttttacttcctcctctttttagtggaagacagaccataatcccagtgtgagtgaaattgattgtttcatttattaccgttttggctgggggttagttccgacaccttcacagttgaagagcaggcagaaggagttgtgaagacaggacaatcttcttggggatgctggtcctggaagccagcgggcctcgctctgtctttggcctcattgaccccaggttctctggttaaaactgaaagcctactactggcctggtgcccatcaatccattgatccttgaggctgtgcccctggggcacccacctggcagggcctaccaccatgcgactgagctccctgttggctctgctgcggccagcgcttcccctcatcttagggctgtctctggggtgcagcctgagcctcctgcgggtttcctggatccagggggagggagaagatccctgtgtcgaggctgtaggggagcgaggagggccacagaatccagattccagagctcggctagaccaaagtgatgaagacttcaaaccccggattgtcccctactacagggaccccaacaagccctacaagaaggtgctcaggactcggtacatccagacagagctgggctcccgtgagcggttgctggtggctgtcctgacctcccgagctacactgtccactttggccgtggctgtgaaccgtacggtggcccatcacttccctcggttactctacttcactgggcagcggggggcccgggctccagcagggatgcaggtggtgtctcatggggatgagcggcccgcctggctcatgtcagagaccctgcgccaccttcacacacactttggggccgactacgactggttcttcatcatgcaggatgacacatatgtgcaggccccccgcctggcagcccttgctggccacctcagcatcaaccaagacctgtacttaggccgggcagaggagttcattggcgcaggcgagcaggcccggtactgtcatgggggctttggctacctgttgtcacggagtctcctgcttcgtctgcggccacatctggatggctgccgaggagacattctcagtgcccgtcctgacgagtggcttggacgctgcctcattgactctctgggcgtcggctgtgtctcacagcaccaggggcagcagtatcgctcatttgaactggccaaaaatagggaccctgagaaggaagggagctcggctttcctgagtgccttcgccgtgcaccctgtctccgaaggtaccctcatgtaccggctccacaaacgcttcagcgctctggagttggagcgggcttacagtgaaatagaacaactgcaggctcagatccggaacctgaccgtgctgacccccgaaggggaggcagggctgagctggcccgttgggctccctgctcctttcacaccacactctcgctttgaggtgctgggctgggactacttcacagagcagcacaccttctcctgtgcagatggggctcccaagtgcccactacagggggctagcagggcggacgtgggtgatgcgttggagactgccctggagcagctcaatcggcgctatcagccccgcctgcgcttccagaagcagcgactgctcaacggctatcggcgcttcgacccagcacggggcatggagtacaccctggacctgctgttggaatgtgtgacacagcgtgggcaccggcgggccctggctcgcagggtcagcctgctgcggccactgagccgggtggaaatcctacctatgccctatgtcactgaggccacccgagtgcagctggtgctgccactcctggtggctgaagctgctgcagccccggctttcctcgaggcctttgcagccaatgtcctggagccacgagaacatgcattgctcaccctgttgctggtctacgggccacgagaaggtggccgtggagctccagacccatttcttggggtgaaggctgcagcagcggagttagagcgacggtaccctgggacgaggctggcctggctcgctgtgcgagcagaggccccttcccaggtgcgactcatggacgtggtctcgaagaagcaccctgtggacactctcttcttccttaccaccgtgtggacaaggcctgggcccgaagtcctcaaccgctgtcgcatgaatgccatctctggctggcaggccttctttccagtccatttccaggagttcaatcctgccctgtcaccacagagatcacccccagggcccccgggggctggccctgaccccccctcccctcctggtgctgacccctcccggggggctcctataggggggagatttgaccggcaggcttctgcggagggctgcttctacaacgctgactacctggcggcccgagcccggctggcaggtgaactggcaggccaggaagaggaggaagccctggaggggctggaggtgatggatgttttcctccggttctcagggctccacctctttcgggccgtagagccagggctggtgcagaagttctccctgcgagactgcagcccacggctcagtgaagaactctaccaccgctgccgcctcagcaacctggaggggctagggggccgtgcccagctggctatggctctctttgagcaggagcaggccaatagcacttagcccgcctgggggccctaacctcattacctttcctttgtctgcctcagccccaggaagggcaaggcaagatggtggacagatagagaattgttgctgtattttttaaatatgaaaatgttattaaacatgtcttctgccaaactgtt

SEQ ID NO: 6538 - protein, 772 aa, Homo sapiens; identical to SEQ ID NO: 935

SEQ ID NO: 6539 - DNA, 4197 bp, Homo sapiens
gactgacaggcagcggaagaggaagctgcggacaggggctgtgaggtggcagcggctgcagcggcggagccggcgcctcagcgggcactggggtctgttcccccttccccgtccctgctccctgccaggcgcgtgcgggacgccgctcttggtccccacgcctccgccccgccccctcccgggacgccgggagaccccggccgtcctttatccggtgtccgccggcccccggccctgaaacccgggcctcctccccgagggccttgggcgtccctcctggtcctgcgctcgcggcctcgatgctgtctctggcgcggcctccgctcccgccgactggcctgagaacgaggtctgtgccccagtctcccagccgcgacctccgaccccgcctcgcagaacgacccgagctggtctcccgagcccccttctcagcagcccggtgacgtggccagtttatttctgttttgagacgaacggcgaagactcgcgtcgggtcttcgttctagggctagacttggtctctgatcgccgagaggtagcgcaggggctgtgggcccccggcaggggtcctgtcggaagctggccgcgcttctgtttgcgttcccaggaccctggcattgtctctagttgctgcttgtgctctctctttgcttttggtttgcttcatttggcccctggggccctggtaaaaccaggcaccgaatcgctcgcacacagagttccagtccccgcctgctgtctcctcagcagctggggttccgaggagaatgccctgcaagatggctccatcggccatggcgctcctgagaggctgtcagtgctgagtcaccgatctacctcattcgggtgggcagaacttatgtgtgccatgcgagtggctccagaccgctcctgagtgggaggaggggttcctgtagccgttgcgtcttctcaaacacggggagcagagtagaaagaggctctggccccttcccttgtgcccaccgggcctgccgcagtggctcagcagccccttcagtagcccgcctgaggaccgatgccagaggcaggcattcttccggaaaggcccactgaggcaggctccggctcctctggttggggctgttgttttgatggatcgtgtgcttttcccttacctcttatcacttgctgtcatctgttgacttaggcccagtctgcagatgtgtgtagtgttcctttttgggttagctttggcagtattgagttttacttcctcctctttttagtggaagacagaccataatcccagtgtgagtgaaattgattgtttcatttattaccgttttggctgggggttagttccgacaccttcacagttgaagagcaggcagaaggagttgtgaagacaggacaatcttcttggggatgctggtcctggaagccagcgggcctcgctctgtctttggcctcattgaccccaggttctctggttaaaactgaaagcctactactggcctggtgcccatcaatccattgatccttgaggctgtgcccctggggcacccacctggcagggcctaccaccatgcgactgagctccctgttggctctgctgcggccagcgcttcccctcatcttagggctgtctctggggtgcagcctgagcctcctgcgggtttcctggatccagggggagggagaagatccctgtgtcgaggctgtaggggagcgaggagggccacagaatccagattccagagctcggctagaccaaagtgatgaagacttcaaaccccggattgtcccctactacagggaccccaacaagccctacaagaaggtgctcaggactcggtacatccagacagagctgggctcccgtgagcggttgctggtggctgtcctgacctcccgagctacactgtccactttggccgtggctgtgaaccgtacggtggcccatcacttccctcggttactctacttcactgggcagcggggggcccgggctccagcagggatgcaggtggtgtctcatggggatgagcggcccgcctggctcatgtcagagaccctgcgccaccttcacacacactttggggccgactacgactggttcttcatcatgcaggatgacacatatgtgcaggccccccgcctggcagcccttgctggccacctcagcatcaaccaagacctgtacttaggccgggcagaggagttcattggcgcaggcgagcaggcccggtactgtcatgggggctttggctacctgttgtcacggagtctcctgcttcgtctgcggccacatctggatggctgccgaggagacattctcagtgcccgtcctgacgagtggcttggacgctgcctcattgactctctgggcgtcggctgtgtctcacagcaccaggggcagcagtatcgctcatttgaactggccaaaaatagggaccctgagaaggaagggagctcggctttcctgagtgccttcgccgtgcaccctgtctccgaaggtaccctcatgtaccggctccacaaacgcttcagcgctctggagttggagcgggcttacagtgaaatagaacaactgcaggctcagatccggaacctgaccgtgctgacccccgaaggggaggcagggctgagctggcccgttgggctccctgctcctttcacaccacactctcgctttgaggtgctgggctgggactacttcacagagcagcacaccttctcctgtgcagatggggctcccaagtgcccactacagggggctagcagggcggacgtgggtgatgcgttggagactgccctggagcagctcaatcggcgctatcagccccgcctgcgcttccagaagcagcgactgctcaacggctatcggcgcttcgacccagcacggggcatggagtacaccctggacctgctgttggaatgtgtgacacagcgtgggcaccggcgggccctggctcgcagggtcagcctgctgcggccactgagccgggtggaaatcctacctatgccctatgtcactgaggccacccgagtgcagctggtgctgccactcctggtggctgaagctgctgcagccccggctttcctcgaggcctttgcagccaatgtcctggagccacgagaacatgcattgctcaccctgttgctggtctacgggccacgagaaggtggccgtggagctccagacccatttcttggggtgaaggctgcagcagcggagttagagcgacggtaccctgggacgaggctggcctggctcgctgtgcgagcagaggccccttcccaggtgcgactcatggacgtggtctcgaagaagcaccctgtggacactctcttcttccttaccaccgtgtggacaaggcctgggcccgaagtcctcaaccgctgtcgcatgaatgccatctctggctggcaggccttctttccagtccatttccaggagttcaatcctgccctgtcaccacagagatcacccccagggcccccgggggctggccctgaccccccctcccctcctggtgctgacccctcccggggggctcctataggggggagatttgaccggcaggcttctgcggagggctgcttctacaacgctgactacctggcggcccgagcccggctggcaggtgaactggcaggccaggaagaggaggaagccctggaggggctggaggtgatggatgttttcctccggttctcagggctccacctctttcgggccgtagagccagggctggtgcagaagttctccctgcgagactgcagcccacggctcagtgaagaactctaccaccgctgccgcctcagcaacctggaggggctagggggccgtgcccagctggctatggctctctttgagcaggagcaggccaatagcacttagcccgcctgggggccctaacctcattacctttcctttgtctgcctcagccccaggaagggcaaggcaagatggtggacagatagagaattgttgctgtattttttaaatatgaaaatgttattaaacatgtcttctgccaaactgtttttaggtctagggaaaattgagtaaggagaagaatccaagggaagggaatggggagtcgtcccgagggacccactgcctccccaccttcttcccttccccttctctccccctcccctccccagtttccaatgaccacacggctgctgtcagatgaatgacttttaatccagccccacaccccaagg

SEQ ID NO: 6540 - protein, 772 aa, Homo sapiens; identical to SEQ ID NO: 935

SEQ ID NO: 6541 - DNA, 2722 bp, Homo sapiens
gaggaagctgcggacaggggctgtgaggtggcagcggctgcagcggcggagccggcgcctcagcgggcactggggtctgttcccccttccccgtccctgctccctgccaggcgcgtgcgggacgccgctcttggtccccacgcctccgccccgccccctcccgggacgccgggagaccccggccgtcctttatccggtgtccgccggcccccggccctgaaacccgggcctcctccccgagggccttgggcgtccctcctggtcctgcgctcgcggcctcgatgctgtctctggcgcggcctccgctcccgccgactggcctgagaacgagcctgagcctcctgcgggtttcctggatccagggggagggagaagatccctgtgtcgaggctgtaggggagcgaggagggccacagaatccagattccagagctcggctagaccaaagtgatgaagacttcaaaccccggattgtcccctactacagggaccccaacaagccctacaagaaggtgctcaggactcggtacatccagacagagctgggctcccgtgagcggttgctggtggctgtcctgacctcccgagctacactgtccactttggccgtggctgtgaaccgtacggtggcccatcacttccctcggttactctacttcactgggcagcggggggcccgggctccagcagggatgcaggtggtgtctcatggggatgagcggcccgcctggctcatgtcagagaccctgcgccaccttcacacacactttggggccgactacgactggttcttcatcatgcaggatgacacatatgtgcaggccccccgcctggcagcccttgctggccacctcagcatcaaccaagacctgtacttaggccgggcagaggagttcattggcgcaggcgagcaggcccggtactgtcatgggggctttggctacctgttgtcacggagtctcctgcttcgtctgcggccacatctggatggctgccgaggagacattctcagtgcccgtcctgacgagtggcttggacgctgcctcattgactctctgggcgtcggctgtgtctcacagcaccaggggcagcagtatcgctcatttgaactggccaaaaatagggaccctgagaaggaagggagctcggctttcctgagtgccttcgccgtgcaccctgtctccgaaggtaccctcatgtaccggctccacaaacgcttcagcgctctggagttggagcgggcttacagtgaaatagaacaactgcaggctcagatccggaacctgaccgtgctgacccccgaaggggaggcagggctgagctggcccgttgggctccctgctcctttcacaccacactctcgctttgaggtgctgggctgggactacttcacagagcagcacaccttctcctgtgcagatggggctcccaagtgcccactacagggggctagcagggcggacgtgggtgatgcgttggagactgccctggagcagctcaatcggcgctatcagccccgcctgcgcttccagaagcagcgactgctcaacggctatcggcgcttcgacccagcacggggcatggagtacaccctggacctgctgttggaatgtgtgacacagcgtgggcaccggcgggccctggctcgcagggtcagcctgctgcggccactgagccgggtggaaatcctacctatgccctatgtcactgaggccacccgagtgcagctggtgctgccactcctggtggctgaagctgctgcagccccggctttcctcgaggcctttgcagccaatgtcctggagccacgagaacatgcattgctcaccctgttgctggtctacgggccacgagaaggtggccgtggagctccagacccatttcttggggtgaaggctgcagcagcggagttagagcgacggtaccctgggacgaggctggcctggctcgctgtgcgagcagaggccccttcccaggtgcgactcatggacgtggtctcgaagaagcaccctgtggacactctcttcttccttaccaccgtgtggacaaggcctgggcccgaagtcctcaaccgctgtcgcatgaatgccatctctggctggcaggccttctttccagtccatttccaggagttcaatcctgccctgtcaccacagagatcacccccagggcccccgggggctggccctgaccccccctcccctcctggtgctgacccctcccggggggctcctataggggggagatttgaccggcaggcttctgcggagggctgcttctacaacgctgactacctggcggcccgagcccggctggcaggtgaactggcaggccaggaagaggaggaagccctggaggggctggaggtgatggatgttttcctccggttctcagggctccacctctttcgggccgtagagccagggctggtgcagaagttctccctgcgagactgcagcccacggctcagtgaagaactctaccaccgctgccgcctcagcaacctggaggggctagggggccgtgcccagctggctatggctctctttgagcaggagcaggccaatagcacttagcccgcctgggggccctaacctcattacctttcctttgtctgcctcagccccaggaagggcaaggcaagatggtggacagatagagaattgttgctgtattttttaaatatgaaaatgttattaaacatgtcttctgccaaactgtt

SEQ ID NO: 6542 - protein, 764 aa, Homo sapiens
MLSLARPPLPPTGLRTSLSLLRVSWIQGEGEDPCVEAVGERGGPQNPDSRARLDQSDEDFKPRIVPYYRDPNKPYKKVLRTRYIQTELGSRERLLVAVLTSRATLSTLAVAVNRTVAHHFPRLLYFTGQRGARAPAGMQVVSHGDERPAWLMSETLRHLHTHFGADYDWFFIMQDDTYVQAPRLAALAGHLSINQDLYLGRAEEFIGAGEQARYCHGGFGYLLSRSLLLRLRPHLDGCRGDILSARPDEWLGRCLIDSLGVGCVSQHQGQQYRSFELAKNRDPEKEGSSAFLSAFAVHPVSEGTLMYRLHKRFSALELERAYSEIEQLQAQIRNLTVLTPEGEAGLSWPVGLPAPFTPHSRFEVLGWDYFTEQHTFSCADGAPKCPLQGASRADVGDALETALEQLNRRYQPRLRFQKQRLLNGYRRFDPARGMEYTLDLLLECVTQRGHRRALARRVSLLRPLSRVEILPMPYVTEATRVQLVLPLLVAEAAAAPAFLEAFAANVLEPREHALLTLLLVYGPREGGRGAPDPFLGVKAAAAELERRYPGTRLAWLAVRAEAPSQVRLMDVVSKKHPVDTLFFLTTVWTRPGPEVLNRCRMNAISGWQAFFPVHFQEFNPALSPQRSPPGPPGAGPDPPSPPGADPSRGAPIGGRFDRQASAEGCFYNADYLAARARLAGELAGQEEEEALEGLEVMDVFLRFSGLHLFRAVEPGLVQKFSLRDCSPRLSEELYHRCRLSNLEGLGGRAQLAMALFEQEQANST

SEQ ID NO: 6543 - DNA, 2908 bp, Homo sapiens
gaggaagctgcggacaggggctgtgaggtggcagcggctgcagcggcggagccggcgcctcagcgggcactggggtctgttcccccttccccgtccctgctccctgccaggcgcgtgcgggacgccgctcttggtccccacgcctccgccccgccccctcccgggacgccgggagaccccggccgtcctttatccggtgtccgccggcccccggccctgaaacccgggcctcctccccgagggccttgggcgtccctcctggtcctgcgctcgcggcctcgatgctgtctctggcgcggcctccgctcccgccgactggcctgagaacgagcctgagcctcctgcgggtttcctggatccagggggagggagaagatccctgtgtcgaggctgtaggggagcgaggagggccacagaatccagattccagagctcggctagaccaaagtgatgaagacttcaaaccccggattgtcccctactacagggaccccaacaagccctacaagaaggtgctcaggactcggtacatccagacagagctgggctcccgtgagcggttgctggtggctgtcctgacctcccgagctacactgtccactttggccgtggctgtgaaccgtacggtggcccatcacttccctcggttactctacttcactgggcagcggggggcccgggctccagcagggatgcaggtggtgtctcatggggatgagcggcccgcctggctcatgtcagagaccctgcgccaccttcacacacactttggggccgactacgactggttcttcatcatgcaggatgacacatatgtgcaggccccccgcctggcagcccttgctggccacctcagcatcaaccaagacctgtacttaggccgggcagaggagttcattggcgcaggcgagcaggcccggtactgtcatgggggctttggctacctgttgtcacggagtctcctgcttcgtctgcggccacatctggatggctgccgaggagacattctcagtgcccgtcctgacgagtggcttggacgctgcctcattgactctctgggcgtcggctgtgtctcacagcaccaggggcagcagtatcgctcatttgaactggccaaaaatagggaccctgagaaggaagggagctcggctttcctgagtgccttcgccgtgcaccctgtctccgaaggtaccctcatgtaccggctccacaaacgcttcagcgctctggagttggagcgggcttacagtgaaatagaacaactgcaggctcagatccggaacctgaccgtgctgacccccgaaggggaggcagggctgagctggcccgttgggctccctgctcctttcacaccacactctcgctttgaggtgctgggctgggactacttcacagagcagcacaccttctcctgtgcagatggggctcccaagtgcccactacagggggctagcagggcggacgtgggtgatgcgttggagactgccctggagcagctcaatcggcgctatcagccccgcctgcgcttccagaagcagcgactgctcaacggctatcggcgcttcgacccagcacggggcatggagtacaccctggacctgctgttggaatgtgtgacacagcgtgggcaccggcgggccctggctcgcagggtcagcctgctgcggccactgagccgggtggaaatcctacctatgccctatgtcactgaggccacccgagtgcagctggtgctgccactcctggtggctgaagctgctgcagccccggctttcctcgaggcctttgcagccaatgtcctggagccacgagaacatgcattgctcaccctgttgctggtctacgggccacgagaaggtggccgtggagctccagacccatttcttggggtgaaggctgcagcagcggagttagagcgacggtaccctgggacgaggctggcctggctcgctgtgcgagcagaggccccttcccaggtgcgactcatggacgtggtctcgaagaagcaccctgtggacactctcttcttccttaccaccgtgtggacaaggcctgggcccgaagtcctcaaccgctgtcgcatgaatgccatctctggctggcaggccttctttccagtccatttccaggagttcaatcctgccctgtcaccacagagatcacccccagggcccccgggggctggccctgaccccccctcccctcctggtgctgacccctcccggggggctcctataggggggagatttgaccggcaggcttctgcggagggctgcttctacaacgctgactacctggcggcccgagcccggctggcaggtgaactggcaggccaggaagaggaggaagccctggaggggctggaggtgatggatgttttcctccggttctcagggctccacctctttcgggccgtagagccagggctggtgcagaagttctccctgcgagactgcagcccacggctcagtgaagaactctaccaccgctgccgcctcagcaacctggaggggctagggggccgtgcccagctggctatggctctctttgagcaggagcaggccaatagcacttagcccgcctgggggccctaacctcattacctttcctttgtctgcctcagccccaggaagggcaaggcaagatggtggacagatagagaattgttgctgtattttttaaatatgaaaatgttattaaacatgtcttctgccaaactgtttttaggtctagggaaaattgagtaaggagaagaatccaagggaagggaatggggagtcgtcccgagggacccactgcctccccaccttcttcccttccccttctctccccctcccctccccagtttccaatgaccacacggctgctgtcagatgaatgacttttaatccagccccacaccccaagg

SEQ ID NO: 6544 - protein, 764 aa, Homo sapiens; identical to SEQ ID NO: 6542

SEQ ID NO: 6545 - DNA, 2905 bp, Homo sapiens
ctggggccctggtaaaaccaggcaccgaatcgctcgcacacagagttccagtccccgcctgctgtctcctcagcagctggggttccgaggagaatgccctgcaagatggctccatcggccatggcgctcctgagaggctgtcagtgctgagtcaccgatctacctcattcgggtgggcagaacttatgtgtgccatgcgagtggctccagaccgctcctgagtgggaggaggggttcctgtagccgttgcgtcttctcaaacacggggagcagagtagaaagaggctctggccccttcccttgtgcccaccgggcctgccgcagtggctcagcagccccttcagtagcccgcctgaggaccgatgccagaggcaggcattcttccggaaaggcccactgaggcaggctccggctcctctggttggggctgttgttttgatggatcgtgtgcttttcccttacctcttatcacttgctgtcatctgttgacttaggcccagtctgcagatgtgtgtagtgttcctttttgggttagctttggcagtattgagttttacttcctcctctttttagtggaagacagaccataatcccagtgtgagtgaaattgattgtttcatttattaccgttttggctgggggttagttccgacaccttcacagttgaagagcaggcagaaggagttgtgaagacaggacaatcttcttggggatgctggtcctggaagccagcgggcctcgctctgtctttggcctcattgaccccaggttctctggttaaaactgaaagcctactactggcctggtgcccatcaatccattgatccttgaggctgtgcccctggggcacccacctggcagggcctaccaccatgcgactgagctccctgttggctctgctgcggccagcgcttcccctcatcttagggctgtctctggggtgcagcctgagcctcctgcgggtttcctggatccagggggagggagaagatccctgtgtcgaggctgtaggggagcgaggagggccacagaatccagattccagagctcggctagaccaaagtgatgaagacttcaaaccccggattgtcccctactacagggaccccaacaagccctacaagaaggtgctcaggactcggtacatccagacagagctgggctcccgtgagcggttgctggtggctgtcctgacctcccgagctacactgtccactttggccgtggctgtgaaccgtacggtggcccatcacttccctcggttactctacttcactgggcagcggggggcccgggctccagcagggatgcaggtggtgtctcatggggatgagcggcccgcctggctcatgtcagagaccctgcgccaccttcacacacactttggggccgactacgactggttcttcatcatgcaggatgacacatatgtgcaggccccccgcctggcagcccttgctggccacctcagcatcaaccaagacctgtacttaggccgggcagaggagttcattggcgcaggcgagcaggcccggtactgtcatgggggctttggctacctgttgtcacggagtctcctgcttcgtctgcggccacatctggatggctgccgaggagacattctcagtgcccgtcctgacgagtggcttggacgctgcctcattgactctctgggcgtcggctgtgtctcacagcaccaggggcagcagtatcgctcatttgaactggccaaaaatagggaccctgagaaggaagggagctcggctttcctgagtgccttcgccgtgcaccctgtctccgaaggtaccctcatgtaccggctccacaaacgcttcagcgctctggagttggagcgggcttacagtgaaatagaacaactgcaggctcagatccggaacctgaccgtgctgacccccgaaggggaggcagggctgagctggcccgttgggctccctgctcctttcacaccacactctcgctttgaggtgctgggctgggactacttcacagagcagcacaccttctcctgtgcagatggggctcccaagtgcccactacagggggctagcagggcggacgtgggtgatgcgttggagactgccctggagcagctcaatcggcgctatcagccccgcctgcgcttccagaagcagcgactgctcaacggctatcggcgcttcgacccagcacggggcatggagtacaccctggacctgctgttggaatgtgtgacacagcgtgggcaccggcgggccctggctcgcagggtcagcctgctgcggccactgagccgggtggaaatcctacctatgccctatgtcactgaggccacccgagtgcagctggtgctgccactcctggtggctgaagctgctgcagccccggctttcctcgaggcctttgcagccaatgtcctggagccacgagaacatgcattgctcaccctgttgctggtctacgggccacgagaaggtggccgtggagctccagacccatttcttggggtgaaggctgcagcagcggagttagagcgacggtaccctgggacgaggctggcctggctcgctgtgcgagcagaggccccttcccaggtgcgactcatggacgtggtctcgaagaagcaccctgtggacactctcttcttccttaccaccgtgtggacaaggcctgggcccgaagtcctcaaccgctgtcgcatgaatgccatctctggctggcaggccttctttccagtccatttccaggagttcaatcctgccctgtcaccacagagatcaccccctaacctcattacctttcctttgtctgcctcagccccaggaagggcaaggcaagatggtggacagatagagaattgttgctgtattttttaaatatgaaaatgttattaaacatgtcttctgcc

SEQ ID NO: 6546 - protein, 666 aa, Homo sapiens
MRLSSLLALLRPALPLILGLSLGCSLSLLRVSWIQGEGEDPCVEAVGERGGPQNPDSRARLDQSDEDFKPRIVPYYRDPNKPYKKVLRTRYIQTELGSRERLLVAVLTSRATLSTLAVAVNRTVAHHFPRLLYFTGQRGARAPAGMQVVSHGDERPAWLMSETLRHLHTHFGADYDWFFIMQDDTYVQAPRLAALAGHLSINQDLYLGRAEEFIGAGEQARYCHGGFGYLLSRSLLLRLRPHLDGCRGDILSARPDEWLGRCLIDSLGVGCVSQHQGQQYRSFELAKNRDPEKEGSSAFLSAFAVHPVSEGTLMYRLHKRFSALELERAYSEIEQLQAQIRNLTVLTPEGEAGLSWPVGLPAPFTPHSRFEVLGWDYFTEQHTFSCADGAPKCPLQGASRADVGDALETALEQLNRRYQPRLRFQKQRLLNGYRRFDPARGMEYTLDLLLECVTQRGHRRALARRVSLLRPLSRVEILPMPYVTEATRVQLVLPLLVAEAAAAPAFLEAFAANVLEPREHALLTLLLVYGPREGGRGAPDPFLGVKAAAAELERRYPGTRLAWLAVRAEAPSQVRLMDVVSKKHPVDTLFFLTTVWTRPGPEVLNRCRMNAISGWQAFFPVHFQEFNPALSPQRSPPNLITFPLSASAPGRARQDGGQIENCCCIF

SEQ ID NO: 6547 - DNA, 1394 bp, Homo sapiens
ctggggccctggtaaaaccaggcaccgaatcgctcgcacacagagttccagtccccgcctgctgtctcctcagcagctggggttccgaggagaatgccctgcaagatggctccatcggccatggcgctcctgagaggctgtcagtgctgagtcaccgatctacctcattcgggtgggcagaacttatgtgtgccatgcgagtggctccagaccgctcctgagtgggaggaggggttcctgtagccgttgcgtcttctcaaacacggggagcagagtagaaagaggctctggccccttcccttgtgcccaccgggcctgccgcagtggctcagcagccccttcagtagcccgcctgaggaccgatgccagaggcaggcattcttccggaaaggcccactgaggcaggctccggctcctctggttggggctgttgttttgatggatcgtgtgcttttcccttacctcttatcacttgctgtcatctgttgacttaggcccagtctgcagatgtgtgtagtgttcctttttgggttagctttggcagtattgagttttacttcctcctctttttagtggaagacagaccataatcccagtgtgagtgaaattgattgtttcatttattaccgttttggctgggggttagttccgacaccttcacagttgaagagcaggcagaaggagttgtgaagacaggacaatcttcttggggatgctggtcctggaagccagcgggcctcgctctgtctttggcctcattgaccccaggttctctggttaaaactgaaagcctactactggcctggtgcccatcaatccattgatccttgaggctgtgcccctggggcacccacctggcagggcctaccaccatgcgactgagctccctgttggctctgctgcggccagcgcttcccctcatcttagggctgtctctggggtgcagcctgagcctcctgcgggtttcctggatccagggggagggagaagatccctgtgtcgaggctgtaggggagcgaggagggccacagaatccagattccagagctcggctagaccaaagtgatgaagacttcaaaccccggattgtcccctactacagggaccccaacaagccctacaagaaggtgctcaggactcggtacatccagacagagctgggctcccgtgagcggttgctggtggctgtcctgacctcccgagctacactctggctatggctctctttgagcaggagcaggccaatagcacttagcccgcctgggggccctaacctcattacctttcctttgtctgcctcagccccaggaagggcaaggcaagatggtggacagatagagaattgttgctgtattttttaaatatgaaaatgttattaaacatgtcttctgcca

SEQ ID NO: 6548 - protein, 162 aa, Homo sapiens
MRLSSLLALLRPALPLILGLSLGCSLSLLRVSWIQGEGEDPCVEAVGERGGPQNPDSRARLDQSDEDFKPRIVPYYRDPNKPYKKVLRTRYIQTELGSRERLLVAVLTSRATLWLWLSLSRSRPIALSPPGGPNLITFPLSASAPGRARQDGGQIENCCCIF

SEQ ID NO: 6549 - DNA, 766 bp, Homo sapiens
tcataaggtaagctcccagcacaacttgaatgcagctaaaggggtttgcaagtagactctgaggatcaggaagctccgcacagtgttcagacagaatagttttagctcctcctcaatagtgcctgtccactgaggaggcaaaaactctgaagtttctttacttctagaactgtcccaagaaagcccaagggtagaagggagaatcacccccagggcccccgggggctggccctgaccccccctcccctcctggtgctgacccctcccggggggctcctataggggggagatttgaccggcaggcttctgcggagggctgcttctacaacgctgactacctggcggcccgagcccggctggcaggtgaactggcaggccaggaagaggaggaagccctggaggggctggaggtgatggatgttttcctccggttctcagggctccacctctttcgggccgtagagccagggctggtgcagaagttctccctgcgagactgcagcccacggctcagtgaagaactctaccaccgctgccgcctcagcaacctggaggggctagggggccgtgcccagctggctatggctctctttgagcaggagcaggccaatagcacttagcccgcctgggggccctaacctcattacctttcctttgtctgcctcagccccaggaagggcaaggcaagatggtggacagatagagaattgttgctgtattttttaaatatgaaaatgttattaaacatgtcttctgccaaactgtt

SEQ ID NO: 6550 - protein, 68 aa, Homo sapiens
MDVFLRFSGLHLFRAVEPGLVQKFSLRDCSPRLSEELYHRCRLSNLEGLGGRAQLAMALFEQEQANST

SEQ ID NO: 6551 - DNA, 952 bp, Homo sapiens
tcataaggtaagctcccagcacaacttgaatgcagctaaaggggtttgcaagtagactctgaggatcaggaagctccgcacagtgttcagacagaatagttttagctcctcctcaatagtgcctgtccactgaggaggcaaaaactctgaagtttctttacttctagaactgtcccaagaaagcccaagggtagaagggagaatcacccccagggcccccgggggctggccctgaccccccctcccctcctggtgctgacccctcccggggggctcctataggggggagatttgaccggcaggcttctgcggagggctgcttctacaacgctgactacctggcggcccgagcccggctggcaggtgaactggcaggccaggaagaggaggaagccctggaggggctggaggtgatggatgttttcctccggttctcagggctccacctctttcgggccgtagagccagggctggtgcagaagttctccctgcgagactgcagcccacggctcagtgaagaactctaccaccgctgccgcctcagcaacctggaggggctagggggccgtgcccagctggctatggctctctttgagcaggagcaggccaatagcacttagcccgcctgggggccctaacctcattacctttcctttgtctgcctcagccccaggaagggcaaggcaagatggtggacagatagagaattgttgctgtattttttaaatatgaaaatgttattaaacatgtcttctgccaaactgtttttaggtctagggaaaattgagtaaggagaagaatccaagggaagggaatggggagtcgtcccgagggacccactgcctccccaccttcttcccttccccttctctccccctcccctccccagtttccaatgaccacacggctgctgtcagatgaatgacttttaatccagccccacaccccaagg

SEQ ID NO: 6552 - protein, 68 aa, Homo sapiens; identical to SEQ ID NO: 6550

SEQ ID NO: 6553 - DNA, 2471 bp, Homo sapiens
cagtatgtgaagaccaacaggctgcaggactcccatgacaaggaatacatcaatggggacaagtatttccagcaggtaacctctctcctgaaccctgggatctggggagcaggcggagttctccagcaggggaagtacctctaccaaggtaactaccacccctcccttctagattcctgagtagcagaagcagtacacagtcatggtcttggagccaagagaccgaccaggattctagttcaggccctactgtggattagctctgtgctgcagccaatccatgttagcccccccaagttaggaagacctggaaaccctacaaagccaaccgctttctggaatgtaatattcttggcacttggagttaggatccccaggttctagtcctgagtctggactctgggtaagtgactcagcgattctgaaccttgtttccttatctttgaagtggagtgacaatacctgtcctatctactctcctgggcagttaggaaaatcaaattgctgcaaaagtgattgagcaaaattccaccaaaacagagaatattcttattaatgcatttaaaaataaatacagcagataaacctgaggagtaaaaatagcagttgatatttattgggcacttaccatgtgccaggcactgtcccaagcactttatgtgtattagttcactgacttctcacggcagccctgggagataggtattcttttcatccccactctagagatgaagacactgagccctgaggtgttaacttgctccaggttgcatagtaagtggcagaggcaggactgatacataagcaggctgacccagggcccgcactctcaacccctgccccacactgacccaccccctatcttgtcagccataccggtggctccaccaccagaccagcccaccccaatcccatccccatgcgcactgaggaatcagacttcctctcagcttcttgtggcctttctagaacaaaaggatctacaactgcatgatgatctcttcaagaagagtgatctctctctccccaattgtcctgcttcagatttttgattgtccccggctgaagttttctgagattccccagcgcctcacagccctgctattgccccctgacccaattgtcatcaaccatgtcatcaggtgaggtggccccagcttgcttctcagaccagggaatgatctcgttcctgccttccctgcccctccctctcctcccactcccatctcttctccctccctgttggatctgccccagccccggggccctggggccgtatgggggcatcgtggacacgaagggctggacttccctggcagcgtggacccttcagaccagaagaagacggcgtgctatgacattgacgtggaggtggaggagccattaaaggggcagatgagcagcttcctcctatccacggccaaccagcaggagatcagtgctctggacagtaagatccatgagacgattgagtccataaaccagctcaagatccagagggacttcatgctaagcttctccagagaccccaaaggctatgtccaagacctgctccgctcccagagccgggacctcaaggtgatgacagatgtagccggcaaccctgaagaggagcgccgggctgagttctaccaccagccctggtcccaggaggccgtcagtcgctacttctactgcaagatccagcagcgcaggcaggagctggagcagtcgctggttgtgcgcaacacctaggagcccaaaaataagcagcacgacggaactttcagccgtgtcccgggccccagcattttgccccgggctccagcatcactcctctgccaccttggggtgtggggctggattaaaagtcattcatctgacagcagccgtgtggtcattggaaactggggaggggagggggagagaaggggaagggaagaaggtggggaggcagtgggtccctcgggacgactccccattcccttcccttggattcttctccttactcaattttccctagacctaaaaacagtttggcagaagacatgtttaataacattttcatatttaaaaaatacagcaacaattctctatctgtccaccatcttgccttgcccttcctggggctgaggcagacaaaggaaaggtaatgaggttagggcccccaggcgggctaagtgctattggcctgctcctgctcaaagagagccatagccagctgggcacggccccctagcccctccaggttgctgaggcggcagcggtggtagagttcttcactgagccgtgggctgcagtctcgcagggagaacttctgcaccagccctggctctacggcccgaaagaggtggagccctgagaaccggaggaaaacatccatcacctccagcccctccagggcttcctcctcttcctggcctgccagttcacctgccagccgggctcgggccgccaggtagtcagcgttgtagaagcagccctccgcagaa

SEQ ID NO: 6554 - protein, 112 aa, Homo sapiens
MSSFLLSTANQQEISALDSKIHETIESINQLKIQRDFMLSFSRDPKGYVQDLLRSQSRDLKVMTDVAGNPEEERRAEFYHQPWSQEAVSRYFYCKIQQRRQELEQSLVVRNT

SEQ ID NO: 6555 - DNA, 2600 bp, Homo sapiens
cgcgggcctcggcggcttcgggctgcagcactgctgcccagcgcccgcggccgggctggtcggcgcgcctcgccgcttatctgcgctgtttggacagcgggcttggaaaggcaggcggccccgtccccgccgagtcaacaggcagaccccgggccgccggactatttctgtcttatcagtgcaggaatgcggcagccgcggcggcggcggcggcggcgggcgggcggcggcggcgtgggccgtgggccgtcagggcagccctgaaggggccccctccccactccgctcgagtagaagtgtgagagagcccagcaggactcagaggggagagttggaggaaaaaaaaaggcagaaaagggaaagaaagaggaagagagagagagagtgagaggagccgctgagcccaccccgatggccgcggacgaagttgccggaggggcgcgcaaagccacgaaaagcaaactttttgagtttctggtccatggggtgcgccccgggatgccgtctggagcccggatgccccaccagggggcgcccatgggccccccgggctccccgtacatgggcagccccgccgtgcgacccggcctggcccccgcgggcatggagcccgcccgcaagcgagcagcgcccccgcccgggcagagccaggcacagagccagggccagccggtgcccaccgcccccgcgcggagccgcagtgccaagaggaggaagatggctgacaaaatcctccctcaaaggattcgggagctggtccccgagtcccaggcttacatggacctcttggcatttgagaggaaactggatcaaaccatcatgcggaagcgggtggacatccaggaggctctgaagaggcccatgaagcaaaagcggaagctgcgactctatatctccaacacttttaaccctgcgaagcctgatgctgaggattccgacggcagcattgcctcctgggagctacgggtggaggggaagctcctggatgatcccagcaaacagaagcggaagttctcttctttcttcaagagtttggtcatcgagctggacaaagatctttatggccctgacaaccacctcgttgagtggcatcggacacccacgacccaggagacggacggcttccaggtgaaacggcctggggacctgagtgtgcgctgcacgctgctcctcatgctggactaccagcctccccagttcaaactggatccccgcctagcccggctgctggggctgcacacacagagccgctcagccattgtccaggccctgtggcagtatgtgaagaccaacaggctgcaggactcccatgacaaggaatacatcaatggggacaagtatttccagcagatttttgattgtccccggctgaagttttctgagattccccagcgcctcacagccctgctattgccccctgacccaattgtcatcaaccatgtcatcagcgtggacccttcagaccagaagaagacggcgtgctatgacattgacgtggaggtggaggagccattaaaggggcagatgagcagcttcctcctatccacggccaaccagcaggagatcagtgctctggacagtaagatccatgagacgattgagtccataaaccagctcaagatccagagggacttcatgctaagcttctccagagaccccaaaggctatgtccaagacctgctccgctcccagagccgggacctcaaggtgatgacagatgtagccggcaaccctgaagaggagcgccgggctgagttctaccaccagccctggtcccaggaggccgtcagtcgctacttctactgcaagatccagcagcgcaggcaggagctggagcagtcgctggttgtgcgcaacacctaggagcccaaaaataagcagcacgacggaactttcagccgtgtcccgggccccagcattttgccccgggctccagcatcactcctctgccaccttggggtgtggggctggattaaaagtcattcatctgacagcagccgtgtggtcattggaaactggggaggggagggggagagaaggggaagggaagaaggtggggaggcagtgggtccctcgggacgactccccattcccttcccttggattcttctccttactcaattttccctagacctaaaaacagtttggcagaagacatgtttaataacattttcatatttaaaaaatacagcaacaattctctatctgtccaccatcttgccttgcccttcctggggctgaggcagacaaaggaaaggtaatgaggttagggcccccaggcgggctaagtgctattggcctgctcctgctcaaagagagccatagccagctgggcacggccccctagcccctccaggttgctgaggcggcagcggtggtagagttcttcactgagccgtgggctgcagtctcgcagggagaacttctgcaccagccctggctctacggcccgaaagaggtggagccctgagaaccggaggaaaacatccatcacctccagcccctccagggcttcctcctcttcctggcctgccagttcacctgccagccgggctcgggccgccaggtagtcagcgttgtagaagcagccctccgcagaa

SEQ ID NO: 6556 - protein, 483 aa, Homo sapiens; identical to SEQ ID NO: 937

SEQ ID NO: 6557 - DNA, 3009 bp, Homo sapiens
cagatcctcagaatggcccttggtgctgcaggcgcggtgggctccgggcccaggcaccgagggggcactggatgactctccaggtgcaggaccctgccatctatgactccaggtcttcagcacccacccaccgtggtacagtgccaagaggaggaagatggctgacaaaatcctccctcaaaggattcgggagctggtccccgagtcccaggcttacatggacctcttggcatttgagaggaaactggatcaaaccatcatgcggaagcgggtggacatccaggaggctctgaagaggcccatgaagcaaaagcggaagctgcgactctatatctccaacacttttaaccctgcgaagcctgatgctgaggattccgacggcagcattgcctcctgggagctacgggtggaggggaagctcctggatgatcccagcaaacagaagcggaagttctcttctttcttcaagagtttggtcatcgagctggacaaagatctttatggccctgacaaccacctcgttgagtggcatcggacacccacgacccaggagacggacggcttccaggtgaaacggcctggggacctgagtgtgcgctgcacgctgctcctcatgctggactaccagcctccccagttcaaactggatccccgcctagcccggctgctggggctgcacacacagagccgctcagccattgtccaggccctgtggcagtatgtgaagaccaacaggctgcaggactcccatgacaaggaatacatcaatggggacaagtatttccagcaggtaacctctctcctgaaccctgggatctggggagcaggcggagttctccagcaggggaagtacctctaccaaggtaactaccacccctcccttctagattcctgagtagcagaagcagtacacagtcatggtcttggagccaagagaccgaccaggattctagttcaggccctactgtggattagctctgtgctgcagccaatccatgttagcccccccaagttaggaagacctggaaaccctacaaagccaaccgctttctggaatgtaatattcttggcacttggagttaggatccccaggttctagtcctgagtctggactctgggtaagtgactcagcgattctgaaccttgtttccttatctttgaagtggagtgacaatacctgtcctatctactctcctgggcagttaggaaaatcaaattgctgcaaaagtgattgagcaaaattccaccaaaacagagaatattcttattaatgcatttaaaaataaatacagcagataaacctgaggagtaaaaatagcagttgatatttattgggcacttaccatgtgccaggcactgtcccaagcactttatgtgtattagttcactgacttctcacggcagccctgggagataggtattcttttcatccccactctagagatgaagacactgagccctgaggtgttaacttgctccaggttgcatagtaagtggcagaggcaggactgatacataagcaggctgacccagggcccgcactctcaacccctgccccacactgacccaccccctatcttgtcagccataccggtggctccaccaccagaccagcccaccccaatcccatccccatgcgcactgaggaatcagacttcctctcagcttcttgtggcctttctagaacaaaaggatctacaactgcatgatgatctcttcaagaagagtgatctctctctccccaattgtcctgcttcagatttttgattgtccccggctgaagttttctgagattccccagcgcctcacagccctgctattgccccctgacccaattgtcatcaaccatgtcatcagcgtggacccttcagaccagaagaagacggcgtgctatgacattgacgtggaggtggaggagccattaaaggggcagatgagcagcttcctcctatccacggccaaccagcaggagatcagtgctctggacagtaagatccatgagacgattgagtccataaaccagctcaagatccagagggacttcatgctaagcttctccagagaccccaaaggctatgtccaagacctgctccgctcccagagccgggacctcaaggtgatgacagatgtagccggcaaccctgaagaggagcgccgggctgagttctaccaccagccctggtcccaggaggccgtcagtcgctacttctactgcaagatccagcagcgcaggcaggagctggagcagtcgctggttgtgcgcaacacctaggagcccaaaaataagcagcacgacggaactttcagccgtgtcccgggccccagcattttgccccgggctccagcatcactcctctgccaccttggggtgtggggctggattaaaagtcattcatctgacagcagccgtgtggtcattggaaactggggaggggagggggagagaaggggaagggaagaaggtggggaggcagtgggtccctcgggacgactccccattcccttcccttggattcttctccttactcaattttccctagacctaaaaacagtttggcagaagacatgtttaataacattttcatatttaaaaaatacagcaacaattctctatctgtccaccatcttgccttgcccttcctggggctgaggcagacaaaggaaaggtaatgaggttagggcccccaggcgggctaagtgctattggcctgctcctgctcaaagagagccatagccagctgggcacggccccctagcccctccaggttgctgaggcggcagcggtggtagagttcttcactgagccgtgggctgcagtctcgcagggagaacttctgcaccagccctggctctacggcccgaaagaggtggagccctgagaaccggaggaaaacatccatcacctccagcccctccagggcttcctcctcttcctggcctgccagttcacctgccagccgggctcgggccgccaggtagtcagcgttgtagaagcagccctccgcagaa

SEQ ID NO: 6558 - protein, 245 aa, Homo sapiens [sequence omitted]

SEQ ID NO: 6559 - DNA, 2906 bp, Homo sapiens
ccctttcctcccaaccctgctcaggattgatccatgggcagcagcctcttttgctcacatggcttaaccagaccctgagccactcccaagccccacctctgtcacccacaccccgctcctacagcactgctctcttcttagctcccatgccccaccgtctgctcagggacttcatttcataagttgggtcctgacccaacgagctggaggccttcctgctcttccagcaaggaaggaagcagggcaggacaggacagagcaggcactagcagggaccaggagggaggcgcctaggccagctggtagtcatggagcaggctgactacctgcctgccacctctggagtccctccatgcccctgggctccagggccatcccagttaccatcctgacctgccctctggcctttgcctccaatgcccagctctctccctccaaccattgccacacccccaaaactggcctctccagtcagggcttgggctctgcctggggtccctgctctgtctttcaagttctttgtcccgcaggaccctggggccggtctctgtctgcttcccacacatactgctcccacctgcgccctgccttgtgccaccccagccccagctggcccatgctggttgcctccatcctaggcccttttttctgcacagtgtcctggcttcctcagacctccactccggggagtttggcttcttcgcagcttcccgaggcctccttgaatctacgctggggctcagggtctgacctctcctttcagatcctcagaatggcccttggtgctgcaggcgcggtgggctccgggcccaggcaccgagggggcactggatgactctccaggtgcaggaccctgccatctatgactccaggtcttcagcacccacccaccgtggtacagcgccccgggatgccgtctggagcccggatgccccaccagggggcgcccatgggccccccgggctccccgtacatgggcagccccgcccccccgcgcggagccgcagtgccaagaggaggaagatggctgacaaaatcctccctcaaaggattcgggagctggtccccgagtcccaggcttacatggacctcttggcatttgagaggaaactggatcaaaccatcatgcggaagcgggtggacatccaggaggctctgaagaggcccatgaagcaaaagcggaagctgcgactctatatctccaacacttttaaccctgcgaagcctgatgctgaggattccgacggcagcattgcctcctgggagctacgggtggaggggaagctcctggatgatcccagcaaacagaagcggaagttctcttctttcttcaagagtttggtcatcgagctggacaaagatctttatggccctgacaaccacctcgttgagtggcatcggacacccacgacccaggagacggacggcttccaggtgaaacggcctggggacctgagtgtgcgctgcacgctgctcctcatgctggactaccagcctccccagttcaaactggatccccgcctagcccggctgctggggctgcacacacagagccgctcagccattgtccaggccctgtggcagtatgtgaagaccaacaggctgcaggactcccatgacaaggaatacatcaatggggacaagtatttccagcagatttttgattgtccccggctgaagttttctgagattccccagcgcctcacagccctgctattgccccctgacccaattgtcatcaaccatgtcatcagcgtggacccttcagaccagaagaagacggcgtgctatgacattgacgtggaggtggaggagccattaaaggggcagatgagcagcttcctcctatccacggccaaccagcaggagatcagtgctctggacagtaagatccatgagacgattgagtccataaaccagctcaagatccagagggacttcatgctaagcttctccagagaccccaaaggctatgtccaagacctgctccgctcccagagccgggacctcaaggtgatgacagatgtagccggcaaccctgaagaggagcgccgggctgagttctaccaccagccctggtcccaggaggccgtcagtcgctacttctactgcaagatccagcagcgcaggcaggagctggagcagtcgctggttgtgcgcaacacctaggagcccaaaaataagcagcacgacggaactttcagccgtgtcccgggccccagcattttgccccgggctccagcatcactcctctgccaccttggggtgtggggctggattaaaagtcattcatctgacagcagccgtgtggtcattggaaactggggaggggagggggagagaaggggaagggaagaaggtggggaggcagtgggtccctcgggacgactccccattcccttcccttggattcttctccttactcaattttccctagacctaaaaacagtttggcagaagacatgtttaataacattttcatatttaaaaaatacagcaacaattctctatctgtccaccatcttgccttgcccttcctggggctgaggcagacaaaggaaaggtaatgaggttagggcccccaggcgggctaagtgctattggcctgctcctgctcaaagagagccatagccagctgggcacggccccctagcccctccaggttgctgaggcggcagcggtggtagagttcttcactgagccgtgggctgcagtctcgcagggagaacttctgcaccagccctggctctacggcccgaaagaggtggagccctgagaaccggaggaaaacatccatcacctccagcccctccagggcttcctcctcttcctggcctgccagttcacctgccagccgggctcgggccgccaggtagtcagcgttgtagaagcagccctccgcagaa

SEQ ID NO: 6560 - protein, 445 aa, Homo sapiens
MTLQVQDPAIYDSRSSAPTHRGTAPRDAVWSPDAPPGGAHGPPGLPVHGQPRPPARSRSAKRRKMADKILPQRIRELVPESQAYMDLLAFERKLDQTIMRKRVDIQEALKRPMKQKRKLRLYISNTFNPAKPDAEDSDGSIASWELRVEGKLLDDPSKQKRKFSSFFKSLVIELDKDLYGPDNHLVEWHRTPTTQETDGFQVKRPGDLSVRCTLLLMLDYQPPQFKLDPRLARLLGLHTQSRSAIVQALWQYVKTNRLQDSHDKEYINGDKYFQQIFDCPRLKFSEIPQRLTALLLPPDPIVINHVISVDPSDQKKTACYDIDVEVEEPLKGQMSSFLLSTANQQEISALDSKIHETIESINQLKIQRDFMLSFSRDPKGYVQDLLRSQSRDLKVMTDVAGNPEEERRAEFYHQPWSQEAVSRYFYCKIQQRRQELEQSLVVRNT

SEQ ID NO: 6561 - DNA, 2856 bp, Homo sapiens
taggcttctccaagctgccaaatttaagtattgagtacataaaaggaggagattggcattagtgagaacatggccctgaggcttgatggacccaaagcctcccagggtatgtgcgttttgagggggtggggggtgcacatgggtgtccgggacctcgtctaggtaatgtctgcagccacataggatgatctgactgaatctgtgtgaggacaaccgtttgtgtgcctgtgtgtgcgcgcccacgtgcatgcgcgtgtgtggtcctagtgtaggtgatgtctgcggccacacaggatgctgactgcgtgtgtgactcgtgggcgtgcagatgcaagcacaggcctacgacacatctgtgtacaggctgaagatcacaacgggtctggccagggcccgccgagggcctccgagctggcgagcacaccgacggctggatggggcgacgcttcctgctccggtccctaactcattattaagctcctcgctctttgcagacgctccctgcgcctcccccgctccgggctgcagcggcgcaggcgccgggccgagccgagcgccgagcagggagcgggcggccgcgctccgggccggggtcccgggggagcagatcctcagaatggcccttggtgctgcaggcgcggtgggctccgggcccaggcaccgagggggcactggatgactctccaggtgcaggaccctgccatctatgactccaggtcttcagcacccacccaccgtggtacagcgccccgggatgccgtctggagcccggatgccccaccagggggcgcccatgggccccccgggctccccgtacatgggcagccccgccgtgcgacccggcctggcccccgcgggcatggagcccgcccgcaagcgagcagcgcccccgcccgggcagagccaggcacagagccagggccagccggtgcccaccgcccccgcgcggagccgcagtgccaagaggaggaagatggctgacaaaatcctccctcaaaggattcgggagctggtccccgagtcccaggcttacatggacctcttggcatttgagaggaaactggatcaaaccatcatgcggaagcgggtggacatccaggaggctctgaagaggcccatgaagcaaaagcggaagctgcgactctatatctccaacacttttaaccctgcgaagcctgatgctgaggattccgacggcagcattgcctcctgggagctacgggtggaggggaagctcctggatgatcccagcaaacagaagcggaagttctcttctttcttcaagagtttggtcatcgagctggacaaagatctttatggccctgacaaccacctcgttgagtggcatcggacacccacgacccaggagacggacggcttccaggtgaaacggcctggggacctgagtgtgcgctgcacgctgctcctcatgctggactaccagcctccccagttcaaactggatccccgcctagcccggctgctggggctgcacacacagagccgctcagccattgtccaggccctgtggcagtatgtgaagaccaacaggctgcaggactcccatgacaaggaatacatcaatggggacaagtatttccagcagatttttgattgtccccggctgaagttttctgagattccccagcgcctcacagccctgctattgccccctgacccaattgtcatcaaccatgtcatcagcgtggacccttcagaccagaagaagacggcgtgctatgacattgacgtggaggtggaggagccattaaaggggcagatgagcagcttcctcctatccacggccaaccagcaggagatcagtgctctggacagtaagatccatgagacgattgagtccataaaccagctcaagatccagagggacttcatgctaagcttctccagagaccccaaaggctatgtccaagacctgctccgctcccagagccgggacctcaaggtgatgacagatgtagccggcaaccctgaagaggagcgccgggctgagttctaccaccagccctggtcccaggaggccgtcagtcgctacttctactgcaagatccagcagcgcaggcaggagctggagcagtcgctggttgtgcgcaacacctaggagcccaaaaataagcagcacgacggaactttcagccgtgtcccgggccccagcattttgccccgggctccagcatcactcctctgccaccttggggtgtggggctggattaaaagtcattcatctgacagcagccgtgtggtcattggaaactggggaggggagggggagagaaggggaagggaagaaggtggggaggcagtgggtccctcgggacgactccccattcccttcccttggattcttctccttactcaattttccctagacctaaaaacagtttggcagaagacatgtttaataacattttcatatttaaaaaatacagcaacaattctctatctgtccaccatcttgccttgcccttcctggggctgaggcagacaaaggaaaggtaatgaggttagggcccccaggcgggctaagtgctattggcctgctcctgctcaaagagagccatagccagctgggcacggccccctagcccctccaggttgctgaggcggcagcggtggtagagttcttcactgagccgtgggctgcagtctcgcagggagaacttctgcaccagccctggctctacggcccgaaagaggtggagccctgagaaccggaggaaaacatccatcacctccagcccctccagggcttcctcctcttcctggcctgccagttcacctgccagccgggctcgggccgccaggtagtcagcgttgtagaagcagccctccgcagaa

SEQ ID NO: 6562 - protein, 470 aa, Homo sapiens; identical to SEQ ID NO: 939

SEQ ID NO: 6563 - DNA, 1863 bp, Homo sapiens
cagtatgtgaagaccaacaggctgcaggactcccatgacaaggaatacatcaatggggacaagtatttccagcaggtaacctctctcctgaaccctgggatctggggagcaggcggagttctccagcaggggaagtacctctaccaaggtaactaccacccctcccttctagattcctgagtagcagaagcagtacacagtcatggtcttggagccaagagaccgaccaggattctagttcaggccctactgtggattagctctgtgctgcagccaatccatgttagcccccccaagttaggaagacctggaaaccctacaaagccaaccgctttctggaatgtaatattcttggcacttggagttaggatccccaggttctagtcctgagtctggactctgggtaagtgactcagcgattctgaaccttgtttccttatctttgaagtggagtgacaatacctgtcctatctactctcctgggcagttaggaaaatcaaattgctgcaaaagtgattgagcaaaattccaccaaaacagagaatattcttattaatgcatttaaaaataaatacagcagataaacctgaggagtaaaaatagcagttgatatttattgggcacttaccatgtgccaggcactgtcccaagcactttatgtgtattagttcactgacttctcacggcagccctgggagataggtattcttttcatccccactctagagatgaagacactgagccctgaggtgttaacttgctccaggttgcatagtaagtggcagaggcaggactgatacataagcaggctgacccagggcccgcactctcaacccctgccccacactgacccaccccctatcttgtcagccataccggtggctccaccaccagaccagcccaccccaatcccatccccatgcgcactgaggaatcagacttcctctcagcttcttgtggcctttctagaacaaaaggatctacaactgcatgatgatctcttcaagaagagtgatctctctctccccaattgtcctgcttcagatttttgattgtccccggctgaagttttctgagattccccagcgcctcacagccctgctattgccccctgacccaattgtcatcaaccatgtcatcaggtgaggtggccccagcttgcttctcagaccagggaatgatctcgttcctgccttccctgcccctccctctcctcccactcccatctcttctccctccctgttggatctgccccagccccggggccctggggccgtatgggggcatcgtggacacgaagggctggacttccctggcagcgtggacccttcagaccagaagaagacggcgtgctatgacattgacgtggaggtggaggagccattaaaggggcagatgagcagcttcctcctatccacggccaaccagcaggagatcagtgctctggacagtaagatccatgagacgattgagtccataaaccagctcaagatccagagggacttcatgctaagcttctccagagaccccaaaggctatgtccaagacctgctccgctcccagagccgggacctcaaggtgatgacagatgtagccggcaaccctgaagaggagcgccgggctgagttctaccaccagccctggtcccaggaggccgtcagtcgctacttctactgcaagatccagcagcgcaggcaggagctggagcagtcgctggttgtgcgcaacacctaggagcccaaaaataagcagcacgacggaactttcagccgtgtcccgggccccagcattttgccccgggctccagcatcactcctctgccaccttggggtgtggggctggattaaaagtcattcatctgac

SEQ ID NO: 6564 - protein, 112 aa, Homo sapiens; identical to SEQ ID NO: 6554

SEQ ID NO: 6565 - DNA, 1992 bp, Homo sapiens
cgcgggcctcggcggcttcgggctgcagcactgctgcccagcgcccgcggccgggctggtcggcgcgcctcgccgcttatctgcgctgtttggacagcgggcttggaaaggcaggcggccccgtccccgccgagtcaacaggcagaccccgggccgccggactatttctgtcttatcagtgcaggaatgcggcagccgcggcggcggcggcggcggcgggcgggcggcggcggcgtgggccgtgggccgtcagggcagccctgaaggggccccctccccactccgctcgagtagaagtgtgagagagcccagcaggactcagaggggagagttggaggaaaaaaaaaggcagaaaagggaaagaaagaggaagagagagagagagtgagaggagccgctgagcccaccccgatggccgcggacgaagttgccggaggggcgcgcaaagccacgaaaagcaaactttttgagtttctggtccatggggtgcgccccgggatgccgtctggagcccggatgccccaccagggggcgcccatgggccccccgggctccccgtacatgggcagccccgccgtgcgacccggcctggcccccgcgggcatggagcccgcccgcaagcgagcagcgcccccgcccgggcagagccaggcacagagccagggccagccggtgcccaccgcccccgcgcggagccgcagtgccaagaggaggaagatggctgacaaaatcctccctcaaaggattcgggagctggtccccgagtcccaggcttacatggacctcttggcatttgagaggaaactggatcaaaccatcatgcggaagcgggtggacatccaggaggctctgaagaggcccatgaagcaaaagcggaagctgcgactctatatctccaacacttttaaccctgcgaagcctgatgctgaggattccgacggcagcattgcctcctgggagctacgggtggaggggaagctcctggatgatcccagcaaacagaagcggaagttctcttctttcttcaagagtttggtcatcgagctggacaaagatctttatggccctgacaaccacctcgttgagtggcatcggacacccacgacccaggagacggacggcttccaggtgaaacggcctggggacctgagtgtgcgctgcacgctgctcctcatgctggactaccagcctccccagttcaaactggatccccgcctagcccggctgctggggctgcacacacagagccgctcagccattgtccaggccctgtggcagtatgtgaagaccaacaggctgcaggactcccatgacaaggaatacatcaatggggacaagtatttccagcagatttttgattgtccccggctgaagttttctgagattccccagcgcctcacagccctgctattgccccctgacccaattgtcatcaaccatgtcatcagcgtggacccttcagaccagaagaagacggcgtgctatgacattgacgtggaggtggaggagccattaaaggggcagatgagcagcttcctcctatccacggccaaccagcaggagatcagtgctctggacagtaagatccatgagacgattgagtccataaaccagctcaagatccagagggacttcatgctaagcttctccagagaccccaaaggctatgtccaagacctgctccgctcccagagccgggacctcaaggtgatgacagatgtagccggcaaccctgaagaggagcgccgggctgagttctaccaccagccctggtcccaggaggccgtcagtcgctacttctactgcaagatccagcagcgcaggcaggagctggagcagtcgctggttgtgcgcaacacctaggagcccaaaaataagcagcacgacggaactttcagccgtgtcccgggccccagcattttgccccgggctccagcatcactcctctgccaccttggggtgtggggctggattaaaagtcattcatctgac

SEQ ID NO: 6566 - protein, 483 aa, Homo sapiens; identical to SEQ ID NO: 937

SEQ ID NO: 6567 - DNA, 2401 bp, Homo sapiens
cagatcctcagaatggcccttggtgctgcaggcgcggtgggctccgggcccaggcaccgagggggcactggatgactctccaggtgcaggaccctgccatctatgactccaggtcttcagcacccacccaccgtggtacagtgccaagaggaggaagatggctgacaaaatcctccctcaaaggattcgggagctggtccccgagtcccaggcttacatggacctcttggcatttgagaggaaactggatcaaaccatcatgcggaagcgggtggacatccaggaggctctgaagaggcccatgaagcaaaagcggaagctgcgactctatatctccaacacttttaaccctgcgaagcctgatgctgaggattccgacggcagcattgcctcctgggagctacgggtggaggggaagctcctggatgatcccagcaaacagaagcggaagttctcttctttcttcaagagtttggtcatcgagctggacaaagatctttatggccctgacaaccacctcgttgagtggcatcggacacccacgacccaggagacggacggcttccaggtgaaacggcctggggacctgagtgtgcgctgcacgctgctcctcatgctggactaccagcctccccagttcaaactggatccccgcctagcccggctgctggggctgcacacacagagccgctcagccattgtccaggccctgtggcagtatgtgaagaccaacaggctgcaggactcccatgacaaggaatacatcaatggggacaagtatttccagcaggtaacctctctcctgaaccctgggatctggggagcaggcggagttctccagcaggggaagtacctctaccaaggtaactaccacccctcccttctagattcctgagtagcagaagcagtacacagtcatggtcttggagccaagagaccgaccaggattctagttcaggccctactgtggattagctctgtgctgcagccaatccatgttagcccccccaagttaggaagacctggaaaccctacaaagccaaccgctttctggaatgtaatattcttggcacttggagttaggatccccaggttctagtcctgagtctggactctgggtaagtgactcagcgattctgaaccttgtttccttatctttgaagtggagtgacaatacctgtcctatctactctcctgggcagttaggaaaatcaaattgctgcaaaagtgattgagcaaaattccaccaaaacagagaatattcttattaatgcatttaaaaataaatacagcagataaacctgaggagtaaaaatagcagttgatatttattgggcacttaccatgtgccaggcactgtcccaagcactttatgtgtattagttcactgacttctcacggcagccctgggagataggtattcttttcatccccactctagagatgaagacactgagccctgaggtgttaacttgctccaggttgcatagtaagtggcagaggcaggactgatacataagcaggctgacccagggcccgcactctcaacccctgccccacactgacccaccccctatcttgtcagccataccggtggctccaccaccagaccagcccaccccaatcccatccccatgcgcactgaggaatcagacttcctctcagcttcttgtggcctttctagaacaaaaggatctacaactgcatgatgatctcttcaagaagagtgatctctctctccccaattgtcctgcttcagatttttgattgtccccggctgaagttttctgagattccccagcgcctcacagccctgctattgccccctgacccaattgtcatcaaccatgtcatcagcgtggacccttcagaccagaagaagacggcgtgctatgacattgacgtggaggtggaggagccattaaaggggcagatgagcagcttcctcctatccacggccaaccagcaggagatcagtgctctggacagtaagatccatgagacgattgagtccataaaccagctcaagatccagagggacttcatgctaagcttctccagagaccccaaaggctatgtccaagacctgctccgctcccagagccgggacctcaaggtgatgacagatgtagccggcaaccctgaagaggagcgccgggctgagttctaccaccagccctggtcccaggaggccgtcagtcgctacttctactgcaagatccagcagcgcaggcaggagctggagcagtcgctggttgtgcgcaacacctaggagcccaaaaataagcagcacgacggaactttcagccgtgtcccgggccccagcattttgccccgggctccagcatcactcctctgccaccttggggtgtggggctggattaaaagtcattcatctgac

SEQ ID NO: 6568 - protein, 245 aa, Homo sapiens [sequence omitted]

SEQ ID NO: 6569 - DNA, 2298 bp, Homo sapiens
ccctttcctcccaaccctgctcaggattgatccatgggcagcagcctcttttgctcacatggcttaaccagaccctgagccactcccaagccccacctctgtcacccacaccccgctcctacagcactgctctcttcttagctcccatgccccaccgtctgctcagggacttcatttcataagttgggtcctgacccaacgagctggaggccttcctgctcttccagcaaggaaggaagcagggcaggacaggacagagcaggcactagcagggaccaggagggaggcgcctaggccagctggtagtcatggagcaggctgactacctgcctgccacctctggagtccctccatgcccctgggctccagggccatcccagttaccatcctgacctgccctctggcctttgcctccaatgcccagctctctccctccaaccattgccacacccccaaaactggcctctccagtcagggcttgggctctgcctggggtccctgctctgtctttcaagttctttgtcccgcaggaccctggggccggtctctgtctgcttcccacacatactgctcccacctgcgccctgccttgtgccaccccagccccagctggcccatgctggttgcctccatcctaggcccttttttctgcacagtgtcctggcttcctcagacctccactccggggagtttggcttcttcgcagcttcccgaggcctccttgaatctacgctggggctcagggtctgacctctcctttcagatcctcagaatggcccttggtgctgcaggcgcggtgggctccgggcccaggcaccgagggggcactggatgactctccaggtgcaggaccctgccatctatgactccaggtcttcagcacccacccaccgtggtacagcgccccgggatgccgtctggagcccggatgccccaccagggggcgcccatgggccccccgggctccccgtacatgggcagccccgcccccccgcgcggagccgcagtgccaagaggaggaagatggctgacaaaatcctccctcaaaggattcgggagctggtccccgagtcccaggcttacatggacctcttggcatttgagaggaaactggatcaaaccatcatgcggaagcgggtggacatccaggaggctctgaagaggcccatgaagcaaaagcggaagctgcgactctatatctccaacacttttaaccctgcgaagcctgatgctgaggattccgacggcagcattgcctcctgggagctacgggtggaggggaagctcctggatgatcccagcaaacagaagcggaagttctcttctttcttcaagagtttggtcatcgagctggacaaagatctttatggccctgacaaccacctcgttgagtggcatcggacacccacgacccaggagacggacggcttccaggtgaaacggcctggggacctgagtgtgcgctgcacgctgctcctcatgctggactaccagcctccccagttcaaactggatccccgcctagcccggctgctggggctgcacacacagagccgctcagccattgtccaggccctgtggcagtatgtgaagaccaacaggctgcaggactcccatgacaaggaatacatcaatggggacaagtatttccagcagatttttgattgtccccggctgaagttttctgagattccccagcgcctcacagccctgctattgccccctgacccaattgtcatcaaccatgtcatcagcgtggacccttcagaccagaagaagacggcgtgctatgacattgacgtggaggtggaggagccattaaaggggcagatgagcagcttcctcctatccacggccaaccagcaggagatcagtgctctggacagtaagatccatgagacgattgagtccataaaccagctcaagatccagagggacttcatgctaagcttctccagagaccccaaaggctatgtccaagacctgctccgctcccagagccgggacctcaaggtgatgacagatgtagccggcaaccctgaagaggagcgccgggctgagttctaccaccagccctggtcccaggaggccgtcagtcgctacttctactgcaagatccagcagcgcaggcaggagctggagcagtcgctggttgtgcgcaacacctaggagcccaaaaataagcagcacgacggaactttcagccgtgtcccgggccccagcattttgccccgggctccagcatcactcctctgccaccttggggtgtggggctggattaaaagtcattcatctgac

SEQ ID NO: 6570 - protein, 445 aa, Homo sapiens; identical to SEQ ID NO: 6560

SEQ ID NO: 6571 - DNA, 1671 bp, Homo sapiens
ctggcatcttcctcccctcctcctttccagatcctcagaatggcccttggtgctgcaggcgcggtgggctccgggcccaggcaccgagggggcactggatgactctccaggtgcaggaccctgccatctatgactccaggtcttcagcacccacccaccgtggtacagcgccccgggatgccgtctggagcccggatgccccaccagggggcgcccatgggccccccgggctccccgtacatgggcagccccgccgtgcgacccggcctggcccccgcgggcatggagcccgcccgcaagcgagcagcgcccccgcccgggcagagccaggcacagagccagggccagccggtgcccaccgcccccgcgcggagccgcagtgccaagaggaggaagatggctgacaaaatcctccctcaaaggattcgggagctggtccccgagtcccaggcttacatggacctcttggcatttgagaggaaactggatcaaaccatcatgcggaagcgggtggacatccaggaggctctgaagaggcccatgaagcaaaagcggaagctgcgactctatatctccaacacttttaaccctgcgaagcctgatgctgaggattccgacggcagcattgcctcctgggagctacgggtggaggggaagctcctggatgatcccagcaaacagaagcggaagttctcttctttcttcaagagtttggtcatcgagctggacaaagatctttatggccctgacaaccacctcgttgagtggcatcggacacccacgacccaggagacggacggcttccaggtgaaacggcctggggacctgagtgtgcgctgcacgctgctcctcatgctggactaccagcctccccagttcaaactggatccccgcctagcccggctgctggggctgcacacacagagccgctcagccattgtccaggccctgtggcagtatgtgaagaccaacaggctgcaggactcccatgacaaggaatacatcaatggggacaagtatttccagcagatttttgattgtccccggctgaagttttctgagattccccagcgcctcacagccctgctattgccccctgacccaattgtcatcaaccatgtcatcagcgtggacccttcagaccagaagaagacggcgtgctatgacattgacgtggaggtggaggagccattaaaggggcagatgagcagcttcctcctatccacggccaaccagcaggagatcagtgctctggacagtaagatccatgagacgattgagtccataaaccagctcaagatccagagggacttcatgctaagcttctccagagaccccaaaggctatgtccaagacctgctccgctcccagagccgggacctcaaggtgatgacagatgtagccggcaaccctgaagaggagcgccgggctgagttctaccaccagccctggtcccaggaggccgtcagtcgctacttctactgcaagatccagcagcgcaggcaggagctggagcagtcgctggttgtgcgcaacacctaggagcccaaaaataagcagcacgacggaactttcagccgtgtcccgggccccagcattttgccccgggctccagcatcactcctctgccaccttggggtgtggggctggattaaaagtcattcatctgac

SEQ ID NO: 6572 - protein, 470 aa, Homo sapiens; identical to SEQ ID NO: 939

SEQ ID NO: 6573 - DNA, 2248 bp, Homo sapiens
taggcttctccaagctgccaaatttaagtattgagtacataaaaggaggagattggcattagtgagaacatggccctgaggcttgatggacccaaagcctcccagggtatgtgcgttttgagggggtggggggtgcacatgggtgtccgggacctcgtctaggtaatgtctgcagccacataggatgatctgactgaatctgtgtgaggacaaccgtttgtgtgcctgtgtgtgcgcgcccacgtgcatgcgcgtgtgtggtcctagtgtaggtgatgtctgcggccacacaggatgctgactgcgtgtgtgactcgtgggcgtgcagatgcaagcacaggcctacgacacatctgtgtacaggctgaagatcacaacgggtctggccagggcccgccgagggcctccgagctggcgagcacaccgacggctggatggggcgacgcttcctgctccggtccctaactcattattaagctcctcgctctttgcagacgctccctgcgcctcccccgctccgggctgcagcggcgcaggcgccgggccgagccgagcgccgagcagggagcgggcggccgcgctccgggccggggtcccgggggagcagatcctcagaatggcccttggtgctgcaggcgcggtgggctccgggcccaggcaccgagggggcactggatgactctccaggtgcaggaccctgccatctatgactccaggtcttcagcacccacccaccgtggtacagcgccccgggatgccgtctggagcccggatgccccaccagggggcgcccatgggccccccgggctccccgtacatgggcagccccgccgtgcgacccggcctggcccccgcgggcatggagcccgcccgcaagcgagcagcgcccccgcccgggcagagccaggcacagagccagggccagccggtgcccaccgcccccgcgcggagccgcagtgccaagaggaggaagatggctgacaaaatcctccctcaaaggattcgggagctggtccccgagtcccaggcttacatggacctcttggcatttgagaggaaactggatcaaaccatcatgcggaagcgggtggacatccaggaggctctgaagaggcccatgaagcaaaagcggaagctgcgactctatatctccaacacttttaaccctgcgaagcctgatgctgaggattccgacggcagcattgcctcctgggagctacgggtggaggggaagctcctggatgatcccagcaaacagaagcggaagttctcttctttcttcaagagtttggtcatcgagctggacaaagatctttatggccctgacaaccacctcgttgagtggcatcggacacccacgacccaggagacggacggcttccaggtgaaacggcctggggacctgagtgtgcgctgcacgctgctcctcatgctggactaccagcctccccagttcaaactggatccccgcctagcccggctgctggggctgcacacacagagccgctcagccattgtccaggccctgtggcagtatgtgaagaccaacaggctgcaggactcccatgacaaggaatacatcaatggggacaagtatttccagcagatttttgattgtccccggctgaagttttctgagattccccagcgcctcacagccctgctattgccccctgacccaattgtcatcaaccatgtcatcagcgtggacccttcagaccagaagaagacggcgtgctatgacattgacgtggaggtggaggagccattaaaggggcagatgagcagcttcctcctatccacggccaaccagcaggagatcagtgctctggacagtaagatccatgagacgattgagtccataaaccagctcaagatccagagggacttcatgctaagcttctccagagaccccaaaggctatgtccaagacctgctccgctcccagagccgggacctcaaggtgatgacagatgtagccggcaaccctgaagaggagcgccgggctgagttctaccaccagccctggtcccaggaggccgtcagtcgctacttctactgcaagatccagcagcgcaggcaggagctggagcagtcgctggttgtgcgcaacacctaggagcccaaaaataagcagcacgacggaactttcagccgtgtcccgggccccagcattttgccccgggctccagcatcactcctctgccaccttggggtgtggggctggattaaaagtcattcatctgac

SEQ ID NO: 6574 - protein, 470 aa, Homo sapiens; identical to SEQ ID NO: 939

SEQ ID NO: 6575 - DNA, 277 bp, Homo sapiens
ctgctccgctcccagagccgggacctcaaggtgaagagggagactcagggagtacagaacactgacacctgctcctgttctcacttcctctaaagatccagcagcgcaggcaggagctggagcagtcgctggttgtgcgcaacacctaggagcccaaaaataagcagcacgacggaactttcagccgtgtcccgggccccagcattttgccccgggctccagcatcactcctctgccaccttggggtgtggggctggattaaaagtcattcatctga

SEQ ID NO: 6576 - protein, 42 aa, Homo sapiens
RGRLREYRTLTPAPVLTSSKDPAAQAGAGAVAGCAQHLGAQK

SEQ ID NO: 6577 - DNA, 806 bp, Homo sapiens
taggcttctccaagctgccaaatttaagtattgagtacataaaaggaggagattggcattagtgagaacatggccctgaggcttgatggacccaaagcctcccagggtatgtgcgttttgagggggtggggggtgcacatgggtgtccgggacctcgtctaggtaatgtctgcagccacataggatgatctgactgaatctgtgtgaggacaaccgtttgtgtgcctgtgtgtgcgcgcccacgtgcatgcgcgtgtgtggtcctagtgtaggtgatgtctgcggccacacaggatgctgactgcgtgtgtgactcgtgggcgtgcagatgcaagcacaggcctacgacacatctgtgtacaggctgaagatcacaacgggtctggccagggcccgccgagggcctccgagctggcgagcacaccgacggctggatggggcgacgcttcctgctccggtccctaactcattattaagctcctcgctctttgcagacgctccctgcgcctcccccgctccgggctgcagcggcgcaggcgccgggccgagccgagcgccgagcagggagcgggcggccgcgctccgggccggggtcccgggggagcagatcctcagaatggcccttggtgctgcaggcgcggtgggctccgggcccaggcaccgagggggcactggatgactctccaggtgcaggaccctgccatctatgactccaggtcttcagcacccacccaccgtggtacagcgccccgggatgccgtctggagcccggatgccccaccagggggcgcccatgggccccccgg

SEQ ID NO: 6578 - protein, 116 aa, Homo sapiens
MQAQAYDTSVYRLKITTGLARARRGPPSWRAHRRLDGATLPAPVPNSLLSSSLFADAPCASPAPGCSGAGAGPSRAPSRERAAALRAGVPGEQILRMALGAAGAVGSGPRHRGGTG

SEQ ID NO: 6579 - DNA, 216 bp, Homo sapiens
gtggcgtggcagcttatgtgcgtgcagacagacgccctgtatgtgtgcctccctccacgacagcctccgtgcgcgcgcgcctgcgtgtgtggcaggacatggcctgtgcctttcagctctgtgagaggctatttctggatgctggctgcatccagatgttggctgccagggatctggggggcagccttgtggcttctggtcgacttgggatctgct

SEQ ID NO: 6580 - protein, 66 aa, Homo sapiens
MCVQTDALYVCLPPRQPPCARACVCGRTWPVPFSSVRGYFWMLAASRCWLPGIWGAALWLLVDLGS

SEQ ID NO: 6581 - DNA, 2408 bp, Homo sapiens
gcgtttccgggatttctctgtaggtgaggcgggaggctggagggagctgagcccccggggagggggcccgattccgcctcgccgcgcctctggctgctgggccgtgggtttttctcttctcctgggagtaaggaggacgacggcccctaacccctgaattagccttctatttccattagtgacttagaagctacccggcgcctcatctgggctcacctgagctgaggatcaggaaggggagggggcacagtcattccctcgcggacgcggcgggaccccagcggacggctttgtgcggactttcggcaccgttatgcccccctagcccgacaccacctggggctggcgcgccacgttactgttcagggccagacgcaccgccctgcctgctccggggagccggacctccgatcccggggatgggggaccccgagacctcagacccaacggaggggactctgatacctcagaccccacgcggggaccccgaggcttcagacccccacagggtgaccccgagatctcagacccccgcaggagtacctccagacctcaaatccccagtaagggaatgaaagagacttcggatccctgaggcagcaaatccctgtaggggcatcccaggactcaggtcaccgcggggtgaacccagacctcacattcaggcaatccccaggacgccgatcggctggcactacccactgtcccggccaccccccctggagctcaaaggcttggccctccagctgctccaccctgccggcaaccaggctcaaacctgcagcccgcggatcccctgccccggaagcaaccagattcgcgggaggttacctgactgatccaaggcagtttctcactccgttgcccaggctggaatgcagtggtgtaatcacagctcactgcagcctcaacctactggactcaaaggataagatctgcttttaattaatttttgtatacggtatgggatagggaccaaagttcatttttttgcatgtatacatatccaaatgttccagcatcatttattaaaaagttatttttgtctctactgcatttcctttgtgcttacatcaaaatctgtgttgcatatgtatgtgtttcattttaggcttcctattgtgttccattgagctatttgtctttttgctgccagcaccatgctgttttgattattgtagctatataaataagtgatgaaatcagatagtttatgtcctacaactttatttttcaaggttattttgtatcttctagattcttcagatttccttttaaatcttagagtcgacttctcattttgcacaaaaaaatactgctgggattttgattgagattgtgttgactctacagatgaatttggggagaattgacattttaaccatattgaatcttctgacccattaacatttaggtcttttaaaatttctctggccagacgcagtggctcacgcctgccactttgggaggccaaggcgggccgatcacaaggtcaggagattgagaccatcctggctaacacagtgaaaccccatctctactaaaaatacaaaaaattagccgggcgtggtggcatgcgcctgtagccccagctacttggaaggctgaggcaggagaatggcatgaacccgggagacagagcttgcagtgagcagagatcttgccactgcactccacctggggcaacagagcgagactccatctcaaaaaaaaaaaatataactgttgttagattttaacctaagtatttgtttttttattttgtttttctttttttcttcttttttttttttttttttttttgagacaggatctcactctgtctcccaggctgaagtgcaatggtgtgatcatggctcatcttgaagcctcgaccctcctgggatcaagctatcctcccacctcaacctcctgagtagctgggactacaagtacacatgaccatgcccaattcattttttaaattctttgtagaggcggagtcccactatgttgcccaggctggtcttgaactcctgggctcaagcaatcctcccacctcagcttcccaaagtgtagggattacaggcatgagccactgtgcaaggtcttgtgttttttgataatatcgtaaatggtgattttttcatttgtttctgattgttgctaatatatggaaatatagttgatatctgcaattgatctcatgtcctgaaaacttgctaaatctgcttaataattttttgtacattcaaaatgatgttctacaggtagtcgtattgtctatgttggaaggaaagcttttcctcattcaatgtcggtcctgtgtttgaagacctgcaaattaactgataacaacaggttaacaggagaaaagacaaggtttagagtaactcactaaatagaaataaaggtttatagatccactt

SEQ ID NO: 6582 - protein, 54 aa, Homo sapiens
MTMPNSFFKFFVEAESHYVAQAGLELLGSSNPPTSASQSVGITGMSHCARSCVF

SEQ ID NO: 6583 - DNA, 1382 bp, Homo sapiens
ccgggatttctctgtaggtgaggcgggaggctggagggagctgagcccccggggagggggcccgattccgcctcgccgcgcctctggctgctgggccgtgggtttttctcttctcctgggagtaaggaggacgacggcccctaacccctgaattagccttctatttccattagtgacttagaagctacccggcgcctcatctgggctcacctgagctgaggatcaggaaggggagggggcacagtcattccctcgcggacgcggcgggaccccagcggacggctttgtgcggactttcggcaccgttatgcccccctagcccgacaccacctggggctggcgcgccacgttactgttcagggccagacgcaccgccctgcctgctccggggagcccagacctcacattcaggcaatccccaggacgccgatcggctggcactacccactgtcccggccaccccccctggagctcaaaggcttggccctccagctgctccaccctgccggcaaccaggctcaaacctgcagcccgcggatcccctgccccggaagcaaccagattcgcgggaggttacctgactgatccaaggtgatacagctggtaactgatggagatgttggtagtgaaattcatgtacttttagttctttctatggaatctagaggtagaatacatgtaaaagaatatcgactaccgtctactcaggtctctgttttatctgtttattcattcactctcagcttttaataggatccaatgagccctctgtggttctgaagaattgccttgagtatatgcagcctcaaaaaacccacttcctaggctcagtctttgatcaatatttatcattatcaccagttattgttctaataaactctactctggaaatatggtgttatggtttacttgggagtgtgagttcagggcatcattgaagactcacgtacttttactgagaaagtgacattgatctctgtagattttgaattaaatgatatgatgaagtatataaaccaattacttttggtcaaggtggtaaaaaaagtttagtatttgatagattcttcatctccacgatcacaaatattttctcctaggatttcttctagaaatattactgctttaggttgtatatcaggtctaggttctacttttttttttttttttctccaggcagtttctcactccgttgcccaggctggaatgcagtggtgtaatcacagctcactgcagcctcaacctactggactcaaaggataagatctgcttttaattaatttttgtatacggtatgggatagggaccaaagttcatttttttgcatgtatacatatccaaatgttccagcatcatttattaaaaagttatttttgtctcta

SEQ ID NO: 6584 - protein, 46 aa, Homo sapiens
MQPQKTHFLGSVFDQYLSLSPVIVLINSTLEIWCYGLLGSVSSGHH

SEQ ID NO: 6585 - DNA, 1699 bp, Homo sapiens
caggactctgcctgccagtgagccccagatccagggactaaggcagcaggggtgaaagcaggcagcaggaagtacctcacctttcaggatgggggccgccatgacagacggcgggatccggccagctggcctacgcggtgcttgcgagcctggcggcgcgcgcgggcactgggcatgcgcggggtgagcgcgccgccgtcaccgcgctccgctgaatccgcgtttccgggatttctctgtagtgacttagaagctacccggcgcctcatctgggctcacctgagctgaggatcaggaaggggagggggcacagtcattccctcgcggacgcggcgggaccccagcggacggctttgtgcggactttcggcaccgttatgcccccctagcccgacaccacctggggctggcgcgccacgttactgttcagggccagacgcaccgccctgcctgctccggggagccggacctccgatcccggggatgggggaccccgagacctcagacccaacggaggggactctgatacctcagaccccacgcggggaccccgaggcttcagacccccacagggtgaccccgagatctcagacccccgcaggagtacctccagacctcaaatccccagtaagggaatgaaagagacttcggatccctgaggcagcaaatccctgtaggggcatcccaggactcaggtcaccgcggggtgaacccagacctcacattcaggcaatccccaggacgccgatcggctggcactacccactgtcccggccaccccccctggagctcaaaggcttggccctccagctgctccaccctgccggcaaccaggctcaaacctgcagcccgcggatcccctgccccggaagcaaccagattcgcgggaggttacctgactgatccaaggtgatacagctggtaactgatggagatgttggtagtgaaattcatgtacttttagttctttctatggaatctagaggtagaatacatgtaaaagaatatcgactaccgtctactcaggtctctgttttatctgtttattcattcactctcagcttttaataggatccaatgagccctctgtggttctgaagaattgccttgagtatatgcagcctcaaaaaacccacttcctaggctcagtctttgatcaatatttatcattatcaccagttattgttctaataaactctactctggaaatatggtgttatggtttacttgggagtgtgagttcagggcatcattgaagactcacgtacttttactgagaaagtgacattgatctctgtagattttgaattaaatgatatgatgaagtatataaaccaattacttttggtcaaggtggtaaaaaaagtttagtatttgatagattcttcatctccacgatcacaaatattttctcctaggatttcttctagaaatattactgctttaggttgtatatcaggtctaggttctacttttttttttttttttctccaggcagtttctcactccgttgcccaggctggaatgcagtggtgtaatcacagctcactgcagcctcaacctactggactcaaaggataagatctgcttttaattaatttttgtatacggtatgggatagggaccaaagttcatttttttgcatgtatacatatccaaatgttccagcatcatttattaaaaagttatttttgtctcta

SEQ ID NO: 6586 - protein, 37 aa, Homo sapiens
MRGVSAPPSPRSAESAFPGFLCSDLEATRRLIWAHLS

SEQ ID NO: 6587 - DNA, 1050 bp, Homo sapiens
gcgtttccgggatttctctgtaggtgaggcgggaggctggagggagctgagcccccggggagggggcccgattccgcctcgccgcgcctctggctgctgggccgtgggtttttctcttctcctgggagtaaggaggacgacggcccctaacccctgaattagccttctatttccattagtgacttagaagctacccggcgcctcatctgggctcacctgagctgaggatcaggaaggggagggggcacagtcattccctcgcggacgcggcgggaccccagcggacggctttgtgcggactttcggcaccgttatgcccccctagcccgacaccacctggggctggcgcgccacgttactgttcagggccagacgcaccgccctgcctgctccggggagccggacctccgatcccggggatgggggaccccgagacctcagacccaacggaggggactctgatacctcagaccccacgcggggaccccgaggcttcagacccccacagggtgaccccgagatctcagacccccgcaggagtacctccagacctcaaatccccagtaagggaatgaaagagacttcggatccctgaggcagcaaatccctgtaggggcatcccaggactcaggtcaccgcggggtgaacccagacctcacattcaggcaatccccaggacgccgatcggctggcactacccactgtcccggccaccccccctggagctcaaaggcttggccctccagctgctccaccctgccggcaaccaggctcaaacctgcagcccgcggatcccctgccccggaagcaaccagattcgcgggaggttacctgactgatccaaggcagtttctcactccgttgcccaggctggaatgcagtggtgtaatcacagctcactgcagcctcaacctactggactcaaaggataagatctgcttttaattaatttttgtatacggtatgggatagggaccaaagttcatttttttgcatgtatacatatccaaatgttccagcatcatttattaaaaagttatttttgtctct

SEQ ID NO: 6588 - protein, 51 aa, Homo sapiens
MGDPETSDPTEGTLIPQTPRGDPEASDPHRVTPRSQTPAGVPPDLKSPVRE

SEQ ID NO: 6589 - DNA, 2770 bp, Homo sapiens
gctaacagctgccaatacctcactgagtgcctcacaccaacatgggctccaagatgaaggcatctttctgatcaggggtttgtagctcaaacaaaagaatgagcgtgcttctagaaccacagagcaagggaacatggtagaggataagctggcaagttgaaaagcgtgggatttcatcccagtttgacactaactgtgcaaccccaaacaaatctcctaaccttcagaggctcggatttcttgtctatgagatgaagtgagtttccttcgtctgggcagactccctcccctcttccataaaggctgcaggagacctgtagctgtcacaggaccttccctaagagcccgcaggggaagactgccccagtccggccatcaccatgctccggaccattctggatgctccccagcggttgctgaaggaggggagagcgtcccggcagctggtgctggtggtggtattcgtcgctttgctcctggacaacatgctgtttactgtggtggtgccaattgtgcccaccttcctatatgacatggagttcaaagaagtcaactcttctctgcacctcggccatgccggaagttccccacatgccctcgcctctcctgccttttccaccatcttctccttcttcaacaacaacaccgtggctgttgaagaaagcgtacctagtggaatagcatggatgaatgacactgccagcaccatcccacctccagccactgaagccatctcagctcataaaaacaactgcttgcaaggcacaggtttcttggaggaagagattacccgggtcggggttctgtttgcttcaaaggctgtgatgcaacttctggtcaacccattcgtgggccctctcaccaacaggattggatatcatatccccatgtttgctggctttgttatcatgtttctctccacagttatgtttgctttttctgggacctatactctactctttgtggcccgaacccttcaaggcattggatcttcattttcatctgttgcaggtcttggaatgctggccagtgtctacactgatgaccatgagagaggacgagccatgggaactgctctggggggcctggccttggggttgctggtgggagctccctttggaagtgtaatgtacgagtttgttgggaagtctgcacccttcctcatcctggccttcctggcactactggatggagcactccagctttgcatcctacagccttccaaagtctctcctgagagtgccaaggggactcccctctttatgcttctcaaagacccttacatcctggtggctgcaggtctagctttcttgcctgccagtgtgtcctacctcattggcaccaacctctttggtgtgttggccaacaagatgggtcggtggctgtgttccctaatcgggatgctggtagtaggtaccagcttgctctgtgttcctctggctcacaatatttttggtctcattggccccaatgcagggcttggccttgccataggcatggtggattcttctatgatgcccatcatggggcacctggtggatctacgccacacctcggtgtatgggagtgtctacgccatcgctgatgtggctttttgcatgggctttgctataggtccatccaccggtggtgccattgtaaaggccatcggttttccctggctcatggtcatcactggggtcatcaacatcgtctatgctccactctgctactacctgcggagccccccggcaaaggaagagaagcttgctattctgagtcaggactgccccatggagacccggatgtatgcaacccagaagcccacgaaggaatttcctctgggggaggacagtgatgaggagcctgaccatgaggagtagcagcagaaggtgctccttgaattcatgatgcctcagtgaccacctctttccctgggaccagatcaccatggctgagcccacggctcagtgggcttcacatacctctgcctgggaatcttctttcctcccctcccatggacactgtccctgatactcttctcacctgtgtaacttgtagctcttcctctatgccttggtgccgcagtggcccatcttttatgggaagacagagtgatgcaccttcccgctgctgtgaggttgattaaacttgagctgtgacgggttctgcaaggggtgactcattgcatagaggtggtagtgagtaatgtgcccctgaaaccagtggggtgactgacaagcctctttaatctgttgcctgattttctctggcatagtcccaacagatcggaagagtgttaccctcttttcctcaacgtgttctttcccgggttttcccagccgagttgagaaaatgttctcagcattgtcttgctgccaaatgccagcttgaagagttttgttttgttttttttcatttatttttttttttaataaagtgagtgatttttctgtggctaaatctagagctgctaaaagggctttaccctcagtgaaaagtgtcttctattttcattatctttcagaaacaggagcccatttctcttctgctggagttattgacattctcctgacctcccctgtgtgttcctaccttttctgaacctcttagactcttagaaataaaagtagaagaaagacagaaaaaataactgattagacccaagatttcatgggaagaagttaaaagaaactgccttgaaatccctcctgattgtagatttcctaacaggaggggtgtaatgtgacattgttcatacttgctaataaatacattattgcctaattca

SEQ ID NO: 6590 - protein, 493 aa, Homo sapiens
MLRTILDAPQRLLKEGRASRQLVLVVVFVALLLDNMLFTVVVPIVPTFLYDMEFKEVNSSLHLGHAGSSPHALASPAFSTIFSFFNNNTVAVEESVPSGIAWMNDTASTIPPPATEAISAHKNNCLQGTGFLEEEITRVGVLFASKAVMQLLVNPFVGPLTNRIGYHIPMFAGFVIMFLSTVMFAFSGTYTLLFVARTLQGIGSSFSSVAGLGMLASVYTDDHERGRAMGTALGGLALGLLVGAPFGSVMYEFVGKSAPFLILAFLALLDGALQLCILQPSKVSPESAKGTPLFMLLKDPYILVAAGLAFLPASVSYLIGTNLFGVLANKMGRWLCSLIGMLVVGTSLLCVPLAHNIFGLIGPNAGLGLAIGMVDSSMMPIMGHLVDLRHTSVYGSVYAIADVAFCMGFAIGPSTGGAIVKAIGFPWLMVITGVINIVYAPLCYYLRSPPAKEEKLAILSQDCPMETRMYATQKPTKEFPLGEDSDEEPDHEE

SEQ ID NO: 6591 - DNA, 2818 bp, Homo sapiens
ggcaataaatccaacagcacatccacgttcagagaacagtgtccctgctgtcttgctaacagctgccaatacctcactgagtgcctcacaccaacatgggctccaagtgagtttccttcgtctgggcagactccctcccctcttccataaaggctgcaggagacctgtagctgtcacaggaccttccctaagagcccgcaggggaagactgccccagtccggccatcaccatgctccggaccattctggatgctccccagcggttgctgaaggaggggagagcgtcccggcagctggtgctggtggtggtattcgtcgctttgctcctggacaacatgctgtttactgtggtggtgccaattgtgcccaccttcctatatgacatggagttcaaagaagtcaactcttctctgcacctcggccatgccggaagttccccacatgccctcgcctctcctgccttttccaccatcttctccttcttcaacaacaacaccgtggctgttgaagaaagcgtacctagtggaatagcatggatgaatgacactgccagcaccatcccacctccagccactgaagccatctcagctcataaaaacaactgcttgcaaggcacaggtttcttggaggaagagattacccgggtcggggttctgtttgcttcaaaggctgtgatgcaacttctggtcaacccattcgtgggccctctcaccaacaggattggatatcatatccccatgtttgctggctttgttatcatgtttctctccacagttatgtttgctttttctgggacctatactctactctttgtggcccgaacccttcaaggcattggatcttcattttcatctgttgcaggtcttggaatgctggccagtgtctacactgatgaccatgagagaggacgagccatgggaactgctctggggggcctggccttggggttgctggtgggagctccctttggaagtgtaatgtacgagtttgttgggaagtctgcacccttcctcatcctggccttcctggcactactggatggagcactccagctttgcatcctacagccttccaaagtctctcctgagagtgccaaggggactcccctctttatgcttctcaaagacccttacatcctggtggctgcagggtccatctgctttgccaacatgggggtggccatcctggagcccacactgcccatctggatgatgcagaccatgtgctcccccaagtggcagctgggtctagctttcttgcctgccagtgtgtcctacctcattggcaccaacctctttggtgtgttggccaacaagatgggtcggtggctgtgttccctaatcgggatgctggtagtaggtaccagcttgctctgtctaccaagttagaagtctaaatgaaacctttcagtgatgtccataatggaaaacagaggcaactttattccatgaagaatgagaccaggagtgtatgtttaggttcctctggctcacaatatttttggtctcattggccccaatgcagggcttggccttgccataggcatggtggattcttctatgatgcccatcatggggcacctggtggatctacgccacacctcggtgtatgggagtgtctacgccatcgctgatgtggctttttgcatgggctttgctataggtccatccaccggtggtgccattgtaaaggccatcggttttccctggctcatggtcatcactggggtcatcaacatcgtctatgctccactctgctactacctgcggagccccccggcaaaggaagagaagcttgctattctgagtcaggactgccccatggagacccggatgtatgcaacccagaagcccacgaaggaatttcctctgggggaggacagtgatgaggagcctgaccatgaggagtagcagcagaaggtgctccttgaattcatgatgcctcagtgaccacctctttccctgggaccagatcaccatggctgagcccacggctcagtgggcttcacatacctctgcctgggaatcttctttcctcccctcccatggacactgtccctgatactcttctcacctgtgtaacttgtagctcttcctctatgccttggtgccgcagtggcccatcttttatgggaagacagagtgatgcaccttcccgctgctgtgaggttgattaaacttgagctgtgacgggttctgcaaggggtgactcattgcatagaggtggtagtgagtaatgtgcccctgaaaccagtggggtgactgacaagcctctttaatctgttgcctgattttctctggcatagtcccaacagatcggaagagtgttaccctcttttcctcaacgtgttctttcccgggttttcccagccgagttgagaaaatgttctcagcattgtcttgctgccaaatgccagcttgaagagttttgttttgttttttttcatttatttttttttttaataaagtgagtgatttttctgtggctaaatctagagctgctaaaagggctttaccctcagtgaaaagtgtcttctattttcattatctttcagaaacaggagcccatttctcttctgctggagttattgacattctcctgacctcccctgtgtgttcctaccttttctgaacctcttagactcttagaaataaaagtagaagaaagacagaaaaaataactgattagacccaagatttcatgggaagaagttaaaagaaactgccttgaaatccctcctgattgtagatttcctaacaggaggggtgtaatgtgacattgttcatacttgctaataaatacattattgcctaattca

SEQ ID NO: 6592 - protein, 385 aa, Homo sapiens
MLRTILDAPQRLLKEGRASRQLVLVVVFVALLLDNMLFTVVVPIVPTFLYDMEFKEVNSSLHLGHAGSSPHALASPAFSTIFSFFNNNTVAVEESVPSGIAWMNDTASTIPPPATEAISAHKNNCLQGTGFLEEEITRVGVLFASKAVMQLLVNPFVGPLTNRIGYHIPMFAGFVIMFLSTVMFAFSGTYTLLFVARTLQGIGSSFSSVAGLGMLASVYTDDHERGRAMGTALGGLALGLLVGAPFGSVMYEFVGKSAPFLILAFLALLDGALQLCILQPSKVSPESAKGTPLFMLLKDPYILVAAGSICFANMGVAILEPTLPIWMMQTMCSPKWQLGLAFLPASVSYLIGTNLFGVLANKMGRWLCSLIGMLVVGTSLLCLPS

SEQ ID NO: 6593 - DNA, 2623 bp, Homo sapiens
ggaggcaataaatccaacagcacatccacgttcagagaacagtgtccctgctgtcttgctaacagctgccaatacctcactgagtgcctcacaccaacatgggctccaagtgagtttccttcgtctgggcagactccctcccctcttccataaaggctgcaggagacctgtagctgtcacaggaccttccctaagagcccgcaggggaagactgccccagtccggccatcaccatgctccggaccattctggatgctccccagcggttgctgaaggaggggagagcgtcccggcagctggtgctggtggtggtattcgtcgctttgctcctggacaacatgctgtttactgtggtggtgccaattgtgcccaccttcctatatgacatggagttcaaagaagtcaactcttctctgcacctcggccatgccggaagttccccacatgccctcgcctctcctgccttttccaccatcttctccttcttcaacaacaacaccgtggctgttgaagaaagcgtacctagtggaatagcatggatgaatgacactgccagcaccatcccacctccagccactgaagccatctcagctcataaaaacaactgcttgcaaggcacaggtttcttggaggaagagattacccgggtcggggttctgtttgcttcaaaggctgtgatgcaacttctggtcaacccattcgtgggccctctcaccaacaggattggatatcatatccccatgtttgctggctttgttatcatgtttctctccacagttatgtttgctttttctgggacctatactctactctttgtggcccgaacccttcaaggcattggatcttcattttcatctgttgcaggtcttggaatgctggccagtgtctacactgatgaccatgagagaggacgagccatgggaactgctctggggggcctggccttggggttgctggtgggagctccctttggaagtgtaatgtacgagtttgttgggaagtctgcacccttcctcatcctggccttcctggcactactggatggagcactccagctttgcatcctacagccttccaaagtctctcctgagagtgccaaggggactcccctctttatgcttctcaaagacccttacatcctggtggctgcaggtctagctttcttgcctgccagtgtgtcctacctcattggcaccaacctctttggtgtgttggccaacaagatgggtcggtggctgtgttccctaatcgggatgctggtagtaggtaccagcttgctctgtgttcctctggctcacaatatttttggtctcattggccccaatgcagggcttggccttgccataggcatggtggattcttctatgatgcccatcatggggcacctggtggatctacgccacacctcggtgtatgggagtgtctacgccatcgctgatgtggctttttgcatgggctttgctataggtccatccaccggtggtgccattgtaaaggccatcggttttccctggctcatggtcatcactggggtcatcaacatcgtctatgctccactctgctactacctgcggagccccccggcaaaggaagagaagcttgctattctgagtcaggactgccccatggagacccggatgtatgcaacccagaagcccacgaaggaatttcctctgggggaggacagtgatgaggagcctgaccatgaggagtagcagcagaaggtgctccttgaattcatgatgcctcagtgaccacctctttccctgggaccagatcaccatggctgagcccacggctcagtgggcttcacatacctctgcctgggaatcttctttcctcccctcccatggacactgtccctgatactcttctcacctgtgtaacttgtagctcttcctctatgccttggtgccgcagtggcccatcttttatgggaagacagagtgatgcaccttcccgctgctgtgaggttgattaaacttgagctgtgacgggttctgcaaggggtgactcattgcatagaggtggtagtgagtaatgtgcccctgaaaccagtggggtgactgacaagcctctttaatctgttgcctgattttctctggcatagtcccaacagatcggaagagtgttaccctcttttcctcaacgtgttctttcccgggttttcccagccgagttgagaaaatgttctcagcattgtcttgctgccaaatgccagcttgaagagttttgttttgttttttttcatttatttttttttttaataaagtgagtgatttttctgtggctaaatctagagctgctaaaagggctttaccctcagtgaaaagtgtcttctattttcattatctttcagaaacaggagcccatttctcttctgctggagttattgacattctcctgacctcccctgtgtgttcctaccttttctgaacctcttagactcttagaaataaaagtagaagaaagacagaaaaaataactgattagacccaagatttcatgggaagaagttaaaagaaactgccttgaaatccctcctgattgtagatttcctaacaggaggggtgtaatgtgacattgttcatacttgctaataaatacattattgcctaattca

SEQ ID NO: 6594 - protein, 493 aa, Homo sapiens; identical to SEQ ID NO: 6590

SEQ ID NO: 6595 - DNA, 2753 bp, Homo sapiens
cacacacacacatacacagaatcctcagataacaggaggcaataaatccaacagcacatccacgttcagagaacagtgtccctgctgtcttgctaacagctgccaatacctcactgagtgcctcacaccaacatgggctccaagtgagtttccttcgtctgggcagactccctcccctcttccataaaggctgcaggagacctgtagctgtcacaggaccttccctaagagcccgcaggggaagactgccccagtccggccatcaccatgctccggaccattctggatgctccccagcggttgctgaaggaggggagagcgtcccggcagctggtgctggtggtggtattcgtcgctttgctcctggacaacatgctgtttactgtggtggtgccaattgtgcccaccttcctatatgacatggagttcaaagaagtcaactcttctctgcacctcggccatgccggaagttccccacatgccctcgcctctcctgccttttccaccatcttctccttcttcaacaacaacaccgtggctgttgaagaaagcgtacctagtggaatagcatggatgaatgacactgccagcaccatcccacctccagccactgaagccatctcagctcataaaaacaactgcttgcaaggcacaggtttcttggaggaagagattacccgggtcggggttctgtttgcttcaaaggctgtgatgcaacttctggtcaacccattcgtgggccctctcaccaacaggattggatatcatatccccatgtttgctggctttgttatcatgtttctctccacagttatgtttgctttttctgggacctatactctactctttgtggcccgaacccttcaaggcattggatcttcattttcatctgttgcaggtcttggaatgctggccagtgtctacactgatgaccatgagagaggacgagccatgggaactgctctggggggcctggccttggggttgctggtgggagctccctttggaagtgtaatgtacgagtttgttgggaagtctgcacccttcctcatcctggccttcctggcactactggatggagcactccagctttgcatcctacagccttccaaagtctctcctgagagtgccaaggggactcccctctttatgcttctcaaagacccttacatcctggtggctgcagggtccatctgctttgccaacatgggggtggccatcctggagcccacactgcccatctggatgatgcagaccatgtgctcccccaagtggcagctgggtctagctttcttgcctgccagtgtgtcctacctcattggcaccaacctctttggtgtgttggccaacaagatgggtcggtggctgtgttccctaatcgggatgctggtagtaggtaccagcttgctctgtgttcctctggctcacaatatttttggtctcattggccccaatgcagggcttggccttgccataggcatggtggattcttctatgatgcccatcatggggcacctggtggatctacgccacacctcggtgtatgggagtgtctacgccatcgctgatgtggctttttgcatgggctttgctataggtccatccaccggtggtgccattgtaaaggccatcggttttccctggctcatggtcatcactggggtcatcaacatcgtctatgctccactctgctactacctgcggagccccccggcaaaggaagagaagcttgctattctgagtcaggactgccccatggagacccggatgtatgcaacccagaagcccacgaaggaatttcctctgggggaggacagtgatgaggagcctgaccatgaggagtagcagcagaaggtgctccttgaattcatgatgcctcagtgaccacctctttccctgggaccagatcaccatggctgagcccacggctcagtgggcttcacatacctctgcctgggaatcttctttcctcccctcccatggacactgtccctgatactcttctcacctgtgtaacttgtagctcttcctctatgccttggtgccgcagtggcccatcttttatgggaagacagagtgatgcaccttcccgctgctgtgaggttgattaaacttgagctgtgacgggttctgcaaggggtgactcattgcatagaggtggtagtgagtaatgtgcccctgaaaccagtggggtgactgacaagcctctttaatctgttgcctgattttctctggcatagtcccaacagatcggaagagtgttaccctcttttcctcaacgtgttctttcccgggttttcccagccgagttgagaaaatgttctcagcattgtcttgctgccaaatgccagcttgaagagttttgttttgttttttttcatttatttttttttttaataaagtgagtgatttttctgtggctaaatctagagctgctaaaagggctttaccctcagtgaaaagtgtcttctattttcattatctttcagaaacaggagcccatttctcttctgctggagttattgacattctcctgacctcccctgtgtgttcctaccttttctgaacctcttagactcttagaaataaaagtagaagaaagacagaaaaaataactgattagacccaagatttcatgggaagaagttaaaagaaactgccttgaaatccctcctgattgtagatttcctaacaggaggggtgtaatgtgacattgttcatacttgctaataaatacattattgcctaattca

SEQ ID NO: 6596 - protein, 525 aa, Homo sapiens; identical to SEQ ID NO: 943

SEQ ID NO: 6597 - DNA, 1056 bp, Homo sapiens
attcgaaatggatatcagctgacgttggcctgcacgcgtttgccttcctcccctcactccgcttgtgcgcctctctttcggctggctttcctctctccttccatctcccctctttcgcttcccttccctctgcgcccgcgcgcgcctcccagcacgctggtcagctcctcttgctcgcaagcaggtctggccccagcggcgcgaagtcacgaggctgggggcggccggcggcgaagggggcggggcgaggccggggcgccgcagcgcgcataggcggagcctcgggccgcgggccgccttggtatatctgcgcgtgcgcggcgtcgctgctgggccagtcgggacagaggagacaagatggcgctgcgggcgatgcgggggattgtcaacggggccgcacccgagctacccgtgcccaccggtgggccggcggtgggagctcgggagcaggcgctggcagtcagtcggaactacctctcccagcctcgcctcacatacaagacagtatctggagtcaatggtccactagtgatcttagatcatgttaagtttcccaggtatgctgaaattgtccatttgaccttaccggatggcacaaagagaagtgggcaagttctggaagttagtggttccaaggcagtagttcaggtatttgaagggacttcaggtatagatgctaagaaaacgtcctgtgagtttactggggatattctccgaacaccggtgtctgaggatatgcttggtcgggtattcaatggatcgggaaaacccattgacagaggtcctgttgtactggccgaagacttccttgatatcatgggtcagccaatcaaccctcaatgtcgaatctacccagaggaaatgattcagactggcatttcggccatcgatgggatgaacagtattgctagggggcagaaaattcctatcttctctgctgctgggctaccacacaatgaggtgaggactgggatcggtttgctatgaagtttagcagacaagaatttctataatgcatcactgttactgagaaaccgaataaagggttttcaaaat

SEQ ID NO: 6598 - protein, 209 aa, Homo sapiens [sequence omitted]

SEQ ID NO: 6599 - DNA, 3191 bp, Homo sapiens
attcgaaatggatatcagctgacgttggcctgcacgcgtttgccttcctcccctcactccgcttgtgcgcctctctttcggctggctttcctctctccttccatctcccctctttcgcttcccttccctctgcgcccgcgcgcgcctcccagcacgctggtcagctcctcttgctcgcaagcaggtctggccccagcggcgcgaagtcacgaggctgggggcggccggcggcgaagggggcggggcgaggccggggcgccgcagcgcgcataggcggagcctcgggccgcgggccgccttggtatatctgcgcgtgcgcggcgtcgctgctgggccagtcgggacagaggagacaagatggcgctgcgggcgatgcgggggattgtcaacggggccgcacccgagctacccgtgcccaccggtgggccggcggtgggagctcgggagcaggcgctggcagtcagtcggaactacctctcccagcctcgcctcacatacaagacagtatctggagtcaatggtccactagtgatcttagatcatgttaagtttcccaggtatgctgaaattgtccatttgaccttaccggatggcacaaagagaagtgggcaagttctggaagttagtggttccaaggcagtagttcaggtatttgaagggacttcaggtatagatgctaagaaaacgtcctgtgagtttactggggatattctccgaacaccggtgtctgaggatatgcttggtcgggtattcaatggatcgggaaaacccattgacagaggtcctgttgtactggccgaagacttccttgatatcatgggtcagccaatcaaccctcaatgtcgaatctacccagaggaaatgattcagactggcatttcggccatcgatgggatgaacagtattgctagggggcagaaaattcctatcttctctgctgctgggctaccacacaatgagattgcagctcagatctgtcgccaggctggtttggtaaagaaatccaaagatgtagtagactacagtgaggaaaattttgcaattgtatttgctgctatgggtgtaaacatggaaactgcccggttcttcaaatctgactttgaagaaaatggctcaatggacaatgtctgcctctttttgaacttggctaatgacccaaccattgagcgaattatcactcctcgcctggctctaaccacagctgaatttctggcgtaccaatgtgagaaacatgtattggttattctaacagacatgagttcttatgctgaagcacttcgagaggtttcagcagccagggaagaggtacctggtcgacgaggttttccaggttacatgtatacagatttagccacgatatatgaacgcgctgggcgagtggaagggagaaacggctcgattactcaaatccctattctaaccatgcctaatgatgatatcactcaccccatcccagacttgactggctacattacagaggggcagatctatgtggacagacagctgcacaacagacagatttatccacctatcaatgtgctgccctcactatcacggttaatgaagtctgctattggagaagggatgaccaggaaggatcatgccgatgtatctaaccagctatatgcgtgctatgctattggaaaggatgtgcaagccatgaaagctgtcgttggagaagaagcccttacctcagatgatcttctctacttggaatttctgcagaagtttgagaggaacttcattgctcagggtccttacgaaaatcgcactgtctttgagactttggacattggctggcagctactccgaatcttccccaaagaaatgctgaagagaatccctcagagcaccctcagcgaattttaccctcgagactctgcaaagcattagctgctgcttctgcattgctccgcgctcttgtgaaatactggttctgttttctttattccttttgcactctcggttcccacctttgtgttggagtttaccatgttaccctgtaattaaaaacaaagaataggtaacatattgtgccagtgttgcaacgttttaaactgctaacagaccttaaaatatccccctacctgggtcctcagtgctatgtttaaagtgctgcagggatggagtggcgttttcttattgctgtatgtattgtacatagtggagtagttagttacctgataacagtcttgttatttgggtctcttagaccttacctctcaactccctcaagagtaccagtctctgaagttataatgctttggtctctacattaggggcaagatccagtctgagagaagtctcctttgagaagggccaagaggctctttcctgagtgtttgctttcggtttgttggtatgcctgtattgctgggctgtgctgctgctcgaagcagatggttttgactgtctttttgctctttcctatataatgaatagatgagtgaaaggagttttctttttctctttagtacttacgtattgggattcctgtgtcttacagctctccctctccaaataatacacagaatcctgcaactttttgcacagctggtatctgtctggtagcagtgagaccccttgtcttggtgatccttactgggtttccaagcagaggagtcacatgattacaattgccagtagagttgttgtttggggtacaagatgagaagaaagaaaaacctacagcctttctacattctgacatgctaacagtggtttaagtttctaaagtgtttaccagatgctgaaggcaaggggagggagcagaagcacttatgtttacggatattttaaactctgttagagagcagcctttgaaaatccccaatttggttctgctttttgacctctctctaccttttcagggtaatctttgtggcacaaacgatagcatttccaagctttagagttttctgaattcctgcgccttcctgacgtgagccctgagcgatcttctatgcagttctgccatgcgtcctgttggtctctctgtgttctttgttacttgggtgcaatagcaacttccctaccccgtgcattccatctttcatgttgtgtaaagttcttcacttttttctctgagggctgggggttgggggagtcagcatgattatattttaatgtagaaaatgtgacatctggatataaaatgaaaataaatgttaaattaaatggaccttaactaa

SEQ ID NO: 6600 - protein, 511 aa, Homo sapiens; identical to SEQ ID NO: 945

SEQ ID NO: 6601 - DNA, 7271 bp, Homo sapiens
attcgaaatggatatcagctgacgttggcctgcacgcgtttgccttcctcccctcactccgcttgtgcgcctctctttcggctggctttcctctctccttccatctcccctctttcgcttcccttccctctgcgcccgcgcgcgcctcccagcacgctggtcagctcctcttgctcgcaagcaggtctggccccagcggcgcgaagtcacgaggctgggggcggccggcggcgaagggggcggggcgaggccggggcgccgcagcgcgcataggcggagcctcgggccgcgggccgccttggtatatctgcgcgtgcgcggcgtcgctgctgggccagtcgggacagaggagacaagatggcgctgcgggcgatgcgggggattgtcaacggggccgcacccgagctacccgtgcccaccggtgggccggcggtgggagctcgggagcaggcgctggcagtcagtcggaactacctctcccagcctcgcctcacatacaagacagtatctggagtcaatggtccactagtgatcttagatcatgttaagtttcccaggtatgctgaaattgtccatttgaccttaccggatggcacaaagagaagtgggcaagttctggaagttagtggttccaaggcagtagttcaggtatttgaagggacttcaggtatagatgctaagaaaacgtcctgtgagtttactggggatattctccgaacaccggtgtctgaggatatgcttggtcgggtattcaatggatcgggaaaacccattgacagaggtcctgttgtactggccgaagacttccttgatatcatgggtcagccaatcaaccctcaatgtcgaatctacccagaggaaatgattcagactggcatttcggccatcgatgggatgaacagtattgctagggggcagaaaattcctatcttctctgctgctgggctaccacacaatgagattgcagctcagatctgtcgccaggctggtttggtaaagaaatccaaagatgtagtagactacagtgaggaaaattttgcaattgtatttgctgctatgggtgtaaacatggaaactgcccggttcttcaaatctgactttgaagaaaatggctcaatggacaatgtctgcctctttttgaacttggctaatgacccaaccattgagcgaattatcactcctcgcctggctctaaccacagctgaatttctggcgtaccaatgtgagaaacatgtattggttattctaacagacatgagttcttatgctgaagcacttcgagaggtaagttgttcatgtttttccctcagttaaacaaaattggttaattttcagggttaacttgtcactttgcaagttttcattctttatggttttttaattccactgttcatatattaatagaatgccttaataaatcagaaaggaaactacttcgtttttgtcaacttggtagaagtgattagaggttaagatttaaatggttagcctgtttatcatactgtcactatctccatggattaagaaatgattgtaaaagggagtaaataattcaagctgtttattcagttactctctcgggaagttctgtttctgtccagactattaatttttaaacctttttgtaattccatttttaatgatgttaatattttataaagaccctactctcacagtactctcttcagcacttttttcttcagaaaacccagtgtttatttaggaaaaatattaagattctagcaggctgggcacggtagctcattcctgtaatcccagcactttgggaagccaaggcaggagggtcacttgggatcaggagttcaagaccagcctgggtaacatagcaagaccctttctccacaaaaaaattaagatattggctgggcgtagtggcacacacacttgtaatcctagttgctcaggaggctgaggtgggaggatagcttgagtccagtaatttgaggctgcggtgggctatgattgtgccactgccctccagtctgggtgacagatcgagacctgcttcttaaagaaagattataacagttacccctagaagttttggggtatttgttcagtaatacaaattactgaaattttgagtaagttacttttttaagcacataaaaagattctgaagagacaggcttcttaaaattccttcagtgccctcaccatatcttactctgctatattgctgtttcagactaactctagtcaaggactagtttttctcccccatccatcacagaccaatacttttgtaaaatgcaataaaattgagttattagaaaagtgaaattttaactatatatataatttacaaatgcagattttagaattgttagattcaacaggcataaaattattctgccaaattgccctgaaagtttctaaatgcttatcttgctttctgtgtgatcattgcatgttgataacagttggtctgcagaccgtgctgtgaggagcaccgctgtagcacgctcctttgaagatgtcagagtagcacttagaagttggatttcataatgctttagggttctagttgattgtaggtgaacatgcacacctatagtctggtatccatgtctctaagggaaagatcgtttatcaccattcttattttgtgcagtgcaatggactcctgactttgtgaccttcagaaattgtttaatttttctgacccttgattccaactgttaattggaggtagcaccttcctcatagggttgctgtgaggattaagttaaataatgttgtaaagcgcagcagatgattcctcgtgtacatttccttcccttttgacctttttgggattaggttagataaatatggctagttccaccacgtggaataaatcttgtgaaccaagaatcttttctgttttaaaattaacttcctttgatttataaaattgcaaacagattttcttctagcaaactatttgaaaacttacattatggcaatacgattttagcaaaaaccttctggtgccccattgtcaacatttttgttacagaatactttgaatttatgttgccgggagatttttctaaatcattcttaaggacagtatttaaaatgaacatgatgggattttcaactttgtactttggcatgttgaaacaaacatgttgtaagcaagcttgttgtaatatcgtgcatgatactcttctgcttgacctgctgtcaggtttcagcagccagggaagaggtacctggtcgacgaggttttccaggttacatgtatacagatttagccacgatatatgaacgcgctgggcgagtggaagggagaaacggctcgattactcaaatccctattctaaccatgcctaatgatggtaagttttggtatttggattataacacacctaatcattttaaagagagagaagacccatctaccttttcgagttgaagttattttgagaacacatcccctaagagtttatcttggttatttgcctaaataaaacatttttcatttgaaaattacccacagttattatcctattgtggaggaaaagcaattttcttcataatttaagtttttaactttattaggtactattgagtgcctgctgtttgcaggacactgttctaaatgtaaagaatttttgaaaagaatttatggtctctacttaatgtaagttactcagtctaattggggatgttttttatgtgtgtgcaccggtaatttaacatggccatgttcagtgccacatgaggagtacaagtgggaaactccacaaaactgagagacagatttttttaaccaagggctggttaaaaatgactttccaatgcctgtctgtgtgtgtgcccaggatggggtacgactattcagaattcctctcctgtgttgcctctttgtccttatttcagtttttgaacaacactttgacaaaatatggtaagttattacttactgtaattgagcactgttctgagtgctttataaatattcactcatttgctcctcatagcaactttgaggcagatgctgtttgaggcacagggaggtcaaatgatttgttgagattagcaagtgatagatttaggacccagtttgagttcataactcacactgttactctgtactgcctctgacgtgaaaatgatttgttccaagggagtagctacaaaatgatgtaatttaacagatttggaaatgtgttgctttgtgtgacctttttggtgcagcctgtgtagtgttgtttacttgtctatatgcctgcgttttgcatggtgaaatgttgtgtatccatccgacatagcttatgaactaagaatgttcttagtatacatcaggttggcaaatttctataagggaactttgggtttaaaatgaaactttacttatattgagaggggagagcgcttacctaggggagagagtatttttaatgaatgcagccagtttacctcatagagccaacacatgtctaactgctgcaaccaaactaaactggccagtatggttgccgctagccacatttggctgtttaagttcaagttaactgaaataattgaaattaagtttttcagttttgttagccacgtttcaagtgttagatagccacatttggctaatggctaccgtactgcacagcacagacacagaacattggcagcatcacagaaaatgactctaagaacactcttctaagtaatgttacaggtagtacagagggactttttgtgggtttggttctgagagatggccgctttaaaactcataacctaaagatgccatgcttaatgccaactgtcttcctctggtagatatcactcaccccatcccagacttgactggctacattacagaggggcagatctatgtggacagacagctgcacaacagacaggtactggacgggagcagtgctgggaagcttgcagacctgctcatccgttattctttagtgacttggattttgctcttaggaattgctttgcttagaaagtatcaacttgaattgtttttaatatggttataaaattgtcatttctattatcttaaattctggtgtcggcagagcgccagaattaagaatcttcttaacactttcctttattgtgtcttaaaacagagtcacttgtctccaagaacttttttgggaattctgttccataatggtatcatctaccaatcttgttattgatagaaaaaaatgacttttccatgcctctctagtagatgctgacttctaaaatcagcttttaggaattattgttaattttttttattttgtgtataattttttgagtcagttcagaagaccattttgactcgataatgtggtagtacttatcaaacagatgttgaaagttgagttttttaaaatagtcttgtacagtgttatagatgacacttttttggatttgattctcgaaagaaatgctatgctataaagtgtttcttactaccttttcttgccaggaagagacagtaggattcatctaggagacaaatgcagcggttgtctttgatttaagttgtaataatgagtttcaaatgtttttttattaccagtaaaacttgagttttgtacttaaatatagtattttttccctctcattctacccaagatttatccacctatcaatgtgctgccctcactatcacggttaatgaagtctgctattggagaagggatgaccaggaaggatcatgccgatgtatctaaccagctatatgcgtgctatgctattggaaaggatgtgcaagccatgaaagctgtcgttggagaagaagcccttacctcagatgatcttctctacttggaatttctgcagaagtttgagaggaacttcattgctcagggtccttacgaaaatcgcactgtctttgagactttggacattggctggcagctactccgaatcttccccaaagaaatgctgaagagaatccctcagagcaccctcagcgaattttaccctcgagactctgcaaagcattagctgctgcttctgcattgctccgcgctcttgtgaaatactggttctgttttctttattccttttgcactctcggttcccacctttgtgttggagtttaccatgttaccctgtaattaaaaacaaagaataggtaacatattgtgccagtgttgcaacgttttaaactgctaacagaccttaaaatatccccctacctgggtcctcagtgctatgtttaaagtgctgcagggatggagtggcgttttcttattgctgtatgtattgtacatagtggagtagttagttacctgataacagtcttgttatttgggtctcttagaccttacctctcaactccctcaagagtaccagtctctgaagttataatgctttggtctctacattaggggcaagatccagtctgagagaagtctcctttgagaagggccaagaggctctttcctgagtgtttgctttcggtttgttggtatgcctgtattgctgggctgtgctgctgctcgaagcagatggttttgactgtctttttgctctttcctatataatgaatagatgagtgaaaggagttttctttttctctttagtacttacgtattgggattcctgtgtcttacagctctccctctccaaataatacacagaatcctgcaactttttgcacagctggtatctgtctggtagcagtgagaccccttgtcttggtgatccttactgggtttccaagcagaggagtcacatgattacaattgccagtagagttgttgtttggggtacaagatgagaagaaagaaaaacctacagcctttctacattctgacatgctaacagtggtttaagtttctaaagtgtttaccagatgctgaaggcaaggggagggagcagaagcacttatgtttacggatattttaaactctgttagagagcagcctttgaaaatccccaatttggttctgctttttgacctctctctaccttttcagggtaatctttgtggcacaaacgatagcatttccaagctttagagttttctgaattcctgcgccttcctgacgtgagccctgagcgatcttctatgcagttctgccatgcgtcctgttggtctctctgtgttctttgttacttgggtgcaatagcaacttccctaccccgtgcattccatctttcatgttgtgtaaagttcttcacttttttctctgagggctgggggttgggggagtcagcatgattatattttaatgtagaaaatgtgacatctggatataaaatgaaaataaatgttaaattaaatggaccttaactaa

SEQ ID NO: 6602 - protein, 318 aa, Homo sapiens
MALRAMRGIVNGAAPELPVPTGGPAVGAREQALAVSRNYLSQPRLTYKTVSGVNGPLVILDHVKFPRYAEIVHLTLPDGTKRSGQVLEVSGSKAVVQVFEGTSGIDAKKTSCEFTGDILRTPVSEDMLGRVFNGSGKPIDRGPVVLAEDFLDIMGQPINPQCRIYPEEMIQTGISAIDGMNSIARGQKIPIFSAAGLPHNEIAAQICRQAGLVKKSKDVVDYSEENFAIVFAAMGVNMETARFFKSDFEENGSMDNVCLFLNLANDPTIERIITPRLALTTAEFLAYQCEKHVLVILTDMSSYAEALREVSCSCFSLS

SEQ ID NO: 6603 - DNA, 328 bp, Homo sapiens
agcaccctcagcgaattttaccctcgagactctgcaaagcattagctgctgcttctgcattgctccgcgctcttgtgaaatactggttctgttttctttattccttttgcactctcggttcccacctttgtgttggagtttaccatgttaccttgggtgcaatagcaacttccctaccccgtgcattccatctttcatgttgtgtaaagttcttcacttttttctctgagggctgggggttgggggagtcagcatgattatattttaatgtagaaaatgtgacatctggatataaaatgaaaataaatgttaaattaaatggacctta

SEQ ID NO: 6604 - protein, 84 aa, Homo sapiens
HPQRILPSRLCKALAAASALLRALVKYWFCFLYSFCTLGSHLCVGVYHVTLGAIATSLPRAFHLSCCVKFFTFFSEGWGLGESA

SEQ ID NO: 6605 - DNA, 326 bp, Homo sapiens
gtaacatattgtgccagtgttgcaacgttttaaactgctaacagaccttaaaatatccccctacctgggtcctcagtgtgtctttttgctgagcgatcttctatgcagttctgccatgcgtcctgttggtctctctgtgttctttgttacttgggtgcaatagcaacttccctaccccgtgcattccatctttcatgttgtgtaaagttcttcacttttttctctgagggctgggggttgggggagtcagcatgattatattttaatgtagaaaatgtgacatctggatataaaatgaaaataaatgttaaattaaatggacctta

SEQ ID NO: 6606 - protein, 50 aa, Homo sapiens
MQFCHASCWSLCVLCYLGAIATSLPRAFHLSCCVKFFTFFSEGWGLGESA

SEQ ID NO: 6607 - DNA, 420 bp, Homo sapiens
acatattgtgccagtgttgcaacgttttaaactgtctgttagagagcagcctttgaaaatccccaatttggttctgctttttgacctctctctaccttttcagggtaatctttgtggcacaaacgatagcatttccaagctttagagttttctgaattcctgcgccttcctgacgtgagccctgagcgatcttctatgcagttctgccatgcgtcctgttggtctctctgtgttctttgttacttgggtgcaatagcaacttccctaccccgtgcattccatctttcatgttgtgtaaagttcttcacttttttctctgagggctgggggttgggggagtcagcatgattatattttaatgtagaaaatgtgacatctggatataaaatgaaaataaatgttaaattaaatggaccttaa

SEQ ID NO: 6608 - protein, 50 aa, Homo sapiens; identical to SEQ ID NO: 6606

SEQ ID NO: 6609 - DNA, 8578 bp, Homo sapiens
tttcatctgcagagtgggtatattgttttctactttgaaggatggattgtggggaccaaaggaggtaacgacataaggctcaggtcagagtctagcacaataggtgctccacgaacatgattttctctagtccttaaattcatgctctctctgttgtggagcatgtgaattcattctttcatacctctttcatcatgtaacttttaatccctaatgaatggaattacttactgtagtgtttctgtgggaaaatgttcaaatgccagaaagccatctcttctccccacattcccagcctcacactgataataaaggggtacctccctctctcctcaaaacattgcacccccttggggaatggagagggaagggcaagtgagagcgctccagtggacagatgggggaaggcagcagctctgtgtttacagaaattgttaaattatttacacaattttggtgtccctaccagatccagagttggggatactgcaagaatggccttttttatgttacaaactggaattagatgagtcatttaattgaagcttaagtttttgtagaagagtaatactcttttcatataaactggtggtaataaaagctttattatctagcagtaggcataaagttttcttttggtttagcccaattattagtgtatttaatccacccccttgctaccccctgttagttatcttagattaaaaggtcaattctagcctggaacatacgtcttcttttaaataatttggcatatttaaattaggaggacatgaagtggcagaatttgagttaaacatttaaatatattttgtgcccttgattatattagacacctgctgctttggaaagtcacatgtttagcgaaaacgtactttggttgaaatgttaaaataaaaagacctagcaaaggtaaccttgtagttcagatatgacagtttgattttggctaggactggaatgagtggtttctgtgtagccatttcttcctccctgtgtagagagccttgctgatttctaaatcttcgtaaaaggaaacacccttgctgtggaggcttgctcaggggagctgggagtggaggcgggctcacacatgagcgcatgtgcaggaacgtttcacggtgcaaaggttaaaggcgggtgtgggcagaggggaacctaccacaggtcccattctggacagacgtgcgcagttgtggtgatgtgcaaacagctgtactggaactggatatccactttcacatcgggcatccgcctagaagagcagcgggcagctgatgggaagaccctcaaacaacagacagtgccgcagcagaaagttggagtgactggtccccctgatccacaagtccgctgtccctctgtcattgagtttgggaagtatgaaattcacacctggtactcctccccatatcctcaagaatactcaaggctgcccaaattgtatctttgtgaattttgtctaaaatatatgaaaagtagaactattctgcagcagcacatgaagaaatgtggttggttccatcctcctgccaatgagatttacagaaagaataatatttctgtctttgaggttgatgggaatgtgagtaccatttattgtcaaaacctgtgtcttttggcaaagttgtttcttgaccacaaaaccctctattacgatgtggagccatttcttttttatgtactaacacagaatgatgtcaagggctgccaccttgttggctacttttctaaggaaaagcactgccaacagaagtacaatgtttcctgtataatgattcttcctcaataccagcgtaagggctatggcaggtttctcatcgatttcagttatttgttatcaaagcgtgaaggccaagcagggtctccagagaaaccgttatctgatctgggtcgtctttcctacatggcatattggaaaagtgtaatattggagtgcctttatcaccaaaatgacaagcagatcagcattaagaagttaagcaagttgactggaatctgccctcaagacatcacttccacactccaccacctacgaatgctggacttccgtagtgaccaatttgtgattatccgccgggaaaaacttatccaggatcacatggcaaagcttcagctgaatttgcgacctgtagatgtagatccagaatgtttgcgctggactccagtcatagtgtccaactctgtggtctcagaggaggaagaagaggaggctgaggaaggagaaaacgaagagccacagtgccaggaaagagaattagagatcagtgtgggaaagtctgtgtctcatgagaacaaagaacaagattcttattcagtagaaagtgaaaagaaaccagaagttatggctccagtcagttctacacgtttgagcaaacaagtccttcctcatgatagtcttcctgcaaatagccagccatctcggaggggccgctgggggaggaagaacagaaaaacccaggaacgttttggtgataaagattctaaactgctcttggaagagacgtcttcagctcctcaggaacaatatggagaatgtggggagaaatcagaagccacccaggaacaatacactgaaagtgaagaacagctggtggcttctgaggagcagccaagccaggacgggaaacctgaccttcccaagagaagactcagtgagggggttgagccctggcgaggacagctcaagaaaagccctgaggctctgaagtgcagattaacagaaggaagtgagaggctgccccgtcgctacagtgagggtgacagggctgtcctcaggggcttcagtgagagcagcgaggaggaggaggagccggaaagccctcggtcaagctcgccaccaattctcacaaagcccacgctgaagcgaaagaaaccatttctccaccgaaggaggagagtccgaaagcgcaaacaccacaatagcagtgtagtcacagaaactatttctgagaccactgaagtgttagatgaaccttttgaagattctgactccgagaggccaatgccaagattagaacccacgtttgagatcgatgaagaagaggaggaagaggatgaaaatgaacttttccctagagaatacttccgtcgtttgtcttcgcaggatgtactcaggtgtcagtcctcttctaagaggaagtctaaagatgaagaagaagatgaagagtcagatgatgctgatgacactcctatcttaaagccagtatctcttttgcgaaaacgtgatgtgaagaattctcctcttgagccagatacatccacacctttgaaaaagaaaaagggatggcccaaaggcaagagccgcaaaccaatccactggaagaaaagacctggtcgaaaaccaggatttaagttgagtcgggaaatcatgccagtttctactcaagcatgcgtcattgagcccatcgtttccattcctaaagctggacgtaaacccaagatccaggagagtgaagaaactgttgagccaaaagaagacatgcccctacccgaggagaggaaggaggaggaggagatgcaagcagaggcagaagaggctgaagagggtgaggaagaggatgcagccagcagtgaagtcccagcagcctctccagcagacagcagcaatagtcctgagaccgaaaccaaggagcctgaggtggaggaggaagaagagaagccccgtgtctcagaggagcagaggcagtcagaggaggagcagcaggaattagaggagccagagccagaggaggaggaagatgcagctgcagagactgcccagaatgacgaccacgacgctgatgatgaggatgatggccacctggagtccacaaagaaaaaggagctagaggaacagcccacgagggaagatgtcaaggaggagcctggtgttcaagagtcttttttagatgctaatatgcagaagagtagggaaaagataaaggataaagaggaaaccgagctggattccgaagaggagcagccttcccatgacacgtccgtggtgtcagagcagatggctgggtctgaggacgaccacgaagaagactcccacactaaggaagagttaatcgaattaaaagaggaggaagagattcctcatagtgagctggatctggaaactgtacaggcagtgcagtctttgactcaagaagaaagcagtgagcatgagggcgcctaccaggactgtgaggaaactcttgcggcgtgtcagaccctgcagagttacacccaggctgacgaggaccctcagatgtccatggttgaagactgtcatgcgtcagaacataatagccctatctcctccgttcagtctcaccccagccagtcagtccgttcggtcagcagtcccaacgtgcctgcccttgagagtggctacacccagatcagcccagaacaaggatccctgtccgcaccctctatgcagaacatggagaccagccccatgatggatgtgccttccgtatcagaccactctcagcaggtggtggacagcggcttcagtgacctgggcagcattgagagcaccactgaaaactatgagaacccaagcagttacgactccacgatgggcggcagcatctgtgggaacagctcttcccagagcagctgctcctacggtgggctgtcgtcctccagcagcctcacccagagcagctgtgtggtcactcagcagatggccagcatgggcagcagctgcagcatgatgcagcagagcagcgtccagcctgctgccaactgcagcatcaagtcacctcagagctgcgtggtggagaggcctcccagtaaccagcagcagcagccgccaccaccgcctccacagcagccacagccgccgccgccacaaccacaaccagcaccacagcctccaccaccccagcagcagccgcaacagcagccgcagcctcagccccagcagcctccacccccaccccctccccagcagcagcccccgctgtcacagtgtagtatgaataacagtttcaccccagctcctatgatcatggagataccagaatctggaagcactgggaacataagtatctatgagaggattccaggggattttggtgccggcagctactctcaaccatcagccaccttcagcctagccaagctgcagcagctgaccaacaccattatggaccctcatgccatgccttatagccattctcctgctgtgacttcctatgcaaccagtgtttctctgtccaatacaggactggctcagctggctccatctcatcccttagctgggactcctcaagcacaagccaccatgacgccacccccaaacttggcatccactaccatgaacctcacatctcctctgcttcagtgcaacatgtctgccaccaacattggcattcctcacacgcagagattgcaagggcaaatgccagtgaaggggcacatttccatccgctccaagtctgcgccactgccctctgcggctgctcaccagcagcagctgtatggccgtagcccatcggcagttgccatgcaggctggccctcgcgcactggctgttcagcgtggcatgaacatgggggttaatctgatgcctactcccgcctataatgtcaattccatgaatatgaacaccttgaatgccatgaacagctatcgaatgacacagcccatgatgaacagcagttaccatagtaaccctgcctacatgaaccagacagcacagtatcctatgcagatgcagatgggaatgatggggagccaggcctatacccagcagcctatgcagcctaaccctcatgggaacatgatgtacacaggcccctcccatcacagctacatgaacgctgctggcgtgcccaagcagtcactcaacggaccttacatgagaagatgagcaagatgaacttgcaatcaaaaacttaaatatatataaataaaggaaccttttatactgacaaaccagagaaaaatggacctttttccagttaaaatattgctgtagatttagaggaatttttctttggtttattttattttttagaaaacctgatcttctctttttttgggttcattttgttctgggttttggttttcttcacaatcttgaacattttacagtagaactcatctaaaaatggatttggggatggggaaacatgcacaaaatcttttcataattaaaaagagccttactttctttacataccacatggacagaatttgtgtaaaagtgaattatctttattttaaaatgtatgtttcccctcactgtttgcagctcccaatgttgtcatttttaaatgttatatacatctcaagggttaaccagaccctttcctccaaacccaacctttcatttcctacttcattccagcaggaggcacttaggggagactcggatggggacatggagaacaacccaagctccttaaacttattattattgttaatattattattattattattaataaagtgaggcaggaaaatgcttctccttttaaaatcccctccactcctcacacacacacacctcttgaaacccttccccaagaatgtttctttatagacggacttcattgaaatctttgttgttcttgaatcaagtgtaatataatttttttcttcttttttaaaatattcccactcagcactcagagacacaaaaatactgtaagtctcaattaacagcagaatctcagagaaaagctgtttgcaatccaaatccagcctttggaggaatagagatggtcaattaacaatcaaaaagaggagattaacctcttgtttttttaccacctggtgaatcagccataacgcacacacacgccacccagcctcttgtttctagtatgtactttgaaatgctaactgagggtcttgatgcttgagcctttgactgataaaactcaaatagcagtccccagtgatttgcctcttaggttctttcttaaattgttggtggatgactgtacattttagtgatttgaaaaataactgacaaaccattgaaacagtttattttatgttggaagagatggcgcagatgtgtgtcagaagggagatcacggtgtgagtttcgtagctatttaagtgatacatacctctagtttttgtatgtcttttgagatcctgagttcatcccctgtgaatcagagtgcacaagcacctctcctgtgagtggctaatgagaagagggacagaccgaccaccagcacagtagggcagatctggacagcagaatgttataacgcaagttcatgtgttgctcccaactccattctcttttctctcgtgcaaccagtttgcccattctcttcctattacttgctccagggataggtaaaaaaaaaaaaaaaaaaaaaaaaaatatatatatatatatatacacacacacacacacacacacacacacatatatatatatatatattccatcattagaagatggaaactattataccacttggtatgtgcagtcaaatatccaaaagggggaagtactgcttagagaaatatctgtaagcattaaattctctcctttatttgtacattttatatagataaatttttaaagtactaattaggcattaacttttttcaaatgcacaggtttgttggtttttttaatacactttaattgactttctcaagcgtgctaggtagaaacgcagaattccacatcttcccgctctcagctctgagcatgtgcaaggctgtgtaggacccagtttctctgtatatactattccagttcccagtcatctatgtagaaagtgcactgtgctgccatcgccctacatcttcagctgtgtcattgcttcctggttggggtggggacggggtgggtcgggagggaggtatattgggaggagggtgggtcaaggcagaaggagaagctgttgaaatgagggccgtgaaatcagtttctgttggtttgcggttgtgtttggttttgtttgtttctttataaaaaattcaatcgggcagctcccttttccacaagcctctttgtgactgtagaactattgtagaaaaaaaaagttcttttctatattataaaagaaattatccaacacagtaatattggtacctgtcattttttcacttctgtttaaaaaaaatgtatttttagcaagataacttgggtaatcttctaaaaaagaaatttaaaaactcactgttagtgactttgatgccttttaaaataagagctttttcatttcattccatctttaaaattttttatctttgttgtagaatattaaaaactattttaagaaagataaattctctttaaagagatctctagcgtgtgtgaatagagctccagatgcctctaaaagccgcatgtacaaaggaagccacgtctatcctgtctgtttatatttgcttttcctgttttgtaacctctttgtactttgttcatggtgacttgtaagctaaggggaaggggtgcctagatgcctttgtatctctccatgtcacgcgctcctgggccagccggcctcccttcctctccttgtatgtaatacctttttttcccctttctagcaagtactttcaaaagaactctgtacattttaacataaaaaataaattatgttgagccattttggatgtc

SEQ ID NO: 6610 - protein, 1584 aa, Homo sapiens
MSACAGTFHGAKVKGGCGQRGTYHRSHSGQTCAVVVMCKQLYWNWISTFTSGIRLEEQRAADGKTLKQQTVPQQKVGVTGPPDPQVRCPSVIEFGKYEIHTWYSSPYPQEYSRLPKLYLCEFCLKYMKSRTILQQHMKKCGWFHPPANEIYRKNNISVFEVDGNVSTIYCQNLCLLAKLFLDHKTLYYDVEPFLFYVLTQNDVKGCHLVGYFSKEKHCQQKYNVSCIMILPQYQRKGYGRFLIDFSYLLSKREGQAGSPEKPLSDLGRLSYMAYWKSVILECLYHQNDKQISIKKLSKLTGICPQDITSTLHHLRMLDFRSDQFVIIRREKLIQDHMAKLQLNLRPVDVDPECLRWTPVIVSNSVVSEEEEEEAEEGENEEPQCQERELEISVGKSVSHENKEQDSYSVESEKKPEVMAPVSSTRLSKQVLPHDSLPANSQPSRRGRWGRKNRKTQERFGDKDSKLLLEETSSAPQEQYGECGEKSEATQEQYTESEEQLVASEEQPSQDGKPDLPKRRLSEGVEPWRGQLKKSPEALKCRLTEGSERLPRRYSEGDRAVLRGFSESSEEEEEPESPRSSSPPILTKPTLKRKKPFLHRRRRVRKRKHHNSSVVTETISETTEVLDEPFEDSDSERPMPRLEPTFEIDEEEEEEDENELFPREYFRRLSSQDVLRCQSSSKRKSKDEEEDEESDDADDTPILKPVSLLRKRDVKNSPLEPDTSTPLKKKKGWPKGKSRKPIHWKKRPGRKPGFKLSREIMPVSTQACVIEPIVSIPKAGRKPKIQESEETVEPKEDMPLPEERKEEEEMQAEAEEAEEGEEEDAASSEVPAASPADSSNSPETETKEPEVEEEEEKPRVSEEQRQSEEEQQELEEPEPEEEEDAAAETAQNDDHDADDEDDGHLESTKKKELEEQPTREDVKEEPGVQESFLDANMQKSREKIKDKEETELDSEEEQPSHDTSVVSEQMAGSEDDHEEDSHTKEELIELKEEEEIPHSELDLETVQAVQSLTQEESSEHEGAYQDCEETLAACQTLQSYTQADEDPQMSMVEDCHASEHNSPISSVQSHPSQSVRSVSSPNVPALESGYTQISPEQGSLSAPSMQNMETSPMMDVPSVSDHSQQVVDSGFSDLGSIESTTENYENPSSYDSTMGGSICGNSSSQSSCSYGGLSSSSSLTQSSCVVTQQMASMGSSCSMMQQSSVQPAANCSIKSPQSCVVERPPSNQQQQPPPPPPQQPQPPPPQPQPAPQPPPPQQQPQQQPQPQPQQPPPPPPPQQQPPLSQCSMNNSFTPAPMIMEIPESGSTGNISIYERIPGDFGAGSYSQPSATFSLAKLQQLTNTIMDPHAMPYSHSPAVTSYATSVSLSNTGLAQLAPSHPLAGTPQAQATMTPPPNLASTTMNLTSPLLQCNMSATNIGIPHTQRLQGQMPVKGHISIRSKSAPLPSAAAHQQQLYGRSPSAVAMQAGPRALAVQRGMNMGVNLMPTPAYNVNSMNMNTLNAMNSYRMTQPMMNSSYHSNPAYMNQTAQYPMQMQMGMMGSQAYTQQPMQPNPHGNMMYTGPSHHSYMNAAGVPKQSLNGPYMRR

SEQ ID NO: 6611 - DNA, 9196 bp, Homo sapiens
gttccgccgccttgcctcccctccccccggctggagctcactgtctccaagatggcggccgtgtcagtttggggcatctccgcggtccggcccggggccccgggatctcggctgtccttcctcccggcataagatgcacatttttctgctctggagccgggaatgaaatattcttgagttcttacaactttatgacgagacccatgtgtggtgctattgagaaattcattgggaagttggaagacatttcaatcaacaggttgttttggtttctatagtacaattggggtggcattctgttttgtgaaaggaggaaggacttaggccagaaaactcatatgctatggttaactggttcccagcctccgagaatcttgttttccatggtgtaaaacttactcagcatcaggataagggataacgactctatggatatacagaatccttcaccatggtaaaactcgcaaacccgctttatactgagtggattttggaggccatcaaaaaagtgaaaaagcagaaacagcgtccttcagaagaaaggatatgcaatgctgtgtcttcatcccatggcttggatcgtaaaactgttttagaacaattggagttgagtgttaaagatggaacaattttaaaagtctcaaataaaggactcaattcctataaagatcctgataatcctgggcgaatagcacttcctaagcctcggaaccatggaaaattggataataaacaaaatgtggattggaataaactgataaagcgggcagttgagggcttggcagagtctggtggctcaactttgaaaagcattgaacgttttttgaaaggtcagaaggatgtgtctgcattattcggaggcagtgctgcctctggctttcaccagcagttacgattggctatcaaacgtgccattggccacggcagactccttaaagatggacctctttatcggctcaacactaaagcaaccaacgtggatgggaaagagagttgtgagtctctttcctgtttacctccagtgtcccttcttccacatgaaaaggataagccggttgctgaaccaatccccatctgtagtttctgtcttggtacaaaagaacaaaaccgagaaaagaagccagaggaactcatctcctgtgccgactgtggcaacagtggccatccatcctgtttaaagttttcccctgaactaacggttcgagtgaaggccttacggtggcagtgcatcgagtgtaaaacatgcagctcctgtcgagatcaaggcaaaaatgcggataacatgctcttttgtgattcatgtgaccgaggttttcacatggagtgttgtgatccgccactcacccgtatgccaaaaggcatgtggatatgtcaaatatgtcgacctaggaaaaaaggacgaaaacttctacaaaagaaggcagcacagataaaacggcgctatactaatccaataggacgtccaaaaaacaggttaaagaaacaaaacacggtatcaaaaggtcccttcagcaaagttcgaactggccctggaaggggtaggaaacgaaaaatcactctttccagccaatcagcatcatcatcatcagaagaaggatatttagagcggatagatggcttggacttctgcagagatagcaatgtctccttgaagttcaacaagaaaaccaaagggctcattgatggccttaccaaattttttaccccttcccctgatgggcggaaagctcggggggaagtggtggactactctgagcaatatcgaatcagaaagaggggcaacaggaaatcaagcacttcagattggcccacagacaatcaggatggctgggatggcaaacaagaaaatgaggagcgactttttgggagccaggaaatcatgactgagaaagatatggaattatttcgtgatatccaagaacaagcactgcagaaagttggagtgactggtccccctgatccacaagtccgctgtccctctgtcattgagtttgggaagtatgaaattcacacctggtactcctccccatatcctcaagaatactcaaggctgcccaaattgtatctttgtgaattttgtctaaaatatatgaaaagtagaactattctgcagcagcacatgaagaaatgtggttggttccatcctcctgccaatgagatttacagaaagaataatatttctgtctttgaggttgatgggaatgtgagtaccatttattgtcaaaacctgtgtcttttggcaaagttgtttcttgaccacaaaaccctctattacgatgtggagccatttcttttttatgtactaacacagaatgatgtcaagggctgccaccttgttggctacttttctaaggaaaagcactgccaacagaagtacaatgtttcctgtataatgattcttcctcaataccagcgtaagggctatggcaggtttctcatcgatttcagttatttgttatcaaagcgtgaaggccaagcagggtctccagagaaaccgttatctgatctgggtcgtctttcctacatggcatattggaaaagtgtaatattggagtgcctttatcaccaaaatgacaagcagatcagcattaagaagttaagcaagttgactggaatctgccctcaagacatcacttccacactccaccacctacgaatgctggacttccgtagtgaccaatttgtgattatccgccgggaaaaacttatccaggatcacatggcaaagcttcagctgaatttgcgacctgtagatgtagatccagaatgtttgcgctggactccagtcatagtgtccaactctgtggtctcagaggaggaagaagaggaggctgaggaaggagaaaacgaagagccacagtgccaggaaagagaattagagatcagtgtgggaaagtctgtgtctcatgagaacaaagaacaagattcttattcagtagaaagtgaaaagaaaccagaagttatggctccagtcagttctacacgtttgagcaaacaagtccttcctcatgatagtcttcctgcaaatagccagccatctcggaggggccgctgggggaggaagaacagaaaaacccaggaacgttttggtgataaagattctaaactgctcttggaagagacgtcttcagctcctcaggaacaatatggagaatgtggggagaaatcagaagccacccaggaacaatacactgaaagtgaagaacagctggtggcttctgaggagcagccaagccaggacgggaaacctgaccttcccaagagaagactcagtgagggggttgagccctggcgaggacagctcaagaaaagccctgaggctctgaagtgcagattaacagaaggaagtgagaggctgccccgtcgctacagtgagggtgacagggctgtcctcaggggcttcagtgagagcagcgaggaggaggaggagccggaaagccctcggtcaagctcgccaccaattctcacaaagcccacgctgaagcgaaagaaaccatttctccaccgaaggaggagagtccgaaagcgcaaacaccacaatagcagtgtagtcacagaaactatttctgagaccactgaagtgttagatgaaccttttgaagattctgactccgagaggccaatgccaagattagaacccacgtttgagatcgatgaagaagaggaggaagaggatgaaaatgaacttttccctagagaatacttccgtcgtttgtcttcgcaggatgtactcaggtgtcagtcctcttctaagaggaagtctaaagatgaagaagaagatgaagagtcagatgatgctgatgacactcctatcttaaagccagtatctcttttgcgaaaacgtgatgtgaagaattctcctcttgagccagatacatccacacctttgaaaaagaaaaagggatggcccaaaggcaagagccgcaaaccaatccactggaagaaaagacctggtcgaaaaccaggatttaagttgagtcgggaaatcatgccagtttctactcaagcatgcgtcattgagcccatcgtttccattcctaaagctggacgtaaacccaagatccaggagagtgaagaaactgttgagccaaaagaagacatgcccctacccgaggagaggaaggaggaggaggagatgcaagcagaggcagaagaggctgaagagggtgaggaagaggatgcagccagcagtgaagtcccagcagcctctccagcagacagcagcaatagtcctgagaccgaaaccaaggagcctgaggtggaggaggaagaagagaagccccgtgtctcagaggagcagaggcagtcagaggaggagcagcaggaattagaggagccagagccagaggaggaggaagatgcagctgcagagactgcccagaatgacgaccacgacgctgatgatgaggatgatggccacctggagtccacaaagaaaaaggagctagaggaacagcccacgagggaagatgtcaaggaggagcctggtgttcaagagtcttttttagatgctaatatgcagaagagtagggaaaagataaaggataaagaggaaaccgagctggattccgaagaggagcagccttcccatgacacgtccgtggtgtcagagcagatggctgggtctgaggacgaccacgaagaagactcccacactaaggaagagttaatcgaattaaaagaggaggaagagattcctcatagtgagctggatctggaaactgtacaggcagtgcagtctttgactcaagaagaaagcagtgagcatgagggcgcctaccaggactgtgaggaaactcttgcggcgtgtcagaccctgcagagttacacccaggctgacgaggaccctcagatgtccatggttgaagactgtcatgcgtcagaacataatagccctatctcctccgttcagtctcaccccagccagtcagtccgttcggtcagcagtcccaacgtgcctgcccttgagagtggctacacccagatcagcccagaacaaggatccctgtccgcaccctctatgcagaacatggagaccagccccatgatggatgtgccttccgtatcagaccactctcagcaggtggtggacagcggcttcagtgacctgggcagcattgagagcaccactgaaaactatgagaacccaagcagttacgactccacgatgggcggcagcatctgtgggaacagctcttcccagagcagctgctcctacggtgggctgtcgtcctccagcagcctcacccagagcagctgtgtggtcactcagcagatggccagcatgggcagcagctgcagcatgatgcagcagagcagcgtccagcctgctgccaactgcagcatcaagtcacctcagagctgcgtggtggagaggcctcccagtaaccagcagcagcagccgccaccaccgcctccacagcagccacagccgccgccgccacaaccacaaccagcaccacagcctccaccaccccagcagcagccgcaacagcagccgcagcctcagccccagcagcctccacccccaccccctccccagcagcagcccccgctgtcacagtgtagtatgaataacagtttcaccccagctcctatgatcatggagataccagaatctggaagcactgggaacataagtatctatgagaggattccaggggattttggtgccggcagctactctcaaccatcagccaccttcagcctagccaagctgcagcagctgaccaacaccattatggaccctcatgccatgccttatagccattctcctgctgtgacttcctatgcaaccagtgtttctctgtccaatacaggactggctcagctggctccatctcatcccttagctgggactcctcaagcacaagccaccatgacgccacccccaaacttggcatccactaccatgaacctcacatctcctctgcttcagtgcaacatgtctgccaccaacattggcattcctcacacgcagagattgcaagggcaaatgccagtgaaggggcacatttccatccgctccaagtctgcgccactgccctctgcggctgctcaccagcagcagctgtatggccgtagcccatcggcagttgccatgcaggctggccctcgcgcactggctgttcagcgtggcatgaacatgggggttaatctgatgcctactcccgcctataatgtcaattccatgaatatgaacaccttgaatgccatgaacagctatcgaatgacacagcccatgatgaacagcagttaccatagtaaccctgcctacatgaaccagacagcacagtatcctatgcagatgcagatgggaatgatggggagccaggcctatacccagcagcctatgcagcctaaccctcatgggaacatgatgtacacaggcccctcccatcacagctacatgaacgctgctggcgtgcccaagcagtcactcaacggaccttacatgagaagatgagcaagatgaacttgcaatcaaaaacttaaatatatataaataaaggaaccttttatactgacaaaccagagaaaaatggacctttttccagttaaaatattgctgtagatttagaggaatttttctttggtttattttattttttagaaaacctgatcttctctttttttgggttcattttgttctgggttttggttttcttcacaatcttgaacattttacagtagaactcatctaaaaatggatttggggatggggaaacatgcacaaaatcttttcataattaaaaagagccttactttctttacataccacatggacagaatttgtgtaaaagtgaattatctttattttaaaatgtatgtttcccctcactgtttgcagctcccaatgttgtcatttttaaatgttatatacatctcaagggttaaccagaccctttcctccaaacccaacctttcatttcctacttcattccagcaggaggcacttaggggagactcggatggggacatggagaacaacccaagctccttaaacttattattattgttaatattattattattattattaataaagtgaggcaggaaaatgcttctccttttaaaatcccctccactcctcacacacacacacctcttgaaacccttccccaagaatgtttctttatagacggacttcattgaaatctttgttgttcttgaatcaagtgtaatataatttttttcttcttttttaaaatattcccactcagcactcagagacacaaaaatactgtaagtctcaattaacagcagaatctcagagaaaagctgtttgcaatccaaatccagcctttggaggaatagagatggtcaattaacaatcaaaaagaggagattaacctcttgtttttttaccacctggtgaatcagccataacgcacacacacgccacccagcctcttgtttctagtatgtactttgaaatgctaactgagggtcttgatgcttgagcctttgactgataaaactcaaatagcagtccccagtgatttgcctcttaggttctttcttaaattgttggtggatgactgtacattttagtgatttgaaaaataactgacaaaccattgaaacagtttattttatgttggaagagatggcgcagatgtgtgtcagaagggagatcacggtgtgagtttcgtagctatttaagtgatacatacctctagtttttgtatgtcttttgagatcctgagttcatcccctgtgaatcagagtgcacaagcacctctcctgtgagtggctaatgagaagagggacagaccgaccaccagcacagtagggcagatctggacagcagaatgttataacgcaagttcatgtgttgctcccaactccattctcttttctctcgtgcaaccagtttgcccattctcttcctattacttgctccagggataggtaaaaaaaaaaaaaaaaaaaaaaaaaatatatatatatatatatacacacacacacacacacacacacacacatatatatatatatatattccatcattagaagatggaaactattataccacttggtatgtgcagtcaaatatccaaaagggggaagtactgcttagagaaatatctgtaagcattaaattctctcctttatttgtacattttatatagataaatttttaaagtactaattaggcattaacttttttcaaatgcacaggtttgttggtttttttaatacactttaattgactttctcaagcgtgctaggtagaaacgcagaattccacatcttcccgctctcagctctgagcatgtgcaaggctgtgtaggacccagtttctctgtatatactattccagttcccagtcatctatgtagaaagtgcactgtgctgccatcgccctacatcttcagctgtgtcattgcttcctggttggggtggggacggggtgggtcgggagggaggtatattgggaggagggtgggtcaaggcagaaggagaagctgttgaaatgagggccgtgaaatcagtttctgttggtttgcggttgtgtttggttttgtttgtttctttataaaaaattcaatcgggcagctcccttttccacaagcctctttgtgactgtagaactattgtagaaaaaaaaagttcttttctatattataaaagaaattatccaacacagtaatattggtacctgtcattttttcacttctgtttaaaaaaaatgtatttttagcaagataacttgggtaatcttctaaaaaagaaatttaaaaactcactgttagtgactttgatgccttttaaaataagagctttttcatttcattccatctttaaaattttttatctttgttgtagaatattaaaaactattttaagaaagataaattctctttaaagagatctctagcgtgtgtgaatagagctccagatgcctctaaaagccgcatgtacaaaggaagccacgtctatcctgtctgtttatatttgcttttcctgttttgtaacctctttgtactttgttcatggtgacttgtaagctaaggggaaggggtgcctagatgcctttgtatctctccatgtcacgcgctcctgggccagccggcctcccttcctctccttgtatgtaatacctttttttcccctttctagcaagtactttcaaaagaactctgtacattttaacataaaaaataaattatgttgagccattttggatgtc

SEQ ID NO: 6612 - protein, 2004 aa, Homo sapiens; identical to SEQ ID NO: 949

SEQ ID NO: 6613 - DNA, 666 bp, Homo sapiens
ggaattaattttgtcttagcagatttattcttcaaaaattcagaaatttaaaaataataataataatacaagttttcattatgtcttatagaaaaccaaatggaaaatgaatataaggaaatgcaaaatacattaaatttctttttacccttgctgcctgttttttctttagttcatcctggacttgtgggccaatacttttttgttatgtttaatactaggagagcaaatacataacaggaactgtgatgaatctggaaagaaaatttatatcattcagtcttcctgaagctgtaagaatctccttaacatctattagatttattttctctttgcatttaaagttttggagaaaatatctttgtcatactgacttggttcttagctatgtaagaggactaaatctaggtgcggagtttgctggtttaaatagaattaaaaatttatttttttctggtgacctggagagtgtttcttaaaattataataatgaatacttttcatgctctgatttatgtataggaattattaagagcttcactctgataaagttatttaccacttggctactcaggggtggagtcatttcacaaaggatctgcagcgaatgaattagaccaggagtaacttcacccttctgcttgtcccagctggagcaggattagg

SEQ ID NO: 6614 - protein, 76 aa, Homo sapiens [sequence omitted]

SEQ ID NO: 6615 - DNA, 1316 bp, Homo sapiens
actgtctccaagatggcggccgtgtcagtttggggcatctccgcggtccggcccggggccccgggatctcggctgtccttcctcccggattctttctactaatccagatacttgttgaagtgctgactagtttcttggggaaagatgtcaaggaagagttgaaattcctagactggcataagatgcacatttttctgctctggagccgggaatgaaatattcttgagttcttacaactttatgacgagacccatgtgtggtgctattgagaaattcattgggaagttggaagacatttcaatcaacaggttgttttggtttctatagtacaattggggtggcattctgttttgtgaaaggaggaaggacttaggccagaaaactcatatgctatggttaactggttcccagcctccgagaatcttgttttccatggtgtaaaacttactcagcatcaggataagggataacgactctatggatatacagaatccttcaccatggtaaaactcgcaaacccgctttatactgagtggattttggaggccatcaaaaaagtgaaaaagcagaaacagcgtccttcagaagaaaggatatgcaatgctgtgtcttcatcccatggcttggatcgtaaaactgttttagaacaattggagttgagtgttaaagatggaacaattttaaaagtctcaaataaaggactcaattcctataaagatcctgataatcctgggcgaatagcacttcctaagcctcggaaccatggaaaattggataataaacaaaatgtggattggaataaactgataaagcgggcagttgagggcttggcagagtctggtggctcaactttgaaaagcattgaacgttttttgaaaggtcagaaggatgtgtctgcattattcggaggcagtgctgcctctggctttcaccagcagttacgattggctatcaaacgtgccattggccacggcagactccttaaagatggacctctttatcggctcaacactaaagcaaccaacgtggatgggaaagagagttgtgagtctctttcctgtttacctccagtgtcccttcttccacatgaaaaggataaggtaagaatggcatatgcttcggggtttatagagctgatgatataggatgctacaaattcacatttctgggaagttatattcaagttttttgtttggggacttctgtggagtgatcacctctggttttttattggtgagttgtagctatgagagcttcatagatttgttctggtactttgaaatatttgaagcctaagattaaaaatgtagaatgtt

SEQ ID NO: 6616 - protein, 214 aa, Homo sapiens
MVKLANPLYTEWILEAIKKVKKQKQRPSEERICNAVSSSHGLDRKTVLEQLELSVKDGTILKVSNKGLNSYKDPDNPGRIALPKPRNHGKLDNKQNVDWNKLIKRAVEGLAESGGSTLKSIERFLKGQKDVSALFGGSAASGFHQQLRLAIKRAIGHGRLLKDGPLYRLNTKATNVDGKESCESLSCLPPVSLLPHEKDKVRMAYASGFIELMI

SEQ ID NO: 6617 - DNA, 1363 bp, Homo sapiens
ctcactgtctccaagatggcggccgtgtcagtttggggcatctccgcggtccggcccggggccccgggatctcggctgtccttcctcccggattctttctactaatccagatacttgttgaagtgctgactagtttcttggggaaagatgtcaaggaagagttgaaattcctagactggtgagcagagattgcggagtacagaatagccatcacccactctggcataagatgcacatttttctgctctggagccgggaatgaaatattcttgagttcttacaactttatgacgagacccatgtgtggtgctattgagaaattcattgggaagttggaagacatttcaatcaacaggttgttttggtttctatagtacaattggggtggcattctgttttgtgaaaggaggaaggacttaggccagaaaactcatatgctatggttaactggttcccagcctccgagaatcttgttttccatggtgtaaaacttactcagcatcaggataagggataacgactctatggatatacagaatccttcaccatggtaaaactcgcaaacccgctttatactgagtggattttggaggccatcaaaaaagtgaaaaagcagaaacagcgtccttcagaagaaaggatatgcaatgctgtgtcttcatcccatggcttggatcgtaaaactgttttagaacaattggagttgagtgttaaagatggaacaattttaaaagtctcaaataaaggactcaattcctataaagatcctgataatcctgggcgaatagcacttcctaagcctcggaaccatggaaaattggataataaacaaaatgtggattggaataaactgataaagcgggcagttgagggcttggcagagtctggtggctcaactttgaaaagcattgaacgttttttgaaaggtcagaaggatgtgtctgcattattcggaggcagtgctgcctctggctttcaccagcagttacgattggctatcaaacgtgccattggccacggcagactccttaaagatggacctctttatcggctcaacactaaagcaaccaacgtggatgggaaagagagttgtgagtctctttcctgtttacctccagtgtcccttcttccacatgaaaaggataaggtaagaatggcatatgcttcggggtttatagagctgatgatataggatgctacaaattcacatttctgggaagttatattcaagttttttgtttggggacttctgtggagtgatcacctctggttttttattggtgagttgtagctatgagagcttcatagatttgttctggtactttgaaatatttgaagcctaagattaaaaatgtagaatgtt

SEQ ID NO: 6618 - protein, 214 aa, Homo sapiens; identical to SEQ ID NO: 6616

SEQ ID NO: 6619 - DNA, 330 bp, Homo sapiens
cagtcgtgctggaaggaaaagcagaacggaatcacaggataaagaagtacagggcagctgtatttgctgagacgtggaaattttccggtgtattctaagtaataaagtgcagaagagtgtgagtagggctgtgtgtatgtggtatgtgtgtttgcatctctggaagtggttgcttcttaggatggtcactgtgggactaggagtggaggagagaaagaaaacttgcttttcaccgtactagaatcttctgcaccttttgaattttgccgtttatactatgtctttacctgtaaagaaaaaagaactttgaaataaagttgcatttgcttg

SEQ ID NO: 6620 - protein, 34 aa, Homo sapiens
MWYVCLHLWKWLLLRMVTVGLGVEERKKTCFSPY

SEQ ID NO: 6621 - DNA, 3677 bp, Homo sapiens
ctcccagatacccaatcagcggccttcaggcgcagatcgtgggcggagcggtagccaggccgcgggccggccaatcagcgggcgagcggctgcctcagcgcgcgcggcgggcggggcggggcctgtccgcgcctaggagcagtgggcgctgagagcagcaaggccagggagggctatcttcaggctcatgcaggaggggaagattgggcctggtcttgaaagatggagttgaaaacttacagagtcctgaggctttcagactgaaaaaggctttcttctgtcactgacaatcgccaccatgatccatagtcttttcttgatcaactcctctggagacattttcctggagaaacattggaaaagtgtggtcagccgttctgtttgtgattacttttttgaggcgcaagagagagctactgaggcagaaaatgtgcctccggttatccctacccctcaccactatctcttaagtgtttaccgccacaagatcttttttgtggccgtgatccagacggaggtcccccctctgtttgtcattgagtttcttcaccgagtggtggacacatttcaggattattttggagtctgttcagagccagtgatcaaagacaatgtagttgtggtttatgaggtattggaagagatgcttgacaatggttttccattggctaccgagtcgaacattcttaaagaactcataaagcctcctaccatccttcgaacggttgtcaacaccatcacaggaagcacgaatgtgggtgaccagcttcccactgggcagctgtcagtggtgccttggcgacggactggggtgaaatataccaacaatgaggcctattttgatgtgattgaagagattgatgcaattattgataaatcaggctccacaattactgctgagatccagggggtgattgatgcctgtgtcaagctgactggcatgccagaccttacactttccttcatgaaccctaggttgttggatgatgtcagcttccatccttgtgttcgtttcaaacgctgggaatctgagcgcatcctctccttcatccctcctgatggaaacttccgcctgctgtcttaccatgtcagtgcacagaatctggttgcaatcccagtgtatgtcaaacataacatcagtttccgggacagtagttcccttggacgctttgaaataacggtgggacccaagcagacgatggggaagaccattgagggagtgactgtcaccagccagatgcccaagggggtcctgaacatgagccttactccatcacaggggacacacacattcgacccagtcacaaagatgctgtcttgggatgtaggaaaaataaatccacaaaagctaccaagtttgaaggggaccatgagtcttcaggctggagcttccaaaccagatgaaaaccccacaattaacctgcagtttaagatccagcagctggccatttctggactcaaggtgaatcgtctggatatgtatggagaaaagtacaaaccctttaagggcataaaatacatgaccaaagctgggaagttccaagttcgaacctgaagggagcatttgctgagggaatagtcttgcacattttttcatttcttacttgtctaaaagtaaaaaaaaatatcagcctgtctcctaggtcagtcccctcctggacccacccgctcccttttttccttagccttcagtgccatggaactaatcaagggaggaaaaggtcaccagggagaactggacagaactgaaacacagcaacaccagttctcaaggacaaggtgtgtgatgggggtaggaagcttggtgcttatgtaaccattttaaacgtggtttctataggaaagaccaacatttgtttagcttgcttggctttaattatctaaagccaatgaaagacttctttgttgattttttaagatagaaagattaaaaagaaagaaagatgggaagaaaatgaatgtcagtcaaggaaaggccacttaaggatctgctctatgaaggagaagaaagaggaaaaagaagtaaaggagttaggaggagacacttaaatgaaagattggcaagaaaagcagtcggactctaccttaaggagggatgggaaggaaagagttgagttggtttctttctgattcctctactcatgtagaaaacacttgtacttctggaaatggactggagactttttaaatttgagtccactattgacatggaaaccccagtggaatcagattttccctcaaagaccatgatggtatcggactagttttcagacactgcctgttgctgtccatcagcacttggtctcttatcttcagtgagaaggtgacccgccttcttcccatggtggctgcctaaagtgcttcttttctaacccaaaacagttctactcacttccttttacagaattcaccggccattttcctgttacctgatccttctacaggatttttaaaaagtaagagagtttcagagaagccgatcccataatccccagtgcagccagggtttgtgtgtcatcgtactggagtagagggccgactcttcccatgaaggtgagcacagctgtgagtgagtgagctcatatctccatttgtcagtgctggactggtaccagatcgtaaccttcccgttggtcggaaacttttccatctgtcgccctagaaaaagagaaagcttaccatcgagggtgtggttgatccttgaagctgcttggtaaagttatcatttcctcagtcttttcttttgtactcctatcatgtattcattaatatctaccagtcccttttcattctaagacaaaacatttctcctaaatctctgaataaaatcagtgctgtaggaagatggactgtgttgatcatgggtgtaagcaacccagtttaagaaacatggcaactaaagggatacctcaggctttctttcccagtgggtcatttttgtcctagttcagtgtgtctgttactatttaaatatttatacaaaagggtttttgtttatagcttaaggaatgatactgtgctctgcttggtgcatggagaaaaaggaagacccgtactctccacaccctagagcttttctctaaatattgtgcaaagtttttgctagttttatcttctgactttgggactagtttttgctgcagagttgtgttgctttgtgattttcctctgggatagtgtactgtacacaaccagatgtgttccacactccgtgactccgcagtttgtcctggagtgacatacacatccaccatggaaagggaagcatctctgcctgtggattctcaagtacttggaagcacctctcctgaggaacctacaggattctaaggtttcctaggtcactgaacaactaatcttggtccctgaatatttctaggtttgtaagtgcagcagttttatttcctctagaactcatcctgtttcaagggaagtacctaagaagatatagagtgtttctagggtaagggacctgcaggtgtaagcatagatgaaataactgtcctgtcacatgtgcagcaggccatggagtgtagcgggcatcgctgccgccattcctgcagcatcaccataagcagtgcagggtgtctccatcgagctgtttggttccatgtgtgtttaacatgtgcagaagtagcttctctgtttaagtttaataaagttgagtttcaccagtc

SEQ ID NO: 6622 - protein, 418 aa, Homo sapiens; identical to SEQ ID NO: 953

SEQ ID NO: 6623 - DNA, 3546 bp, Homo sapiens
aatcagcgggcgagcggctgcctcagcgcgcgcggcgggcggggcggggcctgtccgcgcctaggagcagtgggcgctgagagcagcaaggccagagttgaaaacttacagagtcctgaggctttcagactgaaaaaggctttcttctgtcactgacaatcgccaccatgatccatagtcttttcttgatcaactcctctggagacattttcctggagaaacattggaaaagtgtggtcagccgttctgtttgtgattacttttttgaggcgcaagagagagctactgaggcagaaaatgtgcctccggttatccctacccctcaccactatctcttaagtgtttaccgccacaagatcttttttgtggccgtgatccagacggaggtcccccctctgtttgtcattgagtttcttcaccgagtggtggacacatttcaggattattttggagtctgttcagagccagtgatcaaagacaatgtagttgtggtttatgaggtattggaagagatgcttgacaatggttttccattggctaccgagtcgaacattcttaaagaactcataaagcctcctaccatccttcgaacggttgtcaacaccatcacaggaagcacgaatgtgggtgaccagcttcccactgggcagctgtcagtggtgccttggcgacggactggggtgaaatataccaacaatgaggcctattttgatgtgattgaagagattgatgcaattattgataaatcaggctccacaattactgctgagatccagggggtgattgatgcctgtgtcaagctgactggcatgccagaccttacactttccttcatgaaccctaggttgttggatgatgtcagcttccatccttgtgttcgtttcaaacgctgggaatctgagcgcatcctctccttcatccctcctgatggaaacttccgcctgctgtcttaccatgtcagtgcacagaatctggttgcaatcccagtgtatgtcaaacataacatcagtttccgggacagtagttcccttggacgctttgaaataacggtgggacccaagcagacgatggggaagaccattgagggagtgactgtcaccagccagatgcccaagggggtcctgaacatgagccttactccatcacaggggacacacacattcgacccagtcacaaagatgctgtcttgggatgtaggaaaaataaatccacaaaagctaccaagtttgaaggggaccatgagtcttcaggctggagcttccaaaccagatgaaaaccccacaattaacctgcagtttaagatccagcagctggccatttctggactcaaggtgaatcgtctggatatgtatggagaaaagtacaaaccctttaagggcataaaatacatgaccaaagctgggaagttccaagttcgaacctgaagggagcatttgctgagggaatagtcttgcacattttttcatttcttacttgtctaaaagtaaaaaaaaatatcagcctgtctcctaggtcagtcccctcctggacccacccgctcccttttttccttagccttcagtgccatggaactaatcaagggaggaaaaggtcaccagggagaactggacagaactgaaacacagcaacaccagttctcaaggacaaggtgtgtgatgggggtaggaagcttggtgcttatgtaaccattttaaacgtggtttctataggaaagaccaacatttgtttagcttgcttggctttaattatctaaagccaatgaaagacttctttgttgattttttaagatagaaagattaaaaagaaagaaagatgggaagaaaatgaatgtcagtcaaggaaaggccacttaaggatctgctctatgaaggagaagaaagaggaaaaagaagtaaaggagttaggaggagacacttaaatgaaagattggcaagaaaagcagtcggactctaccttaaggagggatgggaaggaaagagttgagttggtttctttctgattcctctactcatgtagaaaacacttgtacttctggaaatggactggagactttttaaatttgagtccactattgacatggaaaccccagtggaatcagattttccctcaaagaccatgatggtatcggactagttttcagacactgcctgttgctgtccatcagcacttggtctcttatcttcagtgagaaggtgacccgccttcttcccatggtggctgcctaaagtgcttcttttctaacccaaaacagttctactcacttccttttacagaattcaccggccattttcctgttacctgatccttctacaggatttttaaaaagtaagagagtttcagagaagccgatcccataatccccagtgcagccagggtttgtgtgtcatcgtactggagtagagggccgactcttcccatgaaggtgagcacagctgtgagtgagtgagctcatatctccatttgtcagtgctggactggtaccagatcgtaaccttcccgttggtcggaaacttttccatctgtcgccctagaaaaagagaaagcttaccatcgagggtgtggttgatccttgaagctgcttggtaaagttatcatttcctcagtcttttcttttgtactcctatcatgtattcattaatatctaccagtcccttttcattctaagacaaaacatttctcctaaatctctgaataaaatcagtgctgtaggaagatggactgtgttgatcatgggtgtaagcaacccagtttaagaaacatggcaactaaagggatacctcaggctttctttcccagtgggtcatttttgtcctagttcagtgtgtctgttactatttaaatatttatacaaaagggtttttgtttatagcttaaggaatgatactgtgctctgcttggtgcatggagaaaaaggaagacccgtactctccacaccctagagcttttctctaaatattgtgcaaagtttttgctagttttatcttctgactttgggactagtttttgctgcagagttgtgttgctttgtgattttcctctgggatagtgtactgtacacaaccagatgtgttccacactccgtgactccgcagtttgtcctggagtgacatacacatccaccatggaaagggaagcatctctgcctgtggattctcaagtacttggaagcacctctcctgaggaacctacaggattctaaggtttcctaggtcactgaacaactaatcttggtccctgaatatttctaggtttgtaagtgcagcagttttatttcctctagaactcatcctgtttcaagggaagtacctaagaagatatagagtgtttctagggtaagggacctgcaggtgtaagcatagatgaaataactgtcctgtcacatgtgcagcaggccatggagtgtagcgggcatcgctgccgccattcctgcagcatcaccataagcagtgcagggtgtctccatcgagctgtttggttccatgtgtgtttaacatgtgcagaagtagcttctctgtttaagtttaataaagttgagtttcaccagtc

SEQ ID NO: 6624 - protein, 418 aa, Homo sapiens; identical to SEQ ID NO: 953

SEQ ID NO: 6625 - DNA, 723 bp, Homo sapiens
gagcagtgggcgctgagagcagcaaggccagagttgaaaacttacagagtcctgaggctttcagactgaaaaaggctttcttctgtcactgacaatcgccaccatgatccatagtcttttcttgatcaactcctctggagacattttcctggagaaacattggaaaagtgtggtcagccgttctgtttgtgattacttttttgaggcgcaagagagagctactgaggcagaaaatgtgcctccggttatccctacccctcaccactatctcttaagtgtttaccgccacaagatcttttttgtggccgtgatccagacggaggtcccccctctgtttgtcattgagtttcttcaccgagtggtggacacatttcaggttcgtgaatgtgggaaagttcatatatgtaaaccgtaaagtgtctttgtagtcctgtttccattgtgtaaagcctccattaagaaacttaaaaaaaaaaatcaaaactctggtattactcacttcctctcccatctgataagattctggtttctatttattgaattggctgcatgcaaaatgacaaatggaatacttttgaacctcttgcgtgggaaagtcatcctatttgcgatgactatatatagcctttctagctctgattctactttttgctcacaaattagagtttagattgtttttgcctggtggtcttgatcctaaccattgttatctgcattgctttg

SEQ ID NO: 6626 - protein, 103 aa, Homo sapiens
MIHSLFLINSSGDIFLEKHWKSVVSRSVCDYFFEAQERATEAENVPPVIPTPHHYLLSVYRHKIFFVAVIQTEVPPLFVIEFLHRVVDTFQVRECGKVHICKP

SEQ ID NO: 6627 - DNA, 3535 bp, Homo sapiens
aggagtgggggcgcgcgagggtcggggcggggtctcaggatgcagccgggcggcctctcagggctgcggacgcggcggggagagagttgaaaacttacagagtcctgaggctttcagactgaaaaaggctttcttctgtcactgacaatcgccaccatgatccatagtcttttcttgatcaactcctctggagacattttcctggagaaacattggaaaagtgtggtcagccgttctgtttgtgattacttttttgaggcgcaagagagagctactgaggcagaaaatgtgcctccggttatccctacccctcaccactatctcttaagtgtttaccgccacaagatcttttttgtggccgtgatccagacggaggtcccccctctgtttgtcattgagtttcttcaccgagtggtggacacatttcaggattattttggagtctgttcagagccagtgatcaaagacaatgtagttgtggtttatgaggtattggaagagatgcttgacaatggttttccattggctaccgagtcgaacattcttaaagaactcataaagcctcctaccatccttcgaacggttgtcaacaccatcacaggaagcacgaatgtgggtgaccagcttcccactgggcagctgtcagtggtgccttggcgacggactggggtgaaatataccaacaatgaggcctattttgatgtgattgaagagattgatgcaattattgataaatcaggctccacaattactgctgagatccagggggtgattgatgcctgtgtcaagctgactggcatgccagaccttacactttccttcatgaaccctaggttgttggatgatgtcagcttccatccttgtgttcgtttcaaacgctgggaatctgagcgcatcctctccttcatccctcctgatggaaacttccgcctgctgtcttaccatgtcagtgcacagaatctggttgcaatcccagtgtatgtcaaacataacatcagtttccgggacagtagttcccttggacgctttgaaataacggtgggacccaagcagacgatggggaagaccattgagggagtgactgtcaccagccagatgcccaagggggtcctgaacatgagccttactccatcacaggggacacacacattcgacccagtcacaaagatgctgtcttgggatgtaggaaaaataaatccacaaaagctaccaagtttgaaggggaccatgagtcttcaggctggagcttccaaaccagatgaaaaccccacaattaacctgcagtttaagatccagcagctggccatttctggactcaaggtgaatcgtctggatatgtatggagaaaagtacaaaccctttaagggcataaaatacatgaccaaagctgggaagttccaagttcgaacctgaagggagcatttgctgagggaatagtcttgcacattttttcatttcttacttgtctaaaagtaaaaaaaaatatcagcctgtctcctaggtcagtcccctcctggacccacccgctcccttttttccttagccttcagtgccatggaactaatcaagggaggaaaaggtcaccagggagaactggacagaactgaaacacagcaacaccagttctcaaggacaaggtgtgtgatgggggtaggaagcttggtgcttatgtaaccattttaaacgtggtttctataggaaagaccaacatttgtttagcttgcttggctttaattatctaaagccaatgaaagacttctttgttgattttttaagatagaaagattaaaaagaaagaaagatgggaagaaaatgaatgtcagtcaaggaaaggccacttaaggatctgctctatgaaggagaagaaagaggaaaaagaagtaaaggagttaggaggagacacttaaatgaaagattggcaagaaaagcagtcggactctaccttaaggagggatgggaaggaaagagttgagttggtttctttctgattcctctactcatgtagaaaacacttgtacttctggaaatggactggagactttttaaatttgagtccactattgacatggaaaccccagtggaatcagattttccctcaaagaccatgatggtatcggactagttttcagacactgcctgttgctgtccatcagcacttggtctcttatcttcagtgagaaggtgacccgccttcttcccatggtggctgcctaaagtgcttcttttctaacccaaaacagttctactcacttccttttacagaattcaccggccattttcctgttacctgatccttctacaggatttttaaaaagtaagagagtttcagagaagccgatcccataatccccagtgcagccagggtttgtgtgtcatcgtactggagtagagggccgactcttcccatgaaggtgagcacagctgtgagtgagtgagctcatatctccatttgtcagtgctggactggtaccagatcgtaaccttcccgttggtcggaaacttttccatctgtcgccctagaaaaagagaaagcttaccatcgagggtgtggttgatccttgaagctgcttggtaaagttatcatttcctcagtcttttcttttgtactcctatcatgtattcattaatatctaccagtcccttttcattctaagacaaaacatttctcctaaatctctgaataaaatcagtgctgtaggaagatggactgtgttgatcatgggtgtaagcaacccagtttaagaaacatggcaactaaagggatacctcaggctttctttcccagtgggtcatttttgtcctagttcagtgtgtctgttactatttaaatatttatacaaaagggtttttgtttatagcttaaggaatgatactgtgctctgcttggtgcatggagaaaaaggaagacccgtactctccacaccctagagcttttctctaaatattgtgcaaagtttttgctagttttatcttctgactttgggactagtttttgctgcagagttgtgttgctttgtgattttcctctgggatagtgtactgtacacaaccagatgtgttccacactccgtgactccgcagtttgtcctggagtgacatacacatccaccatggaaagggaagcatctctgcctgtggattctcaagtacttggaagcacctctcctgaggaacctacaggattctaaggtttcctaggtcactgaacaactaatcttggtccctgaatatttctaggtttgtaagtgcagcagttttatttcctctagaactcatcctgtttcaagggaagtacctaagaagatatagagtgtttctagggtaagggacctgcaggtgtaagcatagatgaaataactgtcctgtcacatgtgcagcaggccatggagtgtagcgggcatcgctgccgccattcctgcagcatcaccataagcagtgcagggtgtctccatcgagctgtttggttccatgtgtgtttaacatgtgcagaagtagcttctctgtttaagtttaataaagttgagtttcaccagtc

SEQ ID NO: 6628 - protein, 418 aa, Homo sapiens; identical to SEQ ID NO: 953

SEQ ID NO: 6629 - DNA, 3578 bp, Homo sapiens
gagggtcggggcggggtctcaggatgcagccgggcggcctctcagggctgcggacgcggcggggagagggagggctatcttcaggctcatgcaggaggggaagattgggcctggtcttgaaagatggagttgaaaacttacagagtcctgaggctttcagactgaaaaaggctttcttctgtcactgacaatcgccaccatgatccatagtcttttcttgatcaactcctctggagacattttcctggagaaacattggaaaagtgtggtcagccgttctgtttgtgattacttttttgaggcgcaagagagagctactgaggcagaaaatgtgcctccggttatccctacccctcaccactatctcttaagtgtttaccgccacaagatcttttttgtggccgtgatccagacggaggtcccccctctgtttgtcattgagtttcttcaccgagtggtggacacatttcaggattattttggagtctgttcagagccagtgatcaaagacaatgtagttgtggtttatgaggtattggaagagatgcttgacaatggttttccattggctaccgagtcgaacattcttaaagaactcataaagcctcctaccatccttcgaacggttgtcaacaccatcacaggaagcacgaatgtgggtgaccagcttcccactgggcagctgtcagtggtgccttggcgacggactggggtgaaatataccaacaatgaggcctattttgatgtgattgaagagattgatgcaattattgataaatcaggctccacaattactgctgagatccagggggtgattgatgcctgtgtcaagctgactggcatgccagaccttacactttccttcatgaaccctaggttgttggatgatgtcagcttccatccttgtgttcgtttcaaacgctgggaatctgagcgcatcctctccttcatccctcctgatggaaacttccgcctgctgtcttaccatgtcagtgcacagaatctggttgcaatcccagtgtatgtcaaacataacatcagtttccgggacagtagttcccttggacgctttgaaataacggtgggacccaagcagacgatggggaagaccattgagggagtgactgtcaccagccagatgcccaagggggtcctgaacatgagccttactccatcacaggggacacacacattcgacccagtcacaaagatgctgtcttgggatgtaggaaaaataaatccacaaaagctaccaagtttgaaggggaccatgagtcttcaggctggagcttccaaaccagatgaaaaccccacaattaacctgcagtttaagatccagcagctggccatttctggactcaaggtgaatcgtctggatatgtatggagaaaagtacaaaccctttaagggcataaaatacatgaccaaagctgggaagttccaagttcgaacctgaagggagcatttgctgagggaatagtcttgcacattttttcatttcttacttgtctaaaagtaaaaaaaaatatcagcctgtctcctaggtcagtcccctcctggacccacccgctcccttttttccttagccttcagtgccatggaactaatcaagggaggaaaaggtcaccagggagaactggacagaactgaaacacagcaacaccagttctcaaggacaaggtgtgtgatgggggtaggaagcttggtgcttatgtaaccattttaaacgtggtttctataggaaagaccaacatttgtttagcttgcttggctttaattatctaaagccaatgaaagacttctttgttgattttttaagatagaaagattaaaaagaaagaaagatgggaagaaaatgaatgtcagtcaaggaaaggccacttaaggatctgctctatgaaggagaagaaagaggaaaaagaagtaaaggagttaggaggagacacttaaatgaaagattggcaagaaaagcagtcggactctaccttaaggagggatgggaaggaaagagttgagttggtttctttctgattcctctactcatgtagaaaacacttgtacttctggaaatggactggagactttttaaatttgagtccactattgacatggaaaccccagtggaatcagattttccctcaaagaccatgatggtatcggactagttttcagacactgcctgttgctgtccatcagcacttggtctcttatcttcagtgagaaggtgacccgccttcttcccatggtggctgcctaaagtgcttcttttctaacccaaaacagttctactcacttccttttacagaattcaccggccattttcctgttacctgatccttctacaggatttttaaaaagtaagagagtttcagagaagccgatcccataatccccagtgcagccagggtttgtgtgtcatcgtactggagtagagggccgactcttcccatgaaggtgagcacagctgtgagtgagtgagctcatatctccatttgtcagtgctggactggtaccagatcgtaaccttcccgttggtcggaaacttttccatctgtcgccctagaaaaagagaaagcttaccatcgagggtgtggttgatccttgaagctgcttggtaaagttatcatttcctcagtcttttcttttgtactcctatcatgtattcattaatatctaccagtcccttttcattctaagacaaaacatttctcctaaatctctgaataaaatcagtgctgtaggaagatggactgtgttgatcatgggtgtaagcaacccagtttaagaaacatggcaactaaagggatacctcaggctttctttcccagtgggtcatttttgtcctagttcagtgtgtctgttactatttaaatatttatacaaaagggtttttgtttatagcttaaggaatgatactgtgctctgcttggtgcatggagaaaaaggaagacccgtactctccacaccctagagcttttctctaaatattgtgcaaagtttttgctagttttatcttctgactttgggactagtttttgctgcagagttgtgttgctttgtgattttcctctgggatagtgtactgtacacaaccagatgtgttccacactccgtgactccgcagtttgtcctggagtgacatacacatccaccatggaaagggaagcatctctgcctgtggattctcaagtacttggaagcacctctcctgaggaacctacaggattctaaggtttcctaggtcactgaacaactaatcttggtccctgaatatttctaggtttgtaagtgcagcagttttatttcctctagaactcatcctgtttcaagggaagtacctaagaagatatagagtgtttctagggtaagggacctgcaggtgtaagcatagatgaaataactgtcctgtcacatgtgcagcaggccatggagtgtagcgggcatcgctgccgccattcctgcagcatcaccataagcagtgcagggtgtctccatcgagctgtttggttccatgtgtgtttaacatgtgcagaagtagcttctctgtttaagtttaataaagttgagtttcaccagtc

SEQ ID NO: 6630 - protein, 418 aa, Homo sapiens; identical to SEQ ID NO: 953

SEQ ID NO: 6631 - DNA, 3857 bp, Homo sapiens
cagcacacctcagtccgcaccagccacctttcaagtgctcgctggtcccatagtggctatcgtattaagctgcgcatttcttgtgtatgtgtgagctgttgccaaaacatgacatcaaattcagtgttcttggaagccctcttcaaagaacactgattgtgttgcagtcaggcaacgcaaaacatgaggcacggcccttttcttcaaggagtttgcggttcggttgagaaaatagacacccacagataagtagtattttaaatggatgcaatttgggcgatagtaaagataactgggagtatatgattgacagtcagatgactgatcattatcgtttcgaattcaagggagggctatcttcaggctcatgcaggaggggaagattgggcctggtcttgaaagatggagttgaaaacttacagagtcctgaggctttcagactgaaaaaggctttcttctgtcactgacaatcgccaccatgatccatagtcttttcttgatcaactcctctggagacattttcctggagaaacattggaaaagtgtggtcagccgttctgtttgtgattacttttttgaggcgcaagagagagctactgaggcagaaaatgtgcctccggttatccctacccctcaccactatctcttaagtgtttaccgccacaagatcttttttgtggccgtgatccagacggaggtcccccctctgtttgtcattgagtttcttcaccgagtggtggacacatttcaggattattttggagtctgttcagagccagtgatcaaagacaatgtagttgtggtttatgaggtattggaagagatgcttgacaatggttttccattggctaccgagtcgaacattcttaaagaactcataaagcctcctaccatccttcgaacggttgtcaacaccatcacaggaagcacgaatgtgggtgaccagcttcccactgggcagctgtcagtggtgccttggcgacggactggggtgaaatataccaacaatgaggcctattttgatgtgattgaagagattgatgcaattattgataaatcaggctccacaattactgctgagatccagggggtgattgatgcctgtgtcaagctgactggcatgccagaccttacactttccttcatgaaccctaggttgttggatgatgtcagcttccatccttgtgttcgtttcaaacgctgggaatctgagcgcatcctctccttcatccctcctgatggaaacttccgcctgctgtcttaccatgtcagtgcacagaatctggttgcaatcccagtgtatgtcaaacataacatcagtttccgggacagtagttcccttggacgctttgaaataacggtgggacccaagcagacgatggggaagaccattgagggagtgactgtcaccagccagatgcccaagggggtcctgaacatgagccttactccatcacaggggacacacacattcgacccagtcacaaagatgctgtcttgggatgtaggaaaaataaatccacaaaagctaccaagtttgaaggggaccatgagtcttcaggctggagcttccaaaccagatgaaaaccccacaattaacctgcagtttaagatccagcagctggccatttctggactcaaggtgaatcgtctggatatgtatggagaaaagtacaaaccctttaagggcataaaatacatgaccaaagctgggaagttccaagttcgaacctgaagggagcatttgctgagggaatagtcttgcacattttttcatttcttacttgtctaaaagtaaaaaaaaatatcagcctgtctcctaggtcagtcccctcctggacccacccgctcccttttttccttagccttcagtgccatggaactaatcaagggaggaaaaggtcaccagggagaactggacagaactgaaacacagcaacaccagttctcaaggacaaggtgtgtgatgggggtaggaagcttggtgcttatgtaaccattttaaacgtggtttctataggaaagaccaacatttgtttagcttgcttggctttaattatctaaagccaatgaaagacttctttgttgattttttaagatagaaagattaaaaagaaagaaagatgggaagaaaatgaatgtcagtcaaggaaaggccacttaaggatctgctctatgaaggagaagaaagaggaaaaagaagtaaaggagttaggaggagacacttaaatgaaagattggcaagaaaagcagtcggactctaccttaaggagggatgggaaggaaagagttgagttggtttctttctgattcctctactcatgtagaaaacacttgtacttctggaaatggactggagactttttaaatttgagtccactattgacatggaaaccccagtggaatcagattttccctcaaagaccatgatggtatcggactagttttcagacactgcctgttgctgtccatcagcacttggtctcttatcttcagtgagaaggtgacccgccttcttcccatggtggctgcctaaagtgcttcttttctaacccaaaacagttctactcacttccttttacagaattcaccggccattttcctgttacctgatccttctacaggatttttaaaaagtaagagagtttcagagaagccgatcccataatccccagtgcagccagggtttgtgtgtcatcgtactggagtagagggccgactcttcccatgaaggtgagcacagctgtgagtgagtgagctcatatctccatttgtcagtgctggactggtaccagatcgtaaccttcccgttggtcggaaacttttccatctgtcgccctagaaaaagagaaagcttaccatcgagggtgtggttgatccttgaagctgcttggtaaagttatcatttcctcagtcttttcttttgtactcctatcatgtattcattaatatctaccagtcccttttcattctaagacaaaacatttctcctaaatctctgaataaaatcagtgctgtaggaagatggactgtgttgatcatgggtgtaagcaacccagtttaagaaacatggcaactaaagggatacctcaggctttctttcccagtgggtcatttttgtcctagttcagtgtgtctgttactatttaaatatttatacaaaagggtttttgtttatagcttaaggaatgatactgtgctctgcttggtgcatggagaaaaaggaagacccgtactctccacaccctagagcttttctctaaatattgtgcaaagtttttgctagttttatcttctgactttgggactagtttttgctgcagagttgtgttgctttgtgattttcctctgggatagtgtactgtacacaaccagatgtgttccacactccgtgactccgcagtttgtcctggagtgacatacacatccaccatggaaagggaagcatctctgcctgtggattctcaagtacttggaagcacctctcctgaggaacctacaggattctaaggtttcctaggtcactgaacaactaatcttggtccctgaatatttctaggtttgtaagtgcagcagttttatttcctctagaactcatcctgtttcaagggaagtacctaagaagatatagagtgtttctagggtaagggacctgcaggtgtaagcatagatgaaataactgtcctgtcacatgtgcagcaggccatggagtgtagcgggcatcgctgccgccattcctgcagcatcaccataagcagtgcagggtgtctccatcgagctgtttggttccatgtgtgtttaacatgtgcagaagtagcttctctgtttaagtttaataaagttgagtttcaccagtc

SEQ ID NO: 6632 - protein, 418 aa, Homo sapiens; identical to SEQ ID NO: 953

SEQ ID NO: 6633 - DNA, 600 bp, Homo sapiens
attctgtttgaaaaggcagaccagatggcaacaaggggttttaaaaatagactaggttaccccatatagaagttgggaaaaacctcatcttctgtttgaaaaattcttcaattgagtgcatgaatagtgggagcatagaaacttctagggaggtgttctgtggtttctagagtcaaaatggtgttaaaatacagtaatattaattgcctcaggaagcacgaatgtgggtgaccagcttcccactgggcagctgtcagtggtgccttggcgacggactggggtgaaatataccaacaatgaggcctattttgatgtgattgaagagattgatgcaattattgataaatcaggctccacaattactgctgagatccagggggtgattgatgcctgtgtcaagctgactggcatgccagaccttacactttccttcatgaaccctaggttgttggatgatgtcagcttccatccttgtgttcgtttcaaacgctgggaatctgagcgcatcctctccttcatccctcctgatggaaacttccgcctgctgtcttaccatgtcagtgcacagaatctggttgcaatcccagtgtatgtcaaaca

SEQ ID NO: 6634 - protein, 62 aa, Homo sapiens
MPDLTLSFMNPRLLDDVSFHPCVRFKRWESERILSFIPPDGNFRLLSYHVSAQNLVAIPVYV

SEQ ID NO: 6635 - DNA, 649 bp, Homo sapiens
cttattcctgtctcaggctccacaattactgctgagatccagggggtgattgatgcctgtgtcaagctgactggcatgccagaccttacactttccttcatggtaaaatcctgggccagagattaagttcttgggatgagaaattaaatgctgctggaaagacagagtagtgggaatggaatagaacaagaagaaataattaggacagccacgaagcttgtctcaggcttgaattttctagaagtcactacatgatttctgtgtgtgtgtgtgtggtgtgttttaattaaaaacagcatttaaattgctttcctgaaagcactgcgggtgtttaatgcccacttcttgcttctcctctcctgatgactgtagaaccctaggttgttggatgatgtcagcttccatccttgtgttcgtttcaaacgctgggaatctgagcgcatcctctccttcatccctcctgatggaaacttccgcctgctgtcttaccatgtcagtgcacagaatctggttgcaatcccagtgtatgtcaaacataacatcagtttccgggacagtagttcccttggacgtgtttggttccatgtgtgtttaacatgtgcagaagtagcttctctgtttaagtttaataaagttgagtttcaccagt

SEQ ID NO: 6636 - protein, 86 aa, Homo sapiens [sequence omitted]

SEQ ID NO: 6637 - DNA, 1980 bp, Homo sapiens
tttctaggactcaaggtgaatcgtctggatatgtatggagaaaagtacaaaccctttaagggcataaaatacatgaccaaagctgggaagttccaagttcgaacctgaagggagcatttgctgagggaatagtcttgcacattttttcatttcttacttgtctaaaagtaaaaaaaaatatcagcctgtctcctaggtcagtcccctcctggacccacccgctcccttttttccttagccttcagtgccatggaactaatcaagggaggaaaaggtcaccagggagaactggacagaactgaaacacagcaacaccagttctcaaggacaaggtgtgtgatgggggtaggaagcttggtgcttatgtaaccattttaaacgtggtttctataggaaagaccaacatttgtttagcttgcttggctttaattatctaaagccaatgaaagacttctttgttgattttttaagatagaaagattaaaaagaaagaaagatgggaagaaaatgaatgtcagtcaaggaaaggccacttaaggatctgctctatgaaggagaagaaagaggaaaaagaagtaaaggagttaggaggagacacttaaatgaaagattggcaagaaaagcagtcggactctaccttaaggagggatgggaaggaaagagttgagttggtttctttctgattcctctatcacttccttttacagaattcaccggccattttcctgttacctgatccttctacaggatttttaaaaagtaagagagtttcagagaagccgatcccataatccccagtgcagccagggtttgtgtgtcatcgtactggagtagagggccgactcttcccatgaaggtgagcacagctgtgagtgagtgagctcatatctccatttgtcagtgctggactggtaccagatcgtaaccttcccgttggtcggaaacttttccatctgtcgccctagaaaaagagaaagcttaccatcgagggtgtggttgatccttgaagctgcttggtaaagttatcatttcctcagtcttttcttttgtactcctatcatgtattcattaatatctaccagtcccttttcattctaagacaaaacatttctcctaaatctctgaataaaatcagtgctgtaggaagatggactgtgttgatcatgggtgtaagcaacccagtttaagaaacatggcaactaaagggatacctcaggctttctttcccagtgggtcatttttgtcctagttcagtgtgtctgttactatttaaatatttatacaaaagggtttttgtttatagcttaaggaatgatactgtgctctgcttggtgcatggagaaaaaggaagacccgtactctccacaccctagagcttttctctaaatattgtgcaaagtttttgctagttttatcttctgactttgggactagtttttgctgcagagttgtgttgctttgtgattttcctctgggatagtgtactgtacacaaccagatgtgttccacactccgtgactccgcagtttgtcctggagtgacatacacatccaccatggaaagggaagcatctctgcctgtggattctcaagtacttggaagcacctctcctgaggaacctacaggattctaaggtttcctaggtcactgaacaactaatcttggtccctgaatatttctaggtttgtaagtgcagcagttttatttcctctagaactcatcctgtttcaagggaagtacctaagaagatatagagtgtttctagggtaagggacctgcaggtgtaagcatagatgaaataactgtcctgtcacatgtgcagcaggccatggagtgtagcgggcatcgctgccgccattcctgcagcatcaccataagcagtgcagggtgtctccatcgagctgtttggttccatgtgtgtttaacatgtgcagaagtagcttctctgtttaagtttaataaagttgagtttcaccagtc

SEQ ID NO: 6638 - protein, 35 aa, Homo sapiens [sequence omitted]

SEQ ID NO: 6639 - DNA, 648 bp, Homo sapiens
tttctaggactcaaggtgaatcgtctggatatgtatggagaaaagtacaaaccctttaagggcataaaatacatgaccaaagctgggaagttccaagttcgaacctgaagggagcatttgctgagggaatagtcttgcacattttttcatttcttacttgtctaaaagtaaaaaaaaatatcagcctgtctcctaggtcagtcccctcctggacccacccgctcccttttttccttagccttcagtgccatggaactaatcaagggaggaaaaggtcaccagggagaactggacagaactgaaacacagcaacaccagttctcaaggacaagttctactcacttccttttacagaattcaccggccattttcctgttacctgatccttctacaggatttttaaaaagtaagagagtttcagagaagccgatcccataatccccagtgcagccagggtttgtgtgtcatcgtactggagtagagggccgactcttcccatgaaggcatgaaacggtgtcgcagtactctggcgtctttattccaggagaggcttcttacaagataaggcactgcgagtcgattgttacgccacacctgtaacaattttctataaacatctcatggccatcaaaaaaccttaaaactcaa

SEQ ID NO: 6640 - protein, 62 aa, Homo sapiens
MELIKGGKGHQGELDRTETQQHQFSRTSSTHFLLQNSPAIFLLPDPSTGFLKSKRVSEKPIP

SEQ ID NO: 6641 - DNA, 1376 bp, Homo sapiens
atttgagtccactattgacatggaaaccccagtggaatcagattttccctcaaagaccatgatggtatcggactagttttcagacactgcctgttgctgtccatcagcacttggtctcttatcttcagtgagaaggtgacccgccttcttcccatggtggctgcctaaagtgcttcttttctaacccaaaacagttctactcacttccttttacagaattcaccggccattttcctgttacctgatccttctacaggatttttaaaaagtaagagagtttcagagaagccgatcccataatccccagtgcagccagggtttgtgtgtcatcgtactggagtagagggccgactcttcccatgaaggtgagcacagctgtgagtgagtgagctcatatctccatttgtcagtgctggactggtaccagatcgtaaccttcccgttggtcggaaacttttccatctgtcgccctagaaaaagagaaagcttaccatcgagggtgtggttgatccttgaagctgcttggtaaagttatcatttcctcagtcttttcttttgtactcctatcatgtattcattaatatctaccagtcccttttcattctaagacaaaacatttctcctaaatctctgaataaaatcagtgctgtaggaagatggactgtgttgatcatgggtgtaagcaacccagtttaagaaacatggcaactaaagggatacctcaggctttctttcccagtgggtcatttttgtcctagttcagtgtgtctgttactatttaaatattgtgcaaagtttttgctagttttatcttctgactttgggactagtttttgctgcagagttgtgttgctttgtgattttcctctgggatagtgtactgtacacaaccagatgtgttccacactccgtgactccgcagtttgtcctggagtgacatacacatccaccatggaaagggaagcatctctgcctgtggattctcaagtacttggaagcacctctcctgaggaacctacaggattctaaggtttcctaggtcactgaacaactaatcttggtccctgaatatttctaggtttgtaagtgcagcagttttatttcctctagaactcatcctgtttcaagggaagtacctaagaagatatagagtgtttctagggtaagggacctgcaggtgtaagcatagatgaaataactgtcctgtcacatgtgcagcaggccatggagtgtagcgggcatcgctgccgccattcctgcagcatcaccataagcagtgcagggtgtctccatcgagctgtttggttccatgtgtgtttaacatgtgcagaagtagcttctctgtttaagtttaataaagttgagtttcaccagtc

SEQ ID NO: 6642 - protein, 49 aa, Homo sapiens
MECSGHRCRHSCSITISSAGCLHRAVWFHVCLTCAEVASLFKFNKVEFH

SEQ ID NO: 6643 - DNA, 1467 bp, Homo sapiens
ggttcagggtcttgggtgggggtggccagagccacctggcagctcagggcgccaggcgggaccagccctggacagacgccaccatcctattgcagagccactaacacccacactcactcagactgggcccacgtagatacatcctcagttggcttaatgtgcaagctttgggatgtggaaggaaaccggggtacctggacaaaacccaggcagacagtgtccccagacaggaattgatttttgttttcctcatcaaagttataatgaaatgacactgaatggaatattattgaagggcctgctgtattttgaagattacgatgttcatgctacacatactgactttctccagatagtctgctttttttgcaaacgccaaacctgctatctcctttgcagggcgattcgggaggccccctggtgtgtctgaacgatggccgcatgactttggtgggcatcatcagctggggcctgggctgtggacagaaggatgtcccgggtgtgtacaccaaggttaccaactacctagactggattcgtgacaacatgcgaccgtgaccaggaacacccgactcctcaaaagcaaatgagatcccgcctcttcttcttcagaagacactgcaaaggcgcagtgcttctctacagacttctccagacccaccacaccgcagaagcgggacgagaccctacaggagagggaagagtgcattttcccagatacttcccattttggaagttttcaggacttggtctgatttcaggatactctgtcagatgggaagacatgaatgcacactagcctctccaggaatgcctcctccctgggcagaaagtggccatgccaccctgttttcagctaaagcccaacctcctgacctgtcaccgtgagcagctttggaaacaggaccacaaaaatgaaagcatgtctcaaaagcacccttgacgtcaagtctccttcccctttccccactccctggctctcagaaggtattccttttgtgtacagtgtgtaaagtgtaaatcctttttctttataaactttagagtagcatgagagaattgtatcatttgaacaactaggcttcagcatatttatagcaatccatgttagtttttactttctgttgccacaaccctgttttatactgtacttaataaattcagatatatttttcacagtttttccaaaatcagagtggaatggttttgttatagatgctgtatcccactctttattcatgttcacattttaaaatcatttggaattctgcttcactcgcttaacatatacacaacacctgtaacatacaaggcaatgggctaggtgctccagaccgggaaaaggagggacaggaatgcttggtctgatgggctaatatggcatttagagaagtaccaaggtacagtggagccggtcacaaaagggcagacttgtagtagaattcagttgcaagagggattggggaa

SEQ ID NO: 6644 - protein, 34 aa, Homo sapiens [sequence omitted]

SEQ ID NO: 6645 - DNA, 2215 bp, Homo sapiens
tgcagagatgaaaaaacgcagatgatataccagcaacatcagtcatggctgcgccctgtgctcagaagcaaccgggtggaatattgctggtgcaacagtggcagggcacagtgccactcagaaacagtgactgctactttgggaatgggtcagcctaccgtggcacgcacagcctcaccgagtcgggtgcctcctgcctcccgtggaattccatgatcctgataggcaaggtttacacagcacagaaccccagtgcccaggcactgggcctgggcaaacataattactgccggaatcctgatggggatgccaagccctggtgccacgtgctgaagaaccgcaggctgacgtgggagtactgtgatgtgccctcctgctccacctgcggcctgagacagtacagccagcctcagtttcgcatcaaaggagggctcttcgccgacatcgcctcccacccctggcaggctgccatctttgccaagcacaggaggtcgcccggagagcggttcctgtgcgggggcatactcatcagctcctgctggattctctctgccgcccactgcttccaggagaggtttccgccccaccacctgacggtgatcttgggcagaacataccgggtggtccctggcgaggaggagcagaaatttgaagtcgaaaaatacattgtccataaggaattcgatgatgacacttacgacaatgacattgcgctgctgcagctgaaatcggattcgtcccgctgtgcccaggagagcagcgtggtccgcactgtgtgccttcccccggcggacctgcagctgccggactggacggagtgtgagctctccggctacggcaagcatgaggccttgtctcctttctattcggagcggctgaaggaggctcatgtcagactgtacccatccagccgctgcacatcacaacatttacttaacagaacagtcaccgacaacatgctgtgtgctggagacactcggagcggcgggccccaggcaaacttgcacgacgcctgccagggcgattcgggaggccccctggtgtgtctgaacgatggccgcatgactttggtgggcatcatcagctggggcctgggctgtggacagaaggatgtcccgggtgtgtacaccaaggttaccaactacctagactggattcgtgacaacatgcgaccgtgaccaggaacacccgactcctcaaaagcaaatgagatcccgcctcttcttcttcagaagacactgcaaaggcgcagtgcttctctacagacttctccagacccaccacaccgcagaagcgggacgagaccctacaggagagggaagagtgcattttcccagatacttcccattttggaagttttcaggacttggtctgatttcaggatactctgtcagatgggaagacatgaatgcacactagcctctccaggaatgcctcctccctgggcagaaagtggccatgccaccctgttttcagctaaagcccaacctcctgacctgtcaccgtgagcagctttggaaacaggaccacaaaaatgaaagcatgtctcaatagtaaaagataacaagatctttcaggaaagacggattgcattagaaatagacagtatatttatagtcacaagagcccagcagggcctcaaagttggggcaggctggctggcccgtcatgttcctcaaaagcacccttgacgtcaagtctccttcccctttccccactccctggctctcagaaggtattccttttgtgtacagtgtgtaaagtgtaaatcctttttctttataaactttagagtagcatgagagaattgtatcatttgaacaactaggcttcagcatatttatagcaatccatgttagtttttactttctgttgccacaaccctgttttatactgtacttaataaattcagatatatttttcacagtttttccaaaatcagagtggaatggttttgttatagatgctgtatcccactctttattcatgttcacattttaaaatcatttggaattctgcttcactcgcttaacatatacacaacacctgtaacatacaaggcaatgggctaggtgctccagaccgggaaaaggagggacaggaatgcttggtctgatgggctaatatggcatttagagaagtaccaaggtacagtggagccggtcacaaaagggcagacttgtagtagaattcagttgcaagagggattggggaa

SEQ ID NO: 6646 - protein, 377 aa, Homo sapiens
MAAPCAQKQPGGILLVQQWQGTVPLRNSDCYFGNGSAYRGTHSLTESGASCLPWNSMILIGKVYTAQNPSAQALGLGKHNYCRNPDGDAKPWCHVLKNRRLTWEYCDVPSCSTCGLRQYSQPQFRIKGGLFADIASHPWQAAIFAKHRRSPGERFLCGGILISSCWILSAAHCFQERFPPHHLTVILGRTYRVVPGEEEQKFEVEKYIVHKEFDDDTYDNDIALLQLKSDSSRCAQESSVVRTVCLPPADLQLPDWTECELSGYGKHEALSPFYSERLKEAHVRLYPSSRCTSQHLLNRTVTDNMLCAGDTRSGGPQANLHDACQGDSGGPLVCLNDGRMTLVGIISWGLGCGQKDVPGVYTKVTNYLDWIRDNMRP

SEQ ID NO: 6647 - DNA, 2797 bp, Homo sapiens
atggccctgtccactgagcatcctcccgccacacagaaacccgcccagccggggccaccgaccccaccccctgcctggaaacttaaaggaggccggagctgtggggagctcagagctgagatcctacaggagtccagggctggagagaaaacctctgcgaggaaagggaaggagcaagccgtgaatttaagggacgctgtgaagcaatcatggatgcaatgaagagagggctctgctgtgtgctgctgctgtgtggagcagtcttcgtttcgcccagccaggaaatccatgcccgattcagaagaggagccagatcttaccaaggttgcagcgagccaaggtgtttcaacgggggcacctgccagcaggccctgtacttctcagatttcgtgtgccagtgccccgaaggatttgctgggaagtgctgtgaaatagataccagggccacgtgctacgaggaccagggcatcagctacaggggcacgtggagcacagcggagagtggcgccgagtgcaccaactggaacagcagcgcgttggcccagaagccctacagcgggcggaggccagacgccatcaggctgggcctggggaaccacaactactgcagaaacccagatcgagactcaaagccctggtgctacgtctttaaggcggggaagtacagctcagagttctgcagcacccctgcctgctctgagggaaacagtgactgctactttgggaatgggtcagcctaccgtggcacgcacagcctcaccgagtcgggtgcctcctgcctcccgtggaattccatgatcctgataggcaaggtttacacagcacagaaccccagtgcccaggcactgggcctgggcaaacataattactgccggaatcctgatggggatgccaagccctggtgccacgtgctgaagaaccgcaggctgacgtgggagtactgtgatgtgccctcctgctccacctgcggcctgagacagtacagccagcctcagtttcgcatcaaaggagggctcttcgccgacatcgcctcccacccctggcaggctgccatctttgccaagcacaggaggtcgcccggagagcggttcctgtgcgggggcatactcatcagctcctgctggattctctctgccgcccactgcttccaggagaggtttccgccccaccacctgacggtgatcttgggcagaacataccgggtggtccctggcgaggaggagcagaaatttgaagtcgaaaaatacattgtccataaggaattcgatgatgacacttacgacaatgacattgcgctgctgcagctgaaatcggattcgtcccgctgtgcccaggagagcagcgtggtccgcactgtgtgccttcccccggcggacctgcagctgccggactggacggagtgtgagctctccggctacggcaagcatgaggccttgtctcctttctattcggagcggctgaaggaggctcatgtcagactgtacccatccagccgctgcacatcacaacatttacttaacagaacagtcaccgacaacatgctgtgtgctggagacactcggagcggcgggccccaggcaaacttgcacgacgcctgccagggcgattcgggaggccccctggtgtgtctgaacgatggccgcatgactttggtgggcatcatcagctggggcctgggctgtggacagaaggatgtcccgggtgtgtacaccaaggttaccaactacctagactggattcgtgacaacatgcgaccgtgaccaggaacacccgactcctcaaaagcaaatgagatcccgcctcttcttcttcagaagacactgcaaaggcgcagtgcttctctacagacttctccagacccaccacaccgcagaagcgggacgagaccctacaggagagggaagagtgcattttcccagatacttcccattttggaagttttcaggacttggtctgatttcaggatactctgtcagatgggaagacatgaatgcacactagcctctccaggaatgcctcctccctgggcagaaagtggccatgccaccctgttttcagctaaagcccaacctcctgacctgtcaccgtgagcagctttggaaacaggaccacaaaaatgaaagcatgtctcaatagtaaaagataacaagatctttcaggaaagacggattgcattagaaatagacagtatatttatagtcacaagagcccagcagggcctcaaagttggggcaggctggctggcccgtcatgttcctcaaaagcacccttgacgtcaagtctccttcccctttccccactccctggctctcagaaggtattccttttgtgtacagtgtgtaaagtgtaaatcctttttctttataaactttagagtagcatgagagaattgtatcatttgaacaactaggcttcagcatatttatagcaatccatgttagtttttactttctgttgccacaaccctgttttatactgtacttaataaattcagatatatttttcacagtttttccaaaatcagagtggaatggttttgttatagatgctgtatcccactctttattcatgttcacattttaaaatcatttggaattctgcttcactcgcttaacatatacacaacacctgtaacatacaaggcaatgggctaggtgctccagaccgggaaaaggagggacaggaatgcttggtctgatgggctaatatggcatttagagaagtaccaaggtacagtggagccggtcacaaaagggcagacttgtagtagaattcagttgcaagagggattggggaa

SEQ ID NO: 6648 - protein, 516 aa, Homo sapiens; identical to SEQ ID NO: 957

SEQ ID NO: 6649 - DNA, 2961 bp, Homo sapiens
aaaaacaggcctgcctcagctccctcatggccctgtccactgagcatcctcccgccacacagaaacccgcccagccggggccaccgaccccaccccctgcctggaaacttaaaggaggccggagctgtggggagctcagagctgagatcctacaggagtccagggctggagagaaaacctctgcgaggaaagggaaggagcaagccgtgaatttaagggacgctgtgaagcaatcatggatgcaatgaagagagggctctgctgtgtgctgctgctgtgtggagcagtcttcgtttcgcccagccaggaaatccatgcccgattcagaagaggagccagatcttaccaagtgatctgcagagatgaaaaaacgcagatgatataccagcaacatcagtcatggctgcgccctgtgctcagaagcaaccgggtggaatattgctggtgcaacagtggcagggcacagtgccactcagtgcctgtcaaaagttgcagcgagccaaggtgtttcaacgggggcacctgccagcaggccctgtacttctcagatttcgtgtgccagtgccccgaaggatttgctgggaagtgctgtgaaatagataccagggccacgtgctacgaggaccagggcatcagctacaggggcacgtggagcacagcggagagtggcgccgagtgcaccaactggaacagcagcgcgttggcccagaagccctacagcgggcggaggccagacgccatcaggctgggcctggggaaccacaactactgcagaaacccagatcgagactcaaagccctggtgctacgtctttaaggcggggaagtacagctcagagttctgcagcacccctgcctgctctgagggaaacagtgactgctactttgggaatgggtcagcctaccgtggcacgcacagcctcaccgagtcgggtgcctcctgcctcccgtggaattccatgatcctgataggcaaggtttacacagcacagaaccccagtgcccaggcactgggcctgggcaaacataattactgccggaatcctgatggggatgccaagccctggtgccacgtgctgaagaaccgcaggctgacgtgggagtactgtgatgtgccctcctgctccacctgcggcctgagacagtacagccagcctcagtttcgcatcaaaggagggctcttcgccgacatcgcctcccacccctggcaggctgccatctttgccaagcacaggaggtcgcccggagagcggttcctgtgcgggggcatactcatcagctcctgctggattctctctgccgcccactgcttccaggagaggtttccgccccaccacctgacggtgatcttgggcagaacataccgggtggtccctggcgaggaggagcagaaatttgaagtcgaaaaatacattgtccataaggaattcgatgatgacacttacgacaatgacattgcgctgctgcagctgaaatcggattcgtcccgctgtgcccaggagagcagcgtggtccgcactgtgtgccttcccccggcggacctgcagctgccggactggacggagtgtgagctctccggctacggcaagcatgaggccttgtctcctttctattcggagcggctgaaggaggctcatgtcagactgtacccatccagccgctgcacatcacaacatttacttaacagaacagtcaccgacaacatgctgtgtgctggagacactcggagcggcgggccccaggcaaacttgcacgacgcctgccagggcgattcgggaggccccctggtgtgtctgaacgatggccgcatgactttggtgggcatcatcagctggggcctgggctgtggacagaaggatgtcccgggtgtgtacaccaaggttaccaactacctagactggattcgtgacaacatgcgaccgtgaccaggaacacccgactcctcaaaagcaaatgagatcccgcctcttcttcttcagaagacactgcaaaggcgcagtgcttctctacagacttctccagacccaccacaccgcagaagcgggacgagaccctacaggagagggaagagtgcattttcccagatacttcccattttggaagttttcaggacttggtctgatttcaggatactctgtcagatgggaagacatgaatgcacactagcctctccaggaatgcctcctccctgggcagaaagtggccatgccaccctgttttcagctaaagcccaacctcctgacctgtcaccgtgagcagctttggaaacaggaccacaaaaatgaaagcatgtctcaatagtaaaagataacaagatctttcaggaaagacggattgcattagaaatagacagtatatttatagtcacaagagcccagcagggcctcaaagttggggcaggctggctggcccgtcatgttcctcaaaagcacccttgacgtcaagtctccttcccctttccccactccctggctctcagaaggtattccttttgtgtacagtgtgtaaagtgtaaatcctttttctttataaactttagagtagcatgagagaattgtatcatttgaacaactaggcttcagcatatttatagcaatccatgttagtttttactttctgttgccacaaccctgttttatactgtacttaataaattcagatatatttttcacagtttttccaaaatcagagtggaatggttttgttatagatgctgtatcccactctttattcatgttcacattttaaaatcatttggaattctgcttcactcgcttaacatatacacaacacctgtaacatacaaggcaatgggctaggtgctccagaccgggaaaaggagggacaggaatgcttggtctgatgggctaatatggcatttagagaagtaccaaggtacagtggagccggtcacaaaagggcagacttgtagtagaattcagttgcaagagggattggggaa

SEQ ID NO: 6650 - protein, 562 aa, Homo sapiens; identical to SEQ ID NO: 955

SEQ ID NO: 6651 - DNA, 2447 bp, Homo sapiens
aaaaacaggcctgcctcagctccctcatggccctgtccactgagcatcctcccgccacacagaaacccgcccagccggggccaccgaccccaccccctgcctggaaacttaaaggaggccggagctgtggggagctcagagctgagatcctacaggagtccagggctggagagaaaacctctgcgaggaaagggaaggagcaagccgtgaatttaagggacgctgtgaagcaatcatggatgcaatgaagagagggctctgctgtgtgctgctgctgtgtggagcagtcttcgtttcgcccagccaggaaatccatgcccgattcagaagaggagccagatcttaccaagtgatctgcagagatgaaaaaacgcagatgatataccagcaacatcagtcatggctgcgccctgtgctcagaagcaaccgggtggaatattgctggtgcaacagtggcagggcacagtgccactcagtgcctgtcaaaagttgcagcgagccaaggtgtttcaacgggggcacctgccagcaggccctgtacttctcagatttcgtgtgccagtgccccgaaggatttgctgggaagtgctgtgaaatagataccagggccacgtgctacgaggaccagggcatcagctacaggggcacgtggagcacagcggagagtggcgccgagtgcaccaactggaacagcagcgcgttggcccagaagccctacagcgggcggaggccagacgccatcaggctgggcctggggaaccacaactactgcagaaacccagatcgagactcaaagccctggtgctacgtctttaaggcggggaagtacagctcagagttctgcagcacccctgcctgctctgagggaaacagtgactgctactttgggaatgggtcagcctaccgtggcacgcacagcctcaccgagtcgggtgcctcctgcctcccgtggaattccatgatcctgataggcaaggtttacacagcacagaaccccagtgcccaggcactgggcctgggcaaacataattactgccggactggacggagtgtgagctctccggctacggcaagcatgaggccttgtctcctttctattcggagcggctgaaggaggctcatgtcagactgtacccatccagccgctgcacatcacaacatttacttaacagaacagtcaccgacaacatgctgtgtgctggagacactcggagcggcgggccccaggcaaacttgcacgacgcctgccagggcgattcgggaggccccctggtgtgtctgaacgatggccgcatgactttggtgggcatcatcagctggggcctgggctgtggacagaaggatgtcccgggtgtgtacaccaaggttaccaactacctagactggattcgtgacaacatgcgaccgtgaccaggaacacccgactcctcaaaagcaaatgagatcccgcctcttcttcttcagaagacactgcaaaggcgcagtgcttctctacagacttctccagacccaccacaccgcagaagcgggacgagaccctacaggagagggaagagtgcattttcccagatacttcccattttggaagttttcaggacttggtctgatttcaggatactctgtcagatgggaagacatgaatgcacactagcctctccaggaatgcctcctccctgggcagaaagtggccatgccaccctgttttcagctaaagcccaacctcctgacctgtcaccgtgagcagctttggaaacaggaccacaaaaatgaaagcatgtctcaatagtaaaagataacaagatctttcaggaaagacggattgcattagaaatagacagtatatttatagtcacaagagcccagcagggcctcaaagttggggcaggctggctggcccgtcatgttcctcaaaagcacccttgacgtcaagtctccttcccctttccccactccctggctctcagaaggtattccttttgtgtacagtgtgtaaagtgtaaatcctttttctttataaactttagagtagcatgagagaattgtatcatttgaacaactaggcttcagcatatttatagcaatccatgttagtttttactttctgttgccacaaccctgttttatactgtacttaataaattcagatatatttttcacagtttttccaaaatcagagtggaatggttttgttatagatgctgtatcccactctttattcatgttcacattttaaaatcatttggaattctgcttcactcgcttaacatatacacaacacctgtaacatacaaggcaatgggctaggtgctccagaccgggaaaaggagggacaggaatgcttggtctgatgggctaatatggcatttagagaagtaccaaggtacagtggagccggtcacaaaagggcagacttgtagtagaattcagttgcaagagggattggggaa

SEQ ID NO: 6652 - protein, 291 aa, Homo sapiens
MDAMKRGLCCVLLLCGAVFVSPSQEIHARFRRGARSYQVICRDEKTQMIYQQHQSWLRPVLRSNRVEYCWCNSGRAQCHSVPVKSCSEPRCFNGGTCQQALYFSDFVCQCPEGFAGKCCEIDTRATCYEDQGISYRGTWSTAESGAECTNWNSSALAQKPYSGRRPDAIRLGLGNHNYCRNPDRDSKPWCYVFKAGKYSSEFCSTPACSEGNSDCYFGNGSAYRGTHSLTESGASCLPWNSMILIGKVYTAQNPSAQALGLGKHNYCRTGRSVSSPATASMRPCLLSIRSG

SEQ ID NO: 6653 - DNA, 1940 bp, Homo sapiens
tgcagagatgaaaaaacgcagatgatataccagcaacatcagtcatggctgcgccctgtgctcagaagcaaccgggtggaatattgctggtgcaacagtggcagggcacagtgccactcagaaacagtgactgctactttgggaatgggtcagcctaccgtggcacgcacagcctcaccgagtcgggtgcctcctgcctcccgtggaattccatgatcctgataggcaaggtttacacagcacagaaccccagtgcccaggcactgggcctgggcaaacataattactgccggaatcctgatggggatgccaagccctggtgccacgtgctgaagaaccgcaggctgacgtgggagtactgtgatgtgccctcctgctccacctgcggcctgagacagtacagccagcctcagtttcgcatcaaaggagggctcttcgccgacatcgcctcccacccctggcaggctgccatctttgccaagcacaggaggtcgcccggagagcggttcctgtgcgggggcatactcatcagctcctgctggattctctctgccgcccactgcttccaggagaggtttccgccccaccacctgacggtgatcttgggcagaacataccgggtggtccctggcgaggaggagcagaaatttgaagtcgaaaaatacattgtccataaggaattcgatgatgacacttacgacaatgacattgcgctgctgcagctgaaatcggattcgtcccgctgtgcccaggagagcagcgtggtccgcactgtgtgccttcccccggcggacctgcagctgccggactggacggagtgtgagctctccggctacggcaagcatgaggccttgtctcctttctattcggagcggctgaaggaggctcatgtcagactgtacccatccagccgctgcacatcacaacatttacttaacagaacagtcaccgacaacatgctgtgtgctggagacactcggagcggcgggccccaggcaaacttgcacgacgcctgccagggcgattcgggaggccccctggtgtgtctgaacgatggccgcatgactttggtgggcatcatcagctggggcctgggctgtggacagaaggatgtcccgggtgtgtacaccaaggttaccaactacctagactggattcgtgacaacatgcgaccgtgaccaggaacacccgactcctcaaaagcaaatgagatcccgcctcttcttcttcagaagacactgcaaaggcgcagtgcttctctacagacttctccagacccaccacaccgcagaagcgggacgagaccctacaggagagggaagagtgcattttcccagatacttcccattttggaagttttcaggacttggtctgatttcaggatactctgtcagatgggaagacatgaatgcacactagcctctccaggaatgcctcctccctgggcagaaagtggccatgccaccctgttttcagctaaagcccaacctcctgacctgtcaccgtgagcagctttggaaacaggaccacaaaaatgaaagcatgtctcaatagtaaaagataacaagatctttcaggaaagacggattgcattagaaatagacagtatatttatagtcacaagagcccagcagggcctcaaagttggggcaggctggctggcccgtcatgttcctcaaaagcacccttgacgtcaagtctccttcccctttccccactccctggctctcagaaggtattccttttgtgtacagtgtgtaaagtgtaaatcctttttctttataaactttagagtagcatgagagaattgtatcatttgaacaactaggcttcagcatatttatagcaatccatgttagtttttactttctgttgccacaaccctgttttatactgtacttaataaattcagatatatttttcacagtttttccaaaatc

SEQ ID NO: 6654 - protein, 377 aa, Homo sapiens; identical to SEQ ID NO: 6646

SEQ ID NO: 6655 - DNA, 2522 bp, Homo sapiens
atggccctgtccactgagcatcctcccgccacacagaaacccgcccagccggggccaccgaccccaccccctgcctggaaacttaaaggaggccggagctgtggggagctcagagctgagatcctacaggagtccagggctggagagaaaacctctgcgaggaaagggaaggagcaagccgtgaatttaagggacgctgtgaagcaatcatggatgcaatgaagagagggctctgctgtgtgctgctgctgtgtggagcagtcttcgtttcgcccagccaggaaatccatgcccgattcagaagaggagccagatcttaccaaggttgcagcgagccaaggtgtttcaacgggggcacctgccagcaggccctgtacttctcagatttcgtgtgccagtgccccgaaggatttgctgggaagtgctgtgaaatagataccagggccacgtgctacgaggaccagggcatcagctacaggggcacgtggagcacagcggagagtggcgccgagtgcaccaactggaacagcagcgcgttggcccagaagccctacagcgggcggaggccagacgccatcaggctgggcctggggaaccacaactactgcagaaacccagatcgagactcaaagccctggtgctacgtctttaaggcggggaagtacagctcagagttctgcagcacccctgcctgctctgagggaaacagtgactgctactttgggaatgggtcagcctaccgtggcacgcacagcctcaccgagtcgggtgcctcctgcctcccgtggaattccatgatcctgataggcaaggtttacacagcacagaaccccagtgcccaggcactgggcctgggcaaacataattactgccggaatcctgatggggatgccaagccctggtgccacgtgctgaagaaccgcaggctgacgtgggagtactgtgatgtgccctcctgctccacctgcggcctgagacagtacagccagcctcagtttcgcatcaaaggagggctcttcgccgacatcgcctcccacccctggcaggctgccatctttgccaagcacaggaggtcgcccggagagcggttcctgtgcgggggcatactcatcagctcctgctggattctctctgccgcccactgcttccaggagaggtttccgccccaccacctgacggtgatcttgggcagaacataccgggtggtccctggcgaggaggagcagaaatttgaagtcgaaaaatacattgtccataaggaattcgatgatgacacttacgacaatgacattgcgctgctgcagctgaaatcggattcgtcccgctgtgcccaggagagcagcgtggtccgcactgtgtgccttcccccggcggacctgcagctgccggactggacggagtgtgagctctccggctacggcaagcatgaggccttgtctcctttctattcggagcggctgaaggaggctcatgtcagactgtacccatccagccgctgcacatcacaacatttacttaacagaacagtcaccgacaacatgctgtgtgctggagacactcggagcggcgggccccaggcaaacttgcacgacgcctgccagggcgattcgggaggccccctggtgtgtctgaacgatggccgcatgactttggtgggcatcatcagctggggcctgggctgtggacagaaggatgtcccgggtgtgtacaccaaggttaccaactacctagactggattcgtgacaacatgcgaccgtgaccaggaacacccgactcctcaaaagcaaatgagatcccgcctcttcttcttcagaagacactgcaaaggcgcagtgcttctctacagacttctccagacccaccacaccgcagaagcgggacgagaccctacaggagagggaagagtgcattttcccagatacttcccattttggaagttttcaggacttggtctgatttcaggatactctgtcagatgggaagacatgaatgcacactagcctctccaggaatgcctcctccctgggcagaaagtggccatgccaccctgttttcagctaaagcccaacctcctgacctgtcaccgtgagcagctttggaaacaggaccacaaaaatgaaagcatgtctcaatagtaaaagataacaagatctttcaggaaagacggattgcattagaaatagacagtatatttatagtcacaagagcccagcagggcctcaaagttggggcaggctggctggcccgtcatgttcctcaaaagcacccttgacgtcaagtctccttcccctttccccactccctggctctcagaaggtattccttttgtgtacagtgtgtaaagtgtaaatcctttttctttataaactttagagtagcatgagagaattgtatcatttgaacaactaggcttcagcatatttatagcaatccatgttagtttttactttctgttgccacaaccctgttttatactgtacttaataaattcagatatatttttcacagtttttccaaaatc

SEQ ID NO: 6656 - protein, 516 aa, Homo sapiens; identical to SEQ ID NO: 957

SEQ ID NO: 6657 - DNA, 2172 bp, Homo sapiens
aaaaacaggcctgcctcagctccctcatggccctgtccactgagcatcctcccgccacacagaaacccgcccagccggggccaccgaccccaccccctgcctggaaacttaaaggaggccggagctgtggggagctcagagctgagatcctacaggagtccagggctggagagaaaacctctgcgaggaaagggaaggagcaagccgtgaatttaagggacgctgtgaagcaatcatggatgcaatgaagagagggctctgctgtgtgctgctgctgtgtggagcagtcttcgtttcgcccagccaggaaatccatgcccgattcagaagaggagccagatcttaccaagtgatctgcagagatgaaaaaacgcagatgatataccagcaacatcagtcatggctgcgccctgtgctcagaagcaaccgggtggaatattgctggtgcaacagtggcagggcacagtgccactcagtgcctgtcaaaagttgcagcgagccaaggtgtttcaacgggggcacctgccagcaggccctgtacttctcagatttcgtgtgccagtgccccgaaggatttgctgggaagtgctgtgaaatagataccagggccacgtgctacgaggaccagggcatcagctacaggggcacgtggagcacagcggagagtggcgccgagtgcaccaactggaacagcagcgcgttggcccagaagccctacagcgggcggaggccagacgccatcaggctgggcctggggaaccacaactactgcagaaacccagatcgagactcaaagccctggtgctacgtctttaaggcggggaagtacagctcagagttctgcagcacccctgcctgctctgagggaaacagtgactgctactttgggaatgggtcagcctaccgtggcacgcacagcctcaccgagtcgggtgcctcctgcctcccgtggaattccatgatcctgataggcaaggtttacacagcacagaaccccagtgcccaggcactgggcctgggcaaacataattactgccggactggacggagtgtgagctctccggctacggcaagcatgaggccttgtctcctttctattcggagcggctgaaggaggctcatgtcagactgtacccatccagccgctgcacatcacaacatttacttaacagaacagtcaccgacaacatgctgtgtgctggagacactcggagcggcgggccccaggcaaacttgcacgacgcctgccagggcgattcgggaggccccctggtgtgtctgaacgatggccgcatgactttggtgggcatcatcagctggggcctgggctgtggacagaaggatgtcccgggtgtgtacaccaaggttaccaactacctagactggattcgtgacaacatgcgaccgtgaccaggaacacccgactcctcaaaagcaaatgagatcccgcctcttcttcttcagaagacactgcaaaggcgcagtgcttctctacagacttctccagacccaccacaccgcagaagcgggacgagaccctacaggagagggaagagtgcattttcccagatacttcccattttggaagttttcaggacttggtctgatttcaggatactctgtcagatgggaagacatgaatgcacactagcctctccaggaatgcctcctccctgggcagaaagtggccatgccaccctgttttcagctaaagcccaacctcctgacctgtcaccgtgagcagctttggaaacaggaccacaaaaatgaaagcatgtctcaatagtaaaagataacaagatctttcaggaaagacggattgcattagaaatagacagtatatttatagtcacaagagcccagcagggcctcaaagttggggcaggctggctggcccgtcatgttcctcaaaagcacccttgacgtcaagtctccttcccctttccccactccctggctctcagaaggtattccttttgtgtacagtgtgtaaagtgtaaatcctttttctttataaactttagagtagcatgagagaattgtatcatttgaacaactaggcttcagcatatttatagcaatccatgttagtttttactttctgttgccacaaccctgttttatactgtacttaataaattcagatatatttttcacagtttttccaaaatc

SEQ ID NO: 6658 - protein, 291 aa, Homo sapiens; identical to SEQ ID NO: 6652

SEQ ID NO: 6659 - DNA, 2686 bp, Homo sapiens
aaaaacaggcctgcctcagctccctcatggccctgtccactgagcatcctcccgccacacagaaacccgcccagccggggccaccgaccccaccccctgcctggaaacttaaaggaggccggagctgtggggagctcagagctgagatcctacaggagtccagggctggagagaaaacctctgcgaggaaagggaaggagcaagccgtgaatttaagggacgctgtgaagcaatcatggatgcaatgaagagagggctctgctgtgtgctgctgctgtgtggagcagtcttcgtttcgcccagccaggaaatccatgcccgattcagaagaggagccagatcttaccaagtgatctgcagagatgaaaaaacgcagatgatataccagcaacatcagtcatggctgcgccctgtgctcagaagcaaccgggtggaatattgctggtgcaacagtggcagggcacagtgccactcagtgcctgtcaaaagttgcagcgagccaaggtgtttcaacgggggcacctgccagcaggccctgtacttctcagatttcgtgtgccagtgccccgaaggatttgctgggaagtgctgtgaaatagataccagggccacgtgctacgaggaccagggcatcagctacaggggcacgtggagcacagcggagagtggcgccgagtgcaccaactggaacagcagcgcgttggcccagaagccctacagcgggcggaggccagacgccatcaggctgggcctggggaaccacaactactgcagaaacccagatcgagactcaaagccctggtgctacgtctttaaggcggggaagtacagctcagagttctgcagcacccctgcctgctctgagggaaacagtgactgctactttgggaatgggtcagcctaccgtggcacgcacagcctcaccgagtcgggtgcctcctgcctcccgtggaattccatgatcctgataggcaaggtttacacagcacagaaccccagtgcccaggcactgggcctgggcaaacataattactgccggaatcctgatggggatgccaagccctggtgccacgtgctgaagaaccgcaggctgacgtgggagtactgtgatgtgccctcctgctccacctgcggcctgagacagtacagccagcctcagtttcgcatcaaaggagggctcttcgccgacatcgcctcccacccctggcaggctgccatctttgccaagcacaggaggtcgcccggagagcggttcctgtgcgggggcatactcatcagctcctgctggattctctctgccgcccactgcttccaggagaggtttccgccccaccacctgacggtgatcttgggcagaacataccgggtggtccctggcgaggaggagcagaaatttgaagtcgaaaaatacattgtccataaggaattcgatgatgacacttacgacaatgacattgcgctgctgcagctgaaatcggattcgtcccgctgtgcccaggagagcagcgtggtccgcactgtgtgccttcccccggcggacctgcagctgccggactggacggagtgtgagctctccggctacggcaagcatgaggccttgtctcctttctattcggagcggctgaaggaggctcatgtcagactgtacccatccagccgctgcacatcacaacatttacttaacagaacagtcaccgacaacatgctgtgtgctggagacactcggagcggcgggccccaggcaaacttgcacgacgcctgccagggcgattcgggaggccccctggtgtgtctgaacgatggccgcatgactttggtgggcatcatcagctggggcctgggctgtggacagaaggatgtcccgggtgtgtacaccaaggttaccaactacctagactggattcgtgacaacatgcgaccgtgaccaggaacacccgactcctcaaaagcaaatgagatcccgcctcttcttcttcagaagacactgcaaaggcgcagtgcttctctacagacttctccagacccaccacaccgcagaagcgggacgagaccctacaggagagggaagagtgcattttcccagatacttcccattttggaagttttcaggacttggtctgatttcaggatactctgtcagatgggaagacatgaatgcacactagcctctccaggaatgcctcctccctgggcagaaagtggccatgccaccctgttttcagctaaagcccaacctcctgacctgtcaccgtgagcagctttggaaacaggaccacaaaaatgaaagcatgtctcaatagtaaaagataacaagatctttcaggaaagacggattgcattagaaatagacagtatatttatagtcacaagagcccagcagggcctcaaagttggggcaggctggctggcccgtcatgttcctcaaaagcacccttgacgtcaagtctccttcccctttccccactccctggctctcagaaggtattccttttgtgtacagtgtgtaaagtgtaaatcctttttctttataaactttagagtagcatgagagaattgtatcatttgaacaactaggcttcagcatatttatagcaatccatgttagtttttactttctgttgccacaaccctgttttatactgtacttaataaattcagatatatttttcacagtttttccaaaatc

SEQ ID NO: 6660 - protein, 562 aa, Homo sapiens; identical to SEQ ID NO: 955

SEQ ID NO: 6661 - DNA, 1129 bp, Homo sapiens
attgctaaaaaatgaaactttagtttggaaatggccagagagtaggttattaatcacctcctgtgaacacagatcagccagaatgttccccaaggaacacaagtccaactgggacgatgagacacagaccaccagctaactcacacccaagggcattagtgtgagtcctcagtggtccgtgtccctaagctcctcagagctgagcaggtggggacgtcaggaaagctttgcgaggaggcaggattgcacctgggccttgaagcatgggtaaggttggacagatggaaaagaaatgagcagacattccacagaaggaagctgcaattcttcatttcttaggccaggaaatggctgtaggaaaacattagaaggaatgaaggatggcagatccccagttttggagtcaaacatacttgggaactaatccaggtgccattgcaaccttgggcaaaaacgtctccgcctcctgaaacttatcgctgtgggaactaaagagaatgtatggacaacattcggcatgctgatcccaccaagtgaaagttgtggttttacagccatgctgatggcctcctcactctacctacacacgtgcaggaggcctgtgggactgactgcctcctcgtcctttcctccccagccacctgcggcctgagacagtacagccagcctcagtttcgcatcaaaggagggctcttcgccgacatcgcctcccacccctggcaggctgccatctttgccaagcacaggaggtcgcccggagagcggttcctgtgcgggggcatactcatcagctcctgctggattctctctgccgcccactgcttccaggagaggtttccgccccaccacctgacggtgatcttgggcagaacataccgggtggtccctggcgaggaggagcagaaatttgaagtcgaaaaatacattgtccataaggaattcgatgatgacacttacgacaatgacattggtaagagctcgtcattcccggctccagttcatacagatcacacaacacacccacatgcactcacctatgtttacacacacgggcctcctcctccagcccctgcccctcctgcgtgttcctcccctcccggggacgcggccctcacgccagctcactcct

SEQ ID NO: 6662 - protein, 61 aa, Homo sapiens
MMTLTTMTLVRARHSRLQFIQITQHTHMHSPMFTHTGLLLQPLPLLRVPPLPGTRPSRQLT

SEQ ID NO: 6663 - DNA, 1253 bp, Homo sapiens
atggccctgtccactgagcatcctcccgccacacagaaacccgcccagccggggccaccgaccccaccccctgcctggaaacttaaaggaggccggagctgtggggagctcagagctgagatcctacaggagtccagggctggagagaaaacctctgcgaggaaagggaaggagcaagccgtgaatttaagggacgctgtgaagcaatcatggatgcaatgaagagagggctctgctgtgtgctgctgctgtgtggagcagtcttcgtttcgcccagccaggaaatccatgcccgattcagaagaggagccagatcttaccaaggttgcagcgagccaaggtgtttcaacgggggcacctgccagcaggccctgtacttctcagatttcgtgtgccagtgccccgaaggatttgctgggaagtgctgtgaaatagataccagggccacgtgctacgaggaccagggcatcagctacaggggcacgtggagcacagcggagagtggcgccgagtgcaccaactggaacagcagcgcgttggcccagaagccctacagcgggcggaggccagacgccatcaggctgggcctggggaaccacaactactgcagaaacccagatcgagactcaaagccctggtgctacgtctttaaggcggggaagtacagctcagagttctgcagcacccctgcctgctctgagggaaacagtgactgctactttgggaatgggtcagcctaccgtggcacgcacagcctcaccgagtcgggtgcctcctgcctcccgtggaattccatgatcctgataggcaaggtttacacagcacagaaccccagtgcccaggcactgggcctgggcaaacataattactgccggtaggtagcacaggggtggggggttcaggtcttggcagaacgtgggattagggtgtgagacgggggaagatccaatgtctcaagttgcatgacagacccagtgcgtgggaagcacccatggatattatctaatccaacctcttcacttgctagaataacacatattgtgaaaagcaaggtctaccagttttccaacctaaatcccaagttaagggtcctggcctgtaaccatttagtcctcagctgttctcctgacatctttattgcaatgatttgtaagagttccgtaacaggacagctcacagttctgtctgacaaccctatgagattagaacactacattactgactgggtaacaaagttaaagagaagttctcct

SEQ ID NO: 6664 - protein, 222 aa, Homo sapiens
MDAMKRGLCCVLLLCGAVFVSPSQEIHARFRRGARSYQGCSEPRCFNGGTCQQALYFSDFVCQCPEGFAGKCCEIDTRATCYEDQGISYRGTWSTAESGAECTNWNSSALAQKPYSGRRPDAIRLGLGNHNYCRNPDRDSKPWCYVFKAGKYSSEFCSTPACSEGNSDCYFGNGSAYRGTHSLTESGASCLPWNSMILIGKVYTAQNPSAQALGLGKHNYCR

SEQ ID NO: 6665 - DNA, 3444 bp, Homo sapiens
cggccttaggcggaggtgaaggtacaagcagaaaagggagcaagaccaagtgaccttgggcaaatgcccgcttgcctcagtttcctcatctataaagaggtgggaataacagtacacacttcatggtttgctgtgaggattaaattagctaatttttgtagactgtacaacagcgcctggcacatagagcacattcttaatattttaactcacatcatccttggagctgctttgaaaatacaggggacccttgaacaacacttgtctgacctgcagggtccacttatgtatggatttttttcaaccaaaggcaggatgaaaacagtatttgtaggatgcagaactggtatacgcgtgttccacgctgcaggacttgagtgtgtgtggattgtggtagacagggctcctggaaccatggcctgagcacacagaaggaggctgtcattaggggcttccttttttatacttgacaggttgcagcgagccaaggtgtttcaacgggggcacctgccagcaggccctgtacttctcagatttcgtgtgccagtgccccgaaggatttgctgggaagtgctgtgaaatagataccagggccacgtgctacgaggaccagggcatcagctacaggggcacgtggagcacagcggagagtggcgccgagtgcaccaactggaacagcagcgcgttggcccagaagccctacagcgggcggaggccagacgccatcaggctgggcctggggaaccacaactactgcaggtgagggcacatccccaaggagggattccccctgtgagaagctgctacagctggggaaagattctgtcagatccgtcagggttctcccaagaaacataaccaatacaggatggatagatggatagatgatagacagataatagatgataggtgatagatgatagattgatagatgatagatgataggtgatagattagataaatagatgatacatacatgatagatagatgataaatagacggtagatggatgacagatagacagatgataggtgatagatagatgatagattgatagatgattgatagataaatagatgatagatacatagatgatagatggtagatagatgatagatggatagatgatagatgataggtggtagatgatagacagatgattagaaagatagatgatagatacatagatgatagacacatagatgatagacagattgacagatgatagatgattgatagatgattaaatagatgatacatagatgataatgataaatagatgatagatgatagatgataggtgatagatagattgatagatgatagaagattgatagatgatagatacataggtgatagtagatgtaagatgatagatgatagatagatagatgatagacagattgatagatgatagagagatagagatagagaaagaggagagagaaatagagagagagagagaatgtgtgtgaacccaaagtatctgagacaggtctcaatcgatttagaaagttgattttgccaaggttaaggacacccccgtgacacagcctcaggaggtcctgaggacatgtgcccaaggttgtcagggcacagcttgcctttagacgttttagggagtcatgagacatcaatcaacatgtgtgagatgtacatcggtttggtcgggaaagttgggataactcgaagcaagggcttccaggccataggtagataagagacaaaaggctgtattctgagtccttgatcagcttttcactgaacacacaattgagtctggctcagttcatctgcatttttacataaaaaatagggcagaggaagcaatcagatacgcatttgtctcagatgagcagagggatgattttctgtcctgcacctgggaagataagctatccatttacaatgccaaggtgaaagtcaacagaactgttttagggtaaagatctttaggcctgcaaggaatgtccttgtagagaattaaaaaaaaaaaaaaaaaactttgcagctatcttattgaggaataaatgagaggcaggtttgcctgacgtagttcccggcttgacatttcccttggctcatgacgttggggtcctgagatttattttcctttcacactagatagatagacatttatgttaaggaactggctgacaggatcgtgggggctggcaagtccgaaacatcttggtaagccaggctggaagtgcaggcagaagctgaggctgctctcttaaggcagaatttcttattcaggaaacctcatatttgctcttaaggcctttaagtgattggacgaggcccaactacattatctaggacaatttccttttctaaagtcaactggctgtagatattaaccacatctataaaacactttcacaactcctagatgaatgtttggttaactgactgggtgccacagcctggccaagttgacatataagactattccagtccacaccttgtcaatttggcacccatgtgcatctccttaaaccatccttcacctccaagtaaacacaggaacaaaatcatactcctgcctaacatgatagaactaccagtgtacaaccaaaaacgcactcccggctgggcgtggtggctcacgcctgtaatcccagcactttgggaagccaaggcaggtggatcacctgaggtcaggagttcaagaccagcctggccaacatggtgaaaccctgtctctactaaaaatacaaaaattagccaggcatggtggcaggcacctgtaatcccagctactcgggaagctgaggctgaagaattgcccaaatccaggaaacggaggttgcagtgagaggagatgcgccgctgcactccagcctgggataaacagcgagactctgtcaaaaaaaaaagcaccccccattcctccagaaaaggataccaaagtccttgggtcctaaaggagaggcttcacctttgacctaccctggcccttcccttggctgatttttcagaaacccagatcgagactcaaagccctggtgctacgtctttaaggcggggaagtacagctcagagttctgcagcacccctgcctgctctgagggtaagtggcagccaccccgcctttccctgaatgtccctgggggaggaaagtccaggaggacaggccgatagccctcctgcacctgaggggagaaagggggaggccaggagtgagtcattttggttgcagagggaagaaagacaggacttaggtctgtgcctgggcttggcctctgactggctatttgtctgacctggagctgatctcctcacactctgaccctcaatttcctcctctatggaggagaggatggggctgaatcagtggttttcagtccttttgagaatgaatggagattctcccttttttgattaatgggtgaatggggctttgtctctctttcgctccctctcaaactttttaatgca

SEQ ID NO: 6666 - protein, 119 aa, Homo sapiens [sequence omitted]

SEQ ID NO: 6667 - DNA, 557 bp, Homo sapiens
aaaaacaggcctgcctcagctccctcatggccctgtccactgagcatcctcccgccacacagaaacccgcccagccggggccaccgaccccaccccctgcctggaaacttaaaggaggccggagctgtggggagctcagagctgagatcctacaggagtccagggctggagagaaaacctctgcgaggaaagggaaggagcaagccgtgaatttaagggacgctgtgaagcaatcatggatgcaatgaagagagggctctgctgtgtgctgctgctgtgtggagcagtcttcgtttcgcccagccaggaaatccatgcccgattcagaagaggagccagatcttaccaagtgatctgcagagatgaaaaaacgcagatgatataccagcaacatcagtcatggctgcgccctgtgctcagaagcaaccgggtggaatattgctggtgcaacagtggcagggcacagtgccactcagtgcctgtcaaaagttgcagcgagccaaggtgtttcaacgggggcacctgccagcaggccctgtacttctcagatttcgtgt

SEQ ID NO: 6668 - protein, 106 aa, Homo sapiens
MDAMKRGLCCVLLLCGAVFVSPSQEIHARFRRGARSYQVICRDEKTQMIYQQHQSWLRPVLRSNRVEYCWCNSGRAQCHSVPVKSCSEPRCFNGGTCQQALYFSDF

SEQ ID NO: 6669 - DNA, 310 bp, Homo sapiens
acatggtgcaacatttgataatagtatcaatttacgtttgtctttcccttgcaatttccctcctcctctagcttgctcacgtttctgccttcttcttgctggcaagagtacagactataattctccagttcactaacatctggagcgactgcactgtttgcaatttcattgattgactacatgtgtacagttcctttattgcaagtcacttttctgtataatcttttttgagacgaagtcctgctctgtcgcccaggctgcatgagccaagacagcaccattggactccagcctgggtgacagagaccct

SEQ ID NO: 6670 - protein, 30 aa, Homo sapiens
LTTCVQFLYCKSLFCIIFFETKSCSVAQAA

SEQ ID NO: 6671 - DNA, 593 bp, Homo sapiens
gcgggcgctcccctgtctggggggtgcttggctgggtgtggagaaggatcaatcacagctgactcctcagaggtgacagcccctgcccccttaaaaacaagaaaagacctagcagtgtgaagccaaactgcacccccagccccggtgacatgaggaaaccgtgaggcgctcagcctgaggttcatcgttcatctccttcctgcttggaatcagaatgtcctcactgctgagtttctccgttttatgggattacattagtggacaaaggaggaagtcccagccggaaacacagaaaggatatggagaaaattattattctgcccctacagtttcggtgacccagatgggatctctgggacaccctgcctgctctacaattgggatccctggaaaagtgacagaatctggcaacagatgagtaagaaaggtcacttcctggcagacctcaggtatattggggacatcaagaaaagaataattcatcaaagtctacagatattgcaggcaaagttgaaacaagccagacaagttctctttgtattcttgagagacttggaaagtctaacctgagattccttattaaaagttccagc

SEQ ID NO: 6672 - protein, 67 aa, Homo sapiens
MSSLLSFSVLWDYISGQRRKSQPETQKGYGENYYSAPTVSVTQMGSLGHPACSTIGIPGKVTESGNR

SEQ ID NO: 6673 - DNA, 748 bp, Homo sapiens
gcgactcccccggggcgggggtggcgtgtggtctctagacaactgagggaaagtagacagaccgtgctcaccgatttaaaagaacagccctgaaatgacccccgttacaccctgttctctttagacaagttacttccacctggagcggtttctgggcccgggtatggggatttcttcacccggccccctaggctttcacctcggtggaatttcccgcgcccccgctgggatgatttagggactgttggctagaactgcccttgcctaccgccctactgcgggcgctcccctgtctggggggtgcttggctgggtgtggagaaggatcaatcacagctgactcctcagaggtgacagcccctgcccccttaaaaacaagaaaagacctagcagtgtgaagccaaactgcacccccagccccggtgacatgaggaaaccgtgaggcgctcagcctgaggttcatcgttcatctccttcctgcttggaatcagaatgtcctcactgctgagtttctccgttttatgggattacattagtggacaaaggagtgaagcaaagcagcactgagctcctccaagtaaagaaagaattgttttctgtacaacctggagctgaatcatagaaggagaagacagcttgaaagataagaggccgtaaggcagaccacagaggatggggaggatttccccagcaccccagcccccatagtcagctctggttcagcgatttcagcaactctttcatgaccc

SEQ ID NO: 6674 - protein, 37 aa, Homo sapiens
VSPFYGITLVDKGVKQSSTELLQVKKELFSVQPGAES

SEQ ID NO: 6675 - DNA, 1165 bp, Homo sapiens
gtgacgtcagagcaggaagtgtttgaggaagtcgcgccgcgctgcccgcgttaagattcccgcattttaatgttttcaggggggtgtcatagccccgggtttggccgccccagccccgccttccccgccccggggagcccgccccctgccccgcgtccctgccgacagagttagcacgacatcagtatgagctggtcaccttccctgacaacgcagacatgtggggcctgggaaatgaaagagcgccttgggacagggggatttggaaatgtcatccgatggcacaatcaggaaacaggtgagcagattgccatcaagcagtgccggcaggagctcagcccccggaaccgagagcggtggtgcctggagatccagatcatgagaaggctgacccaccccaatgtggtggctgcccgagatgtccctgaggggatgcagaacttggcgcccaatgacctgcccctgctggccatggagtactgccaaggaggagatctccggaagtacctgaaccagtttgagaactgctgtggtctgcgggaaggtgccatcctcaccttgctgagtgacattgcctctgcgcttagataccttcatgaaaacagaatcatccatcgggatctaaagccagaaaacatcgtcctgcagcaaggagaacagaggttaatacacaaaattattgacctaggatatgccaaggagctggatcagggcagtctttgcacatcattcgtggggaccctgcagtacctggccccagagctactggagcagcagaagtacacagtgaccgtcgactactggagcttcggcaccctggcctttgagtgcatcacgggcttccggcccttcctccccaactggcagcccgtgcagtgcgtaagaatgtggccgggtacagtggctcactcctgtaatcccagcactttgggaggccgaggcaggtggatcagttgaggccagcagttccagaccagcctggccaacatggcaaaaccctgtctctactaaaaaccctagccaggtgtggtggcgggcgcctgtaatcccagctactcggaaggctgaggtgggagaattgcttaaacccaggaggcagaggtcgcatcactgcaatccagcctgggcgacagagtgagactctgtctcaaaacaaaaaaagttt

SEQ ID NO: 6676 - protein, 256 aa, Homo sapiens
MSWSPSLTTQTCGAWEMKERLGTGGFGNVIRWHNQETGEQIAIKQCRQELSPRNRERWCLEIQIMRRLTHPNVVAARDVPEGMQNLAPNDLPLLAMEYCQGGDLRKYLNQFENCCGLREGAILTLLSDIASALRYLHENRIIHRDLKPENIVLQQGEQRLIHKIIDLGYAKELDQGSLCTSFVGTLQYLAPELLEQQKYTVTVDYWSFGTLAFECITGFRPFLPNWQPVQCVRMWPGTVAHSCNPSTLGGRGRWIS

SEQ ID NO: 6677 - DNA, 1616 bp, Homo sapiens
gtgacgtcagagcaggaagtgtttgaggaagtcgcgccgcgctgcccgcgttaagattcccgcattttaatgttttcaggggggtgtcatagccccgggtttggccgccccagccccgccttccccgccccggggagcccgccccctgccccgcgtccctgccgacagagttagcacgacatcagtatgagctggtcaccttccctgacaacgcagacatgtggggcctgggaaatgaaagagcgccttgggacagggggatttggaaatgtcatccgatggcacaatcaggaaacaggtgagcagattgccatcaagcagtgccggcaggagctcagcccccggaaccgagagcggtggtgcctggagatccagatcatgagaaggctgacccaccccaatgtggtggctgcccgagatgtccctgaggggatgcagaacttggcgcccaatgacctgcccctgctggccatggagtactgccaaggaggagatctccggaagtacctgaaccagtttgagaactgctgtggtctgcgggaaggtgccatcctcaccttgctgagtgacattgcctctgcgcttagataccttcatgaaaacagaatcatccatcgggatctaaagccagaaaacatcgtcctgcagcaaggagaacagaggttaatacacaaaattattgacctaggatatgccaaggagctggatcagggcagtctttgcacatcattcgtggggaccctgcagtacctggccccagagctactggagcagcagaagtacacagtgaccgtcgactactggagcttcggcaccctggcctttgagtgcatcacgggcttccggcccttcctccccaactggcagcccgtgcagtggcattcaaaagtgcggcagaagagtgaggtggacattgttgttagcgaagacttgaatggaacggtgaagttttcaagctctttaccctaccccaataatcttaacagtgtcctggctgagcgactggagaagtggctgcaactgatgctgatgtggcacccccgacagaggggcacggatcccacgtatgggcccaatggctgcttcaaggccctggatgacatcttaaacttaaagctggttcatatcttgaacatggtcacgggcaccatccacacctaccctgtgacagaggatgagagtctgcagagcttgaaggccagaatccaacaggacacgggcatcccagaggaggaccaggagctgctgcaggaagcgggcctggcgttgatccccgataagcctgccactcagtgtatttcagacggcaaggtgagccctggcttcgtacacaccatcctgtttaccttggctgtgcctcctgggaaactcaacacactttcagatttcaattctgctttgtcatgtagtctgttaatcacacagtgcggatacctggctggtttttaagttggagtatggtgtcctctgtgtggcctgataggaaacacaaatctccttgctggacttgttacttccaaaccctccaagaccggtctcttgcctttattgcaaaaaatgatgctataacactcgaatctctcaagttgcctgcttggccctcttccaagtgtact

SEQ ID NO: 6678 - protein, 420 aa, Homo sapiens
MSWSPSLTTQTCGAWEMKERLGTGGFGNVIRWHNQETGEQIAIKQCRQELSPRNRERWCLEIQIMRRLTHPNVVAARDVPEGMQNLAPNDLPLLAMEYCQGGDLRKYLNQFENCCGLREGAILTLLSDIASALRYLHENRIIHRDLKPENIVLQQGEQRLIHKIIDLGYAKELDQGSLCTSFVGTLQYLAPELLEQQKYTVTVDYWSFGTLAFECITGFRPFLPNWQPVQWHSKVRQKSEVDIVVSEDLNGTVKFSSSLPYPNNLNSVLAERLEKWLQLMLMWHPRQRGTDPTYGPNGCFKALDDILNLKLVHILNMVTGTIHTYPVTEDESLQSLKARIQQDTGIPEEDQELLQEAGLALIPDKPATQCISDGKVSPGFVHTILFTLAVPPGKLNTLSDFNSALSCSLLITQCGYLAGF

SEQ ID NO: 6679 - DNA, 3087 bp, Homo sapiens
gtgacgtcagagcaggaagtgtttgaggaagtcgcgccgcgctgcccgcgttaagattcccgcattttaatgttttcaggggggtgtcatagccccgggtttggccgccccagccccgccttccccgccccggggagcccgccccctgccccgcgtccctgccgacagagttagcacgacatcagtatgagctggtcaccttccctgacaacgcagacatgtggggcctgggaaatgaaagagcgccttgggacagggggatttggaaatgtcatccgatggcacaatcaggaaacaggtgagcagattgccatcaagcagtgccggcaggagctcagcccccggaaccgagagcggtggtgcctggagatccagatcatgagaaggctgacccaccccaatgtggtggctgcccgagatgtccctgaggggatgcagaacttggcgcccaatgacctgcccctgctggccatggagtactgccaaggaggagatctccggaagtacctgaaccagtttgagaactgctgtggtctgcgggaaggtgccatcctcaccttgctgagtgacattgcctctgcgcttagataccttcatgaaaacagaatcatccatcgggatctaaagccagaaaacatcgtcctgcagcaaggagaacagaggttaatacacaaaattattgacctaggatatgccaaggagctggatcagggcagtctttgcacatcattcgtggggaccctgcagtacctggccccagagctactggagcagcagaagtacacagtgaccgtcgactactggagcttcggcaccctggcctttgagtgcatcacgggcttccggcccttcctccccaactggcagcccgtgcagtggcattcaaaagtgcggcagaagagtgaggtggacattgttgttagcgaagacttgaatggaacggtgaagttttcaagctctttaccctaccccaataatcttaacagtgtcctggctgagcgactggagaagtggctgcaactgatgctgatgtggcacccccgacagaggggcacggatcccacgtatgggcccaatggctgcttcaaggccctggatgacatcttaaacttaaagctggttcatatcttgaacatggtcacgggcaccatccacacctaccctgtgacagaggatgagagtctgcagagcttgaaggccagaatccaacaggacacgggcatcccagaggaggaccaggagctgctgcaggaagcgggcctggcgttgatccccgataagcctgccactcagtgtatttcagacggcaagttaaatgagggccacacattggacatggatcttgtttttctctttgacaacagtaaaatcacctatgagactcagatctccccacggccccaacctgaaagtgtcagctgtatccttcaagagcccaagaggaatctcgccttcttccagctgaggaaggtgtggggccaggtctggcacagcatccagaccctgaaggaagattgcaaccggctgcagcagggacagcgagccgccatgatgaatctcctccgaaacaacagctgcctctccaaaatgaagaattccatggcttccatgtctcagcagctcaaggccaagttggatttcttcaaaaccagcatccagattgacctggagaagtacagcgagcaaaccgagtttgggatcacatcagataaactgctgctggcctggagggaaatggagcaggctgtggagctctgtgggcgggagaacgaagtgaaactcctggtagaacggatgatggctctgcagaccgacattgtggacttacagaggagccccatgggccggaagcaggggggaacgctggacgacctagaggagcaagcaagggagctgtacaggagactaagggaaaaacctcgagaccagcgaactgagggtgacagtcaggaaatggtacggctgctgcttcaggcaattcagagcttcgagaagaaagtgcgagtgatctatacgcagctcagtaaaactgtggtttgcaagcagaaggcgctggaactgttgcccaaggtggaagaggtggtgagcttaatgaatgaggatgagaagactgttgtccggctgcaggagaagcggcagaaggagctctggaatctcctgaagattgcttgtagcaaggtccgtggtcctgtcagtggaagcccggatagcatgaatgcctctcgacttagccagcctgggcagctgatgtctcagccctccacggcctccaacagcttacctgagccagccaagaagagtgaagaactggtggctgaagcacataacctctgcaccctgctagaaaatgccatacaggacactgtgagggaacaagaccagagtttcacggccctagactggagctggttacagacggaagaagaagagcacagctgcctggagcaggcctcatgatgtggggggactcgaccccctgacatggggcagcccatagcaggccttgtgcagtggggggactcgaccccctgacatggggctgcctggagcaggccgcgtgacgtggggctgcctggccgcggctctcacatggtggttcctgctgcactgatggcccaggggtctctggtatccagatggagctctcgcttcctcagcagctgtgactttcacccaggacccaggacgcagccctccgtgggcactgccggcgccttgtctgcacactggaggtcctccattacagaggcccagcgcacatcgctggccccacaaacgttcaggggtacagccatggcagctccttcctctgccgtgagaaaagtgcttggagtacggtttgccacacacgtgactggacagtgtccaattcaaatctttcagggcagagtccgagcagcgcttggtgacagcctgtcctctcctgctctccaaaggccctgctccctgtcctctctcactttacagcttgtgtttcttctggattcagcttctcctaaacagacagtttaattatagttgcggcctggccccatcctcacttcctctttttatttcactgctgctaaaattgtgtttttacctact

SEQ ID NO: 6680 - protein, 756 aa, Homo sapiens; identical to SEQ ID NO: 959

SEQ ID NO: 6681 - DNA, 3991 bp, Homo sapiens
gtgacgtcagagcaggaagtgtttgaggaagtcgcgccgcgctgcccgcgttaagattcccgcattttaatgttttcaggggggtgtcatagccccgggtttggccgccccagccccgccttccccgccccggggagcccgccccctgccccgcgtccctgccgacagagttagcacgacatcagtatgagctggtcaccttccctgacaacgcagacatgtggggcctgggaaatgaaagagcgccttgggacagggggatttggaaatgtcatccgatggcacaatcaggaaacaggtgagcagattgccatcaagcagtgccggcaggagctcagcccccggaaccgagagcggtggtgcctggagatccagatcatgagaaggctgacccaccccaatgtggtggctgcccgagatgtccctgaggggatgcagaacttggcgcccaatgacctgcccctgctggccatggagtactgccaaggaggagatctccggaagtacctgaaccagtttgagaactgctgtggtctgcgggaaggtgccatcctcaccttgctgagtgacattggtaaatcccagtcccggaattcaggccgtgtccttcagggagagtgtggtgcccctcctctgcgcttagataccttcatgaaaacagaatcatccatcgggatctaaagccagaaaacatcgtcctgcagcaaggagaacagaggttaatacacaaaattattgacctaggatatgccaaggagctggatcagggcagtctttgcacatcattcgtggggaccctgcagtacctggccccagagctactggagcagcagaagtacacagtgaccgtcgactactggagcttcggcaccctggcctttgagtgcatcacgggcttccggcccttcctccccaactggcagcccgtgcagtggcattcaaaagtgcggcagaagagtgaggtggacattgttgttagcgaagacttgaatggaacggtgaagttttcaagctctttaccctaccccaataatcttaacagtgtcctggctgagcgactggagaagtggctgcaactgatgctgatgtggcacccccgacagaggggcacggatcccacgtatgggcccaatggctgcttcaaggccctggatgacatcttaaacttaaagctggttcatatcttgaacatggtcacgggcaccatccacacctaccctgtgacagaggatgagagtctgcagagcttgaaggccagaatccaacaggacacgggcatcccagaggaggaccaggagctgctgcaggaagcgggcctggcgttgatccccgataagcctgccactcagtgtatttcagacggcaagttaaatgagggccacacattggacatggatcttgtttttctctttgacaacagtaaaatcacctatgagactcagatctccccacggccccaacctgaaagtgtcagctgtatccttcaagagcccaagaggaatctcgccttcttccagctgaggaaggtgtggggccaggtctggcacagcatccagaccctgaaggaagattgcaaccggctgcagcagggacagcgagccgccatgatgaatctcctccgaaacaacagctgcctctccaaaatgaagaattccatggcttccatgtctcagcagctcaaggccaagttggatttcttcaaaaccagcatccagattgacctggagaagtacagcgagcaaaccgagtttgggatcacatcagataaactgctgctggcctggagggaaatggagcaggctgtggagctctgtgggcgggagaacgaagtgaaactcctggtagaacggatgatggctctgcagaccgacattgtggacttacagaggagccccatgggccggaagcaggggggaacgctggacgacctagaggagcaagcaagggagctgtacaggagactaagggaaaaacctcgagaccagcgaactgagggtgacagtcaggaaatggtacggctgctgcttcaggcaattcagagcttcgagaagaaagtgcgagtgatctatacgcagctcagtaaaactgtggtttgcaagcagaaggcgctggaactgttgcccaaggtggaagaggtggtgagcttaatgaatgaggatgagaagactgttgtccggctgcaggagaagcggcagaaggagctctggaatctcctgaagattgcttgtagcaaggtccgtggtcctgtcagtggaagcccggatagcatgaatgcctctcgacttagccagcctgggcagctgatgtctcagccctccacggcctccaacagcttacctgagccagccaagaagagtgaagaactggtggctgaagcacataacctctgcaccctgctagaaaatgccatacaggacactgtgagggaacaagaccagagtttcacggccctagactggagctggttacagacggaagaagaagagcacagctgcctggagcaggcctcatgatgtggggggactcgaccccctgacatggggcagcccatagcaggccttgtgcagtggggggactcgaccccctgacatggggctgcctggagcaggccgcgtgacgtggggctgcctggccgcggctctcacatggtggttcctgctgcactgatggcccaggggtctctggtatccagatggagctctcgcttcctcagcagctgtgactttcacccaggacccaggacgcagccctccgtgggcactgccggcgccttgtctgcacactggaggtcctccattacagaggcccagcgcacatcgctggccccacaaacgttcaggggtacagccatggcagctccttcctctgccgtgagaaaagtgcttggagtacggtttgccacacacgtgactggacagtgtccaattcaaatctttcagggcagagtccgagcagcgcttggtgacagcctgtcctctcctgctctccaaaggccctgctccctgtcctctctcactttacagcttgtgtttcttctggattcagcttctcctaaacagacagtttaattatagttgcggcctggccccatcctcacttcctctttttatttcactgctgctaaaattgtgtttttacctactactttggtggttgtcctcttttcggcaaagttggagcgagtgccaagctctccatctgtggtcctttctgccaagagcgactcatagtaaccaggatgggagagcagctgccttattctgaatcccaaaaattacttgggggtgattgtcacagaggagggacagaaagggtatctgctgaccaccagcctgcctacccatgcccatgtctccattcctgctcaagcgtgtgtgctgggccggggagtccctgtctctcacagcatctagcagtattattaaatggattcattttaaaaatagctcctatattttgtaacatgtctcaaacactcatactgggttccacaatccactgttagaatacctatggttagggcttctgaactaaaataatggaaaattttaacaatttgtatagtgcctggatcattactagtgccataaccctgcttcttcaacatttcacagaacttctcttttatataaaggcaagagcacaaaatgagttcagatgatcacaaacaggtgagttttgttggagaagaaagttggagtaggagactttcacaagtggtttccatggagatagaatgaagcattctgtggtcaagtaagtttagggagctattcatgtttcacttgctttgtggagattcacactatgcactgggaaagtatctgaaaagtcttataataaagaaacaggcttaactttgtgtaagaacactgtttatcaatgtcatttggctatagaaacattttctcctgctgattgtgtgtgtgaaacatgtattaacattccaatgaactagcatttaataaagcacaattttggaaaccctggt

SEQ ID NO: 6682 - protein, 477 aa, Homo sapiens
MLMWHPRQRGTDPTYGPNGCFKALDDILNLKLVHILNMVTGTIHTYPVTEDESLQSLKARIQQDTGIPEEDQELLQEAGLALIPDKPATQCISDGKLNEGHTLDMDLVFLFDNSKITYETQISPRPQPESVSCILQEPKRNLAFFQLRKVWGQVWHSIQTLKEDCNRLQQGQRAAMMNLLRNNSCLSKMKNSMASMSQQLKAKLDFFKTSIQIDLEKYSEQTEFGITSDKLLLAWREMEQAVELCGRENEVKLLVERMMALQTDIVDLQRSPMGRKQGGTLDDLEEQARELYRRLREKPRDQRTEGDSQEMVRLLLQAIQSFEKKVRVIYTQLSKTVVCKQKALELLPKVEEVVSLMNEDEKTVVRLQEKRQKELWNLLKIACSKVRGPVSGSPDSMNASRLSQPGQLMSQPSTASNSLPEPAKKSEELVAEAHNLCTLLENAIQDTVREQDQSFTALDWSWLQTEEEEHSCLEQAS

SEQ ID NO: 6683 - DNA, 3935 bp, Homo sapiens
gtgacgtcagagcaggaagtgtttgaggaagtcgcgccgcgctgcccgcgttaagattcccgcattttaatgttttcaggggggtgtcatagccccgggtttggccgccccagccccgccttccccgccccggggagcccgccccctgccccgcgtccctgccgacagagttagcacgacatcagtatgagctggtcaccttccctgacaacgcagacatgtggggcctgggaaatgaaagagcgccttgggacagggggatttggaaatgtcatccgatggcacaatcaggaaacaggtgagcagattgccatcaagcagtgccggcaggagctcagcccccggaaccgagagcggtggtgcctggagatccagatcatgagaaggctgacccaccccaatgtggtggctgcccgagatgtccctgaggggatgcagaacttggcgcccaatgacctgcccctgctggccatggagtactgccaaggaggagatctccggaagtacctgaaccagtttgagaactgctgtggtctgcgggaaggtgccatcctcaccttgctgagtgacattgcctctgcgcttagataccttcatgaaaacagaatcatccatcgggatctaaagccagaaaacatcgtcctgcagcaaggagaacagaggttaatacacaaaattattgacctaggatatgccaaggagctggatcagggcagtctttgcacatcattcgtggggaccctgcagtacctggccccagagctactggagcagcagaagtacacagtgaccgtcgactactggagcttcggcaccctggcctttgagtgcatcacgggcttccggcccttcctccccaactggcagcccgtgcagtggcattcaaaagtgcggcagaagagtgaggtggacattgttgttagcgaagacttgaatggaacggtgaagttttcaagctctttaccctaccccaataatcttaacagtgtcctggctgagcgactggagaagtggctgcaactgatgctgatgtggcacccccgacagaggggcacggatcccacgtatgggcccaatggctgcttcaaggccctggatgacatcttaaacttaaagctggttcatatcttgaacatggtcacgggcaccatccacacctaccctgtgacagaggatgagagtctgcagagcttgaaggccagaatccaacaggacacgggcatcccagaggaggaccaggagctgctgcaggaagcgggcctggcgttgatccccgataagcctgccactcagtgtatttcagacggcaagttaaatgagggccacacattggacatggatcttgtttttctctttgacaacagtaaaatcacctatgagactcagatctccccacggccccaacctgaaagtgtcagctgtatccttcaagagcccaagaggaatctcgccttcttccagctgaggaaggtgtggggccaggtctggcacagcatccagaccctgaaggaagattgcaaccggctgcagcagggacagcgagccgccatgatgaatctcctccgaaacaacagctgcctctccaaaatgaagaattccatggcttccatgtctcagcagctcaaggccaagttggatttcttcaaaaccagcatccagattgacctggagaagtacagcgagcaaaccgagtttgggatcacatcagataaactgctgctggcctggagggaaatggagcaggctgtggagctctgtgggcgggagaacgaagtgaaactcctggtagaacggatgatggctctgcagaccgacattgtggacttacagaggagccccatgggccggaagcaggggggaacgctggacgacctagaggagcaagcaagggagctgtacaggagactaagggaaaaacctcgagaccagcgaactgagggtgacagtcaggaaatggtacggctgctgcttcaggcaattcagagcttcgagaagaaagtgcgagtgatctatacgcagctcagtaaaactgtggtttgcaagcagaaggcgctggaactgttgcccaaggtggaagaggtggtgagcttaatgaatgaggatgagaagactgttgtccggctgcaggagaagcggcagaaggagctctggaatctcctgaagattgcttgtagcaaggtccgtggtcctgtcagtggaagcccggatagcatgaatgcctctcgacttagccagcctgggcagctgatgtctcagccctccacggcctccaacagcttacctgagccagccaagaagagtgaagaactggtggctgaagcacataacctctgcaccctgctagaaaatgccatacaggacactgtgagggaacaagaccagagtttcacggccctagactggagctggttacagacggaagaagaagagcacagctgcctggagcaggcctcatgatgtggggggactcgaccccctgacatggggcagcccatagcaggccttgtgcagtggggggactcgaccccctgacatggggctgcctggagcaggccgcgtgacgtggggctgcctggccgcggctctcacatggtggttcctgctgcactgatggcccaggggtctctggtatccagatggagctctcgcttcctcagcagctgtgactttcacccaggacccaggacgcagccctccgtgggcactgccggcgccttgtctgcacactggaggtcctccattacagaggcccagcgcacatcgctggccccacaaacgttcaggggtacagccatggcagctccttcctctgccgtgagaaaagtgcttggagtacggtttgccacacacgtgactggacagtgtccaattcaaatctttcagggcagagtccgagcagcgcttggtgacagcctgtcctctcctgctctccaaaggccctgctccctgtcctctctcactttacagcttgtgtttcttctggattcagcttctcctaaacagacagtttaattatagttgcggcctggccccatcctcacttcctctttttatttcactgctgctaaaattgtgtttttacctactactttggtggttgtcctcttttcggcaaagttggagcgagtgccaagctctccatctgtggtcctttctgccaagagcgactcatagtaaccaggatgggagagcagctgccttattctgaatcccaaaaattacttgggggtgattgtcacagaggagggacagaaagggtatctgctgaccaccagcctgcctacccatgcccatgtctccattcctgctcaagcgtgtgtgctgggccggggagtccctgtctctcacagcatctagcagtattattaaatggattcattttaaaaatagctcctatattttgtaacatgtctcaaacactcatactgggttccacaatccactgttagaatacctatggttagggcttctgaactaaaataatggaaaattttaacaatttgtatagtgcctggatcattactagtgccataaccctgcttcttcaacatttcacagaacttctcttttatataaaggcaagagcacaaaatgagttcagatgatcacaaacaggtgagttttgttggagaagaaagttggagtaggagactttcacaagtggtttccatggagatagaatgaagcattctgtggtcaagtaagtttagggagctattcatgtttcacttgctttgtggagattcacactatgcactgggaaagtatctgaaaagtcttataataaagaaacaggcttaactttgtgtaagaacactgtttatcaatgtcatttggctatagaaacattttctcctgctgattgtgtgtgtgaaacatgtattaacattccaatgaactagcatttaataaagcacaattttggaaaccctggt

SEQ ID NO: 6684 - protein, 756 aa, Homo sapiens; identical to SEQ ID NO: 959

SEQ ID NO: 6685 - DNA, 4153 bp, Homo sapiens
gtgacgtcagagcaggaagtgtttgaggaagtcgcgccgcgctgcccgcgttaagattcccgcattttaatgttttcaggggggtgtcatagccccgggtttggccgccccagccccgccttccccgccccggggagcccgccccctgccccgcgtccctgccgacagagttagcacgacatcagtatgagctggtcaccttccctgacaacgcagacatgtggggcctgggaaatgaaagagcgccttgggacagggggatttggaaatgtcatccgatggcacaatcaggaaacaggtgagcagattgccatcaagcagtgccggcaggagctcagcccccggaaccgagagcggtggtgcctggagatccagatcatgagaaggctgacccaccccaatgtggtggctgcccgagatgtccctgaggggatgcagaacttggcgcccaatgacctgcccctgctggccatggagtactgccaaggaggagatctccggaagtacctgaaccagtttgagaactgctgtggtctgcgggaaggtgccatcctcaccttgctgagtgacattgcctctgcgcttagataccttcatgaaaacagaatcatccatcgggatctaaagccagaaaacatcgtcctgcagcaaggagaacagaggttaatacacaaaattattgacctaggatatgccaaggagctggatcagggcagtctttgcacatcattcgtggggaccctgcagtacctggccccagagctactggagcagcagaagtacacagtgaccgtcgactactggagcttcggcaccctggcctttgagtgcatcacgggcttccggcccttcctccccaactggcagcccgtgcagtggcattcaaaagtgcggcagaagagtgaggtggacattgttgttagcgaagacttgaatggaacggtgaagttttcaagctctttaccctaccccaataatcttaacagtgtcctggctgagcgactggagaagtggctgcaactgatgctgatgtggcacccccgacagaggggcacggatcccacgtatgggcccaatggctgcttcaaggccctggatgacatcttaaacttaaagctggttcatatcttgaacatggtcacgggcaccatccacacctaccctgtgacagaggatgagagtctgcagagcttgaaggccagaatccaacaggacacgggcatcccagaggaggaccaggagctgctgcaggaagcgggcctggcgttgatccccgataagcctgccactcagtgtatttcagacggcaagttaaatgagggccacacattggacatggatcttgtttttctctttgacaacagtaaaatcacctatgagactcagatctccccacggccccaacctgaaagtgtcagctgtatccttcaagagcccaagaggaatctcgccttcttccagctgaggaaggtgtggggccaggtctggcacagcatccagaccctgaaggaagattgcaaccggctgcagcagggacagcgagccgccatgatgaatctcctccgaaacaacagctgcctctccaaaatgaagaattccatggcttccatgtctcagcagctcaaggccaagttggatttcttcaaaaccagcatccagattgacctggagaagtacagcgagcaaaccgagtttgggatcacatcagataaactgctgctggcctggagggaaatggagcaggctgtggagctctgtgggcgggagaacgaagtgaaactcctggtagaacggatgatggctctgcagaccgacattgtggacttacagaggagccccatgggccggaagcaggggggaacgctggacgacctagaggagcaagcaagggagctgtacaggagactaagggaaaaacctcgagaccagcgaactgagggtgacagtcaggaaatggtacggctgctgcttcaggcaattcagagcttcgagaagaaagtgcgagtgatctatacgcagctcagtaaaactgtggtttgcaagcagaaggcgctggaactgttgcccaaggtggaagaggtggtgagcttaatgaatgaggatgagaagactgttgtccggctgcaggagaagcggcagaaggagctctggaatctcctgaagattgcttgtagcaaggtccgtggtcctgtcagtggaagcccggatagcatgaatgcctctcgacttagccagcctgggcagctgatgtctcagccctccacggcctccaacagcttacctgagccagccaagaagagtgaagaactggtggctgaagcacataacctctgcaccctgctagaaaatgccatacaggacactgtgagggaacaagaccagagtttcacggccctagactggagctggttacagacggaagaagaagagcacagctgcctggagcaggcctcatgatgtggggggactcgaccccctgacatggggcagcccatagcaggccttgtgcagtggggggactcgaccccctgacatggggctgcctggagcaggccgcgtgacgtggggctgcctggccgcggctctcacatggtggttcctgctgcactgatggcccaggggtctctggtatccagatggagctctcgcttcctcagcagctgtgactttcacccaggacccaggacgcagccctccgtgggcactgccggcgccttgtctgcacactggaggtcctccattacagaggcccagcgcacatcgctggccccacaaacgttcaggggtacagccatggcagctccttcctctgccgtgagaaaagtgcttggagtacggtttgccacacacgtgactggacagtgtccaattcaaatctttcagggcagagtccgagcagcgcttggtgacagcctgtcctctcctgctctccaaaggccctgctccctgtcctctctcactttacagcttgtgtttcttctggattcagcttctcctaaacagacagtttaattatagttgcggcctggccccatcctcacttcctctttttatttcactgctgctaaaattgtgtttttacctactactttggtggttgtcctcttttcggcaaagttggagcgagtgccaagctctccatctgtggtcctttctgccaagagcgactcatagtaaccaggatgggagagcagctgccttattctgaatcccaaaaattacttgggggtgattgtcacagaggagggacagaaagggtatctgctgaccaccagcctgcctacccatgcccatgtctccattcctgctcaagcgtgtgtgctgggccggggagtccctgtctctcacagcatctagcagtattattaaatggattcattttaaaaatagctcctatattttgtaacatgtctcaaacactcatactgggttccacaatccactgttagaatacctatggttagggcttctgaactaaaataatggaaaattttaacaatttgtatagtgcctggatcattactagtgccataaccctgcttcttcaacatttcacagaacttctcttttatataaaggcaagagcacaaaatgagttcagatgatcacaaacaggtgagttttgttggagaagaaagttggagtaggagactttcacaagtggtttccatggagatagaatgaagcattctgtggtcaagtaagtttagggagctattcatgtttcacttgctttgtggagattcacactatgcactgggaaagtatctgaaaagtcttataataaagaaacaggcttaactttgtgtaagaacactgtttatcaatgtcatttggctatagaaacattttctcctgctgattgtgtgtgtgaaacatgtattaacattccaatgaactagcatttaataaagcacaattttggaaaccctggtaaatgacagtgggaaataacacccgaaaggcaaggacgggcagattggggagggaaaggatgttgggctaagggctgtgagcttatgttacaggcaactgagccactgaagaattttgacgaagaaaatgccaaccaaagcagtcattttaaaagtttatggctgttcagttacaggacaagttgtgaaaagaaagaaaaaaaatggaaaaaaaaaaa

SEQ ID NO: 6686 - protein, 756 aa, Homo sapiens; identical to SEQ ID NO: 959

SEQ ID NO: 6687 - DNA, 2778 bp, Homo sapiens
agtgtttgaggaagtcgcgccgcgctgcccgcgttaagattcccgcattttaatgttttcaggggggtgtcatagccccgggtttggccgccccagccccgccttccccgccccggggagcccgccccctgccccgcgtccctgccgacagagttagcacgacatcagtatgagctggtcaccttccctgacaacgcagacatgtggggcctgggaaatgaaagagcgccttgggacagggggatttggaaatgtcatccgatggcacaatcaggcattcaaaagtgcggcagaagagtgaggtggacattgttgttagcgaagacttgaatggaacggtgaagttttcaagctctttaccctaccccaataatcttaacagtgtcctggctgagcgactggagaagtggctgcaactgatgctgatgtggcacccccgacagaggggcacggatcccacgtatgggcccaatggctgcttcaaggccctggatgacatcttaaacttaaagctggttcatatcttgaacatggtcacgggcaccatccacacctaccctgtgacagaggatgagagtctgcagagcttgaaggccagaatccaacaggacacgggcatcccagaggaggaccaggagctgctgcaggaagcgggcctggcgttgatccccgataagcctgccactcagtgtatttcagacggcaagttaaatgagggccacacattggacatggatcttgtttttctctttgacaacagtaaaatcacctatgagactcagatctccccacggccccaacctgaaagtgtcagctgtatccttcaagagcccaagaggaatctcgccttcttccagctgaggaaggtgtggggccaggtctggcacagcatccagaccctgaaggaagattgcaaccggctgcagcagggacagcgagccgccatgatgaatctcctccgaaacaacagctgcctctccaaaatgaagaattccatggcttccatgtctcagcagctcaaggccaagttggatttcttcaaaaccagcatccagattgacctggagaagtacagcgagcaaaccgagtttgggatcacatcagataaactgctgctggcctggagggaaatggagcaggctgtggagctctgtgggcgggagaacgaagtgaaactcctggtagaacggatgatggctctgcagaccgacattgtggacttacagaggagccccatgggccggaagcaggggggaacgctggacgacctagaggagcaagcaagggagctgtacaggagactaagggaaaaacctcgagaccagcgaactgagggtgacagtcaggaaatggtacggctgctgcttcaggcaattcagagcttcgagaagaaagtgcgagtgatctatacgcagctcagtaaaactgtggtttgcaagcagaaggcgctggaactgttgcccaaggtggaagaggtggtgagcttaatgaatgaggatgagaagactgttgtccggctgcaggagaagcggcagaaggagctctggaatctcctgaagattgcttgtagcaaggtccgtggtcctgtcagtggaagcccggatagcatgaatgcctctcgacttagccagcctgggcagctgatgtctcagccctccacggcctccaacagcttacctgagccagccaagaagagtgaagaactggtggctgaagcacataacctctgcaccctgctagaaaatgccatacaggacactgtgagggaacaagaccagagtttcacggccctagactggagctggttacagacggaagaagaagagcacagctgcctggagcaggcctcatgatgtggggggactcgaccccctgacatggggcagcccatagcaggccttgtgcagtggggggactcgaccccctgacatggggctgcctggagcaggccgcgtgacgtggggctgcctggccgcggctctcacatggtggttcctgctgcactgatggcccaggggtctctggtatccagatggagctctcgcttcctcagcagctgtgactttcacccaggacccaggacgcagccctccgtgggcactgccggcgccttgtctgcacactggaggtcctccattacagaggcccagcgcacatcgctggccccacaaacgttcaggggtacagccatggcagctccttcctctgccgtgagaaaagtgcttggagtacggtttgccacacacgtgactggacagtgtccaattcaaatctttcagggcagagtccgagcagcgcttggtgacagcctgtcctctcctgctctccaaaggccctgctccctgtcctctctcactttacagcttgtgtttcttctggattcagcttctcctaaacagacagtttaattatagttgcggcctggccccatcctcacttcctctttttatttcactgctgctaaaattgtgtttttacctactactttggtggttgtcctcttttcggcaaagttggagcgagtgccaagctctccatctgtggtcctttctgccaagagcgactcatagtaaccaggatgggagagcagctgccttattctgaatcccaaaaattacttgggggtgattgtcacagaggagggacagaaagggtatctgctgaccaccagcctgcctacccatgcccatgtctccattcctgctcaagcgtgtgtgctgggccggggagtccctgtctctcacagcatctagcagtattattaaatggattcatttt

SEQ ID NO: 6688 - protein, 533 aa, Homo sapiens
MSSDGTIRHSKVRQKSEVDIVVSEDLNGTVKFSSSLPYPNNLNSVLAERLEKWLQLMLMWHPRQRGTDPTYGPNGCFKALDDILNLKLVHILNMVTGTIHTYPVTEDESLQSLKARIQQDTGIPEEDQELLQEAGLALIPDKPATQCISDGKLNEGHTLDMDLVFLFDNSKITYETQISPRPQPESVSCILQEPKRNLAFFQLRKVWGQVWHSIQTLKEDCNRLQQGQRAAMMNLLRNNSCLSKMKNSMASMSQQLKAKLDFFKTSIQIDLEKYSEQTEFGITSDKLLLAWREMEQAVELCGRENEVKLLVERMMALQTDIVDLQRSPMGRKQGGTLDDLEEQARELYRRLREKPRDQRTEGDSQEMVRLLLQAIQSFEKKVRVIYTQLSKTVVCKQKALELLPKVEEVVSLMNEDEKTVVRLQEKRQKELWNLLKIACSKVRGPVSGSPDSMNASRLSQPGQLMSQPSTASNSLPEPAKKSEELVAEAHNLCTLLENAIQDTVREQDQSFTALDWSWLQTEEEEHSCLEQAS

SEQ ID NO: 6689 - DNA, 3208 bp, Homo sapiens
agtgtttgaggaagtcgcgccgcgctgcccgcgttaagattcccgcattttaatgttttcaggggggtgtcatagccccgggtttggccgccccagccccgccttccccgccccggggagcccgccccctgccccgcgtccctgccgacagagttagcacgacatcagtatgagctggtcaccttccctgacaacgcagacatgtggggcctgggaaatgaaagagcgccttgggacagggggatttggaaatgtcatccgatggcacaatcaggcattcaaaagtgcggcagaagagtgaggtggacattgttgttagcgaagacttgaatggaacggtgaagttttcaagctctttaccctaccccaataatcttaacagtgtcctggctgagcgactggagaagtggctgcaactgatgctgatgtggcacccccgacagaggggcacggatcccacgtatgggcccaatggctgcttcaaggccctggatgacatcttaaacttaaagctggttcatatcttgaacatggtcacgggcaccatccacacctaccctgtgacagaggatgagagtctgcagagcttgaaggccagaatccaacaggacacgggcatcccagaggaggaccaggagctgctgcaggaagcgggcctggcgttgatccccgataagcctgccactcagtgtatttcagacggcaagttaaatgagggccacacattggacatggatcttgtttttctctttgacaacagtaaaatcacctatgagactcagatctccccacggccccaacctgaaagtgtcagctgtatccttcaagagcccaagaggaatctcgccttcttccagctgaggaaggtgtggggccaggtctggcacagcatccagaccctgaaggaagattgcaaccggctgcagcagggacagcgagccgccatgatgaatctcctccgaaacaacagctgcctctccaaaatgaagaattccatggcttccatgtctcagcagctcaaggccaagttggatttcttcaaaaccagcatccagattgacctggagaagtacagcgagcaaaccgagtttgggatcacatcagataaactgctgctggcctggagggaaatggagcaggctgtggagctctgtgggcgggagaacgaagtgaaactcctggtagaacggatgatggctctgcagaccgacattgtggacttacagaggagccccatgggccggaagcaggggggaacgctggacgacctagaggagcaagcaagggagctgtacaggagactaagggaaaaacctcgagaccagcgaactgagggtgacagtcaggaaatggtacggctgctgcttcaggcaattcagagcttcgagaagaaagtgcgagtgatctatacgcagctcagtaaaactgtggtttgcaagcagaaggcgctggaactgttgcccaaggtggaagaggtggtgagcttaatgaatgaggatgagaagactgttgtccggctgcaggagaagcggcagaaggagctctggaatctcctgaagattgcttgtagcaaggtccgtggtcctgtcagtggaagcccggatagcatgaatgcctctcgacttagccagcctgggcagctgatgtctcagccctccacggcctccaacagcttacctgagccagccaagaagagtgaagaactggtggctgaagcacataacctctgcaccctgctagaaaatgccatacaggacactgtgagggaacaagaccagagtttcacggccctagactggagctggttacagacggaagaagaagagcacagctgcctggagcaggcctcatgatgtggggggactcgaccccctgacatggggcagcccatagcaggccttgtgcagtggggggactcgaccccctgacatggggctgcctggagcaggccgcgtgacgtggggctgcctggccgcggctctcacatggtggttcctgctgcactgatggcccaggggtctctggtatccagatggagctctcgcttcctcagcagctgtgactttcacccaggacccaggacgcagccctccgtgggcactgccggcgccttgtctgcacactggaggtcctccattacagaggcccagcgcacatcgctggccccacaaacgttcaggggtacagccatggcagctccttcctctgccgtgagaaaagtgcttggagtacggtttgccacacacgtgactggacagtgtccaattcaaatctttcagggcagagtccgagcagcgcttggtgacagcctgtcctctcctgctctccaaaggccctgctccctgtcctctctcactttacagcttgtgtttcttctggattcagcttctcctaaacagacagtttaattatagttgcggcctggccccatcctcacttcctctttttatttcactgctgctaaaattgtgtttttacctactactttggtggttgtcctcttttcggcaaagttggagcgagtgccaagctctccatctgtggtcctttctgccaagagcgactcatagtaaccaggatgggagagcagctgccttattctgaatcccaaaaattacttgggggtgattgtcacagaggagggacagaaagggtatctgctgaccaccagcctgcctacccatgcccatgtctccattcctgctcaagcgtgtgtgctgggccggggagtccctgtctctcacagcatctagcagtattattaaatggattcattttaaaaatagctcctatattttgtaacatgtctcaaacactcatactgggttccacaatccactgttagaatacctatggttagggcttctgaactaaaataatggaaaattttaacaatttgtatagtgcctggatcattactagtgccataaccctgcttcttcaacatttcacagaacttctcttttatataaaggcaagagcacaaaatgagttcagatgatcacaaacaggtgagttttgttggagaagaaagttggagtaggagactttcacaagtggtttccatggagatagaatgaagcattctgtggtcaagtaagtttagggagctattcatgtttcacttgctttgtggagattcacactatgcactgggaaagtatctgaaaagtcttataataaagaaacaggcttaactttgtgtaag

SEQ ID NO: 6690 - protein, 533 aa, Homo sapiens; identical to SEQ ID NO: 6688

SEQ ID NO: 6691 - DNA, 3331 bp, Homo sapiens
agtgtttgaggaagtcgcgccgcgctgcccgcgttaagattcccgcattttaatgttttcaggggggtgtcatagccccgggtttggccgccccagccccgccttccccgccccggggagcccgccccctgccccgcgtccctgccgacagagttagcacgacatcagtatgagctggtcaccttccctgacaacgcagacatgtggggcctgggaaatgaaagagcgccttgggacagggggatttggaaatgtcatccgatggcacaatcaggcattcaaaagtgcggcagaagagtgaggtggacattgttgttagcgaagacttgaatggaacggtgaagttttcaagctctttaccctaccccaataatcttaacagtgtcctggctgagcgactggagaagtggctgcaactgatgctgatgtggcacccccgacagaggggcacggatcccacgtatgggcccaatggctgcttcaaggccctggatgacatcttaaacttaaagctggttcatatcttgaacatggtcacgggcaccatccacacctaccctgtgacagaggatgagagtctgcagagcttgaaggccagaatccaacaggacacgggcatcccagaggaggaccaggagctgctgcaggaagcgggcctggcgttgatccccgataagcctgccactcagtgtatttcagacggcaagttaaatgagggccacacattggacatggatcttgtttttctctttgacaacagtaaaatcacctatgagactcagatctccccacggccccaacctgaaagtgtcagctgtatccttcaagagcccaagaggaatctcgccttcttccagctgaggaaggtgtggggccaggtctggcacagcatccagaccctgaaggaagattgcaaccggctgcagcagggacagcgagccgccatgatgaatctcctccgaaacaacagctgcctctccaaaatgaagaattccatggcttccatgtctcagcagctcaaggccaagttggatttcttcaaaaccagcatccagattgacctggagaagtacagcgagcaaaccgagtttgggatcacatcagataaactgctgctggcctggagggaaatggagcaggctgtggagctctgtgggcgggagaacgaagtgaaactcctggtagaacggatgatggctctgcagaccgacattgtggacttacagaggagccccatgggccggaagcaggggggaacgctggacgacctagaggagcaagcaagggagctgtacaggagactaagggaaaaacctcgagaccagcgaactgagggtgacagtcaggaaatggtacggctgctgcttcaggcaattcagagcttcgagaagaaagtgcgagtgatctatacgcagctcagtaaaactgtggtttgcaagcagaaggcgctggaactgttgcccaaggtggaagaggtggtgagcttaatgaatgaggatgagaagactgttgtccggctgcaggagaagcggcagaaggagctctggaatctcctgaagattgcttgtagcaaggtccgtggtcctgtcagtggaagcccggatagcatgaatgcctctcgacttagccagcctgggcagctgatgtctcagccctccacggcctccaacagcttacctgagccagccaagaagagtgaagaactggtggctgaagcacataacctctgcaccctgctagaaaatgccatacaggacactgtgagggaacaagaccagagtttcacggccctagactggagctggttacagacggaagaagaagagcacagctgcctggagcaggcctcatgatgtggggggactcgaccccctgacatggggcagcccatagcaggccttgtgcagtggggggactcgaccccctgacatggggctgcctggagcaggccgcgtgacgtggggctgcctggccgcggctctcacatggtggttcctgctgcactgatggcccaggggtctctggtatccagatggagctctcgcttcctcagcagctgtgactttcacccaggacccaggacgcagccctccgtgggcactgccggcgccttgtctgcacactggaggtcctccattacagaggcccagcgcacatcgctggccccacaaacgttcaggggtacagccatggcagctccttcctctgccgtgagaaaagtgcttggagtacggtttgccacacacgtgactggacagtgtccaattcaaatctttcagggcagagtccgagcagcgcttggtgacagcctgtcctctcctgctctccaaaggccctgctccctgtcctctctcactttacagcttgtgtttcttctggattcagcttctcctaaacagacagtttaattatagttgcggcctggccccatcctcacttcctctttttatttcactgctgctaaaattgtgtttttacctactactttggtggttgtcctcttttcggcaaagttggagcgagtgccaagctctccatctgtggtcctttctgccaagagcgactcatagtaaccaggatgggagagcagctgccttattctgaatcccaaaaattacttgggggtgattgtcacagaggagggacagaaagggtatctgctgaccaccagcctgcctacccatgcccatgtctccattcctgctcaagcgtgtgtgctgggccggggagtccctgtctctcacagcatctagcagtattattaaatggattcattttaaaaatagctcctatattttgtaacatgtctcaaacactcatactgggttccacaatccactgttagaatacctatggttagggcttctgaactaaaataatggaaaattttaacaatttgtatagtgcctggatcattactagtgccataaccctgcttcttcaacatttcacagaacttctcttttatataaaggcaagagcacaaaatgagttcagatgatcacaaacaggtgagttttgttggagaagaaagttggagtaggagactttcacaagtggtttccatggagatagaatgaagcattctgtggtcaagtaagtttagggagctattcatgtttcacttgctttgtggagattcacactatgcactgggaaagtatctgaaaagtcttataataaagaaacaggcttaactttgtgtaagaacactgtttatcaatgtcatttggctatagaaacattttctcctgctgattgtgtgtgtgaaacatgtattaacattccaatgaactagcatttaataaagcacaattttggaaaccctggt

SEQ ID NO: 6692 - protein, 533 aa, Homo sapiens; identical to SEQ ID NO: 6688

SEQ ID NO: 6693 - DNA, 3549 bp, Homo sapiens
agtgtttgaggaagtcgcgccgcgctgcccgcgttaagattcccgcattttaatgttttcaggggggtgtcatagccccgggtttggccgccccagccccgccttccccgccccggggagcccgccccctgccccgcgtccctgccgacagagttagcacgacatcagtatgagctggtcaccttccctgacaacgcagacatgtggggcctgggaaatgaaagagcgccttgggacagggggatttggaaatgtcatccgatggcacaatcaggcattcaaaagtgcggcagaagagtgaggtggacattgttgttagcgaagacttgaatggaacggtgaagttttcaagctctttaccctaccccaataatcttaacagtgtcctggctgagcgactggagaagtggctgcaactgatgctgatgtggcacccccgacagaggggcacggatcccacgtatgggcccaatggctgcttcaaggccctggatgacatcttaaacttaaagctggttcatatcttgaacatggtcacgggcaccatccacacctaccctgtgacagaggatgagagtctgcagagcttgaaggccagaatccaacaggacacgggcatcccagaggaggaccaggagctgctgcaggaagcgggcctggcgttgatccccgataagcctgccactcagtgtatttcagacggcaagttaaatgagggccacacattggacatggatcttgtttttctctttgacaacagtaaaatcacctatgagactcagatctccccacggccccaacctgaaagtgtcagctgtatccttcaagagcccaagaggaatctcgccttcttccagctgaggaaggtgtggggccaggtctggcacagcatccagaccctgaaggaagattgcaaccggctgcagcagggacagcgagccgccatgatgaatctcctccgaaacaacagctgcctctccaaaatgaagaattccatggcttccatgtctcagcagctcaaggccaagttggatttcttcaaaaccagcatccagattgacctggagaagtacagcgagcaaaccgagtttgggatcacatcagataaactgctgctggcctggagggaaatggagcaggctgtggagctctgtgggcgggagaacgaagtgaaactcctggtagaacggatgatggctctgcagaccgacattgtggacttacagaggagccccatgggccggaagcaggggggaacgctggacgacctagaggagcaagcaagggagctgtacaggagactaagggaaaaacctcgagaccagcgaactgagggtgacagtcaggaaatggtacggctgctgcttcaggcaattcagagcttcgagaagaaagtgcgagtgatctatacgcagctcagtaaaactgtggtttgcaagcagaaggcgctggaactgttgcccaaggtggaagaggtggtgagcttaatgaatgaggatgagaagactgttgtccggctgcaggagaagcggcagaaggagctctggaatctcctgaagattgcttgtagcaaggtccgtggtcctgtcagtggaagcccggatagcatgaatgcctctcgacttagccagcctgggcagctgatgtctcagccctccacggcctccaacagcttacctgagccagccaagaagagtgaagaactggtggctgaagcacataacctctgcaccctgctagaaaatgccatacaggacactgtgagggaacaagaccagagtttcacggccctagactggagctggttacagacggaagaagaagagcacagctgcctggagcaggcctcatgatgtggggggactcgaccccctgacatggggcagcccatagcaggccttgtgcagtggggggactcgaccccctgacatggggctgcctggagcaggccgcgtgacgtggggctgcctggccgcggctctcacatggtggttcctgctgcactgatggcccaggggtctctggtatccagatggagctctcgcttcctcagcagctgtgactttcacccaggacccaggacgcagccctccgtgggcactgccggcgccttgtctgcacactggaggtcctccattacagaggcccagcgcacatcgctggccccacaaacgttcaggggtacagccatggcagctccttcctctgccgtgagaaaagtgcttggagtacggtttgccacacacgtgactggacagtgtccaattcaaatctttcagggcagagtccgagcagcgcttggtgacagcctgtcctctcctgctctccaaaggccctgctccctgtcctctctcactttacagcttgtgtttcttctggattcagcttctcctaaacagacagtttaattatagttgcggcctggccccatcctcacttcctctttttatttcactgctgctaaaattgtgtttttacctactactttggtggttgtcctcttttcggcaaagttggagcgagtgccaagctctccatctgtggtcctttctgccaagagcgactcatagtaaccaggatgggagagcagctgccttattctgaatcccaaaaattacttgggggtgattgtcacagaggagggacagaaagggtatctgctgaccaccagcctgcctacccatgcccatgtctccattcctgctcaagcgtgtgtgctgggccggggagtccctgtctctcacagcatctagcagtattattaaatggattcattttaaaaatagctcctatattttgtaacatgtctcaaacactcatactgggttccacaatccactgttagaatacctatggttagggcttctgaactaaaataatggaaaattttaacaatttgtatagtgcctggatcattactagtgccataaccctgcttcttcaacatttcacagaacttctcttttatataaaggcaagagcacaaaatgagttcagatgatcacaaacaggtgagttttgttggagaagaaagttggagtaggagactttcacaagtggtttccatggagatagaatgaagcattctgtggtcaagtaagtttagggagctattcatgtttcacttgctttgtggagattcacactatgcactgggaaagtatctgaaaagtcttataataaagaaacaggcttaactttgtgtaagaacactgtttatcaatgtcatttggctatagaaacattttctcctgctgattgtgtgtgtgaaacatgtattaacattccaatgaactagcatttaataaagcacaattttggaaaccctggtaaatgacagtgggaaataacacccgaaaggcaaggacgggcagattggggagggaaaggatgttgggctaagggctgtgagcttatgttacaggcaactgagccactgaagaattttgacgaagaaaatgccaaccaaagcagtcattttaaaagtttatggctgttcagttacaggacaagttgtgaaaagaaagaaaaaaaatggaaaaaaaaaaa

SEQ ID NO: 6694 - protein, 533 aa, Homo sapiens; identical to SEQ ID NO: 6688

SEQ ID NO: 6695 - DNA, 708 bp, Homo sapiens
gtttgaggaagtcgcgccgcgctgcccgcgttaagattcccgcattttaatgttttcaggggggtgtcatagccccgggtttggccgccccagccccgccttccccgccccggggagcccgccccctgccccgcgtccctgccgacagagttagcacgacatcagtatgagctggtcaccttccctgacaacgcagacatgtggggcctgggaaatgaaagagcgccttgggacagggggatttggaaatgtcatccgatggcacaatcaggtaggccctctgtgcagcttggggaggggcggggagccaggccccctcctcactgcctccactttctctgatcctgctgggccaagggctcacctttggctttggtcatcttgggacagtgaatagggggactgggaagagggcttcaggacttctgagctgactccaggttagtggtctccatgctttattgactatgtcacctaaataaatagtaaaataaagttaagctcttagtctctattatatatatatggtaacagtagaatatcatgtactaatatatactgatattatatgttataaaacatatagaaataggaaaatttaaaggatgagactaaataaataatttaaaatattttaattccttgaggccagtagttcaagagcagcctgggcaacatagcaagacctcgtctctacaaaaaaggttt

SEQ ID NO: 6696 - protein, 34 aa, Homo sapiens
MFSGGCHSPGFGRPSPAFPAPGSPPPAPRPCRQS

SEQ ID NO: 6697 - DNA, 3913 bp, Homo sapiens
gtttgaggaagtcgcgccgcgctgcccgcgttaagattcccgcattttaatgttttcaggggggtgtcatagccccgggtttggccgccccagccccgccttccccgccccggggagcccgccccctgccccgcgtccctgccgacaggtgagtccccctcgtgggtgcggcccgggtgccacctgcaggccccgccgccccgctgcctgcaaggcccggaagacccctctgtgccgctgggaagtcgcagcttgcggactggggagcgtttcacttgtgcgggttggagttcgggaagccgggagaaacagctctccctggggtggcttcttgggggtgggtggctttgaggggaacctgcgatttatgggaacattgtaaagaaacacgtgacctcggcgatgctcagaagtaggttctgcccctgccacctcgggcagaaggcgggcaggcccgggcgcccctggtggagtcagctggggatcccctcgctagggcaagggcgtgggcatcgcctccctcggtgactttcttccttgcctgatgccacagcaaccggatgggggagggtgagagggacaaaagtttgccacaaagtttggaccaaccaaacacattggtttctttacaaaataaaaaaccagttgtatttttcttctctcccattcaagagcagtggtatctcttgccttctccatccctttgagctccatttttttcttaatcctaaccttttttccccatcccaaattgcttatagagttagcacgacatcagtatgagctggtcaccttccctgacaacgcagacatgtggggcctgggaaatgaaagagcgccttgggacagggggatttggaaatgtcatccgatggcacaatcaggaaacaggtgagcagattgccatcaagcagtgccggcaggagctcagcccccggaaccgagagcggtggtgcctggagatccagatcatgagaaggctgacccaccccaatgtggtggctgcccgagatgtccctgaggggatgcagaacttggcgcccaatgacctgcccctgctggccatggagtactgccaaggaggagatctccggaagtacctgaaccagtttgagaactgctgtggtctgcgggaaggtgccatcctcaccttgctgagtgacattgcctctgcgcttagataccttcatgaaaacagaatcatccatcgggatctaaagccagaaaacatcgtcctgcagcaaggagaacagaggttaatacacaaaattattgacctaggatatgccaaggagctggatcagggcagtctttgcacatcattcgtggggaccctgcagtacctggccccagagctactggagcagcagaagtacacagtgaccgtcgactactggagcttcggcaccctggcctttgagtgcatcacgggcttccggcccttcctccccaactggcagcccgtgcagtggcattcaaaagtgcggcagaagagtgaggtggacattgttgttagcgaagacttgaatggaacggtgaagttttcaagctctttaccctaccccaataatcttaacagtgtcctggctgagcgactggagaagtggctgcaactgatgctgatgtggcacccccgacagaggggcacggatcccacgtatgggcccaatggctgcttcaaggccctggatgacatcttaaacttaaagctggttcatatcttgaacatggtcacgggcaccatccacacctaccctgtgacagaggatgagagtctgcagagcttgaaggccagaatccaacaggacacgggcatcccagaggaggaccaggagctgctgcaggaagcgggcctggcgttgatccccgataagcctgccactcagtgtatttcagacggcaagttaaatgagggccacacattggacatggatcttgtttttctctttgacaacagtaaaatcacctatgagactcagatctccccacggccccaacctgaaagtgtcagctgtatccttcaagagcccaagaggaatctcgccttcttccagctgaggaaggtgtggggccaggtctggcacagcatccagaccctgaaggaagattgcaaccggctgcagcagggacagcgagccgccatgatgaatctcctccgaaacaacagctgcctctccaaaatgaagaattccatggcttccatgtctcagcagctcaaggccaagttggatttcttcaaaaccagcatccagattgacctggagaagtacagcgagcaaaccgagtttgggatcagagaacgaagtgaaactcctggtagaacggatgatggctctgcagaccgacattgtggacttacagaggagccccatgggccggaagcaggggggaacgctggacgacctagaggagcaagcaagggagctgtacaggagactaagggaaaaacctcgagaccagcgaactgagggtgacagtcaggaaatggtacggctgctgcttcaggcaattcagagcttcgagaagaaagtgcgagtgatctatacgcagctcagtaaaactgtggtttgcaagcagaaggcgctggaactgttgcccaaggtggaagaggtggtgagcttaatgaatgaggatgagaagactgttgtccggctgcaggagaagcggcagaaggagctctggaatctcctgaagattgcttgtagcaaggtccgtggtcctgtcagtggaagcccggatagcatgaatgcctctcgacttagccagcctgggcagctgatgtctcagccctccacggcctccaacagcttacctgagccagccaagaagagtgaagaactggtggctgaagcacataacctctgcaccctgctagaaaatgccatacaggacactgtgagggaacaagaccagagtttcacggccctagactggagctggttacagacggaagaagaagagcacagctgcctggagcaggcctcatgatgtggggggactcgaccccctgacatggggcagcccatagcaggccttgtgcagtggggggactcgaccccctgacatggggctgcctggagcaggccgcgtgacgtggggctgcctggccgcggctctcacatggtggttcctgctgcactgatggcccaggggtctctggtatccagatggagctctcgcttcctcagcagctgtgactttcacccaggacccaggacgcagccctccgtgggcactgccggcgccttgtctgcacactggaggtcctccattacagaggcccagcgcacatcgctggccccacaaacgttcaggggtacagccatggcagctccttcctctgccgtgagaaaagtgcttggagtacggtttgccacacacgtgactggacagtgtccaattcaaatctttcagggcagagtccgagcagcgcttggtgacagcctgtcctctcctgctctccaaaggccctgctccctgtcctctctcactttacagcttgtgtttcttctggattcagcttctcctaaacagacagtttaattatagttgcggcctggccccatcctcacttcctctttttatttcactgctgctaaaattgtgtttttacctactactttggtggttgtcctcttttcggcaaagttggagcgagtgccaagctctccatctgtggtcctttctgccaagagcgactcatagtaaccaggatgggagagcagctgccttattctgaatcccaaaaattacttgggggtgattgtcacagaggagggacagaaagggtatctgctgaccaccagcctgcctacccatgcccatgtctccattcctgctcaagcgtgtgtgctgggccggggagtccctgtctctcacagcatctagcagtattattaaatggattcatttt

SEQ ID NO: 6698 - protein, 562 aa, Homo sapiens
MSWSPSLTTQTCGAWEMKERLGTGGFGNVIRWHNQETGEQIAIKQCRQELSPRNRERWCLEIQIMRRLTHPNVVAARDVPEGMQNLAPNDLPLLAMEYCQGGDLRKYLNQFENCCGLREGAILTLLSDIASALRYLHENRIIHRDLKPENIVLQQGEQRLIHKIIDLGYAKELDQGSLCTSFVGTLQYLAPELLEQQKYTVTVDYWSFGTLAFECITGFRPFLPNWQPVQWHSKVRQKSEVDIVVSEDLNGTVKFSSSLPYPNNLNSVLAERLEKWLQLMLMWHPRQRGTDPTYGPNGCFKALDDILNLKLVHILNMVTGTIHTYPVTEDESLQSLKARIQQDTGIPEEDQELLQEAGLALIPDKPATQCISDGKLNEGHTLDMDLVFLFDNSKITYETQISPRPQPESVSCILQEPKRNLAFFQLRKVWGQVWHSIQTLKEDCNRLQQGQRAAMMNLLRNNSCLSKMKNSMASMSQQLKAKLDFFKTSIQIDLEKYSEQTEFGIRERSETPGRTDDGSADRHCGLTEEPHGPEAGGNAGRPRGASKGAVQETKGKTSRPAN

SEQ ID NO: 6699 - DNA, 5071 bp, Homo sapiens
gtttgaggaagtcgcgccgcgctgcccgcgttaagattcccgcattttaatgttttcaggggggtgtcatagccccgggtttggccgccccagccccgccttccccgccccggggagcccgccccctgccccgcgtccctgccgacagagttagcacgacatcagtatgagctggtcaccttccctgacaacgcagacatgtggggcctgggaaatgaaagagcgccttgggacagggggatttggaaatgtcatccgatggcacaatcaggctgacccaccccaatgtggtggctgcccgagatgtccctgaggggatgcagaacttggcgcccaatgacctgcccctgctggccatggagtactgccaaggaggagatctccggaagtacctgaaccagtttgagaactgctgtggtctgcgggaaggtgccatcctcaccttgctgagtgacattgcctctgcgcttagataccttcatgaaaacagaatcatccatcgggatctaaagccagaaaacatcgtcctgcagcaaggagaacagaggttaatacacaaaattattgacctaggatatgccaaggagctggatcagggcagtctttgcacatcattcgtggggaccctgcagtacctggccccagagctactggagcagcagaagtacacagtgaccgtcgactactggagcttcggcaccctggcctttgagtgcatcacgggcttccggcccttcctccccaactggcagcccgtgcagtggcattcaaaagtgcggcagaagagtgaggtggacattgttgttagcgaagacttgaatggaacggtgaagttttcaagctctttaccctaccccaataatcttaacagtgtcctggctgagcgactggagaagtggctgcaactgatgctgatgtggcacccccgacagaggggcacggatcccacgtatgggcccaatggctgcttcaaggccctggatgacatcttaaacttaaagctggttcatatcttgaacatggtcacgggcaccatccacacctaccctgtgacagaggatgagagtctgcagagcttgaaggccagaatccaacaggacacgggcatcccagaggaggaccaggagctgctgcaggaagcgggcctggcgttgatccccgataagcctgccactcagtgtatttcagacggcaagttaaatgagggccacacattggacatggatcttgtttttctctttgacaacagtaaaatcacctatgagactcagatctccccacggccccaacctgaaagtgtcagctgtatccttcaagagcccaagaggaatctcgccttcttccagctgaggaaggtgtggggccaggtctggcacagcatccagaccctgaaggaagattgcaaccggctgcagcagggacagcgagccgccatgatgaatctcctccgaaacaacagctgcctctccaaaatgaagaattccatggcttccatgtctcagcagctcaaggccaagttggatttcttcaaaaccagcatccagattgacctggagaagtacagcgagcaaaccgagtttgggatcagtgagtgtgcactttgcaatgagtttaaagacaccatttttttttctttttctctttctaaggtttcttttgtcctattataattgagttgcttatttctgtttcagttttgtggtgtttttattttgttttgttttgtttttccttctcaattttttttcagcatcagataaactgctgctggcctggagggaaatggagcaggctgtggagctctgtgggcgggtaggagactcattttgggtttcggaacttaccaagggggtgagattttgtgctcccacttttcactttctcatcaaacactgggtcgatctctgtcaaaaatcaggtgttcctcaccatgctttgagcttaactggaccagctgaaaagaggccaagagagtagccagtgaagggagcccctctgtggccagatgcaagagctgcatgaatggacagagatggtccaggtttaaataagaagcaagggttaggttcccttggggaaaagccaagaccatttcctgttaggaagggcattggattgatgatcaacactccctcttgtcgaaggtttttgactaattttgttgggatgctaaatccataggaaataaaaggtctaggcagaaagtctcagggcagcgtaaatcagatgtcaccaaaaaaagttaattatgaaggcaaaggaaatacatgtgacttaatgaacctcacacaaactgaaggttgaagtcaggctccggggctttttcctggacttatcctctgttttcccctgtgtacttgggcaaggatcttcacctgtgtcttagtatcgatttttatgaatcagtactgatggagtatatgtgtgtttaatggtgaatattaaccatagaagggctgagtgctcctccccatcttgggactcataatctgtgaaataaaacagtctgggcctccctgcccgggtagcatcaggatagacagatgaagagaagagaaagtaatgtgtcttgggcatcttctgtatgccaggcaccatgccagaggctttaagtacttcatcttacttgactcctcagatggccctgttagaagcctattttatgcaaaaggaaactgtagctgggggtaagtaacttgccaaggggtcacacagctagaaagcggtggaccctagatgcaggcgcagccattcagaccccacagtccacattcctttgagccagtccattgagggtcctcagggaatgtggcgggtcccctggtctcgctcccccgcagatcttgcatctcagcatgcgcctaccacatcagttgacattagcacagcttttccattaggagaacgaagtgaaactcctggtagaacggatgatggctctgcagaccgacattgtggacttacagaggagccccatgggccggaagcaggggggaacgctggacgacctagaggagcaagcaagggagctgtacaggagactaagggaaaaacctcgagaccagcgaactgagggtgacagtcaggaaatggtacggctgctgcttcaggcaattcagagcttcgagaagaaagtgcgagtgatctatacgcagctcagtaaaactgtggtttgcaagcagaaggcgctggaactgttgcccaaggtggaagaggtggtgagcttaatgaatgaggatgagaagactgttgtccggctgcaggagaagcggcagaaggagctctggaatctcctgaagattgcttgtagcaaggtccgtggtcctgtcagtggaagcccggatagcatgaatgcctctcgacttagccagcctgggcagctgatgtctcagccctccacggcctccaacagcttacctgagccagccaagaagagtgaagaactggtggctgaagcacataacctctgcaccctgctagaaaatgccatacaggacactgtgagggaacaagaccagagtttcacggccctagactggagctggttacagacggaagaagaagagcacagctgcctggagcaggcctcatgatgtggggggactcgaccccctgacatggggcagcccatagcaggccttgtgcagtggggggactcgaccccctgacatggggctgcctggagcaggccgcgtgacgtggggctgcctggccgcggctctcacatggtggttcctgctgcactgatggcccaggggtctctggtatccagatggagctctcgcttcctcagcagctgtgactttcacccaggacccaggacgcagccctccgtgggcactgccggcgccttgtctgcacactggaggtcctccattacagaggcccagcgcacatcgctggccccacaaacgttcaggggtacagccatggcagctccttcctctgccgtgagaaaagtgcttggagtacggtttgccacacacgtgactggacagtgtccaattcaaatctttcagggcagagtccgagcagcgcttggtgacagcctgtcctctcctgctctccaaaggccctgctccctgtcctctctcactttacagcttgtgtttcttctggattcagcttctcctaaacagacagtttaattatagttgcggcctggccccatcctcacttcctctttttatttcactgctgctaaaattgtgtttttacctactactttggtggttgtcctcttttcggcaaagttggagcgagtgccaagctctccatctgtggtcctttctgccaagagcgactcatagtaaccaggatgggagagcagctgccttattctgaatcccaaaaattacttgggggtgattgtcacagaggagggacagaaagggtatctgctgaccaccagcctgcctacccatgcccatgtctccattcctgctcaagcgtgtgtgctgggccggggagtccctgtctctcacagcatctagcagtattattaaatggattcattttaaaaatagctcctatattttgtaacatgtctcaaacactcatactgggttccacaatccactgttagaatacctatggttagggcttctgaactaaaataatggaaaattttaacaatttgtatagtgcctggatcattactagtgccataaccctgcttcttcaacatttcacagaacttctcttttatataaaggcaagagcacaaaatgagttcagatgatcacaaacaggtgagttttgttggagaagaaagttggagtaggagactttcacaagtggtttccatggagatagaatgaagcattctgtggtcaagtaagtttagggagctattcatgtttcacttgctttgtggagattcacactatgcactgggaaagtatctgaaaagtcttataataaagaaacaggcttaactttgtgtaagaacactgtttatcaatgtcatttggctatagaaacattttctcctgctgattgtgtgtgtgaaacatgtattaacattccaatgaactagcatttaataaagcacaattttggaaaccctggt

SEQ ID NO: 6700 - protein, 473 aa, Homo sapiens
MSSDGTIRLTHPNVVAARDVPEGMQNLAPNDLPLLAMEYCQGGDLRKYLNQFENCCGLREGAILTLLSDIASALRYLHENRIIHRDLKPENIVLQQGEQRLIHKIIDLGYAKELDQGSLCTSFVGTLQYLAPELLEQQKYTVTVDYWSFGTLAFECITGFRPFLPNWQPVQWHSKVRQKSEVDIVVSEDLNGTVKFSSSLPYPNNLNSVLAERLEKWLQLMLMWHPRQRGTDPTYGPNGCFKALDDILNLKLVHILNMVTGTIHTYPVTEDESLQSLKARIQQDTGIPEEDQELLQEAGLALIPDKPATQCISDGKLNEGHTLDMDLVFLFDNSKITYETQISPRPQPESVSCILQEPKRNLAFFQLRKVWGQVWHSIQTLKEDCNRLQQGQRAAMMNLLRNNSCLSKMKNSMASMSQQLKAKLDFFKTSIQIDLEKYSEQTEFGISECALCNEFKDTIFFSFSLSKVSFVLL

SEQ ID NO: 6701 - DNA, 5289 bp, Homo sapiens
gtttgaggaagtcgcgccgcgctgcccgcgttaagattcccgcattttaatgttttcaggggggtgtcatagccccgggtttggccgccccagccccgccttccccgccccggggagcccgccccctgccccgcgtccctgccgacagagttagcacgacatcagtatgagctggtcaccttccctgacaacgcagacatgtggggcctgggaaatgaaagagcgccttgggacagggggatttggaaatgtcatccgatggcacaatcaggctgacccaccccaatgtggtggctgcccgagatgtccctgaggggatgcagaacttggcgcccaatgacctgcccctgctggccatggagtactgccaaggaggagatctccggaagtacctgaaccagtttgagaactgctgtggtctgcgggaaggtgccatcctcaccttgctgagtgacattgcctctgcgcttagataccttcatgaaaacagaatcatccatcgggatctaaagccagaaaacatcgtcctgcagcaaggagaacagaggttaatacacaaaattattgacctaggatatgccaaggagctggatcagggcagtctttgcacatcattcgtggggaccctgcagtacctggccccagagctactggagcagcagaagtacacagtgaccgtcgactactggagcttcggcaccctggcctttgagtgcatcacgggcttccggcccttcctccccaactggcagcccgtgcagtggcattcaaaagtgcggcagaagagtgaggtggacattgttgttagcgaagacttgaatggaacggtgaagttttcaagctctttaccctaccccaataatcttaacagtgtcctggctgagcgactggagaagtggctgcaactgatgctgatgtggcacccccgacagaggggcacggatcccacgtatgggcccaatggctgcttcaaggccctggatgacatcttaaacttaaagctggttcatatcttgaacatggtcacgggcaccatccacacctaccctgtgacagaggatgagagtctgcagagcttgaaggccagaatccaacaggacacgggcatcccagaggaggaccaggagctgctgcaggaagcgggcctggcgttgatccccgataagcctgccactcagtgtatttcagacggcaagttaaatgagggccacacattggacatggatcttgtttttctctttgacaacagtaaaatcacctatgagactcagatctccccacggccccaacctgaaagtgtcagctgtatccttcaagagcccaagaggaatctcgccttcttccagctgaggaaggtgtggggccaggtctggcacagcatccagaccctgaaggaagattgcaaccggctgcagcagggacagcgagccgccatgatgaatctcctccgaaacaacagctgcctctccaaaatgaagaattccatggcttccatgtctcagcagctcaaggccaagttggatttcttcaaaaccagcatccagattgacctggagaagtacagcgagcaaaccgagtttgggatcagtgagtgtgcactttgcaatgagtttaaagacaccatttttttttctttttctctttctaaggtttcttttgtcctattataattgagttgcttatttctgtttcagttttgtggtgtttttattttgttttgttttgtttttccttctcaattttttttcagcatcagataaactgctgctggcctggagggaaatggagcaggctgtggagctctgtgggcgggtaggagactcattttgggtttcggaacttaccaagggggtgagattttgtgctcccacttttcactttctcatcaaacactgggtcgatctctgtcaaaaatcaggtgttcctcaccatgctttgagcttaactggaccagctgaaaagaggccaagagagtagccagtgaagggagcccctctgtggccagatgcaagagctgcatgaatggacagagatggtccaggtttaaataagaagcaagggttaggttcccttggggaaaagccaagaccatttcctgttaggaagggcattggattgatgatcaacactccctcttgtcgaaggtttttgactaattttgttgggatgctaaatccataggaaataaaaggtctaggcagaaagtctcagggcagcgtaaatcagatgtcaccaaaaaaagttaattatgaaggcaaaggaaatacatgtgacttaatgaacctcacacaaactgaaggttgaagtcaggctccggggctttttcctggacttatcctctgttttcccctgtgtacttgggcaaggatcttcacctgtgtcttagtatcgatttttatgaatcagtactgatggagtatatgtgtgtttaatggtgaatattaaccatagaagggctgagtgctcctccccatcttgggactcataatctgtgaaataaaacagtctgggcctccctgcccgggtagcatcaggatagacagatgaagagaagagaaagtaatgtgtcttgggcatcttctgtatgccaggcaccatgccagaggctttaagtacttcatcttacttgactcctcagatggccctgttagaagcctattttatgcaaaaggaaactgtagctgggggtaagtaacttgccaaggggtcacacagctagaaagcggtggaccctagatgcaggcgcagccattcagaccccacagtccacattcctttgagccagtccattgagggtcctcagggaatgtggcgggtcccctggtctcgctcccccgcagatcttgcatctcagcatgcgcctaccacatcagttgacattagcacagcttttccattaggagaacgaagtgaaactcctggtagaacggatgatggctctgcagaccgacattgtggacttacagaggagccccatgggccggaagcaggggggaacgctggacgacctagaggagcaagcaagggagctgtacaggagactaagggaaaaacctcgagaccagcgaactgagggtgacagtcaggaaatggtacggctgctgcttcaggcaattcagagcttcgagaagaaagtgcgagtgatctatacgcagctcagtaaaactgtggtttgcaagcagaaggcgctggaactgttgcccaaggtggaagaggtggtgagcttaatgaatgaggatgagaagactgttgtccggctgcaggagaagcggcagaaggagctctggaatctcctgaagattgcttgtagcaaggtccgtggtcctgtcagtggaagcccggatagcatgaatgcctctcgacttagccagcctgggcagctgatgtctcagccctccacggcctccaacagcttacctgagccagccaagaagagtgaagaactggtggctgaagcacataacctctgcaccctgctagaaaatgccatacaggacactgtgagggaacaagaccagagtttcacggccctagactggagctggttacagacggaagaagaagagcacagctgcctggagcaggcctcatgatgtggggggactcgaccccctgacatggggcagcccatagcaggccttgtgcagtggggggactcgaccccctgacatggggctgcctggagcaggccgcgtgacgtggggctgcctggccgcggctctcacatggtggttcctgctgcactgatggcccaggggtctctggtatccagatggagctctcgcttcctcagcagctgtgactttcacccaggacccaggacgcagccctccgtgggcactgccggcgccttgtctgcacactggaggtcctccattacagaggcccagcgcacatcgctggccccacaaacgttcaggggtacagccatggcagctccttcctctgccgtgagaaaagtgcttggagtacggtttgccacacacgtgactggacagtgtccaattcaaatctttcagggcagagtccgagcagcgcttggtgacagcctgtcctctcctgctctccaaaggccctgctccctgtcctctctcactttacagcttgtgtttcttctggattcagcttctcctaaacagacagtttaattatagttgcggcctggccccatcctcacttcctctttttatttcactgctgctaaaattgtgtttttacctactactttggtggttgtcctcttttcggcaaagttggagcgagtgccaagctctccatctgtggtcctttctgccaagagcgactcatagtaaccaggatgggagagcagctgccttattctgaatcccaaaaattacttgggggtgattgtcacagaggagggacagaaagggtatctgctgaccaccagcctgcctacccatgcccatgtctccattcctgctcaagcgtgtgtgctgggccggggagtccctgtctctcacagcatctagcagtattattaaatggattcattttaaaaatagctcctatattttgtaacatgtctcaaacactcatactgggttccacaatccactgttagaatacctatggttagggcttctgaactaaaataatggaaaattttaacaatttgtatagtgcctggatcattactagtgccataaccctgcttcttcaacatttcacagaacttctcttttatataaaggcaagagcacaaaatgagttcagatgatcacaaacaggtgagttttgttggagaagaaagttggagtaggagactttcacaagtggtttccatggagatagaatgaagcattctgtggtcaagtaagtttagggagctattcatgtttcacttgctttgtggagattcacactatgcactgggaaagtatctgaaaagtcttataataaagaaacaggcttaactttgtgtaagaacactgtttatcaatgtcatttggctatagaaacattttctcctgctgattgtgtgtgtgaaacatgtattaacattccaatgaactagcatttaataaagcacaattttggaaaccctggtaaatgacagtgggaaataacacccgaaaggcaaggacgggcagattggggagggaaaggatgttgggctaagggctgtgagcttatgttacaggcaactgagccactgaagaattttgacgaagaaaatgccaaccaaagcagtcattttaaaagtttatggctgttcagttacaggacaagttgtgaaaagaaagaaaaaaaatggaaaaaaaaaaa

SEQ ID NO: 6702 - protein, 473 aa, Homo sapiens; identical to SEQ ID NO: 6700

SEQ ID NO: 6703 - DNA, 726 bp, Homo sapiens
cgcagcttgcggactggggagcgtttcacttgtgcgggttggagttcgggaagccgggagaaacagctctccctggggtggcttcttgggggtgggtggctttgaggggaacctgcgatttatgggaacattgtaaagaaacacgtgacctcggcgatgctcagaaagttagcacgacatcagtatgagctggtcaccttccctgacaacgcagacatgtggggcctgggaaatgaaagagcgccttgggacagggggatttggaaatgtcatccgatggcacaatcaggtaggccctctgtgcagcttggggaggggcggggagccaggccccctcctcactgcctccactttctctgatcctgctgggccaagggctcacctttggctttggtcatcttgggacagtgaatagggggactgggaagagggcttcaggacttctgagctgactccaggttagtggtctccatgctttattgactatgtcacctaaataaatagtaaaataaagttaagctcttagtctctattatatatatatggtaacagtagaatatcatgtactaatatatactgatattatatgttataaaacatatagaaataggaaaatttaaaggatgagactaaataaataatttaaaatattttaattccttgaggccagtagttcaagagcagcctgggcaacatagcaagacctcgtctctacaaaaaaggttt

SEQ ID NO: 6704 - protein, 67 aa, Homo sapiens
MLRKLARHQYELVTFPDNADMWGLGNERAPWDRGIWKCHPMAQSGRPSVQLGEGRGARPPPHCLHFL

SEQ ID NO: 6705 - DNA, 1259 bp, Homo sapiens
attgcttatagagttagcacgacatcagtatgagctggtcaccttccctgacaacgcagacatgtggggcctgggaaatgaaagagcgccttgggacagggggatttggaaatgtcatccgatggcaccaggacgcagccctccgtgggcactgccggcgccttgtctgcacactggaggtcctccattacagaggcccagcgcacatcgctggccccacaaacgttcaggggtacagccatggcagctccttcctctgccgtgagaaaagtgcttggagtacggtttgccacacacgtgactggacagtgtccaattcaaatctttcagggcagagtccgagcagcgcttggtgacagcctgtcctctcctgctctccaaaggccctgctccctgtcctctctcactttacagcttgtgtttcttctggattcagcttctcctaaacagacagtttaattatagttgcggcctggccccatcctcacttcctctttttatttcactgctgctaaaattgtgtttttacctactactttggtggttgtcctcttttcggcaaagttggagcgagtgccaagctctccatctgtggtcctttctgccaagagcgactcatagtaaccaggatgggagagcagctgccttattctgaatcccaaaaattacttgggggtgattgtcacagaggagggacagaaagggtatctgctgaccaccagcctgcctacccatgcccatgtctccattcctgctcaagcgtgtgtgctgggccggggagtccctgtctctcacagcatctagcagtattattaaatggattcattttaaaaatagctcctatattttgtaacatgtctcaaacactcatactgggttccacaatccactgttagaatacctatggttagggcttctgaactaaaataatggaaaattttaacaatttgtatagtgcctggatcattactagtgccataaccctgcttcttcaacatttcacagaacttctcttttatataaaggcaagagcacaaaatgagttcagatgatcacaaacaggtgagttttgttggagaagaaagttggagtaggagactttcacaagtggtttccatggagatagaatgaagcattctgtggtcaagtaagtttagggagctattcatgtttcacttgctttgtggagattcacactatgcactgggaaagtatctgaaaagtcttataataaagaaacaggcttaactttgtgtaag

SEQ ID NO: 6706 - protein, 115 aa, Homo sapiens
MSSDGTRTQPSVGTAGALSAHWRSSITEAQRTSLAPQTFRGTAMAAPSSAVRKVLGVRFATHVTGQCPIQIFQGRVRAALGDSLSSPALQRPCSLSSLTLQLVFLLDSASPKQTV

SEQ ID NO: 6707 - DNA, 1382 bp, Homo sapiens
attgcttatagagttagcacgacatcagtatgagctggtcaccttccctgacaacgcagacatgtggggcctgggaaatgaaagagcgccttgggacagggggatttggaaatgtcatccgatggcaccaggacgcagccctccgtgggcactgccggcgccttgtctgcacactggaggtcctccattacagaggcccagcgcacatcgctggccccacaaacgttcaggggtacagccatggcagctccttcctctgccgtgagaaaagtgcttggagtacggtttgccacacacgtgactggacagtgtccaattcaaatctttcagggcagagtccgagcagcgcttggtgacagcctgtcctctcctgctctccaaaggccctgctccctgtcctctctcactttacagcttgtgtttcttctggattcagcttctcctaaacagacagtttaattatagttgcggcctggccccatcctcacttcctctttttatttcactgctgctaaaattgtgtttttacctactactttggtggttgtcctcttttcggcaaagttggagcgagtgccaagctctccatctgtggtcctttctgccaagagcgactcatagtaaccaggatgggagagcagctgccttattctgaatcccaaaaattacttgggggtgattgtcacagaggagggacagaaagggtatctgctgaccaccagcctgcctacccatgcccatgtctccattcctgctcaagcgtgtgtgctgggccggggagtccctgtctctcacagcatctagcagtattattaaatggattcattttaaaaatagctcctatattttgtaacatgtctcaaacactcatactgggttccacaatccactgttagaatacctatggttagggcttctgaactaaaataatggaaaattttaacaatttgtatagtgcctggatcattactagtgccataaccctgcttcttcaacatttcacagaacttctcttttatataaaggcaagagcacaaaatgagttcagatgatcacaaacaggtgagttttgttggagaagaaagttggagtaggagactttcacaagtggtttccatggagatagaatgaagcattctgtggtcaagtaagtttagggagctattcatgtttcacttgctttgtggagattcacactatgcactgggaaagtatctgaaaagtcttataataaagaaacaggcttaactttgtgtaagaacactgtttatcaatgtcatttggctatagaaacattttctcctgctgattgtgtgtgtgaaacatgtattaacattccaatgaactagcatttaataaagcacaattttggaaaccctggt

SEQ ID NO: 6708 - protein, 115 aa, Homo sapiens; identical to SEQ ID NO: 6706

SEQ ID NO: 6709 - DNA, 1600 bp, Homo sapiens
attgcttatagagttagcacgacatcagtatgagctggtcaccttccctgacaacgcagacatgtggggcctgggaaatgaaagagcgccttgggacagggggatttggaaatgtcatccgatggcaccaggacgcagccctccgtgggcactgccggcgccttgtctgcacactggaggtcctccattacagaggcccagcgcacatcgctggccccacaaacgttcaggggtacagccatggcagctccttcctctgccgtgagaaaagtgcttggagtacggtttgccacacacgtgactggacagtgtccaattcaaatctttcagggcagagtccgagcagcgcttggtgacagcctgtcctctcctgctctccaaaggccctgctccctgtcctctctcactttacagcttgtgtttcttctggattcagcttctcctaaacagacagtttaattatagttgcggcctggccccatcctcacttcctctttttatttcactgctgctaaaattgtgtttttacctactactttggtggttgtcctcttttcggcaaagttggagcgagtgccaagctctccatctgtggtcctttctgccaagagcgactcatagtaaccaggatgggagagcagctgccttattctgaatcccaaaaattacttgggggtgattgtcacagaggagggacagaaagggtatctgctgaccaccagcctgcctacccatgcccatgtctccattcctgctcaagcgtgtgtgctgggccggggagtccctgtctctcacagcatctagcagtattattaaatggattcattttaaaaatagctcctatattttgtaacatgtctcaaacactcatactgggttccacaatccactgttagaatacctatggttagggcttctgaactaaaataatggaaaattttaacaatttgtatagtgcctggatcattactagtgccataaccctgcttcttcaacatttcacagaacttctcttttatataaaggcaagagcacaaaatgagttcagatgatcacaaacaggtgagttttgttggagaagaaagttggagtaggagactttcacaagtggtttccatggagatagaatgaagcattctgtggtcaagtaagtttagggagctattcatgtttcacttgctttgtggagattcacactatgcactgggaaagtatctgaaaagtcttataataaagaaacaggcttaactttgtgtaagaacactgtttatcaatgtcatttggctatagaaacattttctcctgctgattgtgtgtgtgaaacatgtattaacattccaatgaactagcatttaataaagcacaattttggaaaccctggtaaatgacagtgggaaataacacccgaaaggcaaggacgggcagattggggagggaaaggatgttgggctaagggctgtgagcttatgttacaggcaactgagccactgaagaattttgacgaagaaaatgccaaccaaagcagtcattttaaaagtttatggctgttcagttacaggacaagttgtgaaaagaaagaaaaaaaatggaaaaaaaaaaa

SEQ ID NO: 6710 - protein, 115 aa, Homo sapiens; identical to SEQ ID NO: 6706

SEQ ID NO: 6711 - DNA, 422 bp, Homo sapiens
acaggcatgcgcaaccacacccagcctctcccacctcatttctatccatccagagtctacagagccttcaaggccctgctccattcccagctccgccatgaaacctctactgaccattcctgcgcagagaggtttccctgtccgaaccccggctgctgctgtattaggctgacccatgggacactgctgataattgaccacattgacctacaaaaatggcacctgcatgtggttcaacctaatagtgaacaccacattgagtgtcttcattgtttcatgtgagagttttgtcctttcagagagaacgcaagcataatatggcataatatagcagatgaaacactggctggttcaaattccaactgtgccatttactagctgtgtgaccttgggtaaaccacttggtctgactcagtttcttc

SEQ ID NO: 6712 - protein, 91 aa, Homo sapiens [sequence omitted]

SEQ ID NO: 6713 - DNA, 441 bp, Homo sapiens
ctgaagggaacttagtcatccctctaaacttgtgatagatagagattcatggacccacccttataaaactgctttcttctcggaagtcttgctgctcttatctgttccccagtttgtggtttgtcatctgaaaaaaatacatagggctgtggggctgtgattcggagctgtgattcatcaataagacccacaggattgtcagcgttcttcagttatgtgtttgtgccttcctcatgagccagggaaaggctgggtcactgtgtagttgtgaatagcttaatagtttgcaatgtggtgcttctcacagctcttctctgtaatgggaacatgaaaaattacctggtacagttttatgctttgtggtgtggcttttaatttttataaacatgtcttactgctattgccagggatttagatttttaataaacttccagattcaac

SEQ ID NO: 6714 - protein, 51 aa, Homo sapiens
RELSHPSKLVIDRDSWTHPYKTAFFSEVLLLLSVPQFVVCHLKKIHRAVGL

SEQ ID NO: 6715 - DNA, 2413 bp, Homo sapiens
gtctggcacagcatccagaccctgaaggaagattgcaaccggctgcagcagggacagcgagccgccatgtagcgtgccaggctttttttttaaacttaatttatttaaaattccttggtggctttggccacagggaggtggttgaggcagggacccagaagcaaccgttatgagcaacaaaaggaagacactggtttggatggacgggaagcggttgggtgggctggactgacggaggcccctttagacctggcgaggatgaatctcctccgaaacaacagctgcctctccaaaatgaagaattccatggcttccatgtctcagcagctcaaggccaagttggatttcttcaaaaccagcatccagattgacctggagaagtacagcgagcaaaccgagtttgggatcagtgttcctcaccatgctttgagcttaactggaccagctgaaaagaggccaagagagtagccagtgaagggagcccctctgtggccagatgcaagagctgcatgaatggacagagatggtccaggtttaaataagaagcaagggttaggttcccttggggaaaagccaagaccatttcctgttaggaagggcattggattgatgatcaacactccctcttgtcgaaggtttttgactaattttgttgggatgctaaatccataggaaataaaaggtctaggcagaaagtctcagggcagcgtaaatcagatgtcaccaaaaaaagttaattatgaaggcaaaggaaatacatgtgacttaatgaacctcacacaaactgaaggttgaagtcaggctccggggctttttcctggacttatcctctgttttcccctgtgtacttgggcaaggatcttcacctgtgtcttagtatcgatttttatgaatcagtactgatggagtatatgtgtgtttaatggtgaatattaaccatagaagggctgagtgctcctccccatcttgggactcataatctgtgaaataaaacagtctgggcctccctgcccgggtagcatcaggatagacagatgaagagaagagaaagtaatgtgtcttgggcatcttctgtatgccaggcaccatgccagaggctttaagtacttcatcttacttgactcctcagatggccctgttagaagcctattttatgcaaaaggaaactgtagctgggggtaagtaacttgccaaggggtcacacagctagaaagcggtggaccctagatgcaggcgcagccattcagaccccacagtccacattcctttgagccagtccattgagggtcctcagggaatgtggcgggtcccctggtctcgctcccccgcagatcttgcatctcagcatgcgcctaccacatcagttgacattagcacagcttttccattaggagaacgaagtgaaactcctggtagaacggatgatggctctgcagaccgacattgtggacttacagaggagccccatgggccggaagcaggggggaacgctggacgacctgtgagtactggctggggggcccctctgtgcccagcacacacagacagccctggagcttcggtgtgtgtgtcaagggcaccctcagtggctgtgcgggaccattctctagagcatgcttccctgtggggtcacttccagcaaatcatcactgagcttcagtttccaaatctgttcagtgacaagaaaaacagtcttaagtcacgaagttgtaaggatgaattcagataatgcatttgagacgcaggccataatctgtaaaggctgtaaaatgcaagcagcctctacccctgtagcagactcccctgatttgttccacccaccctgactcaggcatagctcagagcagaaagtaaaacagagaaggaagaacctgatgaggcttaggagtttggacctggaaactattcgtttgagtctttgtcaggtatttggcattggctccatgaggggcggaggggtctaggcagatcactcctacctgaaggagatcacatgtgctcctggcgtacagatggagggaaccaggcaggccgcttgagggctgtgtcaccgtgagctcagcagtgttccctgattctctcactaggattcttaggacaggagctccaaatgtcagaactttgattctgtattttctctaattaaccctttattctcctctagttcttttatttgtatttgtattatttttttaagagacagggtcttgccctgttgccaatgctggagtgcagtggcacaatcatagctcactgcagcctcgacctcccaggcttatgcagtcctcccatctcagcctcccaagtaaccgggactacaggcgcatgccaccatgctcagctaatttaaaaaaaaaatgtttttggctgggcacagtggatcacatctgtaatcccagcaccttgggatgcc

SEQ ID NO: 6716 - protein, 69 aa, Homo sapiens
MNLLRNNSCLSKMKNSMASMSQQLKAKLDFFKTSIQIDLEKYSEQTEFGISVPHHALSLTGPAEKRPRE

SEQ ID NO: 6717 - DNA, 2423 bp, Homo sapiens
ctctgtgggcgggtaggagactcattttgggtttcggaacttaccaagggggtgagattttgtgctcccacttttcactttctcatcaaacactgggtcgatctctgtcaaaaatcaggtgttcctcaccatgctttgagcttaactggaccagctgaaaagaggccaagagagtagccagtgaagggagcccctctgtggccagatgcaagagctgcatgaatggacagagatggtccaggtttaaataagaagcaagggttaggttcccttggggaaaagccaagaccatttcctgttaggaagggcattggattgatgatcaacactccctcttgtcgaaggtttttgactaattttgttgggatgctaaatccataggaaataaaaggtctaggcagaaagtctcagggcagcgtaaatcagatgtcaccaaaaaaagttaattatgaaggcaaaggaaatacatgtgacttaatgaacctcacacaaactgaaggttgaagtcaggctccggggctttttcctggacttatcctctgttttcccctgtgtacttgggcaaggatcttcacctgtgtcttagtatcgatttttatgaatcagtactgatggagtatatgtgtgtttaatggtgaatattaaccatagaagggctgagtgctcctccccatcttgggactcataatctgtgaaataaaacagtctgggcctccctgcccgggtagcatcaggatagacagatgaagagaagagaaagtaatgtgtcttgggcatcttctgtatgccaggcaccatgccagaggctttaagtacttcatcttacttgactcctcagatggccctgttagaagcctattttatgcaaaaggaaactgtagctgggggtaagtaacttgccaaggggtcacacagctagaaagcggtggaccctagatgcaggcgcagccattcagaccccacagtccacattcctttgagccagtccattgagggtcctcagggaatgtggcgggtcccctggtctcgctcccccgcagatcttgcatctcagcatgcgcctaccacatcagttgacattagcacagcttttccattaggagaacgaagtgaaactcctggtagaacggatgatggctctgcagaccgacattgtggacttacagaggagccccatgggccggaagcaggggggaacgctggacgacctagaggagcaagcaagggagctgtacaggagactaagggaaaaacctcgagaccagcgaactgagggtgacagtcaggaaatggtacggctgctgcttcaggcaattcagagcttcgagaagaaagtgcgagtgatctatacgcagctcagtaaaactgtggtttgcaagcagaaggcgctggaactgttgcccaaggtggaagaggtggtgagcttaatgaatgaggatgagaagactgttgtccggctgcaggagaagcggcagaaggagctctggaatctcctgaagattgcttgtagcaaggtccgtggtcctgtcagtggaagcccggatagcatgaatgcctctcgacttagccagcctgggcagctgatgtctcagccctccacggcctccaacagcttacctgagccagccaagaagagtgaagaactggtggctgaagcacataacctctgcaccctgctagaaaatgccatacaggacactgtgagggaacaagaccagagtttcacggccctagactggagctggttacagacggaagaagaagagcacagctgcctggagcaggcctcatgatgtggggggactcgaccccctgacatggggcagcccatagcaggccttgtgcagtggggggactcgaccccctgacatggggctgcctggagcaggccgcgtgacgtggggctgcctggccgcggctctcacatggtggttcctgctgcactgatggcccaggggtctctggtatccagatggagctctcgcttcctcagcagctgtgactttcacccaggacccaggacgcagccctccgtgggcactgccggcgccttgtctgcacactggaggtcctccattacagaggcccagcgcacatcgctggccccacaaacgttcaggggtacagccatggcagctccttcctctgccgtgagaaaagtgcttggagtacggtttgccacacacgtgactggacagtgtccaattcaaatctttcagggcagagtccgagcagcgcttggtgacagcctgtcctctcctgctctccaaaggccctgctccctgtcctctctcactttacagcttgtgtttcttctggattcagcttctcctaaacagacagtttaattatagttgcggcctggccccatcctcacttcctctttttatttcactgctgctaaaattgtgtttttacctact

SEQ ID NO: 6718 - protein, 220 aa, Homo sapiens
MMALQTDIVDLQRSPMGRKQGGTLDDLEEQARELYRRLREKPRDQRTEGDSQEMVRLLLQAIQSFEKKVRVIYTQLSKTVVCKQKALELLPKVEEVVSLMNEDEKTVVRLQEKRQKELWNLLKIACSKVRGPVSGSPDSMNASRLSQPGQLMSQPSTASNSLPEPAKKSEELVAEAHNLCTLLENAIQDTVREQDQSFTALDWSWLQTEEEEHSCLEQAS

SEQ ID NO: 6719 - DNA, 2718 bp, Homo sapiens
ctctgtgggcgggtaggagactcattttgggtttcggaacttaccaagggggtgagattttgtgctcccacttttcactttctcatcaaacactgggtcgatctctgtcaaaaatcaggtgttcctcaccatgctttgagcttaactggaccagctgaaaagaggccaagagagtagccagtgaagggagcccctctgtggccagatgcaagagctgcatgaatggacagagatggtccaggtttaaataagaagcaagggttaggttcccttggggaaaagccaagaccatttcctgttaggaagggcattggattgatgatcaacactccctcttgtcgaaggtttttgactaattttgttgggatgctaaatccataggaaataaaaggtctaggcagaaagtctcagggcagcgtaaatcagatgtcaccaaaaaaagttaattatgaaggcaaaggaaatacatgtgacttaatgaacctcacacaaactgaaggttgaagtcaggctccggggctttttcctggacttatcctctgttttcccctgtgtacttgggcaaggatcttcacctgtgtcttagtatcgatttttatgaatcagtactgatggagtatatgtgtgtttaatggtgaatattaaccatagaagggctgagtgctcctccccatcttgggactcataatctgtgaaataaaacagtctgggcctccctgcccgggtagcatcaggatagacagatgaagagaagagaaagtaatgtgtcttgggcatcttctgtatgccaggcaccatgccagaggctttaagtacttcatcttacttgactcctcagatggccctgttagaagcctattttatgcaaaaggaaactgtagctgggggtaagtaacttgccaaggggtcacacagctagaaagcggtggaccctagatgcaggcgcagccattcagaccccacagtccacattcctttgagccagtccattgagggtcctcagggaatgtggcgggtcccctggtctcgctcccccgcagatcttgcatctcagcatgcgcctaccacatcagttgacattagcacagcttttccattaggagaacgaagtgaaactcctggtagaacggatgatggctctgcagaccgacattgtggacttacagaggagccccatgggccggaagcaggggggaacgctggacgacctagaggagcaagcaagggagctgtacaggagactaagggaaaaacctcgagaccagcgaactgagggtgacagtcaggaaatggtacggctgctgcttcaggcaattcagagcttcgagaagaaagtgcgagtgatctatacgcagctcagtaaaactgtggtttgcaagcagaaggcgctggaactgttgcccaaggtggaagaggtggtgagcttaatgaatgaggatgagaagactgttgtccggctgcaggagaagcggcagaaggagctctggaatctcctgaagattgcttgtagcaaggtccgtggtcctgtcagtggaagcccggatagcatgaatgcctctcgacttagccagcctgggcagctgatgtctcagccctccacggcctccaacagcttacctgagccagccaagaagagtgaagaactggtggctgaagcacataacctctgcaccctgctagaaaatgccatacaggacactgtgagggaacaagaccagagtttcacggccctagactggagctggttacagacggaagaagaagagcacagctgcctggagcaggcctcatgatgtggggggactcgaccccctgacatggggcagcccatagcaggccttgtgcagtggggggactcgaccccctgacatggggctgcctggagcaggccgcgtgacgtggggctgcctggccgcggctctcacatggtggttcctgctgcactgatggcccaggggtctctggtatccagatggagctctcgcttcctcagcagctgtgactttcacccaggacccaggacgcagccctccgtgggcactgccggcgccttgtctgcacactggaggtcctccattacagaggcccagcgcacatcgctggccccacaaacgttcaggggtacagccatggcagctccttcctctgccgtgagaaaagtgcttggagtacggtttgccacacacgtgactggacagtgtccaattcaaatctttcagggcagagtccgagcagcgcttggtgacagcctgtcctctcctgctctccaaaggccctgctccctgtcctctctcactttacagcttgtgtttcttctggattcagcttctcctaaacagacagtttaattatagttgcggcctggccccatcctcacttcctctttttatttcactgctgctaaaattgtgtttttacctactactttggtggttgtcctcttttcggcaaagttggagcgagtgccaagctctccatctgtggtcctttctgccaagagcgactcatagtaaccaggatgggagagcagctgccttattctgaatcccaaaaattacttgggggtgattgtcacagaggagggacagaaagggtatctgctgaccaccagcctgcctacccatgcccatgtctccattcctgctcaagcgtgtgtgctgggccggggagtccctgtctctcacagcatctagcagtattattaaatggattcatttt

SEQ ID NO: 6720 - protein, 220 aa, Homo sapiens; identical to SEQ ID NO: 6718

SEQ ID NO: 6721 - DNA, 3148 bp, Homo sapiens
ctctgtgggcgggtaggagactcattttgggtttcggaacttaccaagggggtgagattttgtgctcccacttttcactttctcatcaaacactgggtcgatctctgtcaaaaatcaggtgttcctcaccatgctttgagcttaactggaccagctgaaaagaggccaagagagtagccagtgaagggagcccctctgtggccagatgcaagagctgcatgaatggacagagatggtccaggtttaaataagaagcaagggttaggttcccttggggaaaagccaagaccatttcctgttaggaagggcattggattgatgatcaacactccctcttgtcgaaggtttttgactaattttgttgggatgctaaatccataggaaataaaaggtctaggcagaaagtctcagggcagcgtaaatcagatgtcaccaaaaaaagttaattatgaaggcaaaggaaatacatgtgacttaatgaacctcacacaaactgaaggttgaagtcaggctccggggctttttcctggacttatcctctgttttcccctgtgtacttgggcaaggatcttcacctgtgtcttagtatcgatttttatgaatcagtactgatggagtatatgtgtgtttaatggtgaatattaaccatagaagggctgagtgctcctccccatcttgggactcataatctgtgaaataaaacagtctgggcctccctgcccgggtagcatcaggatagacagatgaagagaagagaaagtaatgtgtcttgggcatcttctgtatgccaggcaccatgccagaggctttaagtacttcatcttacttgactcctcagatggccctgttagaagcctattttatgcaaaaggaaactgtagctgggggtaagtaacttgccaaggggtcacacagctagaaagcggtggaccctagatgcaggcgcagccattcagaccccacagtccacattcctttgagccagtccattgagggtcctcagggaatgtggcgggtcccctggtctcgctcccccgcagatcttgcatctcagcatgcgcctaccacatcagttgacattagcacagcttttccattaggagaacgaagtgaaactcctggtagaacggatgatggctctgcagaccgacattgtggacttacagaggagccccatgggccggaagcaggggggaacgctggacgacctagaggagcaagcaagggagctgtacaggagactaagggaaaaacctcgagaccagcgaactgagggtgacagtcaggaaatggtacggctgctgcttcaggcaattcagagcttcgagaagaaagtgcgagtgatctatacgcagctcagtaaaactgtggtttgcaagcagaaggcgctggaactgttgcccaaggtggaagaggtggtgagcttaatgaatgaggatgagaagactgttgtccggctgcaggagaagcggcagaaggagctctggaatctcctgaagattgcttgtagcaaggtccgtggtcctgtcagtggaagcccggatagcatgaatgcctctcgacttagccagcctgggcagctgatgtctcagccctccacggcctccaacagcttacctgagccagccaagaagagtgaagaactggtggctgaagcacataacctctgcaccctgctagaaaatgccatacaggacactgtgagggaacaagaccagagtttcacggccctagactggagctggttacagacggaagaagaagagcacagctgcctggagcaggcctcatgatgtggggggactcgaccccctgacatggggcagcccatagcaggccttgtgcagtggggggactcgaccccctgacatggggctgcctggagcaggccgcgtgacgtggggctgcctggccgcggctctcacatggtggttcctgctgcactgatggcccaggggtctctggtatccagatggagctctcgcttcctcagcagctgtgactttcacccaggacccaggacgcagccctccgtgggcactgccggcgccttgtctgcacactggaggtcctccattacagaggcccagcgcacatcgctggccccacaaacgttcaggggtacagccatggcagctccttcctctgccgtgagaaaagtgcttggagtacggtttgccacacacgtgactggacagtgtccaattcaaatctttcagggcagagtccgagcagcgcttggtgacagcctgtcctctcctgctctccaaaggccctgctccctgtcctctctcactttacagcttgtgtttcttctggattcagcttctcctaaacagacagtttaattatagttgcggcctggccccatcctcacttcctctttttatttcactgctgctaaaattgtgtttttacctactactttggtggttgtcctcttttcggcaaagttggagcgagtgccaagctctccatctgtggtcctttctgccaagagcgactcatagtaaccaggatgggagagcagctgccttattctgaatcccaaaaattacttgggggtgattgtcacagaggagggacagaaagggtatctgctgaccaccagcctgcctacccatgcccatgtctccattcctgctcaagcgtgtgtgctgggccggggagtccctgtctctcacagcatctagcagtattattaaatggattcattttaaaaatagctcctatattttgtaacatgtctcaaacactcatactgggttccacaatccactgttagaatacctatggttagggcttctgaactaaaataatggaaaattttaacaatttgtatagtgcctggatcattactagtgccataaccctgcttcttcaacatttcacagaacttctcttttatataaaggcaagagcacaaaatgagttcagatgatcacaaacaggtgagttttgttggagaagaaagttggagtaggagactttcacaagtggtttccatggagatagaatgaagcattctgtggtcaagtaagtttagggagctattcatgtttcacttgctttgtggagattcacactatgcactgggaaagtatctgaaaagtcttataataaagaaacaggcttaactttgtgtaag

SEQ ID NO: 6722 - protein, 220 aa, Homo sapiens; identical to SEQ ID NO: 6718

SEQ ID NO: 6723 - DNA, 1442 bp, Homo sapiens
ttgggatgctaaatccataggaaataaaaggtctaggcagaaagtctcagggcagcgtaaatcagatgtcaccaaaaaaagttaattatgaaggcaaaggaaatacatgtgacttaatgaacctcacacaaactgaaggttgaagtcaggctccggggctttttcctggacttatcctctgttttcccctgtgtacttgggcaaggatcttcacctgtgtcttagtatcgatttttatgaatcagtactgatggagtatatgtgtgtttaatggtgaatattaaccatagaagggctgagtgctcctccccatcttgggactcataatctgtgaaataaaacagtctgggcctccctgcccgggtagcatcaggatagacagatgaagagaagagaaagtaatgtgtcttgggcatcttctgtatgccaggcaccatgccagaggctttaagtacttcatcttacttgactcctcagatggccctgttagaagcctattttatgcaaaaggaaactgtagctgggggtaagtaacttgccaaggggtcacacagctagaaagcggtggaccctagatgcaggcgcagccattcagaccccacagtccacattcctttgagccagtccattgagggtcctcagggaatgtggcgggtcccctggtctcgctcccccgcagatcttgcatctcagcatgcgcctaccacatcagttgacattagcacagcttttccattaggagaacgaagtgaaactcctggtagaacggatgatggctctgcagaccgacattgtggacttacagaggagccccatgggccggaagcaggggggaacgctggacgacctagaggagcaagcaagggagctgtacaggagactaagggaaaaacctcgagaccagcgaactgagggtgacagtcaggaaatggtacggctgctgcttcaggcaattcagagcttcgagaagaaagtgcgagtgatctatacgcagctcagtaaaactgtggtttgcaagcagaaggcgctggaactgttgcccaaggtggaagaggtggtgagcttaatgaatgaggatgagaagactgttgtccggctgcaggagaagcggcagaaggagctctggaatctcctgaagattgcttgtagcaaggtccgtggtcctgtcagtggaagcccggatagcatgaatgcctctcgacttagccagcctgggcagctgatgtctcagccctccacggcctccaacagcttacctgagccagccaagaagagtgaagaactggtggctgaagcacataacctctgcaccctgctagaaaatgccatacaggacactgtgagggaacaagaccagagtttcacggtaacagcttgtgtgagactcctgcgattccatgtcctttctttctatggcaaaatagaagagaaaatggaaatgc

SEQ ID NO: 6724 - protein, 223 aa, Homo sapiens
MMALQTDIVDLQRSPMGRKQGGTLDDLEEQARELYRRLREKPRDQRTEGDSQEMVRLLLQAIQSFEKKVRVIYTQLSKTVVCKQKALELLPKVEEVVSLMNEDEKTVVRLQEKRQKELWNLLKIACSKVRGPVSGSPDSMNASRLSQPGQLMSQPSTASNSLPEPAKKSEELVAEAHNLCTLLENAIQDTVREQDQSFTVTACVRLLRFHVLSFYGKIEEKME

SEQ ID NO: 6725 - DNA, 3027 bp, Homo sapiens
tatgaaggcaaaggaaatacatgtgacttaatgaacctcacacaaactgaaggttgaagtcaggctccggggctttttcctggacttatcctctgttttcccctgtgtacttgggcaaggatcttcacctgtgtcttagtatcgatttttatgaatcagtactgatggagtatatgtgtgtttaatggtgaatattaaccatagaagggctgagtgctcctccccatcttgggactcataatctgtgaaataaaacagtctgggcctccctgcccgggtagcatcaggatagacagatgaagagaagagaaagtaatgtgtcttgggcatcttctgtatgccaggcaccatgccagaggctttaagtacttcatcttacttgactcctcagatggccctgttagaagcctattttatgcaaaaggaaactgtagctgggggtaagtaacttgccaaggggtcacacagctagaaagcggtggaccctagatgcaggcgcagccattcagaccccacagtccacattcctttgagccagtccattgagggtcctcagggaatgtggcgggtcccctggtctcgctcccccgcagatcttgcatctcagcatgcgcctaccacatcagttgacattagcacagcttttccattaggagaacgaagtgaaactcctggtagaacggatgatggctctgcagaccgacattgtggacttacagaggagccccatgggccggaagcaggggggaacgctggacgacctgtgagtactggctggggggcccctctgtgcccagcacacacagacagccctggagcttcggtgtgtgtgtcaagggcaccctcagtggctgtgcgggaccattctctagagcatgcttccctgtggggtcacttccagcaaatcatcactgagcttcagtttccaaatctgttcagtgacaagaaaaacagtcttaagtcacgaagttgtaaggatgaattcagataatgcatttgagacgcaggccataatctgtaaaggctgtaaaatgcaagcagcctctacccctgtagcagactcccctgatttgttccacccaccctgactcaggcatagctcagagcagaaagtaaaacagagaaggaagaacctgatgaggcttaggagtttggacctggaaactattcgtttgagtctttgtcaggtatttggcattggctccatgaggggcggaggggtctaggcagatcactcctacctgaaggagatcacatgtgctcctggcgtacagatggagggaaccaggcaggccgcttgagggctgtgtcaccgtgagctcagcagtgttccctgattctctcactaggattcttaggacaggagctccaaatgtcagaactttgattctgtattttctctaattaaccctttattctcctctagttcttttatttgtatttgtattatttttttaagagacagggtcttgccctgttgccaatgctggagtgcagtggcacaatcatagctcactgcagcctcgacctcccaggcttatgcagtcctcccatctcagcctcccaagtaaccgggactacaggcgcatgccaccatgctcagctaatttaaaaaaaaaatgtttttggctgggcacagtggatcacatctgtaatcccagcaccttgggatgccaaggcaagaagattgcttgtgagcccagaagttcgagaccagcctgggcaacatggtgaaactctacctctaccaaaaaaatgtaaaaattagccatatttgacctcaagtctagacagaacttctttgtatattttagagaggagcaagcaagggagctgtacaggagactaagggaaaaacctcgagaccagcgaactgagggtgacagtcaggaaatggtacggctgctgcttcaggcaattcagagcttcgagaagaaagtgcgagtgatctatacgcagctcagtaaaactgtggtttgcaagcagaaggcgctggaactgttgcccaaggtggaagaggtggtgagcttaatgaatgaggatgagaagactgttgtccggctgcaggagaagcggcagaaggagctctggaatctcctgaagattgcttgtagcaaggtccgtggtcctgtcagtggaagcccggatagcatgaatgcctctcgacttagccagcctgggcagctgatgtctcagccctccacggcctccaacagcttacctgagccagccaagaagagtgaagaactggtggctgaagcacataacctctgcaccctgctagaaaatgccatacaggacactgtgagggaacaagaccagagtttcacggccctagactggagctggttacagacggaagaagaagagcacagctgcctggagcaggcctcatgatgtggggggactcgaccccctgacatggggcagcccatagcaggccttgtgcagtggggggactcgaccccctgacatggggctgcctggagcaggccgcgtgacgtggggctgcctggccgcggctctcacatggtggttcctgctgcactgatggcccaggggtctctggtatccagatggagctctcgcttcctcagcagctgtgactttcacccaggacccaggacgcagccctccgtgggcactgccggcgccttgtctgcacactggaggtcctccattacagaggcccagcgcacatcgctggccccacaaacgttcaggggtacagccatggcagctccttcctctgccgtgagaaaagtgcttggagtacggtttgccacacacgtgactggacagtgtccaattcaaatctttcagggcagagtccgagcagcgcttggtgacagcctgtcctctcctgctctccaaaggccctgctccctgtcctctctcactttacagcttgtgtttcttctggattcagcttctcctaaacagacagtttaattatagttgcggcctggccccatcctcacttcctctttttatttcactgctgctaaaattgtgtttttacctact

SEQ ID NO: 6726 - protein, 167 aa, Homo sapiens [sequence omitted]

SEQ ID NO: 6727 - DNA, 3322 bp, Homo sapiens
tatgaaggcaaaggaaatacatgtgacttaatgaacctcacacaaactgaaggttgaagtcaggctccggggctttttcctggacttatcctctgttttcccctgtgtacttgggcaaggatcttcacctgtgtcttagtatcgatttttatgaatcagtactgatggagtatatgtgtgtttaatggtgaatattaaccatagaagggctgagtgctcctccccatcttgggactcataatctgtgaaataaaacagtctgggcctccctgcccgggtagcatcaggatagacagatgaagagaagagaaagtaatgtgtcttgggcatcttctgtatgccaggcaccatgccagaggctttaagtacttcatcttacttgactcctcagatggccctgttagaagcctattttatgcaaaaggaaactgtagctgggggtaagtaacttgccaaggggtcacacagctagaaagcggtggaccctagatgcaggcgcagccattcagaccccacagtccacattcctttgagccagtccattgagggtcctcagggaatgtggcgggtcccctggtctcgctcccccgcagatcttgcatctcagcatgcgcctaccacatcagttgacattagcacagcttttccattaggagaacgaagtgaaactcctggtagaacggatgatggctctgcagaccgacattgtggacttacagaggagccccatgggccggaagcaggggggaacgctggacgacctgtgagtactggctggggggcccctctgtgcccagcacacacagacagccctggagcttcggtgtgtgtgtcaagggcaccctcagtggctgtgcgggaccattctctagagcatgcttccctgtggggtcacttccagcaaatcatcactgagcttcagtttccaaatctgttcagtgacaagaaaaacagtcttaagtcacgaagttgtaaggatgaattcagataatgcatttgagacgcaggccataatctgtaaaggctgtaaaatgcaagcagcctctacccctgtagcagactcccctgatttgttccacccaccctgactcaggcatagctcagagcagaaagtaaaacagagaaggaagaacctgatgaggcttaggagtttggacctggaaactattcgtttgagtctttgtcaggtatttggcattggctccatgaggggcggaggggtctaggcagatcactcctacctgaaggagatcacatgtgctcctggcgtacagatggagggaaccaggcaggccgcttgagggctgtgtcaccgtgagctcagcagtgttccctgattctctcactaggattcttaggacaggagctccaaatgtcagaactttgattctgtattttctctaattaaccctttattctcctctagttcttttatttgtatttgtattatttttttaagagacagggtcttgccctgttgccaatgctggagtgcagtggcacaatcatagctcactgcagcctcgacctcccaggcttatgcagtcctcccatctcagcctcccaagtaaccgggactacaggcgcatgccaccatgctcagctaatttaaaaaaaaaatgtttttggctgggcacagtggatcacatctgtaatcccagcaccttgggatgccaaggcaagaagattgcttgtgagcccagaagttcgagaccagcctgggcaacatggtgaaactctacctctaccaaaaaaatgtaaaaattagccatatttgacctcaagtctagacagaacttctttgtatattttagagaggagcaagcaagggagctgtacaggagactaagggaaaaacctcgagaccagcgaactgagggtgacagtcaggaaatggtacggctgctgcttcaggcaattcagagcttcgagaagaaagtgcgagtgatctatacgcagctcagtaaaactgtggtttgcaagcagaaggcgctggaactgttgcccaaggtggaagaggtggtgagcttaatgaatgaggatgagaagactgttgtccggctgcaggagaagcggcagaaggagctctggaatctcctgaagattgcttgtagcaaggtccgtggtcctgtcagtggaagcccggatagcatgaatgcctctcgacttagccagcctgggcagctgatgtctcagccctccacggcctccaacagcttacctgagccagccaagaagagtgaagaactggtggctgaagcacataacctctgcaccctgctagaaaatgccatacaggacactgtgagggaacaagaccagagtttcacggccctagactggagctggttacagacggaagaagaagagcacagctgcctggagcaggcctcatgatgtggggggactcgaccccctgacatggggcagcccatagcaggccttgtgcagtggggggactcgaccccctgacatggggctgcctggagcaggccgcgtgacgtggggctgcctggccgcggctctcacatggtggttcctgctgcactgatggcccaggggtctctggtatccagatggagctctcgcttcctcagcagctgtgactttcacccaggacccaggacgcagccctccgtgggcactgccggcgccttgtctgcacactggaggtcctccattacagaggcccagcgcacatcgctggccccacaaacgttcaggggtacagccatggcagctccttcctctgccgtgagaaaagtgcttggagtacggtttgccacacacgtgactggacagtgtccaattcaaatctttcagggcagagtccgagcagcgcttggtgacagcctgtcctctcctgctctccaaaggccctgctccctgtcctctctcactttacagcttgtgtttcttctggattcagcttctcctaaacagacagtttaattatagttgcggcctggccccatcctcacttcctctttttatttcactgctgctaaaattgtgtttttacctactactttggtggttgtcctcttttcggcaaagttggagcgagtgccaagctctccatctgtggtcctttctgccaagagcgactcatagtaaccaggatgggagagcagctgccttattctgaatcccaaaaattacttgggggtgattgtcacagaggagggacagaaagggtatctgctgaccaccagcctgcctacccatgcccatgtctccattcctgctcaagcgtgtgtgctgggccggggagtccctgtctctcacagcatctagcagtattattaaatggattcatttt

SEQ ID NO: 6728 - protein, 167 aa, Homo sapiens [sequence omitted]

SEQ ID NO: 6729 - DNA, 3752 bp, Homo sapiens
tatgaaggcaaaggaaatacatgtgacttaatgaacctcacacaaactgaaggttgaagtcaggctccggggctttttcctggacttatcctctgttttcccctgtgtacttgggcaaggatcttcacctgtgtcttagtatcgatttttatgaatcagtactgatggagtatatgtgtgtttaatggtgaatattaaccatagaagggctgagtgctcctccccatcttgggactcataatctgtgaaataaaacagtctgggcctccctgcccgggtagcatcaggatagacagatgaagagaagagaaagtaatgtgtcttgggcatcttctgtatgccaggcaccatgccagaggctttaagtacttcatcttacttgactcctcagatggccctgttagaagcctattttatgcaaaaggaaactgtagctgggggtaagtaacttgccaaggggtcacacagctagaaagcggtggaccctagatgcaggcgcagccattcagaccccacagtccacattcctttgagccagtccattgagggtcctcagggaatgtggcgggtcccctggtctcgctcccccgcagatcttgcatctcagcatgcgcctaccacatcagttgacattagcacagcttttccattaggagaacgaagtgaaactcctggtagaacggatgatggctctgcagaccgacattgtggacttacagaggagccccatgggccggaagcaggggggaacgctggacgacctgtgagtactggctggggggcccctctgtgcccagcacacacagacagccctggagcttcggtgtgtgtgtcaagggcaccctcagtggctgtgcgggaccattctctagagcatgcttccctgtggggtcacttccagcaaatcatcactgagcttcagtttccaaatctgttcagtgacaagaaaaacagtcttaagtcacgaagttgtaaggatgaattcagataatgcatttgagacgcaggccataatctgtaaaggctgtaaaatgcaagcagcctctacccctgtagcagactcccctgatttgttccacccaccctgactcaggcatagctcagagcagaaagtaaaacagagaaggaagaacctgatgaggcttaggagtttggacctggaaactattcgtttgagtctttgtcaggtatttggcattggctccatgaggggcggaggggtctaggcagatcactcctacctgaaggagatcacatgtgctcctggcgtacagatggagggaaccaggcaggccgcttgagggctgtgtcaccgtgagctcagcagtgttccctgattctctcactaggattcttaggacaggagctccaaatgtcagaactttgattctgtattttctctaattaaccctttattctcctctagttcttttatttgtatttgtattatttttttaagagacagggtcttgccctgttgccaatgctggagtgcagtggcacaatcatagctcactgcagcctcgacctcccaggcttatgcagtcctcccatctcagcctcccaagtaaccgggactacaggcgcatgccaccatgctcagctaatttaaaaaaaaaatgtttttggctgggcacagtggatcacatctgtaatcccagcaccttgggatgccaaggcaagaagattgcttgtgagcccagaagttcgagaccagcctgggcaacatggtgaaactctacctctaccaaaaaaatgtaaaaattagccatatttgacctcaagtctagacagaacttctttgtatattttagagaggagcaagcaagggagctgtacaggagactaagggaaaaacctcgagaccagcgaactgagggtgacagtcaggaaatggtacggctgctgcttcaggcaattcagagcttcgagaagaaagtgcgagtgatctatacgcagctcagtaaaactgtggtttgcaagcagaaggcgctggaactgttgcccaaggtggaagaggtggtgagcttaatgaatgaggatgagaagactgttgtccggctgcaggagaagcggcagaaggagctctggaatctcctgaagattgcttgtagcaaggtccgtggtcctgtcagtggaagcccggatagcatgaatgcctctcgacttagccagcctgggcagctgatgtctcagccctccacggcctccaacagcttacctgagccagccaagaagagtgaagaactggtggctgaagcacataacctctgcaccctgctagaaaatgccatacaggacactgtgagggaacaagaccagagtttcacggccctagactggagctggttacagacggaagaagaagagcacagctgcctggagcaggcctcatgatgtggggggactcgaccccctgacatggggcagcccatagcaggccttgtgcagtggggggactcgaccccctgacatggggctgcctggagcaggccgcgtgacgtggggctgcctggccgcggctctcacatggtggttcctgctgcactgatggcccaggggtctctggtatccagatggagctctcgcttcctcagcagctgtgactttcacccaggacccaggacgcagccctccgtgggcactgccggcgccttgtctgcacactggaggtcctccattacagaggcccagcgcacatcgctggccccacaaacgttcaggggtacagccatggcagctccttcctctgccgtgagaaaagtgcttggagtacggtttgccacacacgtgactggacagtgtccaattcaaatctttcagggcagagtccgagcagcgcttggtgacagcctgtcctctcctgctctccaaaggccctgctccctgtcctctctcactttacagcttgtgtttcttctggattcagcttctcctaaacagacagtttaattatagttgcggcctggccccatcctcacttcctctttttatttcactgctgctaaaattgtgtttttacctactactttggtggttgtcctcttttcggcaaagttggagcgagtgccaagctctccatctgtggtcctttctgccaagagcgactcatagtaaccaggatgggagagcagctgccttattctgaatcccaaaaattacttgggggtgattgtcacagaggagggacagaaagggtatctgctgaccaccagcctgcctacccatgcccatgtctccattcctgctcaagcgtgtgtgctgggccggggagtccctgtctctcacagcatctagcagtattattaaatggattcattttaaaaatagctcctatattttgtaacatgtctcaaacactcatactgggttccacaatccactgttagaatacctatggttagggcttctgaactaaaataatggaaaattttaacaatttgtatagtgcctggatcattactagtgccataaccctgcttcttcaacatttcacagaacttctcttttatataaaggcaagagcacaaaatgagttcagatgatcacaaacaggtgagttttgttggagaagaaagttggagtaggagactttcacaagtggtttccatggagatagaatgaagcattctgtggtcaagtaagtttagggagctattcatgtttcacttgctttgtggagattcacactatgcactgggaaagtatctgaaaagtcttataataaagaaacaggcttaactttgtgtaag

SEQ ID NO: 6730 - protein, 167 aa, Homo sapiens [sequence omitted]

SEQ ID NO: 6731 - DNA, 3875 bp, Homo sapiens
tatgaaggcaaaggaaatacatgtgacttaatgaacctcacacaaactgaaggttgaagtcaggctccggggctttttcctggacttatcctctgttttcccctgtgtacttgggcaaggatcttcacctgtgtcttagtatcgatttttatgaatcagtactgatggagtatatgtgtgtttaatggtgaatattaaccatagaagggctgagtgctcctccccatcttgggactcataatctgtgaaataaaacagtctgggcctccctgcccgggtagcatcaggatagacagatgaagagaagagaaagtaatgtgtcttgggcatcttctgtatgccaggcaccatgccagaggctttaagtacttcatcttacttgactcctcagatggccctgttagaagcctattttatgcaaaaggaaactgtagctgggggtaagtaacttgccaaggggtcacacagctagaaagcggtggaccctagatgcaggcgcagccattcagaccccacagtccacattcctttgagccagtccattgagggtcctcagggaatgtggcgggtcccctggtctcgctcccccgcagatcttgcatctcagcatgcgcctaccacatcagttgacattagcacagcttttccattaggagaacgaagtgaaactcctggtagaacggatgatggctctgcagaccgacattgtggacttacagaggagccccatgggccggaagcaggggggaacgctggacgacctgtgagtactggctggggggcccctctgtgcccagcacacacagacagccctggagcttcggtgtgtgtgtcaagggcaccctcagtggctgtgcgggaccattctctagagcatgcttccctgtggggtcacttccagcaaatcatcactgagcttcagtttccaaatctgttcagtgacaagaaaaacagtcttaagtcacgaagttgtaaggatgaattcagataatgcatttgagacgcaggccataatctgtaaaggctgtaaaatgcaagcagcctctacccctgtagcagactcccctgatttgttccacccaccctgactcaggcatagctcagagcagaaagtaaaacagagaaggaagaacctgatgaggcttaggagtttggacctggaaactattcgtttgagtctttgtcaggtatttggcattggctccatgaggggcggaggggtctaggcagatcactcctacctgaaggagatcacatgtgctcctggcgtacagatggagggaaccaggcaggccgcttgagggctgtgtcaccgtgagctcagcagtgttccctgattctctcactaggattcttaggacaggagctccaaatgtcagaactttgattctgtattttctctaattaaccctttattctcctctagttcttttatttgtatttgtattatttttttaagagacagggtcttgccctgttgccaatgctggagtgcagtggcacaatcatagctcactgcagcctcgacctcccaggcttatgcagtcctcccatctcagcctcccaagtaaccgggactacaggcgcatgccaccatgctcagctaatttaaaaaaaaaatgtttttggctgggcacagtggatcacatctgtaatcccagcaccttgggatgccaaggcaagaagattgcttgtgagcccagaagttcgagaccagcctgggcaacatggtgaaactctacctctaccaaaaaaatgtaaaaattagccatatttgacctcaagtctagacagaacttctttgtatattttagagaggagcaagcaagggagctgtacaggagactaagggaaaaacctcgagaccagcgaactgagggtgacagtcaggaaatggtacggctgctgcttcaggcaattcagagcttcgagaagaaagtgcgagtgatctatacgcagctcagtaaaactgtggtttgcaagcagaaggcgctggaactgttgcccaaggtggaagaggtggtgagcttaatgaatgaggatgagaagactgttgtccggctgcaggagaagcggcagaaggagctctggaatctcctgaagattgcttgtagcaaggtccgtggtcctgtcagtggaagcccggatagcatgaatgcctctcgacttagccagcctgggcagctgatgtctcagccctccacggcctccaacagcttacctgagccagccaagaagagtgaagaactggtggctgaagcacataacctctgcaccctgctagaaaatgccatacaggacactgtgagggaacaagaccagagtttcacggccctagactggagctggttacagacggaagaagaagagcacagctgcctggagcaggcctcatgatgtggggggactcgaccccctgacatggggcagcccatagcaggccttgtgcagtggggggactcgaccccctgacatggggctgcctggagcaggccgcgtgacgtggggctgcctggccgcggctctcacatggtggttcctgctgcactgatggcccaggggtctctggtatccagatggagctctcgcttcctcagcagctgtgactttcacccaggacccaggacgcagccctccgtgggcactgccggcgccttgtctgcacactggaggtcctccattacagaggcccagcgcacatcgctggccccacaaacgttcaggggtacagccatggcagctccttcctctgccgtgagaaaagtgcttggagtacggtttgccacacacgtgactggacagtgtccaattcaaatctttcagggcagagtccgagcagcgcttggtgacagcctgtcctctcctgctctccaaaggccctgctccctgtcctctctcactttacagcttgtgtttcttctggattcagcttctcctaaacagacagtttaattatagttgcggcctggccccatcctcacttcctctttttatttcactgctgctaaaattgtgtttttacctactactttggtggttgtcctcttttcggcaaagttggagcgagtgccaagctctccatctgtggtcctttctgccaagagcgactcatagtaaccaggatgggagagcagctgccttattctgaatcccaaaaattacttgggggtgattgtcacagaggagggacagaaagggtatctgctgaccaccagcctgcctacccatgcccatgtctccattcctgctcaagcgtgtgtgctgggccggggagtccctgtctctcacagcatctagcagtattattaaatggattcattttaaaaatagctcctatattttgtaacatgtctcaaacactcatactgggttccacaatccactgttagaatacctatggttagggcttctgaactaaaataatggaaaattttaacaatttgtatagtgcctggatcattactagtgccataaccctgcttcttcaacatttcacagaacttctcttttatataaaggcaagagcacaaaatgagttcagatgatcacaaacaggtgagttttgttggagaagaaagttggagtaggagactttcacaagtggtttccatggagatagaatgaagcattctgtggtcaagtaagtttagggagctattcatgtttcacttgctttgtggagattcacactatgcactgggaaagtatctgaaaagtcttataataaagaaacaggcttaactttgtgtaagaacactgtttatcaatgtcatttggctatagaaacattttctcctgctgattgtgtgtgtgaaacatgtattaacattccaatgaactagcatttaataaagcacaattttggaaaccctggt

SEQ ID NO: 6732 - protein, 167 aa, Homo sapiens [sequence omitted]

SEQ ID NO: 6733 - DNA, 4093 bp, Homo sapiens
tatgaaggcaaaggaaatacatgtgacttaatgaacctcacacaaactgaaggttgaagtcaggctccggggctttttcctggacttatcctctgttttcccctgtgtacttgggcaaggatcttcacctgtgtcttagtatcgatttttatgaatcagtactgatggagtatatgtgtgtttaatggtgaatattaaccatagaagggctgagtgctcctccccatcttgggactcataatctgtgaaataaaacagtctgggcctccctgcccgggtagcatcaggatagacagatgaagagaagagaaagtaatgtgtcttgggcatcttctgtatgccaggcaccatgccagaggctttaagtacttcatcttacttgactcctcagatggccctgttagaagcctattttatgcaaaaggaaactgtagctgggggtaagtaacttgccaaggggtcacacagctagaaagcggtggaccctagatgcaggcgcagccattcagaccccacagtccacattcctttgagccagtccattgagggtcctcagggaatgtggcgggtcccctggtctcgctcccccgcagatcttgcatctcagcatgcgcctaccacatcagttgacattagcacagcttttccattaggagaacgaagtgaaactcctggtagaacggatgatggctctgcagaccgacattgtggacttacagaggagccccatgggccggaagcaggggggaacgctggacgacctgtgagtactggctggggggcccctctgtgcccagcacacacagacagccctggagcttcggtgtgtgtgtcaagggcaccctcagtggctgtgcgggaccattctctagagcatgcttccctgtggggtcacttccagcaaatcatcactgagcttcagtttccaaatctgttcagtgacaagaaaaacagtcttaagtcacgaagttgtaaggatgaattcagataatgcatttgagacgcaggccataatctgtaaaggctgtaaaatgcaagcagcctctacccctgtagcagactcccctgatttgttccacccaccctgactcaggcatagctcagagcagaaagtaaaacagagaaggaagaacctgatgaggcttaggagtttggacctggaaactattcgtttgagtctttgtcaggtatttggcattggctccatgaggggcggaggggtctaggcagatcactcctacctgaaggagatcacatgtgctcctggcgtacagatggagggaaccaggcaggccgcttgagggctgtgtcaccgtgagctcagcagtgttccctgattctctcactaggattcttaggacaggagctccaaatgtcagaactttgattctgtattttctctaattaaccctttattctcctctagttcttttatttgtatttgtattatttttttaagagacagggtcttgccctgttgccaatgctggagtgcagtggcacaatcatagctcactgcagcctcgacctcccaggcttatgcagtcctcccatctcagcctcccaagtaaccgggactacaggcgcatgccaccatgctcagctaatttaaaaaaaaaatgtttttggctgggcacagtggatcacatctgtaatcccagcaccttgggatgccaaggcaagaagattgcttgtgagcccagaagttcgagaccagcctgggcaacatggtgaaactctacctctaccaaaaaaatgtaaaaattagccatatttgacctcaagtctagacagaacttctttgtatattttagagaggagcaagcaagggagctgtacaggagactaagggaaaaacctcgagaccagcgaactgagggtgacagtcaggaaatggtacggctgctgcttcaggcaattcagagcttcgagaagaaagtgcgagtgatctatacgcagctcagtaaaactgtggtttgcaagcagaaggcgctggaactgttgcccaaggtggaagaggtggtgagcttaatgaatgaggatgagaagactgttgtccggctgcaggagaagcggcagaaggagctctggaatctcctgaagattgcttgtagcaaggtccgtggtcctgtcagtggaagcccggatagcatgaatgcctctcgacttagccagcctgggcagctgatgtctcagccctccacggcctccaacagcttacctgagccagccaagaagagtgaagaactggtggctgaagcacataacctctgcaccctgctagaaaatgccatacaggacactgtgagggaacaagaccagagtttcacggccctagactggagctggttacagacggaagaagaagagcacagctgcctggagcaggcctcatgatgtggggggactcgaccccctgacatggggcagcccatagcaggccttgtgcagtggggggactcgaccccctgacatggggctgcctggagcaggccgcgtgacgtggggctgcctggccgcggctctcacatggtggttcctgctgcactgatggcccaggggtctctggtatccagatggagctctcgcttcctcagcagctgtgactttcacccaggacccaggacgcagccctccgtgggcactgccggcgccttgtctgcacactggaggtcctccattacagaggcccagcgcacatcgctggccccacaaacgttcaggggtacagccatggcagctccttcctctgccgtgagaaaagtgcttggagtacggtttgccacacacgtgactggacagtgtccaattcaaatctttcagggcagagtccgagcagcgcttggtgacagcctgtcctctcctgctctccaaaggccctgctccctgtcctctctcactttacagcttgtgtttcttctggattcagcttctcctaaacagacagtttaattatagttgcggcctggccccatcctcacttcctctttttatttcactgctgctaaaattgtgtttttacctactactttggtggttgtcctcttttcggcaaagttggagcgagtgccaagctctccatctgtggtcctttctgccaagagcgactcatagtaaccaggatgggagagcagctgccttattctgaatcccaaaaattacttgggggtgattgtcacagaggagggacagaaagggtatctgctgaccaccagcctgcctacccatgcccatgtctccattcctgctcaagcgtgtgtgctgggccggggagtccctgtctctcacagcatctagcagtattattaaatggattcattttaaaaatagctcctatattttgtaacatgtctcaaacactcatactgggttccacaatccactgttagaatacctatggttagggcttctgaactaaaataatggaaaattttaacaatttgtatagtgcctggatcattactagtgccataaccctgcttcttcaacatttcacagaacttctcttttatataaaggcaagagcacaaaatgagttcagatgatcacaaacaggtgagttttgttggagaagaaagttggagtaggagactttcacaagtggtttccatggagatagaatgaagcattctgtggtcaagtaagtttagggagctattcatgtttcacttgctttgtggagattcacactatgcactgggaaagtatctgaaaagtcttataataaagaaacaggcttaactttgtgtaagaacactgtttatcaatgtcatttggctatagaaacattttctcctgctgattgtgtgtgtgaaacatgtattaacattccaatgaactagcatttaataaagcacaattttggaaaccctggtaaatgacagtgggaaataacacccgaaaggcaaggacgggcagattggggagggaaaggatgttgggctaagggctgtgagcttatgttacaggcaactgagccactgaagaattttgacgaagaaaatgccaaccaaagcagtcattttaaaagtttatggctgttcagttacaggacaagttgtgaaaagaaagaaaaaaaatggaaaaaaaaaaa

SEQ ID NO: 6734 - protein, 167 aa, Homo sapiens [sequence omitted]

SEQ ID NO: 6735 - DNA, 1595 bp, Homo sapiens
gggatatgatcacatctgggatttggggaagtccctctccaggcagctggaggatctgagtccctggccaacctcagcactgagaagggccgctcagcaaggctggagttgagccgccgctgtgcagcacagaacagggtggggcaggagctggggcagggcctggctgggagggagccaggcagtgcaggagccatcccctgccatactttcggtccagggcagaagcacaggaggccaatgccgggcctctccccaggcatggtcagcagggaaggtgcagcaggaggaccaggaacgggaggcttgggtgcttaacatggcttcttgatgtgtgggccttgaggtttcgctggaggggaggatgtggagccaggatggttccacggcctgagggacacgtgaggggatgaaggactgcaggccgaagtgagtgtcaggtgtggggcctggggggctacatgggtgggttggggaccatgcagggcagagatcagcagaggggtgacctgaagattggccggcggtcgtgggctgtgagctgaggaggctcaggtagctggaatgggaacccctgcttgacccttcgggctgggaggggcagtggctgcagccccttgggagtcagggtgtccttgtttcttctcagccaggtcatagaggatgcaagccacaggaattcccatagcctttgtgtgtgtgtctgtcttctacctggaaaacagtaagaatactttcctgttcttttcttgtaaaagttcattaaggggctggatgcagtggatcatgaatcccagaactttgggaggctgaggcagatcacctgaggtcaggagttcgagaccagcctggccaatatggtgaaacaccgtctctactaaaaatacaaaaattagctgggtgtagtggcacacacctgtaatcccagctacttgggaagctgaggcaggagaatcgcttaaaccccggaggtggaggttgcagtgagccaagatcgcacatcgcacttcagcccaggcgacagagcaagactctcaatcataatcaatcagtaaagctgatgaaaataaaaaagcctgcaaattaatgtaggcacccaggtctccttaaatttagaatcctttcctcaaaagtctccgttgatacagaaacacttttgaagccagatgtgaagcaccagttgacccgcaggtgggggtgccaactggtaggctgtagggttagctctggcctctggcagccagccagttgtctcctaagaaaatactgtggcgtgaatgcaaaatgtgattcatcacttggctcctaatttcttttgattttgtcccctagagcaaggtccgtggtcctgtcagtggaagcccggatagcatgaatgcctctcgacttagccagcctgggcagctgatgtctcagccctccacggcctccaacagcttacctgagccagccaagaagagtgaagaactggtggctgaagcacataacctctgcaccctgctagaaaatgccatacaggacactgtgagggaacaagaccagagtttcacggtaacagcttgtgtgagactcctgcgattccatgtcctttcttt

SEQ ID NO: 6736 - protein, 73 aa, Homo sapiens
MNASRLSQPGQLMSQPSTASNSLPEPAKKSEELVAEAHNLCTLLENAIQDTVREQDQSFTVTACVRLLRFHVL

SEQ ID NO: 6737 - DNA, 1334 bp, Homo sapiens
aacaagcgccgtgcgccccgccccccatcgggggcaaccattgttccgccggtcgcgccggagctgggttgctcctgctcccgtctccaagtcctggtacctccttcaagctgggagagggctctagtccctggttctgaacactctggggttctcgggtgcaggccgccatgagcaaacggaaggcgccgcaggagactctcaacgggggaatcaccgacatgctcacagaactcgcaaactttgagaagaacgtgagccaagctatccacaagtacaatgcttacagaaaagcagcatctgttatagcaaaatacccacacaaaataaagagtggagctgaagctaagaaattgcctggagtaggaacaaaaattgctgaaaagattgatgagtttttagcaactggaaaattacgtaaactggaaaagattcggcaggatgatacgagttcatccatcaatttcctgactcgagttagtggcattggtccatctgctgcaaggaagtttgtagatgaaggaattaaaacactagaagatctcagaaaaaatgaagataaattgaaccatcatcagcgaattgggctgaaatattttggggactttgaaaaaagaattcctcgtgaagagatgttacaaatgcaagatattgtactaaatgaagttaaaaaagtggattctgaatacattgctacagtctgtggcagtttcagaagaggtgcagagtccagtggtgacatggatgttctcctgacccatcccagcttcacttcagaatcaaccaaacagccaaaactgttacatcaggttgtggagcagttacaaaaggttcattttatcacagataccctgtcaaagggtgagacaaagttcatgggtgtttgccagcttcccagtaaaaatgatgaaaaagaatatccacacagaagaattgatatcaggttgatacccaaagatcagtattactgtggtgttctctatttcactgggagtgatattttcaataagaatatgagggctcatgccctagaaaagggtttcacaatcaatgagtacaccatccgtcccttgggagtcactggagttgcaggagaacccctgccagtggatagtgaaaaagacatctttgattacatccagtggaaataccgggaacccaaggaccggagcgaatgaggcctgtatcctccctggcagacacaacccaataggagtcttaatttatttcttaacctttgctatgtaagggtctttggtgtttttaaatgattgtttcttcttcatgcttttgcttgcaatgtagtcaataaaacctcatgtactattattgga

SEQ ID NO: 6738 - protein, 335 aa, Homo sapiens; identical to SEQ ID NO: 961

SEQ ID NO: 6739 - DNA, 1247 bp, Homo sapiens
aacaagcgccgtgcgccccgccccccatcgggggcaaccattgttccgccggtcgcgccggagctgggttgctcctgctcccgtctccaagtcctggtacctccttcaagctgggagagggctctagtccctggttctgaacactctggggttctcgggtgcaggccgccatgagcaaacggaaggcgccgcaggagactctcaacgggggaatcaccgacatgctcacagaactcgcaaactttgagaagaacgtgagccaagctatccacaagtacaatgcttacagaaaagcagcatctgttatagcaaaatacccacacaaaataaagagtggagctgaagctaagaaattgcctggagtaggaacaaaaattgctgaaaagattgatgagtttttagcaactggaaaattacgtaaactggaaaagattcggcaggatgatacgagttcatccatcaatttcctgactcgagttagtggcattggtccatctgctgcaaggaagtttgtagatgaaggaattaaaacactagaagatctcagaaaaaatgaagataaattgaaccatcatcagcgaattgggctgaaatattttggggactttgaaaaaagaattcctcgtgaagagatgttacaaatgcaagatattgtactaaatgaagttaaaaaagtggattctgaatacattgctacagtctgtggcagtttcagaagaggtgcagagtccagtggtgacatggatgttctcctgacccatcccagcttcacttcagaatcaaccaaacagggtgtttgccagcttcccagtaaaaatgatgaaaaagaatatccacacagaagaattgatatcaggttgatacccaaagatcagtattactgtggtgttctctatttcactgggagtgatattttcaataagaatatgagggctcatgccctagaaaagggtttcacaatcaatgagtacaccatccgtcccttgggagtcactggagttgcaggagaacccctgccagtggatagtgaaaaagacatctttgattacatccagtggaaataccgggaacccaaggaccggagcgaatgaggcctgtatcctccctggcagacacaacccaataggagtcttaatttatttcttaacctttgctatgtaagggtctttggtgtttttaaatgattgtttcttcttcatgcttttgcttgcaatgtagtcaataaaacctcatgtactattattgga

SEQ ID NO: 6740 - protein, 306 aa, Homo sapiens
MSKRKAPQETLNGGITDMLTELANFEKNVSQAIHKYNAYRKAASVIAKYPHKIKSGAEAKKLPGVGTKIAEKIDEFLATGKLRKLEKIRQDDTSSSINFLTRVSGIGPSAARKFVDEGIKTLEDLRKNEDKLNHHQRIGLKYFGDFEKRIPREEMLQMQDIVLNEVKKVDSEYIATVCGSFRRGAESSGDMDVLLTHPSFTSESTKQGVCQLPSKNDEKEYPHRRIDIRLIPKDQYYCGVLYFTGSDIFNKNMRAHALEKGFTINEYTIRPLGVTGVAGEPLPVDSEKDIFDYIQWKYREPKDRSE

SEQ ID NO: 6741 - DNA, 590 bp, Homo sapiens
gtgcgccccgccccccatcgggggcaaccattgttccgccggtcgcgccggagctgggttgctcctgctcccgtctccaagtcctggtacctccttcaagctgggagagggctctagtccctggttctgaacactctggggttctcgggtgcaggccgccatgagcaaacggaaggcgccgcaggagactctcaacgggggaatcaccgacatgctcacagaactcgcaaactttgagaagaacgtgagccaagctatccacaagtacaatgcttacaggtgggacagtgcagcattctcgggtagcatacgttctgggataccctgtttagtgtggcaattaacaggactgagggcccagtggatatttggtccatctgcaagagcgggaaaaagcaagaatcgaggctggtaccttactatttcttgaagaatgtgggcagtgcgttataggatcagttcagataagttcccaattctgattgcagatagctgtagcctgatacgtattttgtcatcatcaaacatgaattactagaaatgcggtgtaattttaaccgtaatgaaagacagcggatgaagtccatact

SEQ ID NO: 6742 - protein, 89 aa, Homo sapiens
MSKRKAPQETLNGGITDMLTELANFEKNVSQAIHKYNAYRWDSAAFSGSIRSGIPCLVWQLTGLRAQWIFGPSARAGKSKNRGWYLTIS

SEQ ID NO: 6743 - DNA, 622 bp, Homo sapiens
gtgcgccccgccccccatcgggggcaaccattgttccgccggtcgcgccggagctgggttgctcctgctcccgtctccaagtcctggtacctccttcaagctgggagagggctctagtccctggttctgaacactctggggttctcgggtgcaggccgccatgagcaaacggaaggcgccgcaggagactctcaacgggggaatcaccgacatgctcacagaactcgcaaactttgagaagaacgtgagccaagctatccacaagtacaatgcttacagaaaagcagcatctgttatagcaaaatacccacacaaaataaagagtggagctgaagctaagaaattgcctggagtaggaacaaaaattgctgaaaagattgatgagtttttagcaactggaaaattacgtaaactggaaaaggtaaaattttaacttgtttacttcattaattatagtatctgcctttatggccactatgtagcgtcattgcagggtgaccaatgtcattcactgtagtgagactcacaggaaatgaggtgagtgaagttgatggctttaactttttgaatgttatttccataaaatgttcacttgttttatgtggcatttaagagactatta

SEQ ID NO: 6744 - protein, 90 aa, Homo sapiens
MSKRKAPQETLNGGITDMLTELANFEKNVSQAIHKYNAYRKAASVIAKYPHKIKSGAEAKKLPGVGTKIAEKIDEFLATGKLRKLEKVKF

SEQ ID NO: 6745 - DNA, 759 bp, Homo sapiens
gtgcgccccgccccccatcgggggcaaccattgttccgccggtcgcgccggagctgggttgctcctgctcccgtctccaagtcctggtacctccttcaagctgggagagggctctagtccctggttctgaacactctggggttctcgggtgcaggccgccatgagcaaacggaaggcgccgcaggagactctcaacgggggaatcaccgacatgctcacagaaaagcagcatctgttatagcaaaatacccacacaaaataaagagtggagctgaagctaagaaattgcctggagtaggaacaaaaattgctgaaaagattgatgagtttttagcaactggaaaattacgtaaactggaaaagattcggcaggatgatacgagttcatccatcaatttcctgactcgagttagtggcattggtccatctgctgcaaggaagtttgtagatgaaggaattaaaacactagaagatctcagaaaaaatgaagataaattgaaccatcatcagcgaattgggctgaaatattttggggactttgaaaaaagaattcctcgtgaagagatgttacaaatgcaagatattgtactaaatgaagttaaaaaagtggattctgaatacattgctacagtctgtggcagtttcagaagagattctgctgtctacatcaatacacctgaatagttggacagaaaattgaaatcttttaactaattctaactatgaagcacagtgaaatagaaagttaggctgtaagaa

SEQ ID NO: 6746 - protein, 39 aa, Homo sapiens
MLQMQDIVLNEVKKVDSEYIATVCGSFRRDSAVYINTPE

SEQ ID NO: 6747 - DNA, 2224 bp, Homo sapiens
gattacaggtgtgagccaccacgcctggccctgaagagtcacttttatctagctcttcatatctgaaatttttgtctcattgtgttttcagtcatttcaatgtatttgttccccaggtggttctttataaaaagggtcattgagtttagcattttccccccaaaaagcatttaaattaacatgtcaactttatttatcttctatacagatctcagaaaaaatgaagataaattgaaccatcatcagcgaattgggctgaaatattttggggactttgaaaaaagaattcctcgtgaagagatgttacaaatgcaagatattgtactaaatgaagttaaaaaagtggattctgaatacattgctacagtctgtggcagtttcagaagaggtgcagagtccagtggtgacatggatgttctcctgacccatcccagcttcacttcagaatcaaccaaacaggtgcctcagagtttataatcaatggtgatcagtcttacacaacagtgaatttcactttttaagtgatagttgggtattttcagaataagttttgttttcgccttcctgaaaagtctgaagagctttgtactgattgaattctgcgaaaggcaaatttctcgaaaaggatacctattattcttccatgagttgctgggaggacagtctaacatttgaaagagaaaacattgaatacaatagttttagaacgatttactgtctgtgataaatactttagaaatactataatcagattttcattaaattttatcttaaaaaatgaaatattgagaaaccttctattagaaaacctgtgaaggcaaaacattttttattttagaatatatgcctttggaaggtgaaacagctgactctttgattgcttttttttcccatgagccatttcaagaacaggaaaactctttgatttaaggaaacagataaatacaactgatcattgtttttacaatcgtaataccttaaacagtggtttctaaaaatatgtttcatttgataagatgaattttctattagagggaaaaagtacttgctcagaacattagaaaacatagagatggccgggcacggtggctcatgcctgtaatcacaacactttgggaggccaaggcaggtggatcacgaggtcaggagatcaagaccatcctgcccaacatggtgaaaccccgtctccactaaaaatacaaaattaaccaggcgtggtggtgcgcgcctgtagtcccagctactcgggaggctgaggcaggagaatcgcttgaacccaggaggcaaaggttgcagtgagccgagatcgtgccactgcactccagcctggcaacagaacgagactccatctaaaaataaaataaaataaaataaaataaaataaaataaaatagagatttctccataaataattagaaaactcatgttaaaaatgttttcttcccgggctcgattccctgccaaaaaaaaaaaaagttttcttattcaggcatgatgttgttcctggtactctggatgctgaggtgggaggatcacttgagtccaggagttcaaggctatagtttgccatgattgtacctgtgaatagcacagtctccagcctgtgcaatatagcaagactgtgtctctaaaaatattgttaaatattttcttgccattacaaagtaattactctttttcttattccctaattatgattctacagccaaaactgttacatcaggttgtggagcagttacaaaaggttcattttatcacagataccctgtcaaagggtgagacaaagttcatggtaagtacttgttagagttagcacatctaaaaaaaaacttggagactgttcagtagccattctgagtgtgtgacttcatggtagctttgaattacagtcaccaaatagagtatccatgagactttaaagaaaaataatagcaggggccgggcgcggtggctcacgcctgtgatcccagccctttgggaggccgaggcgggtggatcgcctgaggtcgggagctcaagaccatgctgaccaacatggagaaaccccgtctctgctaaaaacacaaaattggccgggcgtggtggcgcatgcctgtaatcctagctactcaggaggatgaggcgggaaaatcacttgaacccaggagacggaggtgcggtgagcatagatcgtgccactgcacttcagcctgggccacaagagagaaactccgccaaaaaaaaa

SEQ ID NO: 6748 - protein, 98 aa, Homo sapiens
MSTLFIFYTDLRKNEDKLNHHQRIGLKYFGDFEKRIPREEMLQMQDIVLNEVKKVDSEYIATVCGSFRRGAESSGDMDVLLTHPSFTSESTKQVPQSL

SEQ ID NO: 6749 - DNA, 772 bp, Homo sapiens
acatcaggttgtggagcagttacaaaaggttcattttatcacagataccctgtcaaagggtgagacaaagttcatggtaagtacttgttagagttagcacatctaaaaaaaaacttggagactgttcagtagccattctgagtgtgtgacttcatggtagctttgaattacagtcaccaaatagagtatccatgagactttaaagaaaaataatagcaggggccgggcgcggtggctcacgcctgtgatcccagccctttgggaggccgaggcgggtggatcgcctgaggtcgggagctcaagaccatgctgaccaacatggagaaaccccgtctctgctaaaaacacaaaattggccgggcgtggtggcgcatgcctgtaatcctagctactcaggaggatgaggcgggaaaatcacttgaacccaggagacggaggtgcggtgagcatagatcgtgccactgcacttcagcctgggccacaagagagaaactccgccaaaaaaaaaaaaagaaagaaaaataatcagcaggatgcctgattctcatagctactctcagaatattttaggaaagaattttcttttaattctccacttgtaaataacacgtgtcatcagaatagttaattaggcctgggcatggtggtgtagtcccagctttttcgggaggctgaggcgggagaatcacttgaacccgggaggcagaggttgcactgagccgagatcgcaccactgcactccagcctgggtgacagaccgagactctgtctc

SEQ ID NO: 6750 - protein, 50 aa, Homo sapiens
MPVILATQEDEAGKSLEPRRRRCGEHRSCHCTSAWATREKLRQKKKKKEK

SEQ ID NO: 6751 - DNA, 958 bp, Homo sapiens
acttctgctacctatcattttaaattttgatttaaacctttccctgagggttttctatagtattctgttcttacttcatggatagagtatcttctgttattactggaagcttttttgtttgagactatactggtagcttttttgtttgttttcttcttcctgcataatcatcgtttcttccacgttgctctcttctgtttattttgatgtctgtgtttcgtgttcagggttttctttgattagtttcttgcttagaatcacacaaagaccaaatcctcataatgagaatccttatttgcagttttgtgtagttctctaattatcgtgaagtgtaatagaaaggtagggatagtgtattgctcacagaagctgctaagttaaaagtgctcagaattctagagctgctaacattaaaaacaaaaatggccttgtgttttacttgattaaaattaagccttaagtttagaacatctttaaacttggtttaaaatgttcattttagggtgtttgccagcttcccagtaaaaatgatgaaaaagaatatccacacagaagaattgatatcaggttgatacccaaagatcagtattactgtggtgttctctatttcactgggagtgatattttcaataagaatatgagggctcatgccctagaaaagggtttcacaatcaatgagtacaccatccgtcccttgggagtcactggagttgcaggagaacccctgccagtggatagtgaaaaagacatctttgattacatccagtggaaataccgggaacccaaggaccggagcgaatgaggcctgtatcctccctggcagacacaacccaataggagtcttaatttatttcttaacctttgctatgtaagggtctttggtgtttttaaatgattgtttcttcttcatgcttttgcttgcaatgtagtcaataaaacctcatgtactattattgga

SEQ ID NO: 6752 - protein, 65 aa, Homo sapiens
MSTPSVPWESLELQENPCQWIVKKTSLITSSGNTGNPRTGANEACILPGRHNPIGVLIYFLTFAM

SEQ ID NO: 6753 - DNA, 632 bp, Homo sapiens
taataggtgataatgcaatttcatttctccacatctctttcagaacaaagttcacagaaacctaaacaaattacaaggttggggtgatttgagcagtctacctcatgatagtcttctcttcaaattattagaccacttaggcttatctttggtattttgttccttattgattttaggagtcctatatttgctaaacttgaaatgcatggtaaaaaaatgtatctactgtccattttttttaggttgatacccaaagatcagtattactgtggtgttctctatttcactgggagtgatattttcaataagaatatgagggctcatgccctagaaaagggtttcacaatcaatgagtacaccatccgtcccttgggagtcactggagttgcaggagaacccctgccagtggatagtgaaaaagacatctttgattacatccagtggaaataccgggaacccaaggaccggagcgaatgaggcctgtatcctccctggcagacacaacccaataggagtcttaatttatttcttaacctttgctatgtaagggtctttggtgtttttaaatgattgtttcttcttcatgcttttgcttgcaatgtagtcaataaaacctcatgtactattattgg

SEQ ID NO: 6754 - protein, 91 aa, Homo sapiens
MHGKKMYLLSIFFRLIPKDQYYCGVLYFTGSDIFNKNMRAHALEKGFTINEYTIRPLGVTGVAGEPLPVDSEKDIFDYIQWKYREPKDRSE

SEQ ID NO: 6755 - DNA, 292 bp, Homo sapiens
caaagatcagtattactgtggtgttctctatttcactgggagtgatattttcaataagaatatgagggctcatgccctagaaaaggacatctttgattacatccagtggaaataccgggaacccaaggaccggagcgaatgaggcctgtatcctccctggcagacacaacccaataggagtcttaatttatttcttaacctttgctatgtaagggtctttggtgtttttaaatgattgtttcttcttcatgcttttgcttgcaatgtagtcaataaaacctcatgtactatt

SEQ ID NO: 6756 - protein, 30 aa, Homo sapiens
GLYPPWQTQPNRSLNLFLNLCYVRVFGVFK

SEQ ID NO: 6757 - DNA, 1932 bp, Homo sapiens
ctttgctcagccgatttcacgcaccttactcagactaaggtttacttctttcagaaaaagcagtgacaaacagacgacgtgctgagctgccagcttagtggaagctctgctctgggtggagagcagcctcgctttggtgacgcacagtgctgggaccctccaggagccccgggattgaaggatggtggcggccgtcctgctggggctgagctggctctgctctcccctgggagctctggtcctggacttcaacaacatcaggagctctgctgacctgcatggggcccggaagggctcacagtgcctgtctgacacggactgcaataccagaaagttctgcctccagccccgcgatgagaagccgttctgtgctacatgtcgtgggttgcggaggaggtgccagcgagatgccatgtgctgccctgggacactctgtgtgaacgatgtttgtactacgatggaagatgcaaccccaatattagaaaggcagcttgatgagcaagatggcacacatgcagaaggaacaactgggcacccagtccaggaaaaccaacccaaaaggaagccaagtattaagaaatcacaaggcaggaagggacaagagggagaaagttgtctgagaacttttgactgtggccctggactttgctgtgctcgtcatttttggacgaaaatttgtaagccagtccttttggagggacaggtctgctccagaagagggcataaagacactgctcaagctccagaaatcttccagcgttgcgactgtggccctggactactgtgtcgaagccaattgaccagcaatcggcagcatgctcgattaagagtatgccaaaaaatagaaaagctataaatatttcaaaataaagaagaatccacattgcatttgagctcaatcttggacattaactttaaaatgcttccatacagatctctcttaaaatcaaatcttgtagcaagtgaaatagcctgaaactagagaactaagagatggcgaccttgtgatgaatgaaactagctttagccttttgtccgtttttccagaaaactgatgggactctgtaaccaaaaaaattatttctaatctagggactcaattaattcaaatctttaagaattgaagccaggcatggtggctcacgcctgtaatcccagcactttgggaggcagaggtgggtggatcacgaggtcaagagtttgagaccagactggccaacactgtaaaaccctgtctctactaaaaaatacaaaaaattagctgggcatggtggcagatgtctgtaatcccagctactcgggaggctgaggcagaagaattgcttgaacccgggaggcggaggttgcaatgagccaagatcgcaccattgcactccagcccgggtgacagtacgagactcggtctcaaaacaacaacaacaacaacaacaacaacaacaacaaagaattgaaattgtatatatttaaagtgtactgtgtgagttttgaaatacatatactataaccgagccacatctctctctccaaataaatctttaaacaatttctggtgaagggttggtgcctgacagtatcctagggggtaaaaaatgatagcatctgaagttaaaagtaaattaattcttacatcttaccaggaaaattatcacagcaaatactatatttttccttaataactctattgtttatttccattcatttcttagaagggaaatggcatttcactacaaaataatttggttaataaagaagtttcaagatatcttatgtttgtatagtcctttgcaagttataaagcattttcacgttttcagtagctttacttaccatttgataactttgtatattttatatttatataattttaatatttgaaaggcagggctttcaaggagtgtttttacttacacattttgaccacttgtgcttaaa

SEQ ID NO: 6758 - protein, 224 aa, Homo sapiens; identical to SEQ ID NO: 963

SEQ ID NO: 6759 - DNA, 887 bp, Homo sapiens
ctttgctcagccgatttcacgcaccttactcagactaaggtttacttctttcagaaaaagcagtgacaaacagacgacgtgctgagctgccagcttagtggaagctctgctctgggtggagagcagcctcgctttggtgacgcacagtgctgggaccctccaggagccccgggattgaaggatggtggcggccgtcctgctggggctgagctggctctgctctcccctgggagctctggtcctggacttcaacaacatcaggagctctgctgacctgcatggggcccggaagggctcacagtgcctgtctgacacggactgcaataccagaaagttctgcctccagccccgcgatgagaagccgttctgtgctacatgtcgtgggttgcggaggaggtgccagcgagatgccatgtgctgccctgggacactctgtgtgaacgatgtttgtactacgatggaagatgcaaccccaatattagaaaggcagcttgatgagcaagatggcacacatgcagaaggaacaactgggcacccagtccaggaaaaccaacccaaaaggaagccaagtattaagaaatcacaaggcaggaagggacaagagggagaaagttgtctgagaacttttgactgtggccctggactttgctgtgctcgtcatttttggacgaaaatttgtaagccagtccttttggagggacaggtctgctccagaagagggcataaagacactgctcaagctccagaaatcttccagcgttgcgactgtggccctggactactgtgtcgaagccaattgaccagcaatcggcagcatgctcgattaagagtatgccaaaaaatagaaaagctataaatatttcaaaataaagaagaatccacattgc

SEQ ID NO: 6760 - protein, 224 aa, Homo sapiens; identical to SEQ ID NO: 963

SEQ ID NO: 6761 - DNA, 572 bp, Homo sapiens
tccggttgttccgccacgtttgagcgggcgagcccggcggccgggagacgccagggaacggggctggtgggggtacaaaggctcggttccgtcgccttcagccctgcggtgggggcacggggcaagtgaggggacggcagaggcggcgttcggtgtgaggctgcgccctgggctcctgaaaatccagggctgcagtcatttgaaggcttgactggggctggaggattttcatccaagatggctcactcacccagctgttggcaggagacctcggttctttgacttctccgtaagactgtagacagagctgccccgtgttgcccaggccggagtgtagtgatgcgatcttacctcactgcagctttgagttcctgggcgtggcacaagcagttcttgaactcctggcctcaagcgatcctcctgccttggcctcccaagctgctgggattacaggcgtgagccactgcacccagctggaatgcacattctaagttacaagatcaaataacaagggaaagaagacttgattatgtatacacacacaaaaagaaagtgttatcaaaactgacaag

SEQ ID NO: 6762 - protein, 39 aa, Homo sapiens
MRSYLTAALSSWAWHKQFLNSWPQAILLPWPPKLLGLQA

SEQ ID NO: 6763 - DNA, 2444 bp, Homo sapiens
agctctcacctaatgatctccctactcactcctgaccaggacgcaggtcattccccataataattagctcacaggcagagtttccaggcgcttccaggagcatcaatcaccgggatgaatgggaagcccgtgtgtgggaactgcagggggagctgggtgcagagccacctcagccctgtcaccctgcgcgtgtctctgccatgcttccttggatccctatctaccccgttttgggtgacaggacgagttgggccagttaccagagtacaggacatttactttgtggactgccattcaatttgacaacagatttgtttttaatgtgcactttctggaaacaagatattgttcctcaaagaaatgaaaaaaatgttgggaatacataagacatcataacagacaccagcctgagtcgaagctgttaaagaggccaagaattcccaagctttcccaggcaaacggggaagaacactgggatgccttttcctcctcctctgtccatctgcaggccaagtgtgcatcagtcacaggcaaactctgaattgagctttgtgcaagtctctggaaagagacccaagatcgtgtgatgagcaaaagtgacagtgctggaggcagcgacatctgcagagccagccccatccctatctgcagcagaatatgtatggggatcctttatgtgaacaatccacccagggtagaatggggcttttgacatcagctgagacccaggcggccttacaatgagagggctgttggtcaaaggaaggactgtttaatgaactgagaatctgaggccagctctggccatctgcacttggaatcattagagcaactctactgtaactggcaaccttgaataatgcagcaaattcatattccaaaattgtgaactttaaaattttgtgtttgtgtctatgatgaaaagcattatataaacatttgatactacaattttattagtaaggaaggctgaaaaagtatctctcttttgactctgaggtcaataatgataatggcttttcccctacactgggatagaaatgttctgtcaaggatatgaaaacactttatgaaaatgaaattcattaaagcccttaataatcaggtagggaaggcaggtgctcacaattgtcacctgttggtgagtgaacaccttaggctcggggaggacaatgactcaagaacaaggtcgaattgcaggtggggggtgaagctgatccctaacagtgtcctccagcccctggcactgaggaaggacatggagggcttgcatcgacttttcctggcaggcttgtgattcccagccagaatgcaggtggcaatgttgtgattcctggcgtaaccttcaatgcttcaatgataatctctgctggtgccaggcaccagctgagtgtcactgtgcagctcccaggcttaagtgatgcatgccgaggttttcagagcagtctctcatttattagttgtgttggaaagaaatctgtactacctaactgggtacctctggattttaacagctgtggtttataagagatatgagagggggtttgttttcaaagtgcctttcacaaagtaacaccttagactgtagtttacattccattccagtaggataacttgcaacacttctgtgctcagaaatccaactgtgcaagaaaagtcaggttatattttcatacagcccgttctggcaaatatgccttcacaccactttccctcctcctcaccgctattggcaatagtcccaatggaagagttttatgtcaaatgctgagtatcttggaagctgtcctgcacagacacgactgcttggctgcgtgttggagagtcgcggttggactgggagaccaggaaggtcccttctggtctgagatgtgatgactctagaactaattagtttcaactcataacacgaaatgatactagctaccatttggtgggctttttctgtgttccaggctctgtgctaagatcttagcattactctaattacaaaatccctgccaatattatcctcagtttacgcaagaacaaatgggtttagggaaatcaaaaacttgtccaatgacacagatttaagatttagcaactgatggccacgtggaaatggattacagattattctaattggacactctaaacgtgcaatttaaccagaatgaaatttagggctgcgtgctgtggctcatgcctgtaatcctagcactttgggaagccaggtgtatcccttaagcccaggagtttgagagcaacttgggcaacatggtgaaacctgtatctacaaaaaatacaaaaattagccaggtgaggtggtgtatgcctgtagttccagctacttgggaggctgagagatgggaggattggttgagcctaggaggtcgaggctgctgtgagctgtgatggttccactgcactccagcctgggcgacagagacagactccatctc

SEQ ID NO: 6764 - protein, 62 aa, Homo sapiens
MNGKPVCGNCRGSWVQSHLSPVTLRVSLPCFLGSLSTPFWVTGRVGPVTRVQDIYFVDCHSI

SEQ ID NO: 6765 - DNA, 857 bp, Homo sapiens
gtgctggtccaggcttacgcgctaacagtgaattagaaggagaaaacgctctgcgagtgcagcggaagggaggaccctgtggctggagaaatcccgccgcgaacacccagcgaccaggtctacagcagcaccaggtctgtgcttccccctggtggtcacagattttactacacgcggcccacaagtaaaatgagtttctcttcagtggcccggttatcttctgtcgtgtaggaggaagtccagagccacggaaattcggtaaggatcggataagggcaataaaatcgcagctctaaatcttttcatggagttgaagacagacgtttgactgtgggagccatctcatctttataacctggtaaacaatgccagaataaaaacaacaaattcaatgtatttaagtcggtttcgacagtgaggaattaaaattaaatttatttaaactattttgacttttacccaagtttttcttacagttccatctcatttttccctccttacatagtttggggagtagagaacagtctatttttgactcctgtgtaactgacatggacacagaggcctgcggtcccttggaggattagtggcccacgcaggtgtgcagaccacgggtccctcaatcagaagcgggatgtgtggcagggagctttggagagctttcattttggattagtgatttcctgtcgacttttcctcgtttttgtcacagcacactcggaacatttctcatcagctgtgtacactatgtcaggcatttcaaatatgtttctggaagttgtcagtgctgttctctatgaggcctgaaggaaaaattcaatgtttgtagtaaataaagtacaaaaattatatcagct

SEQ ID NO: 6766 - protein, 61 aa, Homo sapiens [sequence omitted]

SEQ ID NO: 6767 - DNA, 975 bp, Homo sapiens
acctcagccctgtcaccctgcgcgtgtctctgccatgcttccttggatccctatctaccccgttttgggtgacaggacgagttgggccagttaccaggatcttgtcgcctggttctgatggtgtcttggttcccggctggggttttgtgtttaccacgagcgttgcctgctgtcggggagctgcgtgtgtttcacaacaaacagggagccagggagaccaccctgcggggctgccccttccctcagcgctttctgcttgggtcgctggcgtcttgcagtgccttcgttcgtctgtggtgtgaggtgctggtccaggcttacgcgctaacagtgaattagaaggagaaaacgctctgcgagtgcagcggaaggtcaatatggagcctggtttgcttttagaatcttcccaaggccgatgggcttcctcttccctcctgaccagaggctttgatgcccctgccctgggctgcctggttcctgccccgagtcttcagaaagatccccgggcctggagactgtgagttcaggttcagatgccttgcgtggcctgtgaatcctgggtctggtctctgtccccaggccggtgttcagggaccaccttgagcaccaaaggcagcccagtccggctttgactcagctcccagggcggagtcccttgcccagcactgggcaggaggagggcatcctcagggcaaggtctgccatcagcagaccagagccagagcccgcagcccctgagcactttcagattcctgcagcgcagagaggttttccgggagggaagggaggaccctgtggctggagaaatcccgccgcgaacacccagcgaccaggtctacagcagcaccaggtctgtgcttccccctggtggtcacagattttactacacgcggcccacaagtaaaatgagtttctcttcagtggcccggttatcttctgtcgtgtaggaggaagtccagagccacggaaattcgg

SEQ ID NO: 6768 - protein, 73 aa, Homo sapiens [sequence omitted]

SEQ ID NO: 6769 - DNA, 568 bp, Homo sapiens
agggcggggcccggctccggttgttccgccacgtttgagcgggcgagcccggcggccgggagacgccagggaacggggctggtgggggtacaaaggctcggttccgtcgccttcagccctgcggtgggggcacggggcaagtgaggggacggcagaggcggcgttcggtgtgaggctgcgccctgggctcctgaaaatccagggctgcagtcatttgaaggcttgactggggctggaggattttcatccaagatggctcactcacccagctgttggcaggagacctcggttctttgacttctccgtaagactgtggactggggactaaaggcaatagcttgacttctgaaaagggctggactgaaggtcagccacatgggcagtgtgaaggatccccagcaaaactctggacatcagtggctgggcaagcttctctggttggcggtactctgcatattgtcacacatcaactctgggagaagatcatactgttcatgtctccacaaggggaggacagctggaaactcagtgtctggacctctttccttggctgattttattgtgtatc

SEQ ID NO: 6770 - protein, 63 aa, Homo sapiens
MGSVKDPQQNSGHQWLGKLLWLAVLCILSHINSGRRSYCSCLHKGRTAGNSVSGPLSLADFIV

SEQ ID NO: 6771 - DNA, 682 bp, Homo sapiens
tcctccggcggcgccggcggccgcagaacttccgggtcggcgcggaggcggggcggaggcgccgcggcggctgttattgttcggctgggctcggtcgggcgctgtctccctcggctctgcgggtgtcagttcgtccggcttcctcacagcccctcactcccggcggctgacagcagcagcggcggcggcgggcggcgcctggcgtttcgaggctgagcggcaccggggttggggcgcggaggaggagcagcagcgggaggaggagccgtgtgccctggcactgagcggccgcggccatggcgtacgcctatctcttcaagtacatcataatcggcgacacaggtgttggtaaatcatgcttattgctacagtttacagacaagaggtttcagccagtgcatgaccttactattggtgtagagttcggtgctcgaatgataactattgatgggaaacagataaaacttcagatatgggatacggcagggcaagaatcctttcgttccatcacaaggtcgtattacagaggtgcagcaggagctttactagtttacgatattacacggagagatacattcaaccacttgacaacctggttagaagatgcccgccagcattccaattccaacatggtcattatgcttattggaaataaaagtgatttagaatctagaagagaagt

SEQ ID NO: 6772 - protein, 127 aa, Homo sapiens
MAYAYLFKYIIIGDTGVGKSCLLLQFTDKRFQPVHDLTIGVEFGARMITIDGKQIKLQIWDTAGQESFRSITRSYYRGAAGALLVYDITRRDTFNHLTTWLEDARQHSNSNMVIMLIGNKSDLESRR

SEQ ID NO: 6773 - DNA, 1103 bp, Homo sapiens
tcctccggcggcgccggcggccgcagaacttccgggtcggcgcggaggcggggcggaggcgccgcggcggctgttattgttcggctgggctcggtcgggcgctgtctccctcggctctgcgggtgtcagttcgtccggcttcctcacagcccctcactcccggcggctgacagcagcagcggcggcggcgggcggcgcctggcgtttcgaggctgagcggcaccggggttggggcgcggaggaggagcagcagcgggaggaggagccgtgtgccctggcactgagcggccgcggccatggcgtacgcctatctcttcaagtacatcataatcggcgacacaggtgttggtaaatcatgcttattgctacagtttacagacaagaggtttcagccagtgcatgaccttactattggtgtagagttcggtgctcgaatgataactattgatgggaaacagataaaacttcagatatgggatacggcagggcaagaatcctttcgttccatcacaaggtcgtattacagaggtgcagcaggagctttactagtttacgatattacacggagagatacattcaaccacttgacaacctggttagaagatgcccgccagcattccaattccaacatggtcattatgcttattggaaataaaagtgatttagaatctagaagagaagtaaaaaaagaagaaggtgaagcttttgcacgagaacatggactcatcttcatggaaacgtctgctaagactgcttccaatgtagaagaggcatttattaatacagcaaaagaaatttatgaaaaaattcaagaaggagtctttgacattaataatgaggcaaatggcattaaaattggccctcagcatgctgctaccaatgcaacacatgcaggcaatcagggaggacagcaggctgggggcggctgctgttgagtctgtttttactgtctagctgcccaacggggcctactcacttattctttcaccccctctcctcctgctcagctgagacatgaaactatttgaaatggctttatgtcacagaagactttaatccgtcaaattcttgtataactttgaataaatggttaatgttcactt

SEQ ID NO: 6774 - protein, 212 aa, Homo sapiens; identical to SEQ ID NO: 966

SEQ ID NO: 6775 - DNA, 991 bp, Homo sapiens
tcctccggcggcgccggcggccgcagaacttccgggtcggcgcggaggcggggcggaggcgccgcggcggctgttattgttcggctgggctcggtcgggcgctgtctccctcggctctgcgggtgtcagttcgtccggcttcctcacagcccctcactcccggcggctgacagcagcagcggcggcggcgggcggcgcctggcgtttcgaggctgagcggcaccggggttggggcgcggaggaggagcagcagcgggaggaggagccgtgtgccctggcactgagcggccgcggccatggcgtacgcctatctcttcaagtacatcataatcggcgacacaggtgttggtaaatcatgcttattgctacagtttacagacaagaggtttcagccagtgcatgaccttactattggtgtagagttcggtgctcgaatgataactattgatgggaaacagataaaacttcagatatgggatacggcagggcaagaatcctttcgttccatcacaaggtcgtattacagaggtgcagcaggagctttactagtttacgatattacacggagagatacattcaaccacttgacaacctggttagaagatgcccgccagcattccaattccaacatggtcattatgcttattggaaataaaaggcatttattaatacagcaaaagaaatttatgaaaaaattcaagaaggagtctttgacattaataatgaggcaaatggcattaaaattggccctcagcatgctgctaccaatgcaacacatgcaggcaatcagggaggacagcaggctgggggcggctgctgttgagtctgtttttactgtctagctgcccaacggggcctactcacttattctttcaccccctctcctcctgctcagctgagacatgaaactatttgaaatggctttatgtcacagaagactttaatccgtcaaattcttgtataactttgaataaatggttaatgttcactt

SEQ ID NO: 6776 - protein, 181 aa, Homo sapiens
MAYAYLFKYIIIGDTGVGKSCLLLQFTDKRFQPVHDLTIGVEFGARMITIDGKQIKLQIWDTAGQESFRSITRSYYRGAAGALLVYDITRRDTFNHLTTWLEDARQHSNSNMVIMLIGNKRHLLIQQKKFMKKFKKESLTLIMRQMALKLALSMLLPMQHMQAIREDSRLGAAAVESVFTV

SEQ ID NO: 6777 - DNA, 1940 bp, Homo sapiens
tcctccggcggcgccggcggccgcagaacttccgggtcggcgcggaggcggggcggaggcgccgcggcggctgttattgttcggctgggctcggtcgggcgctgtctccctcggctctgcgggtgtcagttcgtccggcttcctcacagcccctcactcccggcggctgacagcagcagcggcggcggcgggcggcgcctggcgtttcgaggctgagcggcaccggggttggggcgcggaggaggagcagcagcgggaggaggagccgtgtgccctggcactgagcggccgcggccatggcgtacgcctatctcttcaagtacatcataatcggcgacacaggtgttggtaaatcatgcttattgctacagtttacagacaagaggtttcagccagtgcatgaccttactattggtgtagagttcggtgctcgaatgataactattgatgggaaacagataaaacttcagatatgggatacggcagggcaagaatcctttcgttccatcacaaggtcgtattacagaggtgcagcaggagctttactagtttacgatattacacggagagatacattcaaccacttgacaacctggttagaagatgcccgccagcattccaattccaacatggtcattatgcttattggaaataaaaggcatttattaatacagcaaaagaaatttatgaaaaaattcaagaaggagtctttgacattaataatgaggcaaatggcattaaaattggccctcagcatgctgctaccaatgcaacacatgcaggcaatcagggaggacagcaggctgggggcggctgctgttgagtctgtttttactgtctagctgcccaacggggcctactcacttattctttcaccccctctcctcctgctcagctgagacatgaaactatttgaaatggctttatgtcacagaagactttaatccgtcaaattcttgtataactttgaataaatggttaatgttcacttaaaagacagattttggagattgtattcatatctatttgcatttgatttctaggtcaattgatgtgattatttttgttaaatgttgtcttgtgcccttaactacgaactgaattgtattaaacactacaaagtcatcttgagtattttaaatcggtttgtgtagttaggtttcccaacatctgtggttacctaatgtttaatattatagaactgtcctcagaaactttgtcaattttcacggctataaggaaacagaaggactcttttaattctgtatttatcatttactttctgtatatatagtttaataacctgcttgggtgtaatttgccaagcttgaattctttaatgcatttgcataaattctatactgtttagagcttaaagctacagaagcattgttaggaattgcttggacactgaattttaaactttttgacattgttaacaagcatgttcatcttttcttgtcactagtccaagaaaaatatgcttaatgtatattacaaaggctttgtatatgttaacctgttttaatgccaaaagtttgctttgtccacaatttccttaagacctcttcagaaagggatttgtttgccttaatgaatactgttgggaaaaaacacagtataatgagtgaaaagggcagaagcaagaaatttctacatcttagcgactccaagaagaatgagtatccacatttagatggcacattatgaggactttaatctttccttaaacacaataatgttttcttttttcttttattcacatgatttctaagtatatttttcatgcaggacagtttttcaaccttgatgtacagtgactgtgtaaaatttttctttcagtggcaacctctataatctttaaaatatggtgagcatcttgtctgttttgaaggggatatgacaataaatctatcagatggaaaatcctgttacaaagt

SEQ ID NO: 6778 - protein, 181 aa, Homo sapiens; identical to SEQ ID NO: 6776

SEQ ID NO: 6779 - DNA, 2052 bp, Homo sapiens
tcctccggcggcgccggcggccgcagaacttccgggtcggcgcggaggcggggcggaggcgccgcggcggctgttattgttcggctgggctcggtcgggcgctgtctccctcggctctgcgggtgtcagttcgtccggcttcctcacagcccctcactcccggcggctgacagcagcagcggcggcggcgggcggcgcctggcgtttcgaggctgagcggcaccggggttggggcgcggaggaggagcagcagcgggaggaggagccgtgtgccctggcactgagcggccgcggccatggcgtacgcctatctcttcaagtacatcataatcggcgacacaggtgttggtaaatcatgcttattgctacagtttacagacaagaggtttcagccagtgcatgaccttactattggtgtagagttcggtgctcgaatgataactattgatgggaaacagataaaacttcagatatgggatacggcagggcaagaatcctttcgttccatcacaaggtcgtattacagaggtgcagcaggagctttactagtttacgatattacacggagagatacattcaaccacttgacaacctggttagaagatgcccgccagcattccaattccaacatggtcattatgcttattggaaataaaagtgatttagaatctagaagagaagtaaaaaaagaagaaggtgaagcttttgcacgagaacatggactcatcttcatggaaacgtctgctaagactgcttccaatgtagaagaggcatttattaatacagcaaaagaaatttatgaaaaaattcaagaaggagtctttgacattaataatgaggcaaatggcattaaaattggccctcagcatgctgctaccaatgcaacacatgcaggcaatcagggaggacagcaggctgggggcggctgctgttgagtctgtttttactgtctagctgcccaacggggcctactcacttattctttcaccccctctcctcctgctcagctgagacatgaaactatttgaaatggctttatgtcacagaagactttaatccgtcaaattcttgtataactttgaataaatggttaatgttcacttaaaagacagattttggagattgtattcatatctatttgcatttgatttctaggtcaattgatgtgattatttttgttaaatgttgtcttgtgcccttaactacgaactgaattgtattaaacactacaaagtcatcttgagtattttaaatcggtttgtgtagttaggtttcccaacatctgtggttacctaatgtttaatattatagaactgtcctcagaaactttgtcaattttcacggctataaggaaacagaaggactcttttaattctgtatttatcatttactttctgtatatatagtttaataacctgcttgggtgtaatttgccaagcttgaattctttaatgcatttgcataaattctatactgtttagagcttaaagctacagaagcattgttaggaattgcttggacactgaattttaaactttttgacattgttaacaagcatgttcatcttttcttgtcactagtccaagaaaaatatgcttaatgtatattacaaaggctttgtatatgttaacctgttttaatgccaaaagtttgctttgtccacaatttccttaagacctcttcagaaagggatttgtttgccttaatgaatactgttgggaaaaaacacagtataatgagtgaaaagggcagaagcaagaaatttctacatcttagcgactccaagaagaatgagtatccacatttagatggcacattatgaggactttaatctttccttaaacacaataatgttttcttttttcttttattcacatgatttctaagtatatttttcatgcaggacagtttttcaaccttgatgtacagtgactgtgtaaaatttttctttcagtggcaacctctataatctttaaaatatggtgagcatcttgtctgttttgaaggggatatgacaataaatctatcagatggaaaatcctgttacaaagt

SEQ ID NO: 6780 - protein, 212 aa, Homo sapiens; identical to SEQ ID NO: 966

SEQ ID NO: 6781 - DNA, 2170 bp, Homo sapiens
tcctccggcggcgccggcggccgcagaacttccgggtcggcgcggaggcggggcggaggcgccgcggcggctgttattgttcggctgggctcggtcgggcgctgtctccctcggctctgcgggtgtcagttcgtccggcttcctcacagcccctcactcccggcggctgacagcagcagcggcggcggcgggcggcgcctggcgtttcgaggctgagcggcaccggggttggggcgcggaggaggagcagcagcgggaggaggagccgtgtgccctggcactgagcggccgcggccatggcgtacgcctatctcttcaagtacatcataatcggcgacacaggtgttggtaaatcatgcttattgctacagtttacagacaagaggtttcagccagtgcatgaccttactattggtgtagagttcggtgctcgaatgataactattgatgggaaacagataaaacttcagatatgggatacggcagggcaagaatcctttcgttccatcacaaggtcgtattacagaggtgcagcaggagctttactagtttacgatattacacggagagatacattcaaccacttgacaacctggttagaagatgcccgccagcattccaattccaacatggtcattatgcttattggaaataaaagtgatttagaatctagaagagaagtaaaaaaagaagaaggtgaagcttttgcacgagaacatggactcatcttcatggaaacgtctgctaagactgcttccaatgtagaagaggcatttattaatacagcaaaagaaatttatgaaaaaattcaagaaggagtctttgacattaataatgaggcaaatggcattaaaattggccctcagcatgctgctaccaatgcaacacatgcaggcaatcagggaggacagcaggctgggggcggctgctgttgagtctgtttttactgtctagctgcccaacggggcctactcacttattctttcaccccctctcctcctgctcagctgagacatgaaactatttgaaatggctttatgtcacagaagactttaatccgtcaaattcttgtataactttgaataaatggttaatgttcacttaaaagacagattttggagattgtattcatatctatttgcatttgatttctaggtcaattgatgtgattatttttgttaaatgttgtcttgtgcccttaactacgaactgaattgtattaaacactacaaagtcatcttgagtattttaaatcggtttgtgtagttaggtttcccaacatctgtggttacctaatgtttaatattatagaactgtcctcagaaactttgtcaattttcacggctataaggaaacagaaggactcttttaattctgtatttatcatttactttctgtatatatagtttaataacctgcttgggtgtaatttgccaagcttgaattctttaatgcatttgcataaattctatactgtttagagcttaaagctacagaagcattgttaggaattgcttggacactgaattttaaactttttgacattgttaacaagcatgttcatcttttcttgtcactagtccaagaaaaatatgcttaatgtatattacaaaggctttgtatatgttaacctgttttaatgccaaaagtttgctttgtccacaatttccttaagacctcttcagaaagggatttgtttgccttaatgaatactgttgggaaaaaacacagtataatgagtgaaaagggcagaagcaagaaatttctacatcttagcgactccaagaagaatgagtatccacatttagatggcacattatgaggactttaatctttccttaaacacaataatgttttcttttttcttttattcacatgatttctaagtatatttttcatgcaggacagtttttcaaccttgatgtacagtgactgtgtaaaatttttctttcagtggcaacctctataatctttaaaatatggtgagcatcttgtctgttttgaaggggatatgacaataaatctatcagatggaaaatcctgttacaaagtagaaaagctttagtaatttactcagtgtggtggttttatcctttttttctttttctcccttggtctataatgaaattgttacagcagtgcaaaataaaatcctatgtataaaagtgtt

SEQ ID NO: 6782 - protein, 212 aa, Homo sapiens; identical to SEQ ID NO: 966

SEQ ID NO: 6783 - DNA, 2058 bp, Homo sapiens
tcctccggcggcgccggcggccgcagaacttccgggtcggcgcggaggcggggcggaggcgccgcggcggctgttattgttcggctgggctcggtcgggcgctgtctccctcggctctgcgggtgtcagttcgtccggcttcctcacagcccctcactcccggcggctgacagcagcagcggcggcggcgggcggcgcctggcgtttcgaggctgagcggcaccggggttggggcgcggaggaggagcagcagcgggaggaggagccgtgtgccctggcactgagcggccgcggccatggcgtacgcctatctcttcaagtacatcataatcggcgacacaggtgttggtaaatcatgcttattgctacagtttacagacaagaggtttcagccagtgcatgaccttactattggtgtagagttcggtgctcgaatgataactattgatgggaaacagataaaacttcagatatgggatacggcagggcaagaatcctttcgttccatcacaaggtcgtattacagaggtgcagcaggagctttactagtttacgatattacacggagagatacattcaaccacttgacaacctggttagaagatgcccgccagcattccaattccaacatggtcattatgcttattggaaataaaaggcatttattaatacagcaaaagaaatttatgaaaaaattcaagaaggagtctttgacattaataatgaggcaaatggcattaaaattggccctcagcatgctgctaccaatgcaacacatgcaggcaatcagggaggacagcaggctgggggcggctgctgttgagtctgtttttactgtctagctgcccaacggggcctactcacttattctttcaccccctctcctcctgctcagctgagacatgaaactatttgaaatggctttatgtcacagaagactttaatccgtcaaattcttgtataactttgaataaatggttaatgttcacttaaaagacagattttggagattgtattcatatctatttgcatttgatttctaggtcaattgatgtgattatttttgttaaatgttgtcttgtgcccttaactacgaactgaattgtattaaacactacaaagtcatcttgagtattttaaatcggtttgtgtagttaggtttcccaacatctgtggttacctaatgtttaatattatagaactgtcctcagaaactttgtcaattttcacggctataaggaaacagaaggactcttttaattctgtatttatcatttactttctgtatatatagtttaataacctgcttgggtgtaatttgccaagcttgaattctttaatgcatttgcataaattctatactgtttagagcttaaagctacagaagcattgttaggaattgcttggacactgaattttaaactttttgacattgttaacaagcatgttcatcttttcttgtcactagtccaagaaaaatatgcttaatgtatattacaaaggctttgtatatgttaacctgttttaatgccaaaagtttgctttgtccacaatttccttaagacctcttcagaaagggatttgtttgccttaatgaatactgttgggaaaaaacacagtataatgagtgaaaagggcagaagcaagaaatttctacatcttagcgactccaagaagaatgagtatccacatttagatggcacattatgaggactttaatctttccttaaacacaataatgttttcttttttcttttattcacatgatttctaagtatatttttcatgcaggacagtttttcaaccttgatgtacagtgactgtgtaaaatttttctttcagtggcaacctctataatctttaaaatatggtgagcatcttgtctgttttgaaggggatatgacaataaatctatcagatggaaaatcctgttacaaagtagaaaagctttagtaatttactcagtgtggtggttttatcctttttttctttttctcccttggtctataatgaaattgttacagcagtgcaaaataaaatcctatgtataaaagtgtt

SEQ ID NO: 6784 - protein, 181 aa, Homo sapiens; identical to SEQ ID NO: 6776

SEQ ID NO: 6785 - DNA, 3260 bp, Homo sapiens
tcctccggcggcgccggcggccgcagaacttccgggtcggcgcggaggcggggcggaggcgccgcggcggctgttattgttcggctgggctcggtcgggcgctgtctccctcggctctgcgggtgtcagttcgtccggcttcctcacagcccctcactcccggcggctgacagcagcagcggcggcggcgggcggcgcctggcgtttcgaggctgagcggcaccggggttggggcgcggaggaggagcagcagcgggaggaggagccgtgtgccctggcactgagcggccgcggccatggcgtacgcctatctcttcaagtacatcataatcggcgacacaggtgttggtaaatcatgcttattgctacagtttacagacaagaggtttcagccagtgcatgaccttactattggtgtagagttcggtgctcgaatgataactattgatgggaaacagataaaacttcagatatgggatacggcagggcaagaatcctttcgttccatcacaaggtcgtattacagaggtgcagcaggagctttactagtttacgatattacacggagagatacattcaaccacttgacaacctggttagaagatgcccgccagcattccaattccaacatggtcattatgcttattggaaataaaagtgatttagaatctagaagagaagtaaaaaaagaagaaggtgaagcttttgcacgagaacatggactcatcttcatggaaacgtctgctaagactgcttccaatgtagaagaggcatttattaatacagcaaaagaaatttatgaaaaaattcaagaaggagtctttgacattaataatgaggcaaatggcattaaaattggccctcagcatgctgctaccaatgcaacacatgcaggcaatcagggaggacagcaggctgggggcggctgctgttgagtctgtttttactgtctagctgcccaacggggcctactcacttattctttcaccccctctcctcctgctcagctgagacatgaaactatttgaaatggctttatgtcacagaagactttaatccgtcaaattcttgtataactttgaataaatggttaatgttcacttaaaagacagattttggagattgtattcatatctatttgcatttgatttctaggtcaattgatgtgattatttttgttaaatgttgtcttgtgcccttaactacgaactgaattgtattaaacactacaaagtcatcttgagtattttaaatcggtttgtgtagttaggtttcccaacatctgtggttacctaatgtttaatattatagaactgtcctcagaaactttgtcaattttcacggctataaggaaacagaaggactcttttaattctgtatttatcatttactttctgtatatatagtttaataacctgcttgggtgtaatttgccaagcttgaattctttaatgcatttgcataaattctatactgtttagagcttaaagctacagaagcattgttaggaattgcttggacactgaattttaaactttttgacattgttaacaagcatgttcatcttttcttgtcactagtccaagaaaaatatgcttaatgtatattacaaaggctttgtatatgttaacctgttttaatgccaaaagtttgctttgtccacaatttccttaagacctcttcagaaagggatttgtttgccttaatgaatactgttgggaaaaaacacagtataatgagtgaaaagggcagaagcaagaaatttctacatcttagcgactccaagaagaatgagtatccacatttagatggcacattatgaggactttaatctttccttaaacacaataatgttttcttttttcttttattcacatgatttctaagtatatttttcatgcaggacagtttttcaaccttgatgtacagtgactgtgtaaaatttttctttcagtggcaacctctataatctttaaaatatggtgagcatcttgtctgttttgaaggggatatgacaataaatctatcagatggaaaatcctgttacaaagtagaaaagctttagtaatttactcagtgtggtggttttatcctttttttctttttctcccttggtctataatgaaattgttacagcagtgcaaaataaaatcctatgtataaaagtgttctttttttttattatgaccacctcttttttaatgtatttttagtccacttacagcttttacatgggtttaagcatgttttttaaaagggtcagaatggttaacactcaaccctttttaaaaattttgctaaaatgcgacaaatctcaccatactgaaattatttttgttgatggtgtaagcagtgtaagcaagtgttttctcctgaactagcacaaaagcacttatgcctgaaagaaagcataaagaagttctaactctgaaactaactactttcatttcgctcatggccttcaactttctacaggtcttccctgaagattcagcagtactctctcaaaggtttgacagtactcttgtgggaaatcaccaaatgctgtcatagttttgttttaactgtctccttgagggcagagggaagggtgagagaaaatctgttttcatgggtatttgtagtacagcctttttttctttcaagtggctgtatcaaattcactggtcttactaatcactgtctttaccagtgagtacaaaaagttaaggcaactaggacaggtactgctctataccaagaagagaatgattctttggaaattgttatttttaagcttctgttaatttttccagaagtttagtgcgtttcttttccatactttctcccctaattcttttatttgaagaagagaacttaatggcaaataaacaacaaaccaggacatgcattttaataccctaaggaaaaatggaaccctcaaatataactcctcccacaaccaccctaatgtgcctcagtctggggcagcaggtggacttctcaatagttcttttccacattctctacaaatcacatctaccgttaaggaatatgttatgaatcctttctgttaattgagaaagcaatgttattgtctgtgatttccagtctttgctcattttattatccctgtcaaataatgtaatattggtacctgcagttgaatttgtaatattgtaattgaatttttagttgatcttcgatcagtttttatagcatctatggacatagaaaatcagtcactgaaaaaaataaacacagctttcaatgtctcactc

SEQ ID NO: 6786 - protein, 212 aa, Homo sapiens; identical to SEQ ID NO: 966

SEQ ID NO: 6787 - DNA, 3148 bp, Homo sapiens
tcctccggcggcgccggcggccgcagaacttccgggtcggcgcggaggcggggcggaggcgccgcggcggctgttattgttcggctgggctcggtcgggcgctgtctccctcggctctgcgggtgtcagttcgtccggcttcctcacagcccctcactcccggcggctgacagcagcagcggcggcggcgggcggcgcctggcgtttcgaggctgagcggcaccggggttggggcgcggaggaggagcagcagcgggaggaggagccgtgtgccctggcactgagcggccgcggccatggcgtacgcctatctcttcaagtacatcataatcggcgacacaggtgttggtaaatcatgcttattgctacagtttacagacaagaggtttcagccagtgcatgaccttactattggtgtagagttcggtgctcgaatgataactattgatgggaaacagataaaacttcagatatgggatacggcagggcaagaatcctttcgttccatcacaaggtcgtattacagaggtgcagcaggagctttactagtttacgatattacacggagagatacattcaaccacttgacaacctggttagaagatgcccgccagcattccaattccaacatggtcattatgcttattggaaataaaaggcatttattaatacagcaaaagaaatttatgaaaaaattcaagaaggagtctttgacattaataatgaggcaaatggcattaaaattggccctcagcatgctgctaccaatgcaacacatgcaggcaatcagggaggacagcaggctgggggcggctgctgttgagtctgtttttactgtctagctgcccaacggggcctactcacttattctttcaccccctctcctcctgctcagctgagacatgaaactatttgaaatggctttatgtcacagaagactttaatccgtcaaattcttgtataactttgaataaatggttaatgttcacttaaaagacagattttggagattgtattcatatctatttgcatttgatttctaggtcaattgatgtgattatttttgttaaatgttgtcttgtgcccttaactacgaactgaattgtattaaacactacaaagtcatcttgagtattttaaatcggtttgtgtagttaggtttcccaacatctgtggttacctaatgtttaatattatagaactgtcctcagaaactttgtcaattttcacggctataaggaaacagaaggactcttttaattctgtatttatcatttactttctgtatatatagtttaataacctgcttgggtgtaatttgccaagcttgaattctttaatgcatttgcataaattctatactgtttagagcttaaagctacagaagcattgttaggaattgcttggacactgaattttaaactttttgacattgttaacaagcatgttcatcttttcttgtcactagtccaagaaaaatatgcttaatgtatattacaaaggctttgtatatgttaacctgttttaatgccaaaagtttgctttgtccacaatttccttaagacctcttcagaaagggatttgtttgccttaatgaatactgttgggaaaaaacacagtataatgagtgaaaagggcagaagcaagaaatttctacatcttagcgactccaagaagaatgagtatccacatttagatggcacattatgaggactttaatctttccttaaacacaataatgttttcttttttcttttattcacatgatttctaagtatatttttcatgcaggacagtttttcaaccttgatgtacagtgactgtgtaaaatttttctttcagtggcaacctctataatctttaaaatatggtgagcatcttgtctgttttgaaggggatatgacaataaatctatcagatggaaaatcctgttacaaagtagaaaagctttagtaatttactcagtgtggtggttttatcctttttttctttttctcccttggtctataatgaaattgttacagcagtgcaaaataaaatcctatgtataaaagtgttctttttttttattatgaccacctcttttttaatgtatttttagtccacttacagcttttacatgggtttaagcatgttttttaaaagggtcagaatggttaacactcaaccctttttaaaaattttgctaaaatgcgacaaatctcaccatactgaaattatttttgttgatggtgtaagcagtgtaagcaagtgttttctcctgaactagcacaaaagcacttatgcctgaaagaaagcataaagaagttctaactctgaaactaactactttcatttcgctcatggccttcaactttctacaggtcttccctgaagattcagcagtactctctcaaaggtttgacagtactcttgtgggaaatcaccaaatgctgtcatagttttgttttaactgtctccttgagggcagagggaagggtgagagaaaatctgttttcatgggtatttgtagtacagcctttttttctttcaagtggctgtatcaaattcactggtcttactaatcactgtctttaccagtgagtacaaaaagttaaggcaactaggacaggtactgctctataccaagaagagaatgattctttggaaattgttatttttaagcttctgttaatttttccagaagtttagtgcgtttcttttccatactttctcccctaattcttttatttgaagaagagaacttaatggcaaataaacaacaaaccaggacatgcattttaataccctaaggaaaaatggaaccctcaaatataactcctcccacaaccaccctaatgtgcctcagtctggggcagcaggtggacttctcaatagttcttttccacattctctacaaatcacatctaccgttaaggaatatgttatgaatcctttctgttaattgagaaagcaatgttattgtctgtgatttccagtctttgctcattttattatccctgtcaaataatgtaatattggtacctgcagttgaatttgtaatattgtaattgaatttttagttgatcttcgatcagtttttatagcatctatggacatagaaaatcagtcactgaaaaaaataaacacagctttcaatgtctcactc

SEQ ID NO: 6788 - protein, 181 aa, Homo sapiens; identical to SEQ ID NO: 6776

SEQ ID NO: 6789 - DNA, 3810 bp, Homo sapiens
tcctccggcggcgccggcggccgcagaacttccgggtcggcgcggaggcggggcggaggcgccgcggcggctgttattgttcggctgggctcggtcgggcgctgtctccctcggctctgcgggtgtcagttcgtccggcttcctcacagcccctcactcccggcggctgacagcagcagcggcggcggcgggcggcgcctggcgtttcgaggctgagcggcaccggggttggggcgcggaggaggagcagcagcgggaggaggagccgtgtgccctggcactgagcggccgcggccatggcgtacgcctatctcttcaagtacatcataatcggcgacacaggtgttggtaaatcatgcttattgctacagtttacagacaagaggtttcagccagtgcatgaccttactattggtgtagagttcggtgctcgaatgataactattgatgggaaacagataaaacttcagatatgggatacggcagggcaagaatcctttcgttccatcacaaggtcgtattacagaggtgcagcaggagctttactagtttacgatattacacggagagatacattcaaccacttgacaacctggttagaagatgcccgccagcattccaattccaacatggtcattatgcttattggaaataaaagtgatttagaatctagaagagaagtaaaaaaagaagaaggtgaagcttttgcacgagaacatggactcatcttcatggaaacgtctgctaagactgcttccaatgtagaagaggcatttattaatacagcaaaagaaatttatgaaaaaattcaagaaggagtctttgacattaataatgaggcaaatggcattaaaattggccctcagcatgctgctaccaatgcaacacatgcaggcaatcagggaggacagcaggctgggggcggctgctgttgagtctgtttttactgtctagctgcccaacggggcctactcacttattctttcaccccctctcctcctgctcagctgagacatgaaactatttgaaatggctttatgtcacagaagactttaatccgtcaaattcttgtataactttgaataaatggttaatgttcacttaaaagacagattttggagattgtattcatatctatttgcatttgatttctaggtcaattgatgtgattatttttgttaaatgttgtcttgtgcccttaactacgaactgaattgtattaaacactacaaagtcatcttgagtattttaaatcggtttgtgtagttaggtttcccaacatctgtggttacctaatgtttaatattatagaactgtcctcagaaactttgtcaattttcacggctataaggaaacagaaggactcttttaattctgtatttatcatttactttctgtatatatagtttaataacctgcttgggtgtaatttgccaagcttgaattctttaatgcatttgcataaattctatactgtttagagcttaaagctacagaagcattgttaggaattgcttggacactgaattttaaactttttgacattgttaacaagcatgttcatcttttcttgtcactagtccaagaaaaatatgcttaatgtatattacaaaggctttgtatatgttaacctgttttaatgccaaaagtttgctttgtccacaatttccttaagacctcttcagaaagggatttgtttgccttaatgaatactgttgggaaaaaacacagtataatgagtgaaaagggcagaagcaagaaatttctacatcttagcgactccaagaagaatgagtatccacatttagatggcacattatgaggactttaatctttccttaaacacaataatgttttcttttttcttttattcacatgatttctaagtatatttttcatgcaggacagtttttcaaccttgatgtacagtgactgtgtaaaatttttctttcagtggcaacctctataatctttaaaatatggtgagcatcttgtctgttttgaaggggatatgacaataaatctatcagatggaaaatcctgttacaaagtagaaaagctttagtaatttactcagtgtggtggttttatcctttttttctttttctcccttggtctataatgaaattgttacagcagtgcaaaataaaatcctatgtataaaagtgttctttttttttattatgaccacctcttttttaatgtatttttagtccacttacagcttttacatgggtttaagcatgttttttaaaagggtcagaatggttaacactcaaccctttttaaaaattttgctaaaatgcgacaaatctcaccatactgaaattatttttgttgatggtgtaagcagtgtaagcaagtgttttctcctgaactagcacaaaagcacttatgcctgaaagaaagcataaagaagttctaactctgaaactaactactttcatttcgctcatggccttcaactttctacaggtcttccctgaagattcagcagtactctctcaaaggtttgacagtactcttgtgggaaatcaccaaatgctgtcatagttttgttttaactgtctccttgagggcagagggaagggtgagagaaaatctgttttcatgggtatttgtagtacagcctttttttctttcaagtggctgtatcaaattcactggtcttactaatcactgtctttaccagtgagtacaaaaagttaaggcaactaggacaggtactgctctataccaagaagagaatgattctttggaaattgttatttttaagcttctgttaatttttccagaagtttagtgcgtttcttttccatactttctcccctaattcttttatttgaagaagagaacttaatggcaaataaacaacaaaccaggacatgcattttaataccctaaggaaaaatggaaccctcaaatataactcctcccacaaccaccctaatgtgcctcagtctggggcagcaggtggacttctcaatagttcttttccacattctctacaaatcacatctaccgttaaggaatatgttatgaatcctttctgttaattgagaaagcaatgttattgtctgtgatttccagtctttgctcattttattatccctgtcaaataatgtaatattggtacctgcagttgaatttgtaatattgtaattgaatttttagttgatcttcgatcagtttttatagcatctatggacatagaaaatcagtcactgaaaaaaataaacacagctttcaatgtctcactcaacatgtaacattcaaaattgtgatcttcataaagacattgttaccattcgtcttgcaaatttaagacaactgaatgaaaagccaattttttgaaagaatgtggcatataattagatatacaactgaaacaggatatacaactgcatacaatttgtttttaatgatattttaaaatagcctgttagcaggaaaatagtccctatttatctgctaatggtcaaaaagagttaggatataaatcgtaccaaaatgtttccaatcactcagaaaaactgattcatgtctggctttgcaacaccttaaacatttattctgtcatagatagtaaagccccatctcagtttatttagtcctgaggttggcagcatggggtttgactatatgagctaaaagatacacaaagagataacgctgtttcataataaacaggaattgactatacaaataggtaaaccagcatatctacctgtatttctcagagtttagatgtgtgctttatgtttacattaaaataaagcctaacgccacagtagatcatctcatactgca

SEQ ID NO: 6790 - protein, 212 aa, Homo sapiens; identical to SEQ ID NO: 966

SEQ ID NO: 6791 - DNA, 3698 bp, Homo sapiens
tcctccggcggcgccggcggccgcagaacttccgggtcggcgcggaggcggggcggaggcgccgcggcggctgttattgttcggctgggctcggtcgggcgctgtctccctcggctctgcgggtgtcagttcgtccggcttcctcacagcccctcactcccggcggctgacagcagcagcggcggcggcgggcggcgcctggcgtttcgaggctgagcggcaccggggttggggcgcggaggaggagcagcagcgggaggaggagccgtgtgccctggcactgagcggccgcggccatggcgtacgcctatctcttcaagtacatcataatcggcgacacaggtgttggtaaatcatgcttattgctacagtttacagacaagaggtttcagccagtgcatgaccttactattggtgtagagttcggtgctcgaatgataactattgatgggaaacagataaaacttcagatatgggatacggcagggcaagaatcctttcgttccatcacaaggtcgtattacagaggtgcagcaggagctttactagtttacgatattacacggagagatacattcaaccacttgacaacctggttagaagatgcccgccagcattccaattccaacatggtcattatgcttattggaaataaaaggcatttattaatacagcaaaagaaatttatgaaaaaattcaagaaggagtctttgacattaataatgaggcaaatggcattaaaattggccctcagcatgctgctaccaatgcaacacatgcaggcaatcagggaggacagcaggctgggggcggctgctgttgagtctgtttttactgtctagctgcccaacggggcctactcacttattctttcaccccctctcctcctgctcagctgagacatgaaactatttgaaatggctttatgtcacagaagactttaatccgtcaaattcttgtataactttgaataaatggttaatgttcacttaaaagacagattttggagattgtattcatatctatttgcatttgatttctaggtcaattgatgtgattatttttgttaaatgttgtcttgtgcccttaactacgaactgaattgtattaaacactacaaagtcatcttgagtattttaaatcggtttgtgtagttaggtttcccaacatctgtggttacctaatgtttaatattatagaactgtcctcagaaactttgtcaattttcacggctataaggaaacagaaggactcttttaattctgtatttatcatttactttctgtatatatagtttaataacctgcttgggtgtaatttgccaagcttgaattctttaatgcatttgcataaattctatactgtttagagcttaaagctacagaagcattgttaggaattgcttggacactgaattttaaactttttgacattgttaacaagcatgttcatcttttcttgtcactagtccaagaaaaatatgcttaatgtatattacaaaggctttgtatatgttaacctgttttaatgccaaaagtttgctttgtccacaatttccttaagacctcttcagaaagggatttgtttgccttaatgaatactgttgggaaaaaacacagtataatgagtgaaaagggcagaagcaagaaatttctacatcttagcgactccaagaagaatgagtatccacatttagatggcacattatgaggactttaatctttccttaaacacaataatgttttcttttttcttttattcacatgatttctaagtatatttttcatgcaggacagtttttcaaccttgatgtacagtgactgtgtaaaatttttctttcagtggcaacctctataatctttaaaatatggtgagcatcttgtctgttttgaaggggatatgacaataaatctatcagatggaaaatcctgttacaaagtagaaaagctttagtaatttactcagtgtggtggttttatcctttttttctttttctcccttggtctataatgaaattgttacagcagtgcaaaataaaatcctatgtataaaagtgttctttttttttattatgaccacctcttttttaatgtatttttagtccacttacagcttttacatgggtttaagcatgttttttaaaagggtcagaatggttaacactcaaccctttttaaaaattttgctaaaatgcgacaaatctcaccatactgaaattatttttgttgatggtgtaagcagtgtaagcaagtgttttctcctgaactagcacaaaagcacttatgcctgaaagaaagcataaagaagttctaactctgaaactaactactttcatttcgctcatggccttcaactttctacaggtcttccctgaagattcagcagtactctctcaaaggtttgacagtactcttgtgggaaatcaccaaatgctgtcatagttttgttttaactgtctccttgagggcagagggaagggtgagagaaaatctgttttcatgggtatttgtagtacagcctttttttctttcaagtggctgtatcaaattcactggtcttactaatcactgtctttaccagtgagtacaaaaagttaaggcaactaggacaggtactgctctataccaagaagagaatgattctttggaaattgttatttttaagcttctgttaatttttccagaagtttagtgcgtttcttttccatactttctcccctaattcttttatttgaagaagagaacttaatggcaaataaacaacaaaccaggacatgcattttaataccctaaggaaaaatggaaccctcaaatataactcctcccacaaccaccctaatgtgcctcagtctggggcagcaggtggacttctcaatagttcttttccacattctctacaaatcacatctaccgttaaggaatatgttatgaatcctttctgttaattgagaaagcaatgttattgtctgtgatttccagtctttgctcattttattatccctgtcaaataatgtaatattggtacctgcagttgaatttgtaatattgtaattgaatttttagttgatcttcgatcagtttttatagcatctatggacatagaaaatcagtcactgaaaaaaataaacacagctttcaatgtctcactcaacatgtaacattcaaaattgtgatcttcataaagacattgttaccattcgtcttgcaaatttaagacaactgaatgaaaagccaattttttgaaagaatgtggcatataattagatatacaactgaaacaggatatacaactgcatacaatttgtttttaatgatattttaaaatagcctgttagcaggaaaatagtccctatttatctgctaatggtcaaaaagagttaggatataaatcgtaccaaaatgtttccaatcactcagaaaaactgattcatgtctggctttgcaacaccttaaacatttattctgtcatagatagtaaagccccatctcagtttatttagtcctgaggttggcagcatggggtttgactatatgagctaaaagatacacaaagagataacgctgtttcataataaacaggaattgactatacaaataggtaaaccagcatatctacctgtatttctcagagtttagatgtgtgctttatgtttacattaaaataaagcctaacgccacagtagatcatctcatactgca

SEQ ID NO: 6792 - protein, 181 aa, Homo sapiens; identical to SEQ ID NO: 6776

SEQ ID NO: 6793 - DNA, 679 bp, Homo sapiens
cctccggcggcgccggcggccgcagaacttccgggtcggcgcggaggcggggcggaggcgccgcggcggctgttattgttcggctgggctcggtcgggcgctgtctccctcggctctgcgggtgtcagttcgtccggcttcctcacagcccctcactcccggcggctgacagcagcagcggcggcggcgggcggcgcctggcgtttcgaggctgagcggcaccggggttggggcgcggaggaggagcagcagcgggaggaggagccgtgtgccctggcactgagcggccgcggccatggcgtacgcctatctcttcaagtacatcataatcggcgacacaggtgttggtaaatcatgcttattgctacagtttacagacaagaggtttcagccagtgcatgaccttactattggtaagttttataaaagggatgagaagcactaaaagttttggatagtttaaatggaaaatgctagaaggtccattctactagtgatgatgctaaaatcagtgaaactggatttgttgttacgctgtttaatctctgtcacttttttaaaaatatgtgtagtaaaaataaatattacctaactttgtagaagtggttaaagaagctactgctgaaagacagtagtttttaagatttcaattgtaattagcgatgaaacaatttaagag

SEQ ID NO: 6794 - protein, 49 aa, Homo sapiens
MAYAYLFKYIIIGDTGVGKSCLLLQFTDKRFQPVHDLTIGKFYKRDEKH

SEQ ID NO: 6795 - DNA, 1161 bp, Homo sapiens
ggcggcgccggcggccgcagaacttccgggtcggcgcggaggcggggcggaggcgccgcggcggctgttattgttcggctgggctcggtcgggcgctgtctccctcggctctgcgggtgtcagttcgtccggcttcctcacagcccctcactcccggcggctgacagcagcagcggcggcggcgggcggcgcctggcgtttcgaggctgagcggcaccggggttggggcgcggaggaggagcagcagcgggaggaggagccgtgtgccctggcactgagcggccgcggccatggcgtacgcctatctcttcaagtacatcataatcggcgacacaggtgttggtaaatcatgcttattgctacagtttacagacaagaggtttcagccagtgcatgaccttactattggtgtagagttcggtgctcgaatgataactattgatgggaaacagataaaacttcagatatgggatacggggaagtcaaagaagaaacatacgttgcccctggtttctgttcattggcagaaaaaaggcagaggcagggcaagaatcctttcgttccatcacaaggtcgtattacagaggtgcagcaggagctttactagtttacgatattacacggagagatacattcaaccacttgacaacctggttagaagatgcccgccagcattccaattccaacatggtcattatgcttattggaaataaaagtgatttagaatctagaagagaagtaaaaaaagaagaaggtgaagcttttgcacgagaacatggactcatcttcatggaaacgtctgctaagactgcttccaatgtagaagaggcatttattaatacagcaaaagaaatttatgaaaaaattcaagaaggagtctttgacattaataatgaggcaaatggcattaaaattggccctcagcatgctgctaccaatgcaacacatgcaggcaatcagggaggacagcaggctgggggcggctgctgttgagtctgtttttactgtctagctgcccaacggggcctactcacttattctttcaccccctctcctcctgctcagctgagacatgaaactatttgaaatggctttatgtcacagaagactttaatccgtcaaattcttgtataactttgaataaatggttaatgttcactt

SEQ ID NO: 6796 - protein, 140 aa, Homo sapiens
MAYAYLFKYIIIGDTGVGKSCLLLQFTDKRFQPVHDLTIGVEFGARMITIDGKQIKLQIWDTGKSKKKHTLPLVSVHWQKKGRGRARILSFHHKVVLQRCSRSFTSLRYYTERYIQPLDNLVRRCPPAFQFQHGHYAYWK

SEQ ID NO: 6797 - DNA, 2110 bp, Homo sapiens
ggcggcgccggcggccgcagaacttccgggtcggcgcggaggcggggcggaggcgccgcggcggctgttattgttcggctgggctcggtcgggcgctgtctccctcggctctgcgggtgtcagttcgtccggcttcctcacagcccctcactcccggcggctgacagcagcagcggcggcggcgggcggcgcctggcgtttcgaggctgagcggcaccggggttggggcgcggaggaggagcagcagcgggaggaggagccgtgtgccctggcactgagcggccgcggccatggcgtacgcctatctcttcaagtacatcataatcggcgacacaggtgttggtaaatcatgcttattgctacagtttacagacaagaggtttcagccagtgcatgaccttactattggtgtagagttcggtgctcgaatgataactattgatgggaaacagataaaacttcagatatgggatacggggaagtcaaagaagaaacatacgttgcccctggtttctgttcattggcagaaaaaaggcagaggcagggcaagaatcctttcgttccatcacaaggtcgtattacagaggtgcagcaggagctttactagtttacgatattacacggagagatacattcaaccacttgacaacctggttagaagatgcccgccagcattccaattccaacatggtcattatgcttattggaaataaaagtgatttagaatctagaagagaagtaaaaaaagaagaaggtgaagcttttgcacgagaacatggactcatcttcatggaaacgtctgctaagactgcttccaatgtagaagaggcatttattaatacagcaaaagaaatttatgaaaaaattcaagaaggagtctttgacattaataatgaggcaaatggcattaaaattggccctcagcatgctgctaccaatgcaacacatgcaggcaatcagggaggacagcaggctgggggcggctgctgttgagtctgtttttactgtctagctgcccaacggggcctactcacttattctttcaccccctctcctcctgctcagctgagacatgaaactatttgaaatggctttatgtcacagaagactttaatccgtcaaattcttgtataactttgaataaatggttaatgttcacttaaaagacagattttggagattgtattcatatctatttgcatttgatttctaggtcaattgatgtgattatttttgttaaatgttgtcttgtgcccttaactacgaactgaattgtattaaacactacaaagtcatcttgagtattttaaatcggtttgtgtagttaggtttcccaacatctgtggttacctaatgtttaatattatagaactgtcctcagaaactttgtcaattttcacggctataaggaaacagaaggactcttttaattctgtatttatcatttactttctgtatatatagtttaataacctgcttgggtgtaatttgccaagcttgaattctttaatgcatttgcataaattctatactgtttagagcttaaagctacagaagcattgttaggaattgcttggacactgaattttaaactttttgacattgttaacaagcatgttcatcttttcttgtcactagtccaagaaaaatatgcttaatgtatattacaaaggctttgtatatgttaacctgttttaatgccaaaagtttgctttgtccacaatttccttaagacctcttcagaaagggatttgtttgccttaatgaatactgttgggaaaaaacacagtataatgagtgaaaagggcagaagcaagaaatttctacatcttagcgactccaagaagaatgagtatccacatttagatggcacattatgaggactttaatctttccttaaacacaataatgttttcttttttcttttattcacatgatttctaagtatatttttcatgcaggacagtttttcaaccttgatgtacagtgactgtgtaaaatttttctttcagtggcaacctctataatctttaaaatatggtgagcatcttgtctgttttgaaggggatatgacaataaatctatcagatggaaaatcctgttacaaagt

SEQ ID NO: 6798 - protein, 140 aa, Homo sapiens; identical to SEQ ID NO: 6796

SEQ ID NO: 6799 - DNA, 2228 bp, Homo sapiens
ggcggcgccggcggccgcagaacttccgggtcggcgcggaggcggggcggaggcgccgcggcggctgttattgttcggctgggctcggtcgggcgctgtctccctcggctctgcgggtgtcagttcgtccggcttcctcacagcccctcactcccggcggctgacagcagcagcggcggcggcgggcggcgcctggcgtttcgaggctgagcggcaccggggttggggcgcggaggaggagcagcagcgggaggaggagccgtgtgccctggcactgagcggccgcggccatggcgtacgcctatctcttcaagtacatcataatcggcgacacaggtgttggtaaatcatgcttattgctacagtttacagacaagaggtttcagccagtgcatgaccttactattggtgtagagttcggtgctcgaatgataactattgatgggaaacagataaaacttcagatatgggatacggggaagtcaaagaagaaacatacgttgcccctggtttctgttcattggcagaaaaaaggcagaggcagggcaagaatcctttcgttccatcacaaggtcgtattacagaggtgcagcaggagctttactagtttacgatattacacggagagatacattcaaccacttgacaacctggttagaagatgcccgccagcattccaattccaacatggtcattatgcttattggaaataaaagtgatttagaatctagaagagaagtaaaaaaagaagaaggtgaagcttttgcacgagaacatggactcatcttcatggaaacgtctgctaagactgcttccaatgtagaagaggcatttattaatacagcaaaagaaatttatgaaaaaattcaagaaggagtctttgacattaataatgaggcaaatggcattaaaattggccctcagcatgctgctaccaatgcaacacatgcaggcaatcagggaggacagcaggctgggggcggctgctgttgagtctgtttttactgtctagctgcccaacggggcctactcacttattctttcaccccctctcctcctgctcagctgagacatgaaactatttgaaatggctttatgtcacagaagactttaatccgtcaaattcttgtataactttgaataaatggttaatgttcacttaaaagacagattttggagattgtattcatatctatttgcatttgatttctaggtcaattgatgtgattatttttgttaaatgttgtcttgtgcccttaactacgaactgaattgtattaaacactacaaagtcatcttgagtattttaaatcggtttgtgtagttaggtttcccaacatctgtggttacctaatgtttaatattatagaactgtcctcagaaactttgtcaattttcacggctataaggaaacagaaggactcttttaattctgtatttatcatttactttctgtatatatagtttaataacctgcttgggtgtaatttgccaagcttgaattctttaatgcatttgcataaattctatactgtttagagcttaaagctacagaagcattgttaggaattgcttggacactgaattttaaactttttgacattgttaacaagcatgttcatcttttcttgtcactagtccaagaaaaatatgcttaatgtatattacaaaggctttgtatatgttaacctgttttaatgccaaaagtttgctttgtccacaatttccttaagacctcttcagaaagggatttgtttgccttaatgaatactgttgggaaaaaacacagtataatgagtgaaaagggcagaagcaagaaatttctacatcttagcgactccaagaagaatgagtatccacatttagatggcacattatgaggactttaatctttccttaaacacaataatgttttcttttttcttttattcacatgatttctaagtatatttttcatgcaggacagtttttcaaccttgatgtacagtgactgtgtaaaatttttctttcagtggcaacctctataatctttaaaatatggtgagcatcttgtctgttttgaaggggatatgacaataaatctatcagatggaaaatcctgttacaaagtagaaaagctttagtaatttactcagtgtggtggttttatcctttttttctttttctcccttggtctataatgaaattgttacagcagtgcaaaataaaatcctatgtataaaagtgtt

SEQ ID NO: 6800 - protein, 140 aa, Homo sapiens; identical to SEQ ID NO: 6796

SEQ ID NO: 6801 - DNA, 3318 bp, Homo sapiens
ggcggcgccggcggccgcagaacttccgggtcggcgcggaggcggggcggaggcgccgcggcggctgttattgttcggctgggctcggtcgggcgctgtctccctcggctctgcgggtgtcagttcgtccggcttcctcacagcccctcactcccggcggctgacagcagcagcggcggcggcgggcggcgcctggcgtttcgaggctgagcggcaccggggttggggcgcggaggaggagcagcagcgggaggaggagccgtgtgccctggcactgagcggccgcggccatggcgtacgcctatctcttcaagtacatcataatcggcgacacaggtgttggtaaatcatgcttattgctacagtttacagacaagaggtttcagccagtgcatgaccttactattggtgtagagttcggtgctcgaatgataactattgatgggaaacagataaaacttcagatatgggatacggggaagtcaaagaagaaacatacgttgcccctggtttctgttcattggcagaaaaaaggcagaggcagggcaagaatcctttcgttccatcacaaggtcgtattacagaggtgcagcaggagctttactagtttacgatattacacggagagatacattcaaccacttgacaacctggttagaagatgcccgccagcattccaattccaacatggtcattatgcttattggaaataaaagtgatttagaatctagaagagaagtaaaaaaagaagaaggtgaagcttttgcacgagaacatggactcatcttcatggaaacgtctgctaagactgcttccaatgtagaagaggcatttattaatacagcaaaagaaatttatgaaaaaattcaagaaggagtctttgacattaataatgaggcaaatggcattaaaattggccctcagcatgctgctaccaatgcaacacatgcaggcaatcagggaggacagcaggctgggggcggctgctgttgagtctgtttttactgtctagctgcccaacggggcctactcacttattctttcaccccctctcctcctgctcagctgagacatgaaactatttgaaatggctttatgtcacagaagactttaatccgtcaaattcttgtataactttgaataaatggttaatgttcacttaaaagacagattttggagattgtattcatatctatttgcatttgatttctaggtcaattgatgtgattatttttgttaaatgttgtcttgtgcccttaactacgaactgaattgtattaaacactacaaagtcatcttgagtattttaaatcggtttgtgtagttaggtttcccaacatctgtggttacctaatgtttaatattatagaactgtcctcagaaactttgtcaattttcacggctataaggaaacagaaggactcttttaattctgtatttatcatttactttctgtatatatagtttaataacctgcttgggtgtaatttgccaagcttgaattctttaatgcatttgcataaattctatactgtttagagcttaaagctacagaagcattgttaggaattgcttggacactgaattttaaactttttgacattgttaacaagcatgttcatcttttcttgtcactagtccaagaaaaatatgcttaatgtatattacaaaggctttgtatatgttaacctgttttaatgccaaaagtttgctttgtccacaatttccttaagacctcttcagaaagggatttgtttgccttaatgaatactgttgggaaaaaacacagtataatgagtgaaaagggcagaagcaagaaatttctacatcttagcgactccaagaagaatgagtatccacatttagatggcacattatgaggactttaatctttccttaaacacaataatgttttcttttttcttttattcacatgatttctaagtatatttttcatgcaggacagtttttcaaccttgatgtacagtgactgtgtaaaatttttctttcagtggcaacctctataatctttaaaatatggtgagcatcttgtctgttttgaaggggatatgacaataaatctatcagatggaaaatcctgttacaaagtagaaaagctttagtaatttactcagtgtggtggttttatcctttttttctttttctcccttggtctataatgaaattgttacagcagtgcaaaataaaatcctatgtataaaagtgttctttttttttattatgaccacctcttttttaatgtatttttagtccacttacagcttttacatgggtttaagcatgttttttaaaagggtcagaatggttaacactcaaccctttttaaaaattttgctaaaatgcgacaaatctcaccatactgaaattatttttgttgatggtgtaagcagtgtaagcaagtgttttctcctgaactagcacaaaagcacttatgcctgaaagaaagcataaagaagttctaactctgaaactaactactttcatttcgctcatggccttcaactttctacaggtcttccctgaagattcagcagtactctctcaaaggtttgacagtactcttgtgggaaatcaccaaatgctgtcatagttttgttttaactgtctccttgagggcagagggaagggtgagagaaaatctgttttcatgggtatttgtagtacagcctttttttctttcaagtggctgtatcaaattcactggtcttactaatcactgtctttaccagtgagtacaaaaagttaaggcaactaggacaggtactgctctataccaagaagagaatgattctttggaaattgttatttttaagcttctgttaatttttccagaagtttagtgcgtttcttttccatactttctcccctaattcttttatttgaagaagagaacttaatggcaaataaacaacaaaccaggacatgcattttaataccctaaggaaaaatggaaccctcaaatataactcctcccacaaccaccctaatgtgcctcagtctggggcagcaggtggacttctcaatagttcttttccacattctctacaaatcacatctaccgttaaggaatatgttatgaatcctttctgttaattgagaaagcaatgttattgtctgtgatttccagtctttgctcattttattatccctgtcaaataatgtaatattggtacctgcagttgaatttgtaatattgtaattgaatttttagttgatcttcgatcagtttttatagcatctatggacatagaaaatcagtcactgaaaaaaataaacacagctttcaatgtctcactc

SEQ ID NO: 6802 - protein, 140 aa, Homo sapiens; identical to SEQ ID NO: 6796

SEQ ID NO: 6803 - DNA, 3868 bp, Homo sapiens
ggcggcgccggcggccgcagaacttccgggtcggcgcggaggcggggcggaggcgccgcggcggctgttattgttcggctgggctcggtcgggcgctgtctccctcggctctgcgggtgtcagttcgtccggcttcctcacagcccctcactcccggcggctgacagcagcagcggcggcggcgggcggcgcctggcgtttcgaggctgagcggcaccggggttggggcgcggaggaggagcagcagcgggaggaggagccgtgtgccctggcactgagcggccgcggccatggcgtacgcctatctcttcaagtacatcataatcggcgacacaggtgttggtaaatcatgcttattgctacagtttacagacaagaggtttcagccagtgcatgaccttactattggtgtagagttcggtgctcgaatgataactattgatgggaaacagataaaacttcagatatgggatacggggaagtcaaagaagaaacatacgttgcccctggtttctgttcattggcagaaaaaaggcagaggcagggcaagaatcctttcgttccatcacaaggtcgtattacagaggtgcagcaggagctttactagtttacgatattacacggagagatacattcaaccacttgacaacctggttagaagatgcccgccagcattccaattccaacatggtcattatgcttattggaaataaaagtgatttagaatctagaagagaagtaaaaaaagaagaaggtgaagcttttgcacgagaacatggactcatcttcatggaaacgtctgctaagactgcttccaatgtagaagaggcatttattaatacagcaaaagaaatttatgaaaaaattcaagaaggagtctttgacattaataatgaggcaaatggcattaaaattggccctcagcatgctgctaccaatgcaacacatgcaggcaatcagggaggacagcaggctgggggcggctgctgttgagtctgtttttactgtctagctgcccaacggggcctactcacttattctttcaccccctctcctcctgctcagctgagacatgaaactatttgaaatggctttatgtcacagaagactttaatccgtcaaattcttgtataactttgaataaatggttaatgttcacttaaaagacagattttggagattgtattcatatctatttgcatttgatttctaggtcaattgatgtgattatttttgttaaatgttgtcttgtgcccttaactacgaactgaattgtattaaacactacaaagtcatcttgagtattttaaatcggtttgtgtagttaggtttcccaacatctgtggttacctaatgtttaatattatagaactgtcctcagaaactttgtcaattttcacggctataaggaaacagaaggactcttttaattctgtatttatcatttactttctgtatatatagtttaataacctgcttgggtgtaatttgccaagcttgaattctttaatgcatttgcataaattctatactgtttagagcttaaagctacagaagcattgttaggaattgcttggacactgaattttaaactttttgacattgttaacaagcatgttcatcttttcttgtcactagtccaagaaaaatatgcttaatgtatattacaaaggctttgtatatgttaacctgttttaatgccaaaagtttgctttgtccacaatttccttaagacctcttcagaaagggatttgtttgccttaatgaatactgttgggaaaaaacacagtataatgagtgaaaagggcagaagcaagaaatttctacatcttagcgactccaagaagaatgagtatccacatttagatggcacattatgaggactttaatctttccttaaacacaataatgttttcttttttcttttattcacatgatttctaagtatatttttcatgcaggacagtttttcaaccttgatgtacagtgactgtgtaaaatttttctttcagtggcaacctctataatctttaaaatatggtgagcatcttgtctgttttgaaggggatatgacaataaatctatcagatggaaaatcctgttacaaagtagaaaagctttagtaatttactcagtgtggtggttttatcctttttttctttttctcccttggtctataatgaaattgttacagcagtgcaaaataaaatcctatgtataaaagtgttctttttttttattatgaccacctcttttttaatgtatttttagtccacttacagcttttacatgggtttaagcatgttttttaaaagggtcagaatggttaacactcaaccctttttaaaaattttgctaaaatgcgacaaatctcaccatactgaaattatttttgttgatggtgtaagcagtgtaagcaagtgttttctcctgaactagcacaaaagcacttatgcctgaaagaaagcataaagaagttctaactctgaaactaactactttcatttcgctcatggccttcaactttctacaggtcttccctgaagattcagcagtactctctcaaaggtttgacagtactcttgtgggaaatcaccaaatgctgtcatagttttgttttaactgtctccttgagggcagagggaagggtgagagaaaatctgttttcatgggtatttgtagtacagcctttttttctttcaagtggctgtatcaaattcactggtcttactaatcactgtctttaccagtgagtacaaaaagttaaggcaactaggacaggtactgctctataccaagaagagaatgattctttggaaattgttatttttaagcttctgttaatttttccagaagtttagtgcgtttcttttccatactttctcccctaattcttttatttgaagaagagaacttaatggcaaataaacaacaaaccaggacatgcattttaataccctaaggaaaaatggaaccctcaaatataactcctcccacaaccaccctaatgtgcctcagtctggggcagcaggtggacttctcaatagttcttttccacattctctacaaatcacatctaccgttaaggaatatgttatgaatcctttctgttaattgagaaagcaatgttattgtctgtgatttccagtctttgctcattttattatccctgtcaaataatgtaatattggtacctgcagttgaatttgtaatattgtaattgaatttttagttgatcttcgatcagtttttatagcatctatggacatagaaaatcagtcactgaaaaaaataaacacagctttcaatgtctcactcaacatgtaacattcaaaattgtgatcttcataaagacattgttaccattcgtcttgcaaatttaagacaactgaatgaaaagccaattttttgaaagaatgtggcatataattagatatacaactgaaacaggatatacaactgcatacaatttgtttttaatgatattttaaaatagcctgttagcaggaaaatagtccctatttatctgctaatggtcaaaaagagttaggatataaatcgtaccaaaatgtttccaatcactcagaaaaactgattcatgtctggctttgcaacaccttaaacatttattctgtcatagatagtaaagccccatctcagtttatttagtcctgaggttggcagcatggggtttgactatatgagctaaaagatacacaaagagataacgctgtttcataataaacaggaattgactatacaaataggtaaaccagcatatctacctgtatttctcagagtttagatgtgtgctttatgtttacattaaaataaagcctaacgccacagtagatcatctcatactgca

SEQ ID NO: 6804 - protein, 140 aa, Homo sapiens; identical to SEQ ID NO: 6796

SEQ ID NO: 6805 - DNA, 397 bp, Homo sapiens
cggccgcggccatggcgtacgcctatctcttcaagtacatcataatcggcgacacaggtgttggtaaatcatgcttattgctacagtttacagacaagaggtttcagccagtgcatgaccttactattggtgtagagttcggtgctcgaatgataactattgatgggaaacagataaaacttcagatatgggatacggcagggcaagaatcctttcgttccatcacaaggtcgtattacagaggtgcagcaggagctttactagtttacgatattacacggagagatacattcaaccacttgacaacctggttagaagatgcccgccagcattccaattccaacatggtcattatgcttattggaaataaaagtgatttagaatctagaagagaagt

SEQ ID NO: 6806 - protein, 127 aa, Homo sapiens; identical to SEQ ID NO: 6772

SEQ ID NO: 6807 - DNA, 740 bp, Homo sapiens
ctacctgacaattgtacttttatttccattatattcaccctttagtttcctgtagaacgatatcatattttccagcttttaatccttttctctcatattagcaaaattccacagaatgaattgttcatattttctgtctacagtttccacctattttatgaacccattccacttatccctcctcccccatgtacagatctagctacttactcaacatctccttctcttagatgtctaatagacatcttaaactgaacatgtcccaaatagtttctgatttttccttctcaagtcttaagatgagtgtatatgtacatacccatattcatacccataccgcattcatacccatcctcccacctagatttactgttcttaacattttaaacaagtaaatataagtaaatagattttcccccaccaataaaaagtaaggtccatgacagcagatggttctctgttttgtttattgctgtatctgcacctggtacatactagggactttaaaaatatttgctaaatatactacctacttagtggaggaaaacttcataaagctgtacttgccattgcagggcttaatgcttgcattcctatatgttatactattcagttatgttgtttacaaataaggcacagcccactaattcccactacatttatttcactacctacaaatggacagtttgaccaatgttagtctagcggctaggccatctatatgttgatttcaccttctt

SEQ ID NO: 6808 - protein, 60 aa, Homo sapiens
MVLCFVYCCICTWYILGTLKIFAKYTTYLVEENFIKLYLPLQGLMLAFLYVILFSYVVYK

SEQ ID NO: 6809 - DNA, 1562 bp, Homo sapiens
gtgttctaaatactaaccctcataataccctgaataatacagttagtatgttaaaaattaattaaaagaatggtcatcacaactttgaattccatggtacactttccacaaatgcttctgtttgtaccatgttgattagtaatgtgaccctttctttcccatgtttagtgatttagaatctagaagagaagtaaaaaaagaagaaggtgaagcttttgcacgagaacatggactcatcttcatggaaacgtctgctaagactgcttccaatgtagaagaggcatttattaatacagcaaaagaaatttatgaaaaaattcaagaaggagtctttgacattaataatgaggcaaatggcattaaaattggccctcagcatgctgctaccaatgcaacacatgcaggcaatcagggaggacagcaggctgggggcggctgctgttgagtctgtttttactgtctagctgcccaacggggcctactcacttattctttcaccccctctcctcctgctcagctgagacatgaaactatttgaaatggctttatgtcacagaagactttaatccgtcaaattcttgtataactttgaataaatggttaatgttcacttaaaagacagattttggagattgtattcatatctatttgcatttgatttctaggtcaattgatgtgattatttttgttaaatgttgtcttgtgcccttaactacgaactgaattgtattaaacactacaaagtcatcttgagtattttaaatcggtttgtgtagttaggtttcccaacatctgtggttacctaatgtttaatattatagaactgtcctcagaaactttgtcaattttcacggctataaggaaacagaaggactcttttaattctgtatttatcatttactttctgtatatatagtttaataacctgcttgggtgtaatttgccaagcttgaattctttaatgcatttgcataaattctatactgtttagagcttaaagctacagaagcattgttaggaattgcttggacactgaattttaaactttttgacattgttaacaagcatgttcatcttttcttgtcactagtccaagaaaaatatgcttaatgtatattacaaaggctttgtatatgttaacctgttttaatgccaaaagtttgctttgtccacaatttccttaagacctcttcagaaagggatttgtttgccttaatgaatactgttgggaaaaaacacagtataatgagtgaaaagggcagaagcaagaaatttctacatcttagcgactccaagaagaatgagtatccacatttagatggcacattatgaggactttaatctttccttaaacacaataatgttttcttttttcttttattcacatgatttctaagtatatttttcatgcaggacagtttttcaaccttgatgtacagtgactgtgtaaaatttttctttcagtggcaacctctataatctttaaaatatggtgagcatcttgtctgttttgaaggggatatgacaataaatctatcagatggaaaatcctgttacaaagt

SEQ ID NO: 6810 - protein, 94 aa, Homo sapiens
MFSDLESRREVKKEEGEAFAREHGLIFMETSAKTASNVEEAFINTAKEIYEKIQEGVFDINNEANGIKIGPQHAATNATHAGNQGGQQAGGGCC

SEQ ID NO: 6811 - DNA, 1680 bp, Homo sapiens
gtgttctaaatactaaccctcataataccctgaataatacagttagtatgttaaaaattaattaaaagaatggtcatcacaactttgaattccatggtacactttccacaaatgcttctgtttgtaccatgttgattagtaatgtgaccctttctttcccatgtttagtgatttagaatctagaagagaagtaaaaaaagaagaaggtgaagcttttgcacgagaacatggactcatcttcatggaaacgtctgctaagactgcttccaatgtagaagaggcatttattaatacagcaaaagaaatttatgaaaaaattcaagaaggagtctttgacattaataatgaggcaaatggcattaaaattggccctcagcatgctgctaccaatgcaacacatgcaggcaatcagggaggacagcaggctgggggcggctgctgttgagtctgtttttactgtctagctgcccaacggggcctactcacttattctttcaccccctctcctcctgctcagctgagacatgaaactatttgaaatggctttatgtcacagaagactttaatccgtcaaattcttgtataactttgaataaatggttaatgttcacttaaaagacagattttggagattgtattcatatctatttgcatttgatttctaggtcaattgatgtgattatttttgttaaatgttgtcttgtgcccttaactacgaactgaattgtattaaacactacaaagtcatcttgagtattttaaatcggtttgtgtagttaggtttcccaacatctgtggttacctaatgtttaatattatagaactgtcctcagaaactttgtcaattttcacggctataaggaaacagaaggactcttttaattctgtatttatcatttactttctgtatatatagtttaataacctgcttgggtgtaatttgccaagcttgaattctttaatgcatttgcataaattctatactgtttagagcttaaagctacagaagcattgttaggaattgcttggacactgaattttaaactttttgacattgttaacaagcatgttcatcttttcttgtcactagtccaagaaaaatatgcttaatgtatattacaaaggctttgtatatgttaacctgttttaatgccaaaagtttgctttgtccacaatttccttaagacctcttcagaaagggatttgtttgccttaatgaatactgttgggaaaaaacacagtataatgagtgaaaagggcagaagcaagaaatttctacatcttagcgactccaagaagaatgagtatccacatttagatggcacattatgaggactttaatctttccttaaacacaataatgttttcttttttcttttattcacatgatttctaagtatatttttcatgcaggacagtttttcaaccttgatgtacagtgactgtgtaaaatttttctttcagtggcaacctctataatctttaaaatatggtgagcatcttgtctgttttgaaggggatatgacaataaatctatcagatggaaaatcctgttacaaagtagaaaagctttagtaatttactcagtgtggtggttttatcctttttttctttttctcccttggtctataatgaaattgttacagcagtgcaaaataaaatcctatgtataaaagtgtt

SEQ ID NO: 6812 - protein, 94 aa, Homo sapiens; identical to SEQ ID NO: 6810

SEQ ID NO: 6813 - DNA, 2770 bp, Homo sapiens
gtgttctaaatactaaccctcataataccctgaataatacagttagtatgttaaaaattaattaaaagaatggtcatcacaactttgaattccatggtacactttccacaaatgcttctgtttgtaccatgttgattagtaatgtgaccctttctttcccatgtttagtgatttagaatctagaagagaagtaaaaaaagaagaaggtgaagcttttgcacgagaacatggactcatcttcatggaaacgtctgctaagactgcttccaatgtagaagaggcatttattaatacagcaaaagaaatttatgaaaaaattcaagaaggagtctttgacattaataatgaggcaaatggcattaaaattggccctcagcatgctgctaccaatgcaacacatgcaggcaatcagggaggacagcaggctgggggcggctgctgttgagtctgtttttactgtctagctgcccaacggggcctactcacttattctttcaccccctctcctcctgctcagctgagacatgaaactatttgaaatggctttatgtcacagaagactttaatccgtcaaattcttgtataactttgaataaatggttaatgttcacttaaaagacagattttggagattgtattcatatctatttgcatttgatttctaggtcaattgatgtgattatttttgttaaatgttgtcttgtgcccttaactacgaactgaattgtattaaacactacaaagtcatcttgagtattttaaatcggtttgtgtagttaggtttcccaacatctgtggttacctaatgtttaatattatagaactgtcctcagaaactttgtcaattttcacggctataaggaaacagaaggactcttttaattctgtatttatcatttactttctgtatatatagtttaataacctgcttgggtgtaatttgccaagcttgaattctttaatgcatttgcataaattctatactgtttagagcttaaagctacagaagcattgttaggaattgcttggacactgaattttaaactttttgacattgttaacaagcatgttcatcttttcttgtcactagtccaagaaaaatatgcttaatgtatattacaaaggctttgtatatgttaacctgttttaatgccaaaagtttgctttgtccacaatttccttaagacctcttcagaaagggatttgtttgccttaatgaatactgttgggaaaaaacacagtataatgagtgaaaagggcagaagcaagaaatttctacatcttagcgactccaagaagaatgagtatccacatttagatggcacattatgaggactttaatctttccttaaacacaataatgttttcttttttcttttattcacatgatttctaagtatatttttcatgcaggacagtttttcaaccttgatgtacagtgactgtgtaaaatttttctttcagtggcaacctctataatctttaaaatatggtgagcatcttgtctgttttgaaggggatatgacaataaatctatcagatggaaaatcctgttacaaagtagaaaagctttagtaatttactcagtgtggtggttttatcctttttttctttttctcccttggtctataatgaaattgttacagcagtgcaaaataaaatcctatgtataaaagtgttctttttttttattatgaccacctcttttttaatgtatttttagtccacttacagcttttacatgggtttaagcatgttttttaaaagggtcagaatggttaacactcaaccctttttaaaaattttgctaaaatgcgacaaatctcaccatactgaaattatttttgttgatggtgtaagcagtgtaagcaagtgttttctcctgaactagcacaaaagcacttatgcctgaaagaaagcataaagaagttctaactctgaaactaactactttcatttcgctcatggccttcaactttctacaggtcttccctgaagattcagcagtactctctcaaaggtttgacagtactcttgtgggaaatcaccaaatgctgtcatagttttgttttaactgtctccttgagggcagagggaagggtgagagaaaatctgttttcatgggtatttgtagtacagcctttttttctttcaagtggctgtatcaaattcactggtcttactaatcactgtctttaccagtgagtacaaaaagttaaggcaactaggacaggtactgctctataccaagaagagaatgattctttggaaattgttatttttaagcttctgttaatttttccagaagtttagtgcgtttcttttccatactttctcccctaattcttttatttgaagaagagaacttaatggcaaataaacaacaaaccaggacatgcattttaataccctaaggaaaaatggaaccctcaaatataactcctcccacaaccaccctaatgtgcctcagtctggggcagcaggtggacttctcaatagttcttttccacattctctacaaatcacatctaccgttaaggaatatgttatgaatcctttctgttaattgagaaagcaatgttattgtctgtgatttccagtctttgctcattttattatccctgtcaaataatgtaatattggtacctgcagttgaatttgtaatattgtaattgaatttttagttgatcttcgatcagtttttatagcatctatggacatagaaaatcagtcactgaaaaaaataaacacagctttcaatgtctcactc

SEQ ID NO: 6814 - protein, 94 aa, Homo sapiens; identical to SEQ ID NO: 6810

SEQ ID NO: 6815 - DNA, 3320 bp, Homo sapiens
gtgttctaaatactaaccctcataataccctgaataatacagttagtatgttaaaaattaattaaaagaatggtcatcacaactttgaattccatggtacactttccacaaatgcttctgtttgtaccatgttgattagtaatgtgaccctttctttcccatgtttagtgatttagaatctagaagagaagtaaaaaaagaagaaggtgaagcttttgcacgagaacatggactcatcttcatggaaacgtctgctaagactgcttccaatgtagaagaggcatttattaatacagcaaaagaaatttatgaaaaaattcaagaaggagtctttgacattaataatgaggcaaatggcattaaaattggccctcagcatgctgctaccaatgcaacacatgcaggcaatcagggaggacagcaggctgggggcggctgctgttgagtctgtttttactgtctagctgcccaacggggcctactcacttattctttcaccccctctcctcctgctcagctgagacatgaaactatttgaaatggctttatgtcacagaagactttaatccgtcaaattcttgtataactttgaataaatggttaatgttcacttaaaagacagattttggagattgtattcatatctatttgcatttgatttctaggtcaattgatgtgattatttttgttaaatgttgtcttgtgcccttaactacgaactgaattgtattaaacactacaaagtcatcttgagtattttaaatcggtttgtgtagttaggtttcccaacatctgtggttacctaatgtttaatattatagaactgtcctcagaaactttgtcaattttcacggctataaggaaacagaaggactcttttaattctgtatttatcatttactttctgtatatatagtttaataacctgcttgggtgtaatttgccaagcttgaattctttaatgcatttgcataaattctatactgtttagagcttaaagctacagaagcattgttaggaattgcttggacactgaattttaaactttttgacattgttaacaagcatgttcatcttttcttgtcactagtccaagaaaaatatgcttaatgtatattacaaaggctttgtatatgttaacctgttttaatgccaaaagtttgctttgtccacaatttccttaagacctcttcagaaagggatttgtttgccttaatgaatactgttgggaaaaaacacagtataatgagtgaaaagggcagaagcaagaaatttctacatcttagcgactccaagaagaatgagtatccacatttagatggcacattatgaggactttaatctttccttaaacacaataatgttttcttttttcttttattcacatgatttctaagtatatttttcatgcaggacagtttttcaaccttgatgtacagtgactgtgtaaaatttttctttcagtggcaacctctataatctttaaaatatggtgagcatcttgtctgttttgaaggggatatgacaataaatctatcagatggaaaatcctgttacaaagtagaaaagctttagtaatttactcagtgtggtggttttatcctttttttctttttctcccttggtctataatgaaattgttacagcagtgcaaaataaaatcctatgtataaaagtgttctttttttttattatgaccacctcttttttaatgtatttttagtccacttacagcttttacatgggtttaagcatgttttttaaaagggtcagaatggttaacactcaaccctttttaaaaattttgctaaaatgcgacaaatctcaccatactgaaattatttttgttgatggtgtaagcagtgtaagcaagtgttttctcctgaactagcacaaaagcacttatgcctgaaagaaagcataaagaagttctaactctgaaactaactactttcatttcgctcatggccttcaactttctacaggtcttccctgaagattcagcagtactctctcaaaggtttgacagtactcttgtgggaaatcaccaaatgctgtcatagttttgttttaactgtctccttgagggcagagggaagggtgagagaaaatctgttttcatgggtatttgtagtacagcctttttttctttcaagtggctgtatcaaattcactggtcttactaatcactgtctttaccagtgagtacaaaaagttaaggcaactaggacaggtactgctctataccaagaagagaatgattctttggaaattgttatttttaagcttctgttaatttttccagaagtttagtgcgtttcttttccatactttctcccctaattcttttatttgaagaagagaacttaatggcaaataaacaacaaaccaggacatgcattttaataccctaaggaaaaatggaaccctcaaatataactcctcccacaaccaccctaatgtgcctcagtctggggcagcaggtggacttctcaatagttcttttccacattctctacaaatcacatctaccgttaaggaatatgttatgaatcctttctgttaattgagaaagcaatgttattgtctgtgatttccagtctttgctcattttattatccctgtcaaataatgtaatattggtacctgcagttgaatttgtaatattgtaattgaatttttagttgatcttcgatcagtttttatagcatctatggacatagaaaatcagtcactgaaaaaaataaacacagctttcaatgtctcactcaacatgtaacattcaaaattgtgatcttcataaagacattgttaccattcgtcttgcaaatttaagacaactgaatgaaaagccaattttttgaaagaatgtggcatataattagatatacaactgaaacaggatatacaactgcatacaatttgtttttaatgatattttaaaatagcctgttagcaggaaaatagtccctatttatctgctaatggtcaaaaagagttaggatataaatcgtaccaaaatgtttccaatcactcagaaaaactgattcatgtctggctttgcaacaccttaaacatttattctgtcatagatagtaaagccccatctcagtttatttagtcctgaggttggcagcatggggtttgactatatgagctaaaagatacacaaagagataacgctgtttcataataaacaggaattgactatacaaataggtaaaccagcatatctacctgtatttctcagagtttagatgtgtgctttatgtttacattaaaataaagcctaacgccacagtagatcatctcatactgca

SEQ ID NO: 6816 - protein, 94 aa, Homo sapiens; identical to SEQ ID NO: 6810

SEQ ID NO: 6817 - DNA, 505 bp, Homo sapiens
caaatgcttctgtttgtaccatgttgattagtaatgtgaccctttctttcccatgtttagtgatttagaatctagaagagaagtaaaaaaagaagaaggtgaagcttttgcacgagaacatggactcatcttcatggaaacgtctgctaagactgcttccaatgtagaagaggcatttattaatacagcaaaagaaatttatgaaaaaattcaagaaggagtctttgacattaataatgaggcaaatggcattaaaattggccctcagcatgctgctaccaatgcaacacatgcaggcaatcagggaggacagcaggctgggggcggctgctgttgagtctgtttttactgtctagctgcccaacggggcctactcacttattctttcaccccctctcctcctgctcagctgagacatgaaactatttgaaatggctttatgtcacagaagactttaatccgtcaaattcttgtataactttgaataaatggttaatgttcactt

SEQ ID NO: 6818 - protein, 94 aa, Homo sapiens; identical to SEQ ID NO: 6810

SEQ ID NO: 6819 - DNA, 867 bp, Homo sapiens
ggccctcagcatgctgctaccaatgcaacacatgcaggcaatcagggaggacagcaggctgggggcggctgctgttgagtctgtttttactgtctagctgcccaacggggcctactcacttattctttcaccccctctcctcctgctcagctgagacatgaaactatttgaaatggctttatgtcacagaagactttaatccgtcaaattcttgtataactttgaataaatggttaatgttcacttaaaagacagattttggagattgtattcatatctatttgcatttgatttctaggtcaattgatgtgattatttttgttaaatgttgtcttgtgcccttaactacgaactgaattgtattaaacactacaaagtcatcttgagtattttaaatcggtttgtgtagttaggtttcccaacatctgtggttacctaatgtttaatattatagaactgtcctcagaaactttgtcaattttcacggctataaggaaacagaaggactatttagatggcacattatgaggactttaatctttccttaaacacaataatgttttcttttttcttttattcacatgatttctaagtatatttttcatgcaggacagtttttcaaccttgatgtacagtgactgtgtaaaatttttctttcagtggcaacctctataatctttaaaatatggtgagcatcttgtctgttttgaaggggatatgacaataaatctatcagatggaaaatcctgttacaaagtagaaaagctttagtaatttactcagtgtggtggttttatcctttttttctttttctcccttggtctataatgaaattgttacagcagtgcaaaataaaatcctatgtat

SEQ ID NO: 6820 - protein, 52 aa, Homo sapiens
PSACCYQCNTCRQSGRTAGWGRLLLSLFLLSSCPTGPTHLFFHPLSSCSAET

SEQ ID NO: 6821 - DNA, 1966 bp, Homo sapiens
ggccctcagcatgctgctaccaatgcaacacatgcaggcaatcagggaggacagcaggctgggggcggctgctgttgagtctgtttttactgtctagctgcccaacggggcctactcacttattctttcaccccctctcctcctgctcagctgagacatgaaactatttgaaatggctttatgtcacagaagactttaatccgtcaaattcttgtataactttgaataaatggttaatgttcacttaaaagacagattttggagattgtattcatatctatttgcatttgatttctaggtcaattgatgtgattatttttgttaaatgttgtcttgtgcccttaactacgaactgaattgtattaaacactacaaagtcatcttgagtattttaaatcggtttgtgtagttaggtttcccaacatctgtggttacctaatgtttaatattatagaactgtcctcagaaactttgtcaattttcacggctataaggaaacagaaggactatttagatggcacattatgaggactttaatctttccttaaacacaataatgttttcttttttcttttattcacatgatttctaagtatatttttcatgcaggacagtttttcaaccttgatgtacagtgactgtgtaaaatttttctttcagtggcaacctctataatctttaaaatatggtgagcatcttgtctgttttgaaggggatatgacaataaatctatcagatggaaaatcctgttacaaagtagaaaagctttagtaatttactcagtgtggtggttttatcctttttttctttttctcccttggtctataatgaaattgttacagcagtgcaaaataaaatcctatgtataaaagtgttctttttttttattatgaccacctcttttttaatgtatttttagtccacttacagcttttacatgggtttaagcatgttttttaaaagggtcagaatggttaacactcaaccctttttaaaaattttgctaaaatgcgacaaatctcaccatactgaaattatttttgttgatggtgtaagcagtgtaagcaagtgttttctcctgaactagcacaaaagcacttatgcctgaaagaaagcataaagaagttctaactctgaaactaactactttcatttcgctcatggccttcaactttctacaggtcttccctgaagattcagcagtactctctcaaaggtttgacagtactcttgtgggaaatcaccaaatgctgtcatagttttgttttaactgtctccttgagggcagagggaagggtgagagaaaatctgttttcatgggtatttgtagtacagcctttttttctttcaagtggctgtatcaaattcactggtcttactaatcactgtctttaccagtgagtacaaaaagttaaggcaactaggacaggtactgctctataccaagaagagaatgattctttggaaattgttatttttaagcttctgttaatttttccagaagtttagtgcgtttcttttccatactttctcccctaattcttttatttgaagaagagaacttaatggcaaataaacaacaaaccaggacatgcattttaataccctaaggaaaaatggaaccctcaaatataactcctcccacaaccaccctaatgtgcctcagtctggggcagcaggtggacttctcaatagttcttttccacattctctacaaatcacatctaccgttaaggaatatgttatgaatcctttctgttaattgagaaagcaatgttattgtctgtgatttccagtctttgctcattttattatccctgtcaaataatgtaatattggtacctgcagttgaatttgtaatattgtaattgaatttttagttgatcttcgatcagtttttatagcatctatggacatagaaaatcagtcactgaaaaaaataaacacagctttcaatgtctcactc

SEQ ID NO: 6822 - protein, 56 aa, Homo sapiens [sequence omitted]

SEQ ID NO: 6823 - DNA, 2516 bp, Homo sapiens
ggccctcagcatgctgctaccaatgcaacacatgcaggcaatcagggaggacagcaggctgggggcggctgctgttgagtctgtttttactgtctagctgcccaacggggcctactcacttattctttcaccccctctcctcctgctcagctgagacatgaaactatttgaaatggctttatgtcacagaagactttaatccgtcaaattcttgtataactttgaataaatggttaatgttcacttaaaagacagattttggagattgtattcatatctatttgcatttgatttctaggtcaattgatgtgattatttttgttaaatgttgtcttgtgcccttaactacgaactgaattgtattaaacactacaaagtcatcttgagtattttaaatcggtttgtgtagttaggtttcccaacatctgtggttacctaatgtttaatattatagaactgtcctcagaaactttgtcaattttcacggctataaggaaacagaaggactatttagatggcacattatgaggactttaatctttccttaaacacaataatgttttcttttttcttttattcacatgatttctaagtatatttttcatgcaggacagtttttcaaccttgatgtacagtgactgtgtaaaatttttctttcagtggcaacctctataatctttaaaatatggtgagcatcttgtctgttttgaaggggatatgacaataaatctatcagatggaaaatcctgttacaaagtagaaaagctttagtaatttactcagtgtggtggttttatcctttttttctttttctcccttggtctataatgaaattgttacagcagtgcaaaataaaatcctatgtataaaagtgttctttttttttattatgaccacctcttttttaatgtatttttagtccacttacagcttttacatgggtttaagcatgttttttaaaagggtcagaatggttaacactcaaccctttttaaaaattttgctaaaatgcgacaaatctcaccatactgaaattatttttgttgatggtgtaagcagtgtaagcaagtgttttctcctgaactagcacaaaagcacttatgcctgaaagaaagcataaagaagttctaactctgaaactaactactttcatttcgctcatggccttcaactttctacaggtcttccctgaagattcagcagtactctctcaaaggtttgacagtactcttgtgggaaatcaccaaatgctgtcatagttttgttttaactgtctccttgagggcagagggaagggtgagagaaaatctgttttcatgggtatttgtagtacagcctttttttctttcaagtggctgtatcaaattcactggtcttactaatcactgtctttaccagtgagtacaaaaagttaaggcaactaggacaggtactgctctataccaagaagagaatgattctttggaaattgttatttttaagcttctgttaatttttccagaagtttagtgcgtttcttttccatactttctcccctaattcttttatttgaagaagagaacttaatggcaaataaacaacaaaccaggacatgcattttaataccctaaggaaaaatggaaccctcaaatataactcctcccacaaccaccctaatgtgcctcagtctggggcagcaggtggacttctcaatagttcttttccacattctctacaaatcacatctaccgttaaggaatatgttatgaatcctttctgttaattgagaaagcaatgttattgtctgtgatttccagtctttgctcattttattatccctgtcaaataatgtaatattggtacctgcagttgaatttgtaatattgtaattgaatttttagttgatcttcgatcagtttttatagcatctatggacatagaaaatcagtcactgaaaaaaataaacacagctttcaatgtctcactcaacatgtaacattcaaaattgtgatcttcataaagacattgttaccattcgtcttgcaaatttaagacaactgaatgaaaagccaattttttgaaagaatgtggcatataattagatatacaactgaaacaggatatacaactgcatacaatttgtttttaatgatattttaaaatagcctgttagcaggaaaatagtccctatttatctgctaatggtcaaaaagagttaggatataaatcgtaccaaaatgtttccaatcactcagaaaaactgattcatgtctggctttgcaacaccttaaacatttattctgtcatagatagtaaagccccatctcagtttatttagtcctgaggttggcagcatggggtttgactatatgagctaaaagatacacaaagagataacgctgtttcataataaacaggaattgactatacaaataggtaaaccagcatatctacctgtatttctcagagtttagatgtgtgctttatgtttacattaaaataaagcctaacgccacagtagatcatctcatactgca

SEQ ID NO: 6824 - protein, 56 aa, Homo sapiens [sequence omitted]

SEQ ID NO: 6825 - DNA, 537 bp, Homo sapiens
aacagagttgcagtcatgagggaaggtgagccaaggtgtggggctgcctctgtgtctcctccaaacaccacgcagccagagattcagcctccacccctcctcacacgggagatagaggttgagttcaggggctattggcttcagacaagggatgcccagcgccaaggaaggagtggcttaaaaagaaagaagaaaaaaaaagcattcaagactaataaaggactatgcgcagtagctcatgcctgtaatcccggcactttggaggctgaggcgggaagatcgcttgagcacagcatttgagaccagcctgggcaacatggcaaaaccccatccttacaaaaaatacgaaaattagttgcacgtgatggggtgtgcctgtagtcccagctactcagaaggctgagggaggaggactgattgagcccatgaggttgaggctgcagtgagctgagattgtgccactgcactccagcctggatgacagagtgagaacctgtcaaaaagaggaaagaaagaaagagaaagaaagaaagaaag

SEQ ID NO: 6826 - protein, 94 aa, Homo sapiens
MREGEPRCGAASVSPPNTTQPEIQPPPLLTREIEVEFRGYWLQTRDAQRQGRSGLKRKKKKKAFKTNKGLCAVAHACNPGTLEAEAGRSLEHSI

SEQ ID NO: 6827 - DNA, 3556 bp, Homo sapiens
gttataatagccagaactgaacagaacatcattagatttctctccgttttgtttcctttctttttaaccaacacatatatgttgcttggtggataaggcattcttgtagtgctttataagtattagcccatttaatcattataaccatcccatagaacaggtattcatttgattaagaaaactgaggtatgaaaagtttaagtaacttgctcaaaatcacatgctagttagctgcagaatcgattgaaattttactttaaaattcccttattgataagttcatgctctttctagtttcctgaggtttcccatggtgctgcagtgcatatcccaggtacccagcaagcagcctggagaggagcagggagtcaggtccagggggactgagaaggtcagaagcaccaacacaggcagaagaaagaagggctgaaagccttctttctgaagtgtggtatgcaggtggcctgcagaaagaacacattctcacagcatccacgagcagaaagaacagaccatggagccaatcaaggacaatttatcttgagaacagaaaaggttaaagtaagtcaataagggccagcttgctgggcagggtttcaatgtggaaaagttgcttattgagccacaaccaaggatcctaacagtcattatttctcaatgatttggatgatatgtatgaaagaatattatattacattatcaaatagcacattaatatgatttgatatgtttacctggcaaatttgctatagttacttagcatttgagaattttcatttatattgaattgattcaaatgcatacagagtgaatatttgctgtttcttcctggatggcattatatagctaaaataagagaaagactatttttatttttatatatttttactttttttagagacagtctcactctgtcactcaggctggagtgcagtggtgcaatctcagctcactgcaacgtctgcctcctgggttcaagcgattcttctgcctcagcctcccaagtagctggaattacaggtgcacactaccatgcccagctaatttttgtttgttttttgagacagaggctcactctgttgcccaggctggagtgcagtggtgcgaactcggctcattgcaacctctacctcctgggttcaagcaattctcctgcctcagcctcccgagtagctgggactacaggtgcccgccaccatgcctggctaatttttgtatttttagtagagatggggtttccccatgttggccaggatgatctcgatctcttgacctcgtgatccgcccacctcggcctcccaaagtgctgggattacaggcgtgagccactgtgcctggccaagaaagactattttttaagataataaactaagagatgtatagaaagcaagtagttgaaaataaaattagataagaactgatgaaaacgagagttagtagaaattatggaacatcttagatttggtcaaacaaaaataaaaacaggcaggaatttccttcctaaaatgaactaaattttgaaaatgtagaagcaaaacaaattttagattttgaaaacagagatccttaaaacaggaatgtttctggaataaatgtcattatctctaaatatcttttaaaagtccttgttgcatggaagcatatcgtgttcctggatgagaacacttgctattataacaatatcaattttccccgaattaaaccatacatttacctcaattttctaaaatcccaagagaaccatgagagtctcaagtggcggcactagcatagaaatacagaatctatgacacaataaaaacttgagaaacaggttcaaatatgcattaaaaagtggcctgaaattaaagcatttaaatgtactgaggaaaggattaactgcttaataaatgatattaaaacaaaacgtgagctcatcaagttgccaaaaatatatttttcaaataaaaatttccactattggtaatagagttcaggaaacagaacattctcgtggtctgattggagtataaatcggcacatttctggagggaaattacacagatataaaatcttcaacaatgtctatattttatgagccagtaattccgtttctaagaatgttttctaaagaaatctttgtattttattttatttttaatttttagagacggggtctcactctgtcacccaaactggagtacagtggcacgatcatagctcactacagtctggaactcctgggctcaagtgaaagagttgttgatgtgtccaaagatttatctctgaagataataactgagtgttgatggttttgcctaaattatttataaatctaaatagtcaataggaaggtatgattaaataaattatagaacacgctcacaatgaaatactgtgcagccatcaaaattatgtggcatgacagtgagctaacatctgtccagtgcttggcatgtgccaagcagatttctaagaacttgacgtgcagcaacgtgtttcagcctcccaacacatctgtatgaggcagggcgatgattacttgcatgttatagctgaggaagccactgagagggtgcaactccttgctagtaagtggtagagcccgtatttgaacactcctaatcattacaactatgtaacaatattggaagattttatgcaacataagtggggaagaaggcagtgtcctcagtgtgaccccattttggtaaaagaaggcatgtatacataatcatagaaggaaaccagaaagaaatccagaaagatgctgagtattttctgtgggtggtgggattctcagtcttttgagcagatgctgttggtaccctggcccaccctcgtgtcaccacctcaagttaccttattacagggtaggagtttcctggtctttctgcccaagggcagaaagtgaaagtctggccagtgtacagggcagaccagactgctgaggagctgatgtcccaggagtacccctcacagatgacagaaggtaccctttgcggctgtgtccttcccactgtctcagagggtccccaggagaaggagcaccagggacccatagcagtaacgtttatagcagtgccaacaccttcgtgagctttttctcttcctctcccatctcatttctgctttctttcgccatgcttcctgggatcacctcccagcaaacgtattggcaaccaaatcatgtcagcgttggctttgcggagaatccagacttgcttaaaaagaaagaagaaaaaaaaagcattcaagactaataaaggactatgcgcagtagctcatgcctgtaatcccggcactttggaggctgaggcgggaagatcgcttgagcacagcatttgagaccagcctgggcaacatggcaaaaccccatccttacaaaaaatacgaaaattagttgcacgtgatggggtgtgcctgtagtcccagctactcagaaggctgagggaggaggactgattgagcccatgaggttgaggctgcagtgagctgagattgtgccactgcactccagcctggatgacagagtgagaacctgtcaaaaagaggaaagaaagaaagagaaagaaag

SEQ ID NO: 6828 - protein, 52 aa, Homo sapiens
MSALALRRIQTCLKRKKKKKAFKTNKGLCAVAHACNPGTLEAEAGRSLEHSI

SEQ ID NO: 6829 - DNA, 430 bp, Homo sapiens
gccggaggtccaggtgggagacgccgcgccccgcaccgaggtatgagagctgcagcagcgacaaccaggcggcctgaagtgcagacgcaaaacggatcccggggctaggacacgggggttccgaaagcaggatgacgcgcccggaggggacgagacggtccagagcacgcccgggagagagggcggcccagacggcaccggcctgcgctccagccctccctccctcacacacgcggaatctcaaaacatgcggacatgccagcccctcccgcacacctcgggctgcaccacctgctcccggcgcctccccgcccccggctcgcccgcgccggttctcacgcgcggccagcgcccttccccgccgctcccgcccctttcacttccgcacagcttaggagtcggggccagcgcctccgctcccaccttccca

SEQ ID NO: 6830 - protein, 87 aa, Homo sapiens
MTRPEGTRRSRARPGERAAQTAPACAPALPPSHTRNLKTCGHASPSRTPRAAPPAPGASPPPARPRRFSRAASALPRRSRPFHFRTA

SEQ ID NO: 6831 - DNA, 529 bp, Homo sapiens
cttgggagccaggcctgcaccccatagagtcagctctggtttagagccagcccttccacccttgccaccttcagccgctagcccaaatctcaacgctcttctcgcccattcccaaacatctctgcgcttctcccttccccatccgatcatttctgtttccattatttttctttcttcgcagttccttccacggtgtctttggaaatgctgattcctctcttggctttgtgctgtttttattcgccaaacctattccgttgtaaaccgacttctctgaatctccaacctcaccacaggaccagccctccttccctcttccttggctgagggtgcaccgctcctgcctcagcatctccttgggctctgctctaaatgtattacaactggctgtggcttatgcctgcaatctcagcactttgggaggctgaggtggaagaatcacttgagctcaggagttcaagaccagcgtgggcaacaaagcaagaccctgtctctacaaaattaaattaaattaaaaagtattacattt

SEQ ID NO: 6832 - protein, 45 aa, Homo sapiens [sequence omitted]

SEQ ID NO: 6833 - DNA, 10455 bp, Homo sapiens
ggcggcggcggcggcggcggcggcagcggcggcggcggcggcggcgcgggggttgagtcgtggtggtgcggacgcgctcgtgctcgggaactatcggattaaacttgaatcgagtgaaattacacaaaggagcgccgcggaggaggcggcccggggacccggacaccctgaaactcaccagagacccgttcgcccccggccaactccgtgcccgtggattcagccccctggccgcagctgccgagccaactccggagcccgctctgcgttttgttttcccctcggcactaggcagcggaggagcccgaccgacccggacctatatccagactttgcctgacactgcagggtccaagagaattaaagaaatatggaatgacatgaagaagattagttaaggattataggctttgagggcaaacacctcagtgaagtgaagcacaggcaagctcctgagctgtggtttggaggagccgtgtgttggaagaagatggcagatccaggaatgatgagtctttttggcgaggatgggaatattttcagtgaaggtcttgaaggcctcggagaatgtggttacccggaaaatccagtaaatcctatgggtcagcaaatgccaatagaccaaggctttgcctctttacagccatcccttcatcatccttcaactaatcaaaatcaaacaaagctgacacattttgatcactataatcagtatgaacaacaaaagatgcatctgatggatcagccgaacagaatgatgagcaacacccctgggaacggactcgcgtctccgcactcgcagtatcacacccctcccgttcctcaggtgccccatggtggcagtggtggcggtcagatgggtgtctaccctggcatgcagaatgagaggcatgggcaatcctttgtggacagcagctccatgtggggccccagggctgttcaggtaccagaccagatacgagccccctaccagcagcagcagccacagccgcagccaccgcagccggctccgtcggggccccctgcacagggccaccctcagcacatgcagcagatgggcagctatatggcacgtggggatttttccatgcagcagcatggtcagccacagcagaggatgagccagttttcccaaggccaagagggcctcaatcagggaaatccttttattgccacctcaggacctggccacttgtcccacgtgccccagcagagtcccagcatggcaccttccttgcgtcactcggtgcagcagttccatcaccacccctctactgctctccatggagaatccgttgcccacagtcccagattctccccgaatcctccccaacaaggggctgttaggccgcaaacccttaactttagttctcggagccagacagtcccctctcctactataaacaactcagggcagtattctcgatatccttacagtaacctaaatcagggattagttaacaatacagggatgaatcaaaatttaggccttacaaataatactccaatgaatcagtccgtaccaagataccccaatgctgtaggattcccatcaaacagtggtcaaggactaatgcaccagcagcccatccaccccagtggctcacttaaccaaatgaacacacaaactatgcatccttcacagcctcagggaacttatgcctctccacctcccatgtcacccatgaaagcaatgagtaatccagcaggcactcctcctccacaagtcaggccgggaagtgctgggataccaatggaagttggcagttatccaaatatgccccatcctcagccatctcaccagccccctggtgccatgggaatcggacagaggaatatgggccccagaaacatgcagcagtctcgtccatttataggcatgtcctcggcaccaagggaattgactgggcacatgaggccaaatggttgtcctggtgttggccttggagacccacaagcaatccaggaacgactgatacctggccaacaacatcctggtcaacagccatcttttcagcagttgccaacctgtcctccactgcagcctcacccgggcttgcaccaccagtcttcacctccacaccctcatcaccagccttgggcacagctccacccatcaccccagaacaccccgcagaaagtgcctgtgcatcagcattccccgtcggagccctttctagagaaaccagtgccggatatgactcaggttagtggaccgaatgctcagctagtgaagagtgatgattacctgccatcaatagaacagcagccacaacaaaagaagaagaaaaagaaaaacaaccacattgtagcagaggatcccagtaaaggttttggtaaagatgacttccctggtggggtagataaccaagaactaaataggaactcactggatgggtcccaagaagaaaaaaagaaaaagaaaaggtcaaaggcaaaaaaagacccgaaggaaccgaaagaacccaaggagaaaaaagagcccaaggaacccaagaccccgaaagcccctaagattcccaaagagccaaaggaaaagaaagcaaaaactgccacgccaaaacccaaatccagcaaaaagtcaagtaataagaaacctgactcagaagcaagtgctttgaagaaaaaggtcaacaagggaaaaacagaaggttctgaaaattcagacttagacaaaacacccccaccatctcctcctcctgaagaagatgaggacccaggtgttcagaagagacggtccagcagacaggtgaagagaaagcgctacactgaagacctggagttcaagatttctgatgaggaggcagatgatgcagatgctgctgggagggattccccctccaacacctcccagtcagaacagcaggaatctgttgatgcagaaggcccagtggtagaaaaaattatgagcagtcgttcagtaaaaaagcagaaggaatctggagaggaggtagaaattgaggaattctatgtgaaatacaaaaacttctcttatcttcattgtcagtgggcatctatagaagatctggaaaaagataagagaattcagcaaaaaattaaacgatttaaggcaaagcagggccagaacaagttcctttcagagattgaggatgagctttttaatccagattatgtggaggttgaccggataatggactttgcacgtagcacagatgaccggggagagcctgtgactcactatctggtgaagtggtgttcacttccttatgaagacagcacgtgggagcggaggcaggacatagatcaagcaaagatcgaggagtttgagaaactaatgtccagggagccggaaacagagcgtgtggagcgacctcctgctgatgattggaagaaatcggagagttccagggagtataaaaacaataacaaactcagggaataccagttggagggagtaaactggctacttttcaattggtacaacatgcgaaactgcattttagcagatgaaatgggtttgggaaaaactatccagtccattacatttctctatgagatatatttgaaaggaatccatggcccttttttagtaattgccccattgtccacaatccccaactgggaaagggaattccgaacctggacagagttgaacgtggttgtgtatcatgggagtcaagctagtcgtcggaccattcagttgtatgaaatgtacttcaaagatccccagggtcgagtgataaaggggtcctataagtttcatgccatcatcactacatttgagatgattttgactgattgtcctgagctgcggaatattccatggcgctgtgtagtcattgatgaagcccacaggctgaagaacaggaactgcaagctgttggagggactcaagatgatggacttggaacacaaagtgctgctgacgggaaccccactccagaacactgtggaagaactcttcagcttgcttcatttcttggaaccaagtcgcttcccttcagaaaccacatttatgcaagaatttggtgatctaaaaacagaagagcaggtgcaaaaacttcaagctattctaaagccaatgatgttgagacgtctcaaagaggatgtagaaaagaacttggcccccaaagaagaaactattattgaagttgagctaacaaacattcagaagaaatattaccgagccatccttgagaagaatttcacatttctttccaaaggcggtggtcaagctaacgtacctaacctattaaacactatgatggaattgcggaagtgctgcaatcatccgtaccttatcaatggtgctgaagagaaaattttggaagagtttaaagaaacacacaatgcagagtctccagattttcagctccaggcaatgatccaggctgctggcaagctagtgctgattgacaagctgctgccaaaactgaaggctggtggccacagggtgcttatcttttcccagatggtgcgctgcttggacatactggaagactacctcattcaaagacggtacccatatgaaaggatcgacggccgagtaagaggcaacctccgccaggcagctatcgacagattctccaaacctgattctgataggtttgttttcctcctgtgtacaagggcaggaggtttaggcattaacctcactgctgctgatacctgcatcatctttgattcagactggaatccccaaaatgacctccaggctcaggctagatgtcatagaataggacagagcaaatctgtgaaaatctacaggctgattacaagaaattcctatgaaagggaaatgttcgacaaggctagtttgaaactgggcctggataaagctgtgctacagtctatgagtggaagagaaaatgctaccaatggggtacaacagctttccaagaaagaaatagaggatcttctacgaaaaggggcctatggtgcactcatggatgaggaggatgaagggtctaaattctgtgaagaagatattgatcagatcctcctacgtcgaacccacaccattaccattgagtcagaagggaaaggttccacatttgctaaggccagttttgttgcatctggaaataggacagatatttccttggatgatccaaatttctggcaaaagtgggctaagaaggctgaattggatattgatgccttaaatgggaggaacaacctggttattgatactccaagagtgagaaagcagaccaggctctacagtgcagtgaaggaagatgagctgatggagttctcagacttggaaagtgattctgaagaaaagccctgtgcaaagccacggcgtccccaggataagtcacagggctatgcaaggagtgaatgtttcagggtggagaagaatctgcttgtctatggttggggacggtggacagacattctttcccacggacgctataaacgccaactcactgagcaagatgtagaaaccatctgcagaaccatcctggtgtactgtcttaatcattacaaaggggatgagaatatcaaaagcttcatctgggatctgatcacacccacagcggatggccagactcgagccttggtcaaccattccggtttgtcagctcctgtgccaaggggaaggaagggaaagaaggtgaaagcccagagcacacagccggtggtgcaggatgccgactggctggccagctgcaacccagatgccctgttccaggaggacagctacaagaaacacctgaagcatcactgtaacaaggtcctgctgcgtgtccgcatgctgtactacctaagacaagaagtgataggagaccaggcggataagatcttagagggtgctgactcaagtgaagccgatgtgtggatccctgaacctttccatgctgaagttcctgcagattggtgggataaggaagcagacaaatccctcttaattggagtgttcaaacatggctatgagaagtacaactccatgcgagctgaccccgcgctgtgctttctggaacgagtcggtatgcctgatgccaaggccatagctgccgagcaaagaggaacagacatgctagcagatggtggtgacgggggagaatttgatagagaagatgaagacccagaatataaaccaaccagaacaccgttcaaagatgaaatagatgaatttgcaaattctccttcagaggataaggaagaatccatggaaatacatgccacaggcaagcacagtgagagtaatgctgagttaggccaactttactggcctaacacttcaaccctgactacacgtctgcgccggctcattactgcctatcagcgcagctataaaaggcaacagatgaggcaagaggccctaatgaagactgaccggcgcagacggcggcctcgagaggaagtgagagctctggaagcggaaagggaagctattatatctgagaagcggcaaaagtggacaagaagagaagaggctgatttttaccgtgtggtatccacctttggggttatttttgaccctgtgaaacagcaatttgactggaaccaatttagagcctttgccaggcttgacaaaaaatctgatgagagtttggagaaatacttcagttgttttgtggccatgtgtaggcgagtatgtcgaatgcccgtcaagccagatgatgaaccgcccgacctctcctccataattgagccgatcacagaggagcgagcctctcgaactctgtaccgcattgagctgctacggaagatccgcgagcaggttctccatcacccccagctgggagagaggcttaagctctgccagccaagcttggatctgccagagtggtgggagtgtggacggcatgaccgagacttgctggttggtgctgctaaacacggggtcagtcggacggattatcacatcctcaatgaccctgagttatccttcttggatgcacataaaaactttgctcaaaacagaggggcaggtaatacatcttccttgaacccactggcagttggatttgtccagactcctccagtcatctcatctgctcatattcaagatgagagggtactggaacaagccgaaggcaaagtggaggagcctgaaaacccagctgccaaggagaaatgtgagggcaaagaagaggaagaagaaaccgatggcagcgggaaggagagcaagcaggaatgtgaggcagaggccagctctgtgaaaaatgaactgaaaggtgttgaggtcggcgcagacactgggtccaaatctatttcagagaaaggttccgaagaggatgaagaggaaaagctggaggatgacgataagtcggaagagtcttcccagcccgaagcaggagctgtctctagagggaagaattttgatgaagaaagcaatgcttccatgagcactgctagagatgaaacccgagatggattctacatggaggacggagatccttcagtagctcagctccttcatgaaagaacatttgccttctcgttttggcctaaggatagagtaatgataaaccgcttagacaacatctgtgaagcagtgttgaaaggcaaatggccagtaaataggcgccagatgtttgatttccaaggcctcatcccaggttacacacccaccacagtggacagccccttgcagaagaggagctttgctgagctctccatggtcggccaagccagcattagtgggagtgaggacatcactacgtctcctcagttgtcaaaggaagatgccctcaacctctctgtccctcgccagcggaggaggaggaggagaaaaatcgaaattgaggccgaaagagctgccaagaggcgaaatctcatggagatggttgcccagcttcgagagtctcaggtggtctcagaaaatggacaagaaaaagttgtagatttatcaaaggcctcaagagaggcaacaagctctacctcaaatttttcatctctttcttcaaagtttatcttgcctaatgtctcaacaccagtgtctgatgcctttaagactcaaatggaactgctccaagcaggcctttcgcgcacacccacaaggcatctccttaatggctccctagtggatggagagcctcccatgaagaggaggcggggaaggaggaaaaatgtggagggacttgatctgcttttcatgagccacaaacggacgtcattgagtgcagaggatgctgaggtgaccaaagcttttgaagaagatatagagaccccaccaacaagaaacattccttctcccggacagctggacccagacacacggatccctgttatcaatcttgaagatgggactaggctggtgggggaagatgctcctaaaaataaggatttagttgaatggctgaagctgcaccctacttacactgttgatatgccaagttatgtaccaaagaatgcagatgtgctgttttcctcatttcagaaaccgaaacagaaacgacatagatgtcgaaaccctaataaattggatataaacactttgacaggagaagaaagggtgcctgttgtcaataaacgaaatgggaagaagatgggtggagctatggcgcctccaatgaaggatctacccaggtggctggaagaaaatcctgaatttgcagttgctccagactggactgatatagttaagcagtctggttttgttcctgagtcgatgtttgaccgccttctcactgggcctgtagtgcggggagagggagcgagcagaagaggaagaaggcccaaaagtgagatcgccagagcagccgcggccgccgctgctgtggcctccacgtcagggatcaaccctttgctggtgaacagcctgtttgctggaatggacctgacgagccttcagaatctccagaatctccagtcgctccagctggcaggcctcatgggcttccctccaggactggcaacagctgccaccgccggaggcgatgcgaagaaccctgctgctgtgctgcccctgatgctgccaggaatggcgggcctgcccaacgtgtttggcttgggcgggctgttgaataaccctctgtcagctgctactggaaacaccactactgcttctagtcaaggagaaccggaagacagcacttcaaaaggagaggagaaaggaaatgagaatgaagacgagaacaaagactctgagaaaagcacagatgctgtttcggctgctgactctgcgaatggatctgttggtgctgctactgccccggctggattgccctcaaacccgctagccttcaaccctttcctcctgtccacaatggccccgggcctcttctacccatccatgtttctacctccaggactggggggattgacgctgcctgggttcccagcattggcaggacttcagaatgccgtgggctccagcgaagaaaaggctgctgacaaggctgagggaggaccctttaaagatggagagacccttgaaggcagcgatgccgaggagagcctggataagactgcagagtcctccctcttagaagacgaaatagcacagggtgaagagctagactcacttgatgggggggatgaaatagaaaacaatgaaaatgatgaataaccagtaccagttccagttcaagtgtttaaaacttttgacaagtggtagtcctactgtttacactcacagttaatgttcatacctagttttataagctgttctgtaacatagtgtagcaaaaaaaaaagttcaagtcatgttatacaggtgtgtcaaaaggtatcttggtcattaagtattgtgcagtgcattatttattatccctaggagagatgaaatttgagaggtgatcatgtctttttaaggaaacttacataatgctctgctttttttttttctcttggtaccattggtattataataaagagcaatttgtaactgagtggcactaatggaagaaagtgctgctcaaaggaagtatgaagttatatatttaattttttaattttaatttttaatttttttgctgtgaaggtcaagctgaaatttaccatacatatcatacttgctcatttgtttccctttttgactgtatgggggttcccacactcgtgcatacacacacatccatacactctgacaatctccacgctagtgtgaacgcctctgtcccgaggcgcagcaataataaggcagctgttgaatgtgaagggtccctttggaaaattaacctactgggagggttcttgccagacagaactacagttccattgtctcgtggtcttgtaatgcactggtaaaaacaaaataaatagatgaataaataaagagtgagagaagagagaatcaggtaccttttttaaattaaaggactttgttactttagccacaaagctaaaacagcattacctcagctctaaactagccttgaagtttacagacatgactttgtaaatgtattgtttttctttgttgtgatgtccttttatttttttctttgaaaactgctatcatgtaagataaaatgtaaattgctgccaactgtagtaatgatgcttttaataaaagtgacccatgatatgcagagatgt

SEQ ID NO: 6834 - protein, 2997 aa, Homo sapiens; identical to SEQ ID NO: 968

SEQ ID NO: 6835 - DNA, 2801 bp, Homo sapiens
gagaatccgttgcccacagtcccagattctccccgaatcctccccaacaaggggctgttaggccgcaaacccttaactttagttctcggagccagacagtcccctctcctactataaacaactcagggcagtattctcgatatccttacagtaacctaaatcagggattagttaacaatacagggatgaatcaaaatttaggccttacaaataatactccaatgaatcagtccgtaccaagataccccaatgctgtaggattcccatcaaacagtggtcaaggactaatgcaccagcagcccatccaccccagtggctcacttaaccaaatgaacacacaaactatgcatccttcacagcctcagggaacttatgcctctccacctcccatgtcacccatgaaagcaatgagtaatccagcaggcactcctcctccacaagtcaggccgggaagtgctgggataccaatggaagttggcagttatccaaatatgccccatcctcagccatctcaccagccccctggtgccatgggaatcggacagaggaatatgggccccagaaacatgcagcagtctcgtccatttataggcatgtcctcggcaccaagggaattgactgggcacatgaggccaaatggttgtcctggtgttggccttggagacccacaagcaatccaggaacgactgatacctggccaacaacatcctggtcaacagccatcttttcagcagttgccaacctgtcctccactgcagcctcacccgggcttgcaccaccagtcttcacctccacaccctcatcaccagccttgggcacagggcgcctccaatgaaggatctacccaggtggctggaagaaaatcctgaatttgcagttgctccagactggactgatatagttaagcagtctggttttgttcctgagtcgatgtttgaccgccttctcactgggcctgtagtgcggggagagggagcgagcagaagaggaagaaggcccaaaagtgagatcgccagagcagccgcggccgccgctgctgtggcctccacgtcagggatcaaccctttgctggtgaacagcctgtttgctggaatggacctgacgagccttcagaatctccagaatctccagtcgctccagctggcaggcctcatgggcttccctccaggactggcaacagctgccaccgccggaggcgatgcgaagaaccctgctgctgtgctgcccctgatgctgccaggaatggcgggcctgcccaacgtgtttggcttgggcgggctgttgaataaccctctgtcagctgctactggaaacaccactactgcttctagtcaaggagaaccggaagacagcacttcaaaaggagaggagaaaggaaatgagaatgaagacgagaacaaagactctgagaaaagcacagatgctgtttcggctgctgactctgcgaatggatctgttggtgctgctactgccccggctggattgccctcaaacccgctagccttcaaccctttcctcctgtccacaatggccccgggcctcttctacccatccatgtttctacctccaggactggggggattgacgctgcctgggttcccagcattggcaggacttcagaatgccgtgggctccagcgaagaaaaggctgctgacaaggctgagggaggaccctttaaagatggagagacccttgaaggcagcgatgccgaggagagcctggataagactgcagagtcctccctcttagaagacgaaatagcacagggtgaagagctagactcacttgatgggggggatgaaatagaaaacaatgaaaatgatgaataaccagtaccagttccagttcaagtgtttaaaacttttgacaagtggtagtcctactgtttacactcacagttaatgttcatacctagttttataagctgttctgtaacatagtgtagcaaaaaaaaaagttcaagtcatgttatacaggtgtgtcaaaaggtatcttggtcattaagtattgtgcagtgcattatttattatccctaggagagatgaaatttgagaggtgatcatgtctttttaaggaaacttacataatgctctgctttttttttttctcttggtaccattggtattataataaagagcaatttgtaactgagtggcactaatggaagaaagtgctgctcaaaggaagtatgaagttatatatttaattttttaattttaatttttaatttttttgctgtgaaggtcaagctgaaatttaccatacatatcatacttgctcatttgtttccctttttgactgtatgggggttcccacactcgtgcatacacacacatccatacactctgacaatctccacgctagtgtgaacgcctctgtcccgaggcgcagcaataataaggcagctgttgaatgtgaagggtccctttggaaaattaacctactgggagggttcttgccagacagaactacagttccattgtctcgtggtcttgtaatgcactggtaaaaacaaaataaatagatgaataaataaagagtgagagaagagagaatcaggtaccttttttaaattaaaggactttgttactttagccacaaagctaaaacagcattacctcagctctaaactagccttgaagtttacagacatgactttgtaaatgtattgtttttctttgttgtgatgtccttttatttttttctttgaaaactgctatcatgtaagataaaatgtaaattgctgccaactgtagtaatgatgcttttaataaaagtgacccatgatatgcagagatgt

SEQ ID NO: 6836 - protein, 332 aa, Homo sapiens
MKDLPRWLEENPEFAVAPDWTDIVKQSGFVPESMFDRLLTGPVVRGEGASRRGRRPKSEIARAAAAAAAVASTSGINPLLVNSLFAGMDLTSLQNLQNLQSLQLAGLMGFPPGLATAATAGGDAKNPAAVLPLMLPGMAGLPNVFGLGGLLNNPLSAATGNTTTASSQGEPEDSTSKGEEKGNENEDENKDSEKSTDAVSAADSANGSVGAATAPAGLPSNPLAFNPFLLSTMAPGLFYPSMFLPPGLGGLTLPGFPALAGLQNAVGSSEEKAADKAEGGPFKDGETLEGSDAEESLDKTAESSLLEDEIAQGEELDSLDGGDEIENNENDE

SEQ ID NO: 6837 - DNA, 3922 bp, Homo sapiens
gagaatccgttgcccacagtcccagattctccccgaatcctccccaacaaggggctgttaggccgcaaacccttaactttagttctcggagccagacagtcccctctcctactataaacaactcagggcagtattctcgatatccttacagtaacctaaatcagggattagttaacaatacagggatgaatcaaaatttaggccttacaaataatactccaatgaatcagtccgtaccaagataccccaatgctgtaggattcccatcaaacagtggtcaaggactaatgcaccagcagcccatccaccccagtggctcacttaaccaaatgaacacacaaactatgcatccttcacagcctcagggaacttatgcctctccacctcccatgtcacccatgaaagcaatgagtaatccagcaggcactcctcctccacaagtcaggccgggaagtgctgggataccaatggaagttggcagttatccaaatatgccccatcctcagccatctcaccagccccctggtgccatgggaatcggacagaggaatatgggccccagaaacatgcagcagtctcgtccatttataggcatgtcctcggcaccaagggaattgactgggcacatgaggccaaatggttgtcctggtgttggccttggagacccacaagcaatccaggaacgactgatacctggccaacaacatcctggtcaacagccatcttttcagcagttgccaacctgtcctccactgcagcctcacccgggcttgcaccaccagtcttcacctccacaccctcatcaccagccttgggcacagggcgcctccaatgaaggatctacccaggtggctggaagaaaatcctgaatttgcagttgctccagactggactgatatagttaagcagtctggttttgttcctgagtcgatgtttgaccgccttctcactgggcctgtagtgcggggagagggagcgagcagaagaggaagaaggcccaaaagtgagatcgccagagcagccgcggccgccgctgctgtggcctccacgtcagggatcaaccctttgctggtgaacagcctgtttgctggaatggacctgacgagccttcagaatctccagaatctccagtcgctccagctggcaggcctcatgggcttccctccaggactggcaacagctgccaccgccggaggcgatgcgaagaaccctgctgctgtgctgcccctgatgctgccaggaatggcgggcctgcccaacgtgtttggcttgggcgggctgttgaataaccctctgtcagctgctactggaaacaccactactgcttctagtcaaggagaaccggaagacagcacttcaaaaggagaggagaaaggaaatgagaatgaagacgagaacaaagactctgagaaaagcacagatgctgtttcggctgctgactctgcgaatggatctgttggtgctgctactgccccggctggattgccctcaaacccgctagccttcaaccctttcctcctgtccacaatggccccgggcctcttctacccatccatgtttctacctccaggactggggggattgacgctgcctgggttcccagcattggcaggacttcagaatgccgtgggctccagcgaagaaaaggctgctgacaaggctgagggaggaccctttaaagatggagagacccttgaaggcagcgatgccgaggagagcctggataagactgcagagtcctccctcttagaagacgaaatagcacagggtgaagagctagactcacttgatgggggggatgaaatagaaaacaatgaaaatgatgaataaccagtaccagttccagttcaagtgtttaaaacttttgacaagtggtagtcctactgtttacactcacagttaatgttcatacctagttttataagctgttctgtaacatagtgtagcaaaaaaaaaagttcaagtcatgttatacaggtgtgtcaaaaggtatcttggtcattaagtattgtgcagtgcattatttattatccctaggagagatgaaatttgagaggtgatcatgtctttttaaggaaacttacataatgctctgctttttttttttctcttggtaccattggtattataataaagagcaatttgtaactgagtggcactaatggaagaaagtgctgctcaaaggaagtatgaagttatatatttaattttttaattttaatttttaatttttttgctgtgaaggtcaagctgaaatttaccatacatatcatacttgctcatttgtttccctttttgactgtatgggggttcccacactcgtgcatacacacacatccatacactctgacaatctccacgctagtgtgaacgcctctgtcccgaggcgcagcaataataaggcagctgttgaatgtgaagggtccctttggaaaattaacctactgggagggttcttgccagacagaactacagttccattgtctcgtggtcttgtaatgcactggtaaaaacaaaataaatagatgaataaataaagagtgagagaagagagaatcaggtaccttttttaaattaaaggactttgttactttagccacaaagctaaaacagcattacctcagctctaaactagccttgaagtttacagacatgactttgtaaatgtattgtttttctttgttgtgatgtccttttatttttttctttgaaaactgctatcatgtaagataaaatgtaaattgctgccaactgtagtaatgatgcttttaataaaagtgacccatgatatgcagagatgtaattatagaatgtagtatatagggaaactggtgttcactctattttttttgtattcgcaatagatgcaaatacagcattctggcttttgtacagtttcttgatatatcctcttatactagattagcttttggtaagacactaaactgtctcgaagactagacaggaaggaaaaccttgaattactctcacataattccactccagatatctcaacagaaatgcatacaaaaagctcctattactccctcaaaagggcatctgagaccgagaatacttagaaatgtgtgcagcgtgtgataatgtggtacactgaagaacaaaagggcaaaagaaaaatgaggctttaacaggcacaatatctaggtcatttatccttggttaatgggtagaaaaacacaatgcggtagtgtcagcaagggacacaaaggcactctggtgtcctgcagaccagcgctcgatgccagaaaccagtgtgtggaaaaacccatgtggaattgaaacagacccacttaagcacgcacgcgcgcacgcacggtctcaggagctactgatttgtggacccctttttgacctttggtatttaaagtaaaatataatttgagatctactgttttcacctttttatgtcacctgaaccaacacaaagccatatttccatccagttaaaaagcaggggaagggatgtggacgagagtgtttcgtgtgtgttgccttcctccacacccttcccccaggacgtccgcacacagtccacctccagccagtgtgctgccagacaggtggtctaaattcctcccagactgtgagattcagttcgtttatgccccaagatgaaaatatgccccttaatgattctgggaaagaaacaacctgaaccctccaccttacagatcctgtgattgcttttatttatcatcgtcgttgtctgctgaaagtgaatgggccgtgcacactggaggaaagtgccttgaagagaatattttttgaaagggaattatttgaacacgggaaagtgaaactaggtctgcatgaagtataggaaatttaagtatttaagtaacaaagatgttagcagggagaatttgcttaataaaatgagtcattaaagggtgtttttttt

SEQ ID NO: 6838 - protein, 332 aa, Homo sapiens; identical to SEQ ID NO: 6836

SEQ ID NO: 6839 - DNA, 573 bp, Homo sapiens
gaagatgctggagactttgttgcaagaaaggatggctttaggtcatgttgctgaggcctgatcttaaagatctaattgctattggaagagaatcctgtttcccaactgggcctcccctctggagatggagcaaggaagactgtccaactctgctctgggcaccctgctgatggatgaggtgtcaggccagtcgtcatgtgaggactggtttccaaatgcagatacaaaaagaaaaattactgtcatgtgatgtgtgatccatgataccgtcatagttttgttttgctgtgctccaccttcataccttcgcctatgttagaacttctgagaagctgaagcatcacatataaaaagccaagaccatcctcaaggagtttaatgaatgtggcatcacaagaaaaatatgcatcaacattgaaaagaaaagaaataaaattccattaacagagcttgaggaagtggacttgactaagctggagtaaggagtgcagagagtgaggagacaggatgcgaaacaagaagatgaggaaactgaagcctgagaacaacatgaattctacaatacatttaccg

SEQ ID NO: 6840 - protein, 41 aa, Homo sapiens
MEQGRLSNSALGTLLMDEVSGQSSCEDWFPNADTKRKITVM

SEQ ID NO: 6841 - DNA, 579 bp, Homo sapiens
gaagatgctggagactttgttgcaagaaaggatggctttaggtcatgttgctgaggcctgatcttaaagatctaattgctattggaagagaatcctgtttcccaactgggcctcccctctggagatggagcaaggaagactgtccaactctgctctgggcaccctgctgatggatgaggtgtcaggccagtcgtcatgtgaggactggtttccaaatgatgagaaaactgaggctctgagagatgacatcataaagccttgtaagacccagttgctgtgctccaccttcataccttcgcctatgttagaacttctgagaagctgaagcatcacatataaaaagccaagaccatcctcaaggagtttaatgaatgtggcatcacaagaaaaatatgcatcaacattgaaaagcaaagccttccagccagttcaatggtgggagtctccccctgctcttcctgcacaatcatttcccattgaggaagaatgtgaaaatgacgcacaggtgagggaggcatactataagaccgcttcttacctttcgtttcctggagccaatatgaatgaagacccagagag

SEQ ID NO: 6842 - protein, 69 aa, Homo sapiens
MNVASQEKYASTLKSKAFQPVQWWESPPALPAQSFPIEEECENDAQVREAYYKTASYLSFPGANMNEDP

SEQ ID NO: 6843 - DNA, 2765 bp, Homo sapiens
ggcggggagggggcagtccacgaacttttgtcattcagcctgggagaccacggtgacattcctgtctgcgctgcgggcaggccagcctctccggccctggactagggggcgccgccgagagaagccgccgcaggctgcagagtcgccgaccgcgctgttcgcaggcagaccccgggctgcccaccgcggcctagcgcgcgccggatggcaggagaagtgtccgcggccacgggccgcttttcgctggagcggttgggcctcccgggcctggccctcgccgcggccctgctgctcctggccctctgcttgcttgtccggcgcaccaggagacccggtgagcctccattgataaaaggttggcttccttatcttggagtggtcctgaacttacgaaaagaccccttaaggttcatgaaaacacttcaaaagcaacatggtgacactttcacagttcttcttggtggaaagtacataacatttatcctggaccccttccagtaccagctagtgataaaaaatcataaacaattaagctttcgagtattttctaataaattattagagaaagcatttagcatcagtcagttgcaaaaaaatcatgacatgaatgatgagcttcacctctgctatcaatttttgcaaggcaaatctttggacatactcttggaaagcatgatgcagaatctaaaacaagtttttgaaccccagctgttaaaaaccacaagttgggacacggcagaactgtatccattctgcagctcaataatatttgagatcacatttacaactatatatggaaaagttattgtttgtgacaacaacaaatttattagtgagctaagagatgattttttaaaatttgatgacaagtttgcatatttagtatccaacatacccattgagcttctaggaaatgtcaagtctattagagagaaaattataaaatgcttctcatcagaaaagttagccaagatgcaaggatggtcagaagtttttcaaagcaggcaagatgtcctggagaaatattatgtgcacgaggaccttgaaataggagcacatcatttaggctttctctgggcctctgtggcaaacactattccaactatgttctgggcaatgtattatcttctgcggcacccagaagctatggcagcagtgcgtgacgaaattgaccgtttgctgcagtcaacaggtcaaaagaaagggtctggatttcccatccacctcaccagagaacaattggacagcctaatctgcctagaaagcagcatttttgaagctttacgactgtcctcatattcaaccaccattcgttttgttgaggaggatttgactctcagttcagagaccggggactactgtgtgcgaaagggagacttggtagccatctttcctccagtcctacatggtgaccctgaaatctttgaagctccagaggagtttagatatgatcgttttatagaagatggtaagaagaaaaccacctttttcaaaagagggaaaaagctgaagtgttacctaatgccgtttggaactggaaccagcaaatgtccaggccgattttttgcacttatggaaataaaacaattgttggttatacttttaacttattttgatttagaaataattgatgataagcccataggactaaactacagccgcttgttgtttggtattcagtatccagattctgatgttttatttagatacaaagtgaaatcttagagaagctaaaaggaaagaaaataaatctatcaaaattaccctaaacatcctaagctcatctatttctttttaatttctgcaaatgtaattgatttatttgtttaaaaagcgctaatttctatttgatctgatatcagtccagtttgtccttagtcacaaagcccatcataatataaaacaggatggtggcaggaaaatggacatcaaaatcaacttaagggtaggctcaaaacagggttgttgttgtttttttagtttctccttgttgtgattttcacctgttataataaatgtaccttcacaccaatagattgggcactgtggaatttaaatcactcaaattgttctctaatatgtaaaattacactttgaactactagaaaattgtgctggaaatggacacagtctaacaaattccaaattctcacagaagaaggaaattgaatttccatgagttacactggatgaaaatgttcccttcaagtataatattaataatacctatatttccagggtatgtgtgcattaaatgagtttcacagtagattgaatgcttcaacttcacttcaatatttaatcatgcataaatgttccttattactttgtatactatggctcaatagaacaaaatttctggttacataagacctttcatgttcaagttagatactgataagatttaatgtataagaaaacacagaacctattatatattcagaaattgccctagacattagtattaggtttattatgggagcaaatgttgaaataattacagcattgattatatcatttggctttagtataaactatacaggttatgcaaatattgcaattaaccctttcctaaatgctttcatatatataaactgagaagctagatatagtatttggttttgatgtctcaccttttggatttggagttcatgtgttctattttgaattacaacatcatgtaatgcagtgtaatttcatatgacacatgcagcattgtgtcaataattcaaagattttttttcaattgagagagtatctggctg

SEQ ID NO: 6844 - protein, 506 aa, Homo sapiens; identical to SEQ ID NO: 974

SEQ ID NO: 6845 - DNA, 1523 bp, Homo sapiens
cgggcaggccagcctctccggccctggactagggggcgccgccgagagaagccgccgcaggctgcagagtcgccgaccgcgctgttcgcaggcagaccccgggctgcccaccgcggcctagcgcgcgccggatggcaggagaagtgtccgcggccacgggccgcttttcgctggagcggttgggcctcccgggcctggccctcgccgcggccctgctgctcctggccctctgcttgcttgtccggcgcaccaggagacccggtgagcctccattgataaaaggttggcttccttatcttggagtggtcctgaacttacgaaaagaccccttaaggttcatgaaaacacttcaaaagcaacatggtgacactttcacagttcttcttggtggaaagtacataacatttatcctggaccccttccagtaccagctagtgataaaaaatcataaacaattaagctttcgagtattttctaataaattattagagaaagcatttagcatcagtcagttgcaaaaaaatcatgacatgaatgatgagcttcacctctgctatcaatttttgcaaggcaaatctttggacatactcttggaaagcatgatgcagaatctaaaacaagtttttgaaccccagctgttaaaaaccacaagttgggacacggcagaactgtatccattctgcagctcaataatatttgagatcacatttacaactatatatggaaaagttattgtttgtgacaacaacaaatttattagtgagctaagagatgattttttaaaatttgatgacaagtttgcatatttagtatccaacatacccattgagcttctaggaaatgtcaagtctattagagagaaaattataaaatgcttctcatcagaaaagttagccaagatgcaaggatggtcagaagtttttcaaagcaggcaagatgtcctggagaaatattatgtgcacgaggaccttgaaataggagcacatcatttaggctttctctgggcctctgtggcaaacactattccaactatgttctgggcaatgtattatcttctgcggcacccagaagctatggcagcagtgcgtgacgaaattgaccgtttgctgcagtcaacaggtcaaaagaaagggtctggatttcccatccacctcaccagagaacaattggacagcctaatctgcctagaaagcagcatttttgaagctttacgactgtcctcatattcaaccaccattcgttttgttgaggaggatttgactctcagttcagagaccggggactactgtgtgcgaaagggagacttggtagccatctttcctccagtcctacatggtgaccctgaaatctttgaagctccagaggagtttagatatgatcgttttatagaagatggtaagaagaaaaccacctttttcaaaagagggaaaaagctgaagtgttacctaatgccgtttggaactggaaccagcaaatgtccaggccgattttttgcacttatggaaataaaacaattgttggtt

SEQ ID NO: 6846 - protein, 463 aa, Homo sapiens
MAGEVSAATGRFSLERLGLPGLALAAALLLLALCLLVRRTRRPGEPPLIKGWLPYLGVVLNLRKDPLRFMKTLQKQHGDTFTVLLGGKYITFILDPFQYQLVIKNHKQLSFRVFSNKLLEKAFSISQLQKNHDMNDELHLCYQFLQGKSLDILLESMMQNLKQVFEPQLLKTTSWDTAELYPFCSSIIFEITFTTIYGKVIVCDNNKFISELRDDFLKFDDKFAYLVSNIPIELLGNVKSIREKIIKCFSSEKLAKMQGWSEVFQSRQDVLEKYYVHEDLEIGAHHLGFLWASVANTIPTMFWAMYYLLRHPEAMAAVRDEIDRLLQSTGQKKGSGFPIHLTREQLDSLICLESSIFEALRLSSYSTTIRFVEEDLTLSSETGDYCVRKGDLVAIFPPVLHGDPEIFEAPEEFRYDRFIEDGKKKTTFFKRGKKLKCYLMPFGTGTSKCPGRFFALMEIKQLL

SEQ ID NO: 6847 - DNA, 576 bp, Homo sapiens
gaatgtgtaccacagcaggtactgcatgctaaacccacgacttatgaccctattgtccaaatgagtggcaagcataacttctccattgtggtggtgaatgagaggatgaagagataatgatggcatatagaaagaaaagtgcagcaaacaaaaggataaccctgaagaaaaacttgagctgtttctctgctttgtctaatctcctgtcaggacatcatttattacccacaatattcacttgagaaaacaactttgagaaaccagcaaagaaaaagccaaaggatgaagatgaagtccttctatagttcaaatcgctcatgtctgtgatcttcaaaatgtgacattggacaatcaatttaaatgctcttttttaaaagatagactgttgtattgattattatttcatgctatctaaaagtttccaaaatattttgtcttgttgtaaagagagaaccagattaaaacaatcacgtgtcagtttgttttctaaatattcatatattctcctccctttctgaatgacagagccgttgaccaacagctgtttctattatgtagtttgggatatgcttcttt

SEQ ID NO: 6848 - protein, 41 aa, Homo sapiens
MMAYRKKSAANKRITLKKNLSCFSALSNLLSGHHLLPTIFT

SEQ ID NO: 6849 - DNA, 1284 bp, Homo sapiens
gtcaccataagcttttgatagggcttttgtctttccctttctcatacatttttctgtcctagagaaagtgggagatttaaaaattatgtattctgtctttgcttgggtactgtgaagtcaggtatatttgtagagttgggttagcgaggtagtgacaatttccttttaaagatgtatatcttctttctccccaattctttccaaagaaattactgatgctgaggaagatcctgaggataaagcaacaaacgcagtctggaaccagtgacattaaagacctgaaccctgcacctcatcttgggacaattctaagggctacctgagttccacatattatcaaggactcagctgaatcttttgatggaaaacttgagaccagcgtcagagctagacaagggccatggagggccaaggtcatggcagagcctcaattgtctccacagggagcggttatggacaacctaagagtcttgctctgttgcctaggctgaagtgaagtagtgtgatctcggctcgccacaacctctgcctcccaggttcaagcgattctcctgcctcagcctcccgagtagctggaactataggtcatctaggggaaaacagaagtatgaggattgagacttcttctgaaaatcagtgagtggctctctgcagtggttacagaaatgccccagcatggactccctcctgtaaactggctctgctgtcccagcagtgacggaaagcactcaatttgttttctcttggaagagacagagtggctgtcagtttactgcaatattttggactgcctggaaaattcaatgtacaacaggagaaaggagaggcaggagacagactctggaatagaagtcaaagacaaagaggctcgtaaacatcaagattctggggctaatctagccattcacagctttagaaccatggacagtaaaacttaaaatatatactatgttctaaccaccacaaggttattcactctagcaactaaaaaagcactggcctcaggatttgcaacattaaaagtcacagctcatccaccatcagatgctaactgaccctgctgttccacaagccataactacagctttgattggacaagagtctggtttcagtaactttctcctgattaagaagaccactgaccattgactggttttgccagtttacagagattacacacttacctacctttgtatgtaaaatgatcttttgatatataaagcataactgtagcacatttaaatgttaagtagccaccccaaagtgaacatgggtcatatgtta

SEQ ID NO: 6850 - protein, 35 aa, Homo sapiens
MLRKILRIKQQTQSGTSDIKDLNPAPHLGTILRAT

SEQ ID NO: 6851 - DNA, 553 bp, Homo sapiens
tgggctttagctaggagatttttgatcttgttagcggtgaccacagagcttggatacatggccacacccaaggtgaaagagaaaagctgccaattctggattcttagagtcctatctaccaggttaaggtgaggaaagagaagaccagcagaggttatggaacagtggtccagagtgagaccaccggccagggcaggtgaccaccagaaccaaacttcagagcacgtacgcatccccaggaatccagagatatgtggcagcagggacagcactggtgtaagactggagtggggttcctgtcatattaatttaaatataaaaaggaaatatgaaccctgtgatcagtttttatgagtgtatgaatataggatacatatttgtaatcttagccaatttcttaagtcaaaagttatgtaccattaagtttatttgatcattggggttgataatgaggctggatctgatctagtctgttctattgatatgtctgactattgcaacaccagtaagaaaaaaataggtggaattattattgctttatcatagatgtaac

SEQ ID NO: 6852 - protein, 65 aa, Homo sapiens
MEQWSRVRPPARAGDHQNQTSEHVRIPRNPEICGSRDSTGVRLEWGSCHINLNIKRKYEPCDQFL

SEQ ID NO: 6853 - DNA, 2624 bp, Homo sapiens
gctactgggaccatgttcagaatctgaccagggatggcccctttcccatccttctctggtcccagcctttgcagaggagagcatctgtgaagtcgagataatgccaccattgtgtattgtgcattgtgaacacccttctcttcccacagaaccatctaaattacaaccaaaggtctgatcaaaggatggcacccagtacatgtgctgaatgactgaataggggcagagtcccttcctggtcctgaaacgtggaaattgattatagcaccatgcaggagtttccccacccagtgagctggggcagaagagggtctcactttgtcacccaggctggaatgcagtggcacaatgtcggttcacttcaacctcaacctcccaggctcaagtgatcctcccacctcagtctcccaagtagctgaaattacaggagcctaccaccacgtctggctaatttttgtatttttagtagagatggggtttcactatgttggccaggctggttttcaactcctgaccttaggtgatccacctgcctcagcctcccaaagagctgggataaaaggcgtgagccaccgcgcctggcctgatgcctgtgtgtcattctcttcttttcttttatagtcatgttaacaaaaggagatgcacagaatagcaactttcagtgagactctaccgaattgttgtagggcttggtaaaaagtcccatgtgggagaaccttgagtgtccagtgagatgaaacacagattactgaaccagtaatctgtgttttttattgggcaatactagtacagacttaacctagacacaagactgttataattctataaatttacagtatgattgatataatagcaggtagaaaccacgttccttggcgctagtatcgagtacagttgaataactttaaagtgaaagttaacatttccaatctagattttgttatcatggggaaaataatgattgtgattgaacaaatcaatgctcgcatgcaaaattttaggtggacttttctgagatcttgtagaaaaaaaataaattgggtttttattgtctaaccacagatagagtagagttttgttttctggatctgtctagtagattactaagcttccttgtccagtgtgaataaataagtttgtgggggcatgggtgatgcagacagttttagcaggacttgtgtattttactgggtatgagagtagacttagcataaagtgcttgcaatttctctccacaattgctgtgctgactgattcatattctgggaattaatttactactgaattcctggttggtgttaagagaatggcttaacttctaatgataaagctgagaaaataaggactttcttaactgaaatgtgtcctcctcagtcttgttcttgtactgtgctctgtctctccatccatcctaagctctctctagtcacaacacttactcattcttccataaatagacttgtgcccaaaaggggacagacaaaagaagcatggcaacatgtcttacagattagctttctcttttcttcctctgtcttcttttttctgcaattctcaactacttccctggcttcaggaataatctcttatgatgatcattctcaaatcagtttctccagcctctacctttcttttacatttcagttctcaattctcattttgtaggtatctcaaacacaacatatctaaaatcaattttattccctgctattcccctgctcctccacctttcaatccctctcccaccctgctcccactcctgaaattccattttcatgtaaaggcttcaccacccgcctcctcactctactcaaccttttgtaaaacctctctcatctccatttccagttagtttccaagtccagtcaattttacatgatatcctacatggactcgttcactgagcttaattattattagcaaacattaacgcatattgtgttatttctacagaaatcagcaaaaggtcctggggtatcctctgtgtggaaaataaccatgatgcatcttcagtgttgtagtctgactctatcacccaggctggagtgcagtgtggctggaggtgaagttcagagatacggtgtctttcctgagttgtgcagctcacgcatggagggatcaggatgggaactgaagcctgcatggctcaaagtctttgctttgaagtgctgcaaatatggcttcctgaggaggactgccctggactgcaaatttgtattacacagacaataccttttcccagtgccttcttctggacttatgtctatgtatttagtaaataacttatgagtttgtttttaaaaaacctattgagggctgggcatggtggctcatgcctgtaatcccagcactttgggaggccgaggcgggtgatcacttgaggtcagtagttcgagacccacctggacaacatagtgaaaccctgtctctactaagaatataaaaattagctgggtatggtggcacacgcctgtaatcccagctactcaggaggctgaggcaggagaatcacttgaagccaggaggcggaggttgcagtgagccgagatcgtgccactgcactccagcctgggcgacagagtgactctgtctcaaaaaaacaaaacaaaacaaaacaaaaaagc

SEQ ID NO: 6854 - protein, 96 aa, Homo sapiens
MMHLQCCSLTLSPRLECSVAGGEVQRYGVFPELCSSRMEGSGWELKPAWLKVFALKCCKYGFLRRTALDCKFVLHRQYLFPVPSSGLMSMYLVNNL

SEQ ID NO: 6855 - DNA, 1910 bp, Homo sapiens
gtgtgaaccaacaaggggccagttttccattgttgtggtgaactgtcaagtgcaatttgcaataagttatcatgaaaagtttttagattacacgatcgcatatgctgcatttcacgttttattggacattttaccccactgagtggtaaaaaggacagaggctacagatggagttgctttgtttatgaaagtattttggtttgttttctttcatttaattgcctcatatttaaaaaccatgggtccactgttaaaaccacatgtgtatgtgcagctttacattttattttacgtgaagcatgtgattaggaaaactcattttcttttcaagcctcaggacctacctgaagagaagttttcttgtagctcaagttgtgcatgaattactgaatattttactgtgcttttcttcatgaagggtacatgctttgtactcttcactgaaagctgaaaacatttcttgttaccctcttttgtgcctttttattttgccaaccgtgtttatagaaaggacattactaatgacattttgcagattaaaaacattcatttgaacacagtagtcccctagaaaaacaactctacaaaaattttgcagccttattcattataattttgataaaattaacacaaaatcagtcaagaaggaaacatgtatattagtgaagtgtttttggagactgtttgaatgtgaccaaatgtggttctagttgacttcttttcactttggcttatatcaattcttgagagttaatgtgatcatgatattgcaaacaactataaatggtctctaggccttactttgtgattatacgttatctccggctagaaaaaaataatggtagtaaagaaactgacaaatgaaaaaaaaaaaacaaaaaaagcaacaataactttcagggcacctattgctctaaatgcataatataacttgctgccagaaccagatgtgtttaaaaaagaaaataaaaccaccttctttctatagccattaaagcaaactttactgttctaacaaatttgtattttattttgcattgccacacatctgcttatttaaaaactacatccctttggtagtaatgtttcaggacaagtaggtattacagcttgatgtttgtgtgttctaattctaagagttctttattccagatcatatagagtagttaagacaactgtaacagcattttttgaaatacattgtaaaataataaaaggtaacataattaaaatcgagtggatattatatacttgtggtataagcattattgattatttatttttaaattttattttaagttctgggatacatgtgctgaatgtatcataggtatacatgtgccatggtggtttgctgtacctatcaacccgtcatctaggttttaagccccgcatacattaggtatttttcctaatgctctccctccccttcaccccaccccctgatatgccctggtgtgtgatgtttccctatgttgattactcttaagcctgtttgtacacacgttgcctggcacactttcccagttccctgcagttgtgctacctgactaattcccatgcatcttccattcgtttccttcctgacaccacacctgcctctctccagattggattgctgctcctgtgcatatactcattgtagcatctatcacattatatcaaaattgcatatttaacagtgtctctcccctgctaagctctctgagaagagaatcttttttaagttttgttttgcattgacacataatatttgtgcatatttatggggtacaataatgatgtgagtcttcacattaaccttgtagctgtgcctgacttatagtaaatgctcagatttttttttagggggaatgagcaaagtttttttaaaaatcagtaaaacataaatatacttgttgggcaaaagg

SEQ ID NO: 6856 - protein, 65 aa, Homo sapiens
MKVFWFVFFHLIASYLKTMGPLLKPHVYVQLYILFYVKHVIRKTHFLFKPQDLPEEKFSCSSSCA

SEQ ID NO: 6857 - DNA, 3702 bp, Homo sapiens
aagcgacagaggcgtcaggtcacctgggaagagtctgcagagcctttgcccgccagcgccttcgctctttggctccctgagttagtccggttgcttgcgatcgccgcggccggggctgcgaaccgaagggctcgctccgcgccgcctgggtctctacctcatccgtaggtgtggccctgatggtgtggcaggctctggactcctaaagctctggagcgaatttaagattttattcatgtgcatggcatagaagatgaattcttccacttccaccatgagtgaagagcctgacgctctatcggtagttaaccagttacgggatctagcagcagatccgttaaacagaagagccatcgtccaggatcagggatgtctgcctggccttattttatttatggaccatcccaaccctccagtcgtccactccgctttgcttgctcttcgatacttggcagaatgccgtgcaaacagagaaaagatgaaaggagaactgggtatgatgttgagcttacaaaatgttatacagaaaactacaactccaggagaaacaaaacttctggcctctgaaatctatgacattcttcagtcctccaatatggcagatggtgatagttttaatgagatgaattcacgtcgaaggaaagctcaattttttctgggaactacaaacaaacgtgccaaaacagtggttttgcatatagatggccttgatgatacgtctcggagaaatctatgtgaagaggctttgttaaaaattaaaggtgttattagctttacttttcaaatggctgttcaaaggtgtgtggtgcgaatccgttcagatttgaaagctgaggctttggcatcagcaatagcatcaaccaaggttatgaaagctcagcaagttgtgaaaagtgaaagtggagaagagatgttggtcccattccaagatactcctgtggaagttgaacagaacacagagctacctgactacctgcctgaggatgagagtcccacaaaggaacaggacaaagcggtgtcccgggtcggctcacacccagaaggtggagctagctggcttagcacagctgcaaactttttatccagatcattttattggtgacttcacttttgggctcaaggactgtgtgaaccaacaaggggccagttttccattgttgtggtgaactgtcaagtgcaatttgcaataagttatcatgaaaagtttttagattacacgatcgcatatgctgcatttcacgttttattggacattttaccccactgagtggtaaaaaggacagaggctacagatggagttgctttgtttatgaaagtattttggtttgttttctttcatttaattgcctcatatttaaaaaccatgggtccactgttaaaaccacatgtgtatgtgcagctttacattttattttacgtgaagcatgtgattaggaaaactcattttcttttcaagcctcaggacctacctgaagagaagttttcttgtagctcaagttgtgcatgaattactgaatattttactgtgcttttcttcatgaagggtacatgctttgtactcttcactgaaagctgaaaacatttcttgttaccctcttttgtgcctttttattttgccaaccgtgtttatagaaaggacattactaatgacattttgcagattaaaaacattcatttgaacacagtagtcccctagaaaaacaactctacaaaaattttgcagccttattcattataattttgataaaattaacacaaaatcagtcaagaaggaaacatgtatattagtgaagtgtttttggagactgtttgaatgtgaccaaatgtggttctagttgacttcttttcactttggcttatatcaattcttgagagttaatgtgatcatgatattgcaaacaactataaatggtctctaggccttactttgtgattatacgttatctccggctagaaaaaaataatggtagtaaagaaactgacaaactgaaaataagaaaacaaaaatcaaatgcctataataccataatgccagtttggtatagagtccaactttaaaacatgaattgctcgacagagttctattcagtaggtgtttctttgtattgtcttttgtgaatttattatgaaaatgctgcgttgtgttgaatgaaaaagacccaaattactgcttatgaagaaataaagccagcattgatcacttaatcctgtttctcatgtccagccagaaaaaagaacttcagtgaaggtaagataaataaatacatacacatatgtttttttggtagataagtgctaattacatatatgtaatgctttattaaatttctgaaatatttggtaactaaaattttctttttggaaattaataaatccagatacatattaatgttgatatgagtaaaaacaaataggaagaaattgaaatttcttttcatcaacatgtagagctgctattttactatttggagaatatgatgtgaaaattggacctcaaagggtttccttgtgttttcattgtaaaataccatcatcagtgagagtcttgagttcactaacattgtcaccttctggagagagagttaatggggggcattgaggatgatatttttttacatgtgtttggtttctgattcaagtgacacgcacaaactgaaaaaaaaaaaacaaaaaaagcaacaataactttcagggcacctattgctctaaatgcataatataacttgctgccagaaccagatgtgtttaaaaaagaaaataaaaccaccttctttctatagccattaaagcaaactttactgttctaacaaatttgtattttattttgcattgccacacatctgcttatttaaaaactacatccctttggtagtaatgtttcaggacaagtaggtattacagcttgatgtttgtgtgttctaattctaagagttctttattccagatcatatagagtagttaagacaactgtaacagcattttttgaaatacattgtaaaataataaaaggtaacataattaaaatcgagtggatattatatacttgtggtataagcattattgattatttatttttaaattttattttaagttctgggatacatgtgctgaatgtatcataggtatacatgtgccatggtggtttgctgtacctatcaacccgtcatctaggttttaagccccgcatacattaggtatttttcctaatgctctccctccccttcaccccaccccctgatatgccctggtgtgtgatgtttccctatgttgattactcttaagcctgtttgtacacacgttgcctggcacactttcccagttccctgcagttgtgctacctgactaattcccatgcatcttccattcgtttccttcctgacaccacacctgcctctctccagattggattgctgctcctgtgcatatactcattgtagcatctatcacattatatcaaaattgcatatttaacagtgtctctcccctgctaagctctctgagaagagaatcttttttaagttttgttttgcattgacacataatatttgtgcatatttatggggtacaataatgatgtgagtcttcacattaaccttgtagctgtgcctgacttatagtaaatgctcagatttttttttagggggaatgagcaaagtttttttaaaaatcagtaaaacataaatatacttgttgggcaaaagg

SEQ ID NO: 6858 - protein, 282 aa, Homo sapiens; identical to SEQ ID NO: 976

SEQ ID NO: 6859 - DNA, 1247 bp, Homo sapiens
gtgtgaaccaacaaggggccagttttccattgttgtggtgaactgtcaagtgcaatttgcaataagttatcatgaaaagtttttagattacacgatcgcatatgctgcatttcacgttttattggacattttaccccactgagtggtaaaaaggacagaggctacagatggagttgctttgtttatgaaagtattttggtttgttttctttcatttaattgcctcatatttaaaaaccatgggtccactgttaaaaccacatgtgtatgtgcagctttacattttattttacgtgaagcatgtgattaggaaaactcattttcttttcaagcctcaggacctacctgaagagaagttttcttgtagctcaagttgtgcatgaattactgaatattttactgtgcttttcttcatgaagggtacatgctttgtactcttcactgaaagctgaaaacatttcttgttaccctcttttgtgcctttttattttgccaaccgtgtttatagaaaggacattactaatgacattttgcagattaaaaacattcatttgaacacagtagtcccctagaaaaacaactctacaaaaattttgcagccttattcattataattttgataaaattaacacaaaatcagtcaagaaggaaacatgtatattagtgaagtgtttttggagactgtttgaatgtgaccaaatgtggttctagttgacttcttttcactttggcttatatcaattcttgagagttaatgtgatcatgatattgcaaacaactataaatggtctctaggccttactttgtgattatacgttatctccggctagaaaaaaataatggtagtaaagaaactgacaaatgaaaaaaaaaaaacaaaaaaagcaacaataactttcagggcacctattgctctaaatgcataatataacttgctgccagaaccagatgtgtttaaaaaagaaaataaaaccaccttctttctatagccattaaagcaaactttactgttctaacaaatttgtattttattttgcattgccacacatctgcttatttaaaaactacatccctttggtagtaatgtttcaggacaagtaggtattacagcttgatgtttgtgtgttctaattctaagagttctttattccagatcatatagagtagttaagacaactgtaacagcattttttgaaatacattgtaaaataataaaaggtaacataattaaaatcgagtggatattat

SEQ ID NO: 6860 - protein, 65 aa, Homo sapiens; identical to SEQ ID NO: 6856

SEQ ID NO: 6861 - DNA, 3039 bp, Homo sapiens
aagcgacagaggcgtcaggtcacctgggaagagtctgcagagcctttgcccgccagcgccttcgctctttggctccctgagttagtccggttgcttgcgatcgccgcggccggggctgcgaaccgaagggctcgctccgcgccgcctgggtctctacctcatccgtaggtgtggccctgatggtgtggcaggctctggactcctaaagctctggagcgaatttaagattttattcatgtgcatggcatagaagatgaattcttccacttccaccatgagtgaagagcctgacgctctatcggtagttaaccagttacgggatctagcagcagatccgttaaacagaagagccatcgtccaggatcagggatgtctgcctggccttattttatttatggaccatcccaaccctccagtcgtccactccgctttgcttgctcttcgatacttggcagaatgccgtgcaaacagagaaaagatgaaaggagaactgggtatgatgttgagcttacaaaatgttatacagaaaactacaactccaggagaaacaaaacttctggcctctgaaatctatgacattcttcagtcctccaatatggcagatggtgatagttttaatgagatgaattcacgtcgaaggaaagctcaattttttctgggaactacaaacaaacgtgccaaaacagtggttttgcatatagatggccttgatgatacgtctcggagaaatctatgtgaagaggctttgttaaaaattaaaggtgttattagctttacttttcaaatggctgttcaaaggtgtgtggtgcgaatccgttcagatttgaaagctgaggctttggcatcagcaatagcatcaaccaaggttatgaaagctcagcaagttgtgaaaagtgaaagtggagaagagatgttggtcccattccaagatactcctgtggaagttgaacagaacacagagctacctgactacctgcctgaggatgagagtcccacaaaggaacaggacaaagcggtgtcccgggtcggctcacacccagaaggtggagctagctggcttagcacagctgcaaactttttatccagatcattttattggtgacttcacttttgggctcaaggactgtgtgaaccaacaaggggccagttttccattgttgtggtgaactgtcaagtgcaatttgcaataagttatcatgaaaagtttttagattacacgatcgcatatgctgcatttcacgttttattggacattttaccccactgagtggtaaaaaggacagaggctacagatggagttgctttgtttatgaaagtattttggtttgttttctttcatttaattgcctcatatttaaaaaccatgggtccactgttaaaaccacatgtgtatgtgcagctttacattttattttacgtgaagcatgtgattaggaaaactcattttcttttcaagcctcaggacctacctgaagagaagttttcttgtagctcaagttgtgcatgaattactgaatattttactgtgcttttcttcatgaagggtacatgctttgtactcttcactgaaagctgaaaacatttcttgttaccctcttttgtgcctttttattttgccaaccgtgtttatagaaaggacattactaatgacattttgcagattaaaaacattcatttgaacacagtagtcccctagaaaaacaactctacaaaaattttgcagccttattcattataattttgataaaattaacacaaaatcagtcaagaaggaaacatgtatattagtgaagtgtttttggagactgtttgaatgtgaccaaatgtggttctagttgacttcttttcactttggcttatatcaattcttgagagttaatgtgatcatgatattgcaaacaactataaatggtctctaggccttactttgtgattatacgttatctccggctagaaaaaaataatggtagtaaagaaactgacaaactgaaaataagaaaacaaaaatcaaatgcctataataccataatgccagtttggtatagagtccaactttaaaacatgaattgctcgacagagttctattcagtaggtgtttctttgtattgtcttttgtgaatttattatgaaaatgctgcgttgtgttgaatgaaaaagacccaaattactgcttatgaagaaataaagccagcattgatcacttaatcctgtttctcatgtccagccagaaaaaagaacttcagtgaaggtaagataaataaatacatacacatatgtttttttggtagataagtgctaattacatatatgtaatgctttattaaatttctgaaatatttggtaactaaaattttctttttggaaattaataaatccagatacatattaatgttgatatgagtaaaaacaaataggaagaaattgaaatttcttttcatcaacatgtagagctgctattttactatttggagaatatgatgtgaaaattggacctcaaagggtttccttgtgttttcattgtaaaataccatcatcagtgagagtcttgagttcactaacattgtcaccttctggagagagagttaatggggggcattgaggatgatatttttttacatgtgtttggtttctgattcaagtgacacgcacaaactgaaaaaaaaaaaacaaaaaaagcaacaataactttcagggcacctattgctctaaatgcataatataacttgctgccagaaccagatgtgtttaaaaaagaaaataaaaccaccttctttctatagccattaaagcaaactttactgttctaacaaatttgtattttattttgcattgccacacatctgcttatttaaaaactacatccctttggtagtaatgtttcaggacaagtaggtattacagcttgatgtttgtgtgttctaattctaagagttctttattccagatcatatagagtagttaagacaactgtaacagcattttttgaaatacattgtaaaataataaaaggtaacataattaaaatcgagtggatattat

SEQ ID NO: 6862 - protein, 282 aa, Homo sapiens; identical to SEQ ID NO: 976

SEQ ID NO: 6863 - DNA, 703 bp, Homo sapiens
aaggaggaaagccctcactaggaagagacttgtgccacccggggcaagaacatcagagatccagtgacagcccagcgacctccgggatcaattgcaatgggaggtgtgttttatggaccatgtgctgctatgtatgcctgaagaagtacttgaaatgcaaatttggggagactttgccatataaatgcttggctggattaagcgcctaattaggatggtttttcaacaagttggagtaagcatgcaatcggtactttggtctaggaagccatatggttcgtctcgaagtatcgtaaggaaaattggtactaatttgtctctgattcagtgtccaagagttcagtttcagattaacagccatgcaacagaatggagtcccagccacccaggagaggatgcagtggcgtcttttgctgatgttggatgggtagccaaagaagaaggagagtgttcagcaagactaaggacagaggtcagatcaaggccaccccttcaggatgaccttcttttctttgagaaggccccaagcagacagatttccttaccagacttgtctcaagaagagcctcagctgaagaccccagcgctggcaaatgaggaagcactgcagaagatttgcgctctcgaaaatgaacttgctgctctcagagctcagattgccaaaattgtgacccagcaggagcagcaaaatctcactgcaggt

SEQ ID NO: 6864 - protein, 172 aa, Homo sapiens
MLGWIKRLIRMVFQQVGVSMQSVLWSRKPYGSSRSIVRKIGTNLSLIQCPRVQFQINSHATEWSPSHPGEDAVASFADVGWVAKEEGECSARLRTEVRSRPPLQDDLLFFEKAPSRQISLPDLSQEEPQLKTPALANEEALQKICALENELAALRAQIAKIVTQQEQQNLTA

SEQ ID NO: 6865 - DNA, 2811 bp, Homo sapiens
ccgactgtgactctcagcagccggcttgcggagcggttgccgcgtcctctgccgagcttcttgtgcccgcctccgagcctgaggaaacagctgattgatcagcctggctcaggcttggggcggggattggctgattggcagcaacgccacgggacagccaagctagaagcctgaggagccggagagggtgctggctgccgcgcggccgagtgtgttttatggaccatgtgctgctatgtatgcctgaagaagtacttgaaatgcaaatttggggagactttgccatataaatgcttggctggattaagcgcctaattaggatggtttttcaacaagttggagtaagcatgcaatcggtactttggtctaggaagccatatggttcgtctcgaagtatcgtaaggaaaattggtactaatttgtctctgattcagtgtccaagagttcagtttcagattaacagccatgcaacagaatggagtcccagccacccaggagaggatgcagtggcgtcttttgctgatgttggatgggtagccaaagaagaaggagagtgttcagcaagactaaggacagaggtcagatcaaggccaccccttcaggatgaccttcttttctttgagaaggccccaagcagacagatttccttaccagacttgtctcaagaagagcctcagctgaagaccccagcgctggcaaatgaggaagcactgcagaagatttgcgctctcgaaaatgaacttgctgctctcagagctcagattgccaaaattgtgacccagcaggagcagcaaaatctcactgcaggtgacttagattctaccacatttggtaccataccaccacaccctccacctcccccaccgcccctgcctccccctgcactggggctccaccaaagtacatctgctgttgatctgattaaagaacgaagagagaaaagagccaatgctggaaagactttggttaagaacaatccaaagaaacctgaaatgccaaatatgctagagatccttaaagagatgaacagtgtaaaacttcggtcagtgaagaggtcagagcaagatgtgaagcccaagccagtggatgctactgaccctgctgccctcatagcagaggctctgaaaaagaaatttgcttatcggtatcgaagtgatagccaagatgaagttgaaaaaggaattccaaagtctgaatcagaggccacctcagagagagtgttgtttgggccacacatgttgaagccaacaggaaaaatgaaggctttaattgaaaatgtatcagactcctaatagacaatgagctgcgaaaagactcctggttcccctgttgatttgtgagggccaagtttgctagtagaaatcgacactgtttagtaaatacctctttagtattcagtggtcttcttttcaggctaattagtggattaagcaataatgaaagcactaagtttggttttgcttttgtgagatggtcagctttggtgctctccacaacatgtgtgttctgacatgtttctaatatgtggccagggcgttcagatttccagttttgaaaacaattgtatagatttcacaacacaaaaaggacatttgtggatgttactgcacattttaaattcttaacactaatttatctgtataagtgttttatatgcatatttttggacataaacagtttatgtaaaattagtaatgaatgatggcaacgagggcactgttatcttcgtttgttttcaatgatcatttagcattcaatgatggaacagctggtataacataagttgttggcatgaaatatttgagattggaaacttcttgccttgaacagaacttatatcttagattctctctcacattttcttggagctggggtttgaataggaaccagatgatgttcactgctgaaattccataatgcttcccattgaagggaagttgagaaccaggaaagctgctttcacgtcattgccatccagtactgacagggaagaaagatgtagttttccagtagtgatgaatcaaattattgaattaaatttcttcttaagaagtaaaaactcagaatgtaccatcttgtttcctttcagtttattaaatggcatcataaagatgactttgctaagttaatagagttaaaaatttttttaatataagccaaaatattaactttaatgaaacattgacttggcaaatgaatttcctataaattatcattggtcagaatgctgttttgtttaataatattacgcaacataaaccataggtgttattagaagtggagaactgcctttttcatctggggcttttaaggacttgctataaatgattattttttaaatgctttataaatcttcatggtttttctatttctgatacactcagctatagttaataccagagtatcctaccaggagtaatatttggaatatttaaatctagtaaaagaagaaagttgtacttcctggctgggagtattaggagatgggagtagagattcacttttaagttcttgaaaatatatgcattctcctaaatattaacaaaaatgatttggggaaatgacatggcttgattgttctgtttaaatttgtactgtggcttatgttacacatgttcatgttcacctctcattcacctgttttatatggtttaaaattctctttaacaaaattcagaaaattcacctgaaacgtattttgacctaaaagaaacatatttttgtatcagtattgaattttggacagtgcccccatataaggaagttactgttttaaaataaagcaaactaactgttttattttccttggac

SEQ ID NO: 6866 - protein, 333 aa, Homo sapiens
MLGWIKRLIRMVFQQVGVSMQSVLWSRKPYGSSRSIVRKIGTNLSLIQCPRVQFQINSHATEWSPSHPGEDAVASFADVGWVAKEEGECSARLRTEVRSRPPLQDDLLFFEKAPSRQISLPDLSQEEPQLKTPALANEEALQKICALENELAALRAQIAKIVTQQEQQNLTAGDLDSTTFGTIPPHPPPPPPPLPPPALGLHQSTSAVDLIKERREKRANAGKTLVKNNPKKPEMPNMLEILKEMNSVKLRSVKRSEQDVKPKPVDATDPAALIAEALKKKFAYRYRSDSQDEVEKGIPKSESEATSERVLFGPHMLKPTGKMKALIENVSDS

SEQ ID NO: 6867 - DNA, 765 bp, Homo sapiens
ctgaggaaacagctgattgatcagcctggctcaggcttggggcggggattggctgattggcagcaacgccacgggacagccaagctagaagcctgaggagccggagagggtgctggctgccgcgcggccgagtgtgttttatggaccatgtgctgctatgtatgcctgaagaagtacttgaaatgcaaatttggggagactttgccatataaatgcttggctggattaagcgcctaattaggatggtttttcaacaagttggagtaagcatgcaatcggtactttggtctaggaagccatatggttcgtctcgaagtatcgtaaggaaaattggtactaatttgtctctgattcagtgtccaagagttcagtttcagctgtagtaggacaggaccttgctgggaaccttcaattaacagccatgcaacagaatggagtcccagccacccaggagaggatgcagtggcgtcttttgctgatgttggatgggtagccaaagaagaaggagagtgttcagcaagactaaggacagaggtcagatcaaggccaccccttcaggatgaccttcttttctttgagaaggccccaagcagacagatttccttaccagacttgtctcaagaagagcctcagctgaagaccccagcgctggcaaatgaggaagcactgcagaagatttgcgctctcgaaaatgaacttgctgctctcagagctcagattgccaaaattgtgacccagcaggagcagcaaaatctcactgcaggt

SEQ ID NO: 6868 - protein, 56 aa, Homo sapiens
MLGWIKRLIRMVFQQVGVSMQSVLWSRKPYGSSRSIVRKIGTNLSLIQCPRVQFQL

SEQ ID NO: 6869 - DNA, 802 bp, Homo sapiens
ctgaggaaacagctgattgatcagcctggctcaggcttggggcggggattggctgattggcagcaacgccacgggacagccaagctagaagcctgaggagccggagagggtgctggctgccgcgcggccgagtgtgttttatggaccatgtgctgctatgtatgcctgaagaagtacttgaaatgcaaatttggggagactttgccatataaatgcttggctggattaagcgcctaattaggatggtttttcaacaagttggagtaagcatgcaatcgaatagtatgaaaacctgatgaaaataaaatttttactgtactttggtctaggaagccatatggttcgtctcgaagtatcgtaaggaaaattggtactaatttgtctctgattcagtgtccaagagttcagtttcagctgtagtaggacaggaccttgctgggaaccttcaattaacagccatgcaacagaatggagtcccagccacccaggagaggatgcagtggcgtcttttgctgatgttggatgggtagccaaagaagaaggagagtgttcagcaagactaaggacagaggtcagatcaaggccaccccttcaggatgaccttcttttctttgagaaggccccaagcagacagatttccttaccagacttgtctcaagaagagcctcagctgaagaccccagcgctggcaaatgaggaagcactgcagaagatttgcgctctcgaaaatgaacttgctgctctcagagctcagattgccaaaattgtgacccagcaggagcagcaaaatctcactgcaggt

SEQ ID NO: 6870 - protein, 137 aa, Homo sapiens
FSVQEFSFSCSRTGPCWEPSINSHATEWSPSHPGEDAVASFADVGWVAKEEGECSARLRTEVRSRPPLQDDLLFFEKAPSRQISLPDLSQEEPQLKTPALANEEALQKICALENELAALRAQIAKIVTQQEQQNLTA

SEQ ID NO: 6871 - DNA, 813 bp, Homo sapiens
ctgaggaaacagctgattgatcagcctggctcaggcttggggcggggattggctgattggcagcaacgccacgggacagccaagctagaagcctgaggagccggagagggtgctggctgccgcgcggccgagtgtgttttatggaccatgtgctgctatgtatgcctgaagaagtacttgaaatgcaaatttggggagactttgccatataaatgcttggctggattaagcgcctaattaggatggtttttcaacaagttggagtaagcatgcaatcggtactttggtctaggaagccatatggttcgtctcgaagtatcgtaaggaaaattggtactaatttgtctctgattcagtgtccaagagttcagtttcagattaacagccatgcaacagaatggagtcccagccacccaggagaggatgcagtggcgtcttttgctgatgttggatgggtagccaaagaagaaggagagtgttcagcaagactaaggacagaggtcagatcaaggccaccccttcaggatgaccttcttttctttgagaaggccccaagcagacagatttccttaccagacttgtctcaagaagagcctcagctgaagaccccagcgctggcaaatgaggaagcactgcagaagatttgcgctctcgaaaatgaacttgctgttgatctgattaaagaacgaagagagaaaagagccaatgctggaaagactttggttaagaacaatccaaagaaacctgaaatgccaaatatgctagagatccttaaagagatgaacagtgtaaaacttcggtcagtgaagaggt

SEQ ID NO: 6872 - protein, 199 aa, Homo sapiens
MLGWIKRLIRMVFQQVGVSMQSVLWSRKPYGSSRSIVRKIGTNLSLIQCPRVQFQINSHATEWSPSHPGEDAVASFADVGWVAKEEGECSARLRTEVRSRPPLQDDLLFFEKAPSRQISLPDLSQEEPQLKTPALANEEALQKICALENELAVDLIKERREKRANAGKTLVKNNPKKPEMPNMLEILKEMNSVKLRSVK

SEQ ID NO: 6873 - DNA, 635 bp, Homo sapiens
atctcagctactcaagaggctgaagcaggagaatcacttgaacctggagggggcagaggttgcagggagccgagattgctccacttcactccagcctgggcgaaagagtgaaactccatctcaaaaataaatacataatagtaataaggtactttggtctaggaagccatatggttcgtctcgaagtatcgtaaggaaaattggtactaatttgtctctgattcagtgtccaagagttcagtttcagctgtagtaggacaggaccttgctgggaaccttcaattaacagccatgcaacagaatggagtcccagccacccaggagaggatgcagtggcgtcttttgctgatgttggatgggtagccaaagaagaaggagagtgttcagcaagactaaggacagaggtcagatcaaggccaccccttcaggatgaccttcttttctttgagaaggccccaagcagacagatttccttaccagacttgtctcaagaagagcctcagctgaagaccccagcgctggcaaatgaggaagcactgcagaagatttgcgctctcgaaaatgaacttgctgctctcagagctcagattgccaaaattgtgacccagcaggagcagcaaaatctcactgcaggt

SEQ ID NO: 6874 - protein, 137 aa, Homo sapiens; identical to SEQ ID NO: 6870

SEQ ID NO: 6875 - DNA, 978 bp, Homo sapiens
caggctaattagtggattaagcaataatgaaagcactaagtttggttttgcttttgtgagatggtcagctttggtgctctccacaacatgtgtgttctgacatgtttctaatatgtggccagggcgttcagatttccagttttgaaaacaattgtatagatttcacaacacaaaaaggacatttgtggatgttactgcacattttaaattcttaacactaatttatctgtataagtgttttatatgcatatttttggacataaacagtttatgtaaaattagtaatgaatgatggcaacgagggcactgttatcttcgtttgttttcaatgatcatttagcattcaatgatggaacagctggtataacataagttgttggcatgaaatatttgagattggaaacttcttgccttgaacagaacttatatcttagattctctctcacattttcttggagctggggtttgaataggaaccagatgatgttcactgctgaaattccataatgcttcccattgaagggaagttgagaaccaggaaagctgctttcacgtcattgccatccagtactgacagggaagaaagatgtagttttccagtagtgatgaatcaaattattgaattaaatttcttcttaagaagtaaaaactcagaatgtaccatcttgtttcctttcagtttattaaatggcatcataaagatgactttgctaagttaatagagttaaaaatttttttaatataagccaaaatattaactttaatgaaacattgacttggcaaatgaatttcctataaattatcattggtcagaatgctgttttatatggtttaaaattctctttaacaaaattcagaaaattcacctgaaacgtattttgacctaaaagaaacatatttttgtatcagtattgaattttggacagtgcccccatataaggaagttactgttttaaaataaagcaaactaactgtttt

SEQ ID NO: 6876 - protein, 70 aa, Homo sapiens
MLPIEGKLRTRKAAFTSLPSSTDREERCSFPVVMNQIIELNFFLRSKNSECTILFPFSLLNGIIKMTLLS

SEQ ID NO: 6877 - DNA, 1195 bp, Homo sapiens
aactaggctggagtgcagtggcatgatcactgcagcctccacctcctaggctcaagcaatcctcccacctcagcctcctgagtgccaccacaccacccagtccagcctaggtgacagagcaagactctgtctcaaaaaaaaaaaaaaaacttttttatagagacagggtctctctttgttggcttggctggtcttgaactcttgggctcaagcagtcctgccaccgtggcctctcaaagtgctgggattacaggtgtgagacactgcatcaggcctatagctccacttaaatacgacctatattactggaatatttttttctaaaaaattttaggaaacagttaaatatttaaaagattacttttttaaaaagcaagtaaatattacagaacagaatgcaaaatttattttacatgggagactaaaaattttcacacacatggccaccctttgggcctcttggctcaacatttcaggggctgagggagtctctgctctaggagtaaaaggtccttggagagaaaattttgacaagtcctaactttaaaaaagaaaaattggttcctggtcaatatttgtactcactgtaaatgtgatggttggtaatgatactctgtataaaagtaaaaatcatattttatgtcctttgcaaacaaatatatttgtacctgaggtacagattagaggtgctagtaattccttgaagattctgaaaatgatctttttttccaaaatgctttcttggtttttattaaactttctattttcttaaaactctcacatcaggtatttccagtgttttcaagcatgtataaatattttaatgtataaatgttgtttaaaatcccctcaatcggtatctcctgattgagaaaatacacagtgaccaatagctaataggaattcagtattgctttcaaagaaatgtgcatattaatcactgtagcatctgcatacatttgaaacacggagtaatacaggtctgtgcaagaattagcagcttgttccttgctaataatgacttgtgtcatctggaaggcccccaagagcccatggtctacaggtggaatgaccaccacttgggagtgagctgatggagagcacccagcaggtctcctccatcttcctggttcctgtgctcaccatagggctggtgtacattgggccattaataaacgtttgttgaacaaattaa

SEQ ID NO: 6878 - protein, 58 aa, Homo sapiens
MVGNDTLYKSKNHILCPLQTNIFVPEVQIRGASNSLKILKMIFFSKMLSWFLLNFLFS

SEQ ID NO: 6879 - DNA, 4021 bp, Homo sapiens
ggtgatcactgttggaaggcagctgcttgaggtccaaggcagtcagtgtcccctctcttttgcctcgggacagctggtatttatcagactcctaagaagttttccttgctccctagtagaagagagagattatgcagcgggcttttgattgatccaatgggaattacattgatctggtgtctggccttggttcttatcaagtggatcacctctaagaggcgtggagctatttcctatgacagttctgatcagactgcattatacattcgtatgctaggagatgtacgtgtaaggagccgagcaggatttgaatcagaaagaagaggttctcacccatatattgattttcgtattttccactctcaatctgaaattgaagtgtctgtctctgcaaggaatatcagaaggctactaagtttccagcgatatcttagatcttcacgcttttttcgtggtactgcggtttcaaattccctaaacattttagatgatgattataatggacaagccaagtgtatgctggaaaaagttggaaattggaattttgatatctttctatttgatagactaacaaatggaaatagtctagtaagcttaacctttcatttatttagtcttcatggattaattgagtacttccatttagatatgatgaaacttcgtagatttttagttatgattcaagaagattaccacagtcaaaatccttaccataacgcagtccacgctgcggatgttactcaggccatgcactgttacttaaaggaacctaagcttgccaattctgtaactccttgggatatcttgctgagcttaattgcagctgccactcatgatctggatcatccaggtgttaatcaacctttccttattaaaactaaccattacttggcaactttatacaagaatacctcagtactggaaaatcaccactggagatctgcagtgggcttattgagagaatcaggcttattctcacatctgccattagaaagcaggcaacaaatggagacacagataggtgctctgatactagccacagacatcagtcgccagaatgagtatctgtctttgtttaggtcccatttggatagaggtgatttatgcctagaagacaccagacacagacatttggttttacagatggctttgaaatgtgctgatatttgtaacccatgtcggacgtgggaattaagcaagcagtggagtgaaaaagtaacggaggaattcttccatcaaggcaaatatagaaaaaaaatatcatttgggtgtgagtccactttgcgatcgtcacactgaatctattgccaacatccagattggttttatgacttacctagtggagcctttatttacagaatgggccaggttttccaatacaaggctatcccagacaatgcttggacacgtggggctgaataaagccagctggaagggactgcagagagaacagtcgagcagtgaggacactgatgctgcatttgagttgaactcacagttattacctcaggaaaatcggttatcataacccccagaaccagtgggacaaactgcctcctggaggtttttagaaatgtgaaatggggtcttgaggtgagagaacttaactcttgactgccaaggtttccaagtgagtgatgccagccagcattatttatttccaagatttcctctgttggatcatttgaacccacttgttaattgcaagacccgaacatacagcaatatgaatttggctttcatgtgaaaccttgaatatgcaaagcccagcaggagagaatccgaaaggagtaacaaaggaagttttgatatgtgccacgactttttcaaagcatctaatcttcaaaacgtgaaacttgaattgttcagcaacaatctcttggaatttaaccagtctgatgcaacaatgtgtatcttgtaccttccactaagttctctctgagaaaatggaaatgtgaagtgcccagcctctgctgcctctggcaagacaatgtttacaaatcaactctgaaaatattggttctaaattgccttggagcatgattgtgaaggaaccactcaaacaaatttaaagatcaaactttagactgcagctctttccccctggtttgcctttttcttctttggatgccaccaaagcctcccatttgctatagttttatttcatgcactggaaactgagcatttatcgtagagtaccgccaagctttcactccagtgccgtttggcaatgcaattttttttagcaattagtttttaatttggggtgggaggggaagaacaccaatgtcctagctgtattatgattctgcagtgaagacattgcatgttgttttcactactgtacacttgacctgcacatgcgagaaaaaggtggaatgtttaaaacaccataatcagctcagggtatttgccaatctgaaataaaagtgggatgggagagtgtgtccttcagatcaagggtactaaagtccctttcgctgcagtgagtgagaggtatgttgtgtgtgaatgtacggatgtgtgtttgcgtgcatgtttgtgcatgtgtgactgtgcatgttatgtttctccatgtgggcaaagatttgaaatgtaagcttttatttattattttagaatgtgacataatgagcagccacactcgggggaggggaaggttggtaggtaagctgtaacagattgctccagttgccttaaactatgcacatagctaagtgaccaaacttcttgttttgatttgaaaaaagtgcattgttttcttgtccctccctttgatgaaacgttaccctttgacgggccttttgatgtgaacagatgttttctaggacaaactataaggactaattttaaacttcaaacattccacttttgtaatttgttttaaattgttttatgtatagtaagcacaactgtaatctagttttaagagaaaccggtgctttcttttagttcatttgtatttcccttgttactgtaaaagactgtttattaattgtttacagtttgttgcaacagccattttcttgggagaaagcttgagtgtaaagccatttgtaaaaggctttgccatactcattttaatatgtgcctgttgctgttaacttttgatgaataaaaacctatcttttcatatttttatctttgacatttaccttataactcaatcttttggaaaacacaatgctaaattacaaggaaatcaaagttagcttcttggctcttgtaattcatccctcagatgtttactcagtccgagcttatctactaatgactcaccttgcaagtgagtaagcagaagcccagttagggctgttggagtcctgactaacacaggggagaggtcagctttgagccaggccttttgttcctacagtggtgaactgcataagacatcagcaagtcttgcaagtactaaaatactagttgtatttatttctatcaatcattggcctttttaaagtgataagaaaaggccactccactctacttgattgatatcagttgtaaacaaggtaccactgtgccattccctatatcttcccaggtccaactcattagaagggatatggtgcaaacttctaaatcaaacacattaacatattatttgtacagaagagtgttgatgtccaatagaaacagaatccaagccacataattttcggttttctagtagccacatttagaaaacatggaattaattttagtaacatctattccaatacgtccaaaatattgtatcactttaaaatgtcaatataaaaacaattagatgtttttacattcttttggggggtactaagtctttgaaatccagtgtatattgtgtacttacagcacatctcaatttggactagtcatatctcaggcacccaatatccacatgtggctagtggctaccatattggacagtgtgggtatagaggtctgagggtagtagaggaatatggtcagctggtcactctcgtgagatggccataccttggcctatatttaatgtgtacagaaagtctgataactc

SEQ ID NO: 6880 - protein, 380 aa, Homo sapiens [sequence omitted]

SEQ ID NO: 6881 - DNA, 4396 bp, Homo sapiens
gagctggtcgctgctcctgagtcccgcgcgccctgggtctggccgctggctccagctgtcttttcttgcactgctttgctccgttcgtgctgcgctcgaactctgcagtccgggtacctgctcctctcggccgaggagccccagggcggcggggttccctttccgactttgcctgtgctggccccgcttgcaccccgtcccccctcgcctggagcgaggcgcgcgccggtcctggtaattggcgccgcggccgccgcggagccttcccgccggcggcccgagcggagggctggggttggggaggcgtgagcgcggcttcccagcccggggtcggtccccgcccgccctgcccccgtctcggcccggagcccccgagccgcggccccctcccactgcaggggccggcggccgcggcagggcgggcgccgcgcggaggcagggcgggcgtattcaatggaagtgtgttaccagctgccggtactgcccctggacaggccggtcccccagcacgtcctcagccgccgaggagccatcagcttcagctccagctccgctctcttcggctgccccaatccccggcagctctctcagaggcgtggagctatttcctatgacagttctgatcagactgcattatacattcgtatgctaggagatgtacgtgtaaggagccgagcaggatttgaatcagaaagaagaggttctcacccatatattgattttcgtattttccactctcaatctgaaattgaagtgtctgtctctgcaaggaatatcagaaggctactaagtttccagcgatatcttagatcttcacgcttttttcgtggtactgcggtttcaaattccctaaacattttagatgatgattataatggacaagccaagtgtatgctggaaaaagttggaaattggaattttgatatctttctatttgatagactaacaaatggaaatagtctagtaagcttaacctttcatttatttagtcttcatggattaattgagtacttccatttagatatgatgaaacttcgtagatttttagttatgattcaagaagattaccacagtcaaaatccttaccataacgcagtccacgctgcggatgttactcaggccatgcactgttacttaaaggaacctaagcttgccaattctgtaactccttgggatatcttgctgagcttaattgcagctgccactcatgatctggatcatccaggtgttaatcaacctttccttattaaaactaaccattacttggcaactttatacaagaatacctcagtactggaaaatcaccactggagatctgcagtgggcttattgagagaatcaggcttattctcacatctgccattagaaagcaggcaacaaatggagacacagataggtgctctgatactagccacagacatcagtcgccagaatgagtatctgtctttgtttaggtcccatttggatagaggtgatttatgcctagaagacaccagacacagacatttggttttacagatggctttgaaatgtgctgatatttgtaacccatgtcggacgtgggaattaagcaagcagtggagtgaaaaagtaacggaggaattcttccatcaaggcaaatatagaaaaaaaatatcatttgggtgtgagtccactttgcgatcgtcacactgaatctattgccaacatccagattggttttatgacttacctagtggagcctttatttacagaatgggccaggttttccaatacaaggctatcccagacaatgcttggacacgtggggctgaataaagccagctggaagggactgcagagagaacagtcgagcagtgaggacactgatgctgcatttgagttgaactcacagttattacctcaggaaaatcggttatcataacccccagaaccagtgggacaaactgcctcctggaggtttttagaaatgtgaaatggggtcttgaggtgagagaacttaactcttgactgccaaggtttccaagtgagtgatgccagccagcattatttatttccaagatttcctctgttggatcatttgaacccacttgttaattgcaagacccgaacatacagcaatatgaatttggctttcatgtgaaaccttgaatatgcaaagcccagcaggagagaatccgaaaggagtaacaaaggaagttttgatatgtgccacgactttttcaaagcatctaatcttcaaaacgtgaaacttgaattgttcagcaacaatctcttggaatttaaccagtctgatgcaacaatgtgtatcttgtaccttccactaagttctctctgagaaaatggaaatgtgaagtgcccagcctctgctgcctctggcaagacaatgtttacaaatcaactctgaaaatattggttctaaattgccttggagcatgattgtgaaggaaccactcaaacaaatttaaagatcaaactttagactgcagctctttccccctggtttgcctttttcttctttggatgccaccaaagcctcccatttgctatagttttatttcatgcactggaaactgagcatttatcgtagagtaccgccaagctttcactccagtgccgtttggcaatgcaattttttttagcaattagtttttaatttggggtgggaggggaagaacaccaatgtcctagctgtattatgattctgcagtgaagacattgcatgttgttttcactactgtacacttgacctgcacatgcgagaaaaaggtggaatgtttaaaacaccataatcagctcagggtatttgccaatctgaaataaaagtgggatgggagagtgtgtccttcagatcaagggtactaaagtccctttcgctgcagtgagtgagaggtatgttgtgtgtgaatgtacggatgtgtgtttgcgtgcatgtttgtgcatgtgtgactgtgcatgttatgtttctccatgtgggcaaagatttgaaatgtaagcttttatttattattttagaatgtgacataatgagcagccacactcgggggaggggaaggttggtaggtaagctgtaacagattgctccagttgccttaaactatgcacatagctaagtgaccaaacttcttgttttgatttgaaaaaagtgcattgttttcttgtccctccctttgatgaaacgttaccctttgacgggccttttgatgtgaacagatgttttctaggacaaactataaggactaattttaaacttcaaacattccacttttgtaatttgttttaaattgttttatgtatagtaagcacaactgtaatctagttttaagagaaaccggtgctttcttttagttcatttgtatttcccttgttactgtaaaagactgtttattaattgtttacagtttgttgcaacagccattttcttgggagaaagcttgagtgtaaagccatttgtaaaaggctttgccatactcattttaatatgtgcctgttgctgttaacttttgatgaataaaaacctatcttttcatatttttatctttgacatttaccttataactcaatcttttggaaaacacaatgctaaattacaaggaaatcaaagttagcttcttggctcttgtaattcatccctcagatgtttactcagtccgagcttatctactaatgactcaccttgcaagtgagtaagcagaagcccagttagggctgttggagtcctgactaacacaggggagaggtcagctttgagccaggccttttgttcctacagtggtgaactgcataagacatcagcaagtcttgcaagtactaaaatactagttgtatttatttctatcaatcattggcctttttaaagtgataagaaaaggccactccactctacttgattgatatcagttgtaaacaaggtaccactgtgccattccctatatcttcccaggtccaactcattagaagggatatggtgcaaacttctaaatcaaacacattaacatattatttgtacagaagagtgttgatgtccaatagaaacagaatccaagccacataattttcggttttctagtagccacatttagaaaacatggaattaattttagtaacatctattccaatacgtccaaaatattgtatcactttaaaatgtcaatataaaaacaattagatgtttttacattcttttggggggtactaagtctttgaaatccagtgtatattgtgtacttacagcacatctcaatttggactagtcatatctcaggcacccaatatccacatgtggctagtggctaccatattggacagtgtgggtatagaggtctgagggtagtagaggaatatggtcagctggtcactctcgtgagatggccataccttggcctatatttaatgtgtacagaaagtctgataactc

SEQ ID NO: 6882 - protein, 406 aa, Homo sapiens [sequence omitted]

SEQ ID NO: 6883 - DNA, 3147 bp, Homo sapiens
ggtgatcactgttggaaggcagctgcttgaggtccaaggcagtcagtgtcccctctcttttgcctcgggacagctggtatttatcagactcctaagaagttttccttgctccctagtagaagagagagattatgcagcgggcttttgattgatccaatgggaattacattgatctggtgtctggccttggttcttatcaagtggatcacctctaagaggcgtggagctatttcctatgacagttctgatcagactgcattatacattcgtatgctaggagatgtacgtgtaaggagccgagcaggatttgaatcagaaagaagaggttctcacccatatattgattttcgtattttccactctcaatctgaaattgaagtgtctgtctctgcaaggaatatcagaaggctactaagtttccagcgatatcttagatcttcacgcttttttcgtggtactgcggtttcaaattccctaaacattttagatgatgattataatggacaagccaagtgtatgctggaaaaagttggaaattggaattttgatatctttctatttgatagactaacaaatggaaatagtctagtaagcttaacctttcatttatttagtcttcatggattaattgagtacttccatttagatatgatgaaacttcgtagatttttagttatgattcaagaagattaccacagtcaaaatccttaccataacgcagtccacgctgcggatgttactcaggccatgcactgttacttaaaggaacctaagcttgccaattctgtaactccttgggatatcttgctgagcttaattgcagctgccactcatgatctggatcatccaggtgttaatcaacctttccttattaaaactaaccattacttggcaactttatacaagaatacctcagtactggaaaatcaccactggagatctgcagtgggcttattgagagaatcaggcttattctcacatctgccattagaaagcaggcaacaaatggagacacagataggtgctctgatactagccacagacatcagtcgccagaatgagtatctgtctttgtttaggtcccatttggatagaggtgatttatgcctagaagacaccagacacagacatttggttttacagatggctttgaaatgtgctgatatttgtaacccatgtcggacgtgggaattaagcaagcagtggagtgaaaaagtaacggaggaattcttccatcaaggcaaatatagaaaaaaaatatcatttgggtgtgagtccactttgcgatcgtcacactgaatctattgccaacatccagattggttttatgacttacctagtggagcctttatttacagaatgggccaggttttccaatacaaggctatcccagacaatgcttggacacgtggggctgaataaagccagctggaagggactgcagagagaacagtcgagcagtgaggacactgatgctgcatttgagttgaactcacagttattacctcaggaaaatcggttatcataacccccagaaccagtgggacaaactgcctcctggaggtttttagaaatgtgaaatggggtcttgaggtgagagaacttaactcttgactgccaaggtttccaagtgagtgatgccagccagcattatttatttccaagatttcctctgttggatcatttgaacccacttgttaattgcaagacccgaacatacagcaatatgaatttggctttcatgtgaaaccttgaatatgcaaagcccagcaggagagaatccgaaaggagtaacaaaggaagttttgatatgtgccacgactttttcaaagcatctaatcttcaaaacgtgaaacttgaattgttcagcaacaatctcttggaatttaaccagtctgatgcaacaatgtgtatcttgtaccttccactaagttctctctgagaaaatggaaatgtgaagtgcccagcctctgctgcctctggcaagacaatgtttacaaatcaactctgaaaatattggttctaaattgccttggagcatgattgtgaaggaaccactcaaacaaatttaaagatcaaactttagactgcagctctttccccctggtttgcctttttcttctttggatgccaccaaagcctcccatttgctatagttttatttcatgcactggaaactgagcatttatcgtagagtaccgccaagctttcactccagtgccgtttggcaatgcaattttttttagcaattagtttttaatttggggtgggaggggaagaacaccaatgtcctagctgtattatgattctgcagtgaagacattgcatgttgttttcactactgtacacttgacctgcacatgcgagaaaaaggtggaatgtttaaaacaccataatcagctcagggtatttgccaatctgaaataaaagtgggatgggagagtgtgtccttcagatcaagggtactaaagtccctttcgctgcagtgagtgagaggtatgttgtgtgtgaatgtacggatgtgtgtttgcgtgcatgtttgtgcatgtgtgactgtgcatgttatgtttctccatgtgggcaaagatttgaaatgtaagcttttatttattattttagaatgtgacataatgagcagccacactcgggggaggggaaggttggtaggtaagctgtaacagattgctccagttgccttaaactatgcacatagctaagtgaccaaacttcttgttttgatttgaaaaaagtgcattgttttcttgtccctccctttgatgaaacgttaccctttgacgggccttttgatgtgaacagatgttttctaggacaaactataaggactaattttaaacttcaaacattccacttttgtaatttgttttaaattgttttatgtatagtaagcacaactgtaatctagttttaagagaaaccggtgctttcttttagttcatttgtatttcccttgttactgtaaaagactgtttattaattgtttacagtttgttgcaacagccattttcttgggagaaagcttgagtgtaaagccatttgtaaaaggctttgccatactcattttaatatgtgcctgttgctgttaacttttgatgaataaaaacctatcttttcatatttttatctttg

SEQ ID NO: 6884 - protein, 380 aa, Homo sapiens [sequence omitted]

SEQ ID NO: 6885 - DNA, 3522 bp, Homo sapiens
gagctggtcgctgctcctgagtcccgcgcgccctgggtctggccgctggctccagctgtcttttcttgcactgctttgctccgttcgtgctgcgctcgaactctgcagtccgggtacctgctcctctcggccgaggagccccagggcggcggggttccctttccgactttgcctgtgctggccccgcttgcaccccgtcccccctcgcctggagcgaggcgcgcgccggtcctggtaattggcgccgcggccgccgcggagccttcccgccggcggcccgagcggagggctggggttggggaggcgtgagcgcggcttcccagcccggggtcggtccccgcccgccctgcccccgtctcggcccggagcccccgagccgcggccccctcccactgcaggggccggcggccgcggcagggcgggcgccgcgcggaggcagggcgggcgtattcaatggaagtgtgttaccagctgccggtactgcccctggacaggccggtcccccagcacgtcctcagccgccgaggagccatcagcttcagctccagctccgctctcttcggctgccccaatccccggcagctctctcagaggcgtggagctatttcctatgacagttctgatcagactgcattatacattcgtatgctaggagatgtacgtgtaaggagccgagcaggatttgaatcagaaagaagaggttctcacccatatattgattttcgtattttccactctcaatctgaaattgaagtgtctgtctctgcaaggaatatcagaaggctactaagtttccagcgatatcttagatcttcacgcttttttcgtggtactgcggtttcaaattccctaaacattttagatgatgattataatggacaagccaagtgtatgctggaaaaagttggaaattggaattttgatatctttctatttgatagactaacaaatggaaatagtctagtaagcttaacctttcatttatttagtcttcatggattaattgagtacttccatttagatatgatgaaacttcgtagatttttagttatgattcaagaagattaccacagtcaaaatccttaccataacgcagtccacgctgcggatgttactcaggccatgcactgttacttaaaggaacctaagcttgccaattctgtaactccttgggatatcttgctgagcttaattgcagctgccactcatgatctggatcatccaggtgttaatcaacctttccttattaaaactaaccattacttggcaactttatacaagaatacctcagtactggaaaatcaccactggagatctgcagtgggcttattgagagaatcaggcttattctcacatctgccattagaaagcaggcaacaaatggagacacagataggtgctctgatactagccacagacatcagtcgccagaatgagtatctgtctttgtttaggtcccatttggatagaggtgatttatgcctagaagacaccagacacagacatttggttttacagatggctttgaaatgtgctgatatttgtaacccatgtcggacgtgggaattaagcaagcagtggagtgaaaaagtaacggaggaattcttccatcaaggcaaatatagaaaaaaaatatcatttgggtgtgagtccactttgcgatcgtcacactgaatctattgccaacatccagattggttttatgacttacctagtggagcctttatttacagaatgggccaggttttccaatacaaggctatcccagacaatgcttggacacgtggggctgaataaagccagctggaagggactgcagagagaacagtcgagcagtgaggacactgatgctgcatttgagttgaactcacagttattacctcaggaaaatcggttatcataacccccagaaccagtgggacaaactgcctcctggaggtttttagaaatgtgaaatggggtcttgaggtgagagaacttaactcttgactgccaaggtttccaagtgagtgatgccagccagcattatttatttccaagatttcctctgttggatcatttgaacccacttgttaattgcaagacccgaacatacagcaatatgaatttggctttcatgtgaaaccttgaatatgcaaagcccagcaggagagaatccgaaaggagtaacaaaggaagttttgatatgtgccacgactttttcaaagcatctaatcttcaaaacgtgaaacttgaattgttcagcaacaatctcttggaatttaaccagtctgatgcaacaatgtgtatcttgtaccttccactaagttctctctgagaaaatggaaatgtgaagtgcccagcctctgctgcctctggcaagacaatgtttacaaatcaactctgaaaatattggttctaaattgccttggagcatgattgtgaaggaaccactcaaacaaatttaaagatcaaactttagactgcagctctttccccctggtttgcctttttcttctttggatgccaccaaagcctcccatttgctatagttttatttcatgcactggaaactgagcatttatcgtagagtaccgccaagctttcactccagtgccgtttggcaatgcaattttttttagcaattagtttttaatttggggtgggaggggaagaacaccaatgtcctagctgtattatgattctgcagtgaagacattgcatgttgttttcactactgtacacttgacctgcacatgcgagaaaaaggtggaatgtttaaaacaccataatcagctcagggtatttgccaatctgaaataaaagtgggatgggagagtgtgtccttcagatcaagggtactaaagtccctttcgctgcagtgagtgagaggtatgttgtgtgtgaatgtacggatgtgtgtttgcgtgcatgtttgtgcatgtgtgactgtgcatgttatgtttctccatgtgggcaaagatttgaaatgtaagcttttatttattattttagaatgtgacataatgagcagccacactcgggggaggggaaggttggtaggtaagctgtaacagattgctccagttgccttaaactatgcacatagctaagtgaccaaacttcttgttttgatttgaaaaaagtgcattgttttcttgtccctccctttgatgaaacgttaccctttgacgggccttttgatgtgaacagatgttttctaggacaaactataaggactaattttaaacttcaaacattccacttttgtaatttgttttaaattgttttatgtatagtaagcacaactgtaatctagttttaagagaaaccggtgctttcttttagttcatttgtatttcccttgttactgtaaaagactgtttattaattgtttacagtttgttgcaacagccattttcttgggagaaagcttgagtgtaaagccatttgtaaaaggctttgccatactcattttaatatgtgcctgttgctgttaacttttgatgaataaaaacctatcttttcatatttttatctttg

SEQ ID NO: 6886 - protein, 406 aa, Homo sapiens [sequence omitted]

SEQ ID NO: 6887 - DNA, 1556 bp, Homo sapiens
tcaagtgtacagtagtgaaaacaacatgcaatgtcttcactgcagaatcataatacagctaggacattggtgttcttcccctcccaccccaaattaaaaactaattgctaaaaaaaattgcattgccaaacggcactggagtgaaagcttggcggtactctacgataaatgctcagtttccagtgcatgaaataaaactatagcaaatgggaggctttggtggcatccaaagaagaaaaaggcaaaccagggggaaagagctgcagtctaaagtttgatctttaaatttgtttgagtggttccttcacaatcatgctccaaggcaatttagaaccaatattttcagagttgatttgtaaacattgtcttgccagaggcagcagaggctgggcacttcacatttccattttctcagagagaacttagtggaaggtacaagatacacattgttgcatcagactggttaaattccaagagattgttgctgaacaattcaagtttcacgttttgaagattagatgctttgaaaaagtcgtggcacatatcaaaacttcctttgttactcctttcggattctctcctgctgggctttgcatattcaaggtttcacatgaaagccaaattcatattgctgtatgttcgggtcttgcaattaacaagtgggttcaaatgatccaacagaggaaatcttggaaataaataatgctggctggcatcactcacttggaaaccttggcagtcaagagttaagttctctcacctcaagaccccatttcacatttctaaaaacctccaggaggcagtttgtcccactggttctgggggttatgataaccgattttcctgaggtaataactgtgagttcaactcaaatgcagcatcagtgtcctcactgctcgactgttctctctgcagtcccttccagctggctttattcagccccacgtgtccaagcattgtctgggatagccttgtattggaaaacctggcccattctgtaaataaaggctccactagatttcacaggacgccttgtcaaatgccttactcttatccagtacatattttcttgttcaacaaaattagtattcctatcaaagaaagaaactgtattagttcaacatgacttgtacatactgcccctatgttggggagtagtaatcactgcttggtgagttgttaagaggctgggatttgatgtccgaaagacctggatttgaagcccaacaccaacagctgttaactgcatgaagtgggcaaaccatctgaaaataaggatgctcaaagcaccggtcccctagggttgttgtgtggagtcagcagatgtcaacaatcaccatcagatcagtgaccttatccctgacaacccattctagatctgtacaacactgacaagatcaatagcttgagatgaacagtgaaagggatctagcttctgttaccttataaaaattacaatgttttaaatctcatttgcaagttctcccattaagcaagggagtagtttactaggataaaaagacatttaatattaaaagtaactgagttgactaccg

SEQ ID NO: 6888 - protein, 57 aa, Homo sapiens
MITDFPEVITVSSTQMQHQCPHCSTVLSAVPSSWLYSAPRVQALSGIALYWKTWPIL

SEQ ID NO: 6889 - DNA, 4187 bp, Homo sapiens
gagctggtcgctgctcctgagtcccgcgcgccctgggtctggccgctggctccagctgtcttttcttgcactgctttgctccgttcgtgctgcgctcgaactctgcagtccgggtacctgctcctctcggccgaggagccccagggcggcggggttccctttccgactttgcctgtgctggccccgcttgcaccccgtcccccctcgcctggagcgaggcgcgcgccggtcctggtaattggcgccgcggccgccgcggagccttcccgccggcggcccgagcggagggctggggttggggaggcgtgagcgcggcttcccagcccggggtcggtccccgcccgccctgcccccgtctcggcccggagcccccgagccgcggccccctcccactgcaggggccggcggccgcggcagggcgggcgccgcgcggaggcagggcgggcgtattcaatggaagtgtgttaccagctgccggtactgcccctggacaggccggtcccccagcacgtcctcagccgccgaggagccatcagcttcagctccagctccgctctcttcggctgccccaatccccggcagctctctcagaggcgtggagctatttcctatgacagttctgatcagactgcattatacattcgtatgctaggagatgtacgtgtaaggagccgagcaggatttgaatcagaaagaagaggttctcacccatatattgattttcgtattttccactctcaatctgaaattgaagtgtctgtctctgcaaggaatatcagaaggctactaagtttccagcgatatcttagatcttcacgcttttttcgtggtactgcggtttcaaattccctaaacattttagatgatgattataatggacaagccaagtgtatgctggaaaaagttggaaattggaattttgatatctttctatttgatagactaacaaatggaaatagtctagtaagcttaacctttcatttatttagtcttcatggattaattgagtacttccatttagatatgatgaaacttcgtagatttttagttatgattcaagaagattaccacagtcaaaatccttaccataacgcagtccacgctgcggatgttactcaggccatgcactgttacttaaaggaacctaagcttgccaattctgtaactccttgggatatcttgctgagcttaattgcagctgccactcatgatctggatcatccaggtgttaatcaacctttccttattaaaactaaccattacttggcaactttatacaagaatacctcagtactggaaaatcaccactggagatctgcagtgggcttattgagagaatcaggcttattctcacatctgccattagaaagcaggcaacaaatggagacacagataggtgctctgatactagccacagacatcagtcgccagaatgagtatctgtctttgtttaggtcccatttggatagaggtgatttatgcctagaagacaccagacacagacatttggttttacagatggctttgaaatgtgctgatatttgtaacccatgtcggacgtgggaattaagcaagcagtggagtgaaaaagtaacggaggaattcttccatcaaggcaaatatagaaaaaaaatatcatttgggtgtgagtccactttgcgatcgtcacactgaatctattgccaacatccagattggtaactatacatatttagatatagctggttagaaaaatgccactgtttttatcaagaagggaaatatatttgaaatataaaatattaaaattatgctcatttctatttttaaaaataatttaagaaattttacccttgttttcccttgttatggctcttctaattctcatttaattttaggatgtaaaaagtatatttttgcagaacaggcagcagcaataacttgtttctgttcttatgtaaataagaatccattattcgctcatgtggaagcttcttttgcatcatttgggactgccatttaaaaaaggataggtaaacaaagaaatgacaaaaataaaataaataaaataaaaatggataggtggtgacccactgagcctgatcataatacgaagaccagcttctgccactgcctttccagactcttaccactgcctgttgattaaatctaactcttcaacatcctagacaggcccttataatcttgcttcaaatgctgtgcagccatcttgcctcaacttccctctcatttgcctacagcatctcgggacgcttctgtgtttcccaagtatacgctgttctttcgctctttgtgcctcgccagtgctttccatgtgcctcgtagagttatttttcttgaagaggcagctcaaatgtcaccttctccagaagctgctctccacttgctttaggcagagtcagtcacttttcttctagattccaaagtgcctgatccacttggttgtggattcctggagcctagcaccacaccagaagcacgaggcccttgagaactgtgtgttgagtgaactaataactgtattatagaaagcataatgaaaatgtcctgtgactgaagtatgtgtagcttgttgcaggagttcacaggaaagttgactaggattgagtgtgttgggctttgggtataaaggagggggattctacgggggcagtagctcaacaaggaatagagggaggagtgtaattttggtagctggtgttgaatagggcctttgagaatcagactgaacacagtgaaatatgtgcccaaagttcagaaagatgaagtttccagaaactaagaaggtagcacaatatgtggcatcatactcagaaaggaagaccatgccatggggccagaaattcagaaacgtaattcttacattgtgattgcaatggatactcatggaagaaagtgggtagtggccgatttgacttcagagtgacaggtagagaagggaagagcgtgtagaactgtggccagactttaggagtgtgagggatgctgaatctcccagagagctcacactggccaggaatgctgagagtagcagatgcttttcttttgggaggatagtaaaacaatttagaaccagatatgctttgtcttgattctcaagtagaataatcttcaaatgcaaaagaatacattagaaatggacaaaagtggccaggagcggtagctcatacttgtaacccagcactttgggaagccgaggcgggctgatcgcttgaggtcaggagttcgagaccagcctggccaaaatagtgaaactcacgtttctactaaaaatacaaaaattagctgggtgtgatggccacttgggaggctgagataggagaatcgcttgaacctgggaggcagaggttgcagtgagccaatatcgtgccactgcattccagcctgggtgacagaatgaaactccatcactccatctcaaaaaaaaaaaaaaaaaaaaatggacaaaagagaattgaatcgaagacaggtgaatcggtagtcaactcagttacttttaatattaaatgtctttttatcctagtaaactactcccttgcttaatgggagaacttgcaaatgagatttaaaacattgtaatttttataaggtaacagaagctagatccctttcactgttcatctcaagctattgatcttgtcagtgttgtacagatctagaatgggttgtcagggataaggtcactgatctgatggtgattgttgacatctgctgactccacacaacaaccctaggggaccggtgctttgagcatccttattttcagatggtttgcccacttcatgcagttaacagctgttggtgttgggcttcaaatccaggtctttcggacatcaaatcccagcctcttaacaactcaccaagcagtgattactactccccaacataggggcagtatgtacaagtcatgttgaactaatacagtttctttctttgataggaatactaattttgttgaacaagaaaatatgtactggataagagtaaggcatttgacaaggcgtcctgtgaaatctgtgaagataaagtagaggcttgtggggctagtacaattaaatggagtcacaaatggttgaacagctgtgttcgaggtactaattaacagagtcctgccctccaagagagaggctggtccatggctctggtctgttcatttttatcaggtatttaaaacctaaaagaaattt

SEQ ID NO: 6890 - protein, 406 aa, Homo sapiens [sequence omitted]

SEQ ID NO: 6891 - DNA, 442 bp, Homo sapiens
tcagaaagatgaagtttccagaaactaagaaggtagcacaatatgtggcatcatactcagaaaggaagaccatgccatggggccagaaattcagaaacgtaattcttacattgtgattgcaatggatactcatggaagaaagtgggtagtggccgatttgacttcagagtgacaggtagagaagggaagagcgtgtagaactgtggccagactttaggagtgtgagggatgctgaatctcccagagagctcacactggccaggaatgctgagagtagcagatgcttttcttttgggaggatagtaaaacaatttagaaccagatatgctttgtcttgattctcaagtagaataatcttcaaatgcaaaagaatacatgagccaatatcgtgccactgcattccagcctgggtgacagaatgaaactccatcactccatctca

SEQ ID NO: 6892 - protein, 35 aa, Homo sapiens
MKFPETKKVAQYVASYSERKTMPWGQKFRNVILTL

SEQ ID NO: 6893 - DNA, 4031 bp, Homo sapiens
aaaaaatcaactttattgtggtagaacttacatgcagtaatacagtgcatacattttatgtgtacggttttgacaaatgtatactcccaaccacccaactgtttttttttctctaagagacagggtttcacagtgttgccaggctggagtgcagtggcgtgatcatggctcactgcagcctcgacatcctgggctcaagctggaggccagctaattttttaaattttttgtagagacagggtctcactctattgcccaccccaatttttaaattaaacttcaaaaaaatctctgggccaagactgcatcctctgtttgagaatgttgtgggagagattgatgagtaatcaccatacaatctggtaagtggaaagatggtaataagttctctgcagcacacaaaagggttaacctggtcagcgaaggcttctgcactcccatctccctctgggcacacccaacccaagccaggggcagggaaatctgggtgatgccaggtgagcagggtggggatgcatgtggacaaaaattaataaaaacatgattttgaacactttttgcctgtggagttctgataatacttaaacacttttcatccttaacatactcagtgaacactttacccaaggcttcaattaaggatatagataaaatcacaaagccctacaatgcaggcatttcccttctcccttatcatagtgaacattttaaaatggagtcacccaggactgggcacggtgactcatgcctgtaataccagctacttgggaggctgaggcagaagaatcacttaaacccgggaggtggaggtttcggtgagccgtgattgcgccattactctgcagcctgggcaacaagagcgaaactccatctcaaaaaaaaaaaaaaaaaaaaaaaaaagaagtgcgcaacctggatccctcacatgcacagtttacaatagggtttgtgctcctatgagaagctactgcttccaaggcagagctcaggcaataatgctcactggctggcagctcacctcctgctgtgcacctggttcctctcaggttcctaacaggccatggaccagtaccggtccatggcctggggattgaggagccctgcgaggaccgccttgtccttttgccttctgtgtgtgggaggttcatttctttcagtaatttctcaggatggacataatgtgtcaagaatctgtcttcactaggcagggcatggtggcttatgcctgtgattccagcactttgggaggccaaggcaggcggatcacctgagattaggaattcgagaccagcctggccaacatggtgaaaccccatctctataaaagtaccaaaaaaaaaaaaaagtcaggcatggtggtaggcgcctataatcccagctgctcaggagcctgagtaagagaatcgattgaacctgggaggcagaggctgcagtgagccgagatcgcaccactgcactccaggctgggcatcagcaagactctgtcacaaaaaaatagaatctgttttcagaggtagcatcattaggaaaaataaaaatacaatactgattcaggacattttatgtcactaaactgctctcctccatgatagtgccacctcctctttaccctcagcaagccaccagtatctcaggtaccttctttctgctatttctactatatttttgatttgccaatttagccaaaaaaaaaaaaaaaaaaaaaaagctaccaccaacgaaactcactgtgataaccattacaatgggaaatgataagggctggcaggcagtgaaaacagtaagcttttcactgaacacagcaaaactcaccacttaatagttttctattttattgaaaaagaaccctaatgatggctttgcagatacaagtaaaagctgaccttcacatatgttaaataatctgtagtttcttttttgacatttctttgttgtcagctcttaacagatgtaatcacagaatggaaataacatctgtcttttaatccaccttaaaaagttaagttattgaagtccttgtctttgttataatattgaaaattttgtttctgatgaaaggtttttttttacaagcagaaatgttacatttttatatcaaatatttttttgcatgtgtgatttgtttttaaagttactttctcttcacagaatttttgagaattcagttgcttattgtcatgttcctatttttaatggttaactctttaatatacctgagaatgttttgatgtcatgtgcagtcatacattaattttttaaatcagtctaattttggattattgtattctcccaggatgtctattcttctgccaataagaatgtaacccctttgcatactgcctaataaattacatgttcataagacatagacacccatgcccattcatgtatatgtcaaggaggggagattgctttatatgcagtatgctttatatcctatgcattctgttcatcttgattagtaagcagcgctttagaatgctttattttttcaatgcttttgtatatcctaaagaggaaataattttcttcatcttctcctattcattgaccttctccgtgtactaattatatgcgatacaaaaataaataatatgcatctctgcttccaggtagcttacagttttccaggagattcaagccctcagacagtgatttctctgactgagatgaacttaacacagggagtagaaagagatgattgattcgttctagcagagaaagaaaacaatagaatttgaatctaaaattatttttatctcatttttaaaattttcagtttttatctttgttgtataacatataaatgttagttcagtataataatccataagtacatatacttaatataagtggtgtatgctcaaaaattttcactgttagagcacaggatcattacagtttagtcagcactgtcctaacgtaaacctaaataataccatgctctgatgagtggtattgtggcaggtcatgaggtgctgtgggaacacaaatctggccaagtttgccagaaaatgagaggcatttcatgaaaagcagatgatatagtcaaggtgatcttttttatcattgaacatttgtcagctaatcataaacttttatttattgtgattattaaataagtttggtaatgattattgagagtaaagttacaatttctggtgtgcaagattgctttccctgacatgaatacattgtatcattgttatgaatgtagccatccgttaggggaggattttatcacagacttgacatagacttccacttaacatgattactcagtagcctccttaaacatcaggactaaaggaataaccttacatcttagattacattattgaaatccaataaccaatttgttgataaataaacacccttaaaattttagatcttttgttcagtaatggctacagtaataaaaatgtgccaaactatgtttgtcattttaaagccattatttctcaaaaagaacggtttatgttttagctgccattttaattaagcttgttaaaaatgaaatggcctaaggatgaactctgtaaactccacatgggcagggccactgttgtatcatggctttgccagtgtggtgatgagatcaggacctggcagatgtgcttggtgaacctaatgaacaaccacctgaggaatgacgtgaagggggaggagattaccaccactaccattggctgctaattcaaaactactgtgatggcgtagagcttattttagatatatctgtgattcattattcttttgtcacacttcagcttgccaattctgtaactccttgggatatcttgctgagcttaattgcagctgccactcatgatctggatcatccaggtgttaatcaacctttccttattaaaactaaccattacttggcaactttatacaaggttagtgcaattttatcatcaagatttattatttttgcattctagaaaatctttcatattttgaagaaatgaaagtaatgaaaataaattctcaatgaatgttagaattttaaccagattaatattgct

SEQ ID NO: 6894 - protein, 35 aa, Homo sapiens
MQAFPFSLIIVNILKWSHPGLGTVTHACNTSYLGG

SEQ ID NO: 6895 - DNA, 1089 bp, Homo sapiens
gagctggtcgctgctcctgagtcccgcgcgccctgggtctggccgctggctccagctgtcttttcttgcactgctttgctccgttcgtgctgcgctcgaactctgcagtccgggtacctgctcctctcggccgaggagccccagggcggcggggttccctttccgactttgcctgtgctggccccgcttgcaccccgtcccccctcgcctggagcgaggcgcgcgccggtcctggtaattggcgccgcggccgccgcggagccttcccgccggcggcccgagcggagggctggggttggggaggcgtgagcgcggcttcccagcccggggtcggtccccgcccgccctgcccccgtctcggcccggagcccccgagccgcggccccctcccactgcaggggccggcggccgcggcagggcgggcgccgcgcggaggcagggcgggcgtattcaatggaagtgtgttaccagctgccggtactgcccctggacaggccggtcccccagcacgtcctcagccgccgaggagccatcagcttcagctccagctccgctctcttcggctgccccaatccccggcagctctctcagaggcgtggagctatttcctatgacagttctgatcagactgcattatacattcgtatgctaggagatgtacgtgtaaggagccgagcaggatttgaatcagaaagaagaggttctcacccatatattgattttcgtattttccactctcaatctgaaattgaagtgtctgtctctgcaaggaatatcagaaggctactaagtttccagcgatatcttagatcttcacgcttttttcgtggtactgcggtttcaaattccctaaacattttagatgatgattataatggacaagccaagtgtatgctggaaaaagttggaaattggaattttgatatctttctatttgatagactaacaaatggaaatagtctagtaagcttaacctttcatttatttagtcttcatggattaattgagtacttccatttagatatgatgaaacttcgtagatttttaggtaagtgattctaacccattaacagtaacaagatttacatt

SEQ ID NO: 6896 - protein, 200 aa, Homo sapiens
MEVCYQLPVLPLDRPVPQHVLSRRGAISFSSSSALFGCPNPRQLSQRRGAISYDSSDQTALYIRMLGDVRVRSRAGFESERRGSHPYIDFRIFHSQSEIEVSVSARNIRRLLSFQRYLRSSRFFRGTAVSNSLNILDDDYNGQAKCMLEKVGNWNFDIFLFDRLTNGNSLVSLTFHLFSLHGLIEYFHLDMMKLRRFLGK

SEQ ID NO: 6897 - DNA, 608 bp, Homo sapiens
aaaagctgcatgcaagataccaactgaggattataataccaagacagacacttcaatttcagattgagctgaaataaaaagaataaaagaaaagactcgttaaagtcagaacctgctggacaagaaggcctatggcaaatcctactgaagataaatttataagccttaagagaataaggactatgacaaaaacaatccaaaccacaataattcatggtaggaaatattgtggcatctacataataaaatggttgaggtccttcttttgttaattttgaggcctataattgctccttaactggtcaggtatcttagatatcagctggctcacaggagaatgtatcttcataatataaacccaaacgttgcttataataaactgtacatataaaaaatcttaaaagaaaagttcaatattgcaatatagatgtctaatttctaggtaaatttagtaaacagaatatgttcaacatggagaaaatcacactccagaaataagttaaaaatatttcaacatctaaaaaaaaattcagcagcacccacagatacagcacatagaagaaattaaaaaattatgaatagttttaataaataacactaatatcata

SEQ ID NO: 6898 - protein, 46 aa, Homo sapiens
MANPTEDKFISLKRIRTMTKTIQTTIIHGRKYCGIYIIKWLRSFFC

SEQ ID NO: 6899 - DNA, 572 bp, Homo sapiens
agaagaaaaactcttagaagccagcaacttttacaagcaccctgggacatttagttgaggggcttgagtgttgtataacacaataatttttagtcagaataatgttaatagagcctgtttttaaaagttgaaagattcgtactgtttttttgtttttaaaaagatttccatgccaaagagttttaagtattgatgctgaactgaaatggacaagcttgagttacctggaaaattcatttatgtggatggaacaccagctcttccaaggatgccaatagaagagagagattatgcagcgggcttttgattgatccaatgggaattacattgatctggtgtctggccttggttcttatcaagtggatcacctctaagaggcgtggagctatttcctatgacagttctgatcagactgcattatacattcgtatgctaggagatgtacgtgtaaggagccgagcaggatttgaatcagaaagaagaggttctcacccatatattgattttcgtattttccactctcaatctgaaattgaagtgtctgtctctgcaaggaatatcagaaggctact

SEQ ID NO: 6900 - protein, 84 aa, Homo sapiens
MGITLIWCLALVLIKWITSKRRGAISYDSSDQTALYIRMLGDVRVRSRAGFESERRGSHPYIDFRIFHSQSEIEVSVSARNIRR

SEQ ID NO: 6901 - DNA, 725 bp, Homo sapiens
ggaaaagccagcagtgaccccgcggtcagggctgaggacggcgactgcgccgggtgctttgggtttctggggtcggcaggccggaacgccgcctctagcgcgggacgagcacaccccatagcctaggcgcgctggaacgcacgaatttagcgctcggggggatgccccgaaacggtggggcctcgtgcgcacgcgccttggctggcgaggagctagggaagggagtcacggcggggcgcgaagggaactgcggatgagatagatgggggaaaacgtttgtcgggaggcgactccaacagagccccagggtgcagaacacaaggaaggctactgtcgccctcggccgcttgccagtctccctgggcgctgcggcggcgcggggcgctgggcctgcggcgcggcgtcgtgacgtcacggtggcggcagccgtggttggcgcaaggccggtcccccagcacgtcctcagccgccgaggagccatcagcttcagctccagctccgctctcttcggctgccccaatccccggcagctctctcagaggcgtggagctatttcctatgacagttctgatcagactgcattatacattcgtatgctaggagatgtacgtgtaaggagccgagcaggatttgaatcagaaagaagaggttctcacccatatattgattttcgtattttccactctcaatctgaaattgaagtgtctgtctctgcaaggaatatc

SEQ ID NO: 6902 - protein, 43 aa, Homo sapiens
MLGDVRVRSRAGFESERRGSHPYIDFRIFHSQSEIEVSVSARN

SEQ ID NO: 6903 - DNA, 872 bp, Homo sapiens
gagctggtcgctgctcctgagtcccgcgcgccctgggtctggccgctggctccagctgtcttttcttgcactgctttgctccgttcgtgctgcgctcgaactctgcagtccgggtacctgctcctctcggccgaggagccccagggcggcggggttccctttccgactttgcctgtgctggccccgcttgcaccccgtcccccctcgcctggagcgaggcgcgcgccggtcctggtaattggcgccgcggccgccgcggagccttcccgccggcggcccgagcggagggctggggttggggaggcgtgagcgcggcttcccagcccggggtcggtccccgcccgccctgcccccgtctcggcccggagcccccgagccgcggccccctcccactgcaggggccggcggccgcggcagggcgggcgccgcgcggaggcagggcgggcgtattcaatggaagtgtgttaccagctgccggtactgcccctggacaggccggtcccccagcacgtcctcagccgccgaggagccatcagcttcagctccagctccgctctcttcggctgccccaatccccggcagctctctcagaggcgtggagctatttcctatgacagttctgatcagactgcattatacattcgtatgctagcatgaaggaatggccacaggacaggtgactagtcattgtgggatggaattatagtcgatgaagtgagccttggaggaagtcatggtcctactcagagaaacagagagatgtacgtgtaaggagccgagcaggatttgaatcagaaagaagaggttctcacccatatattgattttcgtattttccactctcaatctgaaattgaagtgtctgtctctgca

SEQ ID NO: 6904 - protein, 67 aa, Homo sapiens
MEVCYQLPVLPLDRPVPQHVLSRRGAISFSSSSALFGCPNPRQLSQRRGAISYDSSDQTALYIRMLA

SEQ ID NO: 6905 - DNA, 5690 bp, Homo sapiens
gccagagcagcggggccgggcgcgcagggcctggccggagcccccactcccaggagtttcctctgcagagccccgcgccccccgcgccgggatttcagcccgatcccctcctctccctgcgcccagcctctccccagcatgtaaagtcttctgtctctcctcggagttggcggaggcggcaactttccattctcgccgccgggggccgggcagcagcgggcgcgcgggtcagcgctcagcacggcgggcagcgccgcgctgcgcaccgccgccgaccatgagcgaggacagccgcggagacagccgcgccgagagcgccaaggacctggagaagcagcttcgcctgcgcgtgtgcgtgctcagcgagctccagaagaccgagcgggactatgtgggcacgctggagttcctggtgtcggcattcttacacagaatgaaccagtgtgcagcatcaaaagttgacaaaaatgtgacagaagaaacagtgaagatgttgttctcaaacattgaagacatccttgcagtacataaagaattcttaaaagtcgtggaagaatgcttacaccccgaacctaatgctcaacaagaagtgggaacctgctttcttcactttaaagacaagtttcgtatctatgatgaatattgtagtaaccatgagaaggcacaaaaattacttcttgaactcaacaaaataagaacaatccggacatttcttttgaactgcatgctgcttggaggacggaagaacacagatgttcccttggaaggatatttagtaacaccaatacaaagaatatgcaagtaccctcttattttgaaggagttgctgaagcggactccacggaaacacagtgactatgcagcagtgatggaagccctccaagccatgaaagctgtctgttccaacataaacgaggccaagagacagatggagaagttagaagttttagaggaatggcagtctcacattgaaggctgggaggggtccaacatcactgacacctgcactgaaatgctaatgtgtggagtcttactgaaaatttcttctggaaatattcaagaacgggtgttttttcttttcgataatcttttggtgtactgcaaaagaaaacacagacggttgaagaacagcaaggcatctacagatggacatcggtacctttttcgtggccggatcaacacggaggtgatggaagtggagaatgtggatgatggcaccgctgatttccatagcagtggacacattgttgttaatggatggaagatacataacacagcaaaaaataaatggtttgtttgtatggcaaaaacacctgaagagaagcatgaatggtttgaagctattttgaaagaaagagaacggcggaaaggtttaaaattaggaatggagcaagatacctgggtcatgatctctgaacagggtgagaaactttataaaatgatgtgcagacaaggaaatctgatcaaagaccgaaagagaaaactgactacgttccctaaatgctttcttggaagcgaatttgtgtcatggctgttggaaattggagagattcacaggcctgaggaaggcgtgcacttgggacaagcattattagaaaatggaatcattcaccatgttactgataaacatcaattcaaaccagaacagatgttatatagatttcgctatgatgatggaacattttatccaagaaatgagatgcaggacgtgatttcaaagggtgtaagattatattgtcgtcttcatagcctttttactccagtgataagagataaagattaccatttaaggacctacaaatctgtggtcatggccaacaaactgatagactggttaattgcacagggagattgccgcaccagagaagaggcaatgatatttggcgttggactctgtgacaatggatttatgcaccatgtccttgaaaaaagcgaattcaaagatgaacccctacttttccgttttttttcggatgaggaaatggagggatcaaatatgaaacatcgacttatgaaacatgacttaaaagttgtggaaaatgttatagctaagtcattattgattaaatccaatgaaggcagctatggctttggattagaagacaaaaataaagttccaataataaagttggtagaaaagggatctaatgctgagatggctggcatggaagtcgggaaaaagatttttgctattaatggtgacctagtttttatgagacctttcaatgaagtggattgcttcctgaaatcgtgtttaaacagcagaaaacctctaagagttcttgtgagcacaaagccaagagagacagtgaaaattccagattcagctgatggacttggcttccagatccggggatttggcccttctgttgtgcatgctgtaggaagaggaactgtggctgcagcagctggtcttcaccctggacagtgcattatcaaggtgaatggaatcaatgtcagcaaagagacacatgccagtgtcattgcacacgttacagcctgcaggaagtacaggcggccaacgaagcaagattccatacaatgggtttataatagcattgagagtgctcaagaagaccttcaaaaatctcactccaagccccctggagatgaagcaggggatgcttttgactgtaaagtagaagaggttattgacaaattcaacactatggccatcattgatgggaagaaggagcatgtgagtctgacagtggacaatgtccacctggaatatggtgtcgtgtatgagtacgacagcacagctggcatcaagtgcaatgtggtggaaaagatgattgagcccaaaggtttcttcagcttaactgccaagattcttgaagccctggctaaaagtgatgagcattttgtacaaaactgtaccagcctaaattctctaaatgaagtgattcctactgaccttcagagtaaattcagtgccctttgcagtgaaagaattgaacacctatgtcagagaatatccagttataaaaagttttctcgtgtactgaagaatagggcctggcctacttttaaacaggccaaatctaaaatctccccactgcacagcagtgatttctgccctaccaactgccatgtcaatgtgatggaagtttcttatcccaaaacatcaacctctttgggaagtgcatttggtgttcagttggatagcaggaagcataattctcatgataaagaaaacaaatcttcggagcaagggaaactgagccctatggtgtacattcagcacaccatcacaaccatggcggccccttcaggtctgtctctgggacagcaggatggccatggtctcaggtatctgctaaaagaagaagacttagaaacccaagacatctatcagaaactgctgggcaaacttcagactgcactgaaagaggtggagatgtgtgtttgtcaaatagatgaccttctgtcttcaataacatattctcctaaattagaacgtaagacatcagagggcataataccaacagacagtgacaatgagaagggagaaagaaacagcaaacgggtatgttttaatgtagcaggagatgaacaggaagattctggtcatgacaccatcagcaacagagactcttacagtgactgcaacagcaataggaattccatcgcctccttcaccagcatctgcagcagccagtgcagctcgtatttccacagtgatgaaatggactcaggtgatgaacttcccttaagtgttcgcatatctcatgataaacaggacaagatacatagttgccttgagcatcttttcagccaggtggattcaattaccaatctcctaaaagggcaggctgttgtgagggcctttgaccaaaccaagtatctcactccaggccgaggattgcaagaatttcaacaggaaatggaaccaaagctgagttgtccaaaaaggctacggcttcatatcaagcaagatccttggaatcttcccagcagcgtccggactcttgctcagaacatcaggaaatttgttgaagaggtaaagtgtaggctactcctggctcttcttgaatattcagatagtgagacacagctccgtagagacatggttttctgccagactcttgtggccactgtctgtgccttctctgagcagctcatggcggccttgaaccagatgtttgacaacagcaaggaaaatgagatggaaacttgggaagccagcaggaggtggctggaccagatagcgaatgcaggtgttctttttcactttcagtcacttctgtcaccaaacttgacagatgaacaagccatgttagaagatacactggttgcactatttgatttggaaaaggtttccttttactttaaaccatcagaagaggaacctctggttgcaaatgttcctcttacatatcaagcagaaggaagtcggcaagctctgaaagtttacttctacattgatagttatcattttgaacaacttcctcaacggctgaaaaatggaggagggtttaaaattcatcctgttctttttgcacaagcactagagagcatggaaggatattattacagagacaatgtttctgtggaagaatttcaagctcagataaatgcagcctcactggaaaaggtcaaacagtacaaccagaagctcagggcattctacttggacaagtcaaattcaccaccaaactccacatccaaagctgcctatgtagataagctaatgaggcctctcaacgctttggatgaactttaccgactggtagcctcgtttatcagatccaagcgcacagctgcctgtgcaaacacagcttgcagtgcttctggggttggactgctgtcagtttcctcggagctgtgcaacaggctgggcgcctgccacatcatcatgtgcagcagcggtgtgcatcggtgcaccctgagcgtgacgctggagcaagccatcattctggccagaagccacggactgccacctcgttacatcatgcaggctacagatgtgatgcggaagcagggagcaagagttcagaacacagcgaagaatttgggagtcagagaccggactccacagtctgcaccaaggctgtacaagctgtgcgagccacctcccccagctggagaagaatgaaaagaactcccaagaaaccaggcaggcagaagctcctgaatgctggactagacaaactacatgctggctaaacattctccactgaagatacatcaatgcttttttttttttttttttctgtaaatctttcttcccattgcaaacaagtagtgatcagtttatactttgatatttatgctggaaatggatagaagttcaatcagacagttcagcttcacgaactgatgtctctctgtattgacattaagtattcacttttagagtaaaatccatccctgggacataaagaaaaaaatattagagatttaaaaattaaccaccatgcctcctctcccattcattaaaatggttttattatgcttgttttcatctttcccaagtggacacatgtaataatggagagttcctcttgaagaaggccattattgaagaaacctggcgacatcttgcaaatcatcatgagaaatgttaaggacaatatagactgtgtgctatacattttcagtcccccatttgcaagagagaaagtcattaatgtgtaaaaggtggaaaagcatgctttactctttctcctaagggcttatttcttatt

SEQ ID NO: 6906 - protein, 1606 aa, Homo sapiens; identical to SEQ ID NO: 984

SEQ ID NO: 6907 - DNA, 421 bp, Homo sapiens
tttcaagctcagataaatgcagcctcactggaaaaggtcaaacagtacaaccagaagctcagggcattctacttggacaagtcaaattcaccaccaaactccacatccaaagctgcctatgtagataagctaatgaggcctctcaacgctttggatgaactttaccgactggtagcctcgtttatcagatccaagcgcacagctgcctgtgcaaacacagcttgcagtgcttctggggttggactgctgtcagtttcctcggagctgtgcaacaggctgggcgcctgccacatcatcatgtgcagcagcggtgtgcatcggtatgtgaccctcccgccttgcttgcctctttgttagatcacactttatttgatggtttttgtttacattttggcttcacaaaattaaaactggaaacatt

SEQ ID NO: 6908 - protein, 35 aa, Homo sapiens
MQPHWKRSNSTTRSSGHSTWTSQIHHQTPHPKLPM

SEQ ID NO: 6909 - DNA, 566 bp, Homo sapiens
aaaggtcaaacagtacaaccagaagctcagggcattctacttggacaagtcaaattcaccaccaaactccacatccaaagctgcctatgtagataagctaatgaggcctctcaacgctttggatgaactttaccgactggtagcctcgtttatcagatccaagcgcacagctgcctgtgcaaacacagcttgcagtgcttctggggttggactgctgtcagtttcctcggagctgtgcaacaggctgggcgcctgccacatcatcatgtgcagcagcggtgtgcatcggtgcaccctgagcgtgacgctggagcaagccatcattctggccagaagccacggactgccacctcgttacatcatgcaggctacagatgtgatgcggaagcagattttgtgtatatacttttcatacagttgttattttaattcactgcttgagtttgaaggaaagataaaagacagaagagaagggtactatgttttcatgatgttttgctaatgattgtaacaaccttgggcagcactttatgtaaccagctgatttgattaataaaaggcttgca

SEQ ID NO: 6910 - protein, 133 aa, Homo sapiens
MRPLNALDELYRLVASFIRSKRTAACANTACSASGVGLLSVSSELCNRLGACHIIMCSSGVHRCTLSVTLEQAIILARSHGLPPRYIMQATDVMRKQILCIYFSYSCYFNSLLEFEGKIKDRREGYYVFMMFC

SEQ ID NO: 6911 - DNA, 2367 bp, Homo sapiens
agtcctggactgagcttcagaagatctcagatcactgacgttctgtctagaagaatactccaagatatatttctaagtaatattccttctcttgttgggggaaattagagaagatttctacctggtgccatatcaactcaaggatggagtcaaatactgagaggctctgtcatctgtctttggatctccttctgtgaaaattctaacaaggagcaaacagcaaagaactgaaatgctatacagactccagtgagaaaaaactgaggtaattggtttcggtgtgctggtgcttgaaactctatcccagtgcttccttcaactaaggctgcaaattgaaaatgtgaagaaccttgcctgcttgaaccagcctgggcttgtggcagcatcattctgtcacttaattcttctcacagagccgttaacaaaccatctgtatgcctaatattgatgctgtctttccctagtgtactggacaacctaagacagggaaataaagataaagtttggattgaagagtgaggagccaaaataatgcagcttcacatctccttaatggacagaagactacactgtttttgctgcacccagagataaaattattggttttggagtaccttcactgatgccaggggtgtcatctttaccttccatcacataatatatataaagagaatttttcttagctttaaatgagttgataagaggacaagaagaaagtcaaggactccatttccaggattaaaagcggttttttcctttgtcttccaaatcctagcagtagaagcatttgagttctgcagaaattactgaagtggttcaagtgtgggcagtcaggacactcagcccaccatactcaaccccaactcaacctcaactctcagtacggcagagagacggagaactcagagctataactttcaggaattctcaaaacctcagacaaaatgcatctttgttttaccacctgttaaagtatatcctcatctgcctcagtgcacataagtatacaacactgcagattgtgtttaacttcatttgcaattaatttaacgcattttgtatccaacatttctactaggaaatagtattagtctatccccaaactaaaattcactgcaaaaatgtaattcactcaagaaaaataatgataattcttcaaacaccttgagatgtcattcaacaatcatacccaatgggtaaaatttagagttcaacatttagcttgcatttctttctaaccaaacatctcaagttcaaaaaataaagcagattgttttgtgcatttgttatcactaccacatcaatggtcacctacacttcctgagccccaaatagaactctcagagaagcattgtgtatttgtcaatatcctggagtttcaaaactcccaagtgttgccaccatttgacctgaaatttcctctcttctcagattcctgcctctaaacacaaaacaaacaaacctttacttaacttagctcatgtgtgaatttttagggtcatttgtttcatatccagaaagacttcaagtctctttgctaaattttgatttacctaaggccagtagcctgaattcaactttagcagtcccagggctcagtagatttgccctgtagattctgtaattggatatttatgttccatgtatttcttctttcagagcatagcagaagtatagggataacaccttagctgaatgttggccctaaaatagctgctcatttgtagcactcagacgaagctgaaattattcacattcagccgacatttccgttaggtgagatgctgcctgctaattcacatttgcctgggattgctcctcagagttcagatttaattttgataacatcaactctatcatttaataaataataagcagtaaaaaattaagcctattgttattgggcattttgaatgaaagaaaagcagtatggcatattaggtttaagggttcctcaatatcttaatctatattgccttcggaaagaagcaatccttagataaaaaaataaaatactttaaaatttctctccatttcattagtgcatgagactgagacaggtattgtcactcttgccactgactcagtgacatgtcagaaacaatgaagtcttaaatatattgctcaaaatttcaactgcctatatatagcataaaattaattgcatttagaaaaaaaagttctgttctcttagcaattttcaggtagatcctaaatgttctcgacacaaaaagattcatatgtgaggtgatagatattatgattagtttgatttaatcatttcacaatgtataaaaatatcaaaacaacatgtacatcataaatatatagactttaaaatttttcaattataccttaataaagctg

SEQ ID NO: 6912 - protein, 44 aa, Homo sapiens
MCEFLGSFVSYPERLQVSLLNFDLPKASSLNSTLAVPGLSRFAL

SEQ ID NO: 6913 - DNA, 866 bp, Homo sapiens
tgaggacacagcaagaaagtggtcatctgcaagcgcaaaagacaggcctcagaagaacccaaccctattgacactatgatcttggacatccagcctccagaactgagccaaaataatgcagcttcacatctccttaatggacagaagactacactgtttttgctgcacccagagataaaattattggttttggagtaccttcactgatgccaggggtgtcatctttaccttccatcacataatatatataaagagaatttttcttagctttaaatgagttgataagaggacaagaagaaagtcaaggactccatttccaggattaaaagcggttttttcctttgtcttccaaatcctagcagtagaagcatttgagttctgcagaaattactgaagtggttcaagtgtgggcagtcaggacactcagcccaccatactcaaccccaactcaacctcaactctcagtacggcagagagacggagaactcagagctataactttcaggaattctcaaaacctcagacaaaatgcatctttgttttaccacctgttaaagtatatcctcatctgcctcagtgcacataagtatacaacactgcagattgtgtttaacttcatttgcaattaatttaacgcattttgtatccaacatttctactaggaaatagtattagtctatccccaaactaaaattcactgcaaaaatgtaattcactcaagaaaaataatgataattcttcaaacaccttgagatgtcattcaacaatcatacccaatgggtaaaatttagagttcaacatttagcttgcatttctttctaaccaaacatctcaagttcaaaaaataaagcagattgttttgtgca

SEQ ID NO: 6914 - protein, 43 aa, Homo sapiens
MILDIQPPELSQNNAASHLLNGQKTTLFLLHPEIKLLVLEYLH

SEQ ID NO: 6915 - DNA, 994 bp, Homo sapiens
gagtgcataaagaaaaggccacgtgaggacacagcaagaaagtggtcatctgcaagcgcaaaagacaggcctcagaagaacccaaccctattgacactatgatcttggacatccagcctccagaactccgttaacaaaccatctgtatgcctaatattgatgctgtctttccctagtgtactggacaacctaagacagggaaataaagataaagtttggattgaagagtgaggagccaaaataatgcagcttcacatctccttaatggacagaagactacactgtttttgctgcacccagagataaaattattggttttggagtaccttcactgatgccaggggtgtcatctttaccttccatcacataatatatataaagagaatttttcttagctttaaatgagttgataagaggacaagaagaaagtcaaggactccatttccaggattaaaagcggttttttcctttgtcttccaaatcctagcagtagaagcatttgagttctgcagaaattactgaagtggttcaagtgtgggcagtcaggacactcagcccaccatactcaaccccaactcaacctcaactctcagtacggcagagagacggagaactcagagctataactttcaggaattctcaaaacctcagacaaaatgcatctttgttttaccacctgttaaagtatatcctcatctgcctcagtgcacataagtatacaacactgcagattgtgtttaacttcatttgcaattaatttaacgcattttgtatccaacatttctactaggaaatagtattagtctatccccaaactaaaattcactgcaaaaatgtaattcactcaagaaaaataatgataattcttcaaacaccttgagatgtcattcaacaatcatacccaatgggtaaaatttagagttcaacatttagcttgcatttctttctaaccaaacatctcaagttcaaaaaataaagcagattgttttgtgca

SEQ ID NO: 6916 - protein, 36 aa, Homo sapiens
RVRSQNNAASHLLNGQKTTLFLLHPEIKLLVLEYLH

SEQ ID NO: 6917 - DNA, 1309 bp, Homo sapiens
tacttggtctaatcagaaatgttgcagaattaagggaagtcatcgagacctggtattacaatttttattatttgattaccactttgagattttttttcttctgagatggtacttagtttgaaggaacttttatacattaaggttattagctcttttgccttatgcaagcaaatattttctgaaaatttttatttgatattagttttatataaggcattttttgagtcacataaattttagaactctctacgggaaaatctctataatagtcatcctttatgaattattccattgttttgaactaatatattttatgaccattttgtaattcaataaatttttatggagtcaaaaattagctccatgtacttggtttccttgatctgatgctgtttttctgacagacttttctgctttgagatttctgataaggtcactgctccatttaactagaagccttgatctcttatcttcaagacttgttttgtcaacaaagaagatcctatctccaacagttcatttatttctaatgcacacaaatcttgcttcctccatggggcagctgacctcctggggataaaaaaggaaagacaactatttatttttcttcctttaagaacggcattaaccattattctggagatgtatattgtgcctatggtggagaatacagaagataaaatggtgggaggaatatgagttttgaaacagaagggattaagaagagtcctttctaattcatcaagatatgaattctgaaaccttatttcattttatttgtctcttaactaaatttgatattaaatacagtaactataaactttcaattatttcactgaagagtaatcgtctttggaataaaacaattctgatattgaagctaacaggtatttgccatgtggaagttgcatgtccaaagggatatattagaataataatgcttacttcatagttttgttatgaggaataaatttttaaaatgaccatttaggtgaatatatcaatcatggaaccttgccacatactgagtgattaatagttattgaattgccttttgatgtcttttctgaaaaattaaaatgtggattatgtaataatgttttaaatccatatgtccaataaatacatatatttcagtatataatttgaaatgtatatgaccaactgtaaccaaaaaccgaatgtctatacaaaagagactgtttatacaaaacttgctattttgtatattgttctctgcttcatctcagtgattttagagtttttatgttaaagttaataattaaactctctcatctgttacttttat

SEQ ID NO: 6918 - protein, 67 aa, Homo sapiens
MNSETLFHFICLLTKFDIKYSNYKLSIISLKSNRLWNKTILILKLTGICHVEVACPKGYIRIIMLTS

SEQ ID NO: 6919 - DNA, 3892 bp, Homo sapiens
gagacctcaacttaaagacaatatgcctttcactgctgcagtatcctcctttttctcttttggttaaaagagagcattgtcgttctcagccatgtgctctgtataattaagagctgacactgaagcagagtaacaacatcttctaatttttttacccctgatcacaggtgcaaacatctcaagccagttcagatgttgctgtttcctcaagttgcaggtctatggaaatgcaggatctaaccagcccgcatagccgtctgagtggtagtagtgaatcccccagtggccccaaactcggtaactctcatataaatagtaattccatgactcccaatggcaccgaagttaaaacagagccaatgagcagcagtgaaacagcttcaacgacagccgacgggtctttaaacaatttctcaggttcagcaattgggagcagtagtttcagcccacgaccaactcaccagttctctccaccacagatttacccttccaacagaccatacccacatattctccctaccccttcctcacaaactatggctgcatatgggcaaacacagtttaccacaggaatgcaacaagctacagcctatgccacgtacccacagccaggacagccgtacggcatttcctcatatggcatcaagactgaaggtggattgtcacagtctcagtcacctggacagacaggatttctcagctatggcacaagcttcagtacccctcaacctggacaggcaccatacagctaccagatgcaaggtagcagttttacaacatcatcaggaatatatacaggaaataattcactcacaaattcctctggatttaatagttcacagcaggactatccgtcttatcccagttttggccagggtcagtacgcacagtattataacagctcaccgtatccagcacattatatgaccagcagcaacaccagcccaacgacaccatccaccaatgccacttaccagcttcaagaaccgccatctggcatcaccagccaagcagttacagatcccacagcagagtacagcacaatccacagcccatcaacacccattaaagattcagattctgatcgattgcgtcgaggttcagatgggaaatcacgtggacggggccgaagaaacaataatccttcacctcccccagattctgatcttgagagagtgttcatctgggacttggatgagacaatcattgttttccactccttgcttactgggtcctacgccaacagatatgggagggatccacccacttcagtttcccttggactgcgaatggaagaaatgattttcaacttggcagacacacatttattttttaatgacttagaagaatgtgaccaagtccatatagatgatgtttcttcagatgataacggacaggacctaagcacatataactttggaacagatggctttcctgctgcagcaaccagtgctaacttatgtttggcaactggtgtacggggcggtgtggactggatgagaaagttggccttccgctacagacgggtaaaagagatctacaacacctacaaaaataatgttggaggtctgcttggtccagctaagagggaagcctggctgcagttgagggccgaaattgaagccctgaccgactcctggttgacactggccctgaaagcactctcgctcattcactcccggacaaactgtgtgaatattttagtaacaactactcagctcatcccagcattggcgaaagtcctgctgtatgggttaggaattgtatttccaatagaaaatatttacagtgcaactaaaataggaaaagaaagctgttttgagagaataattcaaaggtttggaagaaaagtggtgtatgttgttataggagatggtgtagaagaagaacaaggagcaaaaaagcacgcgatgcccttctggaggatctccagccactcggacctcatggccctgcaccatgccttggaactggagtacctgtaacagcgctcggcactttgacagcgcacagctgctctgtgaccagggacagatccagcaggccccagtctcgcatcagcgccggcctccagaacttagcaatttccgcctggtgatgcgcagttgctgtcagtcttgacctctgcctttgtggtgaatggaggaccacgtctatttcatcagaacagctgttgactctagtactgtgaatccagtgaaaataagccatgagaatgttttagcacagcgttatgtgtctgccacattaactacacggttcaaacctgtgaagaaaggacctgcaaacgcttcagttgttagcattttcaatgtgatataaacagcttctccaatacagcaaacctaattgcacaacagagactgaaatgtgtttcctgaataccagtggaggaattttcttgtaaagaaggtttactttttggtgtctcatacccagggtaatctgtacatctctacttatttatgaacagactttttttaaaaagataaaaaaacagctttattgaggtataattcacccaccagacttttttaaacatcaaataattgaagagacaatagcattagaaataagtgattaaaggcctctgcctcacaacatggcaagtacagtactttgaattttagcacattgcatagtagttttaagtatgtctaatttaaacgtataatatgtacatcactgagacaatcatgtacagaaagaatttttggtgtaaatttgtaataatggataattcttttacatattgtttagggaaatgatattgaaaggtagcaatgcctggatagtgaagcatgaggcagcacgtgcacaaattcatgtgccgtgccttatctgagttttcggtataaatatgtagataatggattttttttttttagataatgttgtcaagaccaaaagcatggatgtcaagtgtcagtaaggattttgttttctaaaattttttcctgcatcagttcttctgagggccttgatgaaataacacagcagtttcttaaacaatttgaaacaaaatgagctctcctaccacctcactttttcatttccacactaatgtattatatgtaactacttggaaaaaataattattcaaatgcttcttcccacaaagaatatagatgatagtagatatattttattaataaaatggttcatgaatcggagactaacaaagttttcatgtgctcagaattattaattatcgtgtctgcattttctttcgataaaggaagacacacgatgctaatccggaaatcagcaaactttgcattactccctatgtgcgtattttctctttcttcctgtcaccctgaggaaggttcattgccattgtcatcaccatggaaacaacgttcctctccacctgcattatgtactacatgacaggcatcaatctggggaaataataaaattatcacctttgtcagaccataagagtttctccaaaagtggtcagtttggctgggcaatattttctctcatctaacaaacacaatccattgtcatgaaattacccttaggatgagtcttctttaatcaatcatatattgggcgggaaaaacaccagctttgacccgaagtagttgaagagctacttcattcttttctgaagttgtgtgttgctgctagaaatagtcatttgtgaattatccaaattgtttaaattcacaattgaattagttttttcttcctttttgcttgaagcaaacagttgacaatttttaaccttttcattttatgtttttgtactctgcagactgaaaagacaaagtttatcttggccttactgtataaaggtgtgctgtgtccaccgttgtgtacagaatttttcttcattaattttgtgtttaagttaataaaatttatttgtgatgtactgtaa

SEQ ID NO: 6920 - protein, 587 aa, Homo sapiens
MEMQDLTSPHSRLSGSSESPSGPKLGNSHINSNSMTPNGTEVKTEPMSSSETASTTADGSLNNFSGSAIGSSSFSPRPTHQFSPPQIYPSNRPYPHILPTPSSQTMAAYGQTQFTTGMQQATAYATYPQPGQPYGISSYGIKTEGGLSQSQSPGQTGFLSYGTSFSTPQPGQAPYSYQMQGSSFTTSSGIYTGNNSLTNSSGFNSSQQDYPSYPSFGQGQYAQYYNSSPYPAHYMTSSNTSPTTPSTNATYQLQEPPSGITSQAVTDPTAEYSTIHSPSTPIKDSDSDRLRRGSDGKSRGRGRRNNNPSPPPDSDLERVFIWDLDETIIVFHSLLTGSYANRYGRDPPTSVSLGLRMEEMIFNLADTHLFFNDLEECDQVHIDDVSSDDNGQDLSTYNFGTDGFPAAATSANLCLATGVRGGVDWMRKLAFRYRRVKEIYNTYKNNVGGLLGPAKREAWLQLRAEIEALTDSWLTLALKALSLIHSRTNCVNILVTTTQLIPALAKVLLYGLGIVFPIENIYSATKIGKESCFERIIQRFGRKVVYVVIGDGVEEEQGAKKHAMPFWRISSHSDLMALHHALELEYL

SEQ ID NO: 6921 - DNA, 4269 bp, Homo sapiens
agtgctcctttcaattgttgcatttaaaccaataaggttaggacaagagaatagctgtggtttgcgttgcaaaaaccaaaaaaaaaaaaaaaaaaaaaaaaagaaagccccgaggctccatgggcagacctacaaggctgcgcaaacaaatcgagggatgagattctgctgtttctttgtctagggttctcagatgctatctgccgctgctgtttggtggggaaggagcgctgggcgcaaagctgttaccaaacagaacggtgggagctgatggctccgagtttggggcgaggtagaaactctccagtgccacttccgactttaagccttcctgttgccgtccactgtggcgggtttcttcctggggaacacgttttcgctcagtcgctcggcagcccgagcctgcggcagcggccaggcgcctgccccctgcgccgagctttcccctgcagaggcgctccactcccagaagcgccgcggctgcaccagagcgcctgagagcccccgcgcgtacccatccaggagcaaaactatgtcaggaatggaggtttgctaacccagaaaattcgaaggaacacattaaactggtggatgcagcagatgtaagcgctgtgcaaacatctcaagccagttcagatgttgctgtttcctcaagttgcaggtctatggaaatgcaggatctaaccagcccgcatagccgtctgagtggtagtagtgaatcccccagtggccccaaactcggtaactctcatataaatagtaattccatgactcccaatggcaccgaagttaaaacagagccaatgagcagcagtgaaacagcttcaacgacagccgacgggtctttaaacaatttctcaggttcagcaattgggagcagtagtttcagcccacgaccaactcaccagttctctccaccacagatttacccttccaatttaccacaggaatgcaacaagctacagcctatgccacgtacccacagccaggacagccgtacggcatttcctcatatggcatcaagactgaaggtggattgtcacagtctcagtcacctggacagacaggatttctcagctatggcacaagcttcagtacccctcaacctggacaggcaccatacagctaccagatgcaaggtagcagttttacaacatcatcaggaatatatacaggaaataattcactcacaaattcctctggatttaatagttcacagcaggactatccgtcttatcccagttttggccagggtcagtacgcacagtattataacagctcaccgtatccagcacattatatgaccagcagcaacaccagcccaacgacaccatccaccaatgccacttaccagcttcaagaaccgccatctggcatcaccagccaagcagttacagatcccacagcagagtacagcacaatccacagcccatcaacacccattaaagattcagattctgatcgattgcgtcgaggttcagatgggaaatcacgtggacggggccgaagaaacaataatccttcacctcccccagattctgatcttgagagagtgttcatctgggacttggatgagacaatcattgttttccactccttgcttactgggtcctacgccaacagatatgggagggatccacccacttcagtttcccttggactgcgaatggaagaaatgattttcaacttggcagacacacatttattttttaatgacttagaagaatgtgaccaagtccatatagatgatgtttcttcagatgataacggacaggacctaagcacatataactttggaacagatggctttcctgctgcagcaaccagtgctaacttatgtttggcaactggtgtacggggcggtgtggactggatgagaaagttggccttccgctacagacgggtaaaagagatctacaacacctacaaaaataatgttggaggtctgcttggtccagctaagagggaagcctggctgcagttgagggccgaaattgaagccctgaccgactcctggttgacactggccctgaaagcactctcgctcattcactcccggacaaactgtgtgaatattttagtaacaactactcagctcatcccagcattggcgaaagtcctgctgtatgggttaggaattgtatttccaatagaaaatatttacagtgcaactaaaataggaaaagaaagctgttttgagagaataattcaaaggtttggaagaaaagtggtgtatgttgttataggagatggtgtagaagaagaacaaggagcaaaaaagcacgcgatgcccttctggaggatctccagccactcggacctcatggccctgcaccatgccttggaactggagtacctgtaacagcgctcggcactttgacagcgcacagctgctctgtgaccagggacagatccagcaggccccagtctcgcatcagcgccggcctccagaacttagcaatttccgcctggtgatgcgcagttgctgtcagtcttgacctctgcctttgtggtgaatggaggaccacgtctatttcatcagaacagctgttgactctagtactgtgaatccagtgaaaataagccatgagaatgttttagcacagcgttatgtgtctgccacattaactacacggttcaaacctgtgaagaaaggacctgcaaacgcttcagttgttagcattttcaatgtgatataaacagcttctccaatacagcaaacctaattgcacaacagagactgaaatgtgtttcctgaataccagtggaggaattttcttgtaaagaaggtttactttttggtgtctcatacccagggtaatctgtacatctctacttatttatgaacagactttttttaaaaagataaaaaaacagctttattgaggtataattcacccaccagacttttttaaacatcaaataattgaagagacaatagcattagaaataagtgattaaaggcctctgcctcacaacatggcaagtacagtactttgaattttagcacattgcatagtagttttaagtatgtctaatttaaacgtataatatgtacatcactgagacaatcatgtacagaaagaatttttggtgtaaatttgtaataatggataattcttttacatattgtttagggaaatgatattgaaaggtagcaatgcctggatagtgaagcatgaggcagcacgtgcacaaattcatgtgccgtgccttatctgagttttcggtataaatatgtagataatggattttttttttttagataatgttgtcaagaccaaaagcatggatgtcaagtgtcagtaaggattttgttttctaaaattttttcctgcatcagttcttctgagggccttgatgaaataacacagcagtttcttaaacaatttgaaacaaaatgagctctcctaccacctcactttttcatttccacactaatgtattatatgtaactacttggaaaaaataattattcaaatgcttcttcccacaaagaatatagatgatagtagatatattttattaataaaatggttcatgaatcggagactaacaaagttttcatgtgctcagaattattaattatcgtgtctgcattttctttcgataaaggaagacacacgatgctaatccggaaatcagcaaactttgcattactccctatgtgcgtattttctctttcttcctgtcaccctgaggaaggttcattgccattgtcatcaccatggaaacaacgttcctctccacctgcattatgtactacatgacaggcatcaatctggggaaataataaaattatcacctttgtcagaccataagagtttctccaaaagtggtcagtttggctgggcaatattttctctcatctaacaaacacaatccattgtcatgaaattacccttaggatgagtcttctttaatcaatcatatattgggcgggaaaaacaccagctttgacccgaagtagttgaagagctacttcattcttttctgaagttgtgtgttgctgctagaaatagtcatttgtgaattatccaaattgtttaaattcacaattgaattagttttttcttcctttttgcttgaagcaaacagttgacaatttttaaccttttcattttatgtttttgtactctgcagactgaaaagacaaagtttatcttggccttactgtataaaggtgtgctgtgtccaccgttgtgtacagaatttttcttcattaattttgtgtttaagttaataaaatttatttgtgatgtactgtaa

SEQ ID NO: 6922 - protein, 470 aa, Homo sapiens
MQQATAYATYPQPGQPYGISSYGIKTEGGLSQSQSPGQTGFLSYGTSFSTPQPGQAPYSYQMQGSSFTTSSGIYTGNNSLTNSSGFNSSQQDYPSYPSFGQGQYAQYYNSSPYPAHYMTSSNTSPTTPSTNATYQLQEPPSGITSQAVTDPTAEYSTIHSPSTPIKDSDSDRLRRGSDGKSRGRGRRNNNPSPPPDSDLERVFIWDLDETIIVFHSLLTGSYANRYGRDPPTSVSLGLRMEEMIFNLADTHLFFNDLEECDQVHIDDVSSDDNGQDLSTYNFGTDGFPAAATSANLCLATGVRGGVDWMRKLAFRYRRVKEIYNTYKNNVGGLLGPAKREAWLQLRAEIEALTDSWLTLALKALSLIHSRTNCVNILVTTTQLIPALAKVLLYGLGIVFPIENIYSATKIGKESCFERIIQRFGRKVVYVVIGDGVEEEQGAKKHAMPFWRISSHSDLMALHHALELEYL

SEQ ID NO: 6923 - DNA, 412 bp, Homo sapiens
attcattcctctttatagtttaactttctgttaggtggaaccatatgaaatttccatctccgcaggtcacaaagaccaaatatctgaaatttcatatggccaacctatagttgaaaatatgtcagtgctttctatatattttgtgttttgcttggattattgtgcattattttgttttgtttttgttttccagcaattgggagcagtagtttcagcccacgaccaactcaccagttctctccaccacagatttacccttccaacagaccatacccacatattctccctaccccttcctcacaaactatggctgcatatgggcaaacacagtttaccacaggaatgcaacaagctacagcctatgccacgtacccacagccaggacagccgtacggcatttcctcatatggtg

SEQ ID NO: 6924 - protein, 97 aa, Homo sapiens
MSVLSIYFVFCLDYCALFCFVFVFQQLGAVVSAHDQLTSSLHHRFTLPTDHTHIFSLPLPHKLWLHMGKHSLPQECNKLQPMPRTHSQDSRTAFPHM

SEQ ID NO: 6925 - DNA, 1067 bp, Homo sapiens
agtgctcctttcaattgttgcatttaaaccaataaggttaggacaagagaatagctgtggtttgcgttgcaaaaaccaaaaaaaaaaaaaaaaaaaaaaaaagaaagccccgaggctccatgggcagacctacaaggctgcgcaaacaaatcgagggatgagattctgctgtttctttgtctagggttctcagatgctatctgccgctgctgtttggtggggaaggagcgctgggcgcaaagctgttaccaaacagaacggtgggagctgatggctccgagtttggggcgaggtagaaactctccagtgccacttccgactttaagccttcctgttgccgtccactgtggcgggtttcttcctggggaacacgttttcgctcagtcgctcggcagcccgagcctgcggcagcggccaggcgcctgccccctgcgccgagctttcccctgcagaggcgctccactcccagaagcgccgcggctgcaccagagcgcctgagagcccccgcgcgtacccatccaggagcaaaactatgtcaggaatggaggtttgctaacccagaaaattcgaaggaacacattaaactggtggatgcagcagatgtaagcgctgtgcaaacatctcaagccagttcagatgttgctgtttcctcaagttgcaggtctatggaaatgcaggatctaaccagcccgcatagccgtctgagtggtagtagtgaatcccccagtggccccaaactcggtaactctcatataaatagtaattccatgactcccaatggcaccgaagttaaaacagagccaatgagcagcagtgaaacagcttcaacgacagccgacgggtctttaaacaatttctcaggttcagcaattgggagcagtagtttcagcccacgaccaactcaccagttctctccaccacagatttacccttccaacagaccatacccacatattctccctaccccttcctcacaaactatggctgcatatgggcaaacacagtttaccacaggaatgcaacaagctacagcctatgccacgtacccacagccaggacagccgtac

SEQ ID NO: 6926 - protein, 133 aa, Homo sapiens
MEMQDLTSPHSRLSGSSESPSGPKLGNSHINSNSMTPNGTEVKTEPMSSSETASTTADGSLNNFSGSAIGSSSFSPRPTHQFSPPQIYPSNRPYPHILPTPSSQTMAAYGQTQFTTGMQQATAYATYPQPGQP

SEQ ID NO: 6927 - DNA, 908 bp, Homo sapiens
agtgctcctttcaattgttgcatttaaaccaataaggttaggacaagagaatagctgtggtttgcgttgcaaaaaccaaaaaaaaaaaaaaaaaaaaaaaaagaaagccccgaggctccatgggcagacctacaaggctgcgcaaacaaatcgagggatgagattctgctgtttctttgtctagggttctcagatgctatctgccgctgctgtttggtggggaaggagcgctgggcgcaaagctgttaccaaacagaacggtgggagctgatggctccgagtttggggcgaggtagaaactctccagtgccacttccgactttaagccttcctgttgccgtccactgtggcgggtttcttcctggggaacacgttttcgctcagtcgctcggcagcccgagcctgcggcagcggccaggcgcctgccccctgcgccgagctttcccctgcagaggcgctccactcccagaagcgccgcggctgcaccagagcgcctgagagcccccgcgcgtacccatccaggagcaaaactatgtcaggaatggaggtttgctaacccagaaaattcgaaggaacacattaaactggtggatgcagcagatgtaagcgctgtgcaaacatctcaagccagttcagatgttgctgtttcctcaagttgcagttaaaacagagccaatgagcagcagtgaaacagcttcaacgacagccgacgggtctttaaacaatttctcaggttcagcaattgggagcagtagtttcagcccacgaccaactcaccagttctctccaccacagatttacccttccaacagaccatacccacatattctccctaccccttcctcacaaactatggctgcatatgggcaaacacagtttaccacaggaatgcaacaagctacagccta

SEQ ID NO: 6928 - protein, 89 aa, Homo sapiens
MLLFPQVAVKTEPMSSSETASTTADGSLNNFSGSAIGSSSFSPRPTHQFSPPQIYPSNRPYPHILPTPSSQTMAAYGQTQFTTGMQQAT

SEQ ID NO: 6929 - DNA, 13686 bp, Homo sapiens
attcccagagtgcatatcgggaatagacacacaaagacatgcgcactcaacttaatcagccatttttttaaacagggctaaaacgataataattagcagaataaagacatatcggattttcatttcctttcctccttttcccaaccccttcacaaccaaacagcgagaccgcggtcggcacatgctttaactcctcccggacccccgaggaccgctccatgccccccactttctgctccagcgtttttattttcacccaataaagttcgaggattattttttattttttttgtttttttaatgaaccctctcgttttacttggatgtgatcagctgtaagtaaaataaaagcaaaacaaaaaagaggcgaagatcgagtaggaactgcaggggaaatggaaagtccctgacaggctggatgaaatgagatccccatgtagcaattgccatggaaacctgtgactcccctcctatctcaaggcaggaaaatgggcagagcacatcaaagctatgtggaacgacacaacttgataatgaggtgccagagaaagttgcagggatggagcctgacagggaaaacagctccacagatgacaacctgaaaacggatgagcgcaaaagtgaagccttgctgggtttcagcgttgagaatgcagctgccactcaggttacctcagcaaaggagataccctgcaacgaatgtgccacttcttttcccagtttacagaaatacatggaacaccactgccctaatgcccgccttcctgtcctgaaggatgacaacgagagcgagatcagcgagttagaggacagtgacgtggaaaatctaacaggggagatcgtttaccagcctgatgggtcagcatatataattgaggactccaaagaaagtgggcagaatgcacagactggggcaaatagcaaactcttttctacagcgatgttcctggactccctggcatctgctggagagaagagtgatcagtctgcttctgcacctatgtcgttctacccacagatcatcaacacttttcatatcgcttcatccctcgggaaaccatttacagccgatcaggctttcccaaatacctcagcattagcaggagttggtcctgtgttgcacagtttccgtgtctatgatctccgacacaagagagagaaagactatctaaccagtgatggctcagccaaaaactcctgtgtgtccaaagatgtccctaacaatgtggacttgtccaaattcgatggttgtgttagcgatgggaaaaggaaacctgttttaatgtgtttcttgtgcaagttgtcttttggttatatcaggtcatttgtaacccatgctgtgcatgatcatcggatgaccctcaatgacgaggagcagaagctcctcagtaataaatgcgtctccgccataatacaggggattggcaaagacaaagaacctcttataagctttctggaaccaaaaaaatccacttctgtttatccccatttttctactacaaacctcataggacccgatccaaccttccgcggtttatggagcgcttttcatgttgaaaatggtgactctttgccggctggctttgccttcttaaaaggaagcgcgagcacctcgagctcagcagagcagccgctggggattacccaaatgccaaaggctgaagtgaatctgggggggctgtctagtttagtagtgaacaccccaattacctctgtctccctcagccactcatcgtctgagtctagcaagatgtcagagagcaaagaccaagagaacaactgtgaaaggccaaaagaaagcaacgttttacacccaaacggggagtgccctgtcaaaagtgaacccactgaaccgggagatgaggatgaagaagatgcgtactccaatgaacttgatgacgaggaagtattaggtgaactcaccgatagtattggtaacaaagatttccctctcttaaaccaaagcatttctcctttatcatccagtgtgctaaaatttattgaaaagggtacctcgtcctcctcggcgactgtttctgatgacacagaaaagaaaaaacagactgctgctgttagggccagtggcagtgttgctagtaactatggcatcagtggcaaggactttgcagacgcaagtgccagtaaagacagtgccacagctgctcatccaagtgaaatagcccggggagacgaagacagttcagccactcctcaccagcatggctttaccccgagtactcctggcacaccagggcctggaggagacggctcaccgggcagtggcatcgagtgtccaaagtgcgacactgtgttggggtcttcgaggtctcttggtggtcatatgactatgatgcactcgaggaactcatgcaaaaccctcaaatgtcctaaatgtaactggcactacaaatatcagcagaccctggaggcccatatgaaggagaaacaccctgagccgggtggctcttgtgtttattgtaagactggacagcctcaccccaggcttgcccggggtgagagttacacgtgtggctataaacccttccgttgtgaggtttgtaactactctaccactaccaaaggcaacctcagtattcatatgcagtcggacaagcacctgaacaatgttcagaatctccaaaatggcaatggtgagcaggtgtttggccactctgccccagcccccaacaccagcctcagtggctgcggaacaccctctccgtccaaacccaaacagaaacccacctggcggtgtgaagtttgtgattatgaaaccaatgtcgccaggaacctccgaattcatatgaccagcgaaaagcacatgcataatatgatgcttttgcagcagaacatgaagcagatccagcataatctgcacttgggcctcgccccggcggaagcagagctttatcagtactacctagcccagaacataggcctgaccggaatgaagctggaaaaccctgccgaccctcagctgatgatcaatccattccagctggatccagcgacagcagcggctttggcaccagggctcggagagctgtcaccttatatcagtgacccagcgctgaagctattccagtgtgctgtttgcaacaaattcacctctgacagcctggaggccctaagtgtgcatgtgagcagtgagcgctctctccctgaagaggaatggagggcagtaattggagatatctaccagtgcaagctctgcaactacaacactcagctcaaagccaacttccagctacactgcaagactgataaacatatgcagaaatatcaactggtggctcacattaaagaagggggcaaaagcaatgagtggaggttgaagtgtattgccattggcaaccctgttcacctaaaatgtaacgcctgtgactattacaccaacagtgtggataaattacgcttgcataccaccaatcacaggcacgaggcggccctgaagctctacaagcacttgcagaagcaagagggtgcagtgaatcccgaatcctgctattactactgtgccgtgtgtgattacaccaccaaggtcaagttgaatctggtacaacatgtccgttcggtgaagcatcagcagactgagggcctacggaagctccagctccaccagcaaggcctggcaccagaggaggacaacctcagtgagatcttttttgttaaagattgcccaccaaatgagcttgaaactgcctcattgggagccaggacttgtgatgatgatcttacagagcagcagttgagatcgacctcagaagaacaaagtgaggaggcagaaggagctattaagcctacagcagtggccgaggacgatgaaaaagacacaagtgagagagacaatagtgaaggcaaaaactctaataaagactctgggataatcacaccagagaaggaactaaaagttagtgtggcagggggtacccagccactcctgctggcaaaagaagaggatgttgcaacaaaaaggtcaaaacctacagaggacaataaattctgtcatgaacagttctatcaatgtccttattgtaactacaatagtagggaccaaagtcgtatccagatgcacgtcctatcacagcactcggtgcagccggtcatctgctgtcctctctgtcaggacgtcctcagcaacaaaatgcatctccaactgcatctgacgcatttgcacagtgtgtctccagactgtgtggagaagctgcttatgacagtgcctgtccctgatgtgatgatgccaaacagtatgctactgccagcagctgcctctgagaaatcagagcgggacacacctgcagccgtgacagctgaggggtctgggaaatattcaggtgaaagtccaatggatgacaaaagcatggcaggtctcgaggattcaaaggctaatgtggaagtaaagaatgaggagcagaaaccgactaaagaacccttggaagtctcagaatggaataaaaatagcagtaaggatgtgaaaatccccgacacactgcaagatcaattaaatgaacagcaaaaaaggcaaccgctctctgtttctgaccgtcatgtctacaagtatcgctgtaaccattgtagcttggctttcaaaactatgcagaagcttcagatacattcccagtatcatgcaattcgggctgcgacaatgtgtaacctctgccagcgcagtttccgtacattccaggctttaaaaaaacacttggaagcaggccaccctgaactgagtgaagctgaacttcaacagctatatgcctccttgcccgtgaatggagaactgtgggcagagagcgaaactatgtcccaggatgaccatggcctagagcaggaaatggagagagagtatgaggtggaccacgaagggaaagcaagtcctgtaggaagtgatagtagctctattccagatgacatgggctctgaaccaaagcggaccttaccttttagaaaagggcccaattttacgatggaaaaattccttgatccatctcgtccatataaatgtacagtgtgtaaagagtcattcacccaaaagaacattctcttggtccactataattcagtttctcacttgcataagctgaaaaaagttttgcaggaagcctccagtcctgtcccacaagaaaccaacagcaacacagataacaaaccctacaagtgcagcatctgcaatgttgcatacagccaaagctcaacattggaaatccacatgaggtctgtgctccaccagacaaaggctagggctgcaaagctggagcccagtggtcatgtggctggtgggcacagcattgcagcaaatgtcaacagccctggccaggggatgttagattccatgagtttagcagctgtaaacagcaaagatacccatttagatgccaaagaattaaataaaaagcaaactcctgatttaatctctgctcaacctgcacatcacccaccacagtcaccagcacaaattcagatgcaactacagcacgaattacaacagcaagccgcattctttcagcctcagtttctaaacccagcctttttgcctcattttcctatgaccccagaagcactgctgcagtttcagcagcctcagtttctctttccattttatatacctgggacggagttcagcttggggccagatttgggcttgccaggctctgccacatttgggatgcctggcatgacaggaatggctggctccttgcttgaagacctaaagcagcagattcaaacccaacatcacgttggtcaaactcaactccagatgcaagcaaattattgaaacaagagcaaagtaacatagtgagtgcagactgccaaatcatgaaggatgtgccatcttataaggaggcagaagatatttctgaaaagccagaaaaaccaaagcaggaatttataagtgaaggtgaaggactcaaagaaggcaaagacacaaagaagcaaaaatccttggaaccatccatcccaccaccccgaatagcttcaggggccagaggaaatgctgccaaagcgttattggaaaactttggttttgaactggtcattcagtataacgaaaacaggcagaaggtacagaagaagggcaaaagtggtgaaggcgaaaacactgacaaactagaatgtggaacatgtggtaaattgttttccaatgttcttattttaaagagtcaccaagaacatgtacatgggcaattttttccatatgcagcgctagaaaaatttgctcgtcaatacagggaggcctatgacaagctttatccaatttctccatcttctccagaaacgccgcccccgccacctcctcctcctcccttgcctccggctcctccacagccttcttctatgggtcctgtaaagatccccaacacggtttctactcctctgcaagctccaccacccaacaggtccaactgccggtttctctggacctgccgctctttccttccattatgatgcaacctgtgcaacaccctgcgcttcctccccagcttgccctgcagctgccacagatggacgcactctctgcagacctcacccaactttgccagcagcagctcggattagatcccaacttcttaagacattctcagttcaaacgcccacggacaagaattacagatgatcagctaaaaatcctgagggcttattttgacattaataattctccaagtgaagaacagatccaggaaatggcagagaaatctggcctctcccaaaaagttatcaaacactggtttagaaatacgctttttaaggaacgacagagaaataaagattcaccatacaacttcagtaaccctcctataacggttttagaagatatcagaattgatccacagcccacctctttagaacattacaaatctgatgcatcattcagtaaaaggtcttctagaacgagatttactgactaccagcttagggttctgcaagacttttttgacacaaacgcttacccaaaagatgatgaaatagaacaactctccactgttctcaatctgcctacccgggttattgttgtatggttccagaatgctcgtcagaaagcacgaaagagttatgagaatcaagcagaaacaaaagataatgaaaaaagagaactcactaatgaacggtacattcgaacaagcaacatgcagtaccagtgtaaaaagtgcaatgtggttttccccaggatctttgacttgattacgcatcagaaaaagcagtgttacaaggatgaagatgatgatgcccaagatgaaagccaaacagaagactccatggatgccactgatcaagtggtatacaagcattgcacagtgtctggccaaacggatgcagctaaaaacgctgctgcccctgcagcaagttctggctctgggaccagcacccccctgattccatcacccaaaccagaacctgagaagacttctccaaaacctgaatatcccgcagaaaagccaaagcagagtgacccctctcccccttctcaaggcaccaaaccagccctgccattagcatcgacttcctcggacccaccacaggcatccacagcccagccacagccacagccacagccaccaaaacaaccccaacttatcggaagacctccctcggcctctcaaacaccggtcccttccagtccactgcaaatttccatgacgtctctccagaacagtctacctccacagttactacaataccaatgtgatcagtgtacagttgccttcccaactctggaactctggcaggaacaccagcacatgcacttccttgctgctcaaaaccaattccttcactctccgttcttggaaaggcccatggacatgccctacatgatatttgaccccaacaatccgctgatgactggacaactgctgggcagttccctcactcaaatgccccctcaggccagttcctcccacaccacagcccccacaacggttgctgcttccctaaaaaggaaactagacgataaagaagataataattgcagtgaaaaagaaggagggaatagcggtgaagaccaacaccgagataaacgcttgagaaccacgatcaccccggaacagctggaaatactctatgaaaaatacttgctggattccaatcctaccagaaaaatgcttgatcatattgcccgcgaagtcgggctgaaaaaaagggtcgtgcaagtctggttccagaatacacgagcgcgggagaggaaaggccagttccgggcggtgggtccagcacagtctcataaacggtgtccgttttgccgagccctgtttaaagcaaagtcggccttagaaagccacattcgctctcggcactggaatgaaggaaagcaggcaggttacagcttgccaccaagccctttaatatccaccgaagatgggggagaaagcccacagaaatacatctattttgattacccatctttgccattaactaaaattgatctatcaagtgagaatgaattggcttctacagtgtcaacacctgttagtaaaacagcagagctgtcaccgaagaatcttttaagcccttcttcttttaaagcagagtgttctgaggatgtagagaatttaaatgcccctcctgctgaggctgggtatgatcaaaataaaaccgattttgatgagacttcatcgattaatacggcaatcagtgacgccaccaccggagacgagggaaacactgaaatggaaagcaccacaggaagttccggagatgtgaaaccggctttgtctcccaaagagccaaaaactctggatactctgccaaaacctgcaaccacacctaccacggaggtctgcgatgacaaatttctcttttctctcacaagcccatccatccatttcaatgacaaagatggcgaccacgaccaaagcttttacatcacagatgacccggatgacaacgccgaccgcagcgaaacgtccagcatagcggacccgagctccccaaatccattcggatccagcaatccctttaaatccaaaagtaatgatcggccgggtcacaagcgttttcgaacgcaaatgagcaatcttcaactcaaggttctcaaggcttgctttagtgactaccgaactccaaccatgcaagaatgtgaaatgttagggaatgagattggtctgcccaaacgcgtagtccaggtgtggttccaaaatgcaagggcaaaggaaaagaaatttaaaattaacatagggaagcctttcatgatcaatcaaggcggaacggaaggcaccaaaccagagtgtaccctctgcggggtgaagtactctgcccgcttgtccatcagagatcacattttctccaaacagcacatttcaaaagtgagggagaccgttggcagtcagctcgatcgggagaaagattacttggctccgaccacggttcggcagctgatggcacagcaagaacttgatcgtataaagaaagcttcagacgtgctgggcttgacggtacagcagccaggcatgatggacagcagttctctccacggcatcagcctgccaacagcctaccccggactccccggccttcctccagtccttctccccggaatgaacggtccatcctccttgccgggatttccacaaaattcaaacactttaacacctcccggtgcaggcatgcttgggtttcctacttcagctacttcgtctcctgccctgtctctcagcagtgcccccaccaaacctttgctgcagactccaccacctccaccacctcctcctcctcctcctccttcatcctctctgtcaggacagcagaccgagcaacagaacaaagaatctgagaaaaagcaaactaagccaaacaaggtgaaaaaaatcaaagaggaggaattagaggccaccaaacccgaaaaacaccccaaaaaagaggaaaaaatctcatctgctctttcagtgttgggcaaagttgtaggtgaaacacatgtcgatcctattcagttgcaggcattacagaatgcaattgctggtgacccagcttcctttataggcggacagttcttgccatactttatccctgggtttgcttcttattttacacctcagctccctggaacagtgcaggggggatacttcccacctgtctgtggcatggagagcctctttccttatggccctacaatgccccagacactggcaggtctgtccccaggtgcactgttaaaccagttcaggcaaagacatccaaagtagaaagtgaccagccgcaaaactccaacgatgcttcagaaacaaaggaagacaaaagtactgctacagaaagcacaaaagaagaaccccagttagaatccaaaagtgcagacttttcagacacttacgttgttccattcgtcaagtatgagtttatatgcagaaagtgccagatgatgtttactgatgaagacgccgcagtaaatcatcaaaagtccttctgttatttcggtcagcctttgattgacccacaagagacagtgcttcgtgtcccagtcagcaaatatcagtgtcttgcctgtgatgtggctatcagtgggaatgaagcacttagccaacacctccagtcaagcttgcacaaagagaaaacaatcaaacaagcaatgagaaatgccaaagagcatgttagattattacctcactcagtctgctcccctaatcctaacaccacatctacctcgcagtctgcagcttcttctaataacacctatcctcatctttcttgcttctccatgaagtcctggcctaatatccttttccaagcgtctgccaggagagctgcttctcccccttcttctcctccttccctttccttgccttcaacggttacctcaagtttgtgcagcacctcaggggttcaaacctcactacccacagaaagttgttcagatgagtctgacagtgagctgagccagaagctagaagacttagataattctttggaagtgaaggctaagcctgcttctggcctagatggtaatttcaatagcatccgaatggatatgttcagtgtgtaggagtgaagacaggatcccgtgcttaaaaaaataaaaaataaaaaaataaaaaaaaaataagactttaactgcagttccaaagcttctctaacccaaaaattacagtaccaaatgattgactcaggattgtttttcccatattgatatgctggcaatataggatggtatgtaatggacagaactgatgcagatggttgaatgcgcttgtactatatgctaaaatatggaaaaggaaaaaaaaatctcacaagttcttttggaacttgtttcaagccaaaaactctcaagaaagcaaattgcacctcagctggattgatttccaaatgctagcatgtactgtatgggaggatgatccagatgtttcaaagagaatttctcttagtttagttaggtgtaattcagtagctttaaattctcaggtcagaacataacatttctcatttgttaaaagcagcaagaagcctggtaaaactgtgacttttccccaaacgtcaatctttattagaaagcattttctaggtgtgtttagtgtacaaagagactttataacccttactggacaacacacagatccttgagctcacgctgcaggatagtacagttttaccgcagagggaatctggaacagtggaatcatgtgtctgccctgtgtattgcagtttgtattgccacaagctatatttataccagtgtcacccttttcttgtagaatatactaataatctgtgccaactctaccttctcacttttacctctgacgtcattctttttttctgaaagaggtaataattctagttttgatagactctgaggattatgtgaacaggacatttttcatttgtgaatttaatgctatactgtcaaggtacttgcttgtgtctgaactctagtgcacttatgattttgtagaccatgtgaaatttaataagataccttttttttcctttctttgtgtgtagtgcagcaacagtttggtctgcatttgttagaagtttaactcctaacaacccaaagacctatttaacaattggtgcataaatgaaagtagtactgtatacttgaaactgtttaagtacaagttgaacaaaaattatgaaaaggtatatttgcttctcgggaaagcaaagaagctgctttaaaaaataaaaaggggactaaaaatttgttttgtataaagaggttagccctgcgcacgtaggactgaattcagtgatatccctatacactgccatttagtggataggttattgtacttccattcatactctgggcacttgtgttgtattgttctgttacatactttttttaacctgttttgttttatcatatatgcattaaaagtattatctttatcaacatttgctgctactgtgttaacatttttgttttgcttgccatgaatttcaacttccaccacccagtgaattgatttataaattgctatgctttgctgtttttctgttgctgtggaacttaaagaatgtgaaagctgtcaaagggtattttacgaatcacttttgtgtttgatatagtaaaacaatgtgattcattccaaagtaacagaaggttatttgtaagaaagttaaaggcttgtgaacaaagaaagctaagctgttgtacatatttgtagttggctgtgcatggtacaaatttattaatatgaagaaatgcaaaatgtattgcttttgatatttctcttccgagatgaacaagtagcatgtaatgcaactgtttgacagtttaactcaagtcatgcttcaaactgttttaatgatcaaatcaagacacatttcattttacattttattattgtacagtttttgtttcggatgatgatcacagcaatctttattctatacattttatgtgaacttttttaatgtctttaatttggattttttttttttttagtattttaacatttattttaatcctgaagacacttttttgattgtgtttcgtaagagacaacatggcctcctaaggtgcaatcctgccgctatagtgagctaatgtcctgaatccaaaggcttcagaaaattgcttttgcctttttcatgaatgttaagcagcagcattgtgagatcgatctgtcctggcagttaacacgatgtgcaacagtgtgttagcatggaacagaacgcttttcacaaaacaaaggactgttttacaaatgattattccgacagtgtgtcgacataaacttttacaactgcacagcagccaaaaaaagaaaaaaaaaagaaaaaaaactttaactggatggacgttgttagggtgagaaataaaaggacagcctccaaaggttgagaatgagaattgttttttcctggatatcaaagggattatcacagcgcaatcattgtctacacaacatgtactctcaacgcctgggttacataggaaatgcaccctgaggttttaataaaagcccctatggctataactttaaataaactaaaccaaaaatgttattgatgttttatatatagagagtagtctcattagtttttgttactgtaatgtttgaagtctcaaatgcaccgtattacggtaaataacatggttttgaaaacttttttttattttgtcacagacctgttgtcatagttgaaatgatgtttattgtagatggtatttgaacttattcttctggaaatagttcatcaagtatgtttgttgctcattgtgatacattaaaaactgtatctacatattta

SEQ ID NO: 6930 - protein, 1773 aa, Homo sapiens
METCDSPPISRQENGQSTSKLCGTTQLDNEVPEKVAGMEPDRENSSTDDNLKTDERKSEALLGFSVENAAATQVTSAKEIPCNECATSFPSLQKYMEHHCPNARLPVLKDDNESEISELEDSDVENLTGEIVYQPDGSAYIIEDSKESGQNAQTGANSKLFSTAMFLDSLASAGEKSDQSASAPMSFYPQIINTFHIASSLGKPFTADQAFPNTSALAGVGPVLHSFRVYDLRHKREKDYLTSDGSAKNSCVSKDVPNNVDLSKFDGCVSDGKRKPVLMCFLCKLSFGYIRSFVTHAVHDHRMTLNDEEQKLLSNKCVSAIIQGIGKDKEPLISFLEPKKSTSVYPHFSTTNLIGPDPTFRGLWSAFHVENGDSLPAGFAFLKGSASTSSSAEQPLGITQMPKAEVNLGGLSSLVVNTPITSVSLSHSSSESSKMSESKDQENNCERPKESNVLHPNGECPVKSEPTEPGDEDEEDAYSNELDDEEVLGELTDSIGNKDFPLLNQSISPLSSSVLKFIEKGTSSSSATVSDDTEKKKQTAAVRASGSVASNYGISGKDFADASASKDSATAAHPSEIARGDEDSSATPHQHGFTPSTPGTPGPGGDGSPGSGIECPKCDTVLGSSRSLGGHMTMMHSRNSCKTLKCPKCNWHYKYQQTLEAHMKEKHPEPGGSCVYCKTGQPHPRLARGESYTCGYKPFRCEVCNYSTTTKGNLSIHMQSDKHLNNVQNLQNGNGEQVFGHSAPAPNTSLSGCGTPSPSKPKQKPTWRCEVCDYETNVARNLRIHMTSEKHMHNMMLLQQNMKQIQHNLHLGLAPAEAELYQYYLAQNIGLTGMKLENPADPQLMINPFQLDPATAAALAPGLGELSPYISDPALKLFQCAVCNKFTSDSLEALSVHVSSERSLPEEEWRAVIGDIYQCKLCNYNTQLKANFQLHCKTDKHMQKYQLVAHIKEGGKSNEWRLKCIAIGNPVHLKCNACDYYTNSVDKLRLHTTNHRHEAALKLYKHLQKQEGAVNPESCYYYCAVCDYTTKVKLNLVQHVRSVKHQQTEGLRKLQLHQQGLAPEEDNLSEIFFVKDCPPNELETASLGARTCDDDLTEQQLRSTSEEQSEEAEGAIKPTAVAEDDEKDTSERDNSEGKNSNKDSGIITPEKELKVSVAGGTQPLLLAKEEDVATKRSKPTEDNKFCHEQFYQCPYCNYNSRDQSRIQMHVLSQHSVQPVICCPLCQDVLSNKMHLQLHLTHLHSVSPDCVEKLLMTVPVPDVMMPNSMLLPAAASEKSERDTPAAVTAEGSGKYSGESPMDDKSMAGLEDSKANVEVKNEEQKPTKEPLEVSEWNKNSSKDVKIPDTLQDQLNEQQKRQPLSVSDRHVYKYRCNHCSLAFKTMQKLQIHSQYHAIRAATMCNLCQRSFRTFQALKKHLEAGHPELSEAELQQLYASLPVNGELWAESETMSQDDHGLEQEMEREYEVDHEGKASPVGSDSSSIPDDMGSEPKRTLPFRKGPNFTMEKFLDPSRPYKCTVCKESFTQKNILLVHYNSVSHLHKLKKVLQEASSPVPQETNSNTDNKPYKCSICNVAYSQSSTLEIHMRSVLHQTKARAAKLEPSGHVAGGHSIAANVNSPGQGMLDSMSLAAVNSKDTHLDAKELNKKQTPDLISAQPAHHPPQSPAQIQMQLQHELQQQAAFFQPQFLNPAFLPHFPMTPEALLQFQQPQFLFPFYIPGTEFSLGPDLGLPGSATFGMPGMTGMAGSLLEDLKQQIQTQHHVGQTQLQMQANY

SEQ ID NO: 6931 - DNA, 13411 bp, Homo sapiens
ggctgggggaagctgtcagctccgcaacggcgcgggcactgccaggggtctccgctcgccccgcgcccctgcaccccgatcgggatgactggtcctccgcactcatcctctgaaagtttggacgttggtccctgacaggctggatgaaatgagatccccatgtagcaattgccatggaaacctgtgactcccctcctatctcaaggcaggaaaatgggcagagcacatcaaagctatgtggaacgacacaacttgataatgaggtgccagagaaagttgcagggatggagcctgacagggaaaacagctccacagatgacaacctgaaaacggatgagcgcaaaagtgaagccttgctgggtttcagcgttgagaatgcagctgccactcaggttacctcagcaaaggagataccctgcaacgaatgtgccacttcttttcccagtttacagaaatacatggaacaccactgccctaatgcccgccttcctgtcctgaaggatgacaacgagagcgagatcagcgagttagaggacagtgacgtggaaaatctaacaggggagatcgtttaccagcctgatgggtcagcatatataattgaggactccaaagaaagtgggcagaatgcacagactggggcaaatagcaaactcttttctacagcgatgttcctggactccctggcatctgctggagagaagagtgatcagtctgcttctgcacctatgtcgttctacccacagatcatcaacacttttcatatcgcttcatccctcgggaaaccatttacagccgatcaggctttcccaaatacctcagcattagcaggagttggtcctgtgttgcacagtttccgtgtctatgatctccgacacaagagagagaaagactatctaaccagtgatggctcagccaaaaactcctgtgtgtccaaagatgtccctaacaatgtggacttgtccaaattcgatggttgtgttagcgatgggaaaaggaaacctgttttaatgtgtttcttgtgcaagttgtcttttggttatatcaggtcatttgtaacccatgctgtgcatgatcatcggatgaccctcaatgacgaggagcagaagctcctcagtaataaatgcgtctccgccataatacaggggattggcaaagacaaagaacctcttataagctttctggaaccaaaaaaatccacttctgtttatccccatttttctactacaaacctcataggacccgatccaaccttccgcggtttatggagcgcttttcatgttgaaaatggtgactctttgccggctggctttgccttcttaaaaggaagcgcgagcacctcgagctcagcagagcagccgctggggattacccaaatgccaaaggctgaagtgaatctgggggggctgtctagtttagtagtgaacaccccaattacctctgtctccctcagccactcatcgtctgagtctagcaagatgtcagagagcaaagaccaagagaacaactgtgaaaggccaaaagaaagcaacgttttacacccaaacggggagtgccctgtcaaaagtgaacccactgaaccgggagatgaggatgaagaagatgcgtactccaatgaacttgatgacgaggaagtattaggtgaactcaccgatagtattggtaacaaagatttccctctcttaaaccaaagcatttctcctttatcatccagtgtgctaaaatttattgaaaagggtacctcgtcctcctcggcgactgtttctgatgacacagaaaagaaaaaacagactgctgctgttagggccagtggcagtgttgctagtaactatggcatcagtggcaaggactttgcagacgcaagtgccagtaaagacagtgccacagctgctcatccaagtgaaatagcccggggagacgaagacagttcagccactcctcaccagcatggctttaccccgagtactcctggcacaccagggcctggaggagacggctcaccgggcagtggcatcgagtgtccaaagtgcgacactgtgttggggtcttcgaggtctcttggtggtcatatgactatgatgcactcgaggaactcatgcaaaaccctcaaatgtcctaaatgtaactggcactacaaatatcagcagaccctggaggcccatatgaaggagaaacaccctgagccgggtggctcttgtgtttattgtaagactggacagcctcaccccaggcttgcccggggtgagagttacacgtgtggctataaacccttccgttgtgaggtttgtaactactctaccactaccaaaggcaacctcagtattcatatgcagtcggacaagcacctgaacaatgttcagaatctccaaaatggcaatggtgagcaggtgtttggccactctgccccagcccccaacaccagcctcagtggctgcggaacaccctctccgtccaaacccaaacagaaacccacctggcggtgtgaagtttgtgattatgaaaccaatgtcgccaggaacctccgaattcatatgaccagcgaaaagcacatgcataatatgatgcttttgcagcagaacatgaagcagatccagcataatctgcacttgggcctcgccccggcggaagcagagctttatcagtactacctagcccagaacataggcctgaccggaatgaagctggaaaaccctgccgaccctcagctgatgatcaatccattccagctggatccagcgacagcagcggctttggcaccagggctcggagagctgtcaccttatatcagtgacccagcgctgaagctattccagtgtgctgtttgcaacaaattcacctctgacagcctggaggccctaagtgtgcatgtgagcagtgagcgctctctccctgaagaggaatggagggcagtaattggagatatctaccagtgcaagctctgcaactacaacactcagctcaaagccaacttccagctacactgcaagactgataaacatatgcagaaatatcaactggtggctcacattaaagaagggggcaaaagcaatgagtggaggttgaagtgtattgccattggcaaccctgttcacctaaaatgtaacgcctgtgactattacaccaacagtgtggataaattacgcttgcataccaccaatcacaggcacgaggcggccctgaagctctacaagcacttgcagaagcaagagggtgcagtgaatcccgaatcctgctattactactgtgccgtgtgtgattacaccaccaaggtcaagttgaatctggtacaacatgtccgttcggtgaagcatcagcagactgagggcctacggaagctccagctccaccagcaaggcctggcaccagaggaggacaacctcagtgagatcttttttgttaaagattgcccaccaaatgagcttgaaactgcctcattgggagccaggacttgtgatgatgatcttacagagcagcagttgagatcgacctcagaagaacaaagtgaggaggcagaaggagctattaagcctacagcagtggccgaggacgatgaaaaagacacaagtgagagagacaatagtgaaggcaaaaactctaataaagactctgggataatcacaccagagaaggaactaaaagttagtgtggcagggggtacccagccactcctgctggcaaaagaagaggatgttgcaacaaaaaggtcaaaacctacagaggacaataaattctgtcatgaacagttctatcaatgtccttattgtaactacaatagtagggaccaaagtcgtatccagatgcacgtcctatcacagcactcggtgcagccggtcatctgctgtcctctctgtcaggacgtcctcagcaacaaaatgcatctccaactgcatctgacgcatttgcacagtgtgtctccagactgtgtggagaagctgcttatgacagtgcctgtccctgatgtgatgatgccaaacagtatgctactgccagcagctgcctctgagaaatcagagcgggacacacctgcagccgtgacagctgaggggtctgggaaatattcaggtgaaagtccaatggatgacaaaagcatggcaggtctcgaggattcaaaggctaatgtggaagtaaagaatgaggagcagaaaccgactaaagaacccttggaagtctcagaatggaataaaaatagcagtaaggatgtgaaaatccccgacacactgcaagatcaattaaatgaacagcaaaaaaggcaaccgctctctgtttctgaccgtcatgtctacaagtatcgctgtaaccattgtagcttggctttcaaaactatgcagaagcttcagatacattcccagtatcatgcaattcgggctgcgacaatgtgtaacctctgccagcgcagtttccgtacattccaggctttaaaaaaacacttggaagcaggccaccctgaactgagtgaagctgaacttcaacagctatatgcctccttgcccgtgaatggagaactgtgggcagagagcgaaactatgtcccaggatgaccatggcctagagcaggaaatggagagagagtatgaggtggaccacgaagggaaagcaagtcctgtaggaagtgatagtagctctattccagatgacatgggctctgaaccaaagcggaccttaccttttagaaaagggcccaattttacgatggaaaaattccttgatccatctcgtccatataaatgtacagtgtgtaaagagtcattcacccaaaagaacattctcttggtccactataattcagtttctcacttgcataagctgaaaaaagttttgcaggaagcctccagtcctgtcccacaagaaaccaacagcaacacagataacaaaccctacaagtgcagcatctgcaatgttgcatacagccaaagctcaacattggaaatccacatgaggtctgtgctccaccagacaaaggctagggctgcaaagctggagcccagtggtcatgtggctggtgggcacagcattgcagcaaatgtcaacagccctggccaggggatgttagattccatgagtttagcagctgtaaacagcaaagatacccatttagatgccaaagaattaaataaaaagcaaactcctgatttaatctctgctcaacctgcacatcacccaccacagtcaccagcacaaattcagatgcaactacagcacgaattacaacagcaagccgcattctttcagcctcagtttctaaacccagcctttttgcctcattttcctatgaccccagaagcactgctgcagtttcagcagcctcagtttctctttccattttatatacctgggacggagttcagcttggggccagatttgggcttgccaggctctgccacatttgggatgcctggcatgacaggaatggctggctccttgcttgaagacctaaagcagcagattcaaacccaacatcacgttggtcaaactcaactccagatgcaagcaaattattgaaacaagagcaaagtaacatagtgagtgcagactgccaaatcatgaaggatgtgccatcttataaggaggcagaagatatttctgaaaagccagaaaaaccaaagcaggaatttataagtgaaggtgaaggactcaaagaaggcaaagacacaaagaagcaaaaatccttggaaccatccatcccaccaccccgaatagcttcaggggccagaggaaatgctgccaaagcgttattggaaaactttggttttgaactggtcattcagtataacgaaaacaggcagaaggtacagaagaagggcaaaagtggtgaaggcgaaaacactgacaaactagaatgtggaacatgtggtaaattgttttccaatgttcttattttaaagagtcaccaagaacatgtacatgggcaattttttccatatgcagcgctagaaaaatttgctcgtcaatacagggaggcctatgacaagctttatccaatttctccatcttctccagaaacgccgcccccgccacctcctcctcctcccttgcctccggctcctccacagccttcttctatgggtcctgtaaagatccccaacacggtttctactcctctgcaagctccaccacccaacaggtccaactgccggtttctctggacctgccgctctttccttccattatgatgcaacctgtgcaacaccctgcgcttcctccccagcttgccctgcagctgccacagatggacgcactctctgcagacctcacccaactttgccagcagcagctcggattagatcccaacttcttaagacattctcagttcaaacgcccacggacaagaattacagatgatcagctaaaaatcctgagggcttattttgacattaataattctccaagtgaagaacagatccaggaaatggcagagaaatctggcctctcccaaaaagttatcaaacactggtttagaaatacgctttttaaggaacgacagagaaataaagattcaccatacaacttcagtaaccctcctataacggttttagaagatatcagaattgatccacagcccacctctttagaacattacaaatctgatgcatcattcagtaaaaggtcttctagaacgagatttactgactaccagcttagggttctgcaagacttttttgacacaaacgcttacccaaaagatgatgaaatagaacaactctccactgttctcaatctgcctacccgggttattgttgtatggttccagaatgctcgtcagaaagcacgaaagagttatgagaatcaagcagaaacaaaagataatgaaaaaagagaactcactaatgaacggtacattcgaacaagcaacatgcagtaccagtgtaaaaagtgcaatgtggttttccccaggatctttgacttgattacgcatcagaaaaagcagtgttacaaggatgaagatgatgatgcccaagatgaaagccaaacagaagactccatggatgccactgatcaagtggtatacaagcattgcacagtgtctggccaaacggatgcagctaaaaacgctgctgcccctgcagcaagttctggctctgggaccagcacccccctgattccatcacccaaaccagaacctgagaagacttctccaaaacctgaatatcccgcagaaaagccaaagcagagtgacccctctcccccttctcaaggcaccaaaccagccctgccattagcatcgacttcctcggacccaccacaggcatccacagcccagccacagccacagccacagccaccaaaacaaccccaacttatcggaagacctccctcggcctctcaaacaccggtcccttccagtccactgcaaatttccatgacgtctctccagaacagtctacctccacagttactacaataccaatgtgatcagtgtacagttgccttcccaactctggaactctggcaggaacaccagcacatgcacttccttgctgctcaaaaccaattccttcactctccgttcttggaaaggcccatggacatgccctacatgatatttgaccccaacaatccgctgatgactggacaactgctgggcagttccctcactcaaatgccccctcaggccagttcctcccacaccacagcccccacaacggttgctgcttccctaaaaaggaaactagacgataaagaagataataattgcagtgaaaaagaaggagggaatagcggtgaagaccaacaccgagataaacgcttgagaaccacgatcaccccggaacagctggaaatactctatgaaaaatacttgctggattccaatcctaccagaaaaatgcttgatcatattgcccgcgaagtcgggctgaaaaaaagggtcgtgcaagtctggttccagaatacacgagcgcgggagaggaaaggccagttccgggcggtgggtccagcacagtctcataaacggtgtccgttttgccgagccctgtttaaagcaaagtcggccttagaaagccacattcgctctcggcactggaatgaaggaaagcaggcaggttacagcttgccaccaagccctttaatatccaccgaagatgggggagaaagcccacagaaatacatctattttgattacccatctttgccattaactaaaattgatctatcaagtgagaatgaattggcttctacagtgtcaacacctgttagtaaaacagcagagctgtcaccgaagaatcttttaagcccttcttcttttaaagcagagtgttctgaggatgtagagaatttaaatgcccctcctgctgaggctgggtatgatcaaaataaaaccgattttgatgagacttcatcgattaatacggcaatcagtgacgccaccaccggagacgagggaaacactgaaatggaaagcaccacaggaagttccggagatgtgaaaccggctttgtctcccaaagagccaaaaactctggatactctgccaaaacctgcaaccacacctaccacggaggtctgcgatgacaaatttctcttttctctcacaagcccatccatccatttcaatgacaaagatggcgaccacgaccaaagcttttacatcacagatgacccggatgacaacgccgaccgcagcgaaacgtccagcatagcggacccgagctccccaaatccattcggatccagcaatccctttaaatccaaaagtaatgatcggccgggtcacaagcgttttcgaacgcaaatgagcaatcttcaactcaaggttctcaaggcttgctttagtgactaccgaactccaaccatgcaagaatgtgaaatgttagggaatgagattggtctgcccaaacgcgtagtccaggtgtggttccaaaatgcaagggcaaaggaaaagaaatttaaaattaacatagggaagcctttcatgatcaatcaaggcggaacggaaggcaccaaaccagagtgtaccctctgcggggtgaagtactctgcccgcttgtccatcagagatcacattttctccaaacagcacatttcaaaagtgagggagaccgttggcagtcagctcgatcgggagaaagattacttggctccgaccacggttcggcagctgatggcacagcaagaacttgatcgtataaagaaagcttcagacgtgctgggcttgacggtacagcagccaggcatgatggacagcagttctctccacggcatcagcctgccaacagcctaccccggactccccggccttcctccagtccttctccccggaatgaacggtccatcctccttgccgggatttccacaaaattcaaacactttaacacctcccggtgcaggcatgcttgggtttcctacttcagctacttcgtctcctgccctgtctctcagcagtgcccccaccaaacctttgctgcagactccaccacctccaccacctcctcctcctcctcctccttcatcctctctgtcaggacagcagaccgagcaacagaacaaagaatctgagaaaaagcaaactaagccaaacaaggtgaaaaaaatcaaagaggaggaattagaggccaccaaacccgaaaaacaccccaaaaaagaggaaaaaatctcatctgctctttcagtgttgggcaaagttgtaggtgaaacacatgtcgatcctattcagttgcaggcattacagaatgcaattgctggtgacccagcttcctttataggcggacagttcttgccatactttatccctgggtttgcttcttattttacacctcagctccctggaacagtgcaggggggatacttcccacctgtctgtggcatggagagcctctttccttatggccctacaatgccccagacactggcaggtctgtccccaggtgcactgttaaaccagttcaggcaaagacatccaaagtagaaagtgaccagccgcaaaactccaacgatgcttcagaaacaaaggaagacaaaagtactgctacagaaagcacaaaagaagaaccccagttagaatccaaaagtgcagacttttcagacacttacgttgttccattcgtcaagtatgagtttatatgcagaaagtgccagatgatgtttactgatgaagacgccgcagtaaatcatcaaaagtccttctgttatttcggtcagcctttgattgacccacaagagacagtgcttcgtgtcccagtcagcaaatatcagtgtcttgcctgtgatgtggctatcagtgggaatgaagcacttagccaacacctccagtcaagcttgcacaaagagaaaacaatcaaacaagcaatgagaaatgccaaagagcatgttagattattacctcactcagtctgctcccctaatcctaacaccacatctacctcgcagtctgcagcttcttctaataacacctatcctcatctttcttgcttctccatgaagtcctggcctaatatccttttccaagcgtctgccaggagagctgcttctcccccttcttctcctccttccctttccttgccttcaacggttacctcaagtttgtgcagcacctcaggggttcaaacctcactacccacagaaagttgttcagatgagtctgacagtgagctgagccagaagctagaagacttagataattctttggaagtgaaggctaagcctgcttctggcctagatggtaatttcaatagcatccgaatggatatgttcagtgtgtaggagtgaagacaggatcccgtgcttaaaaaaataaaaaataaaaaaataaaaaaaaaataagactttaactgcagttccaaagcttctctaacccaaaaattacagtaccaaatgattgactcaggattgtttttcccatattgatatgctggcaatataggatggtatgtaatggacagaactgatgcagatggttgaatgcgcttgtactatatgctaaaatatggaaaaggaaaaaaaaatctcacaagttcttttggaacttgtttcaagccaaaaactctcaagaaagcaaattgcacctcagctggattgatttccaaatgctagcatgtactgtatgggaggatgatccagatgtttcaaagagaatttctcttagtttagttaggtgtaattcagtagctttaaattctcaggtcagaacataacatttctcatttgttaaaagcagcaagaagcctggtaaaactgtgacttttccccaaacgtcaatctttattagaaagcattttctaggtgtgtttagtgtacaaagagactttataacccttactggacaacacacagatccttgagctcacgctgcaggatagtacagttttaccgcagagggaatctggaacagtggaatcatgtgtctgccctgtgtattgcagtttgtattgccacaagctatatttataccagtgtcacccttttcttgtagaatatactaataatctgtgccaactctaccttctcacttttacctctgacgtcattctttttttctgaaagaggtaataattctagttttgatagactctgaggattatgtgaacaggacatttttcatttgtgaatttaatgctatactgtcaaggtacttgcttgtgtctgaactctagtgcacttatgattttgtagaccatgtgaaatttaataagataccttttttttcctttctttgtgtgtagtgcagcaacagtttggtctgcatttgttagaagtttaactcctaacaacccaaagacctatttaacaattggtgcataaatgaaagtagtactgtatacttgaaactgtttaagtacaagttgaacaaaaattatgaaaaggtatatttgcttctcgggaaagcaaagaagctgctttaaaaaataaaaaggggactaaaaatttgttttgtataaagaggttagccctgcgcacgtaggactgaattcagtgatatccctatacactgccatttagtggataggttattgtacttccattcatactctgggcacttgtgttgtattgttctgttacatactttttttaacctgttttgttttatcatatatgcattaaaagtattatctttatcaacatttgctgctactgtgttaacatttttgttttgcttgccatgaatttcaacttccaccacccagtgaattgatttataaattgctatgctttgctgtttttctgttgctgtggaacttaaagaatgtgaaagctgtcaaagggtattttacgaatcacttttgtgtttgatatagtaaaacaatgtgattcattccaaagtaacagaaggttatttgtaagaaagttaaaggcttgtgaacaaagaaagctaagctgttgtacatatttgtagttggctgtgcatggtacaaatttattaatatgaagaaatgcaaaatgtattgcttttgatatttctcttccgagatgaacaagtagcatgtaatgcaactgtttgacagtttaactcaagtcatgcttcaaactgttttaatgatcaaatcaagacacatttcattttacattttattattgtacagtttttgtttcggatgatgatcacagcaatctttattctatacattttatgtgaacttttttaatgtctttaatttggattttttttttttttagtattttaacatttattttaatcctgaagacacttttttgattgtgtttcgtaagagacaacatggcctcctaaggtgcaatcctgccgctatagtgagctaatgtcctgaatccaaaggcttcagaaaattgcttttgcctttttcatgaatgttaagcagcagcattgtgagatcgatctgtcctggcagttaacacgatgtgcaacagtgtgttagcatggaacagaacgcttttcacaaaacaaaggactgttttacaaatgattattccgacagtgtgtcgacataaacttttacaactgcacagcagccaaaaaaagaaaaaaaaaagaaaaaaaactttaactggatggacgttgttagggtgagaaataaaaggacagcctccaaaggttgagaatgagaattgttttttcctggatatcaaagggattatcacagcgcaatcattgtctacacaacatgtactctcaacgcctgggttacataggaaatgcaccctgaggttttaataaaagcccctatggctataactttaaataaactaaaccaaaaatgttattgatgttttatatatagagagtagtctcattagtttttgttactgtaatgtttgaagtctcaaatgcaccgtattacggtaaataacatggttttgaaaacttttttttattttgtcacagacctgttgtcatagttgaaatgatgtttattgtagatggtatttgaacttattcttctggaaatagttcatcaagtatgtttgttgctcattgtgatacattaaaaactgtatctacatattta

SEQ ID NO: 6932 - protein, 1773 aa, Homo sapiens; identical to SEQ ID NO: 6930

SEQ ID NO: 6933 - DNA, 13390 bp, Homo sapiens
atcgcccggcctctgggccagggacccgcgaggcggcggctgcttgctccgaacggaacgccgccgggtgtgcgttagaccagcggatagacgcccgcggcttggggtccctgacaggctggatgaaatgagatccccatgtagcaattgccatggaaacctgtgactcccctcctatctcaaggcaggaaaatgggcagagcacatcaaagctatgtggaacgacacaacttgataatgaggtgccagagaaagttgcagggatggagcctgacagggaaaacagctccacagatgacaacctgaaaacggatgagcgcaaaagtgaagccttgctgggtttcagcgttgagaatgcagctgccactcaggttacctcagcaaaggagataccctgcaacgaatgtgccacttcttttcccagtttacagaaatacatggaacaccactgccctaatgcccgccttcctgtcctgaaggatgacaacgagagcgagatcagcgagttagaggacagtgacgtggaaaatctaacaggggagatcgtttaccagcctgatgggtcagcatatataattgaggactccaaagaaagtgggcagaatgcacagactggggcaaatagcaaactcttttctacagcgatgttcctggactccctggcatctgctggagagaagagtgatcagtctgcttctgcacctatgtcgttctacccacagatcatcaacacttttcatatcgcttcatccctcgggaaaccatttacagccgatcaggctttcccaaatacctcagcattagcaggagttggtcctgtgttgcacagtttccgtgtctatgatctccgacacaagagagagaaagactatctaaccagtgatggctcagccaaaaactcctgtgtgtccaaagatgtccctaacaatgtggacttgtccaaattcgatggttgtgttagcgatgggaaaaggaaacctgttttaatgtgtttcttgtgcaagttgtcttttggttatatcaggtcatttgtaacccatgctgtgcatgatcatcggatgaccctcaatgacgaggagcagaagctcctcagtaataaatgcgtctccgccataatacaggggattggcaaagacaaagaacctcttataagctttctggaaccaaaaaaatccacttctgtttatccccatttttctactacaaacctcataggacccgatccaaccttccgcggtttatggagcgcttttcatgttgaaaatggtgactctttgccggctggctttgccttcttaaaaggaagcgcgagcacctcgagctcagcagagcagccgctggggattacccaaatgccaaaggctgaagtgaatctgggggggctgtctagtttagtagtgaacaccccaattacctctgtctccctcagccactcatcgtctgagtctagcaagatgtcagagagcaaagaccaagagaacaactgtgaaaggccaaaagaaagcaacgttttacacccaaacggggagtgccctgtcaaaagtgaacccactgaaccgggagatgaggatgaagaagatgcgtactccaatgaacttgatgacgaggaagtattaggtgaactcaccgatagtattggtaacaaagatttccctctcttaaaccaaagcatttctcctttatcatccagtgtgctaaaatttattgaaaagggtacctcgtcctcctcggcgactgtttctgatgacacagaaaagaaaaaacagactgctgctgttagggccagtggcagtgttgctagtaactatggcatcagtggcaaggactttgcagacgcaagtgccagtaaagacagtgccacagctgctcatccaagtgaaatagcccggggagacgaagacagttcagccactcctcaccagcatggctttaccccgagtactcctggcacaccagggcctggaggagacggctcaccgggcagtggcatcgagtgtccaaagtgcgacactgtgttggggtcttcgaggtctcttggtggtcatatgactatgatgcactcgaggaactcatgcaaaaccctcaaatgtcctaaatgtaactggcactacaaatatcagcagaccctggaggcccatatgaaggagaaacaccctgagccgggtggctcttgtgtttattgtaagactggacagcctcaccccaggcttgcccggggtgagagttacacgtgtggctataaacccttccgttgtgaggtttgtaactactctaccactaccaaaggcaacctcagtattcatatgcagtcggacaagcacctgaacaatgttcagaatctccaaaatggcaatggtgagcaggtgtttggccactctgccccagcccccaacaccagcctcagtggctgcggaacaccctctccgtccaaacccaaacagaaacccacctggcggtgtgaagtttgtgattatgaaaccaatgtcgccaggaacctccgaattcatatgaccagcgaaaagcacatgcataatatgatgcttttgcagcagaacatgaagcagatccagcataatctgcacttgggcctcgccccggcggaagcagagctttatcagtactacctagcccagaacataggcctgaccggaatgaagctggaaaaccctgccgaccctcagctgatgatcaatccattccagctggatccagcgacagcagcggctttggcaccagggctcggagagctgtcaccttatatcagtgacccagcgctgaagctattccagtgtgctgtttgcaacaaattcacctctgacagcctggaggccctaagtgtgcatgtgagcagtgagcgctctctccctgaagaggaatggagggcagtaattggagatatctaccagtgcaagctctgcaactacaacactcagctcaaagccaacttccagctacactgcaagactgataaacatatgcagaaatatcaactggtggctcacattaaagaagggggcaaaagcaatgagtggaggttgaagtgtattgccattggcaaccctgttcacctaaaatgtaacgcctgtgactattacaccaacagtgtggataaattacgcttgcataccaccaatcacaggcacgaggcggccctgaagctctacaagcacttgcagaagcaagagggtgcagtgaatcccgaatcctgctattactactgtgccgtgtgtgattacaccaccaaggtcaagttgaatctggtacaacatgtccgttcggtgaagcatcagcagactgagggcctacggaagctccagctccaccagcaaggcctggcaccagaggaggacaacctcagtgagatcttttttgttaaagattgcccaccaaatgagcttgaaactgcctcattgggagccaggacttgtgatgatgatcttacagagcagcagttgagatcgacctcagaagaacaaagtgaggaggcagaaggagctattaagcctacagcagtggccgaggacgatgaaaaagacacaagtgagagagacaatagtgaaggcaaaaactctaataaagactctgggataatcacaccagagaaggaactaaaagttagtgtggcagggggtacccagccactcctgctggcaaaagaagaggatgttgcaacaaaaaggtcaaaacctacagaggacaataaattctgtcatgaacagttctatcaatgtccttattgtaactacaatagtagggaccaaagtcgtatccagatgcacgtcctatcacagcactcggtgcagccggtcatctgctgtcctctctgtcaggacgtcctcagcaacaaaatgcatctccaactgcatctgacgcatttgcacagtgtgtctccagactgtgtggagaagctgcttatgacagtgcctgtccctgatgtgatgatgccaaacagtatgctactgccagcagctgcctctgagaaatcagagcgggacacacctgcagccgtgacagctgaggggtctgggaaatattcaggtgaaagtccaatggatgacaaaagcatggcaggtctcgaggattcaaaggctaatgtggaagtaaagaatgaggagcagaaaccgactaaagaacccttggaagtctcagaatggaataaaaatagcagtaaggatgtgaaaatccccgacacactgcaagatcaattaaatgaacagcaaaaaaggcaaccgctctctgtttctgaccgtcatgtctacaagtatcgctgtaaccattgtagcttggctttcaaaactatgcagaagcttcagatacattcccagtatcatgcaattcgggctgcgacaatgtgtaacctctgccagcgcagtttccgtacattccaggctttaaaaaaacacttggaagcaggccaccctgaactgagtgaagctgaacttcaacagctatatgcctccttgcccgtgaatggagaactgtgggcagagagcgaaactatgtcccaggatgaccatggcctagagcaggaaatggagagagagtatgaggtggaccacgaagggaaagcaagtcctgtaggaagtgatagtagctctattccagatgacatgggctctgaaccaaagcggaccttaccttttagaaaagggcccaattttacgatggaaaaattccttgatccatctcgtccatataaatgtacagtgtgtaaagagtcattcacccaaaagaacattctcttggtccactataattcagtttctcacttgcataagctgaaaaaagttttgcaggaagcctccagtcctgtcccacaagaaaccaacagcaacacagataacaaaccctacaagtgcagcatctgcaatgttgcatacagccaaagctcaacattggaaatccacatgaggtctgtgctccaccagacaaaggctagggctgcaaagctggagcccagtggtcatgtggctggtgggcacagcattgcagcaaatgtcaacagccctggccaggggatgttagattccatgagtttagcagctgtaaacagcaaagatacccatttagatgccaaagaattaaataaaaagcaaactcctgatttaatctctgctcaacctgcacatcacccaccacagtcaccagcacaaattcagatgcaactacagcacgaattacaacagcaagccgcattctttcagcctcagtttctaaacccagcctttttgcctcattttcctatgaccccagaagcactgctgcagtttcagcagcctcagtttctctttccattttatatacctgggacggagttcagcttggggccagatttgggcttgccaggctctgccacatttgggatgcctggcatgacaggaatggctggctccttgcttgaagacctaaagcagcagattcaaacccaacatcacgttggtcaaactcaactccagatgcaagcaaattattgaaacaagagcaaagtaacatagtgagtgcagactgccaaatcatgaaggatgtgccatcttataaggaggcagaagatatttctgaaaagccagaaaaaccaaagcaggaatttataagtgaaggtgaaggactcaaagaaggcaaagacacaaagaagcaaaaatccttggaaccatccatcccaccaccccgaatagcttcaggggccagaggaaatgctgccaaagcgttattggaaaactttggttttgaactggtcattcagtataacgaaaacaggcagaaggtacagaagaagggcaaaagtggtgaaggcgaaaacactgacaaactagaatgtggaacatgtggtaaattgttttccaatgttcttattttaaagagtcaccaagaacatgtacatgggcaattttttccatatgcagcgctagaaaaatttgctcgtcaatacagggaggcctatgacaagctttatccaatttctccatcttctccagaaacgccgcccccgccacctcctcctcctcccttgcctccggctcctccacagccttcttctatgggtcctgtaaagatccccaacacggtttctactcctctgcaagctccaccacccaacaggtccaactgccggtttctctggacctgccgctctttccttccattatgatgcaacctgtgcaacaccctgcgcttcctccccagcttgccctgcagctgccacagatggacgcactctctgcagacctcacccaactttgccagcagcagctcggattagatcccaacttcttaagacattctcagttcaaacgcccacggacaagaattacagatgatcagctaaaaatcctgagggcttattttgacattaataattctccaagtgaagaacagatccaggaaatggcagagaaatctggcctctcccaaaaagttatcaaacactggtttagaaatacgctttttaaggaacgacagagaaataaagattcaccatacaacttcagtaaccctcctataacggttttagaagatatcagaattgatccacagcccacctctttagaacattacaaatctgatgcatcattcagtaaaaggtcttctagaacgagatttactgactaccagcttagggttctgcaagacttttttgacacaaacgcttacccaaaagatgatgaaatagaacaactctccactgttctcaatctgcctacccgggttattgttgtatggttccagaatgctcgtcagaaagcacgaaagagttatgagaatcaagcagaaacaaaagataatgaaaaaagagaactcactaatgaacggtacattcgaacaagcaacatgcagtaccagtgtaaaaagtgcaatgtggttttccccaggatctttgacttgattacgcatcagaaaaagcagtgttacaaggatgaagatgatgatgcccaagatgaaagccaaacagaagactccatggatgccactgatcaagtggtatacaagcattgcacagtgtctggccaaacggatgcagctaaaaacgctgctgcccctgcagcaagttctggctctgggaccagcacccccctgattccatcacccaaaccagaacctgagaagacttctccaaaacctgaatatcccgcagaaaagccaaagcagagtgacccctctcccccttctcaaggcaccaaaccagccctgccattagcatcgacttcctcggacccaccacaggcatccacagcccagccacagccacagccacagccaccaaaacaaccccaacttatcggaagacctccctcggcctctcaaacaccggtcccttccagtccactgcaaatttccatgacgtctctccagaacagtctacctccacagttactacaataccaatgtgatcagtgtacagttgccttcccaactctggaactctggcaggaacaccagcacatgcacttccttgctgctcaaaaccaattccttcactctccgttcttggaaaggcccatggacatgccctacatgatatttgaccccaacaatccgctgatgactggacaactgctgggcagttccctcactcaaatgccccctcaggccagttcctcccacaccacagcccccacaacggttgctgcttccctaaaaaggaaactagacgataaagaagataataattgcagtgaaaaagaaggagggaatagcggtgaagaccaacaccgagataaacgcttgagaaccacgatcaccccggaacagctggaaatactctatgaaaaatacttgctggattccaatcctaccagaaaaatgcttgatcatattgcccgcgaagtcgggctgaaaaaaagggtcgtgcaagtctggttccagaatacacgagcgcgggagaggaaaggccagttccgggcggtgggtccagcacagtctcataaacggtgtccgttttgccgagccctgtttaaagcaaagtcggccttagaaagccacattcgctctcggcactggaatgaaggaaagcaggcaggttacagcttgccaccaagccctttaatatccaccgaagatgggggagaaagcccacagaaatacatctattttgattacccatctttgccattaactaaaattgatctatcaagtgagaatgaattggcttctacagtgtcaacacctgttagtaaaacagcagagctgtcaccgaagaatcttttaagcccttcttcttttaaagcagagtgttctgaggatgtagagaatttaaatgcccctcctgctgaggctgggtatgatcaaaataaaaccgattttgatgagacttcatcgattaatacggcaatcagtgacgccaccaccggagacgagggaaacactgaaatggaaagcaccacaggaagttccggagatgtgaaaccggctttgtctcccaaagagccaaaaactctggatactctgccaaaacctgcaaccacacctaccacggaggtctgcgatgacaaatttctcttttctctcacaagcccatccatccatttcaatgacaaagatggcgaccacgaccaaagcttttacatcacagatgacccggatgacaacgccgaccgcagcgaaacgtccagcatagcggacccgagctccccaaatccattcggatccagcaatccctttaaatccaaaagtaatgatcggccgggtcacaagcgttttcgaacgcaaatgagcaatcttcaactcaaggttctcaaggcttgctttagtgactaccgaactccaaccatgcaagaatgtgaaatgttagggaatgagattggtctgcccaaacgcgtagtccaggtgtggttccaaaatgcaagggcaaaggaaaagaaatttaaaattaacatagggaagcctttcatgatcaatcaaggcggaacggaaggcaccaaaccagagtgtaccctctgcggggtgaagtactctgcccgcttgtccatcagagatcacattttctccaaacagcacatttcaaaagtgagggagaccgttggcagtcagctcgatcgggagaaagattacttggctccgaccacggttcggcagctgatggcacagcaagaacttgatcgtataaagaaagcttcagacgtgctgggcttgacggtacagcagccaggcatgatggacagcagttctctccacggcatcagcctgccaacagcctaccccggactccccggccttcctccagtccttctccccggaatgaacggtccatcctccttgccgggatttccacaaaattcaaacactttaacacctcccggtgcaggcatgcttgggtttcctacttcagctacttcgtctcctgccctgtctctcagcagtgcccccaccaaacctttgctgcagactccaccacctccaccacctcctcctcctcctcctccttcatcctctctgtcaggacagcagaccgagcaacagaacaaagaatctgagaaaaagcaaactaagccaaacaaggtgaaaaaaatcaaagaggaggaattagaggccaccaaacccgaaaaacaccccaaaaaagaggaaaaaatctcatctgctctttcagtgttgggcaaagttgtaggtgaaacacatgtcgatcctattcagttgcaggcattacagaatgcaattgctggtgacccagcttcctttataggcggacagttcttgccatactttatccctgggtttgcttcttattttacacctcagctccctggaacagtgcaggggggatacttcccacctgtctgtggcatggagagcctctttccttatggccctacaatgccccagacactggcaggtctgtccccaggtgcactgttaaaccagttcaggcaaagacatccaaagtagaaagtgaccagccgcaaaactccaacgatgcttcagaaacaaaggaagacaaaagtactgctacagaaagcacaaaagaagaaccccagttagaatccaaaagtgcagacttttcagacacttacgttgttccattcgtcaagtatgagtttatatgcagaaagtgccagatgatgtttactgatgaagacgccgcagtaaatcatcaaaagtccttctgttatttcggtcagcctttgattgacccacaagagacagtgcttcgtgtcccagtcagcaaatatcagtgtcttgcctgtgatgtggctatcagtgggaatgaagcacttagccaacacctccagtcaagcttgcacaaagagaaaacaatcaaacaagcaatgagaaatgccaaagagcatgttagattattacctcactcagtctgctcccctaatcctaacaccacatctacctcgcagtctgcagcttcttctaataacacctatcctcatctttcttgcttctccatgaagtcctggcctaatatccttttccaagcgtctgccaggagagctgcttctcccccttcttctcctccttccctttccttgccttcaacggttacctcaagtttgtgcagcacctcaggggttcaaacctcactacccacagaaagttgttcagatgagtctgacagtgagctgagccagaagctagaagacttagataattctttggaagtgaaggctaagcctgcttctggcctagatggtaatttcaatagcatccgaatggatatgttcagtgtgtaggagtgaagacaggatcccgtgcttaaaaaaataaaaaataaaaaaataaaaaaaaaataagactttaactgcagttccaaagcttctctaacccaaaaattacagtaccaaatgattgactcaggattgtttttcccatattgatatgctggcaatataggatggtatgtaatggacagaactgatgcagatggttgaatgcgcttgtactatatgctaaaatatggaaaaggaaaaaaaaatctcacaagttcttttggaacttgtttcaagccaaaaactctcaagaaagcaaattgcacctcagctggattgatttccaaatgctagcatgtactgtatgggaggatgatccagatgtttcaaagagaatttctcttagtttagttaggtgtaattcagtagctttaaattctcaggtcagaacataacatttctcatttgttaaaagcagcaagaagcctggtaaaactgtgacttttccccaaacgtcaatctttattagaaagcattttctaggtgtgtttagtgtacaaagagactttataacccttactggacaacacacagatccttgagctcacgctgcaggatagtacagttttaccgcagagggaatctggaacagtggaatcatgtgtctgccctgtgtattgcagtttgtattgccacaagctatatttataccagtgtcacccttttcttgtagaatatactaataatctgtgccaactctaccttctcacttttacctctgacgtcattctttttttctgaaagaggtaataattctagttttgatagactctgaggattatgtgaacaggacatttttcatttgtgaatttaatgctatactgtcaaggtacttgcttgtgtctgaactctagtgcacttatgattttgtagaccatgtgaaatttaataagataccttttttttcctttctttgtgtgtagtgcagcaacagtttggtctgcatttgttagaagtttaactcctaacaacccaaagacctatttaacaattggtgcataaatgaaagtagtactgtatacttgaaactgtttaagtacaagttgaacaaaaattatgaaaaggtatatttgcttctcgggaaagcaaagaagctgctttaaaaaataaaaaggggactaaaaatttgttttgtataaagaggttagccctgcgcacgtaggactgaattcagtgatatccctatacactgccatttagtggataggttattgtacttccattcatactctgggcacttgtgttgtattgttctgttacatactttttttaacctgttttgttttatcatatatgcattaaaagtattatctttatcaacatttgctgctactgtgttaacatttttgttttgcttgccatgaatttcaacttccaccacccagtgaattgatttataaattgctatgctttgctgtttttctgttgctgtggaacttaaagaatgtgaaagctgtcaaagggtattttacgaatcacttttgtgtttgatatagtaaaacaatgtgattcattccaaagtaacagaaggttatttgtaagaaagttaaaggcttgtgaacaaagaaagctaagctgttgtacatatttgtagttggctgtgcatggtacaaatttattaatatgaagaaatgcaaaatgtattgcttttgatatttctcttccgagatgaacaagtagcatgtaatgcaactgtttgacagtttaactcaagtcatgcttcaaactgttttaatgatcaaatcaagacacatttcattttacattttattattgtacagtttttgtttcggatgatgatcacagcaatctttattctatacattttatgtgaacttttttaatgtctttaatttggattttttttttttttagtattttaacatttattttaatcctgaagacacttttttgattgtgtttcgtaagagacaacatggcctcctaaggtgcaatcctgccgctatagtgagctaatgtcctgaatccaaaggcttcagaaaattgcttttgcctttttcatgaatgttaagcagcagcattgtgagatcgatctgtcctggcagttaacacgatgtgcaacagtgtgttagcatggaacagaacgcttttcacaaaacaaaggactgttttacaaatgattattccgacagtgtgtcgacataaacttttacaactgcacagcagccaaaaaaagaaaaaaaaaagaaaaaaaactttaactggatggacgttgttagggtgagaaataaaaggacagcctccaaaggttgagaatgagaattgttttttcctggatatcaaagggattatcacagcgcaatcattgtctacacaacatgtactctcaacgcctgggttacataggaaatgcaccctgaggttttaataaaagcccctatggctataactttaaataaactaaaccaaaaatgttattgatgttttatatatagagagtagtctcattagtttttgttactgtaatgtttgaagtctcaaatgcaccgtattacggtaaataacatggttttgaaaacttttttttattttgtcacagacctgttgtcatagttgaaatgatgtttattgtagatggtatttgaacttattcttctggaaatagttcatcaagtatgtttgttgctcattgtgatacattaaaaactgtatctacatattta

SEQ ID NO: 6934 - protein, 1773 aa, Homo sapiens; identical to SEQ ID NO: 6930

SEQ ID NO: 6935 - DNA, 13459 bp, Homo sapiens
gtagtattatatttttagttgggtggatggatggaagagtgagagagaggctgcggctgccgctgccttttcgggtgttgcttagattaaggctgagacttggctgcgattgggacgcgacagtgacacgggcatcgatcgcttccattgagagcaatgcaaaaacacagcccgggtccctgacaggctggatgaaatgagatccccatgtagcaattgccatggaaacctgtgactcccctcctatctcaaggcaggaaaatgggcagagcacatcaaagctatgtggaacgacacaacttgataatgaggtgccagagaaagttgcagggatggagcctgacagggaaaacagctccacagatgacaacctgaaaacggatgagcgcaaaagtgaagccttgctgggtttcagcgttgagaatgcagctgccactcaggttacctcagcaaaggagataccctgcaacgaatgtgccacttcttttcccagtttacagaaatacatggaacaccactgccctaatgcccgccttcctgtcctgaaggatgacaacgagagcgagatcagcgagttagaggacagtgacgtggaaaatctaacaggggagatcgtttaccagcctgatgggtcagcatatataattgaggactccaaagaaagtgggcagaatgcacagactggggcaaatagcaaactcttttctacagcgatgttcctggactccctggcatctgctggagagaagagtgatcagtctgcttctgcacctatgtcgttctacccacagatcatcaacacttttcatatcgcttcatccctcgggaaaccatttacagccgatcaggctttcccaaatacctcagcattagcaggagttggtcctgtgttgcacagtttccgtgtctatgatctccgacacaagagagagaaagactatctaaccagtgatggctcagccaaaaactcctgtgtgtccaaagatgtccctaacaatgtggacttgtccaaattcgatggttgtgttagcgatgggaaaaggaaacctgttttaatgtgtttcttgtgcaagttgtcttttggttatatcaggtcatttgtaacccatgctgtgcatgatcatcggatgaccctcaatgacgaggagcagaagctcctcagtaataaatgcgtctccgccataatacaggggattggcaaagacaaagaacctcttataagctttctggaaccaaaaaaatccacttctgtttatccccatttttctactacaaacctcataggacccgatccaaccttccgcggtttatggagcgcttttcatgttgaaaatggtgactctttgccggctggctttgccttcttaaaaggaagcgcgagcacctcgagctcagcagagcagccgctggggattacccaaatgccaaaggctgaagtgaatctgggggggctgtctagtttagtagtgaacaccccaattacctctgtctccctcagccactcatcgtctgagtctagcaagatgtcagagagcaaagaccaagagaacaactgtgaaaggccaaaagaaagcaacgttttacacccaaacggggagtgccctgtcaaaagtgaacccactgaaccgggagatgaggatgaagaagatgcgtactccaatgaacttgatgacgaggaagtattaggtgaactcaccgatagtattggtaacaaagatttccctctcttaaaccaaagcatttctcctttatcatccagtgtgctaaaatttattgaaaagggtacctcgtcctcctcggcgactgtttctgatgacacagaaaagaaaaaacagactgctgctgttagggccagtggcagtgttgctagtaactatggcatcagtggcaaggactttgcagacgcaagtgccagtaaagacagtgccacagctgctcatccaagtgaaatagcccggggagacgaagacagttcagccactcctcaccagcatggctttaccccgagtactcctggcacaccagggcctggaggagacggctcaccgggcagtggcatcgagtgtccaaagtgcgacactgtgttggggtcttcgaggtctcttggtggtcatatgactatgatgcactcgaggaactcatgcaaaaccctcaaatgtcctaaatgtaactggcactacaaatatcagcagaccctggaggcccatatgaaggagaaacaccctgagccgggtggctcttgtgtttattgtaagactggacagcctcaccccaggcttgcccggggtgagagttacacgtgtggctataaacccttccgttgtgaggtttgtaactactctaccactaccaaaggcaacctcagtattcatatgcagtcggacaagcacctgaacaatgttcagaatctccaaaatggcaatggtgagcaggtgtttggccactctgccccagcccccaacaccagcctcagtggctgcggaacaccctctccgtccaaacccaaacagaaacccacctggcggtgtgaagtttgtgattatgaaaccaatgtcgccaggaacctccgaattcatatgaccagcgaaaagcacatgcataatatgatgcttttgcagcagaacatgaagcagatccagcataatctgcacttgggcctcgccccggcggaagcagagctttatcagtactacctagcccagaacataggcctgaccggaatgaagctggaaaaccctgccgaccctcagctgatgatcaatccattccagctggatccagcgacagcagcggctttggcaccagggctcggagagctgtcaccttatatcagtgacccagcgctgaagctattccagtgtgctgtttgcaacaaattcacctctgacagcctggaggccctaagtgtgcatgtgagcagtgagcgctctctccctgaagaggaatggagggcagtaattggagatatctaccagtgcaagctctgcaactacaacactcagctcaaagccaacttccagctacactgcaagactgataaacatatgcagaaatatcaactggtggctcacattaaagaagggggcaaaagcaatgagtggaggttgaagtgtattgccattggcaaccctgttcacctaaaatgtaacgcctgtgactattacaccaacagtgtggataaattacgcttgcataccaccaatcacaggcacgaggcggccctgaagctctacaagcacttgcagaagcaagagggtgcagtgaatcccgaatcctgctattactactgtgccgtgtgtgattacaccaccaaggtcaagttgaatctggtacaacatgtccgttcggtgaagcatcagcagactgagggcctacggaagctccagctccaccagcaaggcctggcaccagaggaggacaacctcagtgagatcttttttgttaaagattgcccaccaaatgagcttgaaactgcctcattgggagccaggacttgtgatgatgatcttacagagcagcagttgagatcgacctcagaagaacaaagtgaggaggcagaaggagctattaagcctacagcagtggccgaggacgatgaaaaagacacaagtgagagagacaatagtgaaggcaaaaactctaataaagactctgggataatcacaccagagaaggaactaaaagttagtgtggcagggggtacccagccactcctgctggcaaaagaagaggatgttgcaacaaaaaggtcaaaacctacagaggacaataaattctgtcatgaacagttctatcaatgtccttattgtaactacaatagtagggaccaaagtcgtatccagatgcacgtcctatcacagcactcggtgcagccggtcatctgctgtcctctctgtcaggacgtcctcagcaacaaaatgcatctccaactgcatctgacgcatttgcacagtgtgtctccagactgtgtggagaagctgcttatgacagtgcctgtccctgatgtgatgatgccaaacagtatgctactgccagcagctgcctctgagaaatcagagcgggacacacctgcagccgtgacagctgaggggtctgggaaatattcaggtgaaagtccaatggatgacaaaagcatggcaggtctcgaggattcaaaggctaatgtggaagtaaagaatgaggagcagaaaccgactaaagaacccttggaagtctcagaatggaataaaaatagcagtaaggatgtgaaaatccccgacacactgcaagatcaattaaatgaacagcaaaaaaggcaaccgctctctgtttctgaccgtcatgtctacaagtatcgctgtaaccattgtagcttggctttcaaaactatgcagaagcttcagatacattcccagtatcatgcaattcgggctgcgacaatgtgtaacctctgccagcgcagtttccgtacattccaggctttaaaaaaacacttggaagcaggccaccctgaactgagtgaagctgaacttcaacagctatatgcctccttgcccgtgaatggagaactgtgggcagagagcgaaactatgtcccaggatgaccatggcctagagcaggaaatggagagagagtatgaggtggaccacgaagggaaagcaagtcctgtaggaagtgatagtagctctattccagatgacatgggctctgaaccaaagcggaccttaccttttagaaaagggcccaattttacgatggaaaaattccttgatccatctcgtccatataaatgtacagtgtgtaaagagtcattcacccaaaagaacattctcttggtccactataattcagtttctcacttgcataagctgaaaaaagttttgcaggaagcctccagtcctgtcccacaagaaaccaacagcaacacagataacaaaccctacaagtgcagcatctgcaatgttgcatacagccaaagctcaacattggaaatccacatgaggtctgtgctccaccagacaaaggctagggctgcaaagctggagcccagtggtcatgtggctggtgggcacagcattgcagcaaatgtcaacagccctggccaggggatgttagattccatgagtttagcagctgtaaacagcaaagatacccatttagatgccaaagaattaaataaaaagcaaactcctgatttaatctctgctcaacctgcacatcacccaccacagtcaccagcacaaattcagatgcaactacagcacgaattacaacagcaagccgcattctttcagcctcagtttctaaacccagcctttttgcctcattttcctatgaccccagaagcactgctgcagtttcagcagcctcagtttctctttccattttatatacctgggacggagttcagcttggggccagatttgggcttgccaggctctgccacatttgggatgcctggcatgacaggaatggctggctccttgcttgaagacctaaagcagcagattcaaacccaacatcacgttggtcaaactcaactccagatgcaagcaaattattgaaacaagagcaaagtaacatagtgagtgcagactgccaaatcatgaaggatgtgccatcttataaggaggcagaagatatttctgaaaagccagaaaaaccaaagcaggaatttataagtgaaggtgaaggactcaaagaaggcaaagacacaaagaagcaaaaatccttggaaccatccatcccaccaccccgaatagcttcaggggccagaggaaatgctgccaaagcgttattggaaaactttggttttgaactggtcattcagtataacgaaaacaggcagaaggtacagaagaagggcaaaagtggtgaaggcgaaaacactgacaaactagaatgtggaacatgtggtaaattgttttccaatgttcttattttaaagagtcaccaagaacatgtacatgggcaattttttccatatgcagcgctagaaaaatttgctcgtcaatacagggaggcctatgacaagctttatccaatttctccatcttctccagaaacgccgcccccgccacctcctcctcctcccttgcctccggctcctccacagccttcttctatgggtcctgtaaagatccccaacacggtttctactcctctgcaagctccaccacccaacaggtccaactgccggtttctctggacctgccgctctttccttccattatgatgcaacctgtgcaacaccctgcgcttcctccccagcttgccctgcagctgccacagatggacgcactctctgcagacctcacccaactttgccagcagcagctcggattagatcccaacttcttaagacattctcagttcaaacgcccacggacaagaattacagatgatcagctaaaaatcctgagggcttattttgacattaataattctccaagtgaagaacagatccaggaaatggcagagaaatctggcctctcccaaaaagttatcaaacactggtttagaaatacgctttttaaggaacgacagagaaataaagattcaccatacaacttcagtaaccctcctataacggttttagaagatatcagaattgatccacagcccacctctttagaacattacaaatctgatgcatcattcagtaaaaggtcttctagaacgagatttactgactaccagcttagggttctgcaagacttttttgacacaaacgcttacccaaaagatgatgaaatagaacaactctccactgttctcaatctgcctacccgggttattgttgtatggttccagaatgctcgtcagaaagcacgaaagagttatgagaatcaagcagaaacaaaagataatgaaaaaagagaactcactaatgaacggtacattcgaacaagcaacatgcagtaccagtgtaaaaagtgcaatgtggttttccccaggatctttgacttgattacgcatcagaaaaagcagtgttacaaggatgaagatgatgatgcccaagatgaaagccaaacagaagactccatggatgccactgatcaagtggtatacaagcattgcacagtgtctggccaaacggatgcagctaaaaacgctgctgcccctgcagcaagttctggctctgggaccagcacccccctgattccatcacccaaaccagaacctgagaagacttctccaaaacctgaatatcccgcagaaaagccaaagcagagtgacccctctcccccttctcaaggcaccaaaccagccctgccattagcatcgacttcctcggacccaccacaggcatccacagcccagccacagccacagccacagccaccaaaacaaccccaacttatcggaagacctccctcggcctctcaaacaccggtcccttccagtccactgcaaatttccatgacgtctctccagaacagtctacctccacagttactacaataccaatgtgatcagtgtacagttgccttcccaactctggaactctggcaggaacaccagcacatgcacttccttgctgctcaaaaccaattccttcactctccgttcttggaaaggcccatggacatgccctacatgatatttgaccccaacaatccgctgatgactggacaactgctgggcagttccctcactcaaatgccccctcaggccagttcctcccacaccacagcccccacaacggttgctgcttccctaaaaaggaaactagacgataaagaagataataattgcagtgaaaaagaaggagggaatagcggtgaagaccaacaccgagataaacgcttgagaaccacgatcaccccggaacagctggaaatactctatgaaaaatacttgctggattccaatcctaccagaaaaatgcttgatcatattgcccgcgaagtcgggctgaaaaaaagggtcgtgcaagtctggttccagaatacacgagcgcgggagaggaaaggccagttccgggcggtgggtccagcacagtctcataaacggtgtccgttttgccgagccctgtttaaagcaaagtcggccttagaaagccacattcgctctcggcactggaatgaaggaaagcaggcaggttacagcttgccaccaagccctttaatatccaccgaagatgggggagaaagcccacagaaatacatctattttgattacccatctttgccattaactaaaattgatctatcaagtgagaatgaattggcttctacagtgtcaacacctgttagtaaaacagcagagctgtcaccgaagaatcttttaagcccttcttcttttaaagcagagtgttctgaggatgtagagaatttaaatgcccctcctgctgaggctgggtatgatcaaaataaaaccgattttgatgagacttcatcgattaatacggcaatcagtgacgccaccaccggagacgagggaaacactgaaatggaaagcaccacaggaagttccggagatgtgaaaccggctttgtctcccaaagagccaaaaactctggatactctgccaaaacctgcaaccacacctaccacggaggtctgcgatgacaaatttctcttttctctcacaagcccatccatccatttcaatgacaaagatggcgaccacgaccaaagcttttacatcacagatgacccggatgacaacgccgaccgcagcgaaacgtccagcatagcggacccgagctccccaaatccattcggatccagcaatccctttaaatccaaaagtaatgatcggccgggtcacaagcgttttcgaacgcaaatgagcaatcttcaactcaaggttctcaaggcttgctttagtgactaccgaactccaaccatgcaagaatgtgaaatgttagggaatgagattggtctgcccaaacgcgtagtccaggtgtggttccaaaatgcaagggcaaaggaaaagaaatttaaaattaacatagggaagcctttcatgatcaatcaaggcggaacggaaggcaccaaaccagagtgtaccctctgcggggtgaagtactctgcccgcttgtccatcagagatcacattttctccaaacagcacatttcaaaagtgagggagaccgttggcagtcagctcgatcgggagaaagattacttggctccgaccacggttcggcagctgatggcacagcaagaacttgatcgtataaagaaagcttcagacgtgctgggcttgacggtacagcagccaggcatgatggacagcagttctctccacggcatcagcctgccaacagcctaccccggactccccggccttcctccagtccttctccccggaatgaacggtccatcctccttgccgggatttccacaaaattcaaacactttaacacctcccggtgcaggcatgcttgggtttcctacttcagctacttcgtctcctgccctgtctctcagcagtgcccccaccaaacctttgctgcagactccaccacctccaccacctcctcctcctcctcctccttcatcctctctgtcaggacagcagaccgagcaacagaacaaagaatctgagaaaaagcaaactaagccaaacaaggtgaaaaaaatcaaagaggaggaattagaggccaccaaacccgaaaaacaccccaaaaaagaggaaaaaatctcatctgctctttcagtgttgggcaaagttgtaggtgaaacacatgtcgatcctattcagttgcaggcattacagaatgcaattgctggtgacccagcttcctttataggcggacagttcttgccatactttatccctgggtttgcttcttattttacacctcagctccctggaacagtgcaggggggatacttcccacctgtctgtggcatggagagcctctttccttatggccctacaatgccccagacactggcaggtctgtccccaggtgcactgttaaaccagttcaggcaaagacatccaaagtagaaagtgaccagccgcaaaactccaacgatgcttcagaaacaaaggaagacaaaagtactgctacagaaagcacaaaagaagaaccccagttagaatccaaaagtgcagacttttcagacacttacgttgttccattcgtcaagtatgagtttatatgcagaaagtgccagatgatgtttactgatgaagacgccgcagtaaatcatcaaaagtccttctgttatttcggtcagcctttgattgacccacaagagacagtgcttcgtgtcccagtcagcaaatatcagtgtcttgcctgtgatgtggctatcagtgggaatgaagcacttagccaacacctccagtcaagcttgcacaaagagaaaacaatcaaacaagcaatgagaaatgccaaagagcatgttagattattacctcactcagtctgctcccctaatcctaacaccacatctacctcgcagtctgcagcttcttctaataacacctatcctcatctttcttgcttctccatgaagtcctggcctaatatccttttccaagcgtctgccaggagagctgcttctcccccttcttctcctccttccctttccttgccttcaacggttacctcaagtttgtgcagcacctcaggggttcaaacctcactacccacagaaagttgttcagatgagtctgacagtgagctgagccagaagctagaagacttagataattctttggaagtgaaggctaagcctgcttctggcctagatggtaatttcaatagcatccgaatggatatgttcagtgtgtaggagtgaagacaggatcccgtgcttaaaaaaataaaaaataaaaaaataaaaaaaaaataagactttaactgcagttccaaagcttctctaacccaaaaattacagtaccaaatgattgactcaggattgtttttcccatattgatatgctggcaatataggatggtatgtaatggacagaactgatgcagatggttgaatgcgcttgtactatatgctaaaatatggaaaaggaaaaaaaaatctcacaagttcttttggaacttgtttcaagccaaaaactctcaagaaagcaaattgcacctcagctggattgatttccaaatgctagcatgtactgtatgggaggatgatccagatgtttcaaagagaatttctcttagtttagttaggtgtaattcagtagctttaaattctcaggtcagaacataacatttctcatttgttaaaagcagcaagaagcctggtaaaactgtgacttttccccaaacgtcaatctttattagaaagcattttctaggtgtgtttagtgtacaaagagactttataacccttactggacaacacacagatccttgagctcacgctgcaggatagtacagttttaccgcagagggaatctggaacagtggaatcatgtgtctgccctgtgtattgcagtttgtattgccacaagctatatttataccagtgtcacccttttcttgtagaatatactaataatctgtgccaactctaccttctcacttttacctctgacgtcattctttttttctgaaagaggtaataattctagttttgatagactctgaggattatgtgaacaggacatttttcatttgtgaatttaatgctatactgtcaaggtacttgcttgtgtctgaactctagtgcacttatgattttgtagaccatgtgaaatttaataagataccttttttttcctttctttgtgtgtagtgcagcaacagtttggtctgcatttgttagaagtttaactcctaacaacccaaagacctatttaacaattggtgcataaatgaaagtagtactgtatacttgaaactgtttaagtacaagttgaacaaaaattatgaaaaggtatatttgcttctcgggaaagcaaagaagctgctttaaaaaataaaaaggggactaaaaatttgttttgtataaagaggttagccctgcgcacgtaggactgaattcagtgatatccctatacactgccatttagtggataggttattgtacttccattcatactctgggcacttgtgttgtattgttctgttacatactttttttaacctgttttgttttatcatatatgcattaaaagtattatctttatcaacatttgctgctactgtgttaacatttttgttttgcttgccatgaatttcaacttccaccacccagtgaattgatttataaattgctatgctttgctgtttttctgttgctgtggaacttaaagaatgtgaaagctgtcaaagggtattttacgaatcacttttgtgtttgatatagtaaaacaatgtgattcattccaaagtaacagaaggttatttgtaagaaagttaaaggcttgtgaacaaagaaagctaagctgttgtacatatttgtagttggctgtgcatggtacaaatttattaatatgaagaaatgcaaaatgtattgcttttgatatttctcttccgagatgaacaagtagcatgtaatgcaactgtttgacagtttaactcaagtcatgcttcaaactgttttaatgatcaaatcaagacacatttcattttacattttattattgtacagtttttgtttcggatgatgatcacagcaatctttattctatacattttatgtgaacttttttaatgtctttaatttggattttttttttttttagtattttaacatttattttaatcctgaagacacttttttgattgtgtttcgtaagagacaacatggcctcctaaggtgcaatcctgccgctatagtgagctaatgtcctgaatccaaaggcttcagaaaattgcttttgcctttttcatgaatgttaagcagcagcattgtgagatcgatctgtcctggcagttaacacgatgtgcaacagtgtgttagcatggaacagaacgcttttcacaaaacaaaggactgttttacaaatgattattccgacagtgtgtcgacataaacttttacaactgcacagcagccaaaaaaagaaaaaaaaaagaaaaaaaactttaactggatggacgttgttagggtgagaaataaaaggacagcctccaaaggttgagaatgagaattgttttttcctggatatcaaagggattatcacagcgcaatcattgtctacacaacatgtactctcaacgcctgggttacataggaaatgcaccctgaggttttaataaaagcccctatggctataactttaaataaactaaaccaaaaatgttattgatgttttatatatagagagtagtctcattagtttttgttactgtaatgtttgaagtctcaaatgcaccgtattacggtaaataacatggttttgaaaacttttttttattttgtcacagacctgttgtcatagttgaaatgatgtttattgtagatggtatttgaacttattcttctggaaatagttcatcaagtatgtttgttgctcattgtgatacattaaaaactgtatctacatattta

SEQ ID NO: 6936 - protein, 1773 aa, Homo sapiens; identical to SEQ ID NO: 6930

SEQ ID NO: 6937 - DNA, 13385 bp, Homo sapiens
atagcacaatccccttgtttaaccaatacggaaaccaaagctcatggaaattcctgggaaacatcacataactacagagtgcagctgaagaaattgagtgtgtccctgacaggctggatgaaatgagatccccatgtagcaattgccatggaaacctgtgactcccctcctatctcaaggcaggaaaatgggcagagcacatcaaagctatgtggaacgacacaacttgataatgaggtgccagagaaagttgcagggatggagcctgacagggaaaacagctccacagatgacaacctgaaaacggatgagcgcaaaagtgaagccttgctgggtttcagcgttgagaatgcagctgccactcaggttacctcagcaaaggagataccctgcaacgaatgtgccacttcttttcccagtttacagaaatacatggaacaccactgccctaatgcccgccttcctgtcctgaaggatgacaacgagagcgagatcagcgagttagaggacagtgacgtggaaaatctaacaggggagatcgtttaccagcctgatgggtcagcatatataattgaggactccaaagaaagtgggcagaatgcacagactggggcaaatagcaaactcttttctacagcgatgttcctggactccctggcatctgctggagagaagagtgatcagtctgcttctgcacctatgtcgttctacccacagatcatcaacacttttcatatcgcttcatccctcgggaaaccatttacagccgatcaggctttcccaaatacctcagcattagcaggagttggtcctgtgttgcacagtttccgtgtctatgatctccgacacaagagagagaaagactatctaaccagtgatggctcagccaaaaactcctgtgtgtccaaagatgtccctaacaatgtggacttgtccaaattcgatggttgtgttagcgatgggaaaaggaaacctgttttaatgtgtttcttgtgcaagttgtcttttggttatatcaggtcatttgtaacccatgctgtgcatgatcatcggatgaccctcaatgacgaggagcagaagctcctcagtaataaatgcgtctccgccataatacaggggattggcaaagacaaagaacctcttataagctttctggaaccaaaaaaatccacttctgtttatccccatttttctactacaaacctcataggacccgatccaaccttccgcggtttatggagcgcttttcatgttgaaaatggtgactctttgccggctggctttgccttcttaaaaggaagcgcgagcacctcgagctcagcagagcagccgctggggattacccaaatgccaaaggctgaagtgaatctgggggggctgtctagtttagtagtgaacaccccaattacctctgtctccctcagccactcatcgtctgagtctagcaagatgtcagagagcaaagaccaagagaacaactgtgaaaggccaaaagaaagcaacgttttacacccaaacggggagtgccctgtcaaaagtgaacccactgaaccgggagatgaggatgaagaagatgcgtactccaatgaacttgatgacgaggaagtattaggtgaactcaccgatagtattggtaacaaagatttccctctcttaaaccaaagcatttctcctttatcatccagtgtgctaaaatttattgaaaagggtacctcgtcctcctcggcgactgtttctgatgacacagaaaagaaaaaacagactgctgctgttagggccagtggcagtgttgctagtaactatggcatcagtggcaaggactttgcagacgcaagtgccagtaaagacagtgccacagctgctcatccaagtgaaatagcccggggagacgaagacagttcagccactcctcaccagcatggctttaccccgagtactcctggcacaccagggcctggaggagacggctcaccgggcagtggcatcgagtgtccaaagtgcgacactgtgttggggtcttcgaggtctcttggtggtcatatgactatgatgcactcgaggaactcatgcaaaaccctcaaatgtcctaaatgtaactggcactacaaatatcagcagaccctggaggcccatatgaaggagaaacaccctgagccgggtggctcttgtgtttattgtaagactggacagcctcaccccaggcttgcccggggtgagagttacacgtgtggctataaacccttccgttgtgaggtttgtaactactctaccactaccaaaggcaacctcagtattcatatgcagtcggacaagcacctgaacaatgttcagaatctccaaaatggcaatggtgagcaggtgtttggccactctgccccagcccccaacaccagcctcagtggctgcggaacaccctctccgtccaaacccaaacagaaacccacctggcggtgtgaagtttgtgattatgaaaccaatgtcgccaggaacctccgaattcatatgaccagcgaaaagcacatgcataatatgatgcttttgcagcagaacatgaagcagatccagcataatctgcacttgggcctcgccccggcggaagcagagctttatcagtactacctagcccagaacataggcctgaccggaatgaagctggaaaaccctgccgaccctcagctgatgatcaatccattccagctggatccagcgacagcagcggctttggcaccagggctcggagagctgtcaccttatatcagtgacccagcgctgaagctattccagtgtgctgtttgcaacaaattcacctctgacagcctggaggccctaagtgtgcatgtgagcagtgagcgctctctccctgaagaggaatggagggcagtaattggagatatctaccagtgcaagctctgcaactacaacactcagctcaaagccaacttccagctacactgcaagactgataaacatatgcagaaatatcaactggtggctcacattaaagaagggggcaaaagcaatgagtggaggttgaagtgtattgccattggcaaccctgttcacctaaaatgtaacgcctgtgactattacaccaacagtgtggataaattacgcttgcataccaccaatcacaggcacgaggcggccctgaagctctacaagcacttgcagaagcaagagggtgcagtgaatcccgaatcctgctattactactgtgccgtgtgtgattacaccaccaaggtcaagttgaatctggtacaacatgtccgttcggtgaagcatcagcagactgagggcctacggaagctccagctccaccagcaaggcctggcaccagaggaggacaacctcagtgagatcttttttgttaaagattgcccaccaaatgagcttgaaactgcctcattgggagccaggacttgtgatgatgatcttacagagcagcagttgagatcgacctcagaagaacaaagtgaggaggcagaaggagctattaagcctacagcagtggccgaggacgatgaaaaagacacaagtgagagagacaatagtgaaggcaaaaactctaataaagactctgggataatcacaccagagaaggaactaaaagttagtgtggcagggggtacccagccactcctgctggcaaaagaagaggatgttgcaacaaaaaggtcaaaacctacagaggacaataaattctgtcatgaacagttctatcaatgtccttattgtaactacaatagtagggaccaaagtcgtatccagatgcacgtcctatcacagcactcggtgcagccggtcatctgctgtcctctctgtcaggacgtcctcagcaacaaaatgcatctccaactgcatctgacgcatttgcacagtgtgtctccagactgtgtggagaagctgcttatgacagtgcctgtccctgatgtgatgatgccaaacagtatgctactgccagcagctgcctctgagaaatcagagcgggacacacctgcagccgtgacagctgaggggtctgggaaatattcaggtgaaagtccaatggatgacaaaagcatggcaggtctcgaggattcaaaggctaatgtggaagtaaagaatgaggagcagaaaccgactaaagaacccttggaagtctcagaatggaataaaaatagcagtaaggatgtgaaaatccccgacacactgcaagatcaattaaatgaacagcaaaaaaggcaaccgctctctgtttctgaccgtcatgtctacaagtatcgctgtaaccattgtagcttggctttcaaaactatgcagaagcttcagatacattcccagtatcatgcaattcgggctgcgacaatgtgtaacctctgccagcgcagtttccgtacattccaggctttaaaaaaacacttggaagcaggccaccctgaactgagtgaagctgaacttcaacagctatatgcctccttgcccgtgaatggagaactgtgggcagagagcgaaactatgtcccaggatgaccatggcctagagcaggaaatggagagagagtatgaggtggaccacgaagggaaagcaagtcctgtaggaagtgatagtagctctattccagatgacatgggctctgaaccaaagcggaccttaccttttagaaaagggcccaattttacgatggaaaaattccttgatccatctcgtccatataaatgtacagtgtgtaaagagtcattcacccaaaagaacattctcttggtccactataattcagtttctcacttgcataagctgaaaaaagttttgcaggaagcctccagtcctgtcccacaagaaaccaacagcaacacagataacaaaccctacaagtgcagcatctgcaatgttgcatacagccaaagctcaacattggaaatccacatgaggtctgtgctccaccagacaaaggctagggctgcaaagctggagcccagtggtcatgtggctggtgggcacagcattgcagcaaatgtcaacagccctggccaggggatgttagattccatgagtttagcagctgtaaacagcaaagatacccatttagatgccaaagaattaaataaaaagcaaactcctgatttaatctctgctcaacctgcacatcacccaccacagtcaccagcacaaattcagatgcaactacagcacgaattacaacagcaagccgcattctttcagcctcagtttctaaacccagcctttttgcctcattttcctatgaccccagaagcactgctgcagtttcagcagcctcagtttctctttccattttatatacctgggacggagttcagcttggggccagatttgggcttgccaggctctgccacatttgggatgcctggcatgacaggaatggctggctccttgcttgaagacctaaagcagcagattcaaacccaacatcacgttggtcaaactcaactccagatgcaagcaaattattgaaacaagagcaaagtaacatagtgagtgcagactgccaaatcatgaaggatgtgccatcttataaggaggcagaagatatttctgaaaagccagaaaaaccaaagcaggaatttataagtgaaggtgaaggactcaaagaaggcaaagacacaaagaagcaaaaatccttggaaccatccatcccaccaccccgaatagcttcaggggccagaggaaatgctgccaaagcgttattggaaaactttggttttgaactggtcattcagtataacgaaaacaggcagaaggtacagaagaagggcaaaagtggtgaaggcgaaaacactgacaaactagaatgtggaacatgtggtaaattgttttccaatgttcttattttaaagagtcaccaagaacatgtacatgggcaattttttccatatgcagcgctagaaaaatttgctcgtcaatacagggaggcctatgacaagctttatccaatttctccatcttctccagaaacgccgcccccgccacctcctcctcctcccttgcctccggctcctccacagccttcttctatgggtcctgtaaagatccccaacacggtttctactcctctgcaagctccaccacccaacaggtccaactgccggtttctctggacctgccgctctttccttccattatgatgcaacctgtgcaacaccctgcgcttcctccccagcttgccctgcagctgccacagatggacgcactctctgcagacctcacccaactttgccagcagcagctcggattagatcccaacttcttaagacattctcagttcaaacgcccacggacaagaattacagatgatcagctaaaaatcctgagggcttattttgacattaataattctccaagtgaagaacagatccaggaaatggcagagaaatctggcctctcccaaaaagttatcaaacactggtttagaaatacgctttttaaggaacgacagagaaataaagattcaccatacaacttcagtaaccctcctataacggttttagaagatatcagaattgatccacagcccacctctttagaacattacaaatctgatgcatcattcagtaaaaggtcttctagaacgagatttactgactaccagcttagggttctgcaagacttttttgacacaaacgcttacccaaaagatgatgaaatagaacaactctccactgttctcaatctgcctacccgggttattgttgtatggttccagaatgctcgtcagaaagcacgaaagagttatgagaatcaagcagaaacaaaagataatgaaaaaagagaactcactaatgaacggtacattcgaacaagcaacatgcagtaccagtgtaaaaagtgcaatgtggttttccccaggatctttgacttgattacgcatcagaaaaagcagtgttacaaggatgaagatgatgatgcccaagatgaaagccaaacagaagactccatggatgccactgatcaagtggtatacaagcattgcacagtgtctggccaaacggatgcagctaaaaacgctgctgcccctgcagcaagttctggctctgggaccagcacccccctgattccatcacccaaaccagaacctgagaagacttctccaaaacctgaatatcccgcagaaaagccaaagcagagtgacccctctcccccttctcaaggcaccaaaccagccctgccattagcatcgacttcctcggacccaccacaggcatccacagcccagccacagccacagccacagccaccaaaacaaccccaacttatcggaagacctccctcggcctctcaaacaccggtcccttccagtccactgcaaatttccatgacgtctctccagaacagtctacctccacagttactacaataccaatgtgatcagtgtacagttgccttcccaactctggaactctggcaggaacaccagcacatgcacttccttgctgctcaaaaccaattccttcactctccgttcttggaaaggcccatggacatgccctacatgatatttgaccccaacaatccgctgatgactggacaactgctgggcagttccctcactcaaatgccccctcaggccagttcctcccacaccacagcccccacaacggttgctgcttccctaaaaaggaaactagacgataaagaagataataattgcagtgaaaaagaaggagggaatagcggtgaagaccaacaccgagataaacgcttgagaaccacgatcaccccggaacagctggaaatactctatgaaaaatacttgctggattccaatcctaccagaaaaatgcttgatcatattgcccgcgaagtcgggctgaaaaaaagggtcgtgcaagtctggttccagaatacacgagcgcgggagaggaaaggccagttccgggcggtgggtccagcacagtctcataaacggtgtccgttttgccgagccctgtttaaagcaaagtcggccttagaaagccacattcgctctcggcactggaatgaaggaaagcaggcaggttacagcttgccaccaagccctttaatatccaccgaagatgggggagaaagcccacagaaatacatctattttgattacccatctttgccattaactaaaattgatctatcaagtgagaatgaattggcttctacagtgtcaacacctgttagtaaaacagcagagctgtcaccgaagaatcttttaagcccttcttcttttaaagcagagtgttctgaggatgtagagaatttaaatgcccctcctgctgaggctgggtatgatcaaaataaaaccgattttgatgagacttcatcgattaatacggcaatcagtgacgccaccaccggagacgagggaaacactgaaatggaaagcaccacaggaagttccggagatgtgaaaccggctttgtctcccaaagagccaaaaactctggatactctgccaaaacctgcaaccacacctaccacggaggtctgcgatgacaaatttctcttttctctcacaagcccatccatccatttcaatgacaaagatggcgaccacgaccaaagcttttacatcacagatgacccggatgacaacgccgaccgcagcgaaacgtccagcatagcggacccgagctccccaaatccattcggatccagcaatccctttaaatccaaaagtaatgatcggccgggtcacaagcgttttcgaacgcaaatgagcaatcttcaactcaaggttctcaaggcttgctttagtgactaccgaactccaaccatgcaagaatgtgaaatgttagggaatgagattggtctgcccaaacgcgtagtccaggtgtggttccaaaatgcaagggcaaaggaaaagaaatttaaaattaacatagggaagcctttcatgatcaatcaaggcggaacggaaggcaccaaaccagagtgtaccctctgcggggtgaagtactctgcccgcttgtccatcagagatcacattttctccaaacagcacatttcaaaagtgagggagaccgttggcagtcagctcgatcgggagaaagattacttggctccgaccacggttcggcagctgatggcacagcaagaacttgatcgtataaagaaagcttcagacgtgctgggcttgacggtacagcagccaggcatgatggacagcagttctctccacggcatcagcctgccaacagcctaccccggactccccggccttcctccagtccttctccccggaatgaacggtccatcctccttgccgggatttccacaaaattcaaacactttaacacctcccggtgcaggcatgcttgggtttcctacttcagctacttcgtctcctgccctgtctctcagcagtgcccccaccaaacctttgctgcagactccaccacctccaccacctcctcctcctcctcctccttcatcctctctgtcaggacagcagaccgagcaacagaacaaagaatctgagaaaaagcaaactaagccaaacaaggtgaaaaaaatcaaagaggaggaattagaggccaccaaacccgaaaaacaccccaaaaaagaggaaaaaatctcatctgctctttcagtgttgggcaaagttgtaggtgaaacacatgtcgatcctattcagttgcaggcattacagaatgcaattgctggtgacccagcttcctttataggcggacagttcttgccatactttatccctgggtttgcttcttattttacacctcagctccctggaacagtgcaggggggatacttcccacctgtctgtggcatggagagcctctttccttatggccctacaatgccccagacactggcaggtctgtccccaggtgcactgttaaaccagttcaggcaaagacatccaaagtagaaagtgaccagccgcaaaactccaacgatgcttcagaaacaaaggaagacaaaagtactgctacagaaagcacaaaagaagaaccccagttagaatccaaaagtgcagacttttcagacacttacgttgttccattcgtcaagtatgagtttatatgcagaaagtgccagatgatgtttactgatgaagacgccgcagtaaatcatcaaaagtccttctgttatttcggtcagcctttgattgacccacaagagacagtgcttcgtgtcccagtcagcaaatatcagtgtcttgcctgtgatgtggctatcagtgggaatgaagcacttagccaacacctccagtcaagcttgcacaaagagaaaacaatcaaacaagcaatgagaaatgccaaagagcatgttagattattacctcactcagtctgctcccctaatcctaacaccacatctacctcgcagtctgcagcttcttctaataacacctatcctcatctttcttgcttctccatgaagtcctggcctaatatccttttccaagcgtctgccaggagagctgcttctcccccttcttctcctccttccctttccttgccttcaacggttacctcaagtttgtgcagcacctcaggggttcaaacctcactacccacagaaagttgttcagatgagtctgacagtgagctgagccagaagctagaagacttagataattctttggaagtgaaggctaagcctgcttctggcctagatggtaatttcaatagcatccgaatggatatgttcagtgtgtaggagtgaagacaggatcccgtgcttaaaaaaataaaaaataaaaaaataaaaaaaaaataagactttaactgcagttccaaagcttctctaacccaaaaattacagtaccaaatgattgactcaggattgtttttcccatattgatatgctggcaatataggatggtatgtaatggacagaactgatgcagatggttgaatgcgcttgtactatatgctaaaatatggaaaaggaaaaaaaaatctcacaagttcttttggaacttgtttcaagccaaaaactctcaagaaagcaaattgcacctcagctggattgatttccaaatgctagcatgtactgtatgggaggatgatccagatgtttcaaagagaatttctcttagtttagttaggtgtaattcagtagctttaaattctcaggtcagaacataacatttctcatttgttaaaagcagcaagaagcctggtaaaactgtgacttttccccaaacgtcaatctttattagaaagcattttctaggtgtgtttagtgtacaaagagactttataacccttactggacaacacacagatccttgagctcacgctgcaggatagtacagttttaccgcagagggaatctggaacagtggaatcatgtgtctgccctgtgtattgcagtttgtattgccacaagctatatttataccagtgtcacccttttcttgtagaatatactaataatctgtgccaactctaccttctcacttttacctctgacgtcattctttttttctgaaagaggtaataattctagttttgatagactctgaggattatgtgaacaggacatttttcatttgtgaatttaatgctatactgtcaaggtacttgcttgtgtctgaactctagtgcacttatgattttgtagaccatgtgaaatttaataagataccttttttttcctttctttgtgtgtagtgcagcaacagtttggtctgcatttgttagaagtttaactcctaacaacccaaagacctatttaacaattggtgcataaatgaaagtagtactgtatacttgaaactgtttaagtacaagttgaacaaaaattatgaaaaggtatatttgcttctcgggaaagcaaagaagctgctttaaaaaataaaaaggggactaaaaatttgttttgtataaagaggttagccctgcgcacgtaggactgaattcagtgatatccctatacactgccatttagtggataggttattgtacttccattcatactctgggcacttgtgttgtattgttctgttacatactttttttaacctgttttgttttatcatatatgcattaaaagtattatctttatcaacatttgctgctactgtgttaacatttttgttttgcttgccatgaatttcaacttccaccacccagtgaattgatttataaattgctatgctttgctgtttttctgttgctgtggaacttaaagaatgtgaaagctgtcaaagggtattttacgaatcacttttgtgtttgatatagtaaaacaatgtgattcattccaaagtaacagaaggttatttgtaagaaagttaaaggcttgtgaacaaagaaagctaagctgttgtacatatttgtagttggctgtgcatggtacaaatttattaatatgaagaaatgcaaaatgtattgcttttgatatttctcttccgagatgaacaagtagcatgtaatgcaactgtttgacagtttaactcaagtcatgcttcaaactgttttaatgatcaaatcaagacacatttcattttacattttattattgtacagtttttgtttcggatgatgatcacagcaatctttattctatacattttatgtgaacttttttaatgtctttaatttggattttttttttttttagtattttaacatttattttaatcctgaagacacttttttgattgtgtttcgtaagagacaacatggcctcctaaggtgcaatcctgccgctatagtgagctaatgtcctgaatccaaaggcttcagaaaattgcttttgcctttttcatgaatgttaagcagcagcattgtgagatcgatctgtcctggcagttaacacgatgtgcaacagtgtgttagcatggaacagaacgcttttcacaaaacaaaggactgttttacaaatgattattccgacagtgtgtcgacataaacttttacaactgcacagcagccaaaaaaagaaaaaaaaaagaaaaaaaactttaactggatggacgttgttagggtgagaaataaaaggacagcctccaaaggttgagaatgagaattgttttttcctggatatcaaagggattatcacagcgcaatcattgtctacacaacatgtactctcaacgcctgggttacataggaaatgcaccctgaggttttaataaaagcccctatggctataactttaaataaactaaaccaaaaatgttattgatgttttatatatagagagtagtctcattagtttttgttactgtaatgtttgaagtctcaaatgcaccgtattacggtaaataacatggttttgaaaacttttttttattttgtcacagacctgttgtcatagttgaaatgatgtttattgtagatggtatttgaacttattcttctggaaatagttcatcaagtatgtttgttgctcattgtgatacattaaaaactgtatctacatattta

SEQ ID NO: 6938 - protein, 1773 aa, Homo sapiens; identical to SEQ ID NO: 6930

SEQ ID NO: 6939 - DNA, 13379 bp, Homo sapiens
acggaaaccaaagctcatggaaattcctgggaaacatcacataactacagagtgcagctgaagaaattgagtgttcactgcctgataaagaaaaggtccctgacaggctggatgaaatgagatccccatgtagcaattgccatggaaacctgtgactcccctcctatctcaaggcaggaaaatgggcagagcacatcaaagctatgtggaacgacacaacttgataatgaggtgccagagaaagttgcagggatggagcctgacagggaaaacagctccacagatgacaacctgaaaacggatgagcgcaaaagtgaagccttgctgggtttcagcgttgagaatgcagctgccactcaggttacctcagcaaaggagataccctgcaacgaatgtgccacttcttttcccagtttacagaaatacatggaacaccactgccctaatgcccgccttcctgtcctgaaggatgacaacgagagcgagatcagcgagttagaggacagtgacgtggaaaatctaacaggggagatcgtttaccagcctgatgggtcagcatatataattgaggactccaaagaaagtgggcagaatgcacagactggggcaaatagcaaactcttttctacagcgatgttcctggactccctggcatctgctggagagaagagtgatcagtctgcttctgcacctatgtcgttctacccacagatcatcaacacttttcatatcgcttcatccctcgggaaaccatttacagccgatcaggctttcccaaatacctcagcattagcaggagttggtcctgtgttgcacagtttccgtgtctatgatctccgacacaagagagagaaagactatctaaccagtgatggctcagccaaaaactcctgtgtgtccaaagatgtccctaacaatgtggacttgtccaaattcgatggttgtgttagcgatgggaaaaggaaacctgttttaatgtgtttcttgtgcaagttgtcttttggttatatcaggtcatttgtaacccatgctgtgcatgatcatcggatgaccctcaatgacgaggagcagaagctcctcagtaataaatgcgtctccgccataatacaggggattggcaaagacaaagaacctcttataagctttctggaaccaaaaaaatccacttctgtttatccccatttttctactacaaacctcataggacccgatccaaccttccgcggtttatggagcgcttttcatgttgaaaatggtgactctttgccggctggctttgccttcttaaaaggaagcgcgagcacctcgagctcagcagagcagccgctggggattacccaaatgccaaaggctgaagtgaatctgggggggctgtctagtttagtagtgaacaccccaattacctctgtctccctcagccactcatcgtctgagtctagcaagatgtcagagagcaaagaccaagagaacaactgtgaaaggccaaaagaaagcaacgttttacacccaaacggggagtgccctgtcaaaagtgaacccactgaaccgggagatgaggatgaagaagatgcgtactccaatgaacttgatgacgaggaagtattaggtgaactcaccgatagtattggtaacaaagatttccctctcttaaaccaaagcatttctcctttatcatccagtgtgctaaaatttattgaaaagggtacctcgtcctcctcggcgactgtttctgatgacacagaaaagaaaaaacagactgctgctgttagggccagtggcagtgttgctagtaactatggcatcagtggcaaggactttgcagacgcaagtgccagtaaagacagtgccacagctgctcatccaagtgaaatagcccggggagacgaagacagttcagccactcctcaccagcatggctttaccccgagtactcctggcacaccagggcctggaggagacggctcaccgggcagtggcatcgagtgtccaaagtgcgacactgtgttggggtcttcgaggtctcttggtggtcatatgactatgatgcactcgaggaactcatgcaaaaccctcaaatgtcctaaatgtaactggcactacaaatatcagcagaccctggaggcccatatgaaggagaaacaccctgagccgggtggctcttgtgtttattgtaagactggacagcctcaccccaggcttgcccggggtgagagttacacgtgtggctataaacccttccgttgtgaggtttgtaactactctaccactaccaaaggcaacctcagtattcatatgcagtcggacaagcacctgaacaatgttcagaatctccaaaatggcaatggtgagcaggtgtttggccactctgccccagcccccaacaccagcctcagtggctgcggaacaccctctccgtccaaacccaaacagaaacccacctggcggtgtgaagtttgtgattatgaaaccaatgtcgccaggaacctccgaattcatatgaccagcgaaaagcacatgcataatatgatgcttttgcagcagaacatgaagcagatccagcataatctgcacttgggcctcgccccggcggaagcagagctttatcagtactacctagcccagaacataggcctgaccggaatgaagctggaaaaccctgccgaccctcagctgatgatcaatccattccagctggatccagcgacagcagcggctttggcaccagggctcggagagctgtcaccttatatcagtgacccagcgctgaagctattccagtgtgctgtttgcaacaaattcacctctgacagcctggaggccctaagtgtgcatgtgagcagtgagcgctctctccctgaagaggaatggagggcagtaattggagatatctaccagtgcaagctctgcaactacaacactcagctcaaagccaacttccagctacactgcaagactgataaacatatgcagaaatatcaactggtggctcacattaaagaagggggcaaaagcaatgagtggaggttgaagtgtattgccattggcaaccctgttcacctaaaatgtaacgcctgtgactattacaccaacagtgtggataaattacgcttgcataccaccaatcacaggcacgaggcggccctgaagctctacaagcacttgcagaagcaagagggtgcagtgaatcccgaatcctgctattactactgtgccgtgtgtgattacaccaccaaggtcaagttgaatctggtacaacatgtccgttcggtgaagcatcagcagactgagggcctacggaagctccagctccaccagcaaggcctggcaccagaggaggacaacctcagtgagatcttttttgttaaagattgcccaccaaatgagcttgaaactgcctcattgggagccaggacttgtgatgatgatcttacagagcagcagttgagatcgacctcagaagaacaaagtgaggaggcagaaggagctattaagcctacagcagtggccgaggacgatgaaaaagacacaagtgagagagacaatagtgaaggcaaaaactctaataaagactctgggataatcacaccagagaaggaactaaaagttagtgtggcagggggtacccagccactcctgctggcaaaagaagaggatgttgcaacaaaaaggtcaaaacctacagaggacaataaattctgtcatgaacagttctatcaatgtccttattgtaactacaatagtagggaccaaagtcgtatccagatgcacgtcctatcacagcactcggtgcagccggtcatctgctgtcctctctgtcaggacgtcctcagcaacaaaatgcatctccaactgcatctgacgcatttgcacagtgtgtctccagactgtgtggagaagctgcttatgacagtgcctgtccctgatgtgatgatgccaaacagtatgctactgccagcagctgcctctgagaaatcagagcgggacacacctgcagccgtgacagctgaggggtctgggaaatattcaggtgaaagtccaatggatgacaaaagcatggcaggtctcgaggattcaaaggctaatgtggaagtaaagaatgaggagcagaaaccgactaaagaacccttggaagtctcagaatggaataaaaatagcagtaaggatgtgaaaatccccgacacactgcaagatcaattaaatgaacagcaaaaaaggcaaccgctctctgtttctgaccgtcatgtctacaagtatcgctgtaaccattgtagcttggctttcaaaactatgcagaagcttcagatacattcccagtatcatgcaattcgggctgcgacaatgtgtaacctctgccagcgcagtttccgtacattccaggctttaaaaaaacacttggaagcaggccaccctgaactgagtgaagctgaacttcaacagctatatgcctccttgcccgtgaatggagaactgtgggcagagagcgaaactatgtcccaggatgaccatggcctagagcaggaaatggagagagagtatgaggtggaccacgaagggaaagcaagtcctgtaggaagtgatagtagctctattccagatgacatgggctctgaaccaaagcggaccttaccttttagaaaagggcccaattttacgatggaaaaattccttgatccatctcgtccatataaatgtacagtgtgtaaagagtcattcacccaaaagaacattctcttggtccactataattcagtttctcacttgcataagctgaaaaaagttttgcaggaagcctccagtcctgtcccacaagaaaccaacagcaacacagataacaaaccctacaagtgcagcatctgcaatgttgcatacagccaaagctcaacattggaaatccacatgaggtctgtgctccaccagacaaaggctagggctgcaaagctggagcccagtggtcatgtggctggtgggcacagcattgcagcaaatgtcaacagccctggccaggggatgttagattccatgagtttagcagctgtaaacagcaaagatacccatttagatgccaaagaattaaataaaaagcaaactcctgatttaatctctgctcaacctgcacatcacccaccacagtcaccagcacaaattcagatgcaactacagcacgaattacaacagcaagccgcattctttcagcctcagtttctaaacccagcctttttgcctcattttcctatgaccccagaagcactgctgcagtttcagcagcctcagtttctctttccattttatatacctgggacggagttcagcttggggccagatttgggcttgccaggctctgccacatttgggatgcctggcatgacaggaatggctggctccttgcttgaagacctaaagcagcagattcaaacccaacatcacgttggtcaaactcaactccagatgcaagcaaattattgaaacaagagcaaagtaacatagtgagtgcagactgccaaatcatgaaggatgtgccatcttataaggaggcagaagatatttctgaaaagccagaaaaaccaaagcaggaatttataagtgaaggtgaaggactcaaagaaggcaaagacacaaagaagcaaaaatccttggaaccatccatcccaccaccccgaatagcttcaggggccagaggaaatgctgccaaagcgttattggaaaactttggttttgaactggtcattcagtataacgaaaacaggcagaaggtacagaagaagggcaaaagtggtgaaggcgaaaacactgacaaactagaatgtggaacatgtggtaaattgttttccaatgttcttattttaaagagtcaccaagaacatgtacatgggcaattttttccatatgcagcgctagaaaaatttgctcgtcaatacagggaggcctatgacaagctttatccaatttctccatcttctccagaaacgccgcccccgccacctcctcctcctcccttgcctccggctcctccacagccttcttctatgggtcctgtaaagatccccaacacggtttctactcctctgcaagctccaccacccaacaggtccaactgccggtttctctggacctgccgctctttccttccattatgatgcaacctgtgcaacaccctgcgcttcctccccagcttgccctgcagctgccacagatggacgcactctctgcagacctcacccaactttgccagcagcagctcggattagatcccaacttcttaagacattctcagttcaaacgcccacggacaagaattacagatgatcagctaaaaatcctgagggcttattttgacattaataattctccaagtgaagaacagatccaggaaatggcagagaaatctggcctctcccaaaaagttatcaaacactggtttagaaatacgctttttaaggaacgacagagaaataaagattcaccatacaacttcagtaaccctcctataacggttttagaagatatcagaattgatccacagcccacctctttagaacattacaaatctgatgcatcattcagtaaaaggtcttctagaacgagatttactgactaccagcttagggttctgcaagacttttttgacacaaacgcttacccaaaagatgatgaaatagaacaactctccactgttctcaatctgcctacccgggttattgttgtatggttccagaatgctcgtcagaaagcacgaaagagttatgagaatcaagcagaaacaaaagataatgaaaaaagagaactcactaatgaacggtacattcgaacaagcaacatgcagtaccagtgtaaaaagtgcaatgtggttttccccaggatctttgacttgattacgcatcagaaaaagcagtgttacaaggatgaagatgatgatgcccaagatgaaagccaaacagaagactccatggatgccactgatcaagtggtatacaagcattgcacagtgtctggccaaacggatgcagctaaaaacgctgctgcccctgcagcaagttctggctctgggaccagcacccccctgattccatcacccaaaccagaacctgagaagacttctccaaaacctgaatatcccgcagaaaagccaaagcagagtgacccctctcccccttctcaaggcaccaaaccagccctgccattagcatcgacttcctcggacccaccacaggcatccacagcccagccacagccacagccacagccaccaaaacaaccccaacttatcggaagacctccctcggcctctcaaacaccggtcccttccagtccactgcaaatttccatgacgtctctccagaacagtctacctccacagttactacaataccaatgtgatcagtgtacagttgccttcccaactctggaactctggcaggaacaccagcacatgcacttccttgctgctcaaaaccaattccttcactctccgttcttggaaaggcccatggacatgccctacatgatatttgaccccaacaatccgctgatgactggacaactgctgggcagttccctcactcaaatgccccctcaggccagttcctcccacaccacagcccccacaacggttgctgcttccctaaaaaggaaactagacgataaagaagataataattgcagtgaaaaagaaggagggaatagcggtgaagaccaacaccgagataaacgcttgagaaccacgatcaccccggaacagctggaaatactctatgaaaaatacttgctggattccaatcctaccagaaaaatgcttgatcatattgcccgcgaagtcgggctgaaaaaaagggtcgtgcaagtctggttccagaatacacgagcgcgggagaggaaaggccagttccgggcggtgggtccagcacagtctcataaacggtgtccgttttgccgagccctgtttaaagcaaagtcggccttagaaagccacattcgctctcggcactggaatgaaggaaagcaggcaggttacagcttgccaccaagccctttaatatccaccgaagatgggggagaaagcccacagaaatacatctattttgattacccatctttgccattaactaaaattgatctatcaagtgagaatgaattggcttctacagtgtcaacacctgttagtaaaacagcagagctgtcaccgaagaatcttttaagcccttcttcttttaaagcagagtgttctgaggatgtagagaatttaaatgcccctcctgctgaggctgggtatgatcaaaataaaaccgattttgatgagacttcatcgattaatacggcaatcagtgacgccaccaccggagacgagggaaacactgaaatggaaagcaccacaggaagttccggagatgtgaaaccggctttgtctcccaaagagccaaaaactctggatactctgccaaaacctgcaaccacacctaccacggaggtctgcgatgacaaatttctcttttctctcacaagcccatccatccatttcaatgacaaagatggcgaccacgaccaaagcttttacatcacagatgacccggatgacaacgccgaccgcagcgaaacgtccagcatagcggacccgagctccccaaatccattcggatccagcaatccctttaaatccaaaagtaatgatcggccgggtcacaagcgttttcgaacgcaaatgagcaatcttcaactcaaggttctcaaggcttgctttagtgactaccgaactccaaccatgcaagaatgtgaaatgttagggaatgagattggtctgcccaaacgcgtagtccaggtgtggttccaaaatgcaagggcaaaggaaaagaaatttaaaattaacatagggaagcctttcatgatcaatcaaggcggaacggaaggcaccaaaccagagtgtaccctctgcggggtgaagtactctgcccgcttgtccatcagagatcacattttctccaaacagcacatttcaaaagtgagggagaccgttggcagtcagctcgatcgggagaaagattacttggctccgaccacggttcggcagctgatggcacagcaagaacttgatcgtataaagaaagcttcagacgtgctgggcttgacggtacagcagccaggcatgatggacagcagttctctccacggcatcagcctgccaacagcctaccccggactccccggccttcctccagtccttctccccggaatgaacggtccatcctccttgccgggatttccacaaaattcaaacactttaacacctcccggtgcaggcatgcttgggtttcctacttcagctacttcgtctcctgccctgtctctcagcagtgcccccaccaaacctttgctgcagactccaccacctccaccacctcctcctcctcctcctccttcatcctctctgtcaggacagcagaccgagcaacagaacaaagaatctgagaaaaagcaaactaagccaaacaaggtgaaaaaaatcaaagaggaggaattagaggccaccaaacccgaaaaacaccccaaaaaagaggaaaaaatctcatctgctctttcagtgttgggcaaagttgtaggtgaaacacatgtcgatcctattcagttgcaggcattacagaatgcaattgctggtgacccagcttcctttataggcggacagttcttgccatactttatccctgggtttgcttcttattttacacctcagctccctggaacagtgcaggggggatacttcccacctgtctgtggcatggagagcctctttccttatggccctacaatgccccagacactggcaggtctgtccccaggtgcactgttaaaccagttcaggcaaagacatccaaagtagaaagtgaccagccgcaaaactccaacgatgcttcagaaacaaaggaagacaaaagtactgctacagaaagcacaaaagaagaaccccagttagaatccaaaagtgcagacttttcagacacttacgttgttccattcgtcaagtatgagtttatatgcagaaagtgccagatgatgtttactgatgaagacgccgcagtaaatcatcaaaagtccttctgttatttcggtcagcctttgattgacccacaagagacagtgcttcgtgtcccagtcagcaaatatcagtgtcttgcctgtgatgtggctatcagtgggaatgaagcacttagccaacacctccagtcaagcttgcacaaagagaaaacaatcaaacaagcaatgagaaatgccaaagagcatgttagattattacctcactcagtctgctcccctaatcctaacaccacatctacctcgcagtctgcagcttcttctaataacacctatcctcatctttcttgcttctccatgaagtcctggcctaatatccttttccaagcgtctgccaggagagctgcttctcccccttcttctcctccttccctttccttgccttcaacggttacctcaagtttgtgcagcacctcaggggttcaaacctcactacccacagaaagttgttcagatgagtctgacagtgagctgagccagaagctagaagacttagataattctttggaagtgaaggctaagcctgcttctggcctagatggtaatttcaatagcatccgaatggatatgttcagtgtgtaggagtgaagacaggatcccgtgcttaaaaaaataaaaaataaaaaaataaaaaaaaaataagactttaactgcagttccaaagcttctctaacccaaaaattacagtaccaaatgattgactcaggattgtttttcccatattgatatgctggcaatataggatggtatgtaatggacagaactgatgcagatggttgaatgcgcttgtactatatgctaaaatatggaaaaggaaaaaaaaatctcacaagttcttttggaacttgtttcaagccaaaaactctcaagaaagcaaattgcacctcagctggattgatttccaaatgctagcatgtactgtatgggaggatgatccagatgtttcaaagagaatttctcttagtttagttaggtgtaattcagtagctttaaattctcaggtcagaacataacatttctcatttgttaaaagcagcaagaagcctggtaaaactgtgacttttccccaaacgtcaatctttattagaaagcattttctaggtgtgtttagtgtacaaagagactttataacccttactggacaacacacagatccttgagctcacgctgcaggatagtacagttttaccgcagagggaatctggaacagtggaatcatgtgtctgccctgtgtattgcagtttgtattgccacaagctatatttataccagtgtcacccttttcttgtagaatatactaataatctgtgccaactctaccttctcacttttacctctgacgtcattctttttttctgaaagaggtaataattctagttttgatagactctgaggattatgtgaacaggacatttttcatttgtgaatttaatgctatactgtcaaggtacttgcttgtgtctgaactctagtgcacttatgattttgtagaccatgtgaaatttaataagataccttttttttcctttctttgtgtgtagtgcagcaacagtttggtctgcatttgttagaagtttaactcctaacaacccaaagacctatttaacaattggtgcataaatgaaagtagtactgtatacttgaaactgtttaagtacaagttgaacaaaaattatgaaaaggtatatttgcttctcgggaaagcaaagaagctgctttaaaaaataaaaaggggactaaaaatttgttttgtataaagaggttagccctgcgcacgtaggactgaattcagtgatatccctatacactgccatttagtggataggttattgtacttccattcatactctgggcacttgtgttgtattgttctgttacatactttttttaacctgttttgttttatcatatatgcattaaaagtattatctttatcaacatttgctgctactgtgttaacatttttgttttgcttgccatgaatttcaacttccaccacccagtgaattgatttataaattgctatgctttgctgtttttctgttgctgtggaacttaaagaatgtgaaagctgtcaaagggtattttacgaatcacttttgtgtttgatatagtaaaacaatgtgattcattccaaagtaacagaaggttatttgtaagaaagttaaaggcttgtgaacaaagaaagctaagctgttgtacatatttgtagttggctgtgcatggtacaaatttattaatatgaagaaatgcaaaatgtattgcttttgatatttctcttccgagatgaacaagtagcatgtaatgcaactgtttgacagtttaactcaagtcatgcttcaaactgttttaatgatcaaatcaagacacatttcattttacattttattattgtacagtttttgtttcggatgatgatcacagcaatctttattctatacattttatgtgaacttttttaatgtctttaatttggattttttttttttttagtattttaacatttattttaatcctgaagacacttttttgattgtgtttcgtaagagacaacatggcctcctaaggtgcaatcctgccgctatagtgagctaatgtcctgaatccaaaggcttcagaaaattgcttttgcctttttcatgaatgttaagcagcagcattgtgagatcgatctgtcctggcagttaacacgatgtgcaacagtgtgttagcatggaacagaacgcttttcacaaaacaaaggactgttttacaaatgattattccgacagtgtgtcgacataaacttttacaactgcacagcagccaaaaaaagaaaaaaaaaagaaaaaaaactttaactggatggacgttgttagggtgagaaataaaaggacagcctccaaaggttgagaatgagaattgttttttcctggatatcaaagggattatcacagcgcaatcattgtctacacaacatgtactctcaacgcctgggttacataggaaatgcaccctgaggttttaataaaagcccctatggctataactttaaataaactaaaccaaaaatgttattgatgttttatatatagagagtagtctcattagtttttgttactgtaatgtttgaagtctcaaatgcaccgtattacggtaaataacatggttttgaaaacttttttttattttgtcacagacctgttgtcatagttgaaatgatgtttattgtagatggtatttgaacttattcttctggaaatagttcatcaagtatgtttgttgctcattgtgatacattaaaaactgtatctacatattta

SEQ ID NO: 6940 - protein, 1773 aa, Homo sapiens; identical to SEQ ID NO: 6930

SEQ ID NO: 6941 - DNA, 4565 bp, Homo sapiens
gaaaaggaaacctgttttaatgtgtttcttgtgcaagttgtcttttggttatatcaggtcatttgtaacccatgctgtgcatgatcatcggatgaccctcaatgacgaggagcagaagctcctcagtaataaatgcgtctccgccataatacaggggattggcaaagacaaagaacctcttataagctttctggaaccaaaaaaatccacttctgtttatccccatttttctactacaaacctcataggacccgatccaaccttccgcggtttatggagcgcttttcatgttgaaaatggtgactctttgccggctggctttgccttcttaaaaggaagcgcgagcacctcgagctcagcagagcagccgctggggattacccaaatgccaaaggctgaagtgaatctgggggggctgtctagtttagtagtgaacaccccaattacctctgtctccctcagccactcatcgtctgagtctagcaagatgtcagagagcaaagaccaagagaacaactgtgaaaggccaaaagaaagcaacgttttacacccaaacggggagtgccctgtcaaaagtgaacccactgaaccgggagatgaggatgaagaagatgcgtactccaatgaacttgatgacgaggaagtattaggtgaactcaccgatagtattggtaacaaagatttccctctcttaaaccaaagcatttctcctttatcatccagtgtgctaaaatttattgaaaagggtacctcgtcctcctcggcgactgtttctgatgacacagaaaagaaaaaacagactgctgctgttagggccagtggcagtgttgctagtaactatggcatcagtggcaaggactttgcagacgcaagtgccagtaaagacagtgccacagctgctcatccaagtgaaatagcccggggagacgaagacagttcagccactcctcaccagcatggctttaccccgagtactcctggcacaccagggcctggaggagacggctcaccgggcagtggcatcgagtgtccaaagtgcgacactgtgttggggtcttcgaggtctcttggtggtcatatgactatgatgcactcgaggaactcatgcaaaaccctcaaatgtcctaaatgtaactggcactacaaatatcagcagaccctggaggcccatatgaaggagaaacaccctgagccgggtggctcttgtgtttattgtaagactggacagcctcaccccaggcttgcccggggtgagagttacacgtgtggctataaacccttccgttgtgaggtttgtaactactctaccactaccaaaggcaacctcagtattcatatgcagtcggacaagcacctgaacaatgttcagaatctccaaaatggcaatggtgagcaggtgtttggccactctgccccagcccccaacaccagcctcagtggctgcggaacaccctctccgtccaaacccaaacagaaacccacctggcggtgtgaagtttgtgattatgaaaccaatgtcgccaggaacctccgaattcatatgaccagcgaaaagcacatgcataatatgatgcttttgcagcagaacatgaagcagatccagcataatctgcacttgggcctcgccccggcggaagcagagctttatcagtactacctagcccagaacataggcctgaccggaatgaagctggaaaaccctgccgaccctcagctgatgatcaatccattccagctggatccagcgacagcagcggctttggcaccagggctcgtaaataatgagctgccgcctgaaatccggcttgccagtggtcagctaatgggtgatgacctgtccctccttactgcaggagagctgtcaccttatatcagtgacccagcgctgaagctattccagtgtgctgtttgcaacaaattcacctctgacagcctggaggccctaagtgtgcatgtgagcagtgagcgctctctccctgaagaggaatggagggcagtaattggagatatctaccagtgcaagctctgcaactacaacactcagctcaaagccaacttccagctacactgcaagactgataaacatatgcagaaatatcaactggtggctcacattaaagaagggggcaaaagcaatgagtggaggttgaagtgtattgccattggcaaccctgttcacctaaaatgtaacgcctgtgactattacaccaacagtgtggataaattacgcttgcataccaccaatcacaggcacgaggcggccctgaagctctacaagcacttgcagaagcaagagggtgcagtgaatcccgaatcctgctattactactgtgccgtgtgtgattacaccaccaaggtcaagttgaatctggtacaacatgtccgttcggtgaagcatcagcagactgagggcctacggaagctccagctccaccagcaaggcctggcaccagaggaggacaacctcagtgagatcttttttgttaaagattgcccaccaaatgagcttgaaactgcctcattgggagccaggacttgtgatgatgatcttacagagcagcagttgagatcgacctcagaagaacaaagtgaggaggcagaaggagctattaagcctacagcagtggccgaggacgatgaaaaagacacaagtgagagagacaatagtgaaggcaaaaactctaataaagactctgggataatcacaccagagaaggaactaaaagttagtgtggcagggggtacccagccactcctgctggcaaaagaagaggatgttgcaacaaaaaggtcaaaacctacagaggacaataaattctgtcatgaacagttctatcaatgtccttattgtaactacaatagtagggaccaaagtcgtatccagatgcacgtcctatcacagcactcggtgcagccggtcatctgctgtcctctctgtcaggacgtcctcagcaacaaaatgcatctccaactgcatctgacgcatttgcacagtgtgtctccagactgtgtggagaagctgcttatgacagtgcctgtccctgatgtgatgatgccaaacagtatgctactgccagcagctgcctctgagaaatcagagcgggacacacctgcagccgtgacagctgaggggtctgggaaatattcaggtgaaagtccaatggatgacaaaagcatggcaggtctcgaggattcaaaggctaatgtggaagtaaagaatgaggagcagaaaccgactaaagaacccttggaagtctcagaatggaataaaaatagcagtaaggatgtgaaaatccccgacacactgcaagatcaattaaatgaacagcaaaaaaggcaaccgctctctgtttctgaccgtcatgtctacaagtatcgctgtaaccattgtagcttggctttcaaaactatgcagaagcttcagatacattcccagtatcatgcaattcgggctgcgacaatgtgtaacctctgccagcgcagtttccgtacattccaggctttaaaaaaacacttggaagcaggccaccctgaactgagtgaagctgaacttcaacagctatatgcctccttgcccgtgaatggagaactgtgggcagagagcgaaactatgtcccaggatgaccatggcctagagcaggaaatggagagagagtatgaggtggaccacgaagggaaagcaagtcctgtaggaagtgatagtagctctattccagatgacatgggctctgaaccaaagcggaccttaccttttagaaaagggcccaattttacgatggaaaaattccttgatccatctcgtccatataaatgtacagtgtgtaaagagtcattcacccaaaagaacattctcttggtccactataattcagtttctcacttgcataagctgaaaaaagttttgcaggaagcctccagtcctgtcccacaagaaaccaacagcaacacagataacaaaccctacaagtgcagcatctgcaatgttgcatacagccaaagctcaacattggaaatccacatgaggtctgtgctccaccagacaaaggctagggctgcaaagctggagcccagtggtcatgtggctggtgggcacagcattgcagcaaatgtcaacagccctggccaggggatgttagattccatgagtttagcagctgtaaacagcaaagatacccatttagatgccaaagaattaaataaaaagcaaactcctgatttaatctctgctcaacctgcacatcacccaccacagtcaccagcacaaattcagatgcaactacagcacgaattacaacagcaagccgcattctttcagcctcagtttctaaacccagcctttttgcctcattttcctatgaccccagaagcactgctgcagtttcagcagcctcagtttctctttccattttatatacctgggacggagttcagcttggggccagatttgggcttgccaggctctgccacatttgggatgcctggcatgacaggaatggctggctccttgcttgaagacctaaagcagcagattcaaacccaacatcacgttggtcaaactcaactcc

SEQ ID NO: 6942 - protein, 1514 aa, Homo sapiens
MCFLCKLSFGYIRSFVTHAVHDHRMTLNDEEQKLLSNKCVSAIIQGIGKDKEPLISFLEPKKSTSVYPHFSTTNLIGPDPTFRGLWSAFHVENGDSLPAGFAFLKGSASTSSSAEQPLGITQMPKAEVNLGGLSSLVVNTPITSVSLSHSSSESSKMSESKDQENNCERPKESNVLHPNGECPVKSEPTEPGDEDEEDAYSNELDDEEVLGELTDSIGNKDFPLLNQSISPLSSSVLKFIEKGTSSSSATVSDDTEKKKQTAAVRASGSVASNYGISGKDFADASASKDSATAAHPSEIARGDEDSSATPHQHGFTPSTPGTPGPGGDGSPGSGIECPKCDTVLGSSRSLGGHMTMMHSRNSCKTLKCPKCNWHYKYQQTLEAHMKEKHPEPGGSCVYCKTGQPHPRLARGESYTCGYKPFRCEVCNYSTTTKGNLSIHMQSDKHLNNVQNLQNGNGEQVFGHSAPAPNTSLSGCGTPSPSKPKQKPTWRCEVCDYETNVARNLRIHMTSEKHMHNMMLLQQNMKQIQHNLHLGLAPAEAELYQYYLAQNIGLTGMKLENPADPQLMINPFQLDPATAAALAPGLVNNELPPEIRLASGQLMGDDLSLLTAGELSPYISDPALKLFQCAVCNKFTSDSLEALSVHVSSERSLPEEEWRAVIGDIYQCKLCNYNTQLKANFQLHCKTDKHMQKYQLVAHIKEGGKSNEWRLKCIAIGNPVHLKCNACDYYTNSVDKLRLHTTNHRHEAALKLYKHLQKQEGAVNPESCYYYCAVCDYTTKVKLNLVQHVRSVKHQQTEGLRKLQLHQQGLAPEEDNLSEIFFVKDCPPNELETASLGARTCDDDLTEQQLRSTSEEQSEEAEGAIKPTAVAEDDEKDTSERDNSEGKNSNKDSGIITPEKELKVSVAGGTQPLLLAKEEDVATKRSKPTEDNKFCHEQFYQCPYCNYNSRDQSRIQMHVLSQHSVQPVICCPLCQDVLSNKMHLQLHLTHLHSVSPDCVEKLLMTVPVPDVMMPNSMLLPAAASEKSERDTPAAVTAEGSGKYSGESPMDDKSMAGLEDSKANVEVKNEEQKPTKEPLEVSEWNKNSSKDVKIPDTLQDQLNEQQKRQPLSVSDRHVYKYRCNHCSLAFKTMQKLQIHSQYHAIRAATMCNLCQRSFRTFQALKKHLEAGHPELSEAELQQLYASLPVNGELWAESETMSQDDHGLEQEMEREYEVDHEGKASPVGSDSSSIPDDMGSEPKRTLPFRKGPNFTMEKFLDPSRPYKCTVCKESFTQKNILLVHYNSVSHLHKLKKVLQEASSPVPQETNSNTDNKPYKCSICNVAYSQSSTLEIHMRSVLHQTKARAAKLEPSGHVAGGHSIAANVNSPGQGMLDSMSLAAVNSKDTHLDAKELNKKQTPDLISAQPAHHPPQSPAQIQMQLQHELQQQAAFFQPQFLNPAFLPHFPMTPEALLQFQQPQFLFPFYIPGTEFSLGPDLGLPGSATFGMPGMTGMAGSLLEDLKQQIQTQHHVGQTQ

SEQ ID NO: 6943 - DNA, 422 bp, Homo sapiens
caaggtcaagttgaatctggtacaacatgtccgttcggtgaagcatcagcagactgagggcctacggaagctccagctccaccagcaaggcctggcaccagaggaggacaacctcagtgagatcttttttgttaaagattgcccaccaaatgagcttgaaactgcctcattgggagccaggacttgtgatgatgatcttacagagcagcagttgagatcgacctcaggtaatggttcctactccttctcaaaatatttccttgtcctaaatgagttgcttttgttactctcataattgatggaataaacattctctggaacttctctaattagatctgatcatatgccttattcaaataagtaaaaagcaaaatgaaataaattcaataattggaagtatatgtaaattgactttacatttt

SEQ ID NO: 6944 - protein, 97 aa, Homo sapiens
KVKLNLVQHVRSVKHQQTEGLRKLQLHQQGLAPEEDNLSEIFFVKDCPPNELETASLGARTCDDDLTEQQLRSTSGNGSYSFSKYFLVLNELLLLLS

SEQ ID NO: 6945 - DNA, 623 bp, Homo sapiens
gtatttcttcagagctaattaaagctctgttattgctcgtgttatagtagtcacactcaaggcccatttgtgacctcttttgcttggaaaaaaatatggtacaaggcatagcttagtaaagaacattattttgcagtcttctttttatatctataatgttcatcaaataaccccagtgggcaccttgcatttcaaacttgcttcattatcattataaaaaaataaacctacaggaacctttaagccataataataataatacaacattgccacagcattgatctaaagtggcaaggtgtggcattgatctgtaacatctgcaaaacatccctgctttggctaaaataaacaaatgtaagtgggatatgctaccagcaaaagagagatgtgatggaatttgtgatttctggggtacatttaacataaacccctttggtttccaaaggtgcctgtccctgatgtgatgatgccaaacagtatgctactgccagcagctgcctctgagaaatcagagcgggacacacctgcagccgtgacagctgaggggtctgggaaatattcaggtgaaagtccaatggatgacaaaagcatggcaggtctcgaggattcaaaggctaatgtgg

SEQ ID NO: 6946 - protein, 52 aa, Homo sapiens
MMPNSMLLPAAASEKSERDTPAAVTAEGSGKYSGESPMDDKSMAGLEDSKAN

SEQ ID NO: 6947 - DNA, 5775 bp, Homo sapiens
gggcttattttgacattaataattctccaagtgaagaacagatccaggaaatggcagagaaatctggcctctcccaaaaagttatcaaacactggtttagaaatacgctttttaaggaacgacagagaaataaagattcaccatacaacttcagtaaccctcctataacggttttagaagatatcagaattgatccacagcccacctctttagaacattacaaatctgatgcatcattcagtaaaaggtcttctagaacgagatttactgactaccagcttagggttctgcaagacttttttgacacaaacgcttacccaaaagatgatgaaatagaacaactctccactgttctcaatctgcctacccgggttattgttgtatggttccagaatgctcgtcagaaagcacgaaagagttatgagaatcaagcagaaacaaaagataatgaaaaaagagaactcactaatgaacggtacattcgaacaagcaacatgcagtaccagtgtaaaaagtgcaatgtggttttccccaggatctttgacttgattacgcatcagaaaaagcagtgttacaaggatgaagatgatgatgcccaagatgaaagccaaacagaagactccatggatgccactgatcaagtggtatacaagcattgcacagtgtctggccaaacggatgcagctaaaaacgctgctgcccctgcagcaagttctggctctgggaccagcacccccctgattccatcacccaaaccagaacctgagaagacttctccaaaacctgaatatcccgcagaaaagccaaagcagagtgacccctctcccccttctcaaggcaccaaaccagccctgccattagcatcgacttcctcggacccaccacaggcatccacagcccagccacagccacagccacagccaccaaaacaaccccaacttatcggaagacctccctcggcctctcaaacaccggtcccttccagtccactgcaaatttccatgacgtctctccagaacagtctacctccacagttactacaataccaatgtgatcagtgtacagttgccttcccaactctggaactctggcaggaacaccagcacatgcacttccttgctgctcaaaaccaattccttcactctccgttcttggaaaggcccatggacatgccctacatgatatttgaccccaacaatccgctgatgactggacaactgctgggcagttccctcactcaaatgccccctcaggccagttcctcccacaccacagcccccacaacggttgctgcttccctaaaaaggaaactagacgataaagaagataataattgcagtgaaaaagaaggagggaatagcggtgaagaccaacaccgagataaacgcttgagaaccacgatcaccccggaacagctggaaatactctatgaaaaatacttgctggattccaatcctaccagaaaaatgcttgatcatattgcccgcgaagtcgggctgaaaaaaagggtcgtgcaagtctggttccagaatacacgagcgcgggagaggaaaggccagttccgggcggtgggtccagcacagtctcataaacggtgtccgttttgccgagccctgtttaaagcaaagtcggccttagaaagccacattcgctctcggcactggaatgaaggaaagcaggcaggttacagcttgccaccaagccctttaatatccaccgaagatgggggagaaagcccacagaaatacatctattttgattacccatctttgccattaactaaaattgatctatcaagtgagaatgaattggcttctacagtgtcaacacctgttagtaaaacagcagagctgtcaccgaagaatcttttaagcccttcttcttttaaagcagagtgttctgaggatgtagagaatttaaatgcccctcctgctgaggctgggtatgatcaaaataaaaccgattttgatgagacttcatcgattaatacggcaatcagtgacgccaccaccggagacgagggaaacactgaaatggaaagcaccacaggaagttccggagatgtgaaaccggctttgtctcccaaagagccaaaaactctggatactctgccaaaacctgcaaccacacctaccacggaggtctgcgatgacaaatttctcttttctctcacaagcccatccatccatttcaatgacaaagatggcgaccacgaccaaagcttttacatcacagatgacccggatgacaacgccgaccgcagcgaaacgtccagcatagcggacccgagctccccaaatccattcggatccagcaatccctttaaatccaaaagtaatgatcggccgggtcacaagcgttttcgaacgcaaatgagcaatcttcaactcaaggttctcaaggcttgctttagtgactaccgaactccaaccatgcaagaatgtgaaatgttagggaatgagattggtctgcccaaacgcgtagtccaggtgtggttccaaaatgcaagggcaaaggaaaagaaatttaaaattaacatagggaagcctttcatgatcaatcaaggcggaacggaaggcaccaaaccagagtgtaccctctgcggggtgaagtactctgcccgcttgtccatcagagatcacattttctccaaacagcacatttcaaaagtgagggagaccgttggcagtcagctcgatcgggagaaagattacttggctccgaccacggttcggcagctgatggcacagcaagaacttgatcgtataaagaaagcttcagacgtgctgggcttgacggtacagcagccaggcatgatggacagcagttctctccacggcatcagcctgccaacagcctaccccggactccccggccttcctccagtccttctccccggaatgaacggtccatcctccttgccgggatttccacaaaattcaaacactttaacacctcccggtgcaggcatgcttgggtttcctacttcagctacttcgtctcctgccctgtctctcagcagtgcccccaccaaacctttgctgcagactccaccacctccaccacctcctcctcctcctcctccttcatcctctctgtcaggacagcagaccgagcaacagaacaaagaatctgagaaaaagcaaactaagccaaacaaggtgaaaaaaatcaaagaggaggaattagaggccaccaaacccgaaaaacaccccaaaaaagaggaaaaaatctcatctgctctttcagtgttgggcaaagttgtaggtgaaacacatgtcgatcctattcagttgcaggcattacagaatgcaattgctggtgacccagcttcctttataggcggacagttcttgccatactttatccctgggtttgcttcttattttacacctcagctccctggaacagtgcaggggggatacttcccacctgtctgtggcatggagagcctctttccttatggccctacaatgccccagacactggcaggtctgtccccaggtgcactgttgcagcagtaccaacagtatcagcagaacctgcaggagtccctgcaaaagcagcaaaagcaacagcaagaacagcagcagaaaccagttcaggcaaagacatccaaagtagaaagtgaccagccgcaaaactccaacgatgcttcagaaacaaaggaagacaaaagtactgctacagaaagcacaaaagaagaaccccagttagaatccaaaagtgcagacttttcagacacttacgttgttccattcgtcaagtatgagtttatatgcagaaagtgccagatgatgtttactgatgaagacgccgcagtaaatcatcaaaagtccttctgttatttcggtcagcctttgattgacccacaagagacagtgcttcgtgtcccagtcagcaaatatcagtgtcttgcctgtgatgtggctatcagtgggaatgaagcacttagccaacacctccagtcaagcttgcacaaagagaaaacaatcaaacaagcaatgagaaatgccaaagagcatgttagattattacctcactcagtctgctcccctaatcctaacaccacatctacctcgcagtctgcagcttcttctaataacacctatcctcatctttcttgcttctccatgaagtcctggcctaatatccttttccaagcgtctgccaggagagctgcttctcccccttcttctcctccttccctttccttgccttcaacggttacctcaagtttgtgcagcacctcaggggttcaaacctcactacccacagaaagttgttcagatgagtctgacagtgagctgagccagaagctagaagacttagataattctttggaagtgaaggctaagcctgcttctggcctagatggtaatttcaatagcatccgaatggatatgttcagtgtgtaggagtgaagacaggatcccgtgcttaaaaaaataaaaaataaaaaaataaaaaaaaaataagactttaactgcagttccaaagcttctctaacccaaaaattacagtaccaaatgattgactcaggattgtttttcccatattgatatgctggcaatataggatggtatgtaatggacagaactgatgcagatggttgaatgcgcttgtactatatgctaaaatatggaaaaggaaaaaaaaatctcacaagttcttttggaacttgtttcaagccaaaaactctcaagaaagcaaattgcacctcagctggattgatttccaaatgctagcatgtactgtatgggaggatgatccagatgtttcaaagagaatttctcttagtttagttaggtgtaattcagtagctttaaattctcaggtcagaacataacatttctcatttgttaaaagcagcaagaagcctggtaaaactgtgacttttccccaaacgtcaatctttattagaaagcattttctaggtgtgtttagtgtacaaagagactttataacccttactggacaacacacagatccttgagctcacgctgcaggatagtacagttttaccgcagagggaatctggaacagtggaatcatgtgtctgccctgtgtattgcagtttgtattgccacaagctatatttataccagtgtcacccttttcttgtagaatatactaataatctgtgccaactctaccttctcacttttacctctgacgtcattctttttttctgaaagaggtaataattctagttttgatagactctgaggattatgtgaacaggacatttttcatttgtgaatttaatgctatactgtcaaggtacttgcttgtgtctgaactctagtgcacttatgattttgtagaccatgtgaaatttaataagataccttttttttcctttctttgtgtgtagtgcagcaacagtttggtctgcatttgttagaagtttaactcctaacaacccaaagacctatttaacaattggtgcataaatgaaagtagtactgtatacttgaaactgtttaagtacaagttgaacaaaaattatgaaaaggtatatttgcttctcgggaaagcaaagaagctgctttaaaaaataaaaaggggactaaaaatttgttttgtataaagaggttagccctgcgcacgtaggactgaattcagtgatatccctatacactgccatttagtggataggttattgtacttccattcatactctgggcacttgtgttgtattgttctgttacatactttttttaacctgttttgttttatcatatatgcattaaaagtattatctttatcaac

SEQ ID NO: 6948 - protein, 1455 aa, Homo sapiens
MAEKSGLSQKVIKHWFRNTLFKERQRNKDSPYNFSNPPITVLEDIRIDPQPTSLEHYKSDASFSKRSSRTRFTDYQLRVLQDFFDTNAYPKDDEIEQLSTVLNLPTRVIVVWFQNARQKARKSYENQAETKDNEKRELTNERYIRTSNMQYQCKKCNVVFPRIFDLITHQKKQCYKDEDDDAQDESQTEDSMDATDQVVYKHCTVSGQTDAAKNAAAPAASSGSGTSTPLIPSPKPEPEKTSPKPEYPAEKPKQSDPSPPSQGTKPALPLASTSSDPPQASTAQPQPQPQPPKQPQLIGRPPSASQTPVPSSPLQISMTSLQNSLPPQLLQYQCDQCTVAFPTLELWQEHQHMHFLAAQNQFLHSPFLERPMDMPYMIFDPNNPLMTGQLLGSSLTQMPPQASSSHTTAPTTVAASLKRKLDDKEDNNCSEKEGGNSGEDQHRDKRLRTTITPEQLEILYEKYLLDSNPTRKMLDHIAREVGLKKRVVQVWFQNTRARERKGQFRAVGPAQSHKRCPFCRALFKAKSALESHIRSRHWNEGKQAGYSLPPSPLISTEDGGESPQKYIYFDYPSLPLTKIDLSSENELASTVSTPVSKTAELSPKNLLSPSSFKAECSEDVENLNAPPAEAGYDQNKTDFDETSSINTAISDATTGDEGNTEMESTTGSSGDVKPALSPKEPKTLDTLPKPATTPTTEVCDDKFLFSLTSPSIHFNDKDGDHDQSFYITDDPDDNADRSETSSIADPSSPNPFGSSNPFKSKSNDRPGHKRFRTQMSNLQLKVLKACFSDYRTPTMQECEMLGNEIGLPKRVVQVWFQNARAKEKKFKINIGKPFMINQGGTEGTKPECTLCGVKYSARLSIRDHIFSKQHISKVRETVGSQLDREKDYLAPTTVRQLMAQQELDRIKKASDVLGLTVQQPGMMDSSSLHGISLPTAYPGLPGLPPVLLPGMNGPSSLPGFPQNSNTLTPPGAGMLGFPTSATSSPALSLSSAPTKPLLQTPPPPPPPPPPPPSSSLSGQQTEQQNKESEKKQTKPNKVKKIKEEELEATKPEKHPKKEEKISSALSVLGKVVGETHVDPIQLQALQNAIAGDPASFIGGQFLPYFIPGFASYFTPQLPGTVQGGYFPPVCGMESLFPYGPTMPQTLAGLSPGALLQQYQQYQQNLQESLQKQQKQQQEQQQKPVQAKTSKVESDQPQNSNDASETKEDKSTATESTKEEPQLESKSADFSDTYVVPFVKYEFICRKCQMMFTDEDAAVNHQKSFCYFGQPLIDPQETVLRVPVSKYQCLACDVAISGNEALSQHLQSSLHKEKTIKQAMRNAKEHVRLLPHSVCSPNPNTTSTSQSAASSNNTYPHLSCFSMKSWPNILFQASARRAASPPSSPPSLSLPSTVTSSLCSTSGVQTSLPTESCSDESDSELSQKLEDLDNSLEVKAKPASGLDGNFNSIRMDMFSV

SEQ ID NO: 6949 - DNA, 7138 bp, Homo sapiens
gggcttattttgacattaataattctccaagtgaagaacagatccaggaaatggcagagaaatctggcctctcccaaaaagttatcaaacactggtttagaaatacgctttttaaggaacgacagagaaataaagattcaccatacaacttcagtaaccctcctataacggttttagaagatatcagaattgatccacagcccacctctttagaacattacaaatctgatgcatcattcagtaaaaggtcttctagaacgagatttactgactaccagcttagggttctgcaagacttttttgacacaaacgcttacccaaaagatgatgaaatagaacaactctccactgttctcaatctgcctacccgggttattgttgtatggttccagaatgctcgtcagaaagcacgaaagagttatgagaatcaagcagaaacaaaagataatgaaaaaagagaactcactaatgaacggtacattcgaacaagcaacatgcagtaccagtgtaaaaagtgcaatgtggttttccccaggatctttgacttgattacgcatcagaaaaagcagtgttacaaggatgaagatgatgatgcccaagatgaaagccaaacagaagactccatggatgccactgatcaagtggtatacaagcattgcacagtgtctggccaaacggatgcagctaaaaacgctgctgcccctgcagcaagttctggctctgggaccagcacccccctgattccatcacccaaaccagaacctgagaagacttctccaaaacctgaatatcccgcagaaaagccaaagcagagtgacccctctcccccttctcaaggcaccaaaccagccctgccattagcatcgacttcctcggacccaccacaggcatccacagcccagccacagccacagccacagccaccaaaacaaccccaacttatcggaagacctccctcggcctctcaaacaccggtcccttccagtccactgcaaatttccatgacgtctctccagaacagtctacctccacagttactacaataccaatgtgatcagtgtacagttgccttcccaactctggaactctggcaggaacaccagcacatgcacttccttgctgctcaaaaccaattccttcactctccgttcttggaaaggcccatggacatgccctacatgatatttgaccccaacaatccgctgatgactggacaactgctgggcagttccctcactcaaatgccccctcaggccagttcctcccacaccacagcccccacaacggttgctgcttccctaaaaaggaaactagacgataaagaagataataattgcagtgaaaaagaaggagggaatagcggtgaagaccaacaccgagataaacgcttgagaaccacgatcaccccggaacagctggaaatactctatgaaaaatacttgctggattccaatcctaccagaaaaatgcttgatcatattgcccgcgaagtcgggctgaaaaaaagggtcgtgcaagtctggttccagaatacacgagcgcgggagaggaaaggccagttccgggcggtgggtccagcacagtctcataaacggtgtccgttttgccgagccctgtttaaagcaaagtcggccttagaaagccacattcgctctcggcactggaatgaaggaaagcaggcaggttacagcttgccaccaagccctttaatatccaccgaagatgggggagaaagcccacagaaatacatctattttgattacccatctttgccattaactaaaattgatctatcaagtgagaatgaattggcttctacagtgtcaacacctgttagtaaaacagcagagctgtcaccgaagaatcttttaagcccttcttcttttaaagcagagtgttctgaggatgtagagaatttaaatgcccctcctgctgaggctgggtatgatcaaaataaaaccgattttgatgagacttcatcgattaatacggcaatcagtgacgccaccaccggagacgagggaaacactgaaatggaaagcaccacaggaagttccggagatgtgaaaccggctttgtctcccaaagagccaaaaactctggatactctgccaaaacctgcaaccacacctaccacggaggtctgcgatgacaaatttctcttttctctcacaagcccatccatccatttcaatgacaaagatggcgaccacgaccaaagcttttacatcacagatgacccggatgacaacgccgaccgcagcgaaacgtccagcatagcggacccgagctccccaaatccattcggatccagcaatccctttaaatccaaaagtaatgatcggccgggtcacaagcgttttcgaacgcaaatgagcaatcttcaactcaaggttctcaaggcttgctttagtgactaccgaactccaaccatgcaagaatgtgaaatgttagggaatgagattggtctgcccaaacgcgtagtccaggtgtggttccaaaatgcaagggcaaaggaaaagaaatttaaaattaacatagggaagcctttcatgatcaatcaaggcggaacggaaggcaccaaaccagagtgtaccctctgcggggtgaagtactctgcccgcttgtccatcagagatcacattttctccaaacagcacatttcaaaagtgagggagaccgttggcagtcagctcgatcgggagaaagattacttggctccgaccacggttcggcagctgatggcacagcaagaacttgatcgtataaagaaagcttcagacgtgctgggcttgacggtacagcagccaggcatgatggacagcagttctctccacggcatcagcctgccaacagcctaccccggactccccggccttcctccagtccttctccccggaatgaacggtccatcctccttgccgggatttccacaaaattcaaacactttaacacctcccggtgcaggcatgcttgggtttcctacttcagctacttcgtctcctgccctgtctctcagcagtgcccccaccaaacctttgctgcagactccaccacctccaccacctcctcctcctcctcctccttcatcctctctgtcaggacagcagaccgagcaacagaacaaagaatctgagaaaaagcaaactaagccaaacaaggtgaaaaaaatcaaagaggaggaattagaggccaccaaacccgaaaaacaccccaaaaaagaggaaaaaatctcatctgctctttcagtgttgggcaaagttgtaggtgaaacacatgtcgatcctattcagttgcaggcattacagaatgcaattgctggtgacccagcttcctttataggcggacagttcttgccatactttatccctgggtttgcttcttattttacacctcagctccctggaacagtgcaggggggatacttcccacctgtctgtggcatggagagcctctttccttatggccctacaatgccccagacactggcaggtctgtccccaggtgcactgttgcagcagtaccaacagtatcagcagaacctgcaggagtccctgcaaaagcagcaaaagcaacagcaagaacagcagcagaaaccagttcaggcaaagacatccaaagtagaaagtgaccagccgcaaaactccaacgatgcttcagaaacaaaggaagacaaaagtactgctacagaaagcacaaaagaagaaccccagttagaatccaaaagtgcagacttttcagacacttacgttgttccattcgtcaagtatgagtttatatgcagaaagtgccagatgatgtttactgatgaagacgccgcagtaaatcatcaaaagtccttctgttatttcggtcagcctttgattgacccacaagagacagtgcttcgtgtcccagtcagcaaatatcagtgtcttgcctgtgatgtggctatcagtgggaatgaagcacttagccaacacctccagtcaagcttgcacaaagagaaaacaatcaaacaagcaatgagaaatgccaaagagcatgttagattattacctcactcagtctgctcccctaatcctaacaccacatctacctcgcagtctgcagcttcttctaataacacctatcctcatctttcttgcttctccatgaagtcctggcctaatatccttttccaagcgtctgccaggagagctgcttctcccccttcttctcctccttccctttccttgccttcaacggttacctcaagtttgtgcagcacctcaggggttcaaacctcactacccacagaaagttgttcagatgagtctgacagtgagctgagccagaagctagaagacttagataattctttggaagtgaaggctaagcctgcttctggcctagatggtaatttcaatagcatccgaatggatatgttcagtgtgtaggagtgaagacaggatcccgtgcttaaaaaaataaaaaataaaaaaataaaaaaaaaataagactttaactgcagttccaaagcttctctaacccaaaaattacagtaccaaatgattgactcaggattgtttttcccatattgatatgctggcaatataggatggtatgtaatggacagaactgatgcagatggttgaatgcgcttgtactatatgctaaaatatggaaaaggaaaaaaaaatctcacaagttcttttggaacttgtttcaagccaaaaactctcaagaaagcaaattgcacctcagctggattgatttccaaatgctagcatgtactgtatgggaggatgatccagatgtttcaaagagaatttctcttagtttagttaggtgtaattcagtagctttaaattctcaggtcagaacataacatttctcatttgttaaaagcagcaagaagcctggtaaaactgtgacttttccccaaacgtcaatctttattagaaagcattttctaggtgtgtttagtgtacaaagagactttataacccttactggacaacacacagatccttgagctcacgctgcaggatagtacagttttaccgcagagggaatctggaacagtggaatcatgtgtctgccctgtgtattgcagtttgtattgccacaagctatatttataccagtgtcacccttttcttgtagaatatactaataatctgtgccaactctaccttctcacttttacctctgacgtcattctttttttctgaaagaggtaataattctagttttgatagactctgaggattatgtgaacaggacatttttcatttgtgaatttaatgctatactgtcaaggtacttgcttgtgtctgaactctagtgcacttatgattttgtagaccatgtgaaatttaataagataccttttttttcctttctttgtgtgtagtgcagcaacagtttggtctgcatttgttagaagtttaactcctaacaacccaaagacctatttaacaattggtgcataaatgaaagtagtactgtatacttgaaactgtttaagtacaagttgaacaaaaattatgaaaaggtatatttgcttctcgggaaagcaaagaagctgctttaaaaaataaaaaggggactaaaaatttgttttgtataaagaggttagccctgcgcacgtaggactgaattcagtgatatccctatacactgccatttagtggataggttattgtacttccattcatactctgggcacttgtgttgtattgttctgttacatactttttttaacctgttttgttttatcatatatgcattaaaagtattatctttatcaacatttgctgctactgtgttaacatttttgttttgcttgccatgaatttcaacttccaccacccagtgaattgatttataaattgctatgctttgctgtttttctgttgctgtggaacttaaagaatgtgaaagctgtcaaagggtattttacgaatcacttttgtgtttgatatagtaaaacaatgtgattcattccaaagtaacagaaggttatttgtaagaaagttaaaggcttgtgaacaaagaaagctaagctgttgtacatatttgtagttggctgtgcatggtacaaatttattaatatgaagaaatgcaaaatgtattgcttttgatatttctcttccgagatgaacaagtagcatgtaatgcaactgtttgacagtttaactcaagtcatgcttcaaactgttttaatgatcaaatcaagacacatttcattttacattttattattgtacagtttttgtttcggatgatgatcacagcaatctttattctatacattttatgtgaacttttttaatgtctttaatttggattttttttttttttagtattttaacatttattttaatcctgaagacacttttttgattgtgtttcgtaagagacaacatggcctcctaaggtgcaatcctgccgctatagtgagctaatgtcctgaatccaaaggcttcagaaaattgcttttgcctttttcatgaatgttaagcagcagcattgtgagatcgatctgtcctggcagttaacacgatgtgcaacagtgtgttagcatggaacagaacgcttttcacaaaacaaaggactgttttacaaatgattattccgacagtgtgtcgacataaacttttacaactgcacagcagccaaaaaaagaaaaaaaaaagaaaaaaaactttaactggatggacgttgttagggtgagaaataaaaggacagcctccaaaggttgagaatgagaattgttttttcctggatatcaaagggattatcacagcgcaatcattgtctacacaacatgtactctcaacgcctgggttacataggaaatgcaccctgaggttttaataaaagcccctatggctataactttaaataaactaaaccaaaaatgttattgatgttttatatatagagagtagtctcattagtttttgttactgtaatgtttgaagtctcaaatgcaccgtattacggtaaataacatggttttgaaaacttttttttattttgtcacagacctgttgtcatagttgaaatgatgtttattgtagatggtatttgaacttattcttctggaaatagttcatcaagtatgtttgttgctcattgtgatacattaaaaactgtatctacatattta

SEQ ID NO: 6950 - protein, 1455 aa, Homo sapiens; identical to SEQ ID NO: 6948

SEQ ID NO: 6951 - DNA, 651 bp, Homo sapiens
cgcaacttatctttcctggtttgagttatacagtcagctgaggtgtagaaaatccactatgggaagtaaatccaataacttattggggagaaacttctcttcatttgggctgccacgtgaaaaacttgggccccatggggatcttggataatagttgtgattgatgtccagttaaagcccttcccacgccatctttcttcttcttcatgaaagactgtttgaaaaggtactagatacattaacatcaaggggaagatcttcattccagtaacgaagtctccattctcttttctcctgccactaaactgaactcaaagatggccttttttttttctggatacagtgaatattctcttagtttaaaagggattgtcttccttctggagggtagttcagagagaaaaagcaaggctaagaaggtgaggaggacaagtcttgggcaagtgtgacttagtgaggagaatcatacaaacagacatccatttcctaaagtgtgccagaagcctcttttatctgcatcaggatctctttaaagatgtccatcttgctgagataaaaatgtatacatgtacccaaacattacactgtgccctattaatttgtacaattattattcatcaattaaagatcaaataaaacattaaaaatgtc

SEQ ID NO: 6952 - protein, 30 aa, Homo sapiens
MGSKSNNLLGRNFSSFGLPREKLGPHGDLG

SEQ ID NO: 6953 - DNA, 553 bp, Homo sapiens
attctcaaatgacagaaaaactgagagcattggtcaccacatagcaaatataaagcatggttaaaggaagttatctttaaaggatacacagttttaaaaagaaacatttgaacatcaagaaaaataaataacatgttggaatggagataagatggcagcaactggaataaatatttttgtaccaggagatggaagctaaatatcgagggtgaatagtagcaaggtatgttgagccggggcacttgacgatctcatggaagaagaccttgataacaaaggaacatttacacaggagagaaatgaacttccgaaccgtgtaagctcttgtgaactatggagatctgtttcaatagcaaatcattgtcttaactaatatcaccaggttttctatattaaattgactatgtggcaggtaaaattatttaaaaataatatctataataaaaatgtttttcaaatatatggacaggtaaaaaatatatcagccacgaagaagatacaatcagtctggctttggaactagatgcttatggagagtacctgcttcaacttt

SEQ ID NO: 6954 - protein, 39 aa, Homo sapiens
MWQVKLFKNNIYNKNVFQIYGQVKNISATKKIQSVWLWN

SEQ ID NO: 6955 - DNA, 808 bp, Homo sapiens
gagttgcggtgcgttgtggctcagccctcggcccctagaatctgtgcttggtgtttttcttcctttcgttgtccttttgtgtggcatttgcgtactgggccgggtctgtccacactgcgcttgttttcctgggattgaatgctggtgggaagagatggggttttgccatgttgcccaggctggtcttgaactcctgggttcaagtgatcctcctgcgttggcctcccaaagtgctgggattacagatgacagatatgggacctgcaaaggataaactggtcattggacggatctttcatattgtggagaatgatctgtacatagattttggtggaaagtttcattgtgtatgtagaagaccagaagtggatggagagaaataccagaaaggaaccagggtccggttgcggctattagatcttgaacttacgtctaggttcctgggagcaacaacagatacaactgtactagaggctaatgcagttctcttgggaatccaggagagtaaagactcaagatcgaaagaagaacatcatgaaaaataaatgaactttgcttagtggattgactcctttgctgaagtcagttattcatcaagaatgcaattagactaattgtgaataaatgattgaatgaagatataataaataaaagctataattatagataactcttattagaattttctttagcaatattcccaccccccaccccttgttttgctcttaatgtttttttcctttggtggggatagtatacactgtactaagaaattgtcattcaataaatacgttttgagtgctgtcta

SEQ ID NO: 6956 - protein, 125 aa, Homo sapiens
MLPRLVLNSWVQVILLRWPPKVLGLQMTDMGPAKDKLVIGRIFHIVENDLYIDFGGKFHCVCRRPEVDGEKYQKGTRVRLRLLDLELTSRFLGATTDTTVLEANAVLLGIQESKDSRSKEEHHEK

SEQ ID NO: 6957 - DNA, 675 bp, Homo sapiens
ggggcggagcctggcttaggaaggggagctgaggtccggggcccagttttccggagttgcgggttctccaaaaaatgtggaatcctttgcatctatgctgagacattctcctcttacacagatgggacctgcaaaggataaactggtcattggacggatctttcatattgtggagaatgatctgtacatagattttggtggaaagtttcattgtgtatgtagaagaccagaagtggatggagagaaataccagaaaggaaccagggtccggttgcggctattagatcttgaacttacgtctaggttcctgggagcaacaacagatacaactgtactagaggctaatgcagttctcttgggaatccaggagagtaaagactcaagatcgaaagaagaacatcatgaaaaataaatgaactttgcttagtggattgactcctttgctgaagtcagttattcatcaagaatgcaattagactaattgtgaataaatgattgaatgaagatataataaataaaagctataattatagataactcttattagaattttctttagcaatattcccaccccccaccccttgttttgctcttaatgtttttttcctttggtggggatagtatacactgtactaagaaattgtcattcaataaatacgttttgagtgctgtcta

SEQ ID NO: 6958 - protein, 105 aa, Homo sapiens
MLRHSPLTQMGPAKDKLVIGRIFHIVENDLYIDFGGKFHCVCRRPEVDGEKYQKGTRVRLRLLDLELTSRFLGATTDTTVLEANAVLLGIQESKDSRSKEEHHEK

SEQ ID NO: 6959 - DNA, 726 bp, Homo sapiens
tcgggaataggggcggagcctggcttaggaaggggagctgaggtccggggcccagttttccggagttgcgagatggggttttgccatgttgcccaggctggtcttgaactcctgggttcaagtgatcctcctgcgttggcctcccaaagtgctgggattacagatgacagatatgggacctgcaaaggataaactggtcattggacggatctttcatattgtggagaatgatctgtacatagattttggtggaaagtttcattgtgtatgtagaagaccagaagtggatggagagaaataccagaaaggaaccagggtccggttgcggctattagatcttgaacttacgtctaggttcctgggagcaacaacagatacaactgtactagaggctaatgcagttctcttgggaatccaggagagtaaagactcaagatcgaaagaagaacatcatgaaaaataaatgaactttgcttagtggattgactcctttgctgaagtcagttattcatcaagaatgcaattagactaattgtgaataaatgattgaatgaagatataataaataaaagctataattatagataactcttattagaattttctttagcaatattcccaccccccaccccttgttttgctcttaatgtttttttcctttggtggggatagtatacactgtactaagaaattgtcattcaataaatacgttttgagtgctgtcta

SEQ ID NO: 6960 - protein, 125 aa, Homo sapiens; identical to SEQ ID NO: 6956

SEQ ID NO: 6961 - DNA, 764 bp, Homo sapiens
agaggtaaagaagtcatggcggcgctgtgtcggacccgtgctgtggctgccgagagccattttctgcgagtgtttctcttcttcaggccctttcggggtgtaggcactgagagtggatccgaaagtggtagttccaatgccaaggagcctaagacgcgcgcaggcggtttcgcgagcgcgttggagcggcactcggagcttctacagaagatgggacctgcaaaggataaactggtcattggacggatctttcatattgtggagaatgatctgtacatagattttggtggaaagtttcattgtgtatgtagaagaccagaagtggatggagagaaataccagaaaggaaccagggtccggttgcggctattagatcttgaacttacgtctaggttcctgggagcaacaacagatacaactgtactagaggctaatgcagttctcttgggaatccaggagagtaaagactcaagatcgaaagaagaacatcatgaaaaataaatgaactttgcttagtggattgactcctttgctgaagtcagttattcatcaagaatgcaattagactaattgtgaataaatgattgaatgaagatataataaataaaagctataattatagataactcttattagaattttctttagcaatattcccaccccccaccccttgttttgctcttaatgtttttttcctttggtggggatagtatacactgtactaagaaattgtcattcaataaatacgttttgagtgctgtcta

SEQ ID NO: 6962 - protein, 161 aa, Homo sapiens
MAALCRTRAVAAESHFLRVFLFFRPFRGVGTESGSESGSSNAKEPKTRAGGFASALERHSELLQKMGPAKDKLVIGRIFHIVENDLYIDFGGKFHCVCRRPEVDGEKYQKGTRVRLRLLDLELTSRFLGATTDTTVLEANAVLLGIQESKDSRSKEEHHEK

SEQ ID NO: 6963 - DNA, 661 bp, Homo sapiens
cagaggtaaagaagtcatggcggcgctgtgtcggacccgtgctgtggctgccgagagccattttctgcgagtgtttctcttcttcaggccctttcggggtgtaggcactgagagtggatccgaaagtggtagttccaatgccaaggagcctaagacgcgcgcaggcggtttcgcgagcgcgttggagcggcactcggagcttctacagaaggtggagcccctacagaaggaaataccagaaaggaaccagggtccggttgcggctattagatcttgaacttacgtctaggttcctgggagcaacaacagatacaactgtactagaggctaatgcagttctcttgggaatccaggagagtaaagactcaagatcgaaagaagaacatcatgaaaaataaatgaactttgcttagtggattgactcctttgctgaagtcagttattcatcaagaatgcaattagactaattgtgaataaatgattgaatgaagatataataaataaaagctataattatagataactcttattagaattttctttagcaatattcccaccccccaccccttgttttgctcttaatgtttttttcctttggtggggatagtatacactgtactaagaaattgtcattcaataaatacgttttgagtgctgtcta

SEQ ID NO: 6964 - protein, 86 aa, Homo sapiens
MAALCRTRAVAAESHFLRVFLFFRPFRGVGTESGSESGSSNAKEPKTRAGGFASALERHSELLQKVEPLQKEIPERNQGPVAAIRS

SEQ ID NO: 6965 - DNA, 861 bp, Homo sapiens
ggaggggaggtcaaaggtcagaggtaaagaagtcatggcggcgctgtgtcggacccgtgctgtggctgccgagagccattttctgcgagtgtttctcttcttcaggccctttcggggtgtaggcactgagagtggatccgaaagtggtagttccaatgccaaggagcctaagacgcgcgcaggcggtttcgcgagcgcgttggagcggcactcggagcttctacagaaggtggagcccctacagaagggttctccaaaaaatgtggaatcctttgcatctatgctgagacattctcctcttacacagatgggacctgcaaaggataaactggtcattggacggatctttcatattgtggagaatgatctgtacatagattttggtggaaagtttcattgtgtatgtagaagaccagaagtggatggagagaaataccagaaaggaaccagggtccggttgcggctattagatcttgaacttacgtctaggttcctgggagcaacaacagatacaactgtactagaggctaatgcagttctcttgggaatccaggagagtaaagactcaagatcgaaagaagaacatcatgaaaaataaatgaactttgcttagtggattgactcctttgctgaagtcagttattcatcaagaatgcaattagactaattgtgaataaatgattgaatgaagatataataaataaaagctataattatagataactcttattagaattttctttagcaatattcccaccccccaccccttgttttgctcttaatgtttttttcctttggtggggatagtatacactgtactaagaaattgtcattcaataaatacgttttgagtgctgtcta

SEQ ID NO: 6966 - protein, 187 aa, Homo sapiens; identical to SEQ ID NO: 998

SEQ ID NO: 6967 - DNA, 553 bp, Homo sapiens
cttttgtgtggcatttgcgtactgggccgggtctgtccacactgcgcttgttttcctgggattgaatgctggtgggaagggttctccaaaaaatgtggaatcctttgcatctatgctgagacattctcctcttacacagatgggacctgcaaaggataaactggtcattggacggatctttcatattgtggagaatgatctgtacatagattttggtggaaagtttcattgtgtatgtagaagaccagaagtggatggagagaaataccagaaaggaaccagggtccggttgcggctattagatcttgaacttacgtctaggttcctgggagcaacaacagatacaactgtactagaggctaatgcagttctcttgggaatccaggagagtaaagactcaagatcgaaagaagaacatcatgaaaaataaatgaactttgcttagtggattgactcctttgctgaagtcagttattcatcaagaatgcaattagactaattgtgaataaatgattgaatgaagatataataaataaaagctataattatagat

SEQ ID NO: 6968 - protein, 105 aa, Homo sapiens; identical to SEQ ID NO: 6958

SEQ ID NO: 6969 - DNA, 668 bp, Homo sapiens
gagttgcggtgcgttgtggctcagccctcggcccctagaatctgtgcttggtgtttttcttcctttcgttgtccttttgtgtggcatttgcgtactgggccgggtctgtccacactgcgcttgttttcctgggattgaatgctggtgggaagagatggggttttgccatgttgcccaggctggtcttgaactcctgggttcaagtgatcctcctgcgttggcctcccaaagtgctgggattacagatgacagatatgggacctgcaaaggataaactggtcattggacggatctttcatattgtggagaatgatctgtacatagattttggtggaaagtttcattgtgtatgtagaagaccagaagtggatggagagaaataccagaaaggaaccagggtccggttgcggctattagatcttgaacttacgtctaggttcctgggagcaacaacagatacaactgtactagaggctaatgcagttctcttgggaatccaggagagtaaagactcaagatcgaaagaagaacatcatgaaaaataaatgaactttgcttagtggattgactcctttgctgaagtcagttattcatcaagaatgcaattagactaattgtgaataaatgattgaatgaagatataataaataaaagctataattatagat

SEQ ID NO: 6970 - protein, 125 aa, Homo sapiens; identical to SEQ ID NO: 6956

SEQ ID NO: 6971 - DNA, 535 bp, Homo sapiens
ggggcggagcctggcttaggaaggggagctgaggtccggggcccagttttccggagttgcgggttctccaaaaaatgtggaatcctttgcatctatgctgagacattctcctcttacacagatgggacctgcaaaggataaactggtcattggacggatctttcatattgtggagaatgatctgtacatagattttggtggaaagtttcattgtgtatgtagaagaccagaagtggatggagagaaataccagaaaggaaccagggtccggttgcggctattagatcttgaacttacgtctaggttcctgggagcaacaacagatacaactgtactagaggctaatgcagttctcttgggaatccaggagagtaaagactcaagatcgaaagaagaacatcatgaaaaataaatgaactttgcttagtggattgactcctttgctgaagtcagttattcatcaagaatgcaattagactaattgtgaataaatgattgaatgaagatataataaataaaagctataattatagat

SEQ ID NO: 6972 - protein, 105 aa, Homo sapiens; identical to SEQ ID NO: 6958

SEQ ID NO: 6973 - DNA, 586 bp, Homo sapiens
tcgggaataggggcggagcctggcttaggaaggggagctgaggtccggggcccagttttccggagttgcgagatggggttttgccatgttgcccaggctggtcttgaactcctgggttcaagtgatcctcctgcgttggcctcccaaagtgctgggattacagatgacagatatgggacctgcaaaggataaactggtcattggacggatctttcatattgtggagaatgatctgtacatagattttggtggaaagtttcattgtgtatgtagaagaccagaagtggatggagagaaataccagaaaggaaccagggtccggttgcggctattagatcttgaacttacgtctaggttcctgggagcaacaacagatacaactgtactagaggctaatgcagttctcttgggaatccaggagagtaaagactcaagatcgaaagaagaacatcatgaaaaataaatgaactttgcttagtggattgactcctttgctgaagtcagttattcatcaagaatgcaattagactaattgtgaataaatgattgaatgaagatataataaataaaagctataattatagat

SEQ ID NO: 6974 - protein, 125 aa, Homo sapiens; identical to SEQ ID NO: 6956

SEQ ID NO: 6975 - DNA, 624 bp, Homo sapiens
agaggtaaagaagtcatggcggcgctgtgtcggacccgtgctgtggctgccgagagccattttctgcgagtgtttctcttcttcaggccctttcggggtgtaggcactgagagtggatccgaaagtggtagttccaatgccaaggagcctaagacgcgcgcaggcggtttcgcgagcgcgttggagcggcactcggagcttctacagaagatgggacctgcaaaggataaactggtcattggacggatctttcatattgtggagaatgatctgtacatagattttggtggaaagtttcattgtgtatgtagaagaccagaagtggatggagagaaataccagaaaggaaccagggtccggttgcggctattagatcttgaacttacgtctaggttcctgggagcaacaacagatacaactgtactagaggctaatgcagttctcttgggaatccaggagagtaaagactcaagatcgaaagaagaacatcatgaaaaataaatgaactttgcttagtggattgactcctttgctgaagtcagttattcatcaagaatgcaattagactaattgtgaataaatgattgaatgaagatataataaataaaagctataattatagat

SEQ ID NO: 6976 - protein, 161 aa, Homo sapiens; identical to SEQ ID NO: 6962

SEQ ID NO: 6977 - DNA, 521 bp, Homo sapiens
cagaggtaaagaagtcatggcggcgctgtgtcggacccgtgctgtggctgccgagagccattttctgcgagtgtttctcttcttcaggccctttcggggtgtaggcactgagagtggatccgaaagtggtagttccaatgccaaggagcctaagacgcgcgcaggcggtttcgcgagcgcgttggagcggcactcggagcttctacagaaggtggagcccctacagaaggaaataccagaaaggaaccagggtccggttgcggctattagatcttgaacttacgtctaggttcctgggagcaacaacagatacaactgtactagaggctaatgcagttctcttgggaatccaggagagtaaagactcaagatcgaaagaagaacatcatgaaaaataaatgaactttgcttagtggattgactcctttgctgaagtcagttattcatcaagaatgcaattagactaattgtgaataaatgattgaatgaagatataataaataaaagctataattatagat

SEQ ID NO: 6978 - protein, 86 aa, Homo sapiens; identical to SEQ ID NO: 6964

SEQ ID NO: 6979 - DNA, 712 bp, Homo sapiens
gtcaaaggtcagaggtaaagaagtcatggcggcgctgtgtcggacccgtgctgtggctgccgagagccattttctgcgagtgtttctcttcttcaggccctttcggggtgtaggcactgagagtggatccgaaagtggtagttccaatgccaaggagcctaagacgcgcgcaggcggtttcgcgagcgcgttggagcggcactcggagcttctacagaaggtggagcccctacagaagggttctccaaaaaatgtggaatcctttgcatctatgctgagacattctcctcttacacagatgggacctgcaaaggataaactggtcattggacggatctttcatattgtggagaatgatctgtacatagattttggtggaaagtttcattgtgtatgtagaagaccagaagtggatggagagaaataccagaaaggaaccagggtccggttgcggctattagatcttgaacttacgtctaggttcctgggagcaacaacagatacaactgtactagaggctaatgcagttctcttgggaatccaggagagtaaagactcaagatcgaaagaagaacatcatgaaaaataaatgaactttgcttagtggattgactcctttgctgaagtcagttattcatcaagaatgcaattagactaattgtgaataaatgattgaatgaagatataataaataaaagctataattatagat

SEQ ID NO: 6980 - protein, 187 aa, Homo sapiens; identical to SEQ ID NO: 998

SEQ ID NO: 6981 - DNA, 2580 bp, Homo sapiens
aatgttatgcaagtgtagagacagacagttcactaggtactttaaaataatagaccttacaaagttttctagacagacttcctgtgaagaacaaggagcagggggaaaggggaaggggtagaatttaccaatctgaatatttcagcaagggagaatgcatgagttttactataaaaccacactgaacattgcaacaatactaaattccatacatatataataatcactgagctataaggttgctgatgtatttgttcttgaaagtgaattagagttactttatgcagaatcagctagttttatgtttcataatgtctttcccttttttgaacttttttttaagtctaaagtagggggaaccaagcctgctggtggtgattttggagaagtcttgaattcggctgcaaatgctagtgccaccaccacggagcctcttccagaaaagacacaggagagcctgtgagattcctacctttgttctgctacccactgccagatgctgcaagcgaggtccaagcacatcttgtcaacatgcattgccatgaatttctaccagatgtgcttttatttagctttacatattcttatgaaaaccaaattttaaaagccacaggtgttgattgttataaaataacatgctgccattcttgattgctagagtttttgttagtactttggatgcaattaaaactatgtgctatcacatgtgaaaagcttaataaattccatctatcagtagtataggtctcaatatttattatgagaccagtggtctggaaacagcttgttgtaccgaatcaactggagtctatgcttaaaaaaaaaaaatttttttttaaccatccttaaattattgcttaatggtatcatattaacatattctaaataagggctttaaggcacaggctgttgaagcattttctcagaggagtggatctgtagaagtctgtctttctatagaaatattgtgcttactcaagtgttaaattattttttctatgaactagtctacttcttaaaattcaaacatattcttttgatcacattgtttcttgagcatcctgccctgctactaacttttcaacaaggcaaaatggagtaaagtggcaatttctttagatgagtgaaataccctcaagtctcttttctgcccaaaaagggaaaagtgatagaaatgggggtggcaagtggggtgagtggatgaaggtgggtattgggggtggctgtgaaagaaaataatggagaatcacttttctagacatctacctatacttaatctaagaaacaaagtaatctactgtaaagtactctgccccttgaaagaagtattaaaaagagtgaggatggatttagaaaaaaacatgaatttagaaatattcaaaatggtttttgtggcagattcaatattatgaattcacagatatttaaagaatgagaaacatagtaattagtagaaatgccagaaacagttcctggttcctcttgtgtttgacactaagaaaatagcaagagtgtgaaatctcagatacttatgaaatctcacagatgtaaggactcaagtgtagaagaaaatatccccttcttacaaaaagaaatgtcaatttatggagtttgtgggaaatagggcaagaattcttatgcttatgagagccaagtagtcagtggaagagagtagagctcaaaactggattatcaccttagcaacttagaatagtttgaaatagaaaaaaagtatttaatttggatctggatctgttaagatatgcacagtctattttttgtatagtattggaaaataaaaatgctataatttgggtatgggttcttttgtatacattacctgcccattgaggaaaggggcaagtccattatgcaacttctctccaaacccttcatattctggatatgatacttaaagagccatgagcagctacattctgcctatcagaaggcatttattaaatgactgcttgctgaagatgtgtccaaagagatcctacattaaggtcatttgtcagaatgatgtttgtgtttgtttagagttggctgacctccaactcctggggtcaaggaatcctactgccttagcttcccaaatagctaggactataggcatgcacccggccatgtgttttatttatagctcttaaagcccagatgaagaaatcacatttttgcccatagtgaagaaacatttggccattgattagtccttattttcagtgactgtcctgttttcattagattagagagaccctgtgtgggccacagttaatataaaccattatcacttttaagtaaacctgcacatcttagatttcataatttccttattgttctgactcaaaatgaactaagagcttttcactttttgtttgtaagttctcagagagtcgggtctgcaagtgcttttgcctgccaggattttgtactcaaataaatgctatttggcaactaaaattcttgccagctctcatgtaattttgatgttactgaggttggttggtagtttattttattaattttgtggttcttctatcatatagaaaaagccaaatacagttttgtttgaatatttgt

SEQ ID NO: 6982 - protein, 39 aa, Homo sapiens
MHCHEFLPDVLLFSFTYSYENQILKATGVDCYKITCCHS

SEQ ID NO: 6983 - DNA, 3777 bp, Homo sapiens
attacttatgtctgagactggccctgttcatggaatcaaatgcatactcttaaaatattagatcagaaattgagaatcttacattataaatacttgtatgtacctgcacatatatggtacagattatatctgttcttttgccgattgagaataatgttgaagaggaatcaattatattttcaaactagttggattttttttcagtatttgtatttactatttgtttttcttttctctccatagaaactccccaacttttaaatcatttgaagaaaaggtcgaaaacttaaaggcaatagggggaaccaagcctgctggtggtgattttggagaagtcttgaattcggctgcaaatgctagtgccaccaccacggagcctcttccagaaaagacacaggagagcctgtgagattcctacctttgttctgctacccactgccagatgctgcaagcgaggtccaagcacatcttgtcaacatgcattgccatgaatttctaccagatgtgcttttatttagctttacatattcctttgaccaaatagtttgtgggttaaacaaaatgaaaatatcttcacctctattcttgggaaacaccctttagtgtacatttatgttcctttatttaggaaacaccattataaaaacacttatagtaaatggggacattcactataatgatctaagaagctacagattgtcatagttgttttcctgctttacaaaattgctccagatctggaatgccagtttgacctttgtcttctataatatttcctttttttcccctctttgaatctctgtatatttgattcttaactaaaattgttctcttaaatattctgaatcctggtaattaaaagtttgggtgtattttctttacctccaaggaaagaactactagctacaaaaaatattttggaataagcattgttttggtataaggtacatattttggttgaagacaccagactgaagtaaacagctgtgcatccaatttattatagttttgtaagtaacaatatgtaatcaaacttctaggtgacttgagagtggaacctcctatatcattatttagcaccgtttgtgacagtaaccatttcagtgtattgtttattataccacttatatcaacttatttttcaccaggttaaaattttaatttctacaaaataacattctgaatcaagcacactgtatgttcagtaggttgaactatgaacactgtcatcaatgttcagttcaaaagcctgaaagtttagatctagaagctggtaaaaatgacaatatcaatcacattaggggaaccattgttgtcttcacttaatccatttagcactatttaaaataagcacaccaagttatatgactaatataacttgaaaattttttatactgaggggttggtgataactcttgaggatgtaatgcattaataaaaatcaactcatcattttctacttgttttcaatgtgttggaaactgtaaaatgatactgtagaacctgtctcctactttgaaaactgaatgtcagggctgagtgaatcaaagtgtctagacatatttgcatagaggccaaggtattctattctaataactgcttactcaacactaccaccttttccttatactgtatatgattatggcctacaatgttgtatttgttatttattaaattgtgattgttttattattgtttatgccaaatgttaactgccaagcttggagtgacctaaagcattttttaaaagcatggctagatttacttcagtataaattatcttatgaaaaccaaattttaaaagccacaggtgttgattgttataaaataacatgctgccattcttgattgctagagtttttgttagtactttggatgcaattaaaactatgtgctatcacatgtgaaaagcttaataaattccatctatcagtagtataggtctcaatatttattatgagaccagtggtctggaaacagcttgttgtaccgaatcaactggagtctatgcttaaaaaaaaaaaatttttttttaaccatccttaaattattgcttaatggtatcatattaacatattctaaataagggctttaaggcacaggctgttgaagcattttctcagaggagtggatctgtagaagtctgtctttctatagaaatattgtgcttactcaagtgttaaattattttttctatgaactagtctacttcttaaaattcaaacatattcttttgatcacattgtttcttgagcatcctgccctgctactaacttttcaacaaggcaaaatggagtaaagtggcaatttctttagatgagtgaaataccctcaagtctcttttctgcccaaaaagggaaaagtgatagaaatgggggtggcaagtggggtgagtggatgaaggtgggtattgggggtggctgtgaaagaaaataatggagaatcacttttctagacatctacctatacttaatctaagaaacaaagtaatctactgtaaagtactctgccccttgaaagaagtattaaaaagagtgaggatggatttagaaaaaaacatgaatttagaaatattcaaaatggtttttgtggcagattcaatattatgaattcacagatatttaaagaatgagaaacatagtaattagtagaaatgccagaaacagttcctggttcctcttgtgtttgacactaagaaaatagcaagagtgtgaaatctcagatacttatgaaatctcacagatgtaaggactcaagtgtagaagaaaatatccccttcttacaaaaagaaatgtcaatttatggagtttgtgggaaatagggcaagaattcttatgcttatgagagccaagtagtcagtggaagagagtagagctcaaaactggattatcaccttagcaacttagaatagtttgaaatagaaaaaaagtatttaatttggatctggatctgttaagatatgcacagtctattttttgtatagtattggaaaataaaaatgctataatttgggtatgggttcttttgtatacattacctgcccattgaggaaaggggcaagtccattatgcaacttctctccaaacccttcatattctggatatgatacttaaagagccatgagcagctacattctgcctatcagaaggcatttattaaatgactgcttgctgaagatgtgtccaaagagatcctacattaaggtcatttgtcagaatgatgtttgtgtttgtttagagttggctgacctccaactcctggggtcaaggaatcctactgccttagcttcccaaatagctaggactataggcatgcacccggccatgtgttttatttatagctcttaaagcccagatgaagaaatcacatttttgcccatagtgaagaaacatttggccattgattagtccttattttcagtgactgtcctgttttcattagattagagagaccctgtgtgggccacagttaatataaaccattatcacttttaagtaaacctgcacatcttagatttcataatttccttattgttctgactcaaaatgaactaagagcttttcactttttgtttgtaagttctcagagagtcgggtctgcaagtgcttttgcctgccaggattttgtactcaaataaatgctatttggcaactaaaattcttgccagctctcatgtaattttgatgttactgaggttggttggtagtttattttattaattttgtggttcttctatcatatagaaaaagccaaatacagttttgtttgaatatttgt

SEQ ID NO: 6984 - protein, 75 aa, Homo sapiens [sequence omitted]

SEQ ID NO: 6985 - DNA, 3711 bp, Homo sapiens
actccttcaaaccagtacctggaaggctcatctaaggtcttctaggcctagcattctaacatcaaatgatcatctgatgatcatttaaggttgttgaaaaattctggttgtgaacttctttgtctttttagttcttcatgatcatgcaggattgcaagccttttcacattcctttagaaactccccaacttttaaatcatttgaagaaaaggtcgaaaacttaaaggcaatagggggaaccaagcctgctggtggtgattttggagaagtcttgaattcggctgcaaatgctagtgccaccaccacggagcctcttccagaaaagacacaggagagcctgtgagattcctacctttgttctgctacccactgccagatgctgcaagcgaggtccaagcacatcttgtcaacatgcattgccatgaatttctaccagatgtgcttttatttagctttacatattcctttgaccaaatagtttgtgggttaaacaaaatgaaaatatcttcacctctattcttgggaaacaccctttagtgtacatttatgttcctttatttaggaaacaccattataaaaacacttatagtaaatggggacattcactataatgatctaagaagctacagattgtcatagttgttttcctgctttacaaaattgctccagatctggaatgccagtttgacctttgtcttctataatatttcctttttttcccctctttgaatctctgtatatttgattcttaactaaaattgttctcttaaatattctgaatcctggtaattaaaagtttgggtgtattttctttacctccaaggaaagaactactagctacaaaaaatattttggaataagcattgttttggtataaggtacatattttggttgaagacaccagactgaagtaaacagctgtgcatccaatttattatagttttgtaagtaacaatatgtaatcaaacttctaggtgacttgagagtggaacctcctatatcattatttagcaccgtttgtgacagtaaccatttcagtgtattgtttattataccacttatatcaacttatttttcaccaggttaaaattttaatttctacaaaataacattctgaatcaagcacactgtatgttcagtaggttgaactatgaacactgtcatcaatgttcagttcaaaagcctgaaagtttagatctagaagctggtaaaaatgacaatatcaatcacattaggggaaccattgttgtcttcacttaatccatttagcactatttaaaataagcacaccaagttatatgactaatataacttgaaaattttttatactgaggggttggtgataactcttgaggatgtaatgcattaataaaaatcaactcatcattttctacttgttttcaatgtgttggaaactgtaaaatgatactgtagaacctgtctcctactttgaaaactgaatgtcagggctgagtgaatcaaagtgtctagacatatttgcatagaggccaaggtattctattctaataactgcttactcaacactaccaccttttccttatactgtatatgattatggcctacaatgttgtatttgttatttattaaattgtgattgttttattattgtttatgccaaatgttaactgccaagcttggagtgacctaaagcattttttaaaagcatggctagatttacttcagtataaattatcttatgaaaaccaaattttaaaagccacaggtgttgattgttataaaataacatgctgccattcttgattgctagagtttttgttagtactttggatgcaattaaaactatgtgctatcacatgtgaaaagcttaataaattccatctatcagtagtataggtctcaatatttattatgagaccagtggtctggaaacagcttgttgtaccgaatcaactggagtctatgcttaaaaaaaaaaaatttttttttaaccatccttaaattattgcttaatggtatcatattaacatattctaaataagggctttaaggcacaggctgttgaagcattttctcagaggagtggatctgtagaagtctgtctttctatagaaatattgtgcttactcaagtgttaaattattttttctatgaactagtctacttcttaaaattcaaacatattcttttgatcacattgtttcttgagcatcctgccctgctactaacttttcaacaaggcaaaatggagtaaagtggcaatttctttagatgagtgaaataccctcaagtctcttttctgcccaaaaagggaaaagtgatagaaatgggggtggcaagtggggtgagtggatgaaggtgggtattgggggtggctgtgaaagaaaataatggagaatcacttttctagacatctacctatacttaatctaagaaacaaagtaatctactgtaaagtactctgccccttgaaagaagtattaaaaagagtgaggatggatttagaaaaaaacatgaatttagaaatattcaaaatggtttttgtggcagattcaatattatgaattcacagatatttaaagaatgagaaacatagtaattagtagaaatgccagaaacagttcctggttcctcttgtgtttgacactaagaaaatagcaagagtgtgaaatctcagatacttatgaaatctcacagatgtaaggactcaagtgtagaagaaaatatccccttcttacaaaaagaaatgtcaatttatggagtttgtgggaaatagggcaagaattcttatgcttatgagagccaagtagtcagtggaagagagtagagctcaaaactggattatcaccttagcaacttagaatagtttgaaatagaaaaaaagtatttaatttggatctggatctgttaagatatgcacagtctattttttgtatagtattggaaaataaaaatgctataatttgggtatgggttcttttgtatacattacctgcccattgaggaaaggggcaagtccattatgcaacttctctccaaacccttcatattctggatatgatacttaaagagccatgagcagctacattctgcctatcagaaggcatttattaaatgactgcttgctgaagatgtgtccaaagagatcctacattaaggtcatttgtcagaatgatgtttgtgtttgtttagagttggctgacctccaactcctggggtcaaggaatcctactgccttagcttcccaaatagctaggactataggcatgcacccggccatgtgttttatttatagctcttaaagcccagatgaagaaatcacatttttgcccatagtgaagaaacatttggccattgattagtccttattttcagtgactgtcctgttttcattagattagagagaccctgtgtgggccacagttaatataaaccattatcacttttaagtaaacctgcacatcttagatttcataatttccttattgttctgactcaaaatgaactaagagcttttcactttttgtttgtaagttctcagagagtcgggtctgcaagtgcttttgcctgccaggattttgtactcaaataaatgctatttggcaactaaaattcttgccagctctcatgtaattttgatgttactgaggttggttggtagtttattttattaattttgtggttcttctatcatatagaaaaagccaaatacagttttgtttgaatatttgt

SEQ ID NO: 6986 - protein, 75 aa, Homo sapiens [sequence omitted]

SEQ ID NO: 6987 - DNA, 3699 bp, Homo sapiens
agagtgagggagggcactccttcaaaccagtacctggaaggctcatctaaggtcttctaggcctagcattctaacatcaaatgatcatctgatgatcatttaaggttgttgaaaaattctggttgtgaacttctttgtctttttagttcttcatgatcatgcaggaaactccccaacttttaaatcatttgaagaaaaggtcgaaaacttaaaggcaatagggggaaccaagcctgctggtggtgattttggagaagtcttgaattcggctgcaaatgctagtgccaccaccacggagcctcttccagaaaagacacaggagagcctgtgagattcctacctttgttctgctacccactgccagatgctgcaagcgaggtccaagcacatcttgtcaacatgcattgccatgaatttctaccagatgtgcttttatttagctttacatattcctttgaccaaatagtttgtgggttaaacaaaatgaaaatatcttcacctctattcttgggaaacaccctttagtgtacatttatgttcctttatttaggaaacaccattataaaaacacttatagtaaatggggacattcactataatgatctaagaagctacagattgtcatagttgttttcctgctttacaaaattgctccagatctggaatgccagtttgacctttgtcttctataatatttcctttttttcccctctttgaatctctgtatatttgattcttaactaaaattgttctcttaaatattctgaatcctggtaattaaaagtttgggtgtattttctttacctccaaggaaagaactactagctacaaaaaatattttggaataagcattgttttggtataaggtacatattttggttgaagacaccagactgaagtaaacagctgtgcatccaatttattatagttttgtaagtaacaatatgtaatcaaacttctaggtgacttgagagtggaacctcctatatcattatttagcaccgtttgtgacagtaaccatttcagtgtattgtttattataccacttatatcaacttatttttcaccaggttaaaattttaatttctacaaaataacattctgaatcaagcacactgtatgttcagtaggttgaactatgaacactgtcatcaatgttcagttcaaaagcctgaaagtttagatctagaagctggtaaaaatgacaatatcaatcacattaggggaaccattgttgtcttcacttaatccatttagcactatttaaaataagcacaccaagttatatgactaatataacttgaaaattttttatactgaggggttggtgataactcttgaggatgtaatgcattaataaaaatcaactcatcattttctacttgttttcaatgtgttggaaactgtaaaatgatactgtagaacctgtctcctactttgaaaactgaatgtcagggctgagtgaatcaaagtgtctagacatatttgcatagaggccaaggtattctattctaataactgcttactcaacactaccaccttttccttatactgtatatgattatggcctacaatgttgtatttgttatttattaaattgtgattgttttattattgtttatgccaaatgttaactgccaagcttggagtgacctaaagcattttttaaaagcatggctagatttacttcagtataaattatcttatgaaaaccaaattttaaaagccacaggtgttgattgttataaaataacatgctgccattcttgattgctagagtttttgttagtactttggatgcaattaaaactatgtgctatcacatgtgaaaagcttaataaattccatctatcagtagtataggtctcaatatttattatgagaccagtggtctggaaacagcttgttgtaccgaatcaactggagtctatgcttaaaaaaaaaaaatttttttttaaccatccttaaattattgcttaatggtatcatattaacatattctaaataagggctttaaggcacaggctgttgaagcattttctcagaggagtggatctgtagaagtctgtctttctatagaaatattgtgcttactcaagtgttaaattattttttctatgaactagtctacttcttaaaattcaaacatattcttttgatcacattgtttcttgagcatcctgccctgctactaacttttcaacaaggcaaaatggagtaaagtggcaatttctttagatgagtgaaataccctcaagtctcttttctgcccaaaaagggaaaagtgatagaaatgggggtggcaagtggggtgagtggatgaaggtgggtattgggggtggctgtgaaagaaaataatggagaatcacttttctagacatctacctatacttaatctaagaaacaaagtaatctactgtaaagtactctgccccttgaaagaagtattaaaaagagtgaggatggatttagaaaaaaacatgaatttagaaatattcaaaatggtttttgtggcagattcaatattatgaattcacagatatttaaagaatgagaaacatagtaattagtagaaatgccagaaacagttcctggttcctcttgtgtttgacactaagaaaatagcaagagtgtgaaatctcagatacttatgaaatctcacagatgtaaggactcaagtgtagaagaaaatatccccttcttacaaaaagaaatgtcaatttatggagtttgtgggaaatagggcaagaattcttatgcttatgagagccaagtagtcagtggaagagagtagagctcaaaactggattatcaccttagcaacttagaatagtttgaaatagaaaaaaagtatttaatttggatctggatctgttaagatatgcacagtctattttttgtatagtattggaaaataaaaatgctataatttgggtatgggttcttttgtatacattacctgcccattgaggaaaggggcaagtccattatgcaacttctctccaaacccttcatattctggatatgatacttaaagagccatgagcagctacattctgcctatcagaaggcatttattaaatgactgcttgctgaagatgtgtccaaagagatcctacattaaggtcatttgtcagaatgatgtttgtgtttgtttagagttggctgacctccaactcctggggtcaaggaatcctactgccttagcttcccaaatagctaggactataggcatgcacccggccatgtgttttatttatagctcttaaagcccagatgaagaaatcacatttttgcccatagtgaagaaacatttggccattgattagtccttattttcagtgactgtcctgttttcattagattagagagaccctgtgtgggccacagttaatataaaccattatcacttttaagtaaacctgcacatcttagatttcataatttccttattgttctgactcaaaatgaactaagagcttttcactttttgtttgtaagttctcagagagtcgggtctgcaagtgcttttgcctgccaggattttgtactcaaataaatgctatttggcaactaaaattcttgccagctctcatgtaattttgatgttactgaggttggttggtagtttattttattaattttgtggttcttctatcatatagaaaaagccaaatacagttttgtttgaatatttgt

SEQ ID NO: 6988 - protein, 75 aa, Homo sapiens [sequence omitted]

SEQ ID NO: 6989 - DNA, 3867 bp, Homo sapiens
ctttctggctggactagggcactgcagaagattgtgcctgagcttagggttgagcatacgaagatgtggtgatgccgctctgctggttatgaaggattttagaagttctgaaaaatgttttctctttttgagagttctccagcaggtggtgaccactgcacttgaaacaattgatattagaaaagatgagctgacccttcttttgctctgtgtgtttataatttaatatagttacaagaagacatctgaaaccttatcccaggctggacagaaggcctcagctgctttttcgtctgttggctcagtcatcaccaaaaagctggaagatgtaaaaaactccccaacttttaaatcatttgaagaaaaggtcgaaaacttaaaggcaatagggggaaccaagcctgctggtggtgattttggagaagtcttgaattcggctgcaaatgctagtgccaccaccacggagcctcttccagaaaagacacaggagagcctgtgagattcctacctttgttctgctacccactgccagatgctgcaagcgaggtccaagcacatcttgtcaacatgcattgccatgaatttctaccagatgtgcttttatttagctttacatattcctttgaccaaatagtttgtgggttaaacaaaatgaaaatatcttcacctctattcttgggaaacaccctttagtgtacatttatgttcctttatttaggaaacaccattataaaaacacttatagtaaatggggacattcactataatgatctaagaagctacagattgtcatagttgttttcctgctttacaaaattgctccagatctggaatgccagtttgacctttgtcttctataatatttcctttttttcccctctttgaatctctgtatatttgattcttaactaaaattgttctcttaaatattctgaatcctggtaattaaaagtttgggtgtattttctttacctccaaggaaagaactactagctacaaaaaatattttggaataagcattgttttggtataaggtacatattttggttgaagacaccagactgaagtaaacagctgtgcatccaatttattatagttttgtaagtaacaatatgtaatcaaacttctaggtgacttgagagtggaacctcctatatcattatttagcaccgtttgtgacagtaaccatttcagtgtattgtttattataccacttatatcaacttatttttcaccaggttaaaattttaatttctacaaaataacattctgaatcaagcacactgtatgttcagtaggttgaactatgaacactgtcatcaatgttcagttcaaaagcctgaaagtttagatctagaagctggtaaaaatgacaatatcaatcacattaggggaaccattgttgtcttcacttaatccatttagcactatttaaaataagcacaccaagttatatgactaatataacttgaaaattttttatactgaggggttggtgataactcttgaggatgtaatgcattaataaaaatcaactcatcattttctacttgttttcaatgtgttggaaactgtaaaatgatactgtagaacctgtctcctactttgaaaactgaatgtcagggctgagtgaatcaaagtgtctagacatatttgcatagaggccaaggtattctattctaataactgcttactcaacactaccaccttttccttatactgtatatgattatggcctacaatgttgtatttgttatttattaaattgtgattgttttattattgtttatgccaaatgttaactgccaagcttggagtgacctaaagcattttttaaaagcatggctagatttacttcagtataaattatcttatgaaaaccaaattttaaaagccacaggtgttgattgttataaaataacatgctgccattcttgattgctagagtttttgttagtactttggatgcaattaaaactatgtgctatcacatgtgaaaagcttaataaattccatctatcagtagtataggtctcaatatttattatgagaccagtggtctggaaacagcttgttgtaccgaatcaactggagtctatgcttaaaaaaaaaaaatttttttttaaccatccttaaattattgcttaatggtatcatattaacatattctaaataagggctttaaggcacaggctgttgaagcattttctcagaggagtggatctgtagaagtctgtctttctatagaaatattgtgcttactcaagtgttaaattattttttctatgaactagtctacttcttaaaattcaaacatattcttttgatcacattgtttcttgagcatcctgccctgctactaacttttcaacaaggcaaaatggagtaaagtggcaatttctttagatgagtgaaataccctcaagtctcttttctgcccaaaaagggaaaagtgatagaaatgggggtggcaagtggggtgagtggatgaaggtgggtattgggggtggctgtgaaagaaaataatggagaatcacttttctagacatctacctatacttaatctaagaaacaaagtaatctactgtaaagtactctgccccttgaaagaagtattaaaaagagtgaggatggatttagaaaaaaacatgaatttagaaatattcaaaatggtttttgtggcagattcaatattatgaattcacagatatttaaagaatgagaaacatagtaattagtagaaatgccagaaacagttcctggttcctcttgtgtttgacactaagaaaatagcaagagtgtgaaatctcagatacttatgaaatctcacagatgtaaggactcaagtgtagaagaaaatatccccttcttacaaaaagaaatgtcaatttatggagtttgtgggaaatagggcaagaattcttatgcttatgagagccaagtagtcagtggaagagagtagagctcaaaactggattatcaccttagcaacttagaatagtttgaaatagaaaaaaagtatttaatttggatctggatctgttaagatatgcacagtctattttttgtatagtattggaaaataaaaatgctataatttgggtatgggttcttttgtatacattacctgcccattgaggaaaggggcaagtccattatgcaacttctctccaaacccttcatattctggatatgatacttaaagagccatgagcagctacattctgcctatcagaaggcatttattaaatgactgcttgctgaagatgtgtccaaagagatcctacattaaggtcatttgtcagaatgatgtttgtgtttgtttagagttggctgacctccaactcctggggtcaaggaatcctactgccttagcttcccaaatagctaggactataggcatgcacccggccatgtgttttatttatagctcttaaagcccagatgaagaaatcacatttttgcccatagtgaagaaacatttggccattgattagtccttattttcagtgactgtcctgttttcattagattagagagaccctgtgtgggccacagttaatataaaccattatcacttttaagtaaacctgcacatcttagatttcataatttccttattgttctgactcaaaatgaactaagagcttttcactttttgtttgtaagttctcagagagtcgggtctgcaagtgcttttgcctgccaggattttgtactcaaataaatgctatttggcaactaaaattcttgccagctctcatgtaattttgatgttactgaggttggttggtagtttattttattaattttgtggttcttctatcatatagaaaaagccaaatacagttttgtttgaatatttgt

SEQ ID NO: 6990 - protein, 75 aa, Homo sapiens [sequence omitted]

SEQ ID NO: 6991 - DNA, 3965 bp, Homo sapiens
ggagcttaaatagggattttacttagattttgcactttaaaaaatggtttaaatccccaaccaggtctgctgagaacagacccagtccctgaggaaggagaagatgttgctgccacgatcagtgccacagagaccctctcggaagaggagcaggaagagctaagaagagaacttgcaaaggtagaagaagaaatccagactctgtctcaagtgttagcagcaaaagagaagcatctagcagagatcaagcggaaacttggaatcaattctctacaggaactaaaacagaacattgccaaagggtggcaagacgtgacagcaacatctgcttacaagaagacatctgaaaccttatcccaggctggacagaaggcctcagctgctttttcgtctgttggctcagtcatcaccaaaaagctggaagatgtaaaaaactccccaacttttaaatcatttgaagaaaaggtcgaaaacttaaaggcaatagggggaaccaagcctgctggtggtgattttggagaagtcttgaattcggctgcaaatgctagtgccaccaccacggagcctcttccagaaaagacacaggagagcctgtgagattcctacctttgttctgctacccactgccagatgctgcaagcgaggtccaagcacatcttgtcaacatgcattgccatgaatttctaccagatgtgcttttatttagctttacatattcctttgaccaaatagtttgtgggttaaacaaaatgaaaatatcttcacctctattcttgggaaacaccctttagtgtacatttatgttcctttatttaggaaacaccattataaaaacacttatagtaaatggggacattcactataatgatctaagaagctacagattgtcatagttgttttcctgctttacaaaattgctccagatctggaatgccagtttgacctttgtcttctataatatttcctttttttcccctctttgaatctctgtatatttgattcttaactaaaattgttctcttaaatattctgaatcctggtaattaaaagtttgggtgtattttctttacctccaaggaaagaactactagctacaaaaaatattttggaataagcattgttttggtataaggtacatattttggttgaagacaccagactgaagtaaacagctgtgcatccaatttattatagttttgtaagtaacaatatgtaatcaaacttctaggtgacttgagagtggaacctcctatatcattatttagcaccgtttgtgacagtaaccatttcagtgtattgtttattataccacttatatcaacttatttttcaccaggttaaaattttaatttctacaaaataacattctgaatcaagcacactgtatgttcagtaggttgaactatgaacactgtcatcaatgttcagttcaaaagcctgaaagtttagatctagaagctggtaaaaatgacaatatcaatcacattaggggaaccattgttgtcttcacttaatccatttagcactatttaaaataagcacaccaagttatatgactaatataacttgaaaattttttatactgaggggttggtgataactcttgaggatgtaatgcattaataaaaatcaactcatcattttctacttgttttcaatgtgttggaaactgtaaaatgatactgtagaacctgtctcctactttgaaaactgaatgtcagggctgagtgaatcaaagtgtctagacatatttgcatagaggccaaggtattctattctaataactgcttactcaacactaccaccttttccttatactgtatatgattatggcctacaatgttgtatttgttatttattaaattgtgattgttttattattgtttatgccaaatgttaactgccaagcttggagtgacctaaagcattttttaaaagcatggctagatttacttcagtataaattatcttatgaaaaccaaattttaaaagccacaggtgttgattgttataaaataacatgctgccattcttgattgctagagtttttgttagtactttggatgcaattaaaactatgtgctatcacatgtgaaaagcttaataaattccatctatcagtagtataggtctcaatatttattatgagaccagtggtctggaaacagcttgttgtaccgaatcaactggagtctatgcttaaaaaaaaaaaatttttttttaaccatccttaaattattgcttaatggtatcatattaacatattctaaataagggctttaaggcacaggctgttgaagcattttctcagaggagtggatctgtagaagtctgtctttctatagaaatattgtgcttactcaagtgttaaattattttttctatgaactagtctacttcttaaaattcaaacatattcttttgatcacattgtttcttgagcatcctgccctgctactaacttttcaacaaggcaaaatggagtaaagtggcaatttctttagatgagtgaaataccctcaagtctcttttctgcccaaaaagggaaaagtgatagaaatgggggtggcaagtggggtgagtggatgaaggtgggtattgggggtggctgtgaaagaaaataatggagaatcacttttctagacatctacctatacttaatctaagaaacaaagtaatctactgtaaagtactctgccccttgaaagaagtattaaaaagagtgaggatggatttagaaaaaaacatgaatttagaaatattcaaaatggtttttgtggcagattcaatattatgaattcacagatatttaaagaatgagaaacatagtaattagtagaaatgccagaaacagttcctggttcctcttgtgtttgacactaagaaaatagcaagagtgtgaaatctcagatacttatgaaatctcacagatgtaaggactcaagtgtagaagaaaatatccccttcttacaaaaagaaatgtcaatttatggagtttgtgggaaatagggcaagaattcttatgcttatgagagccaagtagtcagtggaagagagtagagctcaaaactggattatcaccttagcaacttagaatagtttgaaatagaaaaaaagtatttaatttggatctggatctgttaagatatgcacagtctattttttgtatagtattggaaaataaaaatgctataatttgggtatgggttcttttgtatacattacctgcccattgaggaaaggggcaagtccattatgcaacttctctccaaacccttcatattctggatatgatacttaaagagccatgagcagctacattctgcctatcagaaggcatttattaaatgactgcttgctgaagatgtgtccaaagagatcctacattaaggtcatttgtcagaatgatgtttgtgtttgtttagagttggctgacctccaactcctggggtcaaggaatcctactgccttagcttcccaaatagctaggactataggcatgcacccggccatgtgttttatttatagctcttaaagcccagatgaagaaatcacatttttgcccatagtgaagaaacatttggccattgattagtccttattttcagtgactgtcctgttttcattagattagagagaccctgtgtgggccacagttaatataaaccattatcacttttaagtaaacctgcacatcttagatttcataatttccttattgttctgactcaaaatgaactaagagcttttcactttttgtttgtaagttctcagagagtcgggtctgcaagtgcttttgcctgccaggattttgtactcaaataaatgctatttggcaactaaaattcttgccagctctcatgtaattttgatgttactgaggttggttggtagtttattttattaattttgtggttcttctatcatatagaaaaagccaaatacagttttgtttgaatatttgt

SEQ ID NO: 6992 - protein, 75 aa, Homo sapiens [sequence omitted]

SEQ ID NO: 6993 - DNA, 4487 bp, Homo sapiens
agtgtctgatgtttgcctgaactgtttgtacctctgggccatattgcagaaccctgcccttctttgttgactgaggaaagctcgctccctgcccaggtttttcattgttgatcgaaattaacaccaggtggtgaatagagcccctcctaaggttgctcaggataaatcatttattaaataggtctgcttatcaggaggggcgtgaaggctcccaaaaggaaatgctggcacctgggcccagaagccagggcctctaactcctggggttgatttcttcagtgaagttgcaccctacaaagggaatatggccaaagcggcactcaactgaaggctgatatcaggcgattagacagccatgcattctgcgtttgtctggaatggattgtagagagatggacttatatgaggactaccagtccccgtttgattttgatgcaggagtgaacaaaagctatctctacttgtctcctagtggaaattcatctccacccggatcacctactcttcagaaatttggtctgctgagaacagacccagtccctgaggaaggagaagatgttgctgccacgatcagtgccacagagaccctctcggaagaggagcaggaagagctaagaagagaacttgcaaaggtagaagaagaaatccagactctgtctcaagtgttagcagcaaaagagaagcatctagcagagatcaagcggaaacttggaatcaattctctacaggaactaaaacagaacattgccaaagggtggcaagacgtgacagcaacatctgcgaggagcaagcttctagcagcagaaaccgaactgctctgtcttctgtattgagagccatctgcagagctgttacaagaagacatctgaaaccttatcccaggctggacagaaggcctcagctgctttttcgtctgttggctcagtcatcaccaaaaagctggaagatgtaaaaaactccccaacttttaaatcatttgaagaaaaggtcgaaaacttaaaggcaatagggggaaccaagcctgctggtggtgattttggagaagtcttgaattcggctgcaaatgctagtgccaccaccacggagcctcttccagaaaagacacaggagagcctgtgagattcctacctttgttctgctacccactgccagatgctgcaagcgaggtccaagcacatcttgtcaacatgcattgccatgaatttctaccagatgtgcttttatttagctttacatattcctttgaccaaatagtttgtgggttaaacaaaatgaaaatatcttcacctctattcttgggaaacaccctttagtgtacatttatgttcctttatttaggaaacaccattataaaaacacttatagtaaatggggacattcactataatgatctaagaagctacagattgtcatagttgttttcctgctttacaaaattgctccagatctggaatgccagtttgacctttgtcttctataatatttcctttttttcccctctttgaatctctgtatatttgattcttaactaaaattgttctcttaaatattctgaatcctggtaattaaaagtttgggtgtattttctttacctccaaggaaagaactactagctacaaaaaatattttggaataagcattgttttggtataaggtacatattttggttgaagacaccagactgaagtaaacagctgtgcatccaatttattatagttttgtaagtaacaatatgtaatcaaacttctaggtgacttgagagtggaacctcctatatcattatttagcaccgtttgtgacagtaaccatttcagtgtattgtttattataccacttatatcaacttatttttcaccaggttaaaattttaatttctacaaaataacattctgaatcaagcacactgtatgttcagtaggttgaactatgaacactgtcatcaatgttcagttcaaaagcctgaaagtttagatctagaagctggtaaaaatgacaatatcaatcacattaggggaaccattgttgtcttcacttaatccatttagcactatttaaaataagcacaccaagttatatgactaatataacttgaaaattttttatactgaggggttggtgataactcttgaggatgtaatgcattaataaaaatcaactcatcattttctacttgttttcaatgtgttggaaactgtaaaatgatactgtagaacctgtctcctactttgaaaactgaatgtcagggctgagtgaatcaaagtgtctagacatatttgcatagaggccaaggtattctattctaataactgcttactcaacactaccaccttttccttatactgtatatgattatggcctacaatgttgtatttgttatttattaaattgtgattgttttattattgtttatgccaaatgttaactgccaagcttggagtgacctaaagcattttttaaaagcatggctagatttacttcagtataaattatcttatgaaaaccaaattttaaaagccacaggtgttgattgttataaaataacatgctgccattcttgattgctagagtttttgttagtactttggatgcaattaaaactatgtgctatcacatgtgaaaagcttaataaattccatctatcagtagtataggtctcaatatttattatgagaccagtggtctggaaacagcttgttgtaccgaatcaactggagtctatgcttaaaaaaaaaaaatttttttttaaccatccttaaattattgcttaatggtatcatattaacatattctaaataagggctttaaggcacaggctgttgaagcattttctcagaggagtggatctgtagaagtctgtctttctatagaaatattgtgcttactcaagtgttaaattattttttctatgaactagtctacttcttaaaattcaaacatattcttttgatcacattgtttcttgagcatcctgccctgctactaacttttcaacaaggcaaaatggagtaaagtggcaatttctttagatgagtgaaataccctcaagtctcttttctgcccaaaaagggaaaagtgatagaaatgggggtggcaagtggggtgagtggatgaaggtgggtattgggggtggctgtgaaagaaaataatggagaatcacttttctagacatctacctatacttaatctaagaaacaaagtaatctactgtaaagtactctgccccttgaaagaagtattaaaaagagtgaggatggatttagaaaaaaacatgaatttagaaatattcaaaatggtttttgtggcagattcaatattatgaattcacagatatttaaagaatgagaaacatagtaattagtagaaatgccagaaacagttcctggttcctcttgtgtttgacactaagaaaatagcaagagtgtgaaatctcagatacttatgaaatctcacagatgtaaggactcaagtgtagaagaaaatatccccttcttacaaaaagaaatgtcaatttatggagtttgtgggaaatagggcaagaattcttatgcttatgagagccaagtagtcagtggaagagagtagagctcaaaactggattatcaccttagcaacttagaatagtttgaaatagaaaaaaagtatttaatttggatctggatctgttaagatatgcacagtctattttttgtatagtattggaaaataaaaatgctataatttgggtatgggttcttttgtatacattacctgcccattgaggaaaggggcaagtccattatgcaacttctctccaaacccttcatattctggatatgatacttaaagagccatgagcagctacattctgcctatcagaaggcatttattaaatgactgcttgctgaagatgtgtccaaagagatcctacattaaggtcatttgtcagaatgatgtttgtgtttgtttagagttggctgacctccaactcctggggtcaaggaatcctactgccttagcttcccaaatagctaggactataggcatgcacccggccatgtgttttatttatagctcttaaagcccagatgaagaaatcacatttttgcccatagtgaagaaacatttggccattgattagtccttattttcagtgactgtcctgttttcattagattagagagaccctgtgtgggccacagttaatataaaccattatcacttttaagtaaacctgcacatcttagatttcataatttccttattgttctgactcaaaatgaactaagagcttttcactttttgtttgtaagttctcagagagtcgggtctgcaagtgcttttgcctgccaggattttgtactcaaataaatgctatttggcaactaaaattcttgccagctctcatgtaattttgatgttactgaggttggttggtagtttattttattaattttgtggttcttctatcatatagaaaaagccaaatacagttttgtttgaatatttgt

SEQ ID NO: 6994 - protein, 151 aa, Homo sapiens
MDCREMDLYEDYQSPFDFDAGVNKSYLYLSPSGNSSPPGSPTLQKFGLLRTDPVPEEGEDVAATISATETLSEEEQEELRRELAKVEEEIQTLSQVLAAKEKHLAEIKRKLGINSLQELKQNIAKGWQDVTATSARSKLLAAETELLCLLY

SEQ ID NO: 6995 - DNA, 4486 bp, Homo sapiens
agtgtctgatgtttgcctgaactgtttgtacctctgggccatattgcagaaccctgcccttctttgttgactgaggaaagctcgctccctgcccaggtttttcattgttgatcgaaattaacaccaggtggtgaatagagcccctcctaaggttgctcaggataaatcatttattaaataggtctgcttatcaggaggggcgtgaaggctcccaaaaggaaatgctggcacctgggcccagaagccagggcctctaactcctggggttgatttcttcagtgaagttgcaccctacaaagggaatatggccaaagcggcactcaactgaaggctgatatcaggcgattagacagccatgcattctgcgtttgtctggaatggattgtagagagatggacttatatgaggactaccagtccccgtttgattttgatgcaggagtgaacaaaagctatctctacttgtctcctagtggaaattcatctccacccggatcacctactcttcagaaatttggtctgctgagaacagacccagtccctgaggaaggagaagatgttgctgccacgatcagtgccacagagaccctctcggaagaggagcaggaagagctaagaagagaacttgcaaaggtagaagaagaaatccagactctgtctcaagtgttagcagcaaaagagaagcatctagcagagatcaagcggaaacttggaatcaattctctacaggaactaaaacagaacattgccaaagggtggcaagacgtgacagcaacatctgcttacaagaagacatctgaaaccttatcccaggctggacagaaggcctcagctgctttttcgtctgttggctcagtcatcaccaaaaagctggaagatgtaaaattgcaagccttttcacattcctttagtatacgttccattcagcattcaattagcatgcctgctatgagaaactccccaacttttaaatcatttgaagaaaaggtcgaaaacttaaaggcaatagggggaaccaagcctgctggtggtgattttggagaagtcttgaattcggctgcaaatgctagtgccaccaccacggagcctcttccagaaaagacacaggagagcctgtgagattcctacctttgttctgctacccactgccagatgctgcaagcgaggtccaagcacatcttgtcaacatgcattgccatgaatttctaccagatgtgcttttatttagctttacatattcctttgaccaaatagtttgtgggttaaacaaaatgaaaatatcttcacctctattcttgggaaacaccctttagtgtacatttatgttcctttatttaggaaacaccattataaaaacacttatagtaaatggggacattcactataatgatctaagaagctacagattgtcatagttgttttcctgctttacaaaattgctccagatctggaatgccagtttgacctttgtcttctataatatttcctttttttcccctctttgaatctctgtatatttgattcttaactaaaattgttctcttaaatattctgaatcctggtaattaaaagtttgggtgtattttctttacctccaaggaaagaactactagctacaaaaaatattttggaataagcattgttttggtataaggtacatattttggttgaagacaccagactgaagtaaacagctgtgcatccaatttattatagttttgtaagtaacaatatgtaatcaaacttctaggtgacttgagagtggaacctcctatatcattatttagcaccgtttgtgacagtaaccatttcagtgtattgtttattataccacttatatcaacttatttttcaccaggttaaaattttaatttctacaaaataacattctgaatcaagcacactgtatgttcagtaggttgaactatgaacactgtcatcaatgttcagttcaaaagcctgaaagtttagatctagaagctggtaaaaatgacaatatcaatcacattaggggaaccattgttgtcttcacttaatccatttagcactatttaaaataagcacaccaagttatatgactaatataacttgaaaattttttatactgaggggttggtgataactcttgaggatgtaatgcattaataaaaatcaactcatcattttctacttgttttcaatgtgttggaaactgtaaaatgatactgtagaacctgtctcctactttgaaaactgaatgtcagggctgagtgaatcaaagtgtctagacatatttgcatagaggccaaggtattctattctaataactgcttactcaacactaccaccttttccttatactgtatatgattatggcctacaatgttgtatttgttatttattaaattgtgattgttttattattgtttatgccaaatgttaactgccaagcttggagtgacctaaagcattttttaaaagcatggctagatttacttcagtataaattatcttatgaaaaccaaattttaaaagccacaggtgttgattgttataaaataacatgctgccattcttgattgctagagtttttgttagtactttggatgcaattaaaactatgtgctatcacatgtgaaaagcttaataaattccatctatcagtagtataggtctcaatatttattatgagaccagtggtctggaaacagcttgttgtaccgaatcaactggagtctatgcttaaaaaaaaaaaatttttttttaaccatccttaaattattgcttaatggtatcatattaacatattctaaataagggctttaaggcacaggctgttgaagcattttctcagaggagtggatctgtagaagtctgtctttctatagaaatattgtgcttactcaagtgttaaattattttttctatgaactagtctacttcttaaaattcaaacatattcttttgatcacattgtttcttgagcatcctgccctgctactaacttttcaacaaggcaaaatggagtaaagtggcaatttctttagatgagtgaaataccctcaagtctcttttctgcccaaaaagggaaaagtgatagaaatgggggtggcaagtggggtgagtggatgaaggtgggtattgggggtggctgtgaaagaaaataatggagaatcacttttctagacatctacctatacttaatctaagaaacaaagtaatctactgtaaagtactctgccccttgaaagaagtattaaaaagagtgaggatggatttagaaaaaaacatgaatttagaaatattcaaaatggtttttgtggcagattcaatattatgaattcacagatatttaaagaatgagaaacatagtaattagtagaaatgccagaaacagttcctggttcctcttgtgtttgacactaagaaaatagcaagagtgtgaaatctcagatacttatgaaatctcacagatgtaaggactcaagtgtagaagaaaatatccccttcttacaaaaagaaatgtcaatttatggagtttgtgggaaatagggcaagaattcttatgcttatgagagccaagtagtcagtggaagagagtagagctcaaaactggattatcaccttagcaacttagaatagtttgaaatagaaaaaaagtatttaatttggatctggatctgttaagatatgcacagtctattttttgtatagtattggaaaataaaaatgctataatttgggtatgggttcttttgtatacattacctgcccattgaggaaaggggcaagtccattatgcaacttctctccaaacccttcatattctggatatgatacttaaagagccatgagcagctacattctgcctatcagaaggcatttattaaatgactgcttgctgaagatgtgtccaaagagatcctacattaaggtcatttgtcagaatgatgtttgtgtttgtttagagttggctgacctccaactcctggggtcaaggaatcctactgccttagcttcccaaatagctaggactataggcatgcacccggccatgtgttttatttatagctcttaaagcccagatgaagaaatcacatttttgcccatagtgaagaaacatttggccattgattagtccttattttcagtgactgtcctgttttcattagattagagagaccctgtgtgggccacagttaatataaaccattatcacttttaagtaaacctgcacatcttagatttcataatttccttattgttctgactcaaaatgaactaagagcttttcactttttgtttgtaagttctcagagagtcgggtctgcaagtgcttttgcctgccaggattttgtactcaaataaatgctatttggcaactaaaattcttgccagctctcatgtaattttgatgttactgaggttggttggtagtttattttattaattttgtggttcttctatcatatagaaaaagccaaatacagttttgtttgaatatttgt

SEQ ID NO: 6996 - protein, 246 aa, Homo sapiens
MDCREMDLYEDYQSPFDFDAGVNKSYLYLSPSGNSSPPGSPTLQKFGLLRTDPVPEEGEDVAATISATETLSEEEQEELRRELAKVEEEIQTLSQVLAAKEKHLAEIKRKLGINSLQELKQNIAKGWQDVTATSAYKKTSETLSQAGQKASAAFSSVGSVITKKLEDVKLQAFSHSFSIRSIQHSISMPAMRNSPTFKSFEEKVENLKAIGGTKPAGGDFGEVLNSAANASATTTEPLPEKTQESL

SEQ ID NO: 6997 - DNA, 4417 bp, Homo sapiens
agtgtctgatgtttgcctgaactgtttgtacctctgggccatattgcagaaccctgcccttctttgttgactgaggaaagctcgctccctgcccaggtttttcattgttgatcgaaattaacaccaggtggtgaatagagcccctcctaaggttgctcaggataaatcatttattaaataggtctgcttatcaggaggggcgtgaaggctcccaaaaggaaatgctggcacctgggcccagaagccagggcctctaactcctggggttgatttcttcagtgaagttgcaccctacaaagggaatatggccaaagcggcactcaactgaaggctgatatcaggcgattagacagccatgcattctgcgtttgtctggaatggattgtagagagatggacttatatgaggactaccagtccccgtttgattttgatgcaggagtgaacaaaagctatctctacttgtctcctagtggaaattcatctccacccggatcacctactcttcagaaatttggtctgctgagaacagacccagtccctgaggaaggagaagatgttgctgccacgatcagtgccacagagaccctctcggaagaggagcaggaagagctaagaagagaacttgcaaaggtagaagaagaaatccagactctgtctcaagtgttagcagcaaaagagaagcatctagcagagatcaagcggaaacttggaatcaattctctacaggaactaaaacagaacattgccaaagggtggcaagacgtgacagcaacatctgcttacaagaagacatctgaaaccttatcccaggctggacagaaggcctcagctgctttttcgtctgttggctcagtcatcaccaaaaagctggaagatgtaaaaaactccccaacttttaaatcatttgaagaaaaggtcgaaaacttaaaggcaatagggggaaccaagcctgctggtggtgattttggagaagtcttgaattcggctgcaaatgctagtgccaccaccacggagcctcttccagaaaagacacaggagagcctgtgagattcctacctttgttctgctacccactgccagatgctgcaagcgaggtccaagcacatcttgtcaacatgcattgccatgaatttctaccagatgtgcttttatttagctttacatattcctttgaccaaatagtttgtgggttaaacaaaatgaaaatatcttcacctctattcttgggaaacaccctttagtgtacatttatgttcctttatttaggaaacaccattataaaaacacttatagtaaatggggacattcactataatgatctaagaagctacagattgtcatagttgttttcctgctttacaaaattgctccagatctggaatgccagtttgacctttgtcttctataatatttcctttttttcccctctttgaatctctgtatatttgattcttaactaaaattgttctcttaaatattctgaatcctggtaattaaaagtttgggtgtattttctttacctccaaggaaagaactactagctacaaaaaatattttggaataagcattgttttggtataaggtacatattttggttgaagacaccagactgaagtaaacagctgtgcatccaatttattatagttttgtaagtaacaatatgtaatcaaacttctaggtgacttgagagtggaacctcctatatcattatttagcaccgtttgtgacagtaaccatttcagtgtattgtttattataccacttatatcaacttatttttcaccaggttaaaattttaatttctacaaaataacattctgaatcaagcacactgtatgttcagtaggttgaactatgaacactgtcatcaatgttcagttcaaaagcctgaaagtttagatctagaagctggtaaaaatgacaatatcaatcacattaggggaaccattgttgtcttcacttaatccatttagcactatttaaaataagcacaccaagttatatgactaatataacttgaaaattttttatactgaggggttggtgataactcttgaggatgtaatgcattaataaaaatcaactcatcattttctacttgttttcaatgtgttggaaactgtaaaatgatactgtagaacctgtctcctactttgaaaactgaatgtcagggctgagtgaatcaaagtgtctagacatatttgcatagaggccaaggtattctattctaataactgcttactcaacactaccaccttttccttatactgtatatgattatggcctacaatgttgtatttgttatttattaaattgtgattgttttattattgtttatgccaaatgttaactgccaagcttggagtgacctaaagcattttttaaaagcatggctagatttacttcagtataaattatcttatgaaaaccaaattttaaaagccacaggtgttgattgttataaaataacatgctgccattcttgattgctagagtttttgttagtactttggatgcaattaaaactatgtgctatcacatgtgaaaagcttaataaattccatctatcagtagtataggtctcaatatttattatgagaccagtggtctggaaacagcttgttgtaccgaatcaactggagtctatgcttaaaaaaaaaaaatttttttttaaccatccttaaattattgcttaatggtatcatattaacatattctaaataagggctttaaggcacaggctgttgaagcattttctcagaggagtggatctgtagaagtctgtctttctatagaaatattgtgcttactcaagtgttaaattattttttctatgaactagtctacttcttaaaattcaaacatattcttttgatcacattgtttcttgagcatcctgccctgctactaacttttcaacaaggcaaaatggagtaaagtggcaatttctttagatgagtgaaataccctcaagtctcttttctgcccaaaaagggaaaagtgatagaaatgggggtggcaagtggggtgagtggatgaaggtgggtattgggggtggctgtgaaagaaaataatggagaatcacttttctagacatctacctatacttaatctaagaaacaaagtaatctactgtaaagtactctgccccttgaaagaagtattaaaaagagtgaggatggatttagaaaaaaacatgaatttagaaatattcaaaatggtttttgtggcagattcaatattatgaattcacagatatttaaagaatgagaaacatagtaattagtagaaatgccagaaacagttcctggttcctcttgtgtttgacactaagaaaatagcaagagtgtgaaatctcagatacttatgaaatctcacagatgtaaggactcaagtgtagaagaaaatatccccttcttacaaaaagaaatgtcaatttatggagtttgtgggaaatagggcaagaattcttatgcttatgagagccaagtagtcagtggaagagagtagagctcaaaactggattatcaccttagcaacttagaatagtttgaaatagaaaaaaagtatttaatttggatctggatctgttaagatatgcacagtctattttttgtatagtattggaaaataaaaatgctataatttgggtatgggttcttttgtatacattacctgcccattgaggaaaggggcaagtccattatgcaacttctctccaaacccttcatattctggatatgatacttaaagagccatgagcagctacattctgcctatcagaaggcatttattaaatgactgcttgctgaagatgtgtccaaagagatcctacattaaggtcatttgtcagaatgatgtttgtgtttgtttagagttggctgacctccaactcctggggtcaaggaatcctactgccttagcttcccaaatagctaggactataggcatgcacccggccatgtgttttatttatagctcttaaagcccagatgaagaaatcacatttttgcccatagtgaagaaacatttggccattgattagtccttattttcagtgactgtcctgttttcattagattagagagaccctgtgtgggccacagttaatataaaccattatcacttttaagtaaacctgcacatcttagatttcataatttccttattgttctgactcaaaatgaactaagagcttttcactttttgtttgtaagttctcagagagtcgggtctgcaagtgcttttgcctgccaggattttgtactcaaataaatgctatttggcaactaaaattcttgccagctctcatgtaattttgatgttactgaggttggttggtagtttattttattaattttgtggttcttctatcatatagaaaaagccaaatacagttttgtttgaatatttgt

SEQ ID NO: 6998 - protein, 223 aa, Homo sapiens
MDCREMDLYEDYQSPFDFDAGVNKSYLYLSPSGNSSPPGSPTLQKFGLLRTDPVPEEGEDVAATISATETLSEEEQEELRRELAKVEEEIQTLSQVLAAKEKHLAEIKRKLGINSLQELKQNIAKGWQDVTATSAYKKTSETLSQAGQKASAAFSSVGSVITKKLEDVKNSPTFKSFEEKVENLKAIGGTKPAGGDFGEVLNSAANASATTTEPLPEKTQESL

SEQ ID NO: 6999 - DNA, 3917 bp, Homo sapiens
gggagtcgccggcggaggcgaggaggagctctgcgcggcgcggcgggcgatccgagccgggacgggctgcaggcgggggtgctgcagaggacacgaggcggcgggctggagacatggaccgcggcgagcaaggtagaagaagaaatccagactctgtctcaagtgttagcagcaaaagagaagcatctagcagagatcaagcggaaacttggaatcaattctctacaggaactaaaacagaacattgccaaagggtggcaagacgtgacagcaacatctgcttacaagaagacatctgaaaccttatcccaggctggacagaaggcctcagctgctttttcgtctgttggctcagtcatcaccaaaaagctggaagatgtaaaaaactccccaacttttaaatcatttgaagaaaaggtcgaaaacttaaaggcaatagggggaaccaagcctgctggtggtgattttggagaagtcttgaattcggctgcaaatgctagtgccaccaccacggagcctcttccagaaaagacacaggagagcctgtgagattcctacctttgttctgctacccactgccagatgctgcaagcgaggtccaagcacatcttgtcaacatgcattgccatgaatttctaccagatgtgcttttatttagctttacatattcctttgaccaaatagtttgtgggttaaacaaaatgaaaatatcttcacctctattcttgggaaacaccctttagtgtacatttatgttcctttatttaggaaacaccattataaaaacacttatagtaaatggggacattcactataatgatctaagaagctacagattgtcatagttgttttcctgctttacaaaattgctccagatctggaatgccagtttgacctttgtcttctataatatttcctttttttcccctctttgaatctctgtatatttgattcttaactaaaattgttctcttaaatattctgaatcctggtaattaaaagtttgggtgtattttctttacctccaaggaaagaactactagctacaaaaaatattttggaataagcattgttttggtataaggtacatattttggttgaagacaccagactgaagtaaacagctgtgcatccaatttattatagttttgtaagtaacaatatgtaatcaaacttctaggtgacttgagagtggaacctcctatatcattatttagcaccgtttgtgacagtaaccatttcagtgtattgtttattataccacttatatcaacttatttttcaccaggttaaaattttaatttctacaaaataacattctgaatcaagcacactgtatgttcagtaggttgaactatgaacactgtcatcaatgttcagttcaaaagcctgaaagtttagatctagaagctggtaaaaatgacaatatcaatcacattaggggaaccattgttgtcttcacttaatccatttagcactatttaaaataagcacaccaagttatatgactaatataacttgaaaattttttatactgaggggttggtgataactcttgaggatgtaatgcattaataaaaatcaactcatcattttctacttgttttcaatgtgttggaaactgtaaaatgatactgtagaacctgtctcctactttgaaaactgaatgtcagggctgagtgaatcaaagtgtctagacatatttgcatagaggccaaggtattctattctaataactgcttactcaacactaccaccttttccttatactgtatatgattatggcctacaatgttgtatttgttatttattaaattgtgattgttttattattgtttatgccaaatgttaactgccaagcttggagtgacctaaagcattttttaaaagcatggctagatttacttcagtataaattatcttatgaaaaccaaattttaaaagccacaggtgttgattgttataaaataacatgctgccattcttgattgctagagtttttgttagtactttggatgcaattaaaactatgtgctatcacatgtgaaaagcttaataaattccatctatcagtagtataggtctcaatatttattatgagaccagtggtctggaaacagcttgttgtaccgaatcaactggagtctatgcttaaaaaaaaaaaatttttttttaaccatccttaaattattgcttaatggtatcatattaacatattctaaataagggctttaaggcacaggctgttgaagcattttctcagaggagtggatctgtagaagtctgtctttctatagaaatattgtgcttactcaagtgttaaattattttttctatgaactagtctacttcttaaaattcaaacatattcttttgatcacattgtttcttgagcatcctgccctgctactaacttttcaacaaggcaaaatggagtaaagtggcaatttctttagatgagtgaaataccctcaagtctcttttctgcccaaaaagggaaaagtgatagaaatgggggtggcaagtggggtgagtggatgaaggtgggtattgggggtggctgtgaaagaaaataatggagaatcacttttctagacatctacctatacttaatctaagaaacaaagtaatctactgtaaagtactctgccccttgaaagaagtattaaaaagagtgaggatggatttagaaaaaaacatgaatttagaaatattcaaaatggtttttgtggcagattcaatattatgaattcacagatatttaaagaatgagaaacatagtaattagtagaaatgccagaaacagttcctggttcctcttgtgtttgacactaagaaaatagcaagagtgtgaaatctcagatacttatgaaatctcacagatgtaaggactcaagtgtagaagaaaatatccccttcttacaaaaagaaatgtcaatttatggagtttgtgggaaatagggcaagaattcttatgcttatgagagccaagtagtcagtggaagagagtagagctcaaaactggattatcaccttagcaacttagaatagtttgaaatagaaaaaaagtatttaatttggatctggatctgttaagatatgcacagtctattttttgtatagtattggaaaataaaaatgctataatttgggtatgggttcttttgtatacattacctgcccattgaggaaaggggcaagtccattatgcaacttctctccaaacccttcatattctggatatgatacttaaagagccatgagcagctacattctgcctatcagaaggcatttattaaatgactgcttgctgaagatgtgtccaaagagatcctacattaaggtcatttgtcagaatgatgtttgtgtttgtttagagttggctgacctccaactcctggggtcaaggaatcctactgccttagcttcccaaatagctaggactataggcatgcacccggccatgtgttttatttatagctcttaaagcccagatgaagaaatcacatttttgcccatagtgaagaaacatttggccattgattagtccttattttcagtgactgtcctgttttcattagattagagagaccctgtgtgggccacagttaatataaaccattatcacttttaagtaaacctgcacatcttagatttcataatttccttattgttctgactcaaaatgaactaagagcttttcactttttgtttgtaagttctcagagagtcgggtctgcaagtgcttttgcctgccaggattttgtactcaaataaatgctatttggcaactaaaattcttgccagctctcatgtaattttgatgttactgaggttggttggtagtttattttattaattttgtggttcttctatcatatagaaaaagccaaatacagttttgtttgaatatttgt

SEQ ID NO: 7000 - protein, 61 aa, Homo sapiens
MDRGEQGRRRNPDSVSSVSSKREASSRDQAETWNQFSTGTKTEHCQRVARRDSNICLQEDI

SEQ ID NO: 7001 - DNA, 4042 bp, Homo sapiens
ggacttcgcgggagtcgccggcggaggcgaggaggagctctgcgcggcgcggcgggcgatccgagccgggacgggctgcaggcgggggtgctgcagaggacacgaggcggcgggctggagacatggaccgcggcgagcaaggtctgctgagaacagacccagtccctgaggaaggagaagatgttgctgccacgatcagtgccacagagaccctctcggaagaggagcaggaagagctaagaagagaacttgcaaaggtagaagaagaaatccagactctgtctcaagtgttagcagcaaaagagaagcatctagcagagatcaagcggaaacttggaatcaattctctacaggaactaaaacagaacattgccaaagggtggcaagacgtgacagcaacatctgcttacaagaagacatctgaaaccttatcccaggctggacagaaggcctcagctgctttttcgtctgttggctcagtcatcaccaaaaagctggaagatgtaaaaaactccccaacttttaaatcatttgaagaaaaggtcgaaaacttaaaggcaatagggggaaccaagcctgctggtggtgattttggagaagtcttgaattcggctgcaaatgctagtgccaccaccacggagcctcttccagaaaagacacaggagagcctgtgagattcctacctttgttctgctacccactgccagatgctgcaagcgaggtccaagcacatcttgtcaacatgcattgccatgaatttctaccagatgtgcttttatttagctttacatattcctttgaccaaatagtttgtgggttaaacaaaatgaaaatatcttcacctctattcttgggaaacaccctttagtgtacatttatgttcctttatttaggaaacaccattataaaaacacttatagtaaatggggacattcactataatgatctaagaagctacagattgtcatagttgttttcctgctttacaaaattgctccagatctggaatgccagtttgacctttgtcttctataatatttcctttttttcccctctttgaatctctgtatatttgattcttaactaaaattgttctcttaaatattctgaatcctggtaattaaaagtttgggtgtattttctttacctccaaggaaagaactactagctacaaaaaatattttggaataagcattgttttggtataaggtacatattttggttgaagacaccagactgaagtaaacagctgtgcatccaatttattatagttttgtaagtaacaatatgtaatcaaacttctaggtgacttgagagtggaacctcctatatcattatttagcaccgtttgtgacagtaaccatttcagtgtattgtttattataccacttatatcaacttatttttcaccaggttaaaattttaatttctacaaaataacattctgaatcaagcacactgtatgttcagtaggttgaactatgaacactgtcatcaatgttcagttcaaaagcctgaaagtttagatctagaagctggtaaaaatgacaatatcaatcacattaggggaaccattgttgtcttcacttaatccatttagcactatttaaaataagcacaccaagttatatgactaatataacttgaaaattttttatactgaggggttggtgataactcttgaggatgtaatgcattaataaaaatcaactcatcattttctacttgttttcaatgtgttggaaactgtaaaatgatactgtagaacctgtctcctactttgaaaactgaatgtcagggctgagtgaatcaaagtgtctagacatatttgcatagaggccaaggtattctattctaataactgcttactcaacactaccaccttttccttatactgtatatgattatggcctacaatgttgtatttgttatttattaaattgtgattgttttattattgtttatgccaaatgttaactgccaagcttggagtgacctaaagcattttttaaaagcatggctagatttacttcagtataaattatcttatgaaaaccaaattttaaaagccacaggtgttgattgttataaaataacatgctgccattcttgattgctagagtttttgttagtactttggatgcaattaaaactatgtgctatcacatgtgaaaagcttaataaattccatctatcagtagtataggtctcaatatttattatgagaccagtggtctggaaacagcttgttgtaccgaatcaactggagtctatgcttaaaaaaaaaaaatttttttttaaccatccttaaattattgcttaatggtatcatattaacatattctaaataagggctttaaggcacaggctgttgaagcattttctcagaggagtggatctgtagaagtctgtctttctatagaaatattgtgcttactcaagtgttaaattattttttctatgaactagtctacttcttaaaattcaaacatattcttttgatcacattgtttcttgagcatcctgccctgctactaacttttcaacaaggcaaaatggagtaaagtggcaatttctttagatgagtgaaataccctcaagtctcttttctgcccaaaaagggaaaagtgatagaaatgggggtggcaagtggggtgagtggatgaaggtgggtattgggggtggctgtgaaagaaaataatggagaatcacttttctagacatctacctatacttaatctaagaaacaaagtaatctactgtaaagtactctgccccttgaaagaagtattaaaaagagtgaggatggatttagaaaaaaacatgaatttagaaatattcaaaatggtttttgtggcagattcaatattatgaattcacagatatttaaagaatgagaaacatagtaattagtagaaatgccagaaacagttcctggttcctcttgtgtttgacactaagaaaatagcaagagtgtgaaatctcagatacttatgaaatctcacagatgtaaggactcaagtgtagaagaaaatatccccttcttacaaaaagaaatgtcaatttatggagtttgtgggaaatagggcaagaattcttatgcttatgagagccaagtagtcagtggaagagagtagagctcaaaactggattatcaccttagcaacttagaatagtttgaaatagaaaaaaagtatttaatttggatctggatctgttaagatatgcacagtctattttttgtatagtattggaaaataaaaatgctataatttgggtatgggttcttttgtatacattacctgcccattgaggaaaggggcaagtccattatgcaacttctctccaaacccttcatattctggatatgatacttaaagagccatgagcagctacattctgcctatcagaaggcatttattaaatgactgcttgctgaagatgtgtccaaagagatcctacattaaggtcatttgtcagaatgatgtttgtgtttgtttagagttggctgacctccaactcctggggtcaaggaatcctactgccttagcttcccaaatagctaggactataggcatgcacccggccatgtgttttatttatagctcttaaagcccagatgaagaaatcacatttttgcccatagtgaagaaacatttggccattgattagtccttattttcagtgactgtcctgttttcattagattagagagaccctgtgtgggccacagttaatataaaccattatcacttttaagtaaacctgcacatcttagatttcataatttccttattgttctgactcaaaatgaactaagagcttttcactttttgtttgtaagttctcagagagtcgggtctgcaagtgcttttgcctgccaggattttgtactcaaataaatgctatttggcaactaaaattcttgccagctctcatgtaattttgatgttactgaggttggttggtagtttattttattaattttgtggttcttctatcatatagaaaaagccaaatacagttttgtttgaatatttgt

SEQ ID NO: 7002 - protein, 183 aa, Homo sapiens
MDRGEQGLLRTDPVPEEGEDVAATISATETLSEEEQEELRRELAKVEEEIQTLSQVLAAKEKHLAEIKRKLGINSLQELKQNIAKGWQDVTATSAYKKTSETLSQAGQKASAAFSSVGSVITKKLEDVKNSPTFKSFEEKVENLKAIGGTKPAGGDFGEVLNSAANASATTTEPLPEKTQESL

SEQ ID NO: 7003 - DNA, 4187 bp, Homo sapiens
ggttgggtgacgccccaggaaagcgctccaggccgagggcgggcggcgccgccgcgcccgacgcctctgggggtggggacttcgcgggagtcgccggcggaggcgaggaggagctctgcgcggcgcggcgggcgatccgagccgggacgggctgcaggcgggggtgctgcagaggacacgaggcggcgggctggagacatggaccgcggcgagcaaggtctgctgagaacagacccagtccctgaggaaggagaagatgttgctgccacgatcagtgccacagagaccctctcggaagaggagcaggaagagctaagaagagaacttgcaaaggtagaagaagaaatccagactctgtctcaagtgttagcagcaaaagagaagcatctagcagagatcaagcggaaacttggaatcaattctctacaggaactaaaacagaacattgccaaagggtggcaagacgtgacagcaacatctgcttacaagaagacatctgaaaccttatcccaggctggacagaaggcctcagctgctttttcgtctgttggctcagtcatcaccaaaaagctggaagatgtaaaattgcaagccttttcacattcctttagtatacgttccattcagcattcaattagcatgcctgctatgagaaactccccaacttttaaatcatttgaagaaaaggtcgaaaacttaaaggcaatagggggaaccaagcctgctggtggtgattttggagaagtcttgaattcggctgcaaatgctagtgccaccaccacggagcctcttccagaaaagacacaggagagcctgtgagattcctacctttgttctgctacccactgccagatgctgcaagcgaggtccaagcacatcttgtcaacatgcattgccatgaatttctaccagatgtgcttttatttagctttacatattcctttgaccaaatagtttgtgggttaaacaaaatgaaaatatcttcacctctattcttgggaaacaccctttagtgtacatttatgttcctttatttaggaaacaccattataaaaacacttatagtaaatggggacattcactataatgatctaagaagctacagattgtcatagttgttttcctgctttacaaaattgctccagatctggaatgccagtttgacctttgtcttctataatatttcctttttttcccctctttgaatctctgtatatttgattcttaactaaaattgttctcttaaatattctgaatcctggtaattaaaagtttgggtgtattttctttacctccaaggaaagaactactagctacaaaaaatattttggaataagcattgttttggtataaggtacatattttggttgaagacaccagactgaagtaaacagctgtgcatccaatttattatagttttgtaagtaacaatatgtaatcaaacttctaggtgacttgagagtggaacctcctatatcattatttagcaccgtttgtgacagtaaccatttcagtgtattgtttattataccacttatatcaacttatttttcaccaggttaaaattttaatttctacaaaataacattctgaatcaagcacactgtatgttcagtaggttgaactatgaacactgtcatcaatgttcagttcaaaagcctgaaagtttagatctagaagctggtaaaaatgacaatatcaatcacattaggggaaccattgttgtcttcacttaatccatttagcactatttaaaataagcacaccaagttatatgactaatataacttgaaaattttttatactgaggggttggtgataactcttgaggatgtaatgcattaataaaaatcaactcatcattttctacttgttttcaatgtgttggaaactgtaaaatgatactgtagaacctgtctcctactttgaaaactgaatgtcagggctgagtgaatcaaagtgtctagacatatttgcatagaggccaaggtattctattctaataactgcttactcaacactaccaccttttccttatactgtatatgattatggcctacaatgttgtatttgttatttattaaattgtgattgttttattattgtttatgccaaatgttaactgccaagcttggagtgacctaaagcattttttaaaagcatggctagatttacttcagtataaattatcttatgaaaaccaaattttaaaagccacaggtgttgattgttataaaataacatgctgccattcttgattgctagagtttttgttagtactttggatgcaattaaaactatgtgctatcacatgtgaaaagcttaataaattccatctatcagtagtataggtctcaatatttattatgagaccagtggtctggaaacagcttgttgtaccgaatcaactggagtctatgcttaaaaaaaaaaaatttttttttaaccatccttaaattattgcttaatggtatcatattaacatattctaaataagggctttaaggcacaggctgttgaagcattttctcagaggagtggatctgtagaagtctgtctttctatagaaatattgtgcttactcaagtgttaaattattttttctatgaactagtctacttcttaaaattcaaacatattcttttgatcacattgtttcttgagcatcctgccctgctactaacttttcaacaaggcaaaatggagtaaagtggcaatttctttagatgagtgaaataccctcaagtctcttttctgcccaaaaagggaaaagtgatagaaatgggggtggcaagtggggtgagtggatgaaggtgggtattgggggtggctgtgaaagaaaataatggagaatcacttttctagacatctacctatacttaatctaagaaacaaagtaatctactgtaaagtactctgccccttgaaagaagtattaaaaagagtgaggatggatttagaaaaaaacatgaatttagaaatattcaaaatggtttttgtggcagattcaatattatgaattcacagatatttaaagaatgagaaacatagtaattagtagaaatgccagaaacagttcctggttcctcttgtgtttgacactaagaaaatagcaagagtgtgaaatctcagatacttatgaaatctcacagatgtaaggactcaagtgtagaagaaaatatccccttcttacaaaaagaaatgtcaatttatggagtttgtgggaaatagggcaagaattcttatgcttatgagagccaagtagtcagtggaagagagtagagctcaaaactggattatcaccttagcaacttagaatagtttgaaatagaaaaaaagtatttaatttggatctggatctgttaagatatgcacagtctattttttgtatagtattggaaaataaaaatgctataatttgggtatgggttcttttgtatacattacctgcccattgaggaaaggggcaagtccattatgcaacttctctccaaacccttcatattctggatatgatacttaaagagccatgagcagctacattctgcctatcagaaggcatttattaaatgactgcttgctgaagatgtgtccaaagagatcctacattaaggtcatttgtcagaatgatgtttgtgtttgtttagagttggctgacctccaactcctggggtcaaggaatcctactgccttagcttcccaaatagctaggactataggcatgcacccggccatgtgttttatttatagctcttaaagcccagatgaagaaatcacatttttgcccatagtgaagaaacatttggccattgattagtccttattttcagtgactgtcctgttttcattagattagagagaccctgtgtgggccacagttaatataaaccattatcacttttaagtaaacctgcacatcttagatttcataatttccttattgttctgactcaaaatgaactaagagcttttcactttttgtttgtaagttctcagagagtcgggtctgcaagtgcttttgcctgccaggattttgtactcaaataaatgctatttggcaactaaaattcttgccagctctcatgtaattttgatgttactgaggttggttggtagtttattttattaattttgtggttcttctatcatatagaaaaagccaaatacagttttgtttgaatatttgt

SEQ ID NO: 7004 - protein, 206 aa, Homo sapiens
MDRGEQGLLRTDPVPEEGEDVAATISATETLSEEEQEELRRELAKVEEEIQTLSQVLAAKEKHLAEIKRKLGINSLQELKQNIAKGWQDVTATSAYKKTSETLSQAGQKASAAFSSVGSVITKKLEDVKLQAFSHSFSIRSIQHSISMPAMRNSPTFKSFEEKVENLKAIGGTKPAGGDFGEVLNSAANASATTTEPLPEKTQESL

SEQ ID NO: 7005 - DNA, 2456 bp, Homo sapiens
aatgttatgcaagtgtagagacagacagttcactaggtactttaaaataatagaccttacaaagttttctagacagacttcctgtgaagaacaaggagcagggggaaaggggaaggggtagaatttaccaatctgaatatttcagcaagggagaatgcatgagttttactataaaaccacactgaacattgcaacaatactaaattccatacatatataataatcactgagctataaggttgctgatgtatttgttcttgaaagtgaattagagttactttatgcagaatcagctagttttatgtttcataatgtctttcccttttttgaacttttttttaagtctaaagtagggggaaccaagcctgctggtggtgattttggagaagtcttgaattcggctgcaaatgctagtgccaccaccacggagcctcttccagaaaagacacaggagagcctgtgagattcctacctttgttctgctacccactgccagatgctgcaagcgaggtccaagcacatcttgtcaacatgcattgccatgaatttctaccagatgtgcttttatttagctttacatattcttatgaaaaccaaattttaaaagccacaggtgttgattgttataaaataacatgctgccattcttgattgctagagtttttgttagtactttggatgcaattaaaactatgtgctatcacatgtgaaaagcttaataaattccatctatcagtagtataggtctcaatatttattatgagaccagtggtctggaaacagcttgttgtaccgaatcaactggagtctatgcttaaaaaaaaaaaatttttttttaaccatccttaaattattgcttaatggtatcatattaacatattctaaataagggctttaaggcacaggctgttgaagcattttctcagaggagtggatctgtagaagtctgtctttctatagaaatattgtgcttactcaagtgttaaattattttttctatgaactagtctacttcttaaaattcaaacatattcttttgatcacattgtttcttgagcatcctgccctgctactaacttttcaacaaggcaaaatggagtaaagtggcaatttctttagatgagtgaaataccctcaagtctcttttctgcccaaaaagggaaaagtgatagaaatgggggtggcaagtggggtgagtggatgaaggtgggtattgggggtggctgtgaaagaaaataatggagaatcacttttctagacatctacctatacttaatctaagaaacaaagtaatctactgtaaagtactctgccccttgaaagaagtattaaaaagagtgaggatggatttagaaaaaaacatgaatttagaaatattcaaaatggtttttgtggcagattcaatattatgaattcacagatatttaaagaatgagaaacatagtaattagtagaaatgccagaaacagttcctggttcctcttgtgtttgacactaagaaaatagcaagagtgtgaaatctcagatacttatgaaatctcacagatgtaaggactcaagtgtagaagaaaatatccccttcttacaaaaagaaatgtcaatttatggagtttgtgggaaatagggcaagaattcttatgcttatgagagccaagtagtcagtggaagagagtagagctcaaaactggattatcaccttagcaacttagaatagtttgaaatagaaaaaaagtatttaatttggatctggatctgttaagatatgcacagtctattttttgtatagtattggaaaataaaaatgctataatttgggtatgggttcttttgtatacattacctgcccattgaggaaaggggcaagtccattatgcaacttctctccaaacccttcatattctggatatgatacttaaagagccatgagcagctacattctgcctatcagaaggcatttattaaatgactgcttgctgaagatgtgtccaaagagatcctacattaaggtcatttgtcagaatgatgtttgtgtttgtttagagttggctgacctccaactcctggggtcaaggaatcctactgccttagcttcccaaatagctaggactataggcatgcacccggccatgtgttttatttatagctcttaaagcccagatgaagaaatcacatttttgcccatagtgaagaaacatttggccattgattagtccttattttcagtgactgtcctgttttcattagattagagagaccctgtgtgggccacagttaatataaaccattatcacttttaagtaaacctgcacatcttagatttcataatttccttattgttctgactcaaaatgaactaagagcttttcactttttgtttgtaagttctcagagagtcgggtctgcaagtgcttttgcctgccaggattttgtactcaaataaatgctatttggcaact

SEQ ID NO: 7006 - protein, 39 aa, Homo sapiens; identical to SEQ ID NO: 6982

SEQ ID NO: 7007 - DNA, 3653 bp, Homo sapiens
attacttatgtctgagactggccctgttcatggaatcaaatgcatactcttaaaatattagatcagaaattgagaatcttacattataaatacttgtatgtacctgcacatatatggtacagattatatctgttcttttgccgattgagaataatgttgaagaggaatcaattatattttcaaactagttggattttttttcagtatttgtatttactatttgtttttcttttctctccatagaaactccccaacttttaaatcatttgaagaaaaggtcgaaaacttaaaggcaatagggggaaccaagcctgctggtggtgattttggagaagtcttgaattcggctgcaaatgctagtgccaccaccacggagcctcttccagaaaagacacaggagagcctgtgagattcctacctttgttctgctacccactgccagatgctgcaagcgaggtccaagcacatcttgtcaacatgcattgccatgaatttctaccagatgtgcttttatttagctttacatattcctttgaccaaatagtttgtgggttaaacaaaatgaaaatatcttcacctctattcttgggaaacaccctttagtgtacatttatgttcctttatttaggaaacaccattataaaaacacttatagtaaatggggacattcactataatgatctaagaagctacagattgtcatagttgttttcctgctttacaaaattgctccagatctggaatgccagtttgacctttgtcttctataatatttcctttttttcccctctttgaatctctgtatatttgattcttaactaaaattgttctcttaaatattctgaatcctggtaattaaaagtttgggtgtattttctttacctccaaggaaagaactactagctacaaaaaatattttggaataagcattgttttggtataaggtacatattttggttgaagacaccagactgaagtaaacagctgtgcatccaatttattatagttttgtaagtaacaatatgtaatcaaacttctaggtgacttgagagtggaacctcctatatcattatttagcaccgtttgtgacagtaaccatttcagtgtattgtttattataccacttatatcaacttatttttcaccaggttaaaattttaatttctacaaaataacattctgaatcaagcacactgtatgttcagtaggttgaactatgaacactgtcatcaatgttcagttcaaaagcctgaaagtttagatctagaagctggtaaaaatgacaatatcaatcacattaggggaaccattgttgtcttcacttaatccatttagcactatttaaaataagcacaccaagttatatgactaatataacttgaaaattttttatactgaggggttggtgataactcttgaggatgtaatgcattaataaaaatcaactcatcattttctacttgttttcaatgtgttggaaactgtaaaatgatactgtagaacctgtctcctactttgaaaactgaatgtcagggctgagtgaatcaaagtgtctagacatatttgcatagaggccaaggtattctattctaataactgcttactcaacactaccaccttttccttatactgtatatgattatggcctacaatgttgtatttgttatttattaaattgtgattgttttattattgtttatgccaaatgttaactgccaagcttggagtgacctaaagcattttttaaaagcatggctagatttacttcagtataaattatcttatgaaaaccaaattttaaaagccacaggtgttgattgttataaaataacatgctgccattcttgattgctagagtttttgttagtactttggatgcaattaaaactatgtgctatcacatgtgaaaagcttaataaattccatctatcagtagtataggtctcaatatttattatgagaccagtggtctggaaacagcttgttgtaccgaatcaactggagtctatgcttaaaaaaaaaaaatttttttttaaccatccttaaattattgcttaatggtatcatattaacatattctaaataagggctttaaggcacaggctgttgaagcattttctcagaggagtggatctgtagaagtctgtctttctatagaaatattgtgcttactcaagtgttaaattattttttctatgaactagtctacttcttaaaattcaaacatattcttttgatcacattgtttcttgagcatcctgccctgctactaacttttcaacaaggcaaaatggagtaaagtggcaatttctttagatgagtgaaataccctcaagtctcttttctgcccaaaaagggaaaagtgatagaaatgggggtggcaagtggggtgagtggatgaaggtgggtattgggggtggctgtgaaagaaaataatggagaatcacttttctagacatctacctatacttaatctaagaaacaaagtaatctactgtaaagtactctgccccttgaaagaagtattaaaaagagtgaggatggatttagaaaaaaacatgaatttagaaatattcaaaatggtttttgtggcagattcaatattatgaattcacagatatttaaagaatgagaaacatagtaattagtagaaatgccagaaacagttcctggttcctcttgtgtttgacactaagaaaatagcaagagtgtgaaatctcagatacttatgaaatctcacagatgtaaggactcaagtgtagaagaaaatatccccttcttacaaaaagaaatgtcaatttatggagtttgtgggaaatagggcaagaattcttatgcttatgagagccaagtagtcagtggaagagagtagagctcaaaactggattatcaccttagcaacttagaatagtttgaaatagaaaaaaagtatttaatttggatctggatctgttaagatatgcacagtctattttttgtatagtattggaaaataaaaatgctataatttgggtatgggttcttttgtatacattacctgcccattgaggaaaggggcaagtccattatgcaacttctctccaaacccttcatattctggatatgatacttaaagagccatgagcagctacattctgcctatcagaaggcatttattaaatgactgcttgctgaagatgtgtccaaagagatcctacattaaggtcatttgtcagaatgatgtttgtgtttgtttagagttggctgacctccaactcctggggtcaaggaatcctactgccttagcttcccaaatagctaggactataggcatgcacccggccatgtgttttatttatagctcttaaagcccagatgaagaaatcacatttttgcccatagtgaagaaacatttggccattgattagtccttattttcagtgactgtcctgttttcattagattagagagaccctgtgtgggccacagttaatataaaccattatcacttttaagtaaacctgcacatcttagatttcataatttccttattgttctgactcaaaatgaactaagagcttttcactttttgtttgtaagttctcagagagtcgggtctgcaagtgcttttgcctgccaggattttgtactcaaataaatgctatttggcaact

SEQ ID NO: 7008 - protein, 75 aa, Homo sapiens [sequence omitted]

SEQ ID NO: 7009 - DNA, 3587 bp, Homo sapiens
actccttcaaaccagtacctggaaggctcatctaaggtcttctaggcctagcattctaacatcaaatgatcatctgatgatcatttaaggttgttgaaaaattctggttgtgaacttctttgtctttttagttcttcatgatcatgcaggattgcaagccttttcacattcctttagaaactccccaacttttaaatcatttgaagaaaaggtcgaaaacttaaaggcaatagggggaaccaagcctgctggtggtgattttggagaagtcttgaattcggctgcaaatgctagtgccaccaccacggagcctcttccagaaaagacacaggagagcctgtgagattcctacctttgttctgctacccactgccagatgctgcaagcgaggtccaagcacatcttgtcaacatgcattgccatgaatttctaccagatgtgcttttatttagctttacatattcctttgaccaaatagtttgtgggttaaacaaaatgaaaatatcttcacctctattcttgggaaacaccctttagtgtacatttatgttcctttatttaggaaacaccattataaaaacacttatagtaaatggggacattcactataatgatctaagaagctacagattgtcatagttgttttcctgctttacaaaattgctccagatctggaatgccagtttgacctttgtcttctataatatttcctttttttcccctctttgaatctctgtatatttgattcttaactaaaattgttctcttaaatattctgaatcctggtaattaaaagtttgggtgtattttctttacctccaaggaaagaactactagctacaaaaaatattttggaataagcattgttttggtataaggtacatattttggttgaagacaccagactgaagtaaacagctgtgcatccaatttattatagttttgtaagtaacaatatgtaatcaaacttctaggtgacttgagagtggaacctcctatatcattatttagcaccgtttgtgacagtaaccatttcagtgtattgtttattataccacttatatcaacttatttttcaccaggttaaaattttaatttctacaaaataacattctgaatcaagcacactgtatgttcagtaggttgaactatgaacactgtcatcaatgttcagttcaaaagcctgaaagtttagatctagaagctggtaaaaatgacaatatcaatcacattaggggaaccattgttgtcttcacttaatccatttagcactatttaaaataagcacaccaagttatatgactaatataacttgaaaattttttatactgaggggttggtgataactcttgaggatgtaatgcattaataaaaatcaactcatcattttctacttgttttcaatgtgttggaaactgtaaaatgatactgtagaacctgtctcctactttgaaaactgaatgtcagggctgagtgaatcaaagtgtctagacatatttgcatagaggccaaggtattctattctaataactgcttactcaacactaccaccttttccttatactgtatatgattatggcctacaatgttgtatttgttatttattaaattgtgattgttttattattgtttatgccaaatgttaactgccaagcttggagtgacctaaagcattttttaaaagcatggctagatttacttcagtataaattatcttatgaaaaccaaattttaaaagccacaggtgttgattgttataaaataacatgctgccattcttgattgctagagtttttgttagtactttggatgcaattaaaactatgtgctatcacatgtgaaaagcttaataaattccatctatcagtagtataggtctcaatatttattatgagaccagtggtctggaaacagcttgttgtaccgaatcaactggagtctatgcttaaaaaaaaaaaatttttttttaaccatccttaaattattgcttaatggtatcatattaacatattctaaataagggctttaaggcacaggctgttgaagcattttctcagaggagtggatctgtagaagtctgtctttctatagaaatattgtgcttactcaagtgttaaattattttttctatgaactagtctacttcttaaaattcaaacatattcttttgatcacattgtttcttgagcatcctgccctgctactaacttttcaacaaggcaaaatggagtaaagtggcaatttctttagatgagtgaaataccctcaagtctcttttctgcccaaaaagggaaaagtgatagaaatgggggtggcaagtggggtgagtggatgaaggtgggtattgggggtggctgtgaaagaaaataatggagaatcacttttctagacatctacctatacttaatctaagaaacaaagtaatctactgtaaagtactctgccccttgaaagaagtattaaaaagagtgaggatggatttagaaaaaaacatgaatttagaaatattcaaaatggtttttgtggcagattcaatattatgaattcacagatatttaaagaatgagaaacatagtaattagtagaaatgccagaaacagttcctggttcctcttgtgtttgacactaagaaaatagcaagagtgtgaaatctcagatacttatgaaatctcacagatgtaaggactcaagtgtagaagaaaatatccccttcttacaaaaagaaatgtcaatttatggagtttgtgggaaatagggcaagaattcttatgcttatgagagccaagtagtcagtggaagagagtagagctcaaaactggattatcaccttagcaacttagaatagtttgaaatagaaaaaaagtatttaatttggatctggatctgttaagatatgcacagtctattttttgtatagtattggaaaataaaaatgctataatttgggtatgggttcttttgtatacattacctgcccattgaggaaaggggcaagtccattatgcaacttctctccaaacccttcatattctggatatgatacttaaagagccatgagcagctacattctgcctatcagaaggcatttattaaatgactgcttgctgaagatgtgtccaaagagatcctacattaaggtcatttgtcagaatgatgtttgtgtttgtttagagttggctgacctccaactcctggggtcaaggaatcctactgccttagcttcccaaatagctaggactataggcatgcacccggccatgtgttttatttatagctcttaaagcccagatgaagaaatcacatttttgcccatagtgaagaaacatttggccattgattagtccttattttcagtgactgtcctgttttcattagattagagagaccctgtgtgggccacagttaatataaaccattatcacttttaagtaaacctgcacatcttagatttcataatttccttattgttctgactcaaaatgaactaagagcttttcactttttgtttgtaagttctcagagagtcgggtctgcaagtgcttttgcctgccaggattttgtactcaaataaatgctatttggcaact

SEQ ID NO: 7010 - protein, 75 aa, Homo sapiens [sequence omitted]

SEQ ID NO: 7011 - DNA, 3575 bp, Homo sapiens
agagtgagggagggcactccttcaaaccagtacctggaaggctcatctaaggtcttctaggcctagcattctaacatcaaatgatcatctgatgatcatttaaggttgttgaaaaattctggttgtgaacttctttgtctttttagttcttcatgatcatgcaggaaactccccaacttttaaatcatttgaagaaaaggtcgaaaacttaaaggcaatagggggaaccaagcctgctggtggtgattttggagaagtcttgaattcggctgcaaatgctagtgccaccaccacggagcctcttccagaaaagacacaggagagcctgtgagattcctacctttgttctgctacccactgccagatgctgcaagcgaggtccaagcacatcttgtcaacatgcattgccatgaatttctaccagatgtgcttttatttagctttacatattcctttgaccaaatagtttgtgggttaaacaaaatgaaaatatcttcacctctattcttgggaaacaccctttagtgtacatttatgttcctttatttaggaaacaccattataaaaacacttatagtaaatggggacattcactataatgatctaagaagctacagattgtcatagttgttttcctgctttacaaaattgctccagatctggaatgccagtttgacctttgtcttctataatatttcctttttttcccctctttgaatctctgtatatttgattcttaactaaaattgttctcttaaatattctgaatcctggtaattaaaagtttgggtgtattttctttacctccaaggaaagaactactagctacaaaaaatattttggaataagcattgttttggtataaggtacatattttggttgaagacaccagactgaagtaaacagctgtgcatccaatttattatagttttgtaagtaacaatatgtaatcaaacttctaggtgacttgagagtggaacctcctatatcattatttagcaccgtttgtgacagtaaccatttcagtgtattgtttattataccacttatatcaacttatttttcaccaggttaaaattttaatttctacaaaataacattctgaatcaagcacactgtatgttcagtaggttgaactatgaacactgtcatcaatgttcagttcaaaagcctgaaagtttagatctagaagctggtaaaaatgacaatatcaatcacattaggggaaccattgttgtcttcacttaatccatttagcactatttaaaataagcacaccaagttatatgactaatataacttgaaaattttttatactgaggggttggtgataactcttgaggatgtaatgcattaataaaaatcaactcatcattttctacttgttttcaatgtgttggaaactgtaaaatgatactgtagaacctgtctcctactttgaaaactgaatgtcagggctgagtgaatcaaagtgtctagacatatttgcatagaggccaaggtattctattctaataactgcttactcaacactaccaccttttccttatactgtatatgattatggcctacaatgttgtatttgttatttattaaattgtgattgttttattattgtttatgccaaatgttaactgccaagcttggagtgacctaaagcattttttaaaagcatggctagatttacttcagtataaattatcttatgaaaaccaaattttaaaagccacaggtgttgattgttataaaataacatgctgccattcttgattgctagagtttttgttagtactttggatgcaattaaaactatgtgctatcacatgtgaaaagcttaataaattccatctatcagtagtataggtctcaatatttattatgagaccagtggtctggaaacagcttgttgtaccgaatcaactggagtctatgcttaaaaaaaaaaaatttttttttaaccatccttaaattattgcttaatggtatcatattaacatattctaaataagggctttaaggcacaggctgttgaagcattttctcagaggagtggatctgtagaagtctgtctttctatagaaatattgtgcttactcaagtgttaaattattttttctatgaactagtctacttcttaaaattcaaacatattcttttgatcacattgtttcttgagcatcctgccctgctactaacttttcaacaaggcaaaatggagtaaagtggcaatttctttagatgagtgaaataccctcaagtctcttttctgcccaaaaagggaaaagtgatagaaatgggggtggcaagtggggtgagtggatgaaggtgggtattgggggtggctgtgaaagaaaataatggagaatcacttttctagacatctacctatacttaatctaagaaacaaagtaatctactgtaaagtactctgccccttgaaagaagtattaaaaagagtgaggatggatttagaaaaaaacatgaatttagaaatattcaaaatggtttttgtggcagattcaatattatgaattcacagatatttaaagaatgagaaacatagtaattagtagaaatgccagaaacagttcctggttcctcttgtgtttgacactaagaaaatagcaagagtgtgaaatctcagatacttatgaaatctcacagatgtaaggactcaagtgtagaagaaaatatccccttcttacaaaaagaaatgtcaatttatggagtttgtgggaaatagggcaagaattcttatgcttatgagagccaagtagtcagtggaagagagtagagctcaaaactggattatcaccttagcaacttagaatagtttgaaatagaaaaaaagtatttaatttggatctggatctgttaagatatgcacagtctattttttgtatagtattggaaaataaaaatgctataatttgggtatgggttcttttgtatacattacctgcccattgaggaaaggggcaagtccattatgcaacttctctccaaacccttcatattctggatatgatacttaaagagccatgagcagctacattctgcctatcagaaggcatttattaaatgactgcttgctgaagatgtgtccaaagagatcctacattaaggtcatttgtcagaatgatgtttgtgtttgtttagagttggctgacctccaactcctggggtcaaggaatcctactgccttagcttcccaaatagctaggactataggcatgcacccggccatgtgttttatttatagctcttaaagcccagatgaagaaatcacatttttgcccatagtgaagaaacatttggccattgattagtccttattttcagtgactgtcctgttttcattagattagagagaccctgtgtgggccacagttaatataaaccattatcacttttaagtaaacctgcacatcttagatttcataatttccttattgttctgactcaaaatgaactaagagcttttcactttttgtttgtaagttctcagagagtcgggtctgcaagtgcttttgcctgccaggattttgtactcaaataaatgctatttggcaact

SEQ ID NO: 7012 - protein, 75 aa, Homo sapiens [sequence omitted]

SEQ ID NO: 7013 - DNA, 3743 bp, Homo sapiens
ctttctggctggactagggcactgcagaagattgtgcctgagcttagggttgagcatacgaagatgtggtgatgccgctctgctggttatgaaggattttagaagttctgaaaaatgttttctctttttgagagttctccagcaggtggtgaccactgcacttgaaacaattgatattagaaaagatgagctgacccttcttttgctctgtgtgtttataatttaatatagttacaagaagacatctgaaaccttatcccaggctggacagaaggcctcagctgctttttcgtctgttggctcagtcatcaccaaaaagctggaagatgtaaaaaactccccaacttttaaatcatttgaagaaaaggtcgaaaacttaaaggcaatagggggaaccaagcctgctggtggtgattttggagaagtcttgaattcggctgcaaatgctagtgccaccaccacggagcctcttccagaaaagacacaggagagcctgtgagattcctacctttgttctgctacccactgccagatgctgcaagcgaggtccaagcacatcttgtcaacatgcattgccatgaatttctaccagatgtgcttttatttagctttacatattcctttgaccaaatagtttgtgggttaaacaaaatgaaaatatcttcacctctattcttgggaaacaccctttagtgtacatttatgttcctttatttaggaaacaccattataaaaacacttatagtaaatggggacattcactataatgatctaagaagctacagattgtcatagttgttttcctgctttacaaaattgctccagatctggaatgccagtttgacctttgtcttctataatatttcctttttttcccctctttgaatctctgtatatttgattcttaactaaaattgttctcttaaatattctgaatcctggtaattaaaagtttgggtgtattttctttacctccaaggaaagaactactagctacaaaaaatattttggaataagcattgttttggtataaggtacatattttggttgaagacaccagactgaagtaaacagctgtgcatccaatttattatagttttgtaagtaacaatatgtaatcaaacttctaggtgacttgagagtggaacctcctatatcattatttagcaccgtttgtgacagtaaccatttcagtgtattgtttattataccacttatatcaacttatttttcaccaggttaaaattttaatttctacaaaataacattctgaatcaagcacactgtatgttcagtaggttgaactatgaacactgtcatcaatgttcagttcaaaagcctgaaagtttagatctagaagctggtaaaaatgacaatatcaatcacattaggggaaccattgttgtcttcacttaatccatttagcactatttaaaataagcacaccaagttatatgactaatataacttgaaaattttttatactgaggggttggtgataactcttgaggatgtaatgcattaataaaaatcaactcatcattttctacttgttttcaatgtgttggaaactgtaaaatgatactgtagaacctgtctcctactttgaaaactgaatgtcagggctgagtgaatcaaagtgtctagacatatttgcatagaggccaaggtattctattctaataactgcttactcaacactaccaccttttccttatactgtatatgattatggcctacaatgttgtatttgttatttattaaattgtgattgttttattattgtttatgccaaatgttaactgccaagcttggagtgacctaaagcattttttaaaagcatggctagatttacttcagtataaattatcttatgaaaaccaaattttaaaagccacaggtgttgattgttataaaataacatgctgccattcttgattgctagagtttttgttagtactttggatgcaattaaaactatgtgctatcacatgtgaaaagcttaataaattccatctatcagtagtataggtctcaatatttattatgagaccagtggtctggaaacagcttgttgtaccgaatcaactggagtctatgcttaaaaaaaaaaaatttttttttaaccatccttaaattattgcttaatggtatcatattaacatattctaaataagggctttaaggcacaggctgttgaagcattttctcagaggagtggatctgtagaagtctgtctttctatagaaatattgtgcttactcaagtgttaaattattttttctatgaactagtctacttcttaaaattcaaacatattcttttgatcacattgtttcttgagcatcctgccctgctactaacttttcaacaaggcaaaatggagtaaagtggcaatttctttagatgagtgaaataccctcaagtctcttttctgcccaaaaagggaaaagtgatagaaatgggggtggcaagtggggtgagtggatgaaggtgggtattgggggtggctgtgaaagaaaataatggagaatcacttttctagacatctacctatacttaatctaagaaacaaagtaatctactgtaaagtactctgccccttgaaagaagtattaaaaagagtgaggatggatttagaaaaaaacatgaatttagaaatattcaaaatggtttttgtggcagattcaatattatgaattcacagatatttaaagaatgagaaacatagtaattagtagaaatgccagaaacagttcctggttcctcttgtgtttgacactaagaaaatagcaagagtgtgaaatctcagatacttatgaaatctcacagatgtaaggactcaagtgtagaagaaaatatccccttcttacaaaaagaaatgtcaatttatggagtttgtgggaaatagggcaagaattcttatgcttatgagagccaagtagtcagtggaagagagtagagctcaaaactggattatcaccttagcaacttagaatagtttgaaatagaaaaaaagtatttaatttggatctggatctgttaagatatgcacagtctattttttgtatagtattggaaaataaaaatgctataatttgggtatgggttcttttgtatacattacctgcccattgaggaaaggggcaagtccattatgcaacttctctccaaacccttcatattctggatatgatacttaaagagccatgagcagctacattctgcctatcagaaggcatttattaaatgactgcttgctgaagatgtgtccaaagagatcctacattaaggtcatttgtcagaatgatgtttgtgtttgtttagagttggctgacctccaactcctggggtcaaggaatcctactgccttagcttcccaaatagctaggactataggcatgcacccggccatgtgttttatttatagctcttaaagcccagatgaagaaatcacatttttgcccatagtgaagaaacatttggccattgattagtccttattttcagtgactgtcctgttttcattagattagagagaccctgtgtgggccacagttaatataaaccattatcacttttaagtaaacctgcacatcttagatttcataatttccttattgttctgactcaaaatgaactaagagcttttcactttttgtttgtaagttctcagagagtcgggtctgcaagtgcttttgcctgccaggattttgtactcaaataaatgctatttggcaact

SEQ ID NO: 7014 - protein, 75 aa, Homo sapiens [sequence omitted]

SEQ ID NO: 7015 - DNA, 3841 bp, Homo sapiens
ggagcttaaatagggattttacttagattttgcactttaaaaaatggtttaaatccccaaccaggtctgctgagaacagacccagtccctgaggaaggagaagatgttgctgccacgatcagtgccacagagaccctctcggaagaggagcaggaagagctaagaagagaacttgcaaaggtagaagaagaaatccagactctgtctcaagtgttagcagcaaaagagaagcatctagcagagatcaagcggaaacttggaatcaattctctacaggaactaaaacagaacattgccaaagggtggcaagacgtgacagcaacatctgcttacaagaagacatctgaaaccttatcccaggctggacagaaggcctcagctgctttttcgtctgttggctcagtcatcaccaaaaagctggaagatgtaaaaaactccccaacttttaaatcatttgaagaaaaggtcgaaaacttaaaggcaatagggggaaccaagcctgctggtggtgattttggagaagtcttgaattcggctgcaaatgctagtgccaccaccacggagcctcttccagaaaagacacaggagagcctgtgagattcctacctttgttctgctacccactgccagatgctgcaagcgaggtccaagcacatcttgtcaacatgcattgccatgaatttctaccagatgtgcttttatttagctttacatattcctttgaccaaatagtttgtgggttaaacaaaatgaaaatatcttcacctctattcttgggaaacaccctttagtgtacatttatgttcctttatttaggaaacaccattataaaaacacttatagtaaatggggacattcactataatgatctaagaagctacagattgtcatagttgttttcctgctttacaaaattgctccagatctggaatgccagtttgacctttgtcttctataatatttcctttttttcccctctttgaatctctgtatatttgattcttaactaaaattgttctcttaaatattctgaatcctggtaattaaaagtttgggtgtattttctttacctccaaggaaagaactactagctacaaaaaatattttggaataagcattgttttggtataaggtacatattttggttgaagacaccagactgaagtaaacagctgtgcatccaatttattatagttttgtaagtaacaatatgtaatcaaacttctaggtgacttgagagtggaacctcctatatcattatttagcaccgtttgtgacagtaaccatttcagtgtattgtttattataccacttatatcaacttatttttcaccaggttaaaattttaatttctacaaaataacattctgaatcaagcacactgtatgttcagtaggttgaactatgaacactgtcatcaatgttcagttcaaaagcctgaaagtttagatctagaagctggtaaaaatgacaatatcaatcacattaggggaaccattgttgtcttcacttaatccatttagcactatttaaaataagcacaccaagttatatgactaatataacttgaaaattttttatactgaggggttggtgataactcttgaggatgtaatgcattaataaaaatcaactcatcattttctacttgttttcaatgtgttggaaactgtaaaatgatactgtagaacctgtctcctactttgaaaactgaatgtcagggctgagtgaatcaaagtgtctagacatatttgcatagaggccaaggtattctattctaataactgcttactcaacactaccaccttttccttatactgtatatgattatggcctacaatgttgtatttgttatttattaaattgtgattgttttattattgtttatgccaaatgttaactgccaagcttggagtgacctaaagcattttttaaaagcatggctagatttacttcagtataaattatcttatgaaaaccaaattttaaaagccacaggtgttgattgttataaaataacatgctgccattcttgattgctagagtttttgttagtactttggatgcaattaaaactatgtgctatcacatgtgaaaagcttaataaattccatctatcagtagtataggtctcaatatttattatgagaccagtggtctggaaacagcttgttgtaccgaatcaactggagtctatgcttaaaaaaaaaaaatttttttttaaccatccttaaattattgcttaatggtatcatattaacatattctaaataagggctttaaggcacaggctgttgaagcattttctcagaggagtggatctgtagaagtctgtctttctatagaaatattgtgcttactcaagtgttaaattattttttctatgaactagtctacttcttaaaattcaaacatattcttttgatcacattgtttcttgagcatcctgccctgctactaacttttcaacaaggcaaaatggagtaaagtggcaatttctttagatgagtgaaataccctcaagtctcttttctgcccaaaaagggaaaagtgatagaaatgggggtggcaagtggggtgagtggatgaaggtgggtattgggggtggctgtgaaagaaaataatggagaatcacttttctagacatctacctatacttaatctaagaaacaaagtaatctactgtaaagtactctgccccttgaaagaagtattaaaaagagtgaggatggatttagaaaaaaacatgaatttagaaatattcaaaatggtttttgtggcagattcaatattatgaattcacagatatttaaagaatgagaaacatagtaattagtagaaatgccagaaacagttcctggttcctcttgtgtttgacactaagaaaatagcaagagtgtgaaatctcagatacttatgaaatctcacagatgtaaggactcaagtgtagaagaaaatatccccttcttacaaaaagaaatgtcaatttatggagtttgtgggaaatagggcaagaattcttatgcttatgagagccaagtagtcagtggaagagagtagagctcaaaactggattatcaccttagcaacttagaatagtttgaaatagaaaaaaagtatttaatttggatctggatctgttaagatatgcacagtctattttttgtatagtattggaaaataaaaatgctataatttgggtatgggttcttttgtatacattacctgcccattgaggaaaggggcaagtccattatgcaacttctctccaaacccttcatattctggatatgatacttaaagagccatgagcagctacattctgcctatcagaaggcatttattaaatgactgcttgctgaagatgtgtccaaagagatcctacattaaggtcatttgtcagaatgatgtttgtgtttgtttagagttggctgacctccaactcctggggtcaaggaatcctactgccttagcttcccaaatagctaggactataggcatgcacccggccatgtgttttatttatagctcttaaagcccagatgaagaaatcacatttttgcccatagtgaagaaacatttggccattgattagtccttattttcagtgactgtcctgttttcattagattagagagaccctgtgtgggccacagttaatataaaccattatcacttttaagtaaacctgcacatcttagatttcataatttccttattgttctgactcaaaatgaactaagagcttttcactttttgtttgtaagttctcagagagtcgggtctgcaagtgcttttgcctgccaggattttgtactcaaataaatgctatttggcaact

SEQ ID NO: 7016 - protein, 75 aa, Homo sapiens [sequence omitted]

SEQ ID NO: 7017 - DNA, 4362 bp, Homo sapiens
agtgtctgatgtttgcctgaactgtttgtacctctgggccatattgcagaaccctgcccttctttgttgactgaggaaagctcgctccctgcccaggtttttcattgttgatcgaaattaacaccaggtggtgaatagagcccctcctaaggttgctcaggataaatcatttattaaataggtctgcttatcaggaggggcgtgaaggctcccaaaaggaaatgctggcacctgggcccagaagccagggcctctaactcctggggttgatttcttcagtgaagttgcaccctacaaagggaatatggccaaagcggcactcaactgaaggctgatatcaggcgattagacagccatgcattctgcgtttgtctggaatggattgtagagagatggacttatatgaggactaccagtccccgtttgattttgatgcaggagtgaacaaaagctatctctacttgtctcctagtggaaattcatctccacccggatcacctactcttcagaaatttggtctgctgagaacagacccagtccctgaggaaggagaagatgttgctgccacgatcagtgccacagagaccctctcggaagaggagcaggaagagctaagaagagaacttgcaaaggtagaagaagaaatccagactctgtctcaagtgttagcagcaaaagagaagcatctagcagagatcaagcggaaacttggaatcaattctctacaggaactaaaacagaacattgccaaagggtggcaagacgtgacagcaacatctgcttacaagaagacatctgaaaccttatcccaggctggacagaaggcctcagctgctttttcgtctgttggctcagtcatcaccaaaaagctggaagatgtaaaattgcaagccttttcacattcctttagtatacgttccattcagcattcaattagcatgcctgctatgagaaactccccaacttttaaatcatttgaagaaaaggtcgaaaacttaaaggcaatagggggaaccaagcctgctggtggtgattttggagaagtcttgaattcggctgcaaatgctagtgccaccaccacggagcctcttccagaaaagacacaggagagcctgtgagattcctacctttgttctgctacccactgccagatgctgcaagcgaggtccaagcacatcttgtcaacatgcattgccatgaatttctaccagatgtgcttttatttagctttacatattcctttgaccaaatagtttgtgggttaaacaaaatgaaaatatcttcacctctattcttgggaaacaccctttagtgtacatttatgttcctttatttaggaaacaccattataaaaacacttatagtaaatggggacattcactataatgatctaagaagctacagattgtcatagttgttttcctgctttacaaaattgctccagatctggaatgccagtttgacctttgtcttctataatatttcctttttttcccctctttgaatctctgtatatttgattcttaactaaaattgttctcttaaatattctgaatcctggtaattaaaagtttgggtgtattttctttacctccaaggaaagaactactagctacaaaaaatattttggaataagcattgttttggtataaggtacatattttggttgaagacaccagactgaagtaaacagctgtgcatccaatttattatagttttgtaagtaacaatatgtaatcaaacttctaggtgacttgagagtggaacctcctatatcattatttagcaccgtttgtgacagtaaccatttcagtgtattgtttattataccacttatatcaacttatttttcaccaggttaaaattttaatttctacaaaataacattctgaatcaagcacactgtatgttcagtaggttgaactatgaacactgtcatcaatgttcagttcaaaagcctgaaagtttagatctagaagctggtaaaaatgacaatatcaatcacattaggggaaccattgttgtcttcacttaatccatttagcactatttaaaataagcacaccaagttatatgactaatataacttgaaaattttttatactgaggggttggtgataactcttgaggatgtaatgcattaataaaaatcaactcatcattttctacttgttttcaatgtgttggaaactgtaaaatgatactgtagaacctgtctcctactttgaaaactgaatgtcagggctgagtgaatcaaagtgtctagacatatttgcatagaggccaaggtattctattctaataactgcttactcaacactaccaccttttccttatactgtatatgattatggcctacaatgttgtatttgttatttattaaattgtgattgttttattattgtttatgccaaatgttaactgccaagcttggagtgacctaaagcattttttaaaagcatggctagatttacttcagtataaattatcttatgaaaaccaaattttaaaagccacaggtgttgattgttataaaataacatgctgccattcttgattgctagagtttttgttagtactttggatgcaattaaaactatgtgctatcacatgtgaaaagcttaataaattccatctatcagtagtataggtctcaatatttattatgagaccagtggtctggaaacagcttgttgtaccgaatcaactggagtctatgcttaaaaaaaaaaaatttttttttaaccatccttaaattattgcttaatggtatcatattaacatattctaaataagggctttaaggcacaggctgttgaagcattttctcagaggagtggatctgtagaagtctgtctttctatagaaatattgtgcttactcaagtgttaaattattttttctatgaactagtctacttcttaaaattcaaacatattcttttgatcacattgtttcttgagcatcctgccctgctactaacttttcaacaaggcaaaatggagtaaagtggcaatttctttagatgagtgaaataccctcaagtctcttttctgcccaaaaagggaaaagtgatagaaatgggggtggcaagtggggtgagtggatgaaggtgggtattgggggtggctgtgaaagaaaataatggagaatcacttttctagacatctacctatacttaatctaagaaacaaagtaatctactgtaaagtactctgccccttgaaagaagtattaaaaagagtgaggatggatttagaaaaaaacatgaatttagaaatattcaaaatggtttttgtggcagattcaatattatgaattcacagatatttaaagaatgagaaacatagtaattagtagaaatgccagaaacagttcctggttcctcttgtgtttgacactaagaaaatagcaagagtgtgaaatctcagatacttatgaaatctcacagatgtaaggactcaagtgtagaagaaaatatccccttcttacaaaaagaaatgtcaatttatggagtttgtgggaaatagggcaagaattcttatgcttatgagagccaagtagtcagtggaagagagtagagctcaaaactggattatcaccttagcaacttagaatagtttgaaatagaaaaaaagtatttaatttggatctggatctgttaagatatgcacagtctattttttgtatagtattggaaaataaaaatgctataatttgggtatgggttcttttgtatacattacctgcccattgaggaaaggggcaagtccattatgcaacttctctccaaacccttcatattctggatatgatacttaaagagccatgagcagctacattctgcctatcagaaggcatttattaaatgactgcttgctgaagatgtgtccaaagagatcctacattaaggtcatttgtcagaatgatgtttgtgtttgtttagagttggctgacctccaactcctggggtcaaggaatcctactgccttagcttcccaaatagctaggactataggcatgcacccggccatgtgttttatttatagctcttaaagcccagatgaagaaatcacatttttgcccatagtgaagaaacatttggccattgattagtccttattttcagtgactgtcctgttttcattagattagagagaccctgtgtgggccacagttaatataaaccattatcacttttaagtaaacctgcacatcttagatttcataatttccttattgttctgactcaaaatgaactaagagcttttcactttttgtttgtaagttctcagagagtcgggtctgcaagtgcttttgcctgccaggattttgtactcaaataaatgctatttggcaact

SEQ ID NO: 7018 - protein, 246 aa, Homo sapiens; identical to SEQ ID NO: 6996

SEQ ID NO: 7019 - DNA, 4293 bp, Homo sapiens
agtgtctgatgtttgcctgaactgtttgtacctctgggccatattgcagaaccctgcccttctttgttgactgaggaaagctcgctccctgcccaggtttttcattgttgatcgaaattaacaccaggtggtgaatagagcccctcctaaggttgctcaggataaatcatttattaaataggtctgcttatcaggaggggcgtgaaggctcccaaaaggaaatgctggcacctgggcccagaagccagggcctctaactcctggggttgatttcttcagtgaagttgcaccctacaaagggaatatggccaaagcggcactcaactgaaggctgatatcaggcgattagacagccatgcattctgcgtttgtctggaatggattgtagagagatggacttatatgaggactaccagtccccgtttgattttgatgcaggagtgaacaaaagctatctctacttgtctcctagtggaaattcatctccacccggatcacctactcttcagaaatttggtctgctgagaacagacccagtccctgaggaaggagaagatgttgctgccacgatcagtgccacagagaccctctcggaagaggagcaggaagagctaagaagagaacttgcaaaggtagaagaagaaatccagactctgtctcaagtgttagcagcaaaagagaagcatctagcagagatcaagcggaaacttggaatcaattctctacaggaactaaaacagaacattgccaaagggtggcaagacgtgacagcaacatctgcttacaagaagacatctgaaaccttatcccaggctggacagaaggcctcagctgctttttcgtctgttggctcagtcatcaccaaaaagctggaagatgtaaaaaactccccaacttttaaatcatttgaagaaaaggtcgaaaacttaaaggcaatagggggaaccaagcctgctggtggtgattttggagaagtcttgaattcggctgcaaatgctagtgccaccaccacggagcctcttccagaaaagacacaggagagcctgtgagattcctacctttgttctgctacccactgccagatgctgcaagcgaggtccaagcacatcttgtcaacatgcattgccatgaatttctaccagatgtgcttttatttagctttacatattcctttgaccaaatagtttgtgggttaaacaaaatgaaaatatcttcacctctattcttgggaaacaccctttagtgtacatttatgttcctttatttaggaaacaccattataaaaacacttatagtaaatggggacattcactataatgatctaagaagctacagattgtcatagttgttttcctgctttacaaaattgctccagatctggaatgccagtttgacctttgtcttctataatatttcctttttttcccctctttgaatctctgtatatttgattcttaactaaaattgttctcttaaatattctgaatcctggtaattaaaagtttgggtgtattttctttacctccaaggaaagaactactagctacaaaaaatattttggaataagcattgttttggtataaggtacatattttggttgaagacaccagactgaagtaaacagctgtgcatccaatttattatagttttgtaagtaacaatatgtaatcaaacttctaggtgacttgagagtggaacctcctatatcattatttagcaccgtttgtgacagtaaccatttcagtgtattgtttattataccacttatatcaacttatttttcaccaggttaaaattttaatttctacaaaataacattctgaatcaagcacactgtatgttcagtaggttgaactatgaacactgtcatcaatgttcagttcaaaagcctgaaagtttagatctagaagctggtaaaaatgacaatatcaatcacattaggggaaccattgttgtcttcacttaatccatttagcactatttaaaataagcacaccaagttatatgactaatataacttgaaaattttttatactgaggggttggtgataactcttgaggatgtaatgcattaataaaaatcaactcatcattttctacttgttttcaatgtgttggaaactgtaaaatgatactgtagaacctgtctcctactttgaaaactgaatgtcagggctgagtgaatcaaagtgtctagacatatttgcatagaggccaaggtattctattctaataactgcttactcaacactaccaccttttccttatactgtatatgattatggcctacaatgttgtatttgttatttattaaattgtgattgttttattattgtttatgccaaatgttaactgccaagcttggagtgacctaaagcattttttaaaagcatggctagatttacttcagtataaattatcttatgaaaaccaaattttaaaagccacaggtgttgattgttataaaataacatgctgccattcttgattgctagagtttttgttagtactttggatgcaattaaaactatgtgctatcacatgtgaaaagcttaataaattccatctatcagtagtataggtctcaatatttattatgagaccagtggtctggaaacagcttgttgtaccgaatcaactggagtctatgcttaaaaaaaaaaaatttttttttaaccatccttaaattattgcttaatggtatcatattaacatattctaaataagggctttaaggcacaggctgttgaagcattttctcagaggagtggatctgtagaagtctgtctttctatagaaatattgtgcttactcaagtgttaaattattttttctatgaactagtctacttcttaaaattcaaacatattcttttgatcacattgtttcttgagcatcctgccctgctactaacttttcaacaaggcaaaatggagtaaagtggcaatttctttagatgagtgaaataccctcaagtctcttttctgcccaaaaagggaaaagtgatagaaatgggggtggcaagtggggtgagtggatgaaggtgggtattgggggtggctgtgaaagaaaataatggagaatcacttttctagacatctacctatacttaatctaagaaacaaagtaatctactgtaaagtactctgccccttgaaagaagtattaaaaagagtgaggatggatttagaaaaaaacatgaatttagaaatattcaaaatggtttttgtggcagattcaatattatgaattcacagatatttaaagaatgagaaacatagtaattagtagaaatgccagaaacagttcctggttcctcttgtgtttgacactaagaaaatagcaagagtgtgaaatctcagatacttatgaaatctcacagatgtaaggactcaagtgtagaagaaaatatccccttcttacaaaaagaaatgtcaatttatggagtttgtgggaaatagggcaagaattcttatgcttatgagagccaagtagtcagtggaagagagtagagctcaaaactggattatcaccttagcaacttagaatagtttgaaatagaaaaaaagtatttaatttggatctggatctgttaagatatgcacagtctattttttgtatagtattggaaaataaaaatgctataatttgggtatgggttcttttgtatacattacctgcccattgaggaaaggggcaagtccattatgcaacttctctccaaacccttcatattctggatatgatacttaaagagccatgagcagctacattctgcctatcagaaggcatttattaaatgactgcttgctgaagatgtgtccaaagagatcctacattaaggtcatttgtcagaatgatgtttgtgtttgtttagagttggctgacctccaactcctggggtcaaggaatcctactgccttagcttcccaaatagctaggactataggcatgcacccggccatgtgttttatttatagctcttaaagcccagatgaagaaatcacatttttgcccatagtgaagaaacatttggccattgattagtccttattttcagtgactgtcctgttttcattagattagagagaccctgtgtgggccacagttaatataaaccattatcacttttaagtaaacctgcacatcttagatttcataatttccttattgttctgactcaaaatgaactaagagcttttcactttttgtttgtaagttctcagagagtcgggtctgcaagtgcttttgcctgccaggattttgtactcaaataaatgctatttggcaact

SEQ ID NO: 7020 - protein, 223 aa, Homo sapiens; identical to SEQ ID NO: 6998

SEQ ID NO: 7021 - DNA, 4363 bp, Homo sapiens
agtgtctgatgtttgcctgaactgtttgtacctctgggccatattgcagaaccctgcccttctttgttgactgaggaaagctcgctccctgcccaggtttttcattgttgatcgaaattaacaccaggtggtgaatagagcccctcctaaggttgctcaggataaatcatttattaaataggtctgcttatcaggaggggcgtgaaggctcccaaaaggaaatgctggcacctgggcccagaagccagggcctctaactcctggggttgatttcttcagtgaagttgcaccctacaaagggaatatggccaaagcggcactcaactgaaggctgatatcaggcgattagacagccatgcattctgcgtttgtctggaatggattgtagagagatggacttatatgaggactaccagtccccgtttgattttgatgcaggagtgaacaaaagctatctctacttgtctcctagtggaaattcatctccacccggatcacctactcttcagaaatttggtctgctgagaacagacccagtccctgaggaaggagaagatgttgctgccacgatcagtgccacagagaccctctcggaagaggagcaggaagagctaagaagagaacttgcaaaggtagaagaagaaatccagactctgtctcaagtgttagcagcaaaagagaagcatctagcagagatcaagcggaaacttggaatcaattctctacaggaactaaaacagaacattgccaaagggtggcaagacgtgacagcaacatctgcgaggagcaagcttctagcagcagaaaccgaactgctctgtcttctgtattgagagccatctgcagagctgttacaagaagacatctgaaaccttatcccaggctggacagaaggcctcagctgctttttcgtctgttggctcagtcatcaccaaaaagctggaagatgtaaaaaactccccaacttttaaatcatttgaagaaaaggtcgaaaacttaaaggcaatagggggaaccaagcctgctggtggtgattttggagaagtcttgaattcggctgcaaatgctagtgccaccaccacggagcctcttccagaaaagacacaggagagcctgtgagattcctacctttgttctgctacccactgccagatgctgcaagcgaggtccaagcacatcttgtcaacatgcattgccatgaatttctaccagatgtgcttttatttagctttacatattcctttgaccaaatagtttgtgggttaaacaaaatgaaaatatcttcacctctattcttgggaaacaccctttagtgtacatttatgttcctttatttaggaaacaccattataaaaacacttatagtaaatggggacattcactataatgatctaagaagctacagattgtcatagttgttttcctgctttacaaaattgctccagatctggaatgccagtttgacctttgtcttctataatatttcctttttttcccctctttgaatctctgtatatttgattcttaactaaaattgttctcttaaatattctgaatcctggtaattaaaagtttgggtgtattttctttacctccaaggaaagaactactagctacaaaaaatattttggaataagcattgttttggtataaggtacatattttggttgaagacaccagactgaagtaaacagctgtgcatccaatttattatagttttgtaagtaacaatatgtaatcaaacttctaggtgacttgagagtggaacctcctatatcattatttagcaccgtttgtgacagtaaccatttcagtgtattgtttattataccacttatatcaacttatttttcaccaggttaaaattttaatttctacaaaataacattctgaatcaagcacactgtatgttcagtaggttgaactatgaacactgtcatcaatgttcagttcaaaagcctgaaagtttagatctagaagctggtaaaaatgacaatatcaatcacattaggggaaccattgttgtcttcacttaatccatttagcactatttaaaataagcacaccaagttatatgactaatataacttgaaaattttttatactgaggggttggtgataactcttgaggatgtaatgcattaataaaaatcaactcatcattttctacttgttttcaatgtgttggaaactgtaaaatgatactgtagaacctgtctcctactttgaaaactgaatgtcagggctgagtgaatcaaagtgtctagacatatttgcatagaggccaaggtattctattctaataactgcttactcaacactaccaccttttccttatactgtatatgattatggcctacaatgttgtatttgttatttattaaattgtgattgttttattattgtttatgccaaatgttaactgccaagcttggagtgacctaaagcattttttaaaagcatggctagatttacttcagtataaattatcttatgaaaaccaaattttaaaagccacaggtgttgattgttataaaataacatgctgccattcttgattgctagagtttttgttagtactttggatgcaattaaaactatgtgctatcacatgtgaaaagcttaataaattccatctatcagtagtataggtctcaatatttattatgagaccagtggtctggaaacagcttgttgtaccgaatcaactggagtctatgcttaaaaaaaaaaaatttttttttaaccatccttaaattattgcttaatggtatcatattaacatattctaaataagggctttaaggcacaggctgttgaagcattttctcagaggagtggatctgtagaagtctgtctttctatagaaatattgtgcttactcaagtgttaaattattttttctatgaactagtctacttcttaaaattcaaacatattcttttgatcacattgtttcttgagcatcctgccctgctactaacttttcaacaaggcaaaatggagtaaagtggcaatttctttagatgagtgaaataccctcaagtctcttttctgcccaaaaagggaaaagtgatagaaatgggggtggcaagtggggtgagtggatgaaggtgggtattgggggtggctgtgaaagaaaataatggagaatcacttttctagacatctacctatacttaatctaagaaacaaagtaatctactgtaaagtactctgccccttgaaagaagtattaaaaagagtgaggatggatttagaaaaaaacatgaatttagaaatattcaaaatggtttttgtggcagattcaatattatgaattcacagatatttaaagaatgagaaacatagtaattagtagaaatgccagaaacagttcctggttcctcttgtgtttgacactaagaaaatagcaagagtgtgaaatctcagatacttatgaaatctcacagatgtaaggactcaagtgtagaagaaaatatccccttcttacaaaaagaaatgtcaatttatggagtttgtgggaaatagggcaagaattcttatgcttatgagagccaagtagtcagtggaagagagtagagctcaaaactggattatcaccttagcaacttagaatagtttgaaatagaaaaaaagtatttaatttggatctggatctgttaagatatgcacagtctattttttgtatagtattggaaaataaaaatgctataatttgggtatgggttcttttgtatacattacctgcccattgaggaaaggggcaagtccattatgcaacttctctccaaacccttcatattctggatatgatacttaaagagccatgagcagctacattctgcctatcagaaggcatttattaaatgactgcttgctgaagatgtgtccaaagagatcctacattaaggtcatttgtcagaatgatgtttgtgtttgtttagagttggctgacctccaactcctggggtcaaggaatcctactgccttagcttcccaaatagctaggactataggcatgcacccggccatgtgttttatttatagctcttaaagcccagatgaagaaatcacatttttgcccatagtgaagaaacatttggccattgattagtccttattttcagtgactgtcctgttttcattagattagagagaccctgtgtgggccacagttaatataaaccattatcacttttaagtaaacctgcacatcttagatttcataatttccttattgttctgactcaaaatgaactaagagcttttcactttttgtttgtaagttctcagagagtcgggtctgcaagtgcttttgcctgccaggattttgtactcaaataaatgctatttggcaact

SEQ ID NO: 7022 - protein, 151 aa, Homo sapiens; identical to SEQ ID NO: 6994

SEQ ID NO: 7023 - DNA, 3793 bp, Homo sapiens
gggagtcgccggcggaggcgaggaggagctctgcgcggcgcggcgggcgatccgagccgggacgggctgcaggcgggggtgctgcagaggacacgaggcggcgggctggagacatggaccgcggcgagcaaggtagaagaagaaatccagactctgtctcaagtgttagcagcaaaagagaagcatctagcagagatcaagcggaaacttggaatcaattctctacaggaactaaaacagaacattgccaaagggtggcaagacgtgacagcaacatctgcttacaagaagacatctgaaaccttatcccaggctggacagaaggcctcagctgctttttcgtctgttggctcagtcatcaccaaaaagctggaagatgtaaaaaactccccaacttttaaatcatttgaagaaaaggtcgaaaacttaaaggcaatagggggaaccaagcctgctggtggtgattttggagaagtcttgaattcggctgcaaatgctagtgccaccaccacggagcctcttccagaaaagacacaggagagcctgtgagattcctacctttgttctgctacccactgccagatgctgcaagcgaggtccaagcacatcttgtcaacatgcattgccatgaatttctaccagatgtgcttttatttagctttacatattcctttgaccaaatagtttgtgggttaaacaaaatgaaaatatcttcacctctattcttgggaaacaccctttagtgtacatttatgttcctttatttaggaaacaccattataaaaacacttatagtaaatggggacattcactataatgatctaagaagctacagattgtcatagttgttttcctgctttacaaaattgctccagatctggaatgccagtttgacctttgtcttctataatatttcctttttttcccctctttgaatctctgtatatttgattcttaactaaaattgttctcttaaatattctgaatcctggtaattaaaagtttgggtgtattttctttacctccaaggaaagaactactagctacaaaaaatattttggaataagcattgttttggtataaggtacatattttggttgaagacaccagactgaagtaaacagctgtgcatccaatttattatagttttgtaagtaacaatatgtaatcaaacttctaggtgacttgagagtggaacctcctatatcattatttagcaccgtttgtgacagtaaccatttcagtgtattgtttattataccacttatatcaacttatttttcaccaggttaaaattttaatttctacaaaataacattctgaatcaagcacactgtatgttcagtaggttgaactatgaacactgtcatcaatgttcagttcaaaagcctgaaagtttagatctagaagctggtaaaaatgacaatatcaatcacattaggggaaccattgttgtcttcacttaatccatttagcactatttaaaataagcacaccaagttatatgactaatataacttgaaaattttttatactgaggggttggtgataactcttgaggatgtaatgcattaataaaaatcaactcatcattttctacttgttttcaatgtgttggaaactgtaaaatgatactgtagaacctgtctcctactttgaaaactgaatgtcagggctgagtgaatcaaagtgtctagacatatttgcatagaggccaaggtattctattctaataactgcttactcaacactaccaccttttccttatactgtatatgattatggcctacaatgttgtatttgttatttattaaattgtgattgttttattattgtttatgccaaatgttaactgccaagcttggagtgacctaaagcattttttaaaagcatggctagatttacttcagtataaattatcttatgaaaaccaaattttaaaagccacaggtgttgattgttataaaataacatgctgccattcttgattgctagagtttttgttagtactttggatgcaattaaaactatgtgctatcacatgtgaaaagcttaataaattccatctatcagtagtataggtctcaatatttattatgagaccagtggtctggaaacagcttgttgtaccgaatcaactggagtctatgcttaaaaaaaaaaaatttttttttaaccatccttaaattattgcttaatggtatcatattaacatattctaaataagggctttaaggcacaggctgttgaagcattttctcagaggagtggatctgtagaagtctgtctttctatagaaatattgtgcttactcaagtgttaaattattttttctatgaactagtctacttcttaaaattcaaacatattcttttgatcacattgtttcttgagcatcctgccctgctactaacttttcaacaaggcaaaatggagtaaagtggcaatttctttagatgagtgaaataccctcaagtctcttttctgcccaaaaagggaaaagtgatagaaatgggggtggcaagtggggtgagtggatgaaggtgggtattgggggtggctgtgaaagaaaataatggagaatcacttttctagacatctacctatacttaatctaagaaacaaagtaatctactgtaaagtactctgccccttgaaagaagtattaaaaagagtgaggatggatttagaaaaaaacatgaatttagaaatattcaaaatggtttttgtggcagattcaatattatgaattcacagatatttaaagaatgagaaacatagtaattagtagaaatgccagaaacagttcctggttcctcttgtgtttgacactaagaaaatagcaagagtgtgaaatctcagatacttatgaaatctcacagatgtaaggactcaagtgtagaagaaaatatccccttcttacaaaaagaaatgtcaatttatggagtttgtgggaaatagggcaagaattcttatgcttatgagagccaagtagtcagtggaagagagtagagctcaaaactggattatcaccttagcaacttagaatagtttgaaatagaaaaaaagtatttaatttggatctggatctgttaagatatgcacagtctattttttgtatagtattggaaaataaaaatgctataatttgggtatgggttcttttgtatacattacctgcccattgaggaaaggggcaagtccattatgcaacttctctccaaacccttcatattctggatatgatacttaaagagccatgagcagctacattctgcctatcagaaggcatttattaaatgactgcttgctgaagatgtgtccaaagagatcctacattaaggtcatttgtcagaatgatgtttgtgtttgtttagagttggctgacctccaactcctggggtcaaggaatcctactgccttagcttcccaaatagctaggactataggcatgcacccggccatgtgttttatttatagctcttaaagcccagatgaagaaatcacatttttgcccatagtgaagaaacatttggccattgattagtccttattttcagtgactgtcctgttttcattagattagagagaccctgtgtgggccacagttaatataaaccattatcacttttaagtaaacctgcacatcttagatttcataatttccttattgttctgactcaaaatgaactaagagcttttcactttttgtttgtaagttctcagagagtcgggtctgcaagtgcttttgcctgccaggattttgtactcaaataaatgctatttggcaact

SEQ ID NO: 7024 - protein, 61 aa, Homo sapiens; identical to SEQ ID NO: 7000

SEQ ID NO: 7025 - DNA, 3954 bp, Homo sapiens
gggcggcgccgccgcgcccgacgcctctgggggtggggacttcgcgggagtcgccggcggaggcgaggaggagctctgcgcggcgcggcgggcgatccgagccgggacgggctgcaggcgggggtgctgcagaggacacgaggcggcgggctggagacatggaccgcggcgagcaaggtctgctgagaacagacccagtccctgaggaaggagaagatgttgctgccacgatcagtgccacagagaccctctcggaagaggagcaggaagagctaagaagagaacttgcaaaggtagaagaagaaatccagactctgtctcaagtgttagcagcaaaagagaagcatctagcagagatcaagcggaaacttggaatcaattctctacaggaactaaaacagaacattgccaaagggtggcaagacgtgacagcaacatctgcttacaagaagacatctgaaaccttatcccaggctggacagaaggcctcagctgctttttcgtctgttggctcagtcatcaccaaaaagctggaagatgtaaaaaactccccaacttttaaatcatttgaagaaaaggtcgaaaacttaaaggcaatagggggaaccaagcctgctggtggtgattttggagaagtcttgaattcggctgcaaatgctagtgccaccaccacggagcctcttccagaaaagacacaggagagcctgtgagattcctacctttgttctgctacccactgccagatgctgcaagcgaggtccaagcacatcttgtcaacatgcattgccatgaatttctaccagatgtgcttttatttagctttacatattcctttgaccaaatagtttgtgggttaaacaaaatgaaaatatcttcacctctattcttgggaaacaccctttagtgtacatttatgttcctttatttaggaaacaccattataaaaacacttatagtaaatggggacattcactataatgatctaagaagctacagattgtcatagttgttttcctgctttacaaaattgctccagatctggaatgccagtttgacctttgtcttctataatatttcctttttttcccctctttgaatctctgtatatttgattcttaactaaaattgttctcttaaatattctgaatcctggtaattaaaagtttgggtgtattttctttacctccaaggaaagaactactagctacaaaaaatattttggaataagcattgttttggtataaggtacatattttggttgaagacaccagactgaagtaaacagctgtgcatccaatttattatagttttgtaagtaacaatatgtaatcaaacttctaggtgacttgagagtggaacctcctatatcattatttagcaccgtttgtgacagtaaccatttcagtgtattgtttattataccacttatatcaacttatttttcaccaggttaaaattttaatttctacaaaataacattctgaatcaagcacactgtatgttcagtaggttgaactatgaacactgtcatcaatgttcagttcaaaagcctgaaagtttagatctagaagctggtaaaaatgacaatatcaatcacattaggggaaccattgttgtcttcacttaatccatttagcactatttaaaataagcacaccaagttatatgactaatataacttgaaaattttttatactgaggggttggtgataactcttgaggatgtaatgcattaataaaaatcaactcatcattttctacttgttttcaatgtgttggaaactgtaaaatgatactgtagaacctgtctcctactttgaaaactgaatgtcagggctgagtgaatcaaagtgtctagacatatttgcatagaggccaaggtattctattctaataactgcttactcaacactaccaccttttccttatactgtatatgattatggcctacaatgttgtatttgttatttattaaattgtgattgttttattattgtttatgccaaatgttaactgccaagcttggagtgacctaaagcattttttaaaagcatggctagatttacttcagtataaattatcttatgaaaaccaaattttaaaagccacaggtgttgattgttataaaataacatgctgccattcttgattgctagagtttttgttagtactttggatgcaattaaaactatgtgctatcacatgtgaaaagcttaataaattccatctatcagtagtataggtctcaatatttattatgagaccagtggtctggaaacagcttgttgtaccgaatcaactggagtctatgcttaaaaaaaaaaaatttttttttaaccatccttaaattattgcttaatggtatcatattaacatattctaaataagggctttaaggcacaggctgttgaagcattttctcagaggagtggatctgtagaagtctgtctttctatagaaatattgtgcttactcaagtgttaaattattttttctatgaactagtctacttcttaaaattcaaacatattcttttgatcacattgtttcttgagcatcctgccctgctactaacttttcaacaaggcaaaatggagtaaagtggcaatttctttagatgagtgaaataccctcaagtctcttttctgcccaaaaagggaaaagtgatagaaatgggggtggcaagtggggtgagtggatgaaggtgggtattgggggtggctgtgaaagaaaataatggagaatcacttttctagacatctacctatacttaatctaagaaacaaagtaatctactgtaaagtactctgccccttgaaagaagtattaaaaagagtgaggatggatttagaaaaaaacatgaatttagaaatattcaaaatggtttttgtggcagattcaatattatgaattcacagatatttaaagaatgagaaacatagtaattagtagaaatgccagaaacagttcctggttcctcttgtgtttgacactaagaaaatagcaagagtgtgaaatctcagatacttatgaaatctcacagatgtaaggactcaagtgtagaagaaaatatccccttcttacaaaaagaaatgtcaatttatggagtttgtgggaaatagggcaagaattcttatgcttatgagagccaagtagtcagtggaagagagtagagctcaaaactggattatcaccttagcaacttagaatagtttgaaatagaaaaaaagtatttaatttggatctggatctgttaagatatgcacagtctattttttgtatagtattggaaaataaaaatgctataatttgggtatgggttcttttgtatacattacctgcccattgaggaaaggggcaagtccattatgcaacttctctccaaacccttcatattctggatatgatacttaaagagccatgagcagctacattctgcctatcagaaggcatttattaaatgactgcttgctgaagatgtgtccaaagagatcctacattaaggtcatttgtcagaatgatgtttgtgtttgtttagagttggctgacctccaactcctggggtcaaggaatcctactgccttagcttcccaaatagctaggactataggcatgcacccggccatgtgttttatttatagctcttaaagcccagatgaagaaatcacatttttgcccatagtgaagaaacatttggccattgattagtccttattttcagtgactgtcctgttttcattagattagagagaccctgtgtgggccacagttaatataaaccattatcacttttaagtaaacctgcacatcttagatttcataatttccttattgttctgactcaaaatgaactaagagcttttcactttttgtttgtaagttctcagagagtcgggtctgcaagtgcttttgcctgccaggattttgtactcaaataaatgctatttggcaact

SEQ ID NO: 7026 - protein, 183 aa, Homo sapiens; identical to SEQ ID NO: 7002

SEQ ID NO: 7027 - DNA, 4063 bp, Homo sapiens
ggttgggtgacgccccaggaaagcgctccaggccgagggcgggcggcgccgccgcgcccgacgcctctgggggtggggacttcgcgggagtcgccggcggaggcgaggaggagctctgcgcggcgcggcgggcgatccgagccgggacgggctgcaggcgggggtgctgcagaggacacgaggcggcgggctggagacatggaccgcggcgagcaaggtctgctgagaacagacccagtccctgaggaaggagaagatgttgctgccacgatcagtgccacagagaccctctcggaagaggagcaggaagagctaagaagagaacttgcaaaggtagaagaagaaatccagactctgtctcaagtgttagcagcaaaagagaagcatctagcagagatcaagcggaaacttggaatcaattctctacaggaactaaaacagaacattgccaaagggtggcaagacgtgacagcaacatctgcttacaagaagacatctgaaaccttatcccaggctggacagaaggcctcagctgctttttcgtctgttggctcagtcatcaccaaaaagctggaagatgtaaaattgcaagccttttcacattcctttagtatacgttccattcagcattcaattagcatgcctgctatgagaaactccccaacttttaaatcatttgaagaaaaggtcgaaaacttaaaggcaatagggggaaccaagcctgctggtggtgattttggagaagtcttgaattcggctgcaaatgctagtgccaccaccacggagcctcttccagaaaagacacaggagagcctgtgagattcctacctttgttctgctacccactgccagatgctgcaagcgaggtccaagcacatcttgtcaacatgcattgccatgaatttctaccagatgtgcttttatttagctttacatattcctttgaccaaatagtttgtgggttaaacaaaatgaaaatatcttcacctctattcttgggaaacaccctttagtgtacatttatgttcctttatttaggaaacaccattataaaaacacttatagtaaatggggacattcactataatgatctaagaagctacagattgtcatagttgttttcctgctttacaaaattgctccagatctggaatgccagtttgacctttgtcttctataatatttcctttttttcccctctttgaatctctgtatatttgattcttaactaaaattgttctcttaaatattctgaatcctggtaattaaaagtttgggtgtattttctttacctccaaggaaagaactactagctacaaaaaatattttggaataagcattgttttggtataaggtacatattttggttgaagacaccagactgaagtaaacagctgtgcatccaatttattatagttttgtaagtaacaatatgtaatcaaacttctaggtgacttgagagtggaacctcctatatcattatttagcaccgtttgtgacagtaaccatttcagtgtattgtttattataccacttatatcaacttatttttcaccaggttaaaattttaatttctacaaaataacattctgaatcaagcacactgtatgttcagtaggttgaactatgaacactgtcatcaatgttcagttcaaaagcctgaaagtttagatctagaagctggtaaaaatgacaatatcaatcacattaggggaaccattgttgtcttcacttaatccatttagcactatttaaaataagcacaccaagttatatgactaatataacttgaaaattttttatactgaggggttggtgataactcttgaggatgtaatgcattaataaaaatcaactcatcattttctacttgttttcaatgtgttggaaactgtaaaatgatactgtagaacctgtctcctactttgaaaactgaatgtcagggctgagtgaatcaaagtgtctagacatatttgcatagaggccaaggtattctattctaataactgcttactcaacactaccaccttttccttatactgtatatgattatggcctacaatgttgtatttgttatttattaaattgtgattgttttattattgtttatgccaaatgttaactgccaagcttggagtgacctaaagcattttttaaaagcatggctagatttacttcagtataaattatcttatgaaaaccaaattttaaaagccacaggtgttgattgttataaaataacatgctgccattcttgattgctagagtttttgttagtactttggatgcaattaaaactatgtgctatcacatgtgaaaagcttaataaattccatctatcagtagtataggtctcaatatttattatgagaccagtggtctggaaacagcttgttgtaccgaatcaactggagtctatgcttaaaaaaaaaaaatttttttttaaccatccttaaattattgcttaatggtatcatattaacatattctaaataagggctttaaggcacaggctgttgaagcattttctcagaggagtggatctgtagaagtctgtctttctatagaaatattgtgcttactcaagtgttaaattattttttctatgaactagtctacttcttaaaattcaaacatattcttttgatcacattgtttcttgagcatcctgccctgctactaacttttcaacaaggcaaaatggagtaaagtggcaatttctttagatgagtgaaataccctcaagtctcttttctgcccaaaaagggaaaagtgatagaaatgggggtggcaagtggggtgagtggatgaaggtgggtattgggggtggctgtgaaagaaaataatggagaatcacttttctagacatctacctatacttaatctaagaaacaaagtaatctactgtaaagtactctgccccttgaaagaagtattaaaaagagtgaggatggatttagaaaaaaacatgaatttagaaatattcaaaatggtttttgtggcagattcaatattatgaattcacagatatttaaagaatgagaaacatagtaattagtagaaatgccagaaacagttcctggttcctcttgtgtttgacactaagaaaatagcaagagtgtgaaatctcagatacttatgaaatctcacagatgtaaggactcaagtgtagaagaaaatatccccttcttacaaaaagaaatgtcaatttatggagtttgtgggaaatagggcaagaattcttatgcttatgagagccaagtagtcagtggaagagagtagagctcaaaactggattatcaccttagcaacttagaatagtttgaaatagaaaaaaagtatttaatttggatctggatctgttaagatatgcacagtctattttttgtatagtattggaaaataaaaatgctataatttgggtatgggttcttttgtatacattacctgcccattgaggaaaggggcaagtccattatgcaacttctctccaaacccttcatattctggatatgatacttaaagagccatgagcagctacattctgcctatcagaaggcatttattaaatgactgcttgctgaagatgtgtccaaagagatcctacattaaggtcatttgtcagaatgatgtttgtgtttgtttagagttggctgacctccaactcctggggtcaaggaatcctactgccttagcttcccaaatagctaggactataggcatgcacccggccatgtgttttatttatagctcttaaagcccagatgaagaaatcacatttttgcccatagtgaagaaacatttggccattgattagtccttattttcagtgactgtcctgttttcattagattagagagaccctgtgtgggccacagttaatataaaccattatcacttttaagtaaacctgcacatcttagatttcataatttccttattgttctgactcaaaatgaactaagagcttttcactttttgtttgtaagttctcagagagtcgggtctgcaagtgcttttgcctgccaggattttgtactcaaataaatgctatttggcaact

SEQ ID NO: 7028 - protein, 206 aa, Homo sapiens; identical to SEQ ID NO: 7004

SEQ ID NO: 7029 - DNA, 1817 bp, Homo sapiens
aatgttatgcaagtgtagagacagacagttcactaggtactttaaaataatagaccttacaaagttttctagacagacttcctgtgaagaacaaggagcagggggaaaggggaaggggtagaatttaccaatctgaatatttcagcaagggagaatgcatgagttttactataaaaccacactgaacattgcaacaatactaaattccatacatatataataatcactgagctataaggttgctgatgtatttgttcttgaaagtgaattagagttactttatgcagaatcagctagttttatgtttcataatgtctttcccttttttgaacttttttttaagtctaaagtagggggaaccaagcctgctggtggtgattttggagaagtcttgaattcggctgcaaatgctagtgccaccaccacggagcctcttccagaaaagacacaggagagcctgtgagattcctacctttgttctgctacccactgccagatgctgcaagcgaggtccaagcacatcttgtcaacatgcattgccatgaatttctaccagatgtgcttttatttagctttacatattcttatgaaaaccaaattttaaaagccacaggtgttgattgttataaaataacatgctgccattcttgattgctagagtttttgttagtactttggatgcaattaaaactatgtgctatcacatgtgaaaagcttaataaattccatctatcagtagtataggtctcaatatttattatgagaccagtggtctggaaacagcttgttgtaccgaatcaactggagtctatgcttaaaaaaaaaaaatttttttttaaccatccttaaattattgcttaatggtatcatattaacatattctaaataagggctttaaggcacaggctgttgaagcattttctcagaggagtggatctgtagaagtctgtctttctatagaaatattgtgcttactcaagtgttaaattattttttctatgaactagtctacttcttaaaattcaaacatattcttttgatcacattgtttcttgagcatcctgccctgctactaacttttcaacaaggcaaaatggagtaaagtggcaatttctttagatgagtgaaataccctcaagtctcttttctgcccaaaaagggaaaagtgatagaaatgggggtggcaagtggggtgagtggatgaaggtgggtattgggggtggctgtgaaagaaaataatggagaatcacttttctagacatctacctatacttaatctaagaaacaaagtaatctactgtaaagtactctgccccttgaaagaagtattaaaaagagtgaggatggatttagaaaaaaacatgaatttagaaatattcaaaatggtttttgtggcagattcaatattatgaattcacagatatttaaagaatgagaaacatagtaattagtagaaatgccagaaacagttcctggttcctcttgtgtttgacactaagaaaatagcaagagtgtgaaatctcagatacttatgaaatctcacagatgtaaggactcaagtgtagaagaaaatatccccttcttacaaaaagaaatgtcaatttatggagtttgtgggaaatagggcaagaattcttatgcttatgagagccaagtagtcagtggaagagagtagagctcaaaactggattatcaccttagcaacttagaatagtttgaaatagaaaaaaagtatttaatttggatctggatctgttaagatatgcacagtctattttttgtatagtattggaaaataaaaatgctataatttgggt

SEQ ID NO: 7030 - protein, 39 aa, Homo sapiens; identical to SEQ ID NO: 6982

SEQ ID NO: 7031 - DNA, 3014 bp, Homo sapiens
attacttatgtctgagactggccctgttcatggaatcaaatgcatactcttaaaatattagatcagaaattgagaatcttacattataaatacttgtatgtacctgcacatatatggtacagattatatctgttcttttgccgattgagaataatgttgaagaggaatcaattatattttcaaactagttggattttttttcagtatttgtatttactatttgtttttcttttctctccatagaaactccccaacttttaaatcatttgaagaaaaggtcgaaaacttaaaggcaatagggggaaccaagcctgctggtggtgattttggagaagtcttgaattcggctgcaaatgctagtgccaccaccacggagcctcttccagaaaagacacaggagagcctgtgagattcctacctttgttctgctacccactgccagatgctgcaagcgaggtccaagcacatcttgtcaacatgcattgccatgaatttctaccagatgtgcttttatttagctttacatattcctttgaccaaatagtttgtgggttaaacaaaatgaaaatatcttcacctctattcttgggaaacaccctttagtgtacatttatgttcctttatttaggaaacaccattataaaaacacttatagtaaatggggacattcactataatgatctaagaagctacagattgtcatagttgttttcctgctttacaaaattgctccagatctggaatgccagtttgacctttgtcttctataatatttcctttttttcccctctttgaatctctgtatatttgattcttaactaaaattgttctcttaaatattctgaatcctggtaattaaaagtttgggtgtattttctttacctccaaggaaagaactactagctacaaaaaatattttggaataagcattgttttggtataaggtacatattttggttgaagacaccagactgaagtaaacagctgtgcatccaatttattatagttttgtaagtaacaatatgtaatcaaacttctaggtgacttgagagtggaacctcctatatcattatttagcaccgtttgtgacagtaaccatttcagtgtattgtttattataccacttatatcaacttatttttcaccaggttaaaattttaatttctacaaaataacattctgaatcaagcacactgtatgttcagtaggttgaactatgaacactgtcatcaatgttcagttcaaaagcctgaaagtttagatctagaagctggtaaaaatgacaatatcaatcacattaggggaaccattgttgtcttcacttaatccatttagcactatttaaaataagcacaccaagttatatgactaatataacttgaaaattttttatactgaggggttggtgataactcttgaggatgtaatgcattaataaaaatcaactcatcattttctacttgttttcaatgtgttggaaactgtaaaatgatactgtagaacctgtctcctactttgaaaactgaatgtcagggctgagtgaatcaaagtgtctagacatatttgcatagaggccaaggtattctattctaataactgcttactcaacactaccaccttttccttatactgtatatgattatggcctacaatgttgtatttgttatttattaaattgtgattgttttattattgtttatgccaaatgttaactgccaagcttggagtgacctaaagcattttttaaaagcatggctagatttacttcagtataaattatcttatgaaaaccaaattttaaaagccacaggtgttgattgttataaaataacatgctgccattcttgattgctagagtttttgttagtactttggatgcaattaaaactatgtgctatcacatgtgaaaagcttaataaattccatctatcagtagtataggtctcaatatttattatgagaccagtggtctggaaacagcttgttgtaccgaatcaactggagtctatgcttaaaaaaaaaaaatttttttttaaccatccttaaattattgcttaatggtatcatattaacatattctaaataagggctttaaggcacaggctgttgaagcattttctcagaggagtggatctgtagaagtctgtctttctatagaaatattgtgcttactcaagtgttaaattattttttctatgaactagtctacttcttaaaattcaaacatattcttttgatcacattgtttcttgagcatcctgccctgctactaacttttcaacaaggcaaaatggagtaaagtggcaatttctttagatgagtgaaataccctcaagtctcttttctgcccaaaaagggaaaagtgatagaaatgggggtggcaagtggggtgagtggatgaaggtgggtattgggggtggctgtgaaagaaaataatggagaatcacttttctagacatctacctatacttaatctaagaaacaaagtaatctactgtaaagtactctgccccttgaaagaagtattaaaaagagtgaggatggatttagaaaaaaacatgaatttagaaatattcaaaatggtttttgtggcagattcaatattatgaattcacagatatttaaagaatgagaaacatagtaattagtagaaatgccagaaacagttcctggttcctcttgtgtttgacactaagaaaatagcaagagtgtgaaatctcagatacttatgaaatctcacagatgtaaggactcaagtgtagaagaaaatatccccttcttacaaaaagaaatgtcaatttatggagtttgtgggaaatagggcaagaattcttatgcttatgagagccaagtagtcagtggaagagagtagagctcaaaactggattatcaccttagcaacttagaatagtttgaaatagaaaaaaagtatttaatttggatctggatctgttaagatatgcacagtctattttttgtatagtattggaaaataaaaatgctataatttgggt

SEQ ID NO: 7032 - protein, 67 aa, Homo sapiens
MHTLKILDQKLRILHYKYLYVPAHIWYRLYLFFCRLRIMLKRNQLYFQTSWIFFQYLYLLFVFLFSP

SEQ ID NO: 7033 - DNA, 2948 bp, Homo sapiens
actccttcaaaccagtacctggaaggctcatctaaggtcttctaggcctagcattctaacatcaaatgatcatctgatgatcatttaaggttgttgaaaaattctggttgtgaacttctttgtctttttagttcttcatgatcatgcaggattgcaagccttttcacattcctttagaaactccccaacttttaaatcatttgaagaaaaggtcgaaaacttaaaggcaatagggggaaccaagcctgctggtggtgattttggagaagtcttgaattcggctgcaaatgctagtgccaccaccacggagcctcttccagaaaagacacaggagagcctgtgagattcctacctttgttctgctacccactgccagatgctgcaagcgaggtccaagcacatcttgtcaacatgcattgccatgaatttctaccagatgtgcttttatttagctttacatattcctttgaccaaatagtttgtgggttaaacaaaatgaaaatatcttcacctctattcttgggaaacaccctttagtgtacatttatgttcctttatttaggaaacaccattataaaaacacttatagtaaatggggacattcactataatgatctaagaagctacagattgtcatagttgttttcctgctttacaaaattgctccagatctggaatgccagtttgacctttgtcttctataatatttcctttttttcccctctttgaatctctgtatatttgattcttaactaaaattgttctcttaaatattctgaatcctggtaattaaaagtttgggtgtattttctttacctccaaggaaagaactactagctacaaaaaatattttggaataagcattgttttggtataaggtacatattttggttgaagacaccagactgaagtaaacagctgtgcatccaatttattatagttttgtaagtaacaatatgtaatcaaacttctaggtgacttgagagtggaacctcctatatcattatttagcaccgtttgtgacagtaaccatttcagtgtattgtttattataccacttatatcaacttatttttcaccaggttaaaattttaatttctacaaaataacattctgaatcaagcacactgtatgttcagtaggttgaactatgaacactgtcatcaatgttcagttcaaaagcctgaaagtttagatctagaagctggtaaaaatgacaatatcaatcacattaggggaaccattgttgtcttcacttaatccatttagcactatttaaaataagcacaccaagttatatgactaatataacttgaaaattttttatactgaggggttggtgataactcttgaggatgtaatgcattaataaaaatcaactcatcattttctacttgttttcaatgtgttggaaactgtaaaatgatactgtagaacctgtctcctactttgaaaactgaatgtcagggctgagtgaatcaaagtgtctagacatatttgcatagaggccaaggtattctattctaataactgcttactcaacactaccaccttttccttatactgtatatgattatggcctacaatgttgtatttgttatttattaaattgtgattgttttattattgtttatgccaaatgttaactgccaagcttggagtgacctaaagcattttttaaaagcatggctagatttacttcagtataaattatcttatgaaaaccaaattttaaaagccacaggtgttgattgttataaaataacatgctgccattcttgattgctagagtttttgttagtactttggatgcaattaaaactatgtgctatcacatgtgaaaagcttaataaattccatctatcagtagtataggtctcaatatttattatgagaccagtggtctggaaacagcttgttgtaccgaatcaactggagtctatgcttaaaaaaaaaaaatttttttttaaccatccttaaattattgcttaatggtatcatattaacatattctaaataagggctttaaggcacaggctgttgaagcattttctcagaggagtggatctgtagaagtctgtctttctatagaaatattgtgcttactcaagtgttaaattattttttctatgaactagtctacttcttaaaattcaaacatattcttttgatcacattgtttcttgagcatcctgccctgctactaacttttcaacaaggcaaaatggagtaaagtggcaatttctttagatgagtgaaataccctcaagtctcttttctgcccaaaaagggaaaagtgatagaaatgggggtggcaagtggggtgagtggatgaaggtgggtattgggggtggctgtgaaagaaaataatggagaatcacttttctagacatctacctatacttaatctaagaaacaaagtaatctactgtaaagtactctgccccttgaaagaagtattaaaaagagtgaggatggatttagaaaaaaacatgaatttagaaatattcaaaatggtttttgtggcagattcaatattatgaattcacagatatttaaagaatgagaaacatagtaattagtagaaatgccagaaacagttcctggttcctcttgtgtttgacactaagaaaatagcaagagtgtgaaatctcagatacttatgaaatctcacagatgtaaggactcaagtgtagaagaaaatatccccttcttacaaaaagaaatgtcaatttatggagtttgtgggaaatagggcaagaattcttatgcttatgagagccaagtagtcagtggaagagagtagagctcaaaactggattatcaccttagcaacttagaatagtttgaaatagaaaaaaagtatttaatttggatctggatctgttaagatatgcacagtctattttttgtatagtattggaaaataaaaatgctataatttgggt

SEQ ID NO: 7034 - protein, 57 aa, Homo sapiens [sequence omitted]

SEQ ID NO: 7035 - DNA, 2936 bp, Homo sapiens
agagtgagggagggcactccttcaaaccagtacctggaaggctcatctaaggtcttctaggcctagcattctaacatcaaatgatcatctgatgatcatttaaggttgttgaaaaattctggttgtgaacttctttgtctttttagttcttcatgatcatgcaggaaactccccaacttttaaatcatttgaagaaaaggtcgaaaacttaaaggcaatagggggaaccaagcctgctggtggtgattttggagaagtcttgaattcggctgcaaatgctagtgccaccaccacggagcctcttccagaaaagacacaggagagcctgtgagattcctacctttgttctgctacccactgccagatgctgcaagcgaggtccaagcacatcttgtcaacatgcattgccatgaatttctaccagatgtgcttttatttagctttacatattcctttgaccaaatagtttgtgggttaaacaaaatgaaaatatcttcacctctattcttgggaaacaccctttagtgtacatttatgttcctttatttaggaaacaccattataaaaacacttatagtaaatggggacattcactataatgatctaagaagctacagattgtcatagttgttttcctgctttacaaaattgctccagatctggaatgccagtttgacctttgtcttctataatatttcctttttttcccctctttgaatctctgtatatttgattcttaactaaaattgttctcttaaatattctgaatcctggtaattaaaagtttgggtgtattttctttacctccaaggaaagaactactagctacaaaaaatattttggaataagcattgttttggtataaggtacatattttggttgaagacaccagactgaagtaaacagctgtgcatccaatttattatagttttgtaagtaacaatatgtaatcaaacttctaggtgacttgagagtggaacctcctatatcattatttagcaccgtttgtgacagtaaccatttcagtgtattgtttattataccacttatatcaacttatttttcaccaggttaaaattttaatttctacaaaataacattctgaatcaagcacactgtatgttcagtaggttgaactatgaacactgtcatcaatgttcagttcaaaagcctgaaagtttagatctagaagctggtaaaaatgacaatatcaatcacattaggggaaccattgttgtcttcacttaatccatttagcactatttaaaataagcacaccaagttatatgactaatataacttgaaaattttttatactgaggggttggtgataactcttgaggatgtaatgcattaataaaaatcaactcatcattttctacttgttttcaatgtgttggaaactgtaaaatgatactgtagaacctgtctcctactttgaaaactgaatgtcagggctgagtgaatcaaagtgtctagacatatttgcatagaggccaaggtattctattctaataactgcttactcaacactaccaccttttccttatactgtatatgattatggcctacaatgttgtatttgttatttattaaattgtgattgttttattattgtttatgccaaatgttaactgccaagcttggagtgacctaaagcattttttaaaagcatggctagatttacttcagtataaattatcttatgaaaaccaaattttaaaagccacaggtgttgattgttataaaataacatgctgccattcttgattgctagagtttttgttagtactttggatgcaattaaaactatgtgctatcacatgtgaaaagcttaataaattccatctatcagtagtataggtctcaatatttattatgagaccagtggtctggaaacagcttgttgtaccgaatcaactggagtctatgcttaaaaaaaaaaaatttttttttaaccatccttaaattattgcttaatggtatcatattaacatattctaaataagggctttaaggcacaggctgttgaagcattttctcagaggagtggatctgtagaagtctgtctttctatagaaatattgtgcttactcaagtgttaaattattttttctatgaactagtctacttcttaaaattcaaacatattcttttgatcacattgtttcttgagcatcctgccctgctactaacttttcaacaaggcaaaatggagtaaagtggcaatttctttagatgagtgaaataccctcaagtctcttttctgcccaaaaagggaaaagtgatagaaatgggggtggcaagtggggtgagtggatgaaggtgggtattgggggtggctgtgaaagaaaataatggagaatcacttttctagacatctacctatacttaatctaagaaacaaagtaatctactgtaaagtactctgccccttgaaagaagtattaaaaagagtgaggatggatttagaaaaaaacatgaatttagaaatattcaaaatggtttttgtggcagattcaatattatgaattcacagatatttaaagaatgagaaacatagtaattagtagaaatgccagaaacagttcctggttcctcttgtgtttgacactaagaaaatagcaagagtgtgaaatctcagatacttatgaaatctcacagatgtaaggactcaagtgtagaagaaaatatccccttcttacaaaaagaaatgtcaatttatggagtttgtgggaaatagggcaagaattcttatgcttatgagagccaagtagtcagtggaagagagtagagctcaaaactggattatcaccttagcaacttagaatagtttgaaatagaaaaaaagtatttaatttggatctggatctgttaagatatgcacagtctattttttgtatagtattggaaaataaaaatgctataatttgggt

SEQ ID NO: 7036 - protein, 57 aa, Homo sapiens [sequence omitted]

SEQ ID NO: 7037 - DNA, 3104 bp, Homo sapiens
ctttctggctggactagggcactgcagaagattgtgcctgagcttagggttgagcatacgaagatgtggtgatgccgctctgctggttatgaaggattttagaagttctgaaaaatgttttctctttttgagagttctccagcaggtggtgaccactgcacttgaaacaattgatattagaaaagatgagctgacccttcttttgctctgtgtgtttataatttaatatagttacaagaagacatctgaaaccttatcccaggctggacagaaggcctcagctgctttttcgtctgttggctcagtcatcaccaaaaagctggaagatgtaaaaaactccccaacttttaaatcatttgaagaaaaggtcgaaaacttaaaggcaatagggggaaccaagcctgctggtggtgattttggagaagtcttgaattcggctgcaaatgctagtgccaccaccacggagcctcttccagaaaagacacaggagagcctgtgagattcctacctttgttctgctacccactgccagatgctgcaagcgaggtccaagcacatcttgtcaacatgcattgccatgaatttctaccagatgtgcttttatttagctttacatattcctttgaccaaatagtttgtgggttaaacaaaatgaaaatatcttcacctctattcttgggaaacaccctttagtgtacatttatgttcctttatttaggaaacaccattataaaaacacttatagtaaatggggacattcactataatgatctaagaagctacagattgtcatagttgttttcctgctttacaaaattgctccagatctggaatgccagtttgacctttgtcttctataatatttcctttttttcccctctttgaatctctgtatatttgattcttaactaaaattgttctcttaaatattctgaatcctggtaattaaaagtttgggtgtattttctttacctccaaggaaagaactactagctacaaaaaatattttggaataagcattgttttggtataaggtacatattttggttgaagacaccagactgaagtaaacagctgtgcatccaatttattatagttttgtaagtaacaatatgtaatcaaacttctaggtgacttgagagtggaacctcctatatcattatttagcaccgtttgtgacagtaaccatttcagtgtattgtttattataccacttatatcaacttatttttcaccaggttaaaattttaatttctacaaaataacattctgaatcaagcacactgtatgttcagtaggttgaactatgaacactgtcatcaatgttcagttcaaaagcctgaaagtttagatctagaagctggtaaaaatgacaatatcaatcacattaggggaaccattgttgtcttcacttaatccatttagcactatttaaaataagcacaccaagttatatgactaatataacttgaaaattttttatactgaggggttggtgataactcttgaggatgtaatgcattaataaaaatcaactcatcattttctacttgttttcaatgtgttggaaactgtaaaatgatactgtagaacctgtctcctactttgaaaactgaatgtcagggctgagtgaatcaaagtgtctagacatatttgcatagaggccaaggtattctattctaataactgcttactcaacactaccaccttttccttatactgtatatgattatggcctacaatgttgtatttgttatttattaaattgtgattgttttattattgtttatgccaaatgttaactgccaagcttggagtgacctaaagcattttttaaaagcatggctagatttacttcagtataaattatcttatgaaaaccaaattttaaaagccacaggtgttgattgttataaaataacatgctgccattcttgattgctagagtttttgttagtactttggatgcaattaaaactatgtgctatcacatgtgaaaagcttaataaattccatctatcagtagtataggtctcaatatttattatgagaccagtggtctggaaacagcttgttgtaccgaatcaactggagtctatgcttaaaaaaaaaaaatttttttttaaccatccttaaattattgcttaatggtatcatattaacatattctaaataagggctttaaggcacaggctgttgaagcattttctcagaggagtggatctgtagaagtctgtctttctatagaaatattgtgcttactcaagtgttaaattattttttctatgaactagtctacttcttaaaattcaaacatattcttttgatcacattgtttcttgagcatcctgccctgctactaacttttcaacaaggcaaaatggagtaaagtggcaatttctttagatgagtgaaataccctcaagtctcttttctgcccaaaaagggaaaagtgatagaaatgggggtggcaagtggggtgagtggatgaaggtgggtattgggggtggctgtgaaagaaaataatggagaatcacttttctagacatctacctatacttaatctaagaaacaaagtaatctactgtaaagtactctgccccttgaaagaagtattaaaaagagtgaggatggatttagaaaaaaacatgaatttagaaatattcaaaatggtttttgtggcagattcaatattatgaattcacagatatttaaagaatgagaaacatagtaattagtagaaatgccagaaacagttcctggttcctcttgtgtttgacactaagaaaatagcaagagtgtgaaatctcagatacttatgaaatctcacagatgtaaggactcaagtgtagaagaaaatatccccttcttacaaaaagaaatgtcaatttatggagtttgtgggaaatagggcaagaattcttatgcttatgagagccaagtagtcagtggaagagagtagagctcaaaactggattatcaccttagcaacttagaatagtttgaaatagaaaaaaagtatttaatttggatctggatctgttaagatatgcacagtctattttttgtatagtattggaaaataaaaatgctataatttgggt

SEQ ID NO: 7038 - protein, 57 aa, Homo sapiens [sequence omitted]

SEQ ID NO: 7039 - DNA, 3202 bp, Homo sapiens
ggagcttaaatagggattttacttagattttgcactttaaaaaatggtttaaatccccaaccaggtctgctgagaacagacccagtccctgaggaaggagaagatgttgctgccacgatcagtgccacagagaccctctcggaagaggagcaggaagagctaagaagagaacttgcaaaggtagaagaagaaatccagactctgtctcaagtgttagcagcaaaagagaagcatctagcagagatcaagcggaaacttggaatcaattctctacaggaactaaaacagaacattgccaaagggtggcaagacgtgacagcaacatctgcttacaagaagacatctgaaaccttatcccaggctggacagaaggcctcagctgctttttcgtctgttggctcagtcatcaccaaaaagctggaagatgtaaaaaactccccaacttttaaatcatttgaagaaaaggtcgaaaacttaaaggcaatagggggaaccaagcctgctggtggtgattttggagaagtcttgaattcggctgcaaatgctagtgccaccaccacggagcctcttccagaaaagacacaggagagcctgtgagattcctacctttgttctgctacccactgccagatgctgcaagcgaggtccaagcacatcttgtcaacatgcattgccatgaatttctaccagatgtgcttttatttagctttacatattcctttgaccaaatagtttgtgggttaaacaaaatgaaaatatcttcacctctattcttgggaaacaccctttagtgtacatttatgttcctttatttaggaaacaccattataaaaacacttatagtaaatggggacattcactataatgatctaagaagctacagattgtcatagttgttttcctgctttacaaaattgctccagatctggaatgccagtttgacctttgtcttctataatatttcctttttttcccctctttgaatctctgtatatttgattcttaactaaaattgttctcttaaatattctgaatcctggtaattaaaagtttgggtgtattttctttacctccaaggaaagaactactagctacaaaaaatattttggaataagcattgttttggtataaggtacatattttggttgaagacaccagactgaagtaaacagctgtgcatccaatttattatagttttgtaagtaacaatatgtaatcaaacttctaggtgacttgagagtggaacctcctatatcattatttagcaccgtttgtgacagtaaccatttcagtgtattgtttattataccacttatatcaacttatttttcaccaggttaaaattttaatttctacaaaataacattctgaatcaagcacactgtatgttcagtaggttgaactatgaacactgtcatcaatgttcagttcaaaagcctgaaagtttagatctagaagctggtaaaaatgacaatatcaatcacattaggggaaccattgttgtcttcacttaatccatttagcactatttaaaataagcacaccaagttatatgactaatataacttgaaaattttttatactgaggggttggtgataactcttgaggatgtaatgcattaataaaaatcaactcatcattttctacttgttttcaatgtgttggaaactgtaaaatgatactgtagaacctgtctcctactttgaaaactgaatgtcagggctgagtgaatcaaagtgtctagacatatttgcatagaggccaaggtattctattctaataactgcttactcaacactaccaccttttccttatactgtatatgattatggcctacaatgttgtatttgttatttattaaattgtgattgttttattattgtttatgccaaatgttaactgccaagcttggagtgacctaaagcattttttaaaagcatggctagatttacttcagtataaattatcttatgaaaaccaaattttaaaagccacaggtgttgattgttataaaataacatgctgccattcttgattgctagagtttttgttagtactttggatgcaattaaaactatgtgctatcacatgtgaaaagcttaataaattccatctatcagtagtataggtctcaatatttattatgagaccagtggtctggaaacagcttgttgtaccgaatcaactggagtctatgcttaaaaaaaaaaaatttttttttaaccatccttaaattattgcttaatggtatcatattaacatattctaaataagggctttaaggcacaggctgttgaagcattttctcagaggagtggatctgtagaagtctgtctttctatagaaatattgtgcttactcaagtgttaaattattttttctatgaactagtctacttcttaaaattcaaacatattcttttgatcacattgtttcttgagcatcctgccctgctactaacttttcaacaaggcaaaatggagtaaagtggcaatttctttagatgagtgaaataccctcaagtctcttttctgcccaaaaagggaaaagtgatagaaatgggggtggcaagtggggtgagtggatgaaggtgggtattgggggtggctgtgaaagaaaataatggagaatcacttttctagacatctacctatacttaatctaagaaacaaagtaatctactgtaaagtactctgccccttgaaagaagtattaaaaagagtgaggatggatttagaaaaaaacatgaatttagaaatattcaaaatggtttttgtggcagattcaatattatgaattcacagatatttaaagaatgagaaacatagtaattagtagaaatgccagaaacagttcctggttcctcttgtgtttgacactaagaaaatagcaagagtgtgaaatctcagatacttatgaaatctcacagatgtaaggactcaagtgtagaagaaaatatccccttcttacaaaaagaaatgtcaatttatggagtttgtgggaaatagggcaagaattcttatgcttatgagagccaagtagtcagtggaagagagtagagctcaaaactggattatcaccttagcaacttagaatagtttgaaatagaaaaaaagtatttaatttggatctggatctgttaagatatgcacagtctattttttgtatagtattggaaaataaaaatgctataatttgggt

SEQ ID NO: 7040 - protein, 57 aa, Homo sapiens [sequence omitted]

SEQ ID NO: 7041 - DNA, 3724 bp, Homo sapiens
agtgtctgatgtttgcctgaactgtttgtacctctgggccatattgcagaaccctgcccttctttgttgactgaggaaagctcgctccctgcccaggtttttcattgttgatcgaaattaacaccaggtggtgaatagagcccctcctaaggttgctcaggataaatcatttattaaataggtctgcttatcaggaggggcgtgaaggctcccaaaaggaaatgctggcacctgggcccagaagccagggcctctaactcctggggttgatttcttcagtgaagttgcaccctacaaagggaatatggccaaagcggcactcaactgaaggctgatatcaggcgattagacagccatgcattctgcgtttgtctggaatggattgtagagagatggacttatatgaggactaccagtccccgtttgattttgatgcaggagtgaacaaaagctatctctacttgtctcctagtggaaattcatctccacccggatcacctactcttcagaaatttggtctgctgagaacagacccagtccctgaggaaggagaagatgttgctgccacgatcagtgccacagagaccctctcggaagaggagcaggaagagctaagaagagaacttgcaaaggtagaagaagaaatccagactctgtctcaagtgttagcagcaaaagagaagcatctagcagagatcaagcggaaacttggaatcaattctctacaggaactaaaacagaacattgccaaagggtggcaagacgtgacagcaacatctgcgaggagcaagcttctagcagcagaaaccgaactgctctgtcttctgtattgagagccatctgcagagctgttacaagaagacatctgaaaccttatcccaggctggacagaaggcctcagctgctttttcgtctgttggctcagtcatcaccaaaaagctggaagatgtaaaaaactccccaacttttaaatcatttgaagaaaaggtcgaaaacttaaaggcaatagggggaaccaagcctgctggtggtgattttggagaagtcttgaattcggctgcaaatgctagtgccaccaccacggagcctcttccagaaaagacacaggagagcctgtgagattcctacctttgttctgctacccactgccagatgctgcaagcgaggtccaagcacatcttgtcaacatgcattgccatgaatttctaccagatgtgcttttatttagctttacatattcctttgaccaaatagtttgtgggttaaacaaaatgaaaatatcttcacctctattcttgggaaacaccctttagtgtacatttatgttcctttatttaggaaacaccattataaaaacacttatagtaaatggggacattcactataatgatctaagaagctacagattgtcatagttgttttcctgctttacaaaattgctccagatctggaatgccagtttgacctttgtcttctataatatttcctttttttcccctctttgaatctctgtatatttgattcttaactaaaattgttctcttaaatattctgaatcctggtaattaaaagtttgggtgtattttctttacctccaaggaaagaactactagctacaaaaaatattttggaataagcattgttttggtataaggtacatattttggttgaagacaccagactgaagtaaacagctgtgcatccaatttattatagttttgtaagtaacaatatgtaatcaaacttctaggtgacttgagagtggaacctcctatatcattatttagcaccgtttgtgacagtaaccatttcagtgtattgtttattataccacttatatcaacttatttttcaccaggttaaaattttaatttctacaaaataacattctgaatcaagcacactgtatgttcagtaggttgaactatgaacactgtcatcaatgttcagttcaaaagcctgaaagtttagatctagaagctggtaaaaatgacaatatcaatcacattaggggaaccattgttgtcttcacttaatccatttagcactatttaaaataagcacaccaagttatatgactaatataacttgaaaattttttatactgaggggttggtgataactcttgaggatgtaatgcattaataaaaatcaactcatcattttctacttgttttcaatgtgttggaaactgtaaaatgatactgtagaacctgtctcctactttgaaaactgaatgtcagggctgagtgaatcaaagtgtctagacatatttgcatagaggccaaggtattctattctaataactgcttactcaacactaccaccttttccttatactgtatatgattatggcctacaatgttgtatttgttatttattaaattgtgattgttttattattgtttatgccaaatgttaactgccaagcttggagtgacctaaagcattttttaaaagcatggctagatttacttcagtataaattatcttatgaaaaccaaattttaaaagccacaggtgttgattgttataaaataacatgctgccattcttgattgctagagtttttgttagtactttggatgcaattaaaactatgtgctatcacatgtgaaaagcttaataaattccatctatcagtagtataggtctcaatatttattatgagaccagtggtctggaaacagcttgttgtaccgaatcaactggagtctatgcttaaaaaaaaaaaatttttttttaaccatccttaaattattgcttaatggtatcatattaacatattctaaataagggctttaaggcacaggctgttgaagcattttctcagaggagtggatctgtagaagtctgtctttctatagaaatattgtgcttactcaagtgttaaattattttttctatgaactagtctacttcttaaaattcaaacatattcttttgatcacattgtttcttgagcatcctgccctgctactaacttttcaacaaggcaaaatggagtaaagtggcaatttctttagatgagtgaaataccctcaagtctcttttctgcccaaaaagggaaaagtgatagaaatgggggtggcaagtggggtgagtggatgaaggtgggtattgggggtggctgtgaaagaaaataatggagaatcacttttctagacatctacctatacttaatctaagaaacaaagtaatctactgtaaagtactctgccccttgaaagaagtattaaaaagagtgaggatggatttagaaaaaaacatgaatttagaaatattcaaaatggtttttgtggcagattcaatattatgaattcacagatatttaaagaatgagaaacatagtaattagtagaaatgccagaaacagttcctggttcctcttgtgtttgacactaagaaaatagcaagagtgtgaaatctcagatacttatgaaatctcacagatgtaaggactcaagtgtagaagaaaatatccccttcttacaaaaagaaatgtcaatttatggagtttgtgggaaatagggcaagaattcttatgcttatgagagccaagtagtcagtggaagagagtagagctcaaaactggattatcaccttagcaacttagaatagtttgaaatagaaaaaaagtatttaatttggatctggatctgttaagatatgcacagtctattttttgtatagtattggaaaataaaaatgctataatttgggt

SEQ ID NO: 7042 - protein, 151 aa, Homo sapiens; identical to SEQ ID NO: 6994

SEQ ID NO: 7043 - DNA, 3723 bp, Homo sapiens
agtgtctgatgtttgcctgaactgtttgtacctctgggccatattgcagaaccctgcccttctttgttgactgaggaaagctcgctccctgcccaggtttttcattgttgatcgaaattaacaccaggtggtgaatagagcccctcctaaggttgctcaggataaatcatttattaaataggtctgcttatcaggaggggcgtgaaggctcccaaaaggaaatgctggcacctgggcccagaagccagggcctctaactcctggggttgatttcttcagtgaagttgcaccctacaaagggaatatggccaaagcggcactcaactgaaggctgatatcaggcgattagacagccatgcattctgcgtttgtctggaatggattgtagagagatggacttatatgaggactaccagtccccgtttgattttgatgcaggagtgaacaaaagctatctctacttgtctcctagtggaaattcatctccacccggatcacctactcttcagaaatttggtctgctgagaacagacccagtccctgaggaaggagaagatgttgctgccacgatcagtgccacagagaccctctcggaagaggagcaggaagagctaagaagagaacttgcaaaggtagaagaagaaatccagactctgtctcaagtgttagcagcaaaagagaagcatctagcagagatcaagcggaaacttggaatcaattctctacaggaactaaaacagaacattgccaaagggtggcaagacgtgacagcaacatctgcttacaagaagacatctgaaaccttatcccaggctggacagaaggcctcagctgctttttcgtctgttggctcagtcatcaccaaaaagctggaagatgtaaaattgcaagccttttcacattcctttagtatacgttccattcagcattcaattagcatgcctgctatgagaaactccccaacttttaaatcatttgaagaaaaggtcgaaaacttaaaggcaatagggggaaccaagcctgctggtggtgattttggagaagtcttgaattcggctgcaaatgctagtgccaccaccacggagcctcttccagaaaagacacaggagagcctgtgagattcctacctttgttctgctacccactgccagatgctgcaagcgaggtccaagcacatcttgtcaacatgcattgccatgaatttctaccagatgtgcttttatttagctttacatattcctttgaccaaatagtttgtgggttaaacaaaatgaaaatatcttcacctctattcttgggaaacaccctttagtgtacatttatgttcctttatttaggaaacaccattataaaaacacttatagtaaatggggacattcactataatgatctaagaagctacagattgtcatagttgttttcctgctttacaaaattgctccagatctggaatgccagtttgacctttgtcttctataatatttcctttttttcccctctttgaatctctgtatatttgattcttaactaaaattgttctcttaaatattctgaatcctggtaattaaaagtttgggtgtattttctttacctccaaggaaagaactactagctacaaaaaatattttggaataagcattgttttggtataaggtacatattttggttgaagacaccagactgaagtaaacagctgtgcatccaatttattatagttttgtaagtaacaatatgtaatcaaacttctaggtgacttgagagtggaacctcctatatcattatttagcaccgtttgtgacagtaaccatttcagtgtattgtttattataccacttatatcaacttatttttcaccaggttaaaattttaatttctacaaaataacattctgaatcaagcacactgtatgttcagtaggttgaactatgaacactgtcatcaatgttcagttcaaaagcctgaaagtttagatctagaagctggtaaaaatgacaatatcaatcacattaggggaaccattgttgtcttcacttaatccatttagcactatttaaaataagcacaccaagttatatgactaatataacttgaaaattttttatactgaggggttggtgataactcttgaggatgtaatgcattaataaaaatcaactcatcattttctacttgttttcaatgtgttggaaactgtaaaatgatactgtagaacctgtctcctactttgaaaactgaatgtcagggctgagtgaatcaaagtgtctagacatatttgcatagaggccaaggtattctattctaataactgcttactcaacactaccaccttttccttatactgtatatgattatggcctacaatgttgtatttgttatttattaaattgtgattgttttattattgtttatgccaaatgttaactgccaagcttggagtgacctaaagcattttttaaaagcatggctagatttacttcagtataaattatcttatgaaaaccaaattttaaaagccacaggtgttgattgttataaaataacatgctgccattcttgattgctagagtttttgttagtactttggatgcaattaaaactatgtgctatcacatgtgaaaagcttaataaattccatctatcagtagtataggtctcaatatttattatgagaccagtggtctggaaacagcttgttgtaccgaatcaactggagtctatgcttaaaaaaaaaaaatttttttttaaccatccttaaattattgcttaatggtatcatattaacatattctaaataagggctttaaggcacaggctgttgaagcattttctcagaggagtggatctgtagaagtctgtctttctatagaaatattgtgcttactcaagtgttaaattattttttctatgaactagtctacttcttaaaattcaaacatattcttttgatcacattgtttcttgagcatcctgccctgctactaacttttcaacaaggcaaaatggagtaaagtggcaatttctttagatgagtgaaataccctcaagtctcttttctgcccaaaaagggaaaagtgatagaaatgggggtggcaagtggggtgagtggatgaaggtgggtattgggggtggctgtgaaagaaaataatggagaatcacttttctagacatctacctatacttaatctaagaaacaaagtaatctactgtaaagtactctgccccttgaaagaagtattaaaaagagtgaggatggatttagaaaaaaacatgaatttagaaatattcaaaatggtttttgtggcagattcaatattatgaattcacagatatttaaagaatgagaaacatagtaattagtagaaatgccagaaacagttcctggttcctcttgtgtttgacactaagaaaatagcaagagtgtgaaatctcagatacttatgaaatctcacagatgtaaggactcaagtgtagaagaaaatatccccttcttacaaaaagaaatgtcaatttatggagtttgtgggaaatagggcaagaattcttatgcttatgagagccaagtagtcagtggaagagagtagagctcaaaactggattatcaccttagcaacttagaatagtttgaaatagaaaaaaagtatttaatttggatctggatctgttaagatatgcacagtctattttttgtatagtattggaaaataaaaatgctataatttgggt

SEQ ID NO: 7044 - protein, 246 aa, Homo sapiens; identical to SEQ ID NO: 6996

SEQ ID NO: 7045 - DNA, 3654 bp, Homo sapiens
agtgtctgatgtttgcctgaactgtttgtacctctgggccatattgcagaaccctgcccttctttgttgactgaggaaagctcgctccctgcccaggtttttcattgttgatcgaaattaacaccaggtggtgaatagagcccctcctaaggttgctcaggataaatcatttattaaataggtctgcttatcaggaggggcgtgaaggctcccaaaaggaaatgctggcacctgggcccagaagccagggcctctaactcctggggttgatttcttcagtgaagttgcaccctacaaagggaatatggccaaagcggcactcaactgaaggctgatatcaggcgattagacagccatgcattctgcgtttgtctggaatggattgtagagagatggacttatatgaggactaccagtccccgtttgattttgatgcaggagtgaacaaaagctatctctacttgtctcctagtggaaattcatctccacccggatcacctactcttcagaaatttggtctgctgagaacagacccagtccctgaggaaggagaagatgttgctgccacgatcagtgccacagagaccctctcggaagaggagcaggaagagctaagaagagaacttgcaaaggtagaagaagaaatccagactctgtctcaagtgttagcagcaaaagagaagcatctagcagagatcaagcggaaacttggaatcaattctctacaggaactaaaacagaacattgccaaagggtggcaagacgtgacagcaacatctgcttacaagaagacatctgaaaccttatcccaggctggacagaaggcctcagctgctttttcgtctgttggctcagtcatcaccaaaaagctggaagatgtaaaaaactccccaacttttaaatcatttgaagaaaaggtcgaaaacttaaaggcaatagggggaaccaagcctgctggtggtgattttggagaagtcttgaattcggctgcaaatgctagtgccaccaccacggagcctcttccagaaaagacacaggagagcctgtgagattcctacctttgttctgctacccactgccagatgctgcaagcgaggtccaagcacatcttgtcaacatgcattgccatgaatttctaccagatgtgcttttatttagctttacatattcctttgaccaaatagtttgtgggttaaacaaaatgaaaatatcttcacctctattcttgggaaacaccctttagtgtacatttatgttcctttatttaggaaacaccattataaaaacacttatagtaaatggggacattcactataatgatctaagaagctacagattgtcatagttgttttcctgctttacaaaattgctccagatctggaatgccagtttgacctttgtcttctataatatttcctttttttcccctctttgaatctctgtatatttgattcttaactaaaattgttctcttaaatattctgaatcctggtaattaaaagtttgggtgtattttctttacctccaaggaaagaactactagctacaaaaaatattttggaataagcattgttttggtataaggtacatattttggttgaagacaccagactgaagtaaacagctgtgcatccaatttattatagttttgtaagtaacaatatgtaatcaaacttctaggtgacttgagagtggaacctcctatatcattatttagcaccgtttgtgacagtaaccatttcagtgtattgtttattataccacttatatcaacttatttttcaccaggttaaaattttaatttctacaaaataacattctgaatcaagcacactgtatgttcagtaggttgaactatgaacactgtcatcaatgttcagttcaaaagcctgaaagtttagatctagaagctggtaaaaatgacaatatcaatcacattaggggaaccattgttgtcttcacttaatccatttagcactatttaaaataagcacaccaagttatatgactaatataacttgaaaattttttatactgaggggttggtgataactcttgaggatgtaatgcattaataaaaatcaactcatcattttctacttgttttcaatgtgttggaaactgtaaaatgatactgtagaacctgtctcctactttgaaaactgaatgtcagggctgagtgaatcaaagtgtctagacatatttgcatagaggccaaggtattctattctaataactgcttactcaacactaccaccttttccttatactgtatatgattatggcctacaatgttgtatttgttatttattaaattgtgattgttttattattgtttatgccaaatgttaactgccaagcttggagtgacctaaagcattttttaaaagcatggctagatttacttcagtataaattatcttatgaaaaccaaattttaaaagccacaggtgttgattgttataaaataacatgctgccattcttgattgctagagtttttgttagtactttggatgcaattaaaactatgtgctatcacatgtgaaaagcttaataaattccatctatcagtagtataggtctcaatatttattatgagaccagtggtctggaaacagcttgttgtaccgaatcaactggagtctatgcttaaaaaaaaaaaatttttttttaaccatccttaaattattgcttaatggtatcatattaacatattctaaataagggctttaaggcacaggctgttgaagcattttctcagaggagtggatctgtagaagtctgtctttctatagaaatattgtgcttactcaagtgttaaattattttttctatgaactagtctacttcttaaaattcaaacatattcttttgatcacattgtttcttgagcatcctgccctgctactaacttttcaacaaggcaaaatggagtaaagtggcaatttctttagatgagtgaaataccctcaagtctcttttctgcccaaaaagggaaaagtgatagaaatgggggtggcaagtggggtgagtggatgaaggtgggtattgggggtggctgtgaaagaaaataatggagaatcacttttctagacatctacctatacttaatctaagaaacaaagtaatctactgtaaagtactctgccccttgaaagaagtattaaaaagagtgaggatggatttagaaaaaaacatgaatttagaaatattcaaaatggtttttgtggcagattcaatattatgaattcacagatatttaaagaatgagaaacatagtaattagtagaaatgccagaaacagttcctggttcctcttgtgtttgacactaagaaaatagcaagagtgtgaaatctcagatacttatgaaatctcacagatgtaaggactcaagtgtagaagaaaatatccccttcttacaaaaagaaatgtcaatttatggagtttgtgggaaatagggcaagaattcttatgcttatgagagccaagtagtcagtggaagagagtagagctcaaaactggattatcaccttagcaacttagaatagtttgaaatagaaaaaaagtatttaatttggatctggatctgttaagatatgcacagtctattttttgtatagtattggaaaataaaaatgctataatttgggt

SEQ ID NO: 7046 - protein, 223 aa, Homo sapiens; identical to SEQ ID NO: 6998

SEQ ID NO: 7047 - DNA, 3154 bp, Homo sapiens
gggagtcgccggcggaggcgaggaggagctctgcgcggcgcggcgggcgatccgagccgggacgggctgcaggcgggggtgctgcagaggacacgaggcggcgggctggagacatggaccgcggcgagcaaggtagaagaagaaatccagactctgtctcaagtgttagcagcaaaagagaagcatctagcagagatcaagcggaaacttggaatcaattctctacaggaactaaaacagaacattgccaaagggtggcaagacgtgacagcaacatctgcttacaagaagacatctgaaaccttatcccaggctggacagaaggcctcagctgctttttcgtctgttggctcagtcatcaccaaaaagctggaagatgtaaaaaactccccaacttttaaatcatttgaagaaaaggtcgaaaacttaaaggcaatagggggaaccaagcctgctggtggtgattttggagaagtcttgaattcggctgcaaatgctagtgccaccaccacggagcctcttccagaaaagacacaggagagcctgtgagattcctacctttgttctgctacccactgccagatgctgcaagcgaggtccaagcacatcttgtcaacatgcattgccatgaatttctaccagatgtgcttttatttagctttacatattcctttgaccaaatagtttgtgggttaaacaaaatgaaaatatcttcacctctattcttgggaaacaccctttagtgtacatttatgttcctttatttaggaaacaccattataaaaacacttatagtaaatggggacattcactataatgatctaagaagctacagattgtcatagttgttttcctgctttacaaaattgctccagatctggaatgccagtttgacctttgtcttctataatatttcctttttttcccctctttgaatctctgtatatttgattcttaactaaaattgttctcttaaatattctgaatcctggtaattaaaagtttgggtgtattttctttacctccaaggaaagaactactagctacaaaaaatattttggaataagcattgttttggtataaggtacatattttggttgaagacaccagactgaagtaaacagctgtgcatccaatttattatagttttgtaagtaacaatatgtaatcaaacttctaggtgacttgagagtggaacctcctatatcattatttagcaccgtttgtgacagtaaccatttcagtgtattgtttattataccacttatatcaacttatttttcaccaggttaaaattttaatttctacaaaataacattctgaatcaagcacactgtatgttcagtaggttgaactatgaacactgtcatcaatgttcagttcaaaagcctgaaagtttagatctagaagctggtaaaaatgacaatatcaatcacattaggggaaccattgttgtcttcacttaatccatttagcactatttaaaataagcacaccaagttatatgactaatataacttgaaaattttttatactgaggggttggtgataactcttgaggatgtaatgcattaataaaaatcaactcatcattttctacttgttttcaatgtgttggaaactgtaaaatgatactgtagaacctgtctcctactttgaaaactgaatgtcagggctgagtgaatcaaagtgtctagacatatttgcatagaggccaaggtattctattctaataactgcttactcaacactaccaccttttccttatactgtatatgattatggcctacaatgttgtatttgttatttattaaattgtgattgttttattattgtttatgccaaatgttaactgccaagcttggagtgacctaaagcattttttaaaagcatggctagatttacttcagtataaattatcttatgaaaaccaaattttaaaagccacaggtgttgattgttataaaataacatgctgccattcttgattgctagagtttttgttagtactttggatgcaattaaaactatgtgctatcacatgtgaaaagcttaataaattccatctatcagtagtataggtctcaatatttattatgagaccagtggtctggaaacagcttgttgtaccgaatcaactggagtctatgcttaaaaaaaaaaaatttttttttaaccatccttaaattattgcttaatggtatcatattaacatattctaaataagggctttaaggcacaggctgttgaagcattttctcagaggagtggatctgtagaagtctgtctttctatagaaatattgtgcttactcaagtgttaaattattttttctatgaactagtctacttcttaaaattcaaacatattcttttgatcacattgtttcttgagcatcctgccctgctactaacttttcaacaaggcaaaatggagtaaagtggcaatttctttagatgagtgaaataccctcaagtctcttttctgcccaaaaagggaaaagtgatagaaatgggggtggcaagtggggtgagtggatgaaggtgggtattgggggtggctgtgaaagaaaataatggagaatcacttttctagacatctacctatacttaatctaagaaacaaagtaatctactgtaaagtactctgccccttgaaagaagtattaaaaagagtgaggatggatttagaaaaaaacatgaatttagaaatattcaaaatggtttttgtggcagattcaatattatgaattcacagatatttaaagaatgagaaacatagtaattagtagaaatgccagaaacagttcctggttcctcttgtgtttgacactaagaaaatagcaagagtgtgaaatctcagatacttatgaaatctcacagatgtaaggactcaagtgtagaagaaaatatccccttcttacaaaaagaaatgtcaatttatggagtttgtgggaaatagggcaagaattcttatgcttatgagagccaagtagtcagtggaagagagtagagctcaaaactggattatcaccttagcaacttagaatagtttgaaatagaaaaaaagtatttaatttggatctggatctgttaagatatgcacagtctattttttgtatagtattggaaaataaaaatgctataatttgggt

SEQ ID NO: 7048 - protein, 61 aa, Homo sapiens; identical to SEQ ID NO: 7000

SEQ ID NO: 7049 - DNA, 3279 bp, Homo sapiens
ggacttcgcgggagtcgccggcggaggcgaggaggagctctgcgcggcgcggcgggcgatccgagccgggacgggctgcaggcgggggtgctgcagaggacacgaggcggcgggctggagacatggaccgcggcgagcaaggtctgctgagaacagacccagtccctgaggaaggagaagatgttgctgccacgatcagtgccacagagaccctctcggaagaggagcaggaagagctaagaagagaacttgcaaaggtagaagaagaaatccagactctgtctcaagtgttagcagcaaaagagaagcatctagcagagatcaagcggaaacttggaatcaattctctacaggaactaaaacagaacattgccaaagggtggcaagacgtgacagcaacatctgcttacaagaagacatctgaaaccttatcccaggctggacagaaggcctcagctgctttttcgtctgttggctcagtcatcaccaaaaagctggaagatgtaaaaaactccccaacttttaaatcatttgaagaaaaggtcgaaaacttaaaggcaatagggggaaccaagcctgctggtggtgattttggagaagtcttgaattcggctgcaaatgctagtgccaccaccacggagcctcttccagaaaagacacaggagagcctgtgagattcctacctttgttctgctacccactgccagatgctgcaagcgaggtccaagcacatcttgtcaacatgcattgccatgaatttctaccagatgtgcttttatttagctttacatattcctttgaccaaatagtttgtgggttaaacaaaatgaaaatatcttcacctctattcttgggaaacaccctttagtgtacatttatgttcctttatttaggaaacaccattataaaaacacttatagtaaatggggacattcactataatgatctaagaagctacagattgtcatagttgttttcctgctttacaaaattgctccagatctggaatgccagtttgacctttgtcttctataatatttcctttttttcccctctttgaatctctgtatatttgattcttaactaaaattgttctcttaaatattctgaatcctggtaattaaaagtttgggtgtattttctttacctccaaggaaagaactactagctacaaaaaatattttggaataagcattgttttggtataaggtacatattttggttgaagacaccagactgaagtaaacagctgtgcatccaatttattatagttttgtaagtaacaatatgtaatcaaacttctaggtgacttgagagtggaacctcctatatcattatttagcaccgtttgtgacagtaaccatttcagtgtattgtttattataccacttatatcaacttatttttcaccaggttaaaattttaatttctacaaaataacattctgaatcaagcacactgtatgttcagtaggttgaactatgaacactgtcatcaatgttcagttcaaaagcctgaaagtttagatctagaagctggtaaaaatgacaatatcaatcacattaggggaaccattgttgtcttcacttaatccatttagcactatttaaaataagcacaccaagttatatgactaatataacttgaaaattttttatactgaggggttggtgataactcttgaggatgtaatgcattaataaaaatcaactcatcattttctacttgttttcaatgtgttggaaactgtaaaatgatactgtagaacctgtctcctactttgaaaactgaatgtcagggctgagtgaatcaaagtgtctagacatatttgcatagaggccaaggtattctattctaataactgcttactcaacactaccaccttttccttatactgtatatgattatggcctacaatgttgtatttgttatttattaaattgtgattgttttattattgtttatgccaaatgttaactgccaagcttggagtgacctaaagcattttttaaaagcatggctagatttacttcagtataaattatcttatgaaaaccaaattttaaaagccacaggtgttgattgttataaaataacatgctgccattcttgattgctagagtttttgttagtactttggatgcaattaaaactatgtgctatcacatgtgaaaagcttaataaattccatctatcagtagtataggtctcaatatttattatgagaccagtggtctggaaacagcttgttgtaccgaatcaactggagtctatgcttaaaaaaaaaaaatttttttttaaccatccttaaattattgcttaatggtatcatattaacatattctaaataagggctttaaggcacaggctgttgaagcattttctcagaggagtggatctgtagaagtctgtctttctatagaaatattgtgcttactcaagtgttaaattattttttctatgaactagtctacttcttaaaattcaaacatattcttttgatcacattgtttcttgagcatcctgccctgctactaacttttcaacaaggcaaaatggagtaaagtggcaatttctttagatgagtgaaataccctcaagtctcttttctgcccaaaaagggaaaagtgatagaaatgggggtggcaagtggggtgagtggatgaaggtgggtattgggggtggctgtgaaagaaaataatggagaatcacttttctagacatctacctatacttaatctaagaaacaaagtaatctactgtaaagtactctgccccttgaaagaagtattaaaaagagtgaggatggatttagaaaaaaacatgaatttagaaatattcaaaatggtttttgtggcagattcaatattatgaattcacagatatttaaagaatgagaaacatagtaattagtagaaatgccagaaacagttcctggttcctcttgtgtttgacactaagaaaatagcaagagtgtgaaatctcagatacttatgaaatctcacagatgtaaggactcaagtgtagaagaaaatatccccttcttacaaaaagaaatgtcaatttatggagtttgtgggaaatagggcaagaattcttatgcttatgagagccaagtagtcagtggaagagagtagagctcaaaactggattatcaccttagcaacttagaatagtttgaaatagaaaaaaagtatttaatttggatctggatctgttaagatatgcacagtctattttttgtatagtattggaaaataaaaatgctataatttgggt

SEQ ID NO: 7050 - protein, 183 aa, Homo sapiens; identical to SEQ ID NO: 7002

SEQ ID NO: 7051 - DNA, 3424 bp, Homo sapiens
ggttgggtgacgccccaggaaagcgctccaggccgagggcgggcggcgccgccgcgcccgacgcctctgggggtggggacttcgcgggagtcgccggcggaggcgaggaggagctctgcgcggcgcggcgggcgatccgagccgggacgggctgcaggcgggggtgctgcagaggacacgaggcggcgggctggagacatggaccgcggcgagcaaggtctgctgagaacagacccagtccctgaggaaggagaagatgttgctgccacgatcagtgccacagagaccctctcggaagaggagcaggaagagctaagaagagaacttgcaaaggtagaagaagaaatccagactctgtctcaagtgttagcagcaaaagagaagcatctagcagagatcaagcggaaacttggaatcaattctctacaggaactaaaacagaacattgccaaagggtggcaagacgtgacagcaacatctgcttacaagaagacatctgaaaccttatcccaggctggacagaaggcctcagctgctttttcgtctgttggctcagtcatcaccaaaaagctggaagatgtaaaattgcaagccttttcacattcctttagtatacgttccattcagcattcaattagcatgcctgctatgagaaactccccaacttttaaatcatttgaagaaaaggtcgaaaacttaaaggcaatagggggaaccaagcctgctggtggtgattttggagaagtcttgaattcggctgcaaatgctagtgccaccaccacggagcctcttccagaaaagacacaggagagcctgtgagattcctacctttgttctgctacccactgccagatgctgcaagcgaggtccaagcacatcttgtcaacatgcattgccatgaatttctaccagatgtgcttttatttagctttacatattcctttgaccaaatagtttgtgggttaaacaaaatgaaaatatcttcacctctattcttgggaaacaccctttagtgtacatttatgttcctttatttaggaaacaccattataaaaacacttatagtaaatggggacattcactataatgatctaagaagctacagattgtcatagttgttttcctgctttacaaaattgctccagatctggaatgccagtttgacctttgtcttctataatatttcctttttttcccctctttgaatctctgtatatttgattcttaactaaaattgttctcttaaatattctgaatcctggtaattaaaagtttgggtgtattttctttacctccaaggaaagaactactagctacaaaaaatattttggaataagcattgttttggtataaggtacatattttggttgaagacaccagactgaagtaaacagctgtgcatccaatttattatagttttgtaagtaacaatatgtaatcaaacttctaggtgacttgagagtggaacctcctatatcattatttagcaccgtttgtgacagtaaccatttcagtgtattgtttattataccacttatatcaacttatttttcaccaggttaaaattttaatttctacaaaataacattctgaatcaagcacactgtatgttcagtaggttgaactatgaacactgtcatcaatgttcagttcaaaagcctgaaagtttagatctagaagctggtaaaaatgacaatatcaatcacattaggggaaccattgttgtcttcacttaatccatttagcactatttaaaataagcacaccaagttatatgactaatataacttgaaaattttttatactgaggggttggtgataactcttgaggatgtaatgcattaataaaaatcaactcatcattttctacttgttttcaatgtgttggaaactgtaaaatgatactgtagaacctgtctcctactttgaaaactgaatgtcagggctgagtgaatcaaagtgtctagacatatttgcatagaggccaaggtattctattctaataactgcttactcaacactaccaccttttccttatactgtatatgattatggcctacaatgttgtatttgttatttattaaattgtgattgttttattattgtttatgccaaatgttaactgccaagcttggagtgacctaaagcattttttaaaagcatggctagatttacttcagtataaattatcttatgaaaaccaaattttaaaagccacaggtgttgattgttataaaataacatgctgccattcttgattgctagagtttttgttagtactttggatgcaattaaaactatgtgctatcacatgtgaaaagcttaataaattccatctatcagtagtataggtctcaatatttattatgagaccagtggtctggaaacagcttgttgtaccgaatcaactggagtctatgcttaaaaaaaaaaaatttttttttaaccatccttaaattattgcttaatggtatcatattaacatattctaaataagggctttaaggcacaggctgttgaagcattttctcagaggagtggatctgtagaagtctgtctttctatagaaatattgtgcttactcaagtgttaaattattttttctatgaactagtctacttcttaaaattcaaacatattcttttgatcacattgtttcttgagcatcctgccctgctactaacttttcaacaaggcaaaatggagtaaagtggcaatttctttagatgagtgaaataccctcaagtctcttttctgcccaaaaagggaaaagtgatagaaatgggggtggcaagtggggtgagtggatgaaggtgggtattgggggtggctgtgaaagaaaataatggagaatcacttttctagacatctacctatacttaatctaagaaacaaagtaatctactgtaaagtactctgccccttgaaagaagtattaaaaagagtgaggatggatttagaaaaaaacatgaatttagaaatattcaaaatggtttttgtggcagattcaatattatgaattcacagatatttaaagaatgagaaacatagtaattagtagaaatgccagaaacagttcctggttcctcttgtgtttgacactaagaaaatagcaagagtgtgaaatctcagatacttatgaaatctcacagatgtaaggactcaagtgtagaagaaaatatccccttcttacaaaaagaaatgtcaatttatggagtttgtgggaaatagggcaagaattcttatgcttatgagagccaagtagtcagtggaagagagtagagctcaaaactggattatcaccttagcaacttagaatagtttgaaatagaaaaaaagtatttaatttggatctggatctgttaagatatgcacagtctattttttgtatagtattggaaaataaaaatgctataatttgggt

SEQ ID NO: 7052 - protein, 206 aa, Homo sapiens; identical to SEQ ID NO: 7004

SEQ ID NO: 7053 - DNA, 1936 bp, Homo sapiens
attacttatgtctgagactggccctgttcatggaatcaaatgcatactcttaaaatattagatcagaaattgagaatcttacattataaatacttgtatgtacctgcacatatatggtacagattatatctgttcttttgccgattgagaataatgttgaagaggaatcaattatattttcaaactagttggattttttttcagtatttgtatttactatttgtttttcttttctctccatagaaactccccaacttttaaatcatttgaagaaaaggtcgaaaacttaaaggcaatagggggaaccaagcctgctggtggtgattttggagaagtcttgaattcggctgcaaatgctagtgccaccaccacggagcctcttccagaaaagacacaggagagcctgtgagattcctacctttgttctgctacccactgccagatgctgcaagcgaggtccaagcacatcttgtcaacatgcattgccatgaatttctaccagatgtgcttttatttagctttacatattcctttgaccaaatagtttgtgggttaaacaaaatgaaaatatcttcacctctattcttgggaaacaccctttagtgtacatttatgttcctttatttaggaaacaccattataaaaacacttatagtaaatggggacattcactataatgatctaagaagctacagattgtcatagttgttttcctgctttacaaaattgctccagatctggaatgccagtttgacctttgtcttctataatatttcctttttttcccctctttgaatctctgtatatttgattcttaactaaaattgttctcttaaatattctgaatcctggtaattaaaagtttgggtgtattttctttacctccaaggaaagaactactagctacaaaaaatattttggaataagcattgttttggtataaggtacatattttggttgaagacaccagactgaagtaaacagctgtgcatccaatttattatagttttgtaagtaacaatatgtaatcaaacttctaggtgacttgagagtggaacctcctatatcattatttagcaccgtttgtgacagtaaccatttcagtgtattgtttattataccacttatatcaacttatttttcaccaggttaaaattttaatttctacaaaataacattctgaatcaagcacactgtatgttcagtaggttgaactatgaacactgtcatcaatgttcagttcaaaagcctgaaagtttagatctagaagctggtaaaaatgacaatatcaatcacattaggggaaccattgttgtcttcacttaatccatttagcactatttaaaataagcacaccaagttatatgactaatataacttgaaaattttttatactgaggggttggtgataactcttgaggatgtaatgcattaataaaaatcaactcatcattttctacttgttttcaatgtgttggaaactgtaaaatgatactgtagaacctgtctcctactttgaaaactgaatgtcagggctgagtgaatcaaagtgtctagacatatttgcatagaggccaaggtattctattctaataactgcttactcaacactaccaccttttccttatactgtatatgattatggcctacaatgttgtatttgttatttattaaattgtgattgttttattattgtttatgccaaatgttaactgccaagcttggagtgacctaaagcattttttaaaagcatggctagatttacttcagtataaattatcttatgaaaaccaaattttaaaagccacaggtgttgattgttataaaataacatgctgccattcttgattgctagagtttttgttagtactttggatgcaattaaaactatgtgctatcacatgtgaaaagcttaataaattccatctatcagtag

SEQ ID NO: 7054 - protein, 67 aa, Homo sapiens; identical to SEQ ID NO: 7032

SEQ ID NO: 7055 - DNA, 1870 bp, Homo sapiens
actccttcaaaccagtacctggaaggctcatctaaggtcttctaggcctagcattctaacatcaaatgatcatctgatgatcatttaaggttgttgaaaaattctggttgtgaacttctttgtctttttagttcttcatgatcatgcaggattgcaagccttttcacattcctttagaaactccccaacttttaaatcatttgaagaaaaggtcgaaaacttaaaggcaatagggggaaccaagcctgctggtggtgattttggagaagtcttgaattcggctgcaaatgctagtgccaccaccacggagcctcttccagaaaagacacaggagagcctgtgagattcctacctttgttctgctacccactgccagatgctgcaagcgaggtccaagcacatcttgtcaacatgcattgccatgaatttctaccagatgtgcttttatttagctttacatattcctttgaccaaatagtttgtgggttaaacaaaatgaaaatatcttcacctctattcttgggaaacaccctttagtgtacatttatgttcctttatttaggaaacaccattataaaaacacttatagtaaatggggacattcactataatgatctaagaagctacagattgtcatagttgttttcctgctttacaaaattgctccagatctggaatgccagtttgacctttgtcttctataatatttcctttttttcccctctttgaatctctgtatatttgattcttaactaaaattgttctcttaaatattctgaatcctggtaattaaaagtttgggtgtattttctttacctccaaggaaagaactactagctacaaaaaatattttggaataagcattgttttggtataaggtacatattttggttgaagacaccagactgaagtaaacagctgtgcatccaatttattatagttttgtaagtaacaatatgtaatcaaacttctaggtgacttgagagtggaacctcctatatcattatttagcaccgtttgtgacagtaaccatttcagtgtattgtttattataccacttatatcaacttatttttcaccaggttaaaattttaatttctacaaaataacattctgaatcaagcacactgtatgttcagtaggttgaactatgaacactgtcatcaatgttcagttcaaaagcctgaaagtttagatctagaagctggtaaaaatgacaatatcaatcacattaggggaaccattgttgtcttcacttaatccatttagcactatttaaaataagcacaccaagttatatgactaatataacttgaaaattttttatactgaggggttggtgataactcttgaggatgtaatgcattaataaaaatcaactcatcattttctacttgttttcaatgtgttggaaactgtaaaatgatactgtagaacctgtctcctactttgaaaactgaatgtcagggctgagtgaatcaaagtgtctagacatatttgcatagaggccaaggtattctattctaataactgcttactcaacactaccaccttttccttatactgtatatgattatggcctacaatgttgtatttgttatttattaaattgtgattgttttattattgtttatgccaaatgttaactgccaagcttggagtgacctaaagcattttttaaaagcatggctagatttacttcagtataaattatcttatgaaaaccaaattttaaaagccacaggtgttgattgttataaaataacatgctgccattcttgattgctagagtttttgttagtactttggatgcaattaaaactatgtgctatcacatgtgaaaagcttaataaattccatctatcagtag

SEQ ID NO: 7056 - protein, 49 aa, Homo sapiens
MPNVNCQAWSDLKHFLKAWLDLLQYKLSYENQILKATGVDCYKITCCHS

SEQ ID NO: 7057 - DNA, 1858 bp, Homo sapiens
agagtgagggagggcactccttcaaaccagtacctggaaggctcatctaaggtcttctaggcctagcattctaacatcaaatgatcatctgatgatcatttaaggttgttgaaaaattctggttgtgaacttctttgtctttttagttcttcatgatcatgcaggaaactccccaacttttaaatcatttgaagaaaaggtcgaaaacttaaaggcaatagggggaaccaagcctgctggtggtgattttggagaagtcttgaattcggctgcaaatgctagtgccaccaccacggagcctcttccagaaaagacacaggagagcctgtgagattcctacctttgttctgctacccactgccagatgctgcaagcgaggtccaagcacatcttgtcaacatgcattgccatgaatttctaccagatgtgcttttatttagctttacatattcctttgaccaaatagtttgtgggttaaacaaaatgaaaatatcttcacctctattcttgggaaacaccctttagtgtacatttatgttcctttatttaggaaacaccattataaaaacacttatagtaaatggggacattcactataatgatctaagaagctacagattgtcatagttgttttcctgctttacaaaattgctccagatctggaatgccagtttgacctttgtcttctataatatttcctttttttcccctctttgaatctctgtatatttgattcttaactaaaattgttctcttaaatattctgaatcctggtaattaaaagtttgggtgtattttctttacctccaaggaaagaactactagctacaaaaaatattttggaataagcattgttttggtataaggtacatattttggttgaagacaccagactgaagtaaacagctgtgcatccaatttattatagttttgtaagtaacaatatgtaatcaaacttctaggtgacttgagagtggaacctcctatatcattatttagcaccgtttgtgacagtaaccatttcagtgtattgtttattataccacttatatcaacttatttttcaccaggttaaaattttaatttctacaaaataacattctgaatcaagcacactgtatgttcagtaggttgaactatgaacactgtcatcaatgttcagttcaaaagcctgaaagtttagatctagaagctggtaaaaatgacaatatcaatcacattaggggaaccattgttgtcttcacttaatccatttagcactatttaaaataagcacaccaagttatatgactaatataacttgaaaattttttatactgaggggttggtgataactcttgaggatgtaatgcattaataaaaatcaactcatcattttctacttgttttcaatgtgttggaaactgtaaaatgatactgtagaacctgtctcctactttgaaaactgaatgtcagggctgagtgaatcaaagtgtctagacatatttgcatagaggccaaggtattctattctaataactgcttactcaacactaccaccttttccttatactgtatatgattatggcctacaatgttgtatttgttatttattaaattgtgattgttttattattgtttatgccaaatgttaactgccaagcttggagtgacctaaagcattttttaaaagcatggctagatttacttcagtataaattatcttatgaaaaccaaattttaaaagccacaggtgttgattgttataaaataacatgctgccattcttgattgctagagtttttgttagtactttggatgcaattaaaactatgtgctatcacatgtgaaaagcttaataaattccatctatcagtag

SEQ ID NO: 7058 - protein, 49 aa, Homo sapiens; identical to SEQ ID NO: 7056

SEQ ID NO: 7059 - DNA, 2026 bp, Homo sapiens
ctttctggctggactagggcactgcagaagattgtgcctgagcttagggttgagcatacgaagatgtggtgatgccgctctgctggttatgaaggattttagaagttctgaaaaatgttttctctttttgagagttctccagcaggtggtgaccactgcacttgaaacaattgatattagaaaagatgagctgacccttcttttgctctgtgtgtttataatttaatatagttacaagaagacatctgaaaccttatcccaggctggacagaaggcctcagctgctttttcgtctgttggctcagtcatcaccaaaaagctggaagatgtaaaaaactccccaacttttaaatcatttgaagaaaaggtcgaaaacttaaaggcaatagggggaaccaagcctgctggtggtgattttggagaagtcttgaattcggctgcaaatgctagtgccaccaccacggagcctcttccagaaaagacacaggagagcctgtgagattcctacctttgttctgctacccactgccagatgctgcaagcgaggtccaagcacatcttgtcaacatgcattgccatgaatttctaccagatgtgcttttatttagctttacatattcctttgaccaaatagtttgtgggttaaacaaaatgaaaatatcttcacctctattcttgggaaacaccctttagtgtacatttatgttcctttatttaggaaacaccattataaaaacacttatagtaaatggggacattcactataatgatctaagaagctacagattgtcatagttgttttcctgctttacaaaattgctccagatctggaatgccagtttgacctttgtcttctataatatttcctttttttcccctctttgaatctctgtatatttgattcttaactaaaattgttctcttaaatattctgaatcctggtaattaaaagtttgggtgtattttctttacctccaaggaaagaactactagctacaaaaaatattttggaataagcattgttttggtataaggtacatattttggttgaagacaccagactgaagtaaacagctgtgcatccaatttattatagttttgtaagtaacaatatgtaatcaaacttctaggtgacttgagagtggaacctcctatatcattatttagcaccgtttgtgacagtaaccatttcagtgtattgtttattataccacttatatcaacttatttttcaccaggttaaaattttaatttctacaaaataacattctgaatcaagcacactgtatgttcagtaggttgaactatgaacactgtcatcaatgttcagttcaaaagcctgaaagtttagatctagaagctggtaaaaatgacaatatcaatcacattaggggaaccattgttgtcttcacttaatccatttagcactatttaaaataagcacaccaagttatatgactaatataacttgaaaattttttatactgaggggttggtgataactcttgaggatgtaatgcattaataaaaatcaactcatcattttctacttgttttcaatgtgttggaaactgtaaaatgatactgtagaacctgtctcctactttgaaaactgaatgtcagggctgagtgaatcaaagtgtctagacatatttgcatagaggccaaggtattctattctaataactgcttactcaacactaccaccttttccttatactgtatatgattatggcctacaatgttgtatttgttatttattaaattgtgattgttttattattgtttatgccaaatgttaactgccaagcttggagtgacctaaagcattttttaaaagcatggctagatttacttcagtataaattatcttatgaaaaccaaattttaaaagccacaggtgttgattgttataaaataacatgctgccattcttgattgctagagtttttgttagtactttggatgcaattaaaactatgtgctatcacatgtgaaaagcttaataaattccatctatcagtag

SEQ ID NO: 7060 - protein, 49 aa, Homo sapiens; identical to SEQ ID NO: 7056

SEQ ID NO: 7061 - DNA, 2124 bp, Homo sapiens
ggagcttaaatagggattttacttagattttgcactttaaaaaatggtttaaatccccaaccaggtctgctgagaacagacccagtccctgaggaaggagaagatgttgctgccacgatcagtgccacagagaccctctcggaagaggagcaggaagagctaagaagagaacttgcaaaggtagaagaagaaatccagactctgtctcaagtgttagcagcaaaagagaagcatctagcagagatcaagcggaaacttggaatcaattctctacaggaactaaaacagaacattgccaaagggtggcaagacgtgacagcaacatctgcttacaagaagacatctgaaaccttatcccaggctggacagaaggcctcagctgctttttcgtctgttggctcagtcatcaccaaaaagctggaagatgtaaaaaactccccaacttttaaatcatttgaagaaaaggtcgaaaacttaaaggcaatagggggaaccaagcctgctggtggtgattttggagaagtcttgaattcggctgcaaatgctagtgccaccaccacggagcctcttccagaaaagacacaggagagcctgtgagattcctacctttgttctgctacccactgccagatgctgcaagcgaggtccaagcacatcttgtcaacatgcattgccatgaatttctaccagatgtgcttttatttagctttacatattcctttgaccaaatagtttgtgggttaaacaaaatgaaaatatcttcacctctattcttgggaaacaccctttagtgtacatttatgttcctttatttaggaaacaccattataaaaacacttatagtaaatggggacattcactataatgatctaagaagctacagattgtcatagttgttttcctgctttacaaaattgctccagatctggaatgccagtttgacctttgtcttctataatatttcctttttttcccctctttgaatctctgtatatttgattcttaactaaaattgttctcttaaatattctgaatcctggtaattaaaagtttgggtgtattttctttacctccaaggaaagaactactagctacaaaaaatattttggaataagcattgttttggtataaggtacatattttggttgaagacaccagactgaagtaaacagctgtgcatccaatttattatagttttgtaagtaacaatatgtaatcaaacttctaggtgacttgagagtggaacctcctatatcattatttagcaccgtttgtgacagtaaccatttcagtgtattgtttattataccacttatatcaacttatttttcaccaggttaaaattttaatttctacaaaataacattctgaatcaagcacactgtatgttcagtaggttgaactatgaacactgtcatcaatgttcagttcaaaagcctgaaagtttagatctagaagctggtaaaaatgacaatatcaatcacattaggggaaccattgttgtcttcacttaatccatttagcactatttaaaataagcacaccaagttatatgactaatataacttgaaaattttttatactgaggggttggtgataactcttgaggatgtaatgcattaataaaaatcaactcatcattttctacttgttttcaatgtgttggaaactgtaaaatgatactgtagaacctgtctcctactttgaaaactgaatgtcagggctgagtgaatcaaagtgtctagacatatttgcatagaggccaaggtattctattctaataactgcttactcaacactaccaccttttccttatactgtatatgattatggcctacaatgttgtatttgttatttattaaattgtgattgttttattattgtttatgccaaatgttaactgccaagcttggagtgacctaaagcattttttaaaagcatggctagatttacttcagtataaattatcttatgaaaaccaaattttaaaagccacaggtgttgattgttataaaataacatgctgccattcttgattgctagagtttttgttagtactttggatgcaattaaaactatgtgctatcacatgtgaaaagcttaataaattccatctatcagtag

SEQ ID NO: 7062 - protein, 49 aa, Homo sapiens; identical to SEQ ID NO: 7056

SEQ ID NO: 7063 - DNA, 2576 bp, Homo sapiens
agtgtctgatgtttgcctgaactgtttgtacctctgggccatattgcagaaccctgcccttctttgttgactgaggaaagctcgctccctgcccaggtttttcattgttgatcgaaattaacaccaggtggtgaatagagcccctcctaaggttgctcaggataaatcatttattaaataggtctgcttatcaggaggggcgtgaaggctcccaaaaggaaatgctggcacctgggcccagaagccagggcctctaactcctggggttgatttcttcagtgaagttgcaccctacaaagggaatatggccaaagcggcactcaactgaaggctgatatcaggcgattagacagccatgcattctgcgtttgtctggaatggattgtagagagatggacttatatgaggactaccagtccccgtttgattttgatgcaggagtgaacaaaagctatctctacttgtctcctagtggaaattcatctccacccggatcacctactcttcagaaatttggtctgctgagaacagacccagtccctgaggaaggagaagatgttgctgccacgatcagtgccacagagaccctctcggaagaggagcaggaagagctaagaagagaacttgcaaaggtagaagaagaaatccagactctgtctcaagtgttagcagcaaaagagaagcatctagcagagatcaagcggaaacttggaatcaattctctacaggaactaaaacagaacattgccaaagggtggcaagacgtgacagcaacatctgcttacaagaagacatctgaaaccttatcccaggctggacagaaggcctcagctgctttttcgtctgttggctcagtcatcaccaaaaagctggaagatgtaaaaaactccccaacttttaaatcatttgaagaaaaggtcgaaaacttaaaggcaatagggggaaccaagcctgctggtggtgattttggagaagtcttgaattcggctgcaaatgctagtgccaccaccacggagcctcttccagaaaagacacaggagagcctgtgagattcctacctttgttctgctacccactgccagatgctgcaagcgaggtccaagcacatcttgtcaacatgcattgccatgaatttctaccagatgtgcttttatttagctttacatattcctttgaccaaatagtttgtgggttaaacaaaatgaaaatatcttcacctctattcttgggaaacaccctttagtgtacatttatgttcctttatttaggaaacaccattataaaaacacttatagtaaatggggacattcactataatgatctaagaagctacagattgtcatagttgttttcctgctttacaaaattgctccagatctggaatgccagtttgacctttgtcttctataatatttcctttttttcccctctttgaatctctgtatatttgattcttaactaaaattgttctcttaaatattctgaatcctggtaattaaaagtttgggtgtattttctttacctccaaggaaagaactactagctacaaaaaatattttggaataagcattgttttggtataaggtacatattttggttgaagacaccagactgaagtaaacagctgtgcatccaatttattatagttttgtaagtaacaatatgtaatcaaacttctaggtgacttgagagtggaacctcctatatcattatttagcaccgtttgtgacagtaaccatttcagtgtattgtttattataccacttatatcaacttatttttcaccaggttaaaattttaatttctacaaaataacattctgaatcaagcacactgtatgttcagtaggttgaactatgaacactgtcatcaatgttcagttcaaaagcctgaaagtttagatctagaagctggtaaaaatgacaatatcaatcacattaggggaaccattgttgtcttcacttaatccatttagcactatttaaaataagcacaccaagttatatgactaatataacttgaaaattttttatactgaggggttggtgataactcttgaggatgtaatgcattaataaaaatcaactcatcattttctacttgttttcaatgtgttggaaactgtaaaatgatactgtagaacctgtctcctactttgaaaactgaatgtcagggctgagtgaatcaaagtgtctagacatatttgcatagaggccaaggtattctattctaataactgcttactcaacactaccaccttttccttatactgtatatgattatggcctacaatgttgtatttgttatttattaaattgtgattgttttattattgtttatgccaaatgttaactgccaagcttggagtgacctaaagcattttttaaaagcatggctagatttacttcagtataaattatcttatgaaaaccaaattttaaaagccacaggtgttgattgttataaaataacatgctgccattcttgattgctagagtttttgttagtactttggatgcaattaaaactatgtgctatcacatgtgaaaagcttaataaattccatctatcagtag

SEQ ID NO: 7064 - protein, 223 aa, Homo sapiens; identical to SEQ ID NO: 6998

SEQ ID NO: 7065 - DNA, 2645 bp, Homo sapiens
agtgtctgatgtttgcctgaactgtttgtacctctgggccatattgcagaaccctgcccttctttgttgactgaggaaagctcgctccctgcccaggtttttcattgttgatcgaaattaacaccaggtggtgaatagagcccctcctaaggttgctcaggataaatcatttattaaataggtctgcttatcaggaggggcgtgaaggctcccaaaaggaaatgctggcacctgggcccagaagccagggcctctaactcctggggttgatttcttcagtgaagttgcaccctacaaagggaatatggccaaagcggcactcaactgaaggctgatatcaggcgattagacagccatgcattctgcgtttgtctggaatggattgtagagagatggacttatatgaggactaccagtccccgtttgattttgatgcaggagtgaacaaaagctatctctacttgtctcctagtggaaattcatctccacccggatcacctactcttcagaaatttggtctgctgagaacagacccagtccctgaggaaggagaagatgttgctgccacgatcagtgccacagagaccctctcggaagaggagcaggaagagctaagaagagaacttgcaaaggtagaagaagaaatccagactctgtctcaagtgttagcagcaaaagagaagcatctagcagagatcaagcggaaacttggaatcaattctctacaggaactaaaacagaacattgccaaagggtggcaagacgtgacagcaacatctgcttacaagaagacatctgaaaccttatcccaggctggacagaaggcctcagctgctttttcgtctgttggctcagtcatcaccaaaaagctggaagatgtaaaattgcaagccttttcacattcctttagtatacgttccattcagcattcaattagcatgcctgctatgagaaactccccaacttttaaatcatttgaagaaaaggtcgaaaacttaaaggcaatagggggaaccaagcctgctggtggtgattttggagaagtcttgaattcggctgcaaatgctagtgccaccaccacggagcctcttccagaaaagacacaggagagcctgtgagattcctacctttgttctgctacccactgccagatgctgcaagcgaggtccaagcacatcttgtcaacatgcattgccatgaatttctaccagatgtgcttttatttagctttacatattcctttgaccaaatagtttgtgggttaaacaaaatgaaaatatcttcacctctattcttgggaaacaccctttagtgtacatttatgttcctttatttaggaaacaccattataaaaacacttatagtaaatggggacattcactataatgatctaagaagctacagattgtcatagttgttttcctgctttacaaaattgctccagatctggaatgccagtttgacctttgtcttctataatatttcctttttttcccctctttgaatctctgtatatttgattcttaactaaaattgttctcttaaatattctgaatcctggtaattaaaagtttgggtgtattttctttacctccaaggaaagaactactagctacaaaaaatattttggaataagcattgttttggtataaggtacatattttggttgaagacaccagactgaagtaaacagctgtgcatccaatttattatagttttgtaagtaacaatatgtaatcaaacttctaggtgacttgagagtggaacctcctatatcattatttagcaccgtttgtgacagtaaccatttcagtgtattgtttattataccacttatatcaacttatttttcaccaggttaaaattttaatttctacaaaataacattctgaatcaagcacactgtatgttcagtaggttgaactatgaacactgtcatcaatgttcagttcaaaagcctgaaagtttagatctagaagctggtaaaaatgacaatatcaatcacattaggggaaccattgttgtcttcacttaatccatttagcactatttaaaataagcacaccaagttatatgactaatataacttgaaaattttttatactgaggggttggtgataactcttgaggatgtaatgcattaataaaaatcaactcatcattttctacttgttttcaatgtgttggaaactgtaaaatgatactgtagaacctgtctcctactttgaaaactgaatgtcagggctgagtgaatcaaagtgtctagacatatttgcatagaggccaaggtattctattctaataactgcttactcaacactaccaccttttccttatactgtatatgattatggcctacaatgttgtatttgttatttattaaattgtgattgttttattattgtttatgccaaatgttaactgccaagcttggagtgacctaaagcattttttaaaagcatggctagatttacttcagtataaattatcttatgaaaaccaaattttaaaagccacaggtgttgattgttataaaataacatgctgccattcttgattgctagagtttttgttagtactttggatgcaattaaaactatgtgctatcacatgtgaaaagcttaataaattccatctatcagtag

SEQ ID NO: 7066 - protein, 246 aa, Homo sapiens; identical to SEQ ID NO: 6996

SEQ ID NO: 7067 - DNA, 2646 bp, Homo sapiens
agtgtctgatgtttgcctgaactgtttgtacctctgggccatattgcagaaccctgcccttctttgttgactgaggaaagctcgctccctgcccaggtttttcattgttgatcgaaattaacaccaggtggtgaatagagcccctcctaaggttgctcaggataaatcatttattaaataggtctgcttatcaggaggggcgtgaaggctcccaaaaggaaatgctggcacctgggcccagaagccagggcctctaactcctggggttgatttcttcagtgaagttgcaccctacaaagggaatatggccaaagcggcactcaactgaaggctgatatcaggcgattagacagccatgcattctgcgtttgtctggaatggattgtagagagatggacttatatgaggactaccagtccccgtttgattttgatgcaggagtgaacaaaagctatctctacttgtctcctagtggaaattcatctccacccggatcacctactcttcagaaatttggtctgctgagaacagacccagtccctgaggaaggagaagatgttgctgccacgatcagtgccacagagaccctctcggaagaggagcaggaagagctaagaagagaacttgcaaaggtagaagaagaaatccagactctgtctcaagtgttagcagcaaaagagaagcatctagcagagatcaagcggaaacttggaatcaattctctacaggaactaaaacagaacattgccaaagggtggcaagacgtgacagcaacatctgcgaggagcaagcttctagcagcagaaaccgaactgctctgtcttctgtattgagagccatctgcagagctgttacaagaagacatctgaaaccttatcccaggctggacagaaggcctcagctgctttttcgtctgttggctcagtcatcaccaaaaagctggaagatgtaaaaaactccccaacttttaaatcatttgaagaaaaggtcgaaaacttaaaggcaatagggggaaccaagcctgctggtggtgattttggagaagtcttgaattcggctgcaaatgctagtgccaccaccacggagcctcttccagaaaagacacaggagagcctgtgagattcctacctttgttctgctacccactgccagatgctgcaagcgaggtccaagcacatcttgtcaacatgcattgccatgaatttctaccagatgtgcttttatttagctttacatattcctttgaccaaatagtttgtgggttaaacaaaatgaaaatatcttcacctctattcttgggaaacaccctttagtgtacatttatgttcctttatttaggaaacaccattataaaaacacttatagtaaatggggacattcactataatgatctaagaagctacagattgtcatagttgttttcctgctttacaaaattgctccagatctggaatgccagtttgacctttgtcttctataatatttcctttttttcccctctttgaatctctgtatatttgattcttaactaaaattgttctcttaaatattctgaatcctggtaattaaaagtttgggtgtattttctttacctccaaggaaagaactactagctacaaaaaatattttggaataagcattgttttggtataaggtacatattttggttgaagacaccagactgaagtaaacagctgtgcatccaatttattatagttttgtaagtaacaatatgtaatcaaacttctaggtgacttgagagtggaacctcctatatcattatttagcaccgtttgtgacagtaaccatttcagtgtattgtttattataccacttatatcaacttatttttcaccaggttaaaattttaatttctacaaaataacattctgaatcaagcacactgtatgttcagtaggttgaactatgaacactgtcatcaatgttcagttcaaaagcctgaaagtttagatctagaagctggtaaaaatgacaatatcaatcacattaggggaaccattgttgtcttcacttaatccatttagcactatttaaaataagcacaccaagttatatgactaatataacttgaaaattttttatactgaggggttggtgataactcttgaggatgtaatgcattaataaaaatcaactcatcattttctacttgttttcaatgtgttggaaactgtaaaatgatactgtagaacctgtctcctactttgaaaactgaatgtcagggctgagtgaatcaaagtgtctagacatatttgcatagaggccaaggtattctattctaataactgcttactcaacactaccaccttttccttatactgtatatgattatggcctacaatgttgtatttgttatttattaaattgtgattgttttattattgtttatgccaaatgttaactgccaagcttggagtgacctaaagcattttttaaaagcatggctagatttacttcagtataaattatcttatgaaaaccaaattttaaaagccacaggtgttgattgttataaaataacatgctgccattcttgattgctagagtttttgttagtactttggatgcaattaaaactatgtgctatcacatgtgaaaagcttaataaattccatctatcagtag

SEQ ID NO: 7068 - protein, 151 aa, Homo sapiens; identical to SEQ ID NO: 6994

SEQ ID NO: 7069 - DNA, 2076 bp, Homo sapiens
gggagtcgccggcggaggcgaggaggagctctgcgcggcgcggcgggcgatccgagccgggacgggctgcaggcgggggtgctgcagaggacacgaggcggcgggctggagacatggaccgcggcgagcaaggtagaagaagaaatccagactctgtctcaagtgttagcagcaaaagagaagcatctagcagagatcaagcggaaacttggaatcaattctctacaggaactaaaacagaacattgccaaagggtggcaagacgtgacagcaacatctgcttacaagaagacatctgaaaccttatcccaggctggacagaaggcctcagctgctttttcgtctgttggctcagtcatcaccaaaaagctggaagatgtaaaaaactccccaacttttaaatcatttgaagaaaaggtcgaaaacttaaaggcaatagggggaaccaagcctgctggtggtgattttggagaagtcttgaattcggctgcaaatgctagtgccaccaccacggagcctcttccagaaaagacacaggagagcctgtgagattcctacctttgttctgctacccactgccagatgctgcaagcgaggtccaagcacatcttgtcaacatgcattgccatgaatttctaccagatgtgcttttatttagctttacatattcctttgaccaaatagtttgtgggttaaacaaaatgaaaatatcttcacctctattcttgggaaacaccctttagtgtacatttatgttcctttatttaggaaacaccattataaaaacacttatagtaaatggggacattcactataatgatctaagaagctacagattgtcatagttgttttcctgctttacaaaattgctccagatctggaatgccagtttgacctttgtcttctataatatttcctttttttcccctctttgaatctctgtatatttgattcttaactaaaattgttctcttaaatattctgaatcctggtaattaaaagtttgggtgtattttctttacctccaaggaaagaactactagctacaaaaaatattttggaataagcattgttttggtataaggtacatattttggttgaagacaccagactgaagtaaacagctgtgcatccaatttattatagttttgtaagtaacaatatgtaatcaaacttctaggtgacttgagagtggaacctcctatatcattatttagcaccgtttgtgacagtaaccatttcagtgtattgtttattataccacttatatcaacttatttttcaccaggttaaaattttaatttctacaaaataacattctgaatcaagcacactgtatgttcagtaggttgaactatgaacactgtcatcaatgttcagttcaaaagcctgaaagtttagatctagaagctggtaaaaatgacaatatcaatcacattaggggaaccattgttgtcttcacttaatccatttagcactatttaaaataagcacaccaagttatatgactaatataacttgaaaattttttatactgaggggttggtgataactcttgaggatgtaatgcattaataaaaatcaactcatcattttctacttgttttcaatgtgttggaaactgtaaaatgatactgtagaacctgtctcctactttgaaaactgaatgtcagggctgagtgaatcaaagtgtctagacatatttgcatagaggccaaggtattctattctaataactgcttactcaacactaccaccttttccttatactgtatatgattatggcctacaatgttgtatttgttatttattaaattgtgattgttttattattgtttatgccaaatgttaactgccaagcttggagtgacctaaagcattttttaaaagcatggctagatttacttcagtataaattatcttatgaaaaccaaattttaaaagccacaggtgttgattgttataaaataacatgctgccattcttgattgctagagtttttgttagtactttggatgcaattaaaactatgtgctatcacatgtgaaaagcttaataaattccatctatcagtag

SEQ ID NO: 7070 - protein, 61 aa, Homo sapiens; identical to SEQ ID NO: 7000

SEQ ID NO: 7071 - DNA, 2201 bp, Homo sapiens
ggacttcgcgggagtcgccggcggaggcgaggaggagctctgcgcggcgcggcgggcgatccgagccgggacgggctgcaggcgggggtgctgcagaggacacgaggcggcgggctggagacatggaccgcggcgagcaaggtctgctgagaacagacccagtccctgaggaaggagaagatgttgctgccacgatcagtgccacagagaccctctcggaagaggagcaggaagagctaagaagagaacttgcaaaggtagaagaagaaatccagactctgtctcaagtgttagcagcaaaagagaagcatctagcagagatcaagcggaaacttggaatcaattctctacaggaactaaaacagaacattgccaaagggtggcaagacgtgacagcaacatctgcttacaagaagacatctgaaaccttatcccaggctggacagaaggcctcagctgctttttcgtctgttggctcagtcatcaccaaaaagctggaagatgtaaaaaactccccaacttttaaatcatttgaagaaaaggtcgaaaacttaaaggcaatagggggaaccaagcctgctggtggtgattttggagaagtcttgaattcggctgcaaatgctagtgccaccaccacggagcctcttccagaaaagacacaggagagcctgtgagattcctacctttgttctgctacccactgccagatgctgcaagcgaggtccaagcacatcttgtcaacatgcattgccatgaatttctaccagatgtgcttttatttagctttacatattcctttgaccaaatagtttgtgggttaaacaaaatgaaaatatcttcacctctattcttgggaaacaccctttagtgtacatttatgttcctttatttaggaaacaccattataaaaacacttatagtaaatggggacattcactataatgatctaagaagctacagattgtcatagttgttttcctgctttacaaaattgctccagatctggaatgccagtttgacctttgtcttctataatatttcctttttttcccctctttgaatctctgtatatttgattcttaactaaaattgttctcttaaatattctgaatcctggtaattaaaagtttgggtgtattttctttacctccaaggaaagaactactagctacaaaaaatattttggaataagcattgttttggtataaggtacatattttggttgaagacaccagactgaagtaaacagctgtgcatccaatttattatagttttgtaagtaacaatatgtaatcaaacttctaggtgacttgagagtggaacctcctatatcattatttagcaccgtttgtgacagtaaccatttcagtgtattgtttattataccacttatatcaacttatttttcaccaggttaaaattttaatttctacaaaataacattctgaatcaagcacactgtatgttcagtaggttgaactatgaacactgtcatcaatgttcagttcaaaagcctgaaagtttagatctagaagctggtaaaaatgacaatatcaatcacattaggggaaccattgttgtcttcacttaatccatttagcactatttaaaataagcacaccaagttatatgactaatataacttgaaaattttttatactgaggggttggtgataactcttgaggatgtaatgcattaataaaaatcaactcatcattttctacttgttttcaatgtgttggaaactgtaaaatgatactgtagaacctgtctcctactttgaaaactgaatgtcagggctgagtgaatcaaagtgtctagacatatttgcatagaggccaaggtattctattctaataactgcttactcaacactaccaccttttccttatactgtatatgattatggcctacaatgttgtatttgttatttattaaattgtgattgttttattattgtttatgccaaatgttaactgccaagcttggagtgacctaaagcattttttaaaagcatggctagatttacttcagtataaattatcttatgaaaaccaaattttaaaagccacaggtgttgattgttataaaataacatgctgccattcttgattgctagagtttttgttagtactttggatgcaattaaaactatgtgctatcacatgtgaaaagcttaataaattccatctatcagtag

SEQ ID NO: 7072 - protein, 183 aa, Homo sapiens; identical to SEQ ID NO: 7002

SEQ ID NO: 7073 - DNA, 2346 bp, Homo sapiens
ggttgggtgacgccccaggaaagcgctccaggccgagggcgggcggcgccgccgcgcccgacgcctctgggggtggggacttcgcgggagtcgccggcggaggcgaggaggagctctgcgcggcgcggcgggcgatccgagccgggacgggctgcaggcgggggtgctgcagaggacacgaggcggcgggctggagacatggaccgcggcgagcaaggtctgctgagaacagacccagtccctgaggaaggagaagatgttgctgccacgatcagtgccacagagaccctctcggaagaggagcaggaagagctaagaagagaacttgcaaaggtagaagaagaaatccagactctgtctcaagtgttagcagcaaaagagaagcatctagcagagatcaagcggaaacttggaatcaattctctacaggaactaaaacagaacattgccaaagggtggcaagacgtgacagcaacatctgcttacaagaagacatctgaaaccttatcccaggctggacagaaggcctcagctgctttttcgtctgttggctcagtcatcaccaaaaagctggaagatgtaaaattgcaagccttttcacattcctttagtatacgttccattcagcattcaattagcatgcctgctatgagaaactccccaacttttaaatcatttgaagaaaaggtcgaaaacttaaaggcaatagggggaaccaagcctgctggtggtgattttggagaagtcttgaattcggctgcaaatgctagtgccaccaccacggagcctcttccagaaaagacacaggagagcctgtgagattcctacctttgttctgctacccactgccagatgctgcaagcgaggtccaagcacatcttgtcaacatgcattgccatgaatttctaccagatgtgcttttatttagctttacatattcctttgaccaaatagtttgtgggttaaacaaaatgaaaatatcttcacctctattcttgggaaacaccctttagtgtacatttatgttcctttatttaggaaacaccattataaaaacacttatagtaaatggggacattcactataatgatctaagaagctacagattgtcatagttgttttcctgctttacaaaattgctccagatctggaatgccagtttgacctttgtcttctataatatttcctttttttcccctctttgaatctctgtatatttgattcttaactaaaattgttctcttaaatattctgaatcctggtaattaaaagtttgggtgtattttctttacctccaaggaaagaactactagctacaaaaaatattttggaataagcattgttttggtataaggtacatattttggttgaagacaccagactgaagtaaacagctgtgcatccaatttattatagttttgtaagtaacaatatgtaatcaaacttctaggtgacttgagagtggaacctcctatatcattatttagcaccgtttgtgacagtaaccatttcagtgtattgtttattataccacttatatcaacttatttttcaccaggttaaaattttaatttctacaaaataacattctgaatcaagcacactgtatgttcagtaggttgaactatgaacactgtcatcaatgttcagttcaaaagcctgaaagtttagatctagaagctggtaaaaatgacaatatcaatcacattaggggaaccattgttgtcttcacttaatccatttagcactatttaaaataagcacaccaagttatatgactaatataacttgaaaattttttatactgaggggttggtgataactcttgaggatgtaatgcattaataaaaatcaactcatcattttctacttgttttcaatgtgttggaaactgtaaaatgatactgtagaacctgtctcctactttgaaaactgaatgtcagggctgagtgaatcaaagtgtctagacatatttgcatagaggccaaggtattctattctaataactgcttactcaacactaccaccttttccttatactgtatatgattatggcctacaatgttgtatttgttatttattaaattgtgattgttttattattgtttatgccaaatgttaactgccaagcttggagtgacctaaagcattttttaaaagcatggctagatttacttcagtataaattatcttatgaaaaccaaattttaaaagccacaggtgttgattgttataaaataacatgctgccattcttgattgctagagtttttgttagtactttggatgcaattaaaactatgtgctatcacatgtgaaaagcttaataaattccatctatcagtag

SEQ ID NO: 7074 - protein, 206 aa, Homo sapiens; identical to SEQ ID NO: 7004

SEQ ID NO: 7075 - DNA, 1468 bp, Homo sapiens
attacttatgtctgagactggccctgttcatggaatcaaatgcatactcttaaaatattagatcagaaattgagaatcttacattataaatacttgtatgtacctgcacatatatggtacagattatatctgttcttttgccgattgagaataatgttgaagaggaatcaattatattttcaaactagttggattttttttcagtatttgtatttactatttgtttttcttttctctccatagaaactccccaacttttaaatcatttgaagaaaaggtcgaaaacttaaaggcaatagggggaaccaagcctgctggtggtgattttggagaagtcttgaattcggctgcaaatgctagtgccaccaccacggagcctcttccagaaaagacacaggagagcctgtgagattcctacctttgttctgctacccactgccagatgctgcaagcgaggtccaagcacatcttgtcaacatgcattgccatgaatttctaccagatgtgcttttatttagctttacatattcctttgaccaaatagtttgtgggttaaacaaaatgaaaatatcttcacctctattcttgggaaacaccctttagtgtacatttatgttcctttatttaggaaacaccattataaaaacacttatagtaaatggggacattcactataatgatctaagaagctacagattgtcatagttgttttcctgctttacaaaattgctccagatctggaatgccagtttgacctttgtcttctataatatttcctttttttcccctctttgaatctctgtatatttgattcttaactaaaattgttctcttaaatattctgaatcctggtaattaaaagtttgggtgtattttctttacctccaaggaaagaactactagctacaaaaaatattttggaataagcattgttttggtataaggtacatattttggttgaagacaccagactgaagtaaacagctgtgcatccaatttattatagttttgtaagtaacaatatgtaatcaaacttctaggtgacttgagagtggaacctcctatatcattatttagcaccgtttgtgacagtaaccatttcagtgtattgtttattataccacttatatcaacttatttttcaccaggttaaaattttaatttctacaaaataacattctgaatcaagcacactgtatgttcagtaggttgaactatgaacactgtcatcaatgttcagttcaaaagcctgaaagtttagatctagaagctggtaaaaatgacaatatcaatcacattaggggaaccattgttgtcttcacttaatccatttagcactatttaaaataagcacaccaagttatatgactaatataacttgaaaattttttatactgaggggttggtgataactcttgaggatgtaatgcattaataaaaatcaactcatcattttctacttgttttc

SEQ ID NO: 7076 - protein, 67 aa, Homo sapiens; identical to SEQ ID NO: 7032

SEQ ID NO: 7077 - DNA, 1402 bp, Homo sapiens
actccttcaaaccagtacctggaaggctcatctaaggtcttctaggcctagcattctaacatcaaatgatcatctgatgatcatttaaggttgttgaaaaattctggttgtgaacttctttgtctttttagttcttcatgatcatgcaggattgcaagccttttcacattcctttagaaactccccaacttttaaatcatttgaagaaaaggtcgaaaacttaaaggcaatagggggaaccaagcctgctggtggtgattttggagaagtcttgaattcggctgcaaatgctagtgccaccaccacggagcctcttccagaaaagacacaggagagcctgtgagattcctacctttgttctgctacccactgccagatgctgcaagcgaggtccaagcacatcttgtcaacatgcattgccatgaatttctaccagatgtgcttttatttagctttacatattcctttgaccaaatagtttgtgggttaaacaaaatgaaaatatcttcacctctattcttgggaaacaccctttagtgtacatttatgttcctttatttaggaaacaccattataaaaacacttatagtaaatggggacattcactataatgatctaagaagctacagattgtcatagttgttttcctgctttacaaaattgctccagatctggaatgccagtttgacctttgtcttctataatatttcctttttttcccctctttgaatctctgtatatttgattcttaactaaaattgttctcttaaatattctgaatcctggtaattaaaagtttgggtgtattttctttacctccaaggaaagaactactagctacaaaaaatattttggaataagcattgttttggtataaggtacatattttggttgaagacaccagactgaagtaaacagctgtgcatccaatttattatagttttgtaagtaacaatatgtaatcaaacttctaggtgacttgagagtggaacctcctatatcattatttagcaccgtttgtgacagtaaccatttcagtgtattgtttattataccacttatatcaacttatttttcaccaggttaaaattttaatttctacaaaataacattctgaatcaagcacactgtatgttcagtaggttgaactatgaacactgtcatcaatgttcagttcaaaagcctgaaagtttagatctagaagctggtaaaaatgacaatatcaatcacattaggggaaccattgttgtcttcacttaatccatttagcactatttaaaataagcacaccaagttatatgactaatataacttgaaaattttttatactgaggggttggtgataactcttgaggatgtaatgcattaataaaaatcaactcatcattttctacttgttttc

SEQ ID NO: 7078 - protein, 45 aa, Homo sapiens
MLVPPPRSLFQKRHRRACEIPTFVLLPTARCCKRGPSTSCQHALP

SEQ ID NO: 7079 - DNA, 1390 bp, Homo sapiens
agagtgagggagggcactccttcaaaccagtacctggaaggctcatctaaggtcttctaggcctagcattctaacatcaaatgatcatctgatgatcatttaaggttgttgaaaaattctggttgtgaacttctttgtctttttagttcttcatgatcatgcaggaaactccccaacttttaaatcatttgaagaaaaggtcgaaaacttaaaggcaatagggggaaccaagcctgctggtggtgattttggagaagtcttgaattcggctgcaaatgctagtgccaccaccacggagcctcttccagaaaagacacaggagagcctgtgagattcctacctttgttctgctacccactgccagatgctgcaagcgaggtccaagcacatcttgtcaacatgcattgccatgaatttctaccagatgtgcttttatttagctttacatattcctttgaccaaatagtttgtgggttaaacaaaatgaaaatatcttcacctctattcttgggaaacaccctttagtgtacatttatgttcctttatttaggaaacaccattataaaaacacttatagtaaatggggacattcactataatgatctaagaagctacagattgtcatagttgttttcctgctttacaaaattgctccagatctggaatgccagtttgacctttgtcttctataatatttcctttttttcccctctttgaatctctgtatatttgattcttaactaaaattgttctcttaaatattctgaatcctggtaattaaaagtttgggtgtattttctttacctccaaggaaagaactactagctacaaaaaatattttggaataagcattgttttggtataaggtacatattttggttgaagacaccagactgaagtaaacagctgtgcatccaatttattatagttttgtaagtaacaatatgtaatcaaacttctaggtgacttgagagtggaacctcctatatcattatttagcaccgtttgtgacagtaaccatttcagtgtattgtttattataccacttatatcaacttatttttcaccaggttaaaattttaatttctacaaaataacattctgaatcaagcacactgtatgttcagtaggttgaactatgaacactgtcatcaatgttcagttcaaaagcctgaaagtttagatctagaagctggtaaaaatgacaatatcaatcacattaggggaaccattgttgtcttcacttaatccatttagcactatttaaaataagcacaccaagttatatgactaatataacttgaaaattttttatactgaggggttggtgataactcttgaggatgtaatgcattaataaaaatcaactcatcattttctacttgttttc

SEQ ID NO: 7080 - protein, 45 aa, Homo sapiens; identical to SEQ ID NO: 7078

SEQ ID NO: 7081 - DNA, 1558 bp, Homo sapiens
ctttctggctggactagggcactgcagaagattgtgcctgagcttagggttgagcatacgaagatgtggtgatgccgctctgctggttatgaaggattttagaagttctgaaaaatgttttctctttttgagagttctccagcaggtggtgaccactgcacttgaaacaattgatattagaaaagatgagctgacccttcttttgctctgtgtgtttataatttaatatagttacaagaagacatctgaaaccttatcccaggctggacagaaggcctcagctgctttttcgtctgttggctcagtcatcaccaaaaagctggaagatgtaaaaaactccccaacttttaaatcatttgaagaaaaggtcgaaaacttaaaggcaatagggggaaccaagcctgctggtggtgattttggagaagtcttgaattcggctgcaaatgctagtgccaccaccacggagcctcttccagaaaagacacaggagagcctgtgagattcctacctttgttctgctacccactgccagatgctgcaagcgaggtccaagcacatcttgtcaacatgcattgccatgaatttctaccagatgtgcttttatttagctttacatattcctttgaccaaatagtttgtgggttaaacaaaatgaaaatatcttcacctctattcttgggaaacaccctttagtgtacatttatgttcctttatttaggaaacaccattataaaaacacttatagtaaatggggacattcactataatgatctaagaagctacagattgtcatagttgttttcctgctttacaaaattgctccagatctggaatgccagtttgacctttgtcttctataatatttcctttttttcccctctttgaatctctgtatatttgattcttaactaaaattgttctcttaaatattctgaatcctggtaattaaaagtttgggtgtattttctttacctccaaggaaagaactactagctacaaaaaatattttggaataagcattgttttggtataaggtacatattttggttgaagacaccagactgaagtaaacagctgtgcatccaatttattatagttttgtaagtaacaatatgtaatcaaacttctaggtgacttgagagtggaacctcctatatcattatttagcaccgtttgtgacagtaaccatttcagtgtattgtttattataccacttatatcaacttatttttcaccaggttaaaattttaatttctacaaaataacattctgaatcaagcacactgtatgttcagtaggttgaactatgaacactgtcatcaatgttcagttcaaaagcctgaaagtttagatctagaagctggtaaaaatgacaatatcaatcacattaggggaaccattgttgtcttcacttaatccatttagcactatttaaaataagcacaccaagttatatgactaatataacttgaaaattttttatactgaggggttggtgataactcttgaggatgtaatgcattaataaaaatcaactcatcattttctacttgttttc

SEQ ID NO: 7082 - protein, 45 aa, Homo sapiens
MKDFRSSEKCFLFLRVLQQVVTTALETIDIRKDELTLLLLCVFII

SEQ ID NO: 7083 - DNA, 1656 bp, Homo sapiens
ggagcttaaatagggattttacttagattttgcactttaaaaaatggtttaaatccccaaccaggtctgctgagaacagacccagtccctgaggaaggagaagatgttgctgccacgatcagtgccacagagaccctctcggaagaggagcaggaagagctaagaagagaacttgcaaaggtagaagaagaaatccagactctgtctcaagtgttagcagcaaaagagaagcatctagcagagatcaagcggaaacttggaatcaattctctacaggaactaaaacagaacattgccaaagggtggcaagacgtgacagcaacatctgcttacaagaagacatctgaaaccttatcccaggctggacagaaggcctcagctgctttttcgtctgttggctcagtcatcaccaaaaagctggaagatgtaaaaaactccccaacttttaaatcatttgaagaaaaggtcgaaaacttaaaggcaatagggggaaccaagcctgctggtggtgattttggagaagtcttgaattcggctgcaaatgctagtgccaccaccacggagcctcttccagaaaagacacaggagagcctgtgagattcctacctttgttctgctacccactgccagatgctgcaagcgaggtccaagcacatcttgtcaacatgcattgccatgaatttctaccagatgtgcttttatttagctttacatattcctttgaccaaatagtttgtgggttaaacaaaatgaaaatatcttcacctctattcttgggaaacaccctttagtgtacatttatgttcctttatttaggaaacaccattataaaaacacttatagtaaatggggacattcactataatgatctaagaagctacagattgtcatagttgttttcctgctttacaaaattgctccagatctggaatgccagtttgacctttgtcttctataatatttcctttttttcccctctttgaatctctgtatatttgattcttaactaaaattgttctcttaaatattctgaatcctggtaattaaaagtttgggtgtattttctttacctccaaggaaagaactactagctacaaaaaatattttggaataagcattgttttggtataaggtacatattttggttgaagacaccagactgaagtaaacagctgtgcatccaatttattatagttttgtaagtaacaatatgtaatcaaacttctaggtgacttgagagtggaacctcctatatcattatttagcaccgtttgtgacagtaaccatttcagtgtattgtttattataccacttatatcaacttatttttcaccaggttaaaattttaatttctacaaaataacattctgaatcaagcacactgtatgttcagtaggttgaactatgaacactgtcatcaatgttcagttcaaaagcctgaaagtttagatctagaagctggtaaaaatgacaatatcaatcacattaggggaaccattgttgtcttcacttaatccatttagcactatttaaaataagcacaccaagttatatgactaatataacttgaaaattttttatactgaggggttggtgataactcttgaggatgtaatgcattaataaaaatcaactcatcattttctacttgttttc

SEQ ID NO: 7084 - protein, 45 aa, Homo sapiens; identical to SEQ ID NO: 7078

SEQ ID NO: 7085 - DNA, 2108 bp, Homo sapiens
agtgtctgatgtttgcctgaactgtttgtacctctgggccatattgcagaaccctgcccttctttgttgactgaggaaagctcgctccctgcccaggtttttcattgttgatcgaaattaacaccaggtggtgaatagagcccctcctaaggttgctcaggataaatcatttattaaataggtctgcttatcaggaggggcgtgaaggctcccaaaaggaaatgctggcacctgggcccagaagccagggcctctaactcctggggttgatttcttcagtgaagttgcaccctacaaagggaatatggccaaagcggcactcaactgaaggctgatatcaggcgattagacagccatgcattctgcgtttgtctggaatggattgtagagagatggacttatatgaggactaccagtccccgtttgattttgatgcaggagtgaacaaaagctatctctacttgtctcctagtggaaattcatctccacccggatcacctactcttcagaaatttggtctgctgagaacagacccagtccctgaggaaggagaagatgttgctgccacgatcagtgccacagagaccctctcggaagaggagcaggaagagctaagaagagaacttgcaaaggtagaagaagaaatccagactctgtctcaagtgttagcagcaaaagagaagcatctagcagagatcaagcggaaacttggaatcaattctctacaggaactaaaacagaacattgccaaagggtggcaagacgtgacagcaacatctgcttacaagaagacatctgaaaccttatcccaggctggacagaaggcctcagctgctttttcgtctgttggctcagtcatcaccaaaaagctggaagatgtaaaaaactccccaacttttaaatcatttgaagaaaaggtcgaaaacttaaaggcaatagggggaaccaagcctgctggtggtgattttggagaagtcttgaattcggctgcaaatgctagtgccaccaccacggagcctcttccagaaaagacacaggagagcctgtgagattcctacctttgttctgctacccactgccagatgctgcaagcgaggtccaagcacatcttgtcaacatgcattgccatgaatttctaccagatgtgcttttatttagctttacatattcctttgaccaaatagtttgtgggttaaacaaaatgaaaatatcttcacctctattcttgggaaacaccctttagtgtacatttatgttcctttatttaggaaacaccattataaaaacacttatagtaaatggggacattcactataatgatctaagaagctacagattgtcatagttgttttcctgctttacaaaattgctccagatctggaatgccagtttgacctttgtcttctataatatttcctttttttcccctctttgaatctctgtatatttgattcttaactaaaattgttctcttaaatattctgaatcctggtaattaaaagtttgggtgtattttctttacctccaaggaaagaactactagctacaaaaaatattttggaataagcattgttttggtataaggtacatattttggttgaagacaccagactgaagtaaacagctgtgcatccaatttattatagttttgtaagtaacaatatgtaatcaaacttctaggtgacttgagagtggaacctcctatatcattatttagcaccgtttgtgacagtaaccatttcagtgtattgtttattataccacttatatcaacttatttttcaccaggttaaaattttaatttctacaaaataacattctgaatcaagcacactgtatgttcagtaggttgaactatgaacactgtcatcaatgttcagttcaaaagcctgaaagtttagatctagaagctggtaaaaatgacaatatcaatcacattaggggaaccattgttgtcttcacttaatccatttagcactatttaaaataagcacaccaagttatatgactaatataacttgaaaattttttatactgaggggttggtgataactcttgaggatgtaatgcattaataaaaatcaactcatcattttctacttgttttc

SEQ ID NO: 7086 - protein, 223 aa, Homo sapiens; identical to SEQ ID NO: 6998

SEQ ID NO: 7087 - DNA, 2177 bp, Homo sapiens
agtgtctgatgtttgcctgaactgtttgtacctctgggccatattgcagaaccctgcccttctttgttgactgaggaaagctcgctccctgcccaggtttttcattgttgatcgaaattaacaccaggtggtgaatagagcccctcctaaggttgctcaggataaatcatttattaaataggtctgcttatcaggaggggcgtgaaggctcccaaaaggaaatgctggcacctgggcccagaagccagggcctctaactcctggggttgatttcttcagtgaagttgcaccctacaaagggaatatggccaaagcggcactcaactgaaggctgatatcaggcgattagacagccatgcattctgcgtttgtctggaatggattgtagagagatggacttatatgaggactaccagtccccgtttgattttgatgcaggagtgaacaaaagctatctctacttgtctcctagtggaaattcatctccacccggatcacctactcttcagaaatttggtctgctgagaacagacccagtccctgaggaaggagaagatgttgctgccacgatcagtgccacagagaccctctcggaagaggagcaggaagagctaagaagagaacttgcaaaggtagaagaagaaatccagactctgtctcaagtgttagcagcaaaagagaagcatctagcagagatcaagcggaaacttggaatcaattctctacaggaactaaaacagaacattgccaaagggtggcaagacgtgacagcaacatctgcttacaagaagacatctgaaaccttatcccaggctggacagaaggcctcagctgctttttcgtctgttggctcagtcatcaccaaaaagctggaagatgtaaaattgcaagccttttcacattcctttagtatacgttccattcagcattcaattagcatgcctgctatgagaaactccccaacttttaaatcatttgaagaaaaggtcgaaaacttaaaggcaatagggggaaccaagcctgctggtggtgattttggagaagtcttgaattcggctgcaaatgctagtgccaccaccacggagcctcttccagaaaagacacaggagagcctgtgagattcctacctttgttctgctacccactgccagatgctgcaagcgaggtccaagcacatcttgtcaacatgcattgccatgaatttctaccagatgtgcttttatttagctttacatattcctttgaccaaatagtttgtgggttaaacaaaatgaaaatatcttcacctctattcttgggaaacaccctttagtgtacatttatgttcctttatttaggaaacaccattataaaaacacttatagtaaatggggacattcactataatgatctaagaagctacagattgtcatagttgttttcctgctttacaaaattgctccagatctggaatgccagtttgacctttgtcttctataatatttcctttttttcccctctttgaatctctgtatatttgattcttaactaaaattgttctcttaaatattctgaatcctggtaattaaaagtttgggtgtattttctttacctccaaggaaagaactactagctacaaaaaatattttggaataagcattgttttggtataaggtacatattttggttgaagacaccagactgaagtaaacagctgtgcatccaatttattatagttttgtaagtaacaatatgtaatcaaacttctaggtgacttgagagtggaacctcctatatcattatttagcaccgtttgtgacagtaaccatttcagtgtattgtttattataccacttatatcaacttatttttcaccaggttaaaattttaatttctacaaaataacattctgaatcaagcacactgtatgttcagtaggttgaactatgaacactgtcatcaatgttcagttcaaaagcctgaaagtttagatctagaagctggtaaaaatgacaatatcaatcacattaggggaaccattgttgtcttcacttaatccatttagcactatttaaaataagcacaccaagttatatgactaatataacttgaaaattttttatactgaggggttggtgataactcttgaggatgtaatgcattaataaaaatcaactcatcattttctacttgttttc

SEQ ID NO: 7088 - protein, 246 aa, Homo sapiens; identical to SEQ ID NO: 6996

SEQ ID NO: 7089 - DNA, 1608 bp, Homo sapiens
gggagtcgccggcggaggcgaggaggagctctgcgcggcgcggcgggcgatccgagccgggacgggctgcaggcgggggtgctgcagaggacacgaggcggcgggctggagacatggaccgcggcgagcaaggtagaagaagaaatccagactctgtctcaagtgttagcagcaaaagagaagcatctagcagagatcaagcggaaacttggaatcaattctctacaggaactaaaacagaacattgccaaagggtggcaagacgtgacagcaacatctgcttacaagaagacatctgaaaccttatcccaggctggacagaaggcctcagctgctttttcgtctgttggctcagtcatcaccaaaaagctggaagatgtaaaaaactccccaacttttaaatcatttgaagaaaaggtcgaaaacttaaaggcaatagggggaaccaagcctgctggtggtgattttggagaagtcttgaattcggctgcaaatgctagtgccaccaccacggagcctcttccagaaaagacacaggagagcctgtgagattcctacctttgttctgctacccactgccagatgctgcaagcgaggtccaagcacatcttgtcaacatgcattgccatgaatttctaccagatgtgcttttatttagctttacatattcctttgaccaaatagtttgtgggttaaacaaaatgaaaatatcttcacctctattcttgggaaacaccctttagtgtacatttatgttcctttatttaggaaacaccattataaaaacacttatagtaaatggggacattcactataatgatctaagaagctacagattgtcatagttgttttcctgctttacaaaattgctccagatctggaatgccagtttgacctttgtcttctataatatttcctttttttcccctctttgaatctctgtatatttgattcttaactaaaattgttctcttaaatattctgaatcctggtaattaaaagtttgggtgtattttctttacctccaaggaaagaactactagctacaaaaaatattttggaataagcattgttttggtataaggtacatattttggttgaagacaccagactgaagtaaacagctgtgcatccaatttattatagttttgtaagtaacaatatgtaatcaaacttctaggtgacttgagagtggaacctcctatatcattatttagcaccgtttgtgacagtaaccatttcagtgtattgtttattataccacttatatcaacttatttttcaccaggttaaaattttaatttctacaaaataacattctgaatcaagcacactgtatgttcagtaggttgaactatgaacactgtcatcaatgttcagttcaaaagcctgaaagtttagatctagaagctggtaaaaatgacaatatcaatcacattaggggaaccattgttgtcttcacttaatccatttagcactatttaaaataagcacaccaagttatatgactaatataacttgaaaattttttatactgaggggttggtgataactcttgaggatgtaatgcattaataaaaatcaactcatcattttctacttgttttc

SEQ ID NO: 7090 - protein, 61 aa, Homo sapiens; identical to SEQ ID NO: 7000

SEQ ID NO: 7091 - DNA, 1733 bp, Homo sapiens
ggacttcgcgggagtcgccggcggaggcgaggaggagctctgcgcggcgcggcgggcgatccgagccgggacgggctgcaggcgggggtgctgcagaggacacgaggcggcgggctggagacatggaccgcggcgagcaaggtctgctgagaacagacccagtccctgaggaaggagaagatgttgctgccacgatcagtgccacagagaccctctcggaagaggagcaggaagagctaagaagagaacttgcaaaggtagaagaagaaatccagactctgtctcaagtgttagcagcaaaagagaagcatctagcagagatcaagcggaaacttggaatcaattctctacaggaactaaaacagaacattgccaaagggtggcaagacgtgacagcaacatctgcttacaagaagacatctgaaaccttatcccaggctggacagaaggcctcagctgctttttcgtctgttggctcagtcatcaccaaaaagctggaagatgtaaaaaactccccaacttttaaatcatttgaagaaaaggtcgaaaacttaaaggcaatagggggaaccaagcctgctggtggtgattttggagaagtcttgaattcggctgcaaatgctagtgccaccaccacggagcctcttccagaaaagacacaggagagcctgtgagattcctacctttgttctgctacccactgccagatgctgcaagcgaggtccaagcacatcttgtcaacatgcattgccatgaatttctaccagatgtgcttttatttagctttacatattcctttgaccaaatagtttgtgggttaaacaaaatgaaaatatcttcacctctattcttgggaaacaccctttagtgtacatttatgttcctttatttaggaaacaccattataaaaacacttatagtaaatggggacattcactataatgatctaagaagctacagattgtcatagttgttttcctgctttacaaaattgctccagatctggaatgccagtttgacctttgtcttctataatatttcctttttttcccctctttgaatctctgtatatttgattcttaactaaaattgttctcttaaatattctgaatcctggtaattaaaagtttgggtgtattttctttacctccaaggaaagaactactagctacaaaaaatattttggaataagcattgttttggtataaggtacatattttggttgaagacaccagactgaagtaaacagctgtgcatccaatttattatagttttgtaagtaacaatatgtaatcaaacttctaggtgacttgagagtggaacctcctatatcattatttagcaccgtttgtgacagtaaccatttcagtgtattgtttattataccacttatatcaacttatttttcaccaggttaaaattttaatttctacaaaataacattctgaatcaagcacactgtatgttcagtaggttgaactatgaacactgtcatcaatgttcagttcaaaagcctgaaagtttagatctagaagctggtaaaaatgacaatatcaatcacattaggggaaccattgttgtcttcacttaatccatttagcactatttaaaataagcacaccaagttatatgactaatataacttgaaaattttttatactgaggggttggtgataactcttgaggatgtaatgcattaataaaaatcaactcatcattttctacttgttttc

SEQ ID NO: 7092 - protein, 183 aa, Homo sapiens; identical to SEQ ID NO: 7002

SEQ ID NO: 7093 - DNA, 1878 bp, Homo sapiens
ggttgggtgacgccccaggaaagcgctccaggccgagggcgggcggcgccgccgcgcccgacgcctctgggggtggggacttcgcgggagtcgccggcggaggcgaggaggagctctgcgcggcgcggcgggcgatccgagccgggacgggctgcaggcgggggtgctgcagaggacacgaggcggcgggctggagacatggaccgcggcgagcaaggtctgctgagaacagacccagtccctgaggaaggagaagatgttgctgccacgatcagtgccacagagaccctctcggaagaggagcaggaagagctaagaagagaacttgcaaaggtagaagaagaaatccagactctgtctcaagtgttagcagcaaaagagaagcatctagcagagatcaagcggaaacttggaatcaattctctacaggaactaaaacagaacattgccaaagggtggcaagacgtgacagcaacatctgcttacaagaagacatctgaaaccttatcccaggctggacagaaggcctcagctgctttttcgtctgttggctcagtcatcaccaaaaagctggaagatgtaaaattgcaagccttttcacattcctttagtatacgttccattcagcattcaattagcatgcctgctatgagaaactccccaacttttaaatcatttgaagaaaaggtcgaaaacttaaaggcaatagggggaaccaagcctgctggtggtgattttggagaagtcttgaattcggctgcaaatgctagtgccaccaccacggagcctcttccagaaaagacacaggagagcctgtgagattcctacctttgttctgctacccactgccagatgctgcaagcgaggtccaagcacatcttgtcaacatgcattgccatgaatttctaccagatgtgcttttatttagctttacatattcctttgaccaaatagtttgtgggttaaacaaaatgaaaatatcttcacctctattcttgggaaacaccctttagtgtacatttatgttcctttatttaggaaacaccattataaaaacacttatagtaaatggggacattcactataatgatctaagaagctacagattgtcatagttgttttcctgctttacaaaattgctccagatctggaatgccagtttgacctttgtcttctataatatttcctttttttcccctctttgaatctctgtatatttgattcttaactaaaattgttctcttaaatattctgaatcctggtaattaaaagtttgggtgtattttctttacctccaaggaaagaactactagctacaaaaaatattttggaataagcattgttttggtataaggtacatattttggttgaagacaccagactgaagtaaacagctgtgcatccaatttattatagttttgtaagtaacaatatgtaatcaaacttctaggtgacttgagagtggaacctcctatatcattatttagcaccgtttgtgacagtaaccatttcagtgtattgtttattataccacttatatcaacttatttttcaccaggttaaaattttaatttctacaaaataacattctgaatcaagcacactgtatgttcagtaggttgaactatgaacactgtcatcaatgttcagttcaaaagcctgaaagtttagatctagaagctggtaaaaatgacaatatcaatcacattaggggaaccattgttgtcttcacttaatccatttagcactatttaaaataagcacaccaagttatatgactaatataacttgaaaattttttatactgaggggttggtgataactcttgaggatgtaatgcattaataaaaatcaactcatcattttctacttgttttc

SEQ ID NO: 7094 - protein, 206 aa, Homo sapiens; identical to SEQ ID NO: 7004

SEQ ID NO: 7095 - DNA, 587 bp, Homo sapiens
gatccgagccgggacgggctgcaggcgggggtgctgcagaggacacgaggcggcgggctggagacatggaccgcggcgagcaagctttttatttcatctggaatttctggcttgaattagggaaagatttatcttttctccactcatataaaatgtctgctgagaacagacccagtccctgaggaaggagaagatgttgctgccacgatcagtgccacagagaccctctcggaagaggagcaggaagagctaagaagagaacttgcaaaggtagaagaagaaatccagactctgtctcaagtgttagcagcaaaagagaagcatctagcagagatcaagcggaaacttggaatcaattctctacaggaactaaaacagaacattgccaaagggtggcaagacgtgacagcaacatctgcttacaagaagacatctgaaaccttatcccaggctggacagaaggcctcagctgctttttcgtctgttggctcagtcatcaccaaaaagctggaagatgtaaaattgcaagccttttcacattcctttagtatacgttccattcagcattcaattagcatgcctgctat

SEQ ID NO: 7096 - protein, 38 aa, Homo sapiens
MDRGEQAFYFIWNFWLELGKDLSFLHSYKMSAENRPSP

SEQ ID NO: 7097 - DNA, 564 bp, Homo sapiens
ggaggcgaggaggagctctgcgcggcgcggcgggcgatccgagccgggacgggctgcaggcgggggtgctgcagaggacacgaggcggcgggctggagacatggaccgcggcgagcaaggtctgctgagaacagacccagtccctgaggaaggagaagatgttgctgccacgatcagtgccacagagaccctctcggaagaggagcaggaagagctaagaagagaacttgcaaaggtagaagaagaaatccagactctgtctcaagtgttagcagcaaaagagaagcatctagcagagatcaagcggaaacttggaatcaattctctacaggaactaaaacagaacattgccaaagggtggcaagacgtgacagcaacatctgcttacaagaagacatctgaaaccttatcccaggctggacagaaggcctcagctgctttttcgtctgttggctcagtcatcaccaaaaagctggaagatgtaaagtatgtcctcatttttccttgctcattaagtagctgacgcaaattaaaatgttattgttgttgcatctgtttcctgac

SEQ ID NO: 7098 - protein, 140 aa, Homo sapiens
MDRGEQGLLRTDPVPEEGEDVAATISATETLSEEEQEELRRELAKVEEEIQTLSQVLAAKEKHLAEIKRKLGINSLQELKQNIAKGWQDVTATSAYKKTSETLSQAGQKASAAFSSVGSVITKKLEDVKYVLIFPCSLSS

SEQ ID NO: 7099 - DNA, 1920 bp, Homo sapiens
agtgtctgatgtttgcctgaactgtttgtacctctgggccatattgcagaaccctgcccttctttgttgactgaggaaagctcgctccctgcccaggtttttcattgttgatcgaaattaacaccaggtggtgaatagagcccctcctaaggttgctcaggataaatcatttattaaataggtctgcttatcaggaggggcgtgaaggctcccaaaaggaaatgctggcacctgggcccagaagccagggcctctaactcctggggttgatttcttcagtgaagttgcaccctacaaagggaatatggccaaagcggcactcaactgaaggctgatatcaggcgattagacagccatgcattctgcgtttgtctggaatggattgtagagagatggacttatatgaggactaccagtccccgtttgattttgatgcaggagtgaacaaaagctatctctacttgtctcctagtggaaattcatctccacccggatcacctactcttcagaaatttgactgcaccttttaattttaatgataatgatttgctgccacctacgggctaatgtggaaagagcagaacatgtcattaccaactttcttagatgctgaatataaaatctcaaggtcatcctggcagacttgaagccaactggacaacccgtcatcctcttttctgagagatttattttccttgatagcctagccgcatacttgaatagaaccagaatccccttggattctttttggaattgggcagtatacataaagcattgtgttagcagtcagatactgtatttctccccttgtttgagtagatttgcaaaacagtgtgtatcaaaaaagcatgaaagagtctttgctatttaagtaatggtttggtacctgagttttgcttgttttgttttggagatctgttgtagttggagaacctgggagttctgtacaaaacattaaaaataaaataacgtttaacaggtagctctgttatggttcttactgtgttgccttatatgattgttacttgaatgcttgactctcagtttcaatctcatacaactttcttcacataatctgacatagagggtagatttacaagcacacacagatgctgggaaatggtttctgacagtacatagtacagcacgttgttcacggtgtggtttggcaggagttggagtaagaggtgccaatgccagctagcaggagacgggtccagtaagggctacctgccaacctcaggggtcacactttgctttgaaaacagtaaggaatcaccaaaggattttaagctgaagagtgatacagtcagatttctattatagaaatattatttgggcagtctgttcacaaatattttagaggaagacctgcggaagcaattatgcattgagcttttctacttgctgattgtacctattaaatattttatattcagtcaagagcttaatcatattttttgccagtccgatttgtggtttttgaattttttgtgttacttttatgcctttaacagttctgtgctttccaggtaggcactattttggtgctgccatgctgatgattattattataattattaactgctattaatcagtgagtgtacagtagagcctgtaccaagtgcctttgtaacttgtacaccatgtacataagcatcatctcattgactcatgtaattctctaatgcttgctgcgacgctggctgcttgttccacagtgtggttattctccttcctttttcttctgtgtctgctccctggcgccttgcattgggcaggatgccacattgctgctgtggctgaactggcagttctcagaaatggtcctggggggtagcagggaacaactgcagtggctgtgatgctcactggcaggaagagcaggcagaggagtaaaccttcccctggtttctttgc

SEQ ID NO: 7100 - protein, 50 aa, Homo sapiens
MDCREMDLYEDYQSPFDFDAGVNKSYLYLSPSGNSSPPGSPTLQKFDCTF

SEQ ID NO: 7101 - DNA, 945 bp, Homo sapiens
agaaagctggtgcttcagttacatgcactcaaaggagaagaatctactttgaatggaaagctcccgggtattcccacaccttctttgtttgtctaaggccatggctctgcagagctgcaataaacctgcgtacccaccctgcagaaggactgggccacagctagcttgtaaaacaaaactaagtcaccaaatttatttcctttaacacagtctcttagcagaacctttctatgctgactgtggccttggctcaagcaacagcaattgcagctcctgctggttctactaaggaggtaaaaataaaggcgactcgctttcagagcttcgctcttgtgaccaggctggagtacaatggcacaatctcagctcactgcaacctccaccttctgggttcaagtgattctcctgcctcagcctcccaagtagctgggattacaggcacccaccacccactatgcccggctaatttttgtatttttagtagagatggggtttcgccatgttggccaggctggtctcaaactcctgacctcaggtgatccgcctgcctcggcctcccaaagttctcggattacaggtgtgagccaccgtgcccggactatgaggggaaacaagacaaggacagttcctgtaaacctgtctttgggcatagagctagcaagtaaaggagccgcagtttgaagcctggtacgtgcctccaagtccctgtcctctccatcctgtggctgtagcctagagccgggcagtaaggataagccagtccctcacatctaatggccctggggatcttgctgtgatgcagagtctgcatcctggtgatgggaggctgctggccctggaaccacatgggatcacacttggagtaacaaggtgatggaagaactcgaatggaggctggagagtaggaatttggttttcgtcagattaaagcaacaattcttcatt

SEQ ID NO: 7102 - protein, 102 aa, Homo sapiens
MLTVALAQATAIAAPAGSTKEVKIKATRFQSFALVTRLEYNGTISAHCNLHLLGSSDSPASASQVAGITGTHHPLCPANFCIFSRDGVSPCWPGWSQTPDLR

SEQ ID NO: 7103 - DNA, 252 bp, Homo sapiens
gtgcgtgtgtgggggagagggagagaaggttctgggaggtggcgaaggggctagcgtcaggggctggcggccgtgatgcgctttgggtggaaagccgcgtgaagggagcacggcgcagccagctcctgtaagtgactggaaccaggaacagaggacagtgagtcgctctcgtccctccagctttttatttcatctggaatttctggcttgaattagggaaagatttatcttttctccactcatataaaatgt

SEQ ID NO: 7104 - protein, 44 aa, Homo sapiens [sequence omitted]

SEQ ID NO: 7105 - DNA, 364 bp, Homo sapiens
attcaggctgaatgcatggtaatgaacaaggacatggcaattccacagacaatagtttgggaaaccttcactgctaggctgagaattctgacgtctgcctctaggccagcaagggcatgccgtggcagaagcaggtcagcagtggggcatggagtaggaagaaagccggaactgcaagcatgctcaggagcactactgaggtcctctgagcagaaaggcaccagctgacttgagacaaggacagtgggtgggaggaaaggaggtgggagtaaagccaccatgtggacagatcctgggttcctgagtttccatttaatggagcactgccaagaagaaaaacccaaataaagacactgcaaatcag

SEQ ID NO: 7106 - protein, 70 aa, Homo sapiens [sequence omitted]

SEQ ID NO: 7107 - DNA, 9130 bp, Homo sapiens
ggagccctggccaccgcagggagctcagaggccaatctacgcaaaaggcatgcaaaacaatggattctggtcccaaaatatttctaagtaaggcatgatgtagccttttgattttttttttatcctttgacaccccagccttcagaaaaggtttttcatctctctccaaagaagtcatttcatagtgactgacaggacattctccagagagcgacaaagcagagtggccagcaggcagtggtgttaagccttgggccttcccagcagatgtgtgctgcattggtgggtgggaggcagtgtgacagcctggagaaaacacacaggtagcaagggagtcaggggggaggtacaagagggctgtggacacctggctcttgctcatcttcttggtgctgatcagctggtggtcaccatccctaagtacctcccagggagctgccattttctcctctgggagcagctgcctgaagcaaggagagaatgacctgaagggaagtacctccggccaagagtgcagggctgctgtgcctagcctgagcgggccatctctagcagatatggacttctctccaccacactagctgaaaagttttctcccttggttggcaaaagccagtgtcaggaaaaaagctgtgggtttctgaccaagaatgtgtgcgcttagctgcaaagtgcctgtcagcagctccaggcaccaacaaggtgcccttttattagacaattcctgcccgaacataaccatattgcagatgaaaattttcaatagagaatgacacaattcttgacctttctaaaaacttttcaaagagatagtcacatgtgtatatgttgcaaaagatttttgaaactgaaatgtcctccattaaatctcaagagcactcgagttttaagtctgctgtttctggtgtcacactaagacacacttttgaaagcagccctgggttctgaattagttggcactgggactgttcctgttcctcatacctgtggggattcctccatattggaactgtttcatgtatcttttttgcattgtaactagccaaacctgaagtcagtaaataaaatgagattagcactttttttaggtaccagttgtatcactgagtaatgcacaccaatagagcaagaaagtataaaatgtatttaagaccaactggtttgcttattatgactgactttgaaaaagcccatatccaatgatatacatgctttaaaaggtatatctatcgtaggaccaggaaccaaaatgggaattttacttctggtcctgttttgtaaatagttcctttttttgaagacaatctcatgttttataacttttgttgtgggtctgagaatcacaatggtaatatgtcttggcaaaacataacctttaaatacaaaaacaattataacttaattttccaaataaaacaagaaatacactgattaggcttctacagttctaagagacatgacactttggtaataagcgtcagtactctacttctcaagttaactggaaatattttacaagatgcagtgttttgtaatcacaaagaacgcagacattttgtgagaaatgaccttggttttatacattgtagcttattttttaaaatatagtattttaccaggcaggaagtattaatattataagtaattcttgctcaccaaacaaagggctatgtctcttttaagcaaatgttttgatgcatatctttttaattaaccctctgcagcaagggtagaaatacagatcagatggaatgggtattataggagaatcaagatagcaacagctactccttttaccattactagtgtgttttcaaagtatggaaaaagatgcctgaagagtcattttatatattttaaatctaaaaagtgttaacaggtatgcttataggccatgggagaaatattcttataaattttttagtgtaaaatgataaattctgtgtcacaaagacaagtttaccacttgacctaccagaatcacagatacttgcatttaactagcaagtatcatttggtggaaatttctaaaatcatagtagacaggcccaaagatagaattcttaggtgatcagtagtgtttaaaataattttgtcctcagcactaactatataactgtaatttctacataagaacaagtgcttccaaaatatagtggagggaaaaaataaaaaaggaaaataaaaaaacaaaacaaaaagaacaagtgcttgatttttcactgtgaagaactagcaggcacatgaggttgtgatcagaaagtgactgagttcccaagaaccaggaaacagaggggagttgtgaagagtttattaaaactgtacaaataattcagagctttgccaaaaccatttcataatgctgtacagttttttcaagcccactcactgttaaaacaagaaagcaccttttctttctaagattttagtaatccaaaagctagcctaattagccaagtatgcagataacatcaaaagcaaagctgagatagaacagccatacacccgttgggcagctcttatgaggtggtcagaaggtcactcagaccttggtttcaaataggctttagaatctgcacacttgaggactagaaatgcacagagttagggaaagccatgtacaggcttggctcctagtctttgagatgaggcgtcttgcaaatctctgttttcactccttggaatgtctccattgttagcattaaagtccccaagaagtttttattgctgtacggttttgaacccaatgagtctcatttccaaaagattcctaattctatataggagaggttgcaaatgtcagtgcctcagaaggaccaggcaagttctgtaaatgattgatgtggataaggcaaagaggaacacaagaatggtggagaccaggttgaactgcagaacacatgccctctttgaaggggtgcccacactcagctctagacaatcagaaccatgcagaaatcaggcccagggctgctagatcttctgacgtggaagtatgatattacctgacacgtaagtgttgacaactaactcaaactcttggccaacactgtgcagaccaaagagaagctgtacacagacaggtgcagcctgcagcccccagtttcaactattgggaaaagtggatttcacattccacagttgtcaggtcaggttcatccatcagccccacaaactcacatgtcggcactatctgggcaactaaaataaaagaggggaaagagatcatttctccccagatatcattctcatggcagacttgaatatagatacgctgagttatccagctctctcactctgcctccttttggcatgcccaggctgtgccccgtaaagtgttgaatcactgttatcctaattttcttagtgttttctaccgtggccactgtgatgaggggctggcaaagagcagcctcgtgccttccgagaaggctgccaggagcctctgaagcttgaagcgagcacacattgcctccttgtgccaaagcccttggccagcctccccacactccttccctctccatccggcctcatgagtcttcgttaccaagtaaaattaccactgcttcacctctgatacagcagaagccttgcttcagaactggtaggcatttaggctatttcagagtgtccactaacctcaaaaggaggtttttccacatacaaaaccctagcatctttgaggggaaagcaaaatgagaataaattatgtcatgaaaaaaattagaagttgcttccttcatttagatggactaagttattttaaactctatcttacatcagagtcctgatggtgttgggatagtcactgaccctttcacgtatgtaataagatacgtctcgttcacacactatttcatttgatctttgtaagaacccagtgtagaataggaatatttaaaatcaacattacccacctccaaggccaacccagagtagtcttgaacctgagtcagcctcagtattgcttgcaaggaagagggaaggggctcattaaaggcctggctcaaaccttagtcttccagactgactagggacgtaagaagacccagggacccaccatgttctcaaaccatctattcagtccaggcctttcagcatagacataaagagcccacccgttactcagtcatgttgccaagtgcaaactgatttatccccagatgaatccctttactgtagcagatccctaatccctaaatttcagccaatttggtagttaattataggagtttattagctaaatgtatgttctgagtaaaagttttgactctttggggaaaatttattttgctgctagcatacaacatttgctatgtatataaacttaagtcaatgccagaaattttaaaaccagctcaaatttataatctgtaatgatcaaatcaaaacatactgtaaactcagagttggaaacgcctggtaatatggttaagtcatgtttaaatatgaatgcaatttaaatgacattggcaatgcctgagatttctttcattgtgaatgattaaaaggcagtccaatatatgaatggatttcatcttacctttctcccgttaatttactaggtgtaacatcttgagtgtaaagtcattcacaggcagttgggttgtggagctagaaggagcctcaaaaaaaaactttttggccagactcctacatcatgaacagggtttttgatgaataatatttattattatgtttctaaagtaatacagtgttggagaatgaaacagtttagtcctttcctcttctgatggaaaagaatcatagcgccgttgccatgacaataacaggatgtagaaagacccatgaagaaagaaagaagaaagctatggttccgaaagcaggtaaccacagattttgaaaggaggcagagatggtgattaaactgtagtccttgttttttaaaatgttctttcatgttaggcaccaccacatagttaataactaccaacttctaaagagaagatccccttgatttatttatatcatgaaaatactaaaaatcaattctcaagtctaattaactattacattatcttgctaggtccttttccctaaatttttaattcagaaaattaaccagaattggccagatgcagtggttcacgcctataatcccagcactttgggagtccaaggcagatggatcacttgaggtcagtagttcaagaccagcctggccaacagaggaagaaagagtgaaaacaaaagaagaaagagggaaaccctgtctttactaaaaatacaaaaattagtcgggcgtggtggcgcacacctgtaattccagctacttgagaggctgaggcaggagaatcccttgaaactgcaggcagaggttgcagtgagccaagatttcactgctgcacctggggtgagactaccattaaggaaggaaatttcctttaaacagaaaaaaacaaaggtgctcatctatttcttctgaattctctctacatccttgacttaagaggaaaaccagcactcaagaaacagctttaaaagagaacagtccccattctagctaccagtcttgctttcccccatcttggcaagccccagtgaatttgccattgaaagattaccctcccctttgccctcatctgcctgagctagaggccaggctgttgttaatgttttttcagttccaaagcccctgatgggacattcttgtttctgtgctactgctttctctctcttaaattaaggtgcaaggggataaatattactataactgggatgtaaggctcagtcagtgtggctattccctcccttcgggggaaatattccatctgtctgaacggttttaggtgatcatgaggagagcggcttagtcacacagccagccacgctcatcacaaaagatttgttcagactcactgtaaagaatgacaaggcagatagctaatcctttcactgtgcctcaaagcccgccgtgcaagtcaccaaccctaccggtcctctccacgtgcgaggctaatagagtgatcagaaccaggaatgtgagctgggttccaccttaggaggggacaatgaggacagagcaagagggctccatgtttaattactccaggctctgacttctgcccacaattacagagcatgaaagcagaattggcctttagtaagtgaaaaggaagtggctcctgcagcatataattgttataatttcgtatttatggaaagagaaaaggacttcagtccactcatgttgttaagcacttgtccctcactccactggagcccccttcctatgttttgggcacagatggctgggaccgagaggaaagaggaagagcggctgccagagtgtgaatatacccctcagggatatacagcggagtttcatgataaactacccatactttcccaaaaaaggttgaggagcaatacataactttgcagattacaaacccttgttttactttttaaaccttttttccatactctgcttattggaaatcgatggctgtgatgtgaccaacacctgtgatgatagcaaagcccctcctttcacagtctcctgactgttcggggaacctccttggtcattggtagaaagctttagaaaagacttagctttttagggaagaactaaaaaatctccaaaacatactagtcccatgacttcgataactgaaaatgtcctgggtgtaaactaacccaggaatgtggatcatacatgttttttttaaaaaaaatccctgaatcaatattttcctacaacacaccctaaaattcctatttttgtaattaatggttggacagtgatcagccatttaaacataggctttctggaataaccagacactagaatagtttccaaagtgttttgcgtatcaaaatcctatatacttagaagaagaactcaggataagaaaaaatcgctaggtcccaaagggttcatgactatcatcagatgcaactgcgagtggcctacggtcattttttcaaatgagaagactggagagagagaacaacagtaatcacaaaacctctgttgcccttagtccatgacaatgtttaaggaaactttaaaaaattaagccatcttctgaattgttttctacaccaaatctaaaatattaaaatgaaattattaaatatttaaaatggggtatttagtggaaatgcaatcagtagaaaacattgctttttagtgcctgctaaacaagtaaaggagaaagaatgaagagaaaacagcagtccttcctgtgtgacactcgtgtggaaatgacaggcattcacatgtcattgagtgctaactcaaaagctaggtggcaatgctgtccaatgtttagagatcttttgaaatataattttaccaccattcagaggtaagtacttgcttaacagaagtctttaatgttagtgaatgaatgtataaaattataaactatgcattttcaaagagtagcatgtattttgtatcgaatccaagtaaatttttttcatagctacctaccacaactgcaaattattcaaaataaacttggatacatatccttatggggatatgggaagcccatctatattctcctacttgatgtttttaaagattgaaactttattctgaaacatcaggctctaaaaaattccatcattaagatgaataaatgggaaatggtttatttgttacttcgtaagcataaatgggaaatgttggctgttagaaaatgtgcccagttctttaaaggtggatgttctagtaacactggattaacaagcaaacaaaactgcatgaagtgaacgaatatttcattggataaagttagcataggttttatctgctgggtttaattctcaatcccagaaaaaaatattcttcaaggggtatcagttatagtttcaaagaacaaaatatgaaaatattgtccagcaaagcaaatcattgatcttttttcaaaattacttatattttggaaagtctatatagaatatccacaaatttcttcagccctcttgttgatttcatattttcatgaaactttttcccctaataatttgtcttcgctctttaatcagtgctttactacattactcagcctgaaaaaatatcttttccttcatctgacaatgtggaaataaagaactccatttctgtcattctggttctcttcagtgtccattgagaaagtttctcaactgtttgtaaaatacggggggaaaaaaacacgcatttctaaacctggtacttaaggttatactggattgtttgctacctaattagaagttattggggaaggggcattgtgtctttttatatgatttttagccaaatccagatgttctgatacacatttctgaatacctgtctgactgtaaatacagcctgtggaggttcaggttgataaacctttcacctgactgctccacagccatgctccttgccagcttctggcacattgtacatagatttgttgaatgtttaaatgatgttgtttttctaaatgctgttctctaaaacaattttttgaatttcttttgctttccattgttttggactttgtgtgttcgttttttaaaaaaaaaaatgtttcctaaatatttaacaccaggaaaaatatttttaaatacactggtgctaattgaaacagaaggaaattttcagatcgaagatgtacaatgttaaatgttcataccagttaaactgcactttcccaaggggacagctggcatctacttgaaatgggcatcaagagaccaccaaatgtttacagtttctgtggcccgtttaagtgtaaaatgcagaagtggctctgtccccccagagttaaggatttgctacactggtcctctggaagcatttaagtagaagaaaaggcttatagtcagaatcactttagtaatcgtcttctggtccttggacttttctgttctgtaatgcttgtaacaatgaatatggtgttgccaatctagtctgatatcattgttgacctgtacttactttgtggatggttctacctggggttgcactggcacaaacagagccagaacactggactttcaaaagaccattttgacttctacagtgtccacacacatgaatttaaatgcacttgtaactggttaattaccatgaagtaagtctaacttccacttaataaaagtttttgtgtatctgcttcta

SEQ ID NO: 7108 - protein, 72 aa, Homo sapiens [sequence omitted]

SEQ ID NO: 7109 - DNA, 8719 bp, Homo sapiens
aacacgtcctttctcctcctggtgtcctgtcaccccccatgcagcaccactgatgcgagatgatgctctggcctggtccaggaagccctgagccatgggcagattgcccagtggccttgggcggccagagcttgtcacctgtttaaacaagttcaccatgtgtttaaatgacagggtacagtcctggaccagaggtttttctcttcagcaaagctccctggcccttgatcgttggactgttactaatagaaaaagattcaagtcatgaagtataaaatccatcccccatcccagaactttgaaacacaaggagggagagatctttgctatggagcagtcctggagcaaagccccgtggcttccacccccagatatataccccataagtagtgctgagctccagcttagctgagccaagctcagtccttatctggtgttcagccagtgcacaggtataagcagaactacagagctgaatgtagcttccctgggatctcttctcctttctaaagcatttttcacacagttctgtacctcctacccaacggcacggactgttcctgttcctcatacctgtggggattcctccatattggaactgtttcatgtatcttttttgcattgtaactagccaaacctgaagtcagtaaataaaatgagattagcactttttttaggtaccagttgtatcactgagtaatgcacaccaatagagcaagaaagtataaaatgtatttaagaccaactggtttgcttattatgactgactttgaaaaagcccatatccaatgatatacatgctttaaaaggtatatctatcgtaggaccaggaaccaaaatgggaattttacttctggtcctgttttgtaaatagttcctttttttgaagacaatctcatgttttataacttttgttgtgggtctgagaatcacaatggtaatatgtcttggcaaaacataacctttaaatacaaaaacaattataacttaattttccaaataaaacaagaaatacactgattaggcttctacagttctaagagacatgacactttggtaataagcgtcagtactctacttctcaagttaactggaaatattttacaagatgcagtgttttgtaatcacaaagaacgcagacattttgtgagaaatgaccttggttttatacattgtagcttattttttaaaatatagtattttaccaggcaggaagtattaatattataagtaattcttgctcaccaaacaaagggctatgtctcttttaagcaaatgttttgatgcatatctttttaattaaccctctgcagcaagggtagaaatacagatcagatggaatgggtattataggagaatcaagatagcaacagctactccttttaccattactagtgtgttttcaaagtatggaaaaagatgcctgaagagtcattttatatattttaaatctaaaaagtgttaacaggtatgcttataggccatgggagaaatattcttataaattttttagtgtaaaatgataaattctgtgtcacaaagacaagtttaccacttgacctaccagaatcacagatacttgcatttaactagcaagtatcatttggtggaaatttctaaaatcatagtagacaggcccaaagatagaattcttaggtgatcagtagtgtttaaaataattttgtcctcagcactaactatataactgtaatttctacataagaacaagtgcttccaaaatatagtggagggaaaaaataaaaaaggaaaataaaaaaacaaaacaaaaagaacaagtgcttgatttttcactgtgaagaactagcaggcacatgaggttgtgatcagaaagtgactgagttcccaagaaccaggaaacagaggggagttgtgaagagtttattaaaactgtacaaataattcagagctttgccaaaaccatttcataatgctgtacagttttttcaagcccactcactgttaaaacaagaaagcaccttttctttctaagattttagtaatccaaaagctagcctaattagccaagtatgcagataacatcaaaagcaaagctgagatagaacagccatacacccgttgggcagctcttatgaggtggtcagaaggtcactcagaccttggtttcaaataggctttagaatctgcacacttgaggactagaaatgcacagagttagggaaagccatgtacaggcttggctcctagtctttgagatgaggcgtcttgcaaatctctgttttcactccttggaatgtctccattgttagcattaaagtccccaagaagtttttattgctgtacggttttgaacccaatgagtctcatttccaaaagattcctaattctatataggagaggttgcaaatgtcagtgcctcagaaggaccaggcaagttctgtaaatgattgatgtggataaggcaaagaggaacacaagaatggtggagaccaggttgaactgcagaacacatgccctctttgaaggggtgcccacactcagctctagacaatcagaaccatgcagaaatcaggcccagggctgctagatcttctgacgtggaagtatgatattacctgacacgtaagtgttgacaactaactcaaactcttggccaacactgtgcagaccaaagagaagctgtacacagacaggtgcagcctgcagcccccagtttcaactattgggaaaagtggatttcacattccacagttgtcaggtcaggttcatccatcagccccacaaactcacatgtcggcactatctgggcaactaaaataaaagaggggaaagagatcatttctccccagatatcattctcatggcagacttgaatatagatacgctgagttatccagctctctcactctgcctccttttggcatgcccaggctgtgccccgtaaagtgttgaatcactgttatcctaattttcttagtgttttctaccgtggccactgtgatgaggggctggcaaagagcagcctcgtgccttccgagaaggctgccaggagcctctgaagcttgaagcgagcacacattgcctccttgtgccaaagcccttggccagcctccccacactccttccctctccatccggcctcatgagtcttcgttaccaagtaaaattaccactgcttcacctctgatacagcagaagccttgcttcagaactggtaggcatttaggctatttcagagtgtccactaacctcaaaaggaggtttttccacatacaaaaccctagcatctttgaggggaaagcaaaatgagaataaattatgtcatgaaaaaaattagaagttgcttccttcatttagatggactaagttattttaaactctatcttacatcagagtcctgatggtgttgggatagtcactgaccctttcacgtatgtaataagatacgtctcgttcacacactatttcatttgatctttgtaagaacccagtgtagaataggaatatttaaaatcaacattacccacctccaaggccaacccagagtagtcttgaacctgagtcagcctcagtattgcttgcaaggaagagggaaggggctcattaaaggcctggctcaaaccttagtcttccagactgactagggacgtaagaagacccagggacccaccatgttctcaaaccatctattcagtccaggcctttcagcatagacataaagagcccacccgttactcagtcatgttgccaagtgcaaactgatttatccccagatgaatccctttactgtagcagatccctaatccctaaatttcagccaatttggtagttaattataggagtttattagctaaatgtatgttctgagtaaaagttttgactctttggggaaaatttattttgctgctagcatacaacatttgctatgtatataaacttaagtcaatgccagaaattttaaaaccagctcaaatttataatctgtaatgatcaaatcaaaacatactgtaaactcagagttggaaacgcctggtaatatggttaagtcatgtttaaatatgaatgcaatttaaatgacattggcaatgcctgagatttctttcattgtgaatgattaaaaggcagtccaatatatgaatggatttcatcttacctttctcccgttaatttactaggtgtaacatcttgagtgtaaagtcattcacaggcagttgggttgtggagctagaaggagcctcaaaaaaaaactttttggccagactcctacatcatgaacagggtttttgatgaataatatttattattatgtttctaaagtaatacagtgttggagaatgaaacagtttagtcctttcctcttctgatggaaaagaatcatagcgccgttgccatgacaataacaggatgtagaaagacccatgaagaaagaaagaagaaagctatggttccgaaagcaggtaaccacagattttgaaaggaggcagagatggtgattaaactgtagtccttgttttttaaaatgttctttcatgttaggcaccaccacatagttaataactaccaacttctaaagagaagatccccttgatttatttatatcatgaaaatactaaaaatcaattctcaagtctaattaactattacattatcttgctaggtccttttccctaaatttttaattcagaaaattaaccagaattggccagatgcagtggttcacgcctataatcccagcactttgggagtccaaggcagatggatcacttgaggtcagtagttcaagaccagcctggccaacagaggaagaaagagtgaaaacaaaagaagaaagagggaaaccctgtctttactaaaaatacaaaaattagtcgggcgtggtggcgcacacctgtaattccagctacttgagaggctgaggcaggagaatcccttgaaactgcaggcagaggttgcagtgagccaagatttcactgctgcacctggggtgagactaccattaaggaaggaaatttcctttaaacagaaaaaaacaaaggtgctcatctatttcttctgaattctctctacatccttgacttaagaggaaaaccagcactcaagaaacagctttaaaagagaacagtccccattctagctaccagtcttgctttcccccatcttggcaagccccagtgaatttgccattgaaagattaccctcccctttgccctcatctgcctgagctagaggccaggctgttgttaatgttttttcagttccaaagcccctgatgggacattcttgtttctgtgctactgctttctctctcttaaattaaggtgcaaggggataaatattactataactgggatgtaaggctcagtcagtgtggctattccctcccttcgggggaaatattccatctgtctgaacggttttaggtgatcatgaggagagcggcttagtcacacagccagccacgctcatcacaaaagatttgttcagactcactgtaaagaatgacaaggcagatagctaatcctttcactgtgcctcaaagcccgccgtgcaagtcaccaaccctaccggtcctctccacgtgcgaggctaatagagtgatcagaaccaggaatgtgagctgggttccaccttaggaggggacaatgaggacagagcaagagggctccatgtttaattactccaggctctgacttctgcccacaattacagagcatgaaagcagaattggcctttagtaagtgaaaaggaagtggctcctgcagcatataattgttataatttcgtatttatggaaagagaaaaggacttcagtccactcatgttgttaagcacttgtccctcactccactggagcccccttcctatgttttgggcacagatggctgggaccgagaggaaagaggaagagcggctgccagagtgtgaatatacccctcagggatatacagcggagtttcatgataaactacccatactttcccaaaaaaggttgaggagcaatacataactttgcagattacaaacccttgttttactttttaaaccttttttccatactctgcttattggaaatcgatggctgtgatgtgaccaacacctgtgatgatagcaaagcccctcctttcacagtctcctgactgttcggggaacctccttggtcattggtagaaagctttagaaaagacttagctttttagggaagaactaaaaaatctccaaaacatactagtcccatgacttcgataactgaaaatgtcctgggtgtaaactaacccaggaatgtggatcatacatgttttttttaaaaaaaatccctgaatcaatattttcctacaacacaccctaaaattcctatttttgtaattaatggttggacagtgatcagccatttaaacataggctttctggaataaccagacactagaatagtttccaaagtgttttgcgtatcaaaatcctatatacttagaagaagaactcaggataagaaaaaatcgctaggtcccaaagggttcatgactatcatcagatgcaactgcgagtggcctacggtcattttttcaaatgagaagactggagagagagaacaacagtaatcacaaaacctctgttgcccttagtccatgacaatgtttaaggaaactttaaaaaattaagccatcttctgaattgttttctacaccaaatctaaaatattaaaatgaaattattaaatatttaaaatggggtatttagtggaaatgcaatcagtagaaaacattgctttttagtgcctgctaaacaagtaaaggagaaagaatgaagagaaaacagcagtccttcctgtgtgacactcgtgtggaaatgacaggcattcacatgtcattgagtgctaactcaaaagctaggtggcaatgctgtccaatgtttagagatcttttgaaatataattttaccaccattcagaggtaagtacttgcttaacagaagtctttaatgttagtgaatgaatgtataaaattataaactatgcattttcaaagagtagcatgtattttgtatcgaatccaagtaaatttttttcatagctacctaccacaactgcaaattattcaaaataaacttggatacatatccttatggggatatgggaagcccatctatattctcctacttgatgtttttaaagattgaaactttattctgaaacatcaggctctaaaaaattccatcattaagatgaataaatgggaaatggtttatttgttacttcgtaagcataaatgggaaatgttggctgttagaaaatgtgcccagttctttaaaggtggatgttctagtaacactggattaacaagcaaacaaaactgcatgaagtgaacgaatatttcattggataaagttagcataggttttatctgctgggtttaattctcaatcccagaaaaaaatattcttcaaggggtatcagttatagtttcaaagaacaaaatatgaaaatattgtccagcaaagcaaatcattgatcttttttcaaaattacttatattttggaaagtctatatagaatatccacaaatttcttcagccctcttgttgatttcatattttcatgaaactttttcccctaataatttgtcttcgctctttaatcagtgctttactacattactcagcctgaaaaaatatcttttccttcatctgacaatgtggaaataaagaactccatttctgtcattctggttctcttcagtgtccattgagaaagtttctcaactgtttgtaaaatacggggggaaaaaaacacgcatttctaaacctggtacttaaggttatactggattgtttgctacctaattagaagttattggggaaggggcattgtgtctttttatatgatttttagccaaatccagatgttctgatacacatttctgaatacctgtctgactgtaaatacagcctgtggaggttcaggttgataaacctttcacctgactgctccacagccatgctccttgccagcttctggcacattgtacatagatttgttgaatgtttaaatgatgttgtttttctaaatgctgttctctaaaacaattttttgaatttcttttgctttccattgttttggactttgtgtgttcgttttttaaaaaaaaaaatgtttcctaaatatttaacaccaggaaaaatatttttaaatacactggtgctaattgaaacagaaggaaattttcagatcgaagatgtacaatgttaaatgttcataccagttaaactgcactttcccaaggggacagctggcatctacttgaaatgggcatcaagagaccaccaaatgtttacagtttctgtggcccgtttaagtgtaaaatgcagaagtggctctgtccccccagagttaaggatttgctacactggtcctctggaagcatttaagtagaagaaaaggcttatagtcagaatcactttagtaatcgtcttctggtccttggacttttctgttctgtaatgcttgtaacaatgaatatggtgttgccaatctagtctgatatcattgttgacctgtacttactttgtggatggttctacctggggttgcactggcacaaacagagccagaacactggactttcaaaagaccattttgacttctacagtgtccacacacatgaatttaaatgcacttgtaactggttaattaccatgaagtaagtctaacttccacttaataaaagtttttgtgtatctgcttcta

SEQ ID NO: 7110 - protein, 72 aa, Homo sapiens [sequence omitted]

SEQ ID NO: 7111 - DNA, 8455 bp, Homo sapiens
caagaattggcacctgtagccatctggcatgttagcgaacaaacttccatggacttttgtggacaaggtgctgctttttctcatgaccctgtagaattgctatcgaccacatcttctgtagcactgacctgtgtgaactcagggaagaatttgtgcatacaaatgagtggaaacagagcaggattcatgaatatgaatgagaatgtgaatcattttggagaatgccctgggcacacgggtcaactggaaatttcatttctctaagaaagtagccctaccagcggcacggactgttcctgttcctcatacctgtggggattcctccatattggaactgtttcatgtatcttttttgcattgtaactagccaaacctgaagtcagtaaataaaatgagattagcactttttttaggtaccagttgtatcactgagtaatgcacaccaatagagcaagaaagtataaaatgtatttaagaccaactggtttgcttattatgactgactttgaaaaagcccatatccaatgatatacatgctttaaaaggtatatctatcgtaggaccaggaaccaaaatgggaattttacttctggtcctgttttgtaaatagttcctttttttgaagacaatctcatgttttataacttttgttgtgggtctgagaatcacaatggtaatatgtcttggcaaaacataacctttaaatacaaaaacaattataacttaattttccaaataaaacaagaaatacactgattaggcttctacagttctaagagacatgacactttggtaataagcgtcagtactctacttctcaagttaactggaaatattttacaagatgcagtgttttgtaatcacaaagaacgcagacattttgtgagaaatgaccttggttttatacattgtagcttattttttaaaatatagtattttaccaggcaggaagtattaatattataagtaattcttgctcaccaaacaaagggctatgtctcttttaagcaaatgttttgatgcatatctttttaattaaccctctgcagcaagggtagaaatacagatcagatggaatgggtattataggagaatcaagatagcaacagctactccttttaccattactagtgtgttttcaaagtatggaaaaagatgcctgaagagtcattttatatattttaaatctaaaaagtgttaacaggtatgcttataggccatgggagaaatattcttataaattttttagtgtaaaatgataaattctgtgtcacaaagacaagtttaccacttgacctaccagaatcacagatacttgcatttaactagcaagtatcatttggtggaaatttctaaaatcatagtagacaggcccaaagatagaattcttaggtgatcagtagtgtttaaaataattttgtcctcagcactaactatataactgtaatttctacataagaacaagtgcttccaaaatatagtggagggaaaaaataaaaaaggaaaataaaaaaacaaaacaaaaagaacaagtgcttgatttttcactgtgaagaactagcaggcacatgaggttgtgatcagaaagtgactgagttcccaagaaccaggaaacagaggggagttgtgaagagtttattaaaactgtacaaataattcagagctttgccaaaaccatttcataatgctgtacagttttttcaagcccactcactgttaaaacaagaaagcaccttttctttctaagattttagtaatccaaaagctagcctaattagccaagtatgcagataacatcaaaagcaaagctgagatagaacagccatacacccgttgggcagctcttatgaggtggtcagaaggtcactcagaccttggtttcaaataggctttagaatctgcacacttgaggactagaaatgcacagagttagggaaagccatgtacaggcttggctcctagtctttgagatgaggcgtcttgcaaatctctgttttcactccttggaatgtctccattgttagcattaaagtccccaagaagtttttattgctgtacggttttgaacccaatgagtctcatttccaaaagattcctaattctatataggagaggttgcaaatgtcagtgcctcagaaggaccaggcaagttctgtaaatgattgatgtggataaggcaaagaggaacacaagaatggtggagaccaggttgaactgcagaacacatgccctctttgaaggggtgcccacactcagctctagacaatcagaaccatgcagaaatcaggcccagggctgctagatcttctgacgtggaagtatgatattacctgacacgtaagtgttgacaactaactcaaactcttggccaacactgtgcagaccaaagagaagctgtacacagacaggtgcagcctgcagcccccagtttcaactattgggaaaagtggatttcacattccacagttgtcaggtcaggttcatccatcagccccacaaactcacatgtcggcactatctgggcaactaaaataaaagaggggaaagagatcatttctccccagatatcattctcatggcagacttgaatatagatacgctgagttatccagctctctcactctgcctccttttggcatgcccaggctgtgccccgtaaagtgttgaatcactgttatcctaattttcttagtgttttctaccgtggccactgtgatgaggggctggcaaagagcagcctcgtgccttccgagaaggctgccaggagcctctgaagcttgaagcgagcacacattgcctccttgtgccaaagcccttggccagcctccccacactccttccctctccatccggcctcatgagtcttcgttaccaagtaaaattaccactgcttcacctctgatacagcagaagccttgcttcagaactggtaggcatttaggctatttcagagtgtccactaacctcaaaaggaggtttttccacatacaaaaccctagcatctttgaggggaaagcaaaatgagaataaattatgtcatgaaaaaaattagaagttgcttccttcatttagatggactaagttattttaaactctatcttacatcagagtcctgatggtgttgggatagtcactgaccctttcacgtatgtaataagatacgtctcgttcacacactatttcatttgatctttgtaagaacccagtgtagaataggaatatttaaaatcaacattacccacctccaaggccaacccagagtagtcttgaacctgagtcagcctcagtattgcttgcaaggaagagggaaggggctcattaaaggcctggctcaaaccttagtcttccagactgactagggacgtaagaagacccagggacccaccatgttctcaaaccatctattcagtccaggcctttcagcatagacataaagagcccacccgttactcagtcatgttgccaagtgcaaactgatttatccccagatgaatccctttactgtagcagatccctaatccctaaatttcagccaatttggtagttaattataggagtttattagctaaatgtatgttctgagtaaaagttttgactctttggggaaaatttattttgctgctagcatacaacatttgctatgtatataaacttaagtcaatgccagaaattttaaaaccagctcaaatttataatctgtaatgatcaaatcaaaacatactgtaaactcagagttggaaacgcctggtaatatggttaagtcatgtttaaatatgaatgcaatttaaatgacattggcaatgcctgagatttctttcattgtgaatgattaaaaggcagtccaatatatgaatggatttcatcttacctttctcccgttaatttactaggtgtaacatcttgagtgtaaagtcattcacaggcagttgggttgtggagctagaaggagcctcaaaaaaaaactttttggccagactcctacatcatgaacagggtttttgatgaataatatttattattatgtttctaaagtaatacagtgttggagaatgaaacagtttagtcctttcctcttctgatggaaaagaatcatagcgccgttgccatgacaataacaggatgtagaaagacccatgaagaaagaaagaagaaagctatggttccgaaagcaggtaaccacagattttgaaaggaggcagagatggtgattaaactgtagtccttgttttttaaaatgttctttcatgttaggcaccaccacatagttaataactaccaacttctaaagagaagatccccttgatttatttatatcatgaaaatactaaaaatcaattctcaagtctaattaactattacattatcttgctaggtccttttccctaaatttttaattcagaaaattaaccagaattggccagatgcagtggttcacgcctataatcccagcactttgggagtccaaggcagatggatcacttgaggtcagtagttcaagaccagcctggccaacagaggaagaaagagtgaaaacaaaagaagaaagagggaaaccctgtctttactaaaaatacaaaaattagtcgggcgtggtggcgcacacctgtaattccagctacttgagaggctgaggcaggagaatcccttgaaactgcaggcagaggttgcagtgagccaagatttcactgctgcacctggggtgagactaccattaaggaaggaaatttcctttaaacagaaaaaaacaaaggtgctcatctatttcttctgaattctctctacatccttgacttaagaggaaaaccagcactcaagaaacagctttaaaagagaacagtccccattctagctaccagtcttgctttcccccatcttggcaagccccagtgaatttgccattgaaagattaccctcccctttgccctcatctgcctgagctagaggccaggctgttgttaatgttttttcagttccaaagcccctgatgggacattcttgtttctgtgctactgctttctctctcttaaattaaggtgcaaggggataaatattactataactgggatgtaaggctcagtcagtgtggctattccctcccttcgggggaaatattccatctgtctgaacggttttaggtgatcatgaggagagcggcttagtcacacagccagccacgctcatcacaaaagatttgttcagactcactgtaaagaatgacaaggcagatagctaatcctttcactgtgcctcaaagcccgccgtgcaagtcaccaaccctaccggtcctctccacgtgcgaggctaatagagtgatcagaaccaggaatgtgagctgggttccaccttaggaggggacaatgaggacagagcaagagggctccatgtttaattactccaggctctgacttctgcccacaattacagagcatgaaagcagaattggcctttagtaagtgaaaaggaagtggctcctgcagcatataattgttataatttcgtatttatggaaagagaaaaggacttcagtccactcatgttgttaagcacttgtccctcactccactggagcccccttcctatgttttgggcacagatggctgggaccgagaggaaagaggaagagcggctgccagagtgtgaatatacccctcagggatatacagcggagtttcatgataaactacccatactttcccaaaaaaggttgaggagcaatacataactttgcagattacaaacccttgttttactttttaaaccttttttccatactctgcttattggaaatcgatggctgtgatgtgaccaacacctgtgatgatagcaaagcccctcctttcacagtctcctgactgttcggggaacctccttggtcattggtagaaagctttagaaaagacttagctttttagggaagaactaaaaaatctccaaaacatactagtcccatgacttcgataactgaaaatgtcctgggtgtaaactaacccaggaatgtggatcatacatgttttttttaaaaaaaatccctgaatcaatattttcctacaacacaccctaaaattcctatttttgtaattaatggttggacagtgatcagccatttaaacataggctttctggaataaccagacactagaatagtttccaaagtgttttgcgtatcaaaatcctatatacttagaagaagaactcaggataagaaaaaatcgctaggtcccaaagggttcatgactatcatcagatgcaactgcgagtggcctacggtcattttttcaaatgagaagactggagagagagaacaacagtaatcacaaaacctctgttgcccttagtccatgacaatgtttaaggaaactttaaaaaattaagccatcttctgaattgttttctacaccaaatctaaaatattaaaatgaaattattaaatatttaaaatggggtatttagtggaaatgcaatcagtagaaaacattgctttttagtgcctgctaaacaagtaaaggagaaagaatgaagagaaaacagcagtccttcctgtgtgacactcgtgtggaaatgacaggcattcacatgtcattgagtgctaactcaaaagctaggtggcaatgctgtccaatgtttagagatcttttgaaatataattttaccaccattcagaggtaagtacttgcttaacagaagtctttaatgttagtgaatgaatgtataaaattataaactatgcattttcaaagagtagcatgtattttgtatcgaatccaagtaaatttttttcatagctacctaccacaactgcaaattattcaaaataaacttggatacatatccttatggggatatgggaagcccatctatattctcctacttgatgtttttaaagattgaaactttattctgaaacatcaggctctaaaaaattccatcattaagatgaataaatgggaaatggtttatttgttacttcgtaagcataaatgggaaatgttggctgttagaaaatgtgcccagttctttaaaggtggatgttctagtaacactggattaacaagcaaacaaaactgcatgaagtgaacgaatatttcattggataaagttagcataggttttatctgctgggtttaattctcaatcccagaaaaaaatattcttcaaggggtatcagttatagtttcaaagaacaaaatatgaaaatattgtccagcaaagcaaatcattgatcttttttcaaaattacttatattttggaaagtctatatagaatatccacaaatttcttcagccctcttgttgatttcatattttcatgaaactttttcccctaataatttgtcttcgctctttaatcagtgctttactacattactcagcctgaaaaaatatcttttccttcatctgacaatgtggaaataaagaactccatttctgtcattctggttctcttcagtgtccattgagaaagtttctcaactgtttgtaaaatacggggggaaaaaaacacgcatttctaaacctggtacttaaggttatactggattgtttgctacctaattagaagttattggggaaggggcattgtgtctttttatatgatttttagccaaatccagatgttctgatacacatttctgaatacctgtctgactgtaaatacagcctgtggaggttcaggttgataaacctttcacctgactgctccacagccatgctccttgccagcttctggcacattgtacatagatttgttgaatgtttaaatgatgttgtttttctaaatgctgttctctaaaacaattttttgaatttcttttgctttccattgttttggactttgtgtgttcgttttttaaaaaaaaaaatgtttcctaaatatttaacaccaggaaaaatatttttaaatacactggtgctaattgaaacagaaggaaattttcagatcgaagatgtacaatgttaaatgttcataccagttaaactgcactttcccaaggggacagctggcatctacttgaaatgggcatcaagagaccaccaaatgtttacagtttctgtggcccgtttaagtgtaaaatgcagaagtggctctgtccccccagagttaaggatttgctacactggtcctctggaagcatttaagtagaagaaaaggcttatagtcagaatcactttagtaatcgtcttctggtccttggacttttctgttctgtaatgcttgtaacaatgaatatggtgttgccaatctagtctgatatcattgttgacctgtacttactttgtggatggttctacctggggttgcactggcacaaacagagccagaacactggactttcaaaagaccattttgacttctacagtgtccacacacatgaatttaaatgcacttgtaactggttaattaccatgaagtaagtctaacttccacttaataaaagtttttgtgtatctgcttcta

SEQ ID NO: 7112 - protein, 72 aa, Homo sapiens [sequence omitted]

SEQ ID NO: 7113 - DNA, 4346 bp, Homo sapiens
acacaagctcaggagtagctgccatgcacatcagtgtccattaaaatgacttgtagcaaatctctacgttcaaagtctaactttgacagacaaccttacttccagcgaagtctactcccctccctccggagggaagaatgggctgcggttaagcgtttgccctggtgtcagggccaactgcttcgaagcgccagactttcggagactgtgggtggggagcattaagcgggaaatgaccttcacatttcagtcagaggacttaaaacgtgactgtggtaaaaaaatgtctcatcaacacgtgttttccttggccatggaggaagatgtgaaaacagcagacaccaaaaaagccagccggatccttgaccatgaaaaagaaaacactcgctccatctgtctccttgagcaaaaaagaaaagttgtttcctccaacattgatgttcctccagcaaggaaatcttcagaggaactagacatggacaaggtgacagcagcaatggtactaaccagcttgtcgactagccctttggttcgaagtcctcccgtgcggccgaacgagagcctcagcggatcctggaaggagggcggctgcgtgccttccagcaccagcagcagcggctactggagctggagcgcccccagcgaccagtccaacccgtccacgccgtcgccgccgctctcggctgacagcttcaagcccttccgcagccccgcgcagccagacgacggcatcgacgaggcggaggccagcaacctgctcttcgacgagcccattcccaggaaaagaaagaattccatgaaggtgatgttcaaatgcctctggaaaaactgtgggaaggtgctgagcactgcagcaggtatccagaaacacatccgaaccatccatctggggcgcgttggagactctgactacagtgatggagaagaggacttttactacactgagatcaagctcaacacagactcagtggcagacgggctgagcagcctggccccggtctcaccttcccagtccctggcttcacctcctactttccccatcccagattcaagccgaacagaaactccttgtgccaaaacggagactaagttgatgacgccgttgagccgctcagctcccaccaccctctacctcgtgcacactgaccatgcttaccaggccacaccccctgtgaccattccaggatcggccaagttcacccccaatggcagcagcttcagcatttcctggcaatctcctccggtcactttcacaggcatcccagtgtcacccacacatcatccggtgggcacaggagagcagagacagcatgcgcacacggtcctgtcctccccacccagaggcacagtcagcttaaggaagcccaggggagagggcaaaaagtgtcggaaggtgtacgggatggagaaccgagacatgtggtgtaccgcctgccgctggaagaaggcctgccagaggttcctcgactgagagacccccaggcagaggggctcagggccctgagccgctcctgccctggcctgccactgcaggtgttggaaagagcttttcctactgaataaaacacagttgaagccaggaaaagccctttcaggaaccttggaggaataacagcaaaaacacagaaaaattgtttaagtcaccacctatgacaaaagaaagttgctcttactgagaacccagcttggagcagctataactagttttttttccttcaaaagaaaagtcaactttttttgctgtatgtctagacttaaaactgtggacttctgtagcaattgaaccaacaaagcccattttacctagaaaggaggcatattttgataagctttctgaattatgccattttcaagatttttttgacacttaaaaaacaagctacaggttattcagtagcatttgtacaaagatcaatacttacttttgttgtgaataatcttttccgtatcttccatttgacttcttggagcagtatatgtcaggatgtgttgcaagacagcgcagcactctgggcatcttttctatggctttttgtttgtttttcttttaagaatggccccacactgaaccatggtagagctattagtttgtagggccccagatggcataaactcgagaagggattgtccacggaaatcaccagcagacttcagcccgaagctgagttcaggaagtccagctgtcactgttgggaaacatctaggagtcttccttggatccataagaagctcttcccctaaaggcagcacagctaactctactctctacctgccacaactcagtcaagaattggcacctgtagccatctgggtaagcctcgatgcttctttcagggatgtgacacaaatggcaactcggagctatttgttactgcttgtctgtcaagattgtagccaggttaatgggtcattttccttctctccagactccaccactgactgatttcagaagaggtagagaactccaaactgtcccagcaggtttgctttagacaacagagcacagcccacatggccctacctgttcagaaagtcatgttagatcaacaaaccacttccattctgagtgcacttttataggttttatgctttagcatgtccgggagatgagttaattaacaatataaacattatgtgagtaaatggaaggtccaaactttaagtttttcttataaaaatattggagctattcatttaagaatttgctcaaaagggaacataacgccaaaaggaaaatgcatgtaggtataggaatttctcagtttagtagggccagggcttgcactatgttccatttattgggcttcgtaacttacttgcttgtttgtttgggggatagtggtgtggggagaggggagtcgtcaagccctataaataagctcattctctatctacccgactctcaattgccctgctaaagagttatttctcctatacctatgcaaagtaggaagagcaccttataggaggcactgtatagggacaggggacatgggatcagccataggaatgttaaatgaaattgcacagaggaaagtttaatatatgtctagagattatacatacacttttttaagcgtaaaaagaagacatctagtaatgacagatattctttttatatacaagcaaaagaaagtataaggaggttctacagtgcaacatccacaatctgtgcattcacatattatgggacttttattttttaaactctcatataaattttttaaaattactccttggaagagatcctggtttttttcttcatttatttttttctttaaaaacatttattttaagagaagagaaaaagagcttcatctaattttgcatcttgattaccaatcagtactagtcacagcaccagcaatactgtatgttttagactgacaaggtcagccaggaaatggcatttttttaaacgcagaaatgtgtttgtttcctctactctaacacgtcctttctcctcctggtgtcctgtcaccccccatgcagcaccactgatgcgagatgatgctctggcctggtccaggaagccctgagccatgggcagattgcccagtggccttgggcggccagagcttgtcacctgtttaaacaagttcaccatgtgtttaaatgacagggtacagtcctggaccagaggtttttctcttcagcaaagctccctggcccttgatcgttggactgttactaatagaaaaagattcaagtcatgaagtataaaatccatcccccatcccagaactttgaaacacaaggagggagagatctttgctatggagcagtcctggagcaaagccccgtggcttccacccccagatatataccccataagtagtgctgagctccagcttagctgagccaagctcagtccttatctggtgttcagccagtgcacaggtataagcagaactacagagctgaatgtagcttccctgggatctcttctcctttctaaagcatttttcacacagttctgtacctcctacccaagttggggctgctttctgcctgctagcccacggctctgtgtactttcttttctggcttcaggtgcagacagaccctcagtaccttcctggacacagacacatattccctggaccaaggcgtggaataactagtagaccaccaagccacaggtggctggtcttgaagaaaagggattatactccttacaggccacccagaaagctatgaattccaatatacaccactgatcgtgcaagttagggttttttttttttaaacgtagcattattttgttatattttggaactaaatgaagtgccaaattaaccagacattcgtttgatgccatctctgtggaaccaagttctctgtgt

SEQ ID NO: 7114 - protein, 412 aa, Homo sapiens; identical to SEQ ID NO: 1006

SEQ ID NO: 7115 - DNA, 243 bp, Homo sapiens
gatcggccaagttcacccccaatggcagcagcttcagcatttcctggcaatctcctccggtcactttcacaggcatcccagacctcacaaaagcttcttattgtcaaccactggcatctcccggaggtttccagcaaagtctaacgccttctgtggaactgataaaaatgaaagtggctgaatgaattgtgctgtgctctgttgatgaatatttattaaattccatagaggaatagccaagaa

SEQ ID NO: 7116 - protein, 40 aa, Homo sapiens
MAAASAFPGNLLRSLSQASQTSQKLLIVNHWHLPEVSSKV

SEQ ID NO: 7117 - DNA, 671 bp, Homo sapiens
acaaaattgttctttttaatgtcctccgttacctgtaagaacagaactcagtttgaaagacttgggatctgaaaccacttgaaaaagaagcaattctgtctcccttcttactctggggcaaaatttcattgaatggaacggtggaatgggttaactggccaaaattaatgaaccagagcaacctcttcatctcagtgaatgattaccagtggctcttcactttaacaacatggaaatcttcagaggaactagacatggacaaggtgacagcagcaatggtactaaccagcttgtcgactagccctttggttcgaagtcctcccgtgcggccgaacgagagcctcagcggatcctggaaggagggcggctgcgtgccttccagcaccagcagcagcggctactggagctggagcgcccccagcgaccagtccaacccgtccacgccgtcgccgccgctctcggctgacagcttcaagcccttccgcagccccgcgcagccagacgacggcatcgacgaggcggaggccagcaacctgctcttcgacgagcccattcccaggaaaagaaagaattccatgaaggtgatgttcaaatgcctctggaaaaactgtgggaaggtgctgagcactgcagcaggtatccagaaacacatccgaaccatccatctgggg

SEQ ID NO: 7118 - protein, 167 aa, Homo sapiens
MNQSNLFISVNDYQWLFTLTTWKSSEELDMDKVTAAMVLTSLSTSPLVRSPPVRPNESLSGSWKEGGCVPSSTSSSGYWSWSAPSDQSNPSTPSPPLSADSFKPFRSPAQPDDGIDEAEASNLLFDEPIPRKRKNSMKVMFKCLWKNCGKVLSTAAGIQKHIRTIHL

SEQ ID NO: 7119 - DNA, 805 bp, Homo sapiens
cgaggacgaggagggcgggagcaggcggcggagggggctcgggcgtgtggaggagaagccccgagggggcgcggaggaggaggatgacgacgaggaagaggaggacgaggaggtggtcgtcgaggtggtggacggcgacgaagacgacgaggacggcgaggagcgtttcgtgcccctcggacccggccacgcagtccccaggggcccggcccggggcgcgttgaaggtggggagcattaagcgggaaatgaccttcacatttcagtcagaggacttaaaacgtgactgtggtaaaaaaatgtctcatcaacacgtgttttccttggccatggaggaagatgtgaaaacagcagacaccaaaaaagccagccggatccttgaccatgaaaaagaaaacactcgctccatctgtctccttgagcaaaaaagaaaagttgtttcctccaacattgatgttcctccagcaaggaaatcttcagaggaactagacatggacaaggtgacagcagcaatggtactaaccagcttgtcgactagccctttggttcgaagtcctcccgtgcggccgaacgagagcctcagcggatcctggaaggagggcggctgcgtgccttccagcaccagcagcagcggctactggagctggagcgcccccagcgaccagtccaacccgtccacgccgtcgccgccgctctcggctgacagcttcaagcccttccgcagccccgcgcagccagacgacggcatcgacgaggcggaggccagcaacctgctcttcgacgagcccattcccaggaaaagaaag

SEQ ID NO: 7120 - protein, 185 aa, Homo sapiens
MTFTFQSEDLKRDCGKKMSHQHVFSLAMEEDVKTADTKKASRILDHEKENTRSICLLEQKRKVVSSNIDVPPARKSSEELDMDKVTAAMVLTSLSTSPLVRSPPVRPNESLSGSWKEGGCVPSSTSSSGYWSWSAPSDQSNPSTPSPPLSADSFKPFRSPAQPDDGIDEAEASNLLFDEPIPRKR

SEQ ID NO: 7121 - DNA, 704 bp, Homo sapiens
ggtctccagtacaacattgaaaagaagtggtgagagagctaacatccttgccttgttcctgagtttataaagagtttctagatgcaaacacacacacacacaaaagtgtgcttccagaagatgctgctgggaaggccactgcatccctagggagccaaatcaaagcattttgtcctaatgtgtccggaattggtgggttcttggtctcactgacttcaagaatgaagccgtggaccctcgcggaaagatagaatagaagctacaagatctgcagttatgcttcctcttacccaatttacagataatatatgtttgtggctgtgatacacagaaaaatggcatccaaggaaagtccacctcctaatcctcagaagctgtgaatatgttactttatatggcaaaatggactctgcagatgagattaagtttctgcctgcctgacaatcactctgctgatggcaaccaaatattgtcttcttcctggagtctcagggaaaatgtggcctggggcagaccctagttcttcagatggaaggtgaaacttcaatacatcaccgcaacaggaaacaatctcaagaatttgtatttacacatcctggacaaagaaagtgtaaataagtctggaatgcagtcatcagttcccaggtcctggaaggcaggagtctggagtcaggcagaaagagaaagcaggcacagtgacaacc

SEQ ID NO: 7122 - protein, 45 aa, Homo sapiens
MLLYMAKWTLQMRLSFCLPDNHSADGNQILSSSWSLRENVAWGRP

SEQ ID NO: 7123 - DNA, 616 bp, Homo sapiens
accttttgaattgaagaggcaagaaaactacatactacatttctgatacccttttttgcagaaaggatacttgatacttcatttaaagctgagagttgtgtctgtatcttcaagacttagattcagagctgagttacttggctatatgaggaagcctctttgctgatacagatcatgtagtgatggtgtgcgaagtcctagacagcagcaatttgattcaacaacattctgacagtggtgagaggcagaagctctcttctctacacaactctatgggcttacatatctgaaattcagttgaattcagacaaaattcaagtgatatagtgaaacggagtttgtgatgtcaacttgcctaagcaagcacacaagataagctgacaagaggagcaagctaaagttcaagggcctgtgtgaaagagagatgcctgactaatgttttgtcaagataaagcagagggttggtgacagacaatagaggccaggacacttaagtaagaaggtctacctttcctgttttaaagtcatggttgcatctactttcataagaacttattgtgtaatgtttctgtcagtaacctgggaataaagagtggagtttctcctgcactacaga

SEQ ID NO: 7124 - protein, 35 aa, Homo sapiens
MVCEVLDSSNLIQQHSDSGERQKLSSLHNSMGLHI

SEQ ID NO: 7125 - DNA, 640 bp, Homo sapiens
gatcacgatggtcctctggtgtcccatctttctctctcaaactgtcctttcctcaatcctttgactccgccggactttgtcacccccacaacctggttttgggtctggccaccccaacattaaaccttccagtgggacaagatgtggaggtggaagacaatgatattcacgatcctggccctgggtataaagaaggaaaatatacaagtgttcatgtgatgagaggtactgaatcactgaaaataaactggcctagaagcaataccaggatcgagagagatggagtcttattctgtcacccaggctggagtgcaatggcatgatctcggctcactgcaacttccgcctcccaggttcaagagattctcctgccttagcttcccaagtagctgagattacaggcacccaccaccatgcccagccaatttttgtatttttagtagagatggggtttcaccatgttgtccaggctggtctcgaattcctgaccttgtgatctgcccacctttgcctcccaaagtgctgggattagaggcgtgagccaccatgcccggcctaaatgctgtgtttttaagtttatgcacatgtggtcacattttatgtgagaatagtggttacttgtagggtgttaggggaaaca

SEQ ID NO: 7126 - protein, 37 aa, Homo sapiens
MESYSVTQAGVQWHDLGSLQLPPPRFKRFSCLSFPSS

SEQ ID NO: 7127 - DNA, 3133 bp, Homo sapiens
aatcgcggcagcagcggcagaggcggcggcagctgcgcgcctcgggcccaaccccgctcggctccccctctcgccggcgccctgcctgtcttgcgtgtgcgtgtgcgtgtgctcagcctcagcgtgaggggcacctgctcgtctgggctcacagcgaaggcagcctcgccgcgagctgccgctgccgctgctgccgccactggtgttgccgctctcaggcgccaggctccccgtcgccgccgccgccgcctcgccagccagagttgggctccgtgggcttcccccctcgcagcctcggtccttccccgctgcctgcaagtcagcctggctccgagtcacgtgtcagtgcctgaggcagagactgcgagaaaaaaacgcgcttcattccttcttccaccgccatactgtattttatactaaatctcatttttattccaacattttactcccgctcggtgagtaccttctcagtggcattcttgtcctattcttttttttgtccttttttttggttttttgttttttttgtttttgttttttttctttttttccacttctttgattattgtttatatttgggaaagctggaggagcatggttttgagccttttcctgaatccaagtttttctagcatgcgatcgttctgtagacaaggcgctgtgtctcggagtccgcggcgaccgtgcccgctgggagcgtctcccaagtccagcaaaatgtgcaactggttttatggaaaaagcgatgtgaagtatggtgcctatttttttcctttgtaaaaataaaaagcatgtttctaactctttttttgcatactctttttctgataacatttttgtataggtgggattttacggcagtgtttacaagtttgtggtcttgcaatactggtgcaaaccactgagcaaagacattaattttatattttttgtgccctttttggaagccggtgaaaacaaattcgttttttttccctcctgtttttgatacccattgataacatgaaacttttcttacagctggtgattgggatcatttttaagcaaaatacttttttcctcctttaaattaactatgacttttgcacatttgacttttttaaaaaaccgagataattttatgatagatatcctgatatctatatctatattgtcccttatttctcccccttccctccccgtaaatcaattttcaaatgatggcagtggaaggtttttctggaaaaaaaaaaatgaagtgcggtttggtttccttgtcaacggaggatgaagtgaacagctgagcagctcgcagagagcaggattaaagcaaggagagccaatcatgactggcaaaacacagaccagcaacgtcaccaataagaatgaccccaagtccatcaactcccgtgttttcatcggcaatctaaatacggcaattgtcaagaaagttgacattgaagccattttttcaaagtatggaaaaatagttggatgttccgttcacaaaggttatgcatttgtacagtacatgagtgagcgacatgcaagagctgcagtggctggagaaaatgccagagtcatcgccggccaaccacttgatatcaacatggcaggagagcccaaaccatacagaccaaaacctggaaacaagaggcccctttctgcactttacagacttgaatcaaaggaacctttcctgtctgttggcggttatgtctttgactatgattactacagagatgatttctacaatcggttatttgattaccacgggcgtgtgcctccacctccccgtgcagtaattccgctgaagcgtcccagagtggcagtcacaacgactcgcagggggaaaggagtcttttccatgaaaggtggatcgagatctactgccagtgggtcaacaggttctaaattgaaatcagatgagttacagaccatcaagaaagaattaacccagatcaaaactaaaattgactccttgctagggcgcctggagaagattgagaaacagcagaaggcggaggcagaagctcagaagaagcaattggaagagagtctagtgctgatccaagaggaatgtgtgtcagagattgcagatcactctacagaggagcctgctgaaggagggccagatgccgatggagaagagatgacagatgggatagaggaggacttcgatgaagatgggggtcatgagctgtttctacagataaagtgatctgaaataacgcatgatgccacaaagcagaaaagagaaactgtgacaacccccagaaatgtgaaaggaggtttcttactggacagcagcatctttggttcaatttatataaaaacccaaataaataaaatggacagtattgctcagttttagaaattccatttcttctatgttttaagctgtacaattgtcaggtttttatggtttaaattgtaaatgtgttttcccctttgctaattatgttttttttttcagtcttaaaatgtgaaaggcatttatgaatggtaagggaaacactatatacaaatgtatatttgtaaaagctatttttatgattagcatgtttcactgttgatcatatataaagtcaggtgatattgcaattctgtatttaaagcttatttccaacaatgtcatgtaagaaaagatgcatcttatgctagtttttataatttatttataatttatagtttaaagtacttcagatcataatgataaaatacttgaaaaagttatatttctgccctgtataagcaccctttttattaataaagaatgcagatatttcagatgtgatataatagttaaagaactgttggtttgatctgtgattaagttgagcatgctccgctctactgaactaaatgatccaattattacttcagtctgggtatgagattccatggacaagtaaggactagattgccaaggaaaagactgtcttgcccttggatccaaaagtttaaattagtgcatacatcatgtcatttcacctcctgttcctaggaactctccattcccaagcattgccagtgttttccagataatcttagctgttgtcttgtgctgtggaaatggaagaaaccatcttcacagaccgtaggagaattcaacatataatttcttaataaatactgtttcttttaaaacaaa

SEQ ID NO: 7128 - protein, 291 aa, Homo sapiens; identical to SEQ ID NO: 1008

SEQ ID NO: 7129 - DNA, 3100 bp, Homo sapiens
aatcgcggcagcagcggcagaggcggcggcagctgcgcgcctcgggcccaaccccgctcggctccccctctcgccggcgccctgcctgtcttgcgtgtgcgtgtgcgtgtgctcagcctcagcgtgaggggcacctgctcgtctgggctcacagcgaaggcagcctcgccgcgagctgccgctgccgctgctgccgccactggtgttgccgctctcaggcgccaggctccccgtcgccgccgccgccgcctcgccagccagagttgggctccgtgggcttcccccctcgcagcctcggtccttccccgctgcctgcaagtcagcctggctccgagtcacgtgtcagtgcctgaggcagagactgcgagaaaaaaacgcgcttcattccttcttccaccgccatactgtattttatactaaatctcatttttattccaacattttactcccgctcggtgagtaccttctcagtggcattcttgtcctattcttttttttgtccttttttttggttttttgttttttttgtttttgttttttttctttttttccacttctttgattattgtttatatttgggaaagctggaggagcatggttttgagccttttcctgaatccaagtttttctagcatgcgatcgttctgtagacaaggcgctgtgtctcggagtccgcggcgaccgtgcccgctgggagcgtctcccaagtccagcaaaatgtgcaactggttttatggaaaaagcgatgtgaagtatggtgcctatttttttcctttgtaaaaataaaaagcatgtttctaactctttttttgcatactctttttctgataacatttttgtataggtgggattttacggcagtgtttacaagtttgtggtcttgcaatactggtgcaaaccactgagcaaagacattaattttatattttttgtgccctttttggaagccggtgaaaacaaattcgttttttttccctcctgtttttgatacccattgataacatgaaacttttcttacagctggtgattgggatcatttttaagcaaaatacttttttcctcctttaaattaactatgacttttgcacatttgacttttttaaaaaaccgagataattttatgatagatatcctgatatctatatctatattgtcccttatttctcccccttccctccccgtaaatcaattttcaaatgatggcagtggaaggtttttctggaaaaaaaaaaatgaagtgcggtttggtttccttgtcaacggaggatgaagtgaacagctgagcagctcgcagagagcaggattaaagcaaggagagccaatcatgactggcaaaacacagaccagcaacgtcaccaataagaatgaccccaagtccatcaactcccgtgttttcatcggcaatctaaatacggcaattgtcaagaaagttgacattgaagccattttttcaaagtatggaaaaatagttggatgttccgttcacaaaggttatgcatttgtacagtacatgagtgagcgacatgcaagagctgcagtggctggagaaaatgccagagtcatcgccggccaaccacttgatatcaacatggcaggagagcccaaaccatacagaccaaaacctggaaacaagaggcccctttctgcactttacagcggttatgtctttgactatgattactacagagatgatttctacaatcggttatttgattaccacgggcgtgtgcctccacctccccgtgcagtaattccgctgaagcgtcccagagtggcagtcacaacgactcgcagggggaaaggagtcttttccatgaaaggtggatcgagatctactgccagtgggtcaacaggttctaaattgaaatcagatgagttacagaccatcaagaaagaattaacccagatcaaaactaaaattgactccttgctagggcgcctggagaagattgagaaacagcagaaggcggaggcagaagctcagaagaagcaattggaagagagtctagtgctgatccaagaggaatgtgtgtcagagattgcagatcactctacagaggagcctgctgaaggagggccagatgccgatggagaagagatgacagatgggatagaggaggacttcgatgaagatgggggtcatgagctgtttctacagataaagtgatctgaaataacgcatgatgccacaaagcagaaaagagaaactgtgacaacccccagaaatgtgaaaggaggtttcttactggacagcagcatctttggttcaatttatataaaaacccaaataaataaaatggacagtattgctcagttttagaaattccatttcttctatgttttaagctgtacaattgtcaggtttttatggtttaaattgtaaatgtgttttcccctttgctaattatgttttttttttcagtcttaaaatgtgaaaggcatttatgaatggtaagggaaacactatatacaaatgtatatttgtaaaagctatttttatgattagcatgtttcactgttgatcatatataaagtcaggtgatattgcaattctgtatttaaagcttatttccaacaatgtcatgtaagaaaagatgcatcttatgctagtttttataatttatttataatttatagtttaaagtacttcagatcataatgataaaatacttgaaaaagttatatttctgccctgtataagcaccctttttattaataaagaatgcagatatttcagatgtgatataatagttaaagaactgttggtttgatctgtgattaagttgagcatgctccgctctactgaactaaatgatccaattattacttcagtctgggtatgagattccatggacaagtaaggactagattgccaaggaaaagactgtcttgcccttggatccaaaagtttaaattagtgcatacatcatgtcatttcacctcctgttcctaggaactctccattcccaagcattgccagtgttttccagataatcttagctgttgtcttgtgctgtggaaatggaagaaaccatcttcacagaccgtaggagaattcaacatataatttcttaataaatactgtttcttttaaaacaaa

SEQ ID NO: 7130 - protein, 280 aa, Homo sapiens
MTGKTQTSNVTNKNDPKSINSRVFIGNLNTAIVKKVDIEAIFSKYGKIVGCSVHKGYAFVQYMSERHARAAVAGENARVIAGQPLDINMAGEPKPYRPKPGNKRPLSALYSGYVFDYDYYRDDFYNRLFDYHGRVPPPPRAVIPLKRPRVAVTTTRRGKGVFSMKGGSRSTASGSTGSKLKSDELQTIKKELTQIKTKIDSLLGRLEKIEKQQKAEAEAQKKQLEESLVLIQEECVSEIADHSTEEPAEGGPDADGEEMTDGIEEDFDEDGGHELFLQIK

SEQ ID NO: 7131 - DNA, 2317 bp, Homo sapiens
aatcgcggcagcagcggcagaggcggcggcagctgcgcgcctcgggcccaaccccgctcggctccccctctcgccggcgccctgcctgtcttgcgtgtgcgtgtgcgtgtgctcagcctcagcgtgaggggcacctgctcgtctgggctcacagcgaaggcagcctcgccgcgagctgccgctgccgctgctgccgccactggtgttgccgctctcaggcgccaggctccccgtcgccgccgccgccgcctcgccagccagagttgggctccgtgggcttcccccctcgcagcctcggtccttccccgctgcctgcaagtcagcctggctccgagtcacgtgtcagtgcctgaggcagagactgcgagaaaaaaacgcgcttcattccttcttccaccgccatactgtattttatactaaatctcatttttattccaacattttactcccgctcggtgagtaccttctcagtggcattcttgtcctattcttttttttgtccttttttttggttttttgattaaagcaaggagagccaatcatgactggcaaaacacagaccagcaacgtcaccaataagaatgaccccaagtccatcaactcccgtgttttcatcggcaatctaaatacggcaattgtcaagaaagttgacattgaagccattttttcaaagtatggaaaaatagttggatgttccgttcacaaaggttatgcatttgtacagtacatgagtgagcgacatgcaagagctgcagtggctggagaaaatgccagagtcatcgccggccaaccacttgatatcaacatggcaggagagcccaaaccatacagaccaaaacctggaaacaagaggcccctttctgcactttacagcggttatgtctttgactatgattactacagagatgatttctacaatcggttatttgattaccacgggcgtgtgcctccacctccccgtgcagtaattccgctgaagcgtcccagagtggcagtcacaacgactcgcagggggaaaggagtcttttccatgaaaggtggatcgagatctactgccagtgggtcaacaggttctaaattgaaatcagatgagttacagaccatcaagaaagaattaacccagatcaaaactaaaattgactccttgctagggcgcctggagaagattgagaaacagcagaaggcggaggcagaagctcagaagaagcaattggaagagagtctagtgctgatccaagaggaatgtgtgtcagagattgcagatcactctacagaggagcctgctgaaggagggccagatgccgatggagaagagatgacagatgggatagaggaggacttcgatgaagatgggggtcatgagctgtttctacagataaagtgatctgaaataacgcatgatgccacaaagcagaaaagagaaactgtgacaacccccagaaatgtgaaaggaggtttcttactggacagcagcatctttggttcaatttatataaaaacccaaataaataaaatggacagtattgctcagttttagaaattccatttcttctatgttttaagctgtacaattgtcaggtttttatggtttaaattgtaaatgtgttttcccctttgctaattatgttttttttttcagtcttaaaatgtgaaaggcatttatgaatggtaagggaaacactatatacaaatgtatatttgtaaaagctatttttatgattagcatgtttcactgttgatcatatataaagtcaggtgatattgcaattctgtatttaaagcttatttccaacaatgtcatgtaagaaaagatgcatcttatgctagtttttataatttatttataatttatagtttaaagtacttcagatcataatgataaaatacttgaaaaagttatatttctgccctgtataagcaccctttttattaataaagaatgcagatatttcagatgtgatataatagttaaagaactgttggtttgatctgtgattaagttgagcatgctccgctctactgaactaaatgatccaattattacttcagtctgggtatgagattccatggacaagtaaggactagattgccaaggaaaagactgtcttgcccttggatccaaaagtttaaattagtgcatacatcatgtcatttcacctcctgttcctaggaactctccattcccaagcattgccagtgttttccagataatcttagctgttgtcttgtgctgtggaaatggaagaaaccatcttcacagaccgtaggagaattcaacatataatttcttaataaatactgtttcttttaaaacaaa

SEQ ID NO: 7132 - protein, 280 aa, Homo sapiens; identical to SEQ ID NO: 7130

SEQ ID NO: 7133 - DNA, 2237 bp, Homo sapiens
tgcctgtcttgcgtgtgcgtgtgcgtgtgctcagcctcagcgtgaggggcacctgctcgtctgggctcacagcgaaggcagcctcgccgcgagctgccgctgccgctgctgccgccactggtgttgccgctctcaggcgccaggctccccgtcgccgccgccgccgcctcgccagccagagttgggctccgtgggcttcccccctcgcagcctcggtccttccccgctgcctgcaagtcagcctggctccgagtcacgtgtcagtgcctgaggcagagactgcgagaaaaaaacgcgcttcattccttcttccaccgccatactgtattttatactaaatctcatttttattccaacattttactcccgctcgatatagcccttggcgaggtgcctggctccatagattaaagcaaggagagccaatcatgactggcaaaacacagaccagcaacgtcaccaataagaatgaccccaagtccatcaactcccgtgttttcatcggcaatctaaatacggcaattgtcaagaaagttgacattgaagccattttttcaaagtatggaaaaatagttggatgttccgttcacaaaggttatgcatttgtacagtacatgagtgagcgacatgcaagagctgcagtggctggagaaaatgccagagtcatcgccggccaaccacttgatatcaacatggcaggagagcccaaaccatacagaccaaaacctggaaacaagaggcccctttctgcactttacagacttgaatcaaaggaacctttcctgtctgttggcggttatgtctttgactatgattactacagagatgatttctacaatcggttatttgattaccacgggcgtgtgcctccacctccccgtgcagtaattccgctgaagcgtcccagagtggcagtcacaacgactcgcagggggaaaggagtcttttccatgaaaggtggatcgagatctactgccagtgggtcaacaggttctaaattgaaatcagatgagttacagaccatcaagaaagaattaacccagatcaaaactaaaattgactccttgctagggcgcctggagaagattgagaaacagcagaaggcggaggcagaagctcagaagaagcaattggaagagagtctagtgctgatccaagaggaatgtgtgtcagagattgcagatcactctacagaggagcctgctgaaggagggccagatgccgatggagaagagatgacagatgggatagaggaggacttcgatgaagatgggggtcatgagctgtttctacagataaagtgatctgaaataacgcatgatgccacaaagcagaaaagagaaactgtgacaacccccagaaatgtgaaaggaggtttcttactggacagcagcatctttggttcaatttatataaaaacccaaataaataaaatggacagtattgctcagttttagaaattccatttcttctatgttttaagctgtacaattgtcaggtttttatggtttaaattgtaaatgtgttttcccctttgctaattatgttttttttttcagtcttaaaatgtgaaaggcatttatgaatggtaagggaaacactatatacaaatgtatatttgtaaaagctatttttatgattagcatgtttcactgttgatcatatataaagtcaggtgatattgcaattctgtatttaaagcttatttccaacaatgtcatgtaagaaaagatgcatcttatgctagtttttataatttatttataatttatagtttaaagtacttcagatcataatgataaaatacttgaaaaagttatatttctgccctgtataagcaccctttttattaataaagaatgcagatatttcagatgtgatataatagttaaagaactgttggtttgatctgtgattaagttgagcatgctccgctctactgaactaaatgatccaattattacttcagtctgggtatgagattccatggacaagtaaggactagattgccaaggaaaagactgtcttgcccttggatccaaaagtttaaattagtgcatacatcatgtcatttcacctcctgttcctaggaactctccattcccaagcattgccagtgttttccagataatcttagctgttgtcttgtgctgtggaaatggaagaaaccatcttcacagaccgtaggagaattcaacatataatttcttaataaatactgtttcttttaaaacaaa

SEQ ID NO: 7134 - protein, 291 aa, Homo sapiens; identical to SEQ ID NO: 1008

SEQ ID NO: 7135 - DNA, 2205 bp, Homo sapiens
tgcctgtcttgcgtgtgcgtgtgcgtgtgctcagcctcagcgtgaggggcacctgctcgtctgggctcacagcgaaggcagcctcgccgcgagctgccgctgccgctgctgccgccactggtgttgccgctctcaggcgccaggctccccgtcgccgccgccgccgcctcgccagccagagttgggctccgtgggcttcccccctcgcagcctcggtccttccccgctgcctgcaagtcagcctggctccgagtcacgtgtcagtgcctgaggcagagactgcgagaaaaaaacgcgcttcattccttcttccaccgccatactgtattttatactaaatctcatttttattccaacattttactcccgctcggattaaagcaaggagagccaatcatgactggcaaaacacagaccagcaacgtcaccaataagaatgaccccaagtccatcaactcccgtgttttcatcggcaatctaaatacggcaattgtcaagaaagttgacattgaagccattttttcaaagtatggaaaaatagttggatgttccgttcacaaaggttatgcatttgtacagtacatgagtgagcgacatgcaagagctgcagtggctggagaaaatgccagagtcatcgccggccaaccacttgatatcaacatggcaggagagcccaaaccatacagaccaaaacctggaaacaagaggcccctttctgcactttacagacttgaatcaaaggaacctttcctgtctgttggcggttatgtctttgactatgattactacagagatgatttctacaatcggttatttgattaccacgggcgtgtgcctccacctccccgtgcagtaattccgctgaagcgtcccagagtggcagtcacaacgactcgcagggggaaaggagtcttttccatgaaaggtggatcgagatctactgccagtgggtcaacaggttctaaattgaaatcagatgagttacagaccatcaagaaagaattaacccagatcaaaactaaaattgactccttgctagggcgcctggagaagattgagaaacagcagaaggcggaggcagaagctcagaagaagcaattggaagagagtctagtgctgatccaagaggaatgtgtgtcagagattgcagatcactctacagaggagcctgctgaaggagggccagatgccgatggagaagagatgacagatgggatagaggaggacttcgatgaagatgggggtcatgagctgtttctacagataaagtgatctgaaataacgcatgatgccacaaagcagaaaagagaaactgtgacaacccccagaaatgtgaaaggaggtttcttactggacagcagcatctttggttcaatttatataaaaacccaaataaataaaatggacagtattgctcagttttagaaattccatttcttctatgttttaagctgtacaattgtcaggtttttatggtttaaattgtaaatgtgttttcccctttgctaattatgttttttttttcagtcttaaaatgtgaaaggcatttatgaatggtaagggaaacactatatacaaatgtatatttgtaaaagctatttttatgattagcatgtttcactgttgatcatatataaagtcaggtgatattgcaattctgtatttaaagcttatttccaacaatgtcatgtaagaaaagatgcatcttatgctagtttttataatttatttataatttatagtttaaagtacttcagatcataatgataaaatacttgaaaaagttatatttctgccctgtataagcaccctttttattaataaagaatgcagatatttcagatgtgatataatagttaaagaactgttggtttgatctgtgattaagttgagcatgctccgctctactgaactaaatgatccaattattacttcagtctgggtatgagattccatggacaagtaaggactagattgccaaggaaaagactgtcttgcccttggatccaaaagtttaaattagtgcatacatcatgtcatttcacctcctgttcctaggaactctccattcccaagcattgccagtgttttccagataatcttagctgttgtcttgtgctgtggaaatggaagaaaccatcttcacagaccgtaggagaattcaacatataatttcttaataaatactgtttcttttaaaacaaa

SEQ ID NO: 7136 - protein, 291 aa, Homo sapiens; identical to SEQ ID NO: 1008

SEQ ID NO: 7137 - DNA, 1982 bp, Homo sapiens
gggtagaagcggcagagaccgcatattccggaggggctggctccaggccacgcgagccggagctggagacatttccagagccttgaggatggcaccggccctcgcacgctcaactcctgctcctcctcttcgcaatgagtaaacgacgcagattaaagcaaggagagccaatcatgactggcaaaacacagaccagcaacgtcaccaataagaatgaccccaagtccatcaactcccgtgttttcatcggcaatctaaatacggcaattgtcaagaaagttgacattgaagccattttttcaaagtatggaaaaatagttggatgttccgttcacaaaggttatgcatttgtacagtacatgagtgagcgacatgcaagagctgcagtggctggagaaaatgccagagtcatcgccggccaaccacttgatatcaacatggcaggagagcccaaaccatacagaccaaaacctggaaacaagaggcccctttctgcactttacagacttgaatcaaaggaacctttcctgtctgttggcggttatgtctttgactatgattactacagagatgatttctacaatcggttatttgattaccacgggcgtgtgcctccacctccccgtgcagtaattccgctgaagcgtcccagagtggcagtcacaacgactcgcagggggaaaggagtcttttccatgaaaggtggatcgagatctactgccagtgggtcaacaggttctaaattgaaatcagatgagttacagaccatcaagaaagaattaacccagatcaaaactaaaattgactccttgctagggcgcctggagaagattgagaaacagcagaaggcggaggcagaagctcagaagaagcaattggaagagagtctagtgctgatccaagaggaatgtgtgtcagagattgcagatcactctacagaggagcctgctgaaggagggccagatgccgatggagaagagatgacagatgggatagaggaggacttcgatgaagatgggggtcatgagctgtttctacagataaagtgatctgaaataacgcatgatgccacaaagcagaaaagagaaactgtgacaacccccagaaatgtgaaaggaggtttcttactggacagcagcatctttggttcaatttatataaaaacccaaataaataaaatggacagtattgctcagttttagaaattccatttcttctatgttttaagctgtacaattgtcaggtttttatggtttaaattgtaaatgtgttttcccctttgctaattatgttttttttttcagtcttaaaatgtgaaaggcatttatgaatggtaagggaaacactatatacaaatgtatatttgtaaaagctatttttatgattagcatgtttcactgttgatcatatataaagtcaggtgatattgcaattctgtatttaaagcttatttccaacaatgtcatgtaagaaaagatgcatcttatgctagtttttataatttatttataatttatagtttaaagtacttcagatcataatgataaaatacttgaaaaagttatatttctgccctgtataagcaccctttttattaataaagaatgcagatatttcagatgtgatataatagttaaagaactgttggtttgatctgtgattaagttgagcatgctccgctctactgaactaaatgatccaattattacttcagtctgggtatgagattccatggacaagtaaggactagattgccaaggaaaagactgtcttgcccttggatccaaaagtttaaattagtgcatacatcatgtcatttcacctcctgttcctaggaactctccattcccaagcattgccagtgttttccagataatcttagctgttgtcttgtgctgtggaaatggaagaaaccatcttcacagaccgtaggagaattcaacatataatttcttaataaatactgtttcttttaaaacaaa

SEQ ID NO: 7138 - protein, 304 aa, Homo sapiens
MSKRRRLKQGEPIMTGKTQTSNVTNKNDPKSINSRVFIGNLNTAIVKKVDIEAIFSKYGKIVGCSVHKGYAFVQYMSERHARAAVAGENARVIAGQPLDINMAGEPKPYRPKPGNKRPLSALYRLESKEPFLSVGGYVFDYDYYRDDFYNRLFDYHGRVPPPPRAVIPLKRPRVAVTTTRRGKGVFSMKGGSRSTASGSTGSKLKSDELQTIKKELTQIKTKIDSLLGRLEKIEKQQKAEAEAQKKQLEESLVLIQEECVSEIADHSTEEPAEGGPDADGEEMTDGIEEDFDEDGGHELFLQIK

SEQ ID NO: 7139 - DNA, 456 bp, Homo sapiens
tcgaccggcggcaatcgagacctagacctcggtcagcgccccgccgcccctctgcgtgcgacttggtgaggccggtgggtgcgcgtcgagagggccgagggacgagcggaagagaagctgctgcgaactcgggccacccagatggcccggcggagttccctgcgtaaggcgcggcctcggccacttcgccgaggaccccgggaagggtcgagcttcccacgcctgagaacccacctttgggcatttcctcgcgttccgggaagaggtcatcctcccctcttcatgtctctcaaacacccacaagtgtaggaattaccagcacgccgggtgaaaatccaggtgctcatcaggcccgccccagaccacaccggccagtgtggggaagggcaggaacccctgctgctttttaagcccctgcgggcgtttgtgatgcaatagggagttagaaaagtactc

SEQ ID NO: 7140 - protein, 55 aa, Homo sapiens [sequence omitted]

SEQ ID NO: 7141 - DNA, 4306 bp, Homo sapiens
ggtgtggtctggggcgggcctgatgagcacctggattttcacccggcgtgctggtaattcctacacttgtgggtgtttgagagacatgaagaggggaggatgacctcttcccggaagcgggacttccataaaagaagcgtggtgggcgggtcccgggcacctgtggtttggtgagtcctccaggtaactgtgatgcgggggtcagcgggagaggcacccggaagctcccggcgtctgcaccccggcagcgcgaggaaatgcccaaagaaactatagtgacactgaaactgaaggagagatttttaattccttagtgcaatactttggtgacaacttggggcgaaaagttaaagcgatgccattagttgaagaaacttctttactggaagattcgtcagtgacttttcctgtggtaataataggaaatggaccctcaggaatatgcctttcttatatgttatcaggctacagaccgtatttatcatcagaagcaatacacccaaatacaatcttaaatagtaaattagaagaagcaagacatctttccattgttgatcaggacttagaatacttgtctgagggccttgagggccgatcatccaatccagttgcagtacttttcgatacacttcttcatccagatgctgactttgggtatgattatccatccgttttgcattggaaattagagcaacatcattatatccctcacgtagttcttggtaaaggtccacctggtggggcttggcataatatggaaggctccatgttgacaatcagctttggaagttggatggaactacctggacttaaatttaaggactgggtatcaagtaaacgaaggagcctaaaaggggatcgagttatgccagaggaaatagctcgctactataaacattatgtaaaagtcatgggtcttcagaagaatttcagagagaatacttacataacttccgtatcaagactctacagagatcaagatgatgatgatattcaagacagagatatttcaacaaagcatttacagatagagaagtcaaactttatcaagagaaactgggaaattaggggttatcagcgaatagctgatggttctcatgttcccttctgcctctttgctgagaatgtagcgctggcaactggaacgctggattctcctgcccatctggaaattgaaggggaagattttccttttgtgtttcattcaatgcctgaatttggagctgctataaacaaaggaaagttgcgtggcaaagtggatccagtgttaattgtaggttctgggcttactgccgctgacgcagtactgtgtgcttacaacagtaatatccctgtgattcatgtgtttcgcagacgagtaactgatccaagcttaattttcaaacagcttcccaaaaagctgtatcctgaatatcataaagtctatcatatgatgtgtactcagtcatattctgtagactcaaatcttttatctgattataccagctttcccgagcaccgtgtgctttcctttaagtcggacatgaaatgtgttctccaaagcgtttctggattgaagaaaatatttaagctgtctgcagcagtagtattgataggttctcatcctaatctgtcttttctgaaggatcaagggtgttacctaggccataagtcaagccagccaatcacatgtaagggtaatcctgtggaaatagatacatatacctatgagtgtattaaagaagccaacctttttgcattgggtcctttggttggagacaattttgttcgatttttaaagggaggggcgctgggtgttacacgctgtttagctacaagacagaagaaaaagcatttgtttgttgaaagaggaggaggagatgggatagcttaaagcaagtttacaagtaattaaaatggacagtttgccattaaagatttttaatagtggttttgcagtgtactggcttgaattttctggacttgagttaactgaaggagagcctcaaactatagtaacttcatttttaaaagttactagaatttggtatcctgatttatattgcagtgtttcaaaggtgtcactgtcagacaaatagaaacactgccaacttggtgtaacttaagctttcatttaactaaaacattcttttcttgcaaaacttatttttcatgatcatttttggttatttattatacttgattccaaaatagtacagccttgaatctataaaactgtgcagtcattatgccagaaattatcttaaatatataatgggtcaccttgctgttcaaagggtggtgcaaggtcctgcagcatcttacatctgtagcttgttagaaatgtaaactctcaggccccacaacttacttcctgcattttaacaagatccccaagggatatgtatgctcataaaaatttgagacactggtttaaatgaaaatggatataaggtatgtataactgggggtggggtgagggtaggaggcatttacaactcagattttatttattttgaaattatcaattgtataaatctaatttattaccaaatagggtcttttaaaaaatatttttatcgttgaaaccttgacaggtacttcatattcttctaataatttaaacagtccaataatgtggtatacactttgacatccaagaactcaccaagatgtttttcagagatttattctcgatttaactatcatagcatttaatgaatctgatttgtagttcaataaattgtgggttgaactacttatccctgtgtgaacattgaattactttctgtcactgaaactgaggtatttgggtgtggtaagtacttcgaaaattgtaatactgtttgggcattgtctaaattattaaaggttaaaatagaaaataaagtcagaatttttcttttccattccaaaggtgtacttagagatctctattagtattcattcgagatgacatagcagctcatatcatggttgtttattggatttatctgttctaattatataagtgtgtttactgtctgtgttttcacacaaactgctagaatttttaatgttaagacgaaaacatctgaagttctccatggcaaattgaatttttcagtcattttcttttctttttttggtacaattacttcatctggaatgtcttcattgaactcgttattctatttttcttagaattaaaagtggattaatgtgggtttttctgttcattttattgcagtattaaatgcttaagcttattaggaccataattcactttaaatataattgtatagaatatatttgcgtcgatcaaataattgcttcagatgaattcttagactcttgataatatcacacctaatttaacttgattttacaagctgtacaatccagttttagttttctattgtgataataacttttttcaaaccagtttcacatcttaatgaaataacattctctgactgcacttgcttcagtactctcttgcctgcctgtttttgacctctgcatgagttggattagatgtttttcttactgtcacttctaaatagaaaatgacagtgttataaaaaagggaaggataaaacctttgacatccccttgtgtctcaaaagtccacagttattcaaacaatggctttttttgtgatgagagtatttgttaaaaaaaaaaaaagacttcaagaaaaataaaagttcagtggagctgcaaataaatctggtgaataatttcatctttggtaatctcccatttcctgagttcttcctcaatccaagctgtcctgtgtagtatataacatttgggcattttctctgatatactatactctcatgttctataaatttctgtcccgtaattctaacactttacattttttctttgctatcagctatagctattcatggaagggaagaatcactaaatacttgtctagttatagcatgatgtgagcatctcctccttatccctcgatgcctggcttggtgtctggcaaacagtccataattagcagatgttgaaagaccgtttacaaagcagaatttggggatttaaagtgcaatgatacaacaaaaagatttaattacagcttccagtgttttgactatgtgaaccatatccaactacttttttgaaaatctagttctatgtaatatatttctgtggcatcaaattttagttgattgtattagtcaataggaagtggtggaaaatttctaaataaattcaactattaaataaatgcaagttccactaaatcttagtgtttggaacactgaagaacccagaatgaaacaaaattagactgaatgtaaatgtcatttaaaaatctaac

SEQ ID NO: 7142 - protein, 505 aa, Homo sapiens; identical to SEQ ID NO: 1012

SEQ ID NO: 7143 - DNA, 1968 bp, Homo sapiens
gctccgcccctatcgcggcgccccgagatcacccgcctccggcgcctggctccctgcaggcgaggagcggaagccgctatctggaggcggactccggcgccacagagccggggcagccgcggcaacggcgaggcgcgaggcaggggcgcccggcagaccccgagaccccgagccagcgggcgccccgagcgggcagcctcgccgggggaggcggaggcggccacggcggccgcgctcgggcgcccctcgcgcagcgctccatgcccgtgtggtgctgccgctgctccctggccggtcatttcagaaactatagtgacactgaaactgaaggagagatttttaattccttagtgcaatactttggtgacaacttggggcgaaaagttaaagcgatgccattagttgaagaaacttctttactggaagattcgtcagtgacttttcctgtggtaataataggaaatggaccctcaggaatatgcctttcttatatgttatcaggctacagaccgtatttatcatcagaagcaatacacccaaatacaatcttaaatagtaaattagaagaagcaagacatctttccattgttgatcaggacttagaatacttgtctgagggccttgagggccgatcatccaatccagttgcagtacttttcgatacacttcttcatccagatgctgactttgggtatgattatccatccgttttgcattggaaattagagcaacatcattatatccctcacgtagttcttggtaaaggtccacctggtggggcttggcataatatggaaggctccatgttgacaatcagctttggaagttggatggaactacctggacttaaatttaaggactgggtatcaagtaaacgaaggagcctaaaaggggatcgagttatgccagaggaaatagctcgctactataaacattatgtaaaagtcatgggtcttcagaagaatttcagagagaatacttacataacttccgtatcaagactctacagagatcaagatgatgatgatattcaagacagagatatttcaacaaagcatttacagatagagaagtcaaactttatcaagagaaactgggaaattaggggttatcagcgaatagctgatggttctcatgttcccttctgcctctttgctgagaatgtagcgctggcaactggaacgctggattctcctgcccatctggaaattgaaggggaagattttccttttgtgtttcattcaatgcctgaatttggagctgctataaacaaaggaaagttgcgtggcaaagtggatccagtgttaattgtaggttctgggcttactgccgctgacgcagtactgtgtgcttacaacagtaatatccctgtgattcatgtgtttcgcagacgagtaactgatccaagcttaattttcaaacagcttcccaaaaagctgtatcctgaatatcataaagtctatcatatgatgtgtactcagtcatattctgtagactcaaatcttttatctgattataccagctttcccgagcaccgtgtgctttcctttaagtcggacatgaaatgtgttctccaaagcgtttctggattgaagaaaatatttaagctgtctgcagcagtagtattgataggttctcatcctaatctgtcttttctgaaggatcaagggtgttacctaggccataagtcaagccagccaatcacatgtaagggtaatcctgtggaaatagatacatatacctatgagtgtattaaagaagccaacctttttgcattgggtcctttggttggagacaattttgttcgatttttaaagggaggggcgctgggtgttacacgctgtttagctacaagacagaagaaaaagcatttgtttgttgaaagaggaggaggagatgggatagcttaaagcaagtttacaagtaattaaaatggacagtttgccattaaagatttttaatagtggt

SEQ ID NO: 7144 - protein, 549 aa, Homo sapiens
MPVWCCRCSLAGHFRNYSDTETEGEIFNSLVQYFGDNLGRKVKAMPLVEETSLLEDSSVTFPVVIIGNGPSGICLSYMLSGYRPYLSSEAIHPNTILNSKLEEARHLSIVDQDLEYLSEGLEGRSSNPVAVLFDTLLHPDADFGYDYPSVLHWKLEQHHYIPHVVLGKGPPGGAWHNMEGSMLTISFGSWMELPGLKFKDWVSSKRRSLKGDRVMPEEIARYYKHYVKVMGLQKNFRENTYITSVSRLYRDQDDDDIQDRDISTKHLQIEKSNFIKRNWEIRGYQRIADGSHVPFCLFAENVALATGTLDSPAHLEIEGEDFPFVFHSMPEFGAAINKGKLRGKVDPVLIVGSGLTAADAVLCAYNSNIPVIHVFRRRVTDPSLIFKQLPKKLYPEYHKVYHMMCTQSYSVDSNLLSDYTSFPEHRVLSFKSDMKCVLQSVSGLKKIFKLSAAVVLIGSHPNLSFLKDQGCYLGHKSSQPITCKGNPVEIDTYTYECIKEANLFALGPLVGDNFVRFLKGGALGVTRCLATRQKKKHLFVERGGGDGIA

SEQ ID NO: 7145 - DNA, 1021 bp, Homo sapiens
cccctatcgcggcgccccgagatcacccgcctccggcgcctggctccctgcaggcgaggagcggaagccgctatctggaggcggactccggcgccacagagccggggcagccgcggcaacggcgaggcgcgaggcaggggcgcccggcagaccccgagaccccgagccagcgggcgccccgagcgggcagcctcgccgggggaggcggaggcggccacggcggccgcgctcgggcgcccctcgcgcagcgctccatgcccgtgtggtgctgccgctgctccctggccggtcatttcagaaactatagtgacactgaaactgaaggagagatttttaattccttagtgcaatactttggtgacaacttggggcgaaaagttaaagcgatgccattagttgaagaaacttctttactggaagattcgtcagtgacttttcctgtggtaataataggaaatggaccctcaggaatatgcctttcttatatgttatcaggctacagaccgtatttatcatcagaagcaatacacccaaatacaatcttaaatagtaaattagaagaagcaagacatctttccattgttgatcaggacttagaatacttgtctgagggccttgagggccgatcatccaatccagttgcagtacttttcgatacacttcttcatccagatgctgactttgggtatgattatccatccgttttgcattggaaattagagcaacatcattatatccctcacgtagttcttggtaaaggtccacctggtggggcttggcataatatggaaggctccatgttgacaatcagctttggaagttggatggaactacctggacttaaatttaaggactgggtatcaagtaaacgaaggtaaagattgaactgtattaaaattctttggtgtacgttgaaaaagagaatgtggaaaaatttcaaaatatttgtgattttgtcatggctgaagaatataaatgtacgtctttcaaataaaaatgtgtccttgaagcagtgattata

SEQ ID NO: 7146 - protein, 207 aa, Homo sapiens
MPVWCCRCSLAGHFRNYSDTETEGEIFNSLVQYFGDNLGRKVKAMPLVEETSLLEDSSVTFPVVIIGNGPSGICLSYMLSGYRPYLSSEAIHPNTILNSKLEEARHLSIVDQDLEYLSEGLEGRSSNPVAVLFDTLLHPDADFGYDYPSVLHWKLEQHHYIPHVVLGKGPPGGAWHNMEGSMLTISFGSWMELPGLKFKDWVSSKRR

SEQ ID NO: 7147 - DNA, 4337 bp, Homo sapiens
cccctatcgcggcgccccgagatcacccgcctccggcgcctggctccctgcaggcgaggagcggaagccgctatctggaggcggactccggcgccacagagccggggcagccgcggcaacggcgaggcgcgaggcaggggcgcccggcagaccccgagaccccgagccagcgggcgccccgagcgggcagcctcgccgggggaggcggaggcggccacggcggccgcgctcgggcgcccctcgcgcagcgctccatgcccgtgtggtgctgccgctgctccctggccggtcatttcagaaactatagtgacactgaaactgaaggagagatttttaattccttagtgcaatactttggtgacaacttggggcgaaaagttaaagcgatgccattagttgaagaaacttctttactggaagattcgtcagtgacttttcctgtggtaataataggaaatggaccctcaggaatatgcctttcttatatgttatcaggctacagaccgtatttatcatcagaagcaatacacccaaatacaatcttaaatagtaaattagaagaagcaagacatctttccattgttgatcaggacttagaatacttgtctgagggccttgagggccgatcatccaatccagttgcagtacttttcgatacacttcttcatccagatgctgactttgggtatgattatccatccgttttgcattggaaattagagcaacatcattatatccctcacgtagttcttggtaaaggtccacctggtggggcttggcataatatggaaggctccatgttgacaatcagctttggaagttggatggaactacctggacttaaatttaaggactgggtatcaagtaaacgaaggagcctaaaaggggatcgagttatgccagaggaaatagctcgctactataaacattatgtaaaagtcatgggtcttcagaagaatttcagagagaatacttacataacttccgtatcaagactctacagagatcaagatgatgatgatattcaagacagagatatttcaacaaagcatttacagatagagaagtcaaactttatcaagagaaactgggaaattaggggttatcagcgaatagctgatggttctcatgttcccttctgcctctttgctgagaatgtagcgctggcaactggaacgctggattctcctgcccatctggaaattgaaggggaagattttccttttgtgtttcattcaatgcctgaatttggagctgctataaacaaaggaaagttgcgtggcaaagtggatccagtgttaattgtaggttctgggcttactgccgctgacgcagtactgtgtgcttacaacagtaatatccctgtgattcatgtgtttcgcagacgagtaactgatccaagcttaattttcaaacagcttcccaaaaagctgtatcctgaatatcataaagtctatcatatgatgtgtactcagtcatattctgtagactcaaatcttttatctgattataccagctttcccgagcaccgtgtgctttcctttaagtcggacatgaaatgtgttctccaaagcgtttctggattgaagaaaatatttaagctgtctgcagcagtagtattgataggttctcatcctaatctgtcttttctgaaggatcaagggtgttacctaggccataagtcaagccagccaatcacatgtaagggtaatcctgtggaaatagatacatatacctatgagtgtattaaagaagccaacctttttgcattgggtcctttggttggagacaattttgttcgatttttaaagggaggggcgctgggtgttacacgctgtttagctacaagacagaagaaaaagcatttgtttgttgaaagaggaggaggagatgggatagcttaaagcaagtttacaagtaattaaaatggacagtttgccattaaagatttttaatagtggttttgcagtgtactggcttgaattttctggacttgagttaactgaaggagagcctcaaactatagtaacttcatttttaaaagttactagaatttggtatcctgatttatattgcagtgtttcaaaggtgtcactgtcagacaaatagaaacactgccaacttggtgtaacttaagctttcatttaactaaaacattcttttcttgcaaaacttatttttcatgatcatttttggttatttattatacttgattccaaaatagtacagccttgaatctataaaactgtgcagtcattatgccagaaattatcttaaatatataatgggtcaccttgctgttcaaagggtggtgcaaggtcctgcagcatcttacatctgtagcttgttagaaatgtaaactctcaggccccacaacttacttcctgcattttaacaagatccccaagggatatgtatgctcataaaaatttgagacactggtttaaatgaaaatggatataaggtatgtataactgggggtggggtgagggtaggaggcatttacaactcagattttatttattttgaaattatcaattgtataaatctaatttattaccaaatagggtcttttaaaaaatatttttatcgttgaaaccttgacaggtacttcatattcttctaataatttaaacagtccaataatgtggtatacactttgacatccaagaactcaccaagatgtttttcagagatttattctcgatttaactatcatagcatttaatgaatctgatttgtagttcaataaattgtgggttgaactacttatccctgtgtgaacattgaattactttctgtcactgaaactgaggtatttgggtgtggtaagtacttcgaaaattgtaatactgtttgggcattgtctaaattattaaaggttaaaatagaaaataaagtcagaatttttcttttccattccaaaggtgtacttagagatctctattagtattcattcgagatgacatagcagctcatatcatggttgtttattggatttatctgttctaattatataagtgtgtttactgtctgtgttttcacacaaactgctagaatttttaatgttaagacgaaaacatctgaagttctccatggcaaattgaatttttcagtcattttcttttctttttttggtacaattacttcatctggaatgtcttcattgaactcgttattctatttttcttagaattaaaagtggattaatgtgggtttttctgttcattttattgcagtattaaatgcttaagcttattaggaccataattcactttaaatataattgtatagaatatatttgcgtcgatcaaataattgcttcagatgaattcttagactcttgataatatcacacctaatttaacttgattttacaagctgtacaatccagttttagttttctattgtgataataacttttttcaaaccagtttcacatcttaatgaaataacattctctgactgcacttgcttcagtactctcttgcctgcctgtttttgacctctgcatgagttggattagatgtttttcttactgtcacttctaaatagaaaatgacagtgttataaaaaagggaaggataaaacctttgacatccccttgtgtctcaaaagtccacagttattcaaacaatggctttttttgtgatgagagtatttgttaaaaaaaaaaaaagacttcaagaaaaataaaagttcagtggagctgcaaataaatctggtgaataatttcatctttggtaatctcccatttcctgagttcttcctcaatccaagctgtcctgtgtagtatataacatttgggcattttctctgatatactatactctcatgttctataaatttctgtcccgtaattctaacactttacattttttctttgctatcagctatagctattcatggaagggaagaatcactaaatacttgtctagttatagcatgatgtgagcatctcctccttatccctcgatgcctggcttggtgtctggcaaacagtccataattagcagatgttgaaagaccgtttacaaagcagaatttggggatttaaagtgcaatgatacaacaaaaagatttaattacagcttccagtgttttgactatgtgaaccatatccaactacttttttgaaaatctagttctatgtaatatatttctgtggcatcaaattttagttgattgtattagtcaataggaagtggtggaaaatttctaaataaattcaactattaaataaatgcaagttccactaaatcttagtgtttggaacactgaagaacccagaatgaaacaaaattagactgaatgtaaatgtcatttaaaaatctaac

SEQ ID NO: 7148 - protein, 549 aa, Homo sapiens; identical to SEQ ID NO: 7144

SEQ ID NO: 7149 - DNA, 1100 bp, Homo sapiens
tccacttttaattctaagaaaaatagaataacgagttcaatgaagacattccagatgaagtaattgtaccaaaaaaagaaaagaaaatgactgaaaaattcaatttgccatggagaacttcagatgttttcgtcttaacattaaaaattctagcagtttgtgtgaaaacacagacagtaaacacacttatataattagaacagataaatccaataaacaaccatgatatgagctgctatgtcatctcgaatgaatactaatagagatctctaagtacacctttggaatggaaaagaaaaattctgactttattttctattttaacctttaataatttagacaatgcccaaacagtattacaattttcgaagtacttaccacacccaaatacctcagtttcagtgacagaaagtaattcaatgttcacacagggataagtagttcaacccacaatttattgaactacaaatcagattcattaaatgctatgatagttaaatcgagaataaatctctgaaaaacatcttggtgagttcttggatgtcaaagtgtataccacattattggactgtttaaattattagaagaatatgaagtacctgtcaaggtttcaacgataaaaatattttttaaaagaccctatttggtaataaattagatttatacaattgataatttcaaaataaataaaatctgagttgtaaatgcctcctaccctcaccccacccccagttatacataccttatatccattttcatttaaaccagtgaggtgacccattatatatttaagataatttctggcataatgactgcacagttttatagattcaaggctgtactattttggaatcaagtataataaataaccaaaaatgatcatgaaaaataagttttgcaagaaaagaatgttttagttaaatgaaagcttaagttacaccaagttggcagtgtttctatttgtctgacagtgacacctttgaaacactgcaatataaatcaggataccaaattctagtaacttttaaaaatgaagttactatagtttgaggctctccttcagttaactcaagtccagaaaattcaagccagtacactgc

SEQ ID NO: 7150 - protein, 38 aa, Homo sapiens
MENFRCFRLNIKNSSSLCENTDSKHTYIIRTDKSNKQP

SEQ ID NO: 7151 - DNA, 4666 bp, Homo sapiens
aagtcgcactcccgcctcatccaaggcagcctgcgtggctcccgggagcgcgcacgtcccggagcccatgccgaccgcaggcgccgtatccgcgctcgtctagcagccccggttacgcggttgcacgtcggccccagccctgaggagccggaccgatgtggaaactgctgcccgccgcgggcccggcaggaggagaaccatacagacttttgactggcgttgagtacgttgttggaaggaaaaactgtgccattctgattgaaaatgatcagtcgatcagccgaaatcatgctgtgttaactgctaacttttctgtaaccaacctgagtcaaacagatgaaatccctgtattgacattaaaagataattctaagtatggtacctttgttaatgaggaaaaaatgcagaatggcttttcccgaactttgaagtcgggggatggtattacttttggagtgtttggaagtaaattcagaatagagtatgagcctttggttgcatgctcttcttgtttagatgtctctgggaaaactgctttaaatcaagctatattgcaacttggaggatttactgtaaacaattggacagaagaatgcactcaccttgtcatggtatcagtgaaagttaccattaaaacaatatgtgcactcatttgtggacgtccaattgtaaagccagaatattttactgaattcctgaaagcagttgagtccaagaagcagcctccacaaattgaaagtttttacccacctcttgatgaaccatctattggaagtaaaaatgttgatctgtcaggacggcaggaaagaaaacaaatcttcaaagggaaaacatttatatttttgaatgccaaacagcataagaaattgagttccgcagttgtctttggaggtggggaagctaggttgataacagaagagaatgaagaagaacataatttctttttggctccgggaacgtgtgttgttgatacaggaataacaaactcacagaccttaattcctgactgtcagaagaaatggattcagtcaataatggatatgctccaaaggcaaggtcttagacctattcctgaagcagaaattggattggcggtgattttcatgactacaaagaattactgtgatcctcagggccatcccagtacaggattaaagacaacaactccaggaccaagcctttcacaaggcgtgtcagttgatgaaaaactaatgccaagcgccccagtgaacactacaacatacgtagctgacacagaatcagagcaagcagatacatgggatttgagtgaaaggccaaaagaaatcaaagtctccaaaatggaacaaaaattcagaatgctttcacaagatgcacccactgtaaaggagtcctgcaaaacaagctctaataataatagtatggtatcaaatactttggctaagatgagaatcccaaactatcagctttcaccaactaaattgccaagtataaataaaagtaaagatagggcttctcagcagcagcagaccaactccatcagaaactactttcagccgtctaccaaaaaaagggaaagggatgaagaaaatcaagaaatgtcttcatgcaaatcagcaagaatagaaacgtcttgttctcttttagaacaaacacaacctgctacaccctcattgtggaaaaataaggagcagcatctatctgagaatgagcctgtggacacaaactcagacaataacttatttacagatacagatttaaaatctattgtgaaaaattctgccagtaaatctcatgctgcagaaaagctaagatcaaataaaaaaagggaaatggatgatgtggccatagaagatgaagtattggaacagttattcaaggacacaaaaccagagttagaaattgatgtgaaagttcaaaaacaggaggaagatgtcaatgttagaaaaaggccaaggatggatatagaaacaaatgacactttcagtgatgaagcagtaccagaaagtagcaaaatatctcaagaaaatgaaattgggaagaaacgtgaactcaaggaagactcactatggtcagctaaagaaatatctaacaatgacaaacttcaggatgatagtgagatgcttccaaaaaagctgttattgactgaatttagatcactggtgattaaaaactctacttccagaaatccatctggcataaatgatgattatggtcaactaaaaaatttcaagaaattcaaaaaggtcacatatcctggagcaggaaaacttccacacatcattggaggatcagatctaatagctcatcatgctcgaaagaatacagaactagaagagtggctaaggcaggaaatggaggtacaaaatcaacatgcaaaagaagagtctcttgctgatgatctttttagatacaatccttatttaaaaaggagaagataactgaggattttaaaaagaagccatggaaaaacttcctagtaagcatctacttcaggccaacaaggttatatgaatatatagtgtatagaagcgatttaagttacaatgttttatggcctaaatttattaaataaaatgcacaaaactttgattcttttgtatgtaacaattgtttgttctgttttcaggctttgtcattgcatctttttttcatttttaaatgtgttttgtttattaaatagttaatatagtcacagttcaaaattctaaatgtacgtaaggtaaagactaaagtcacccttccaccattgtcctagctacttggttcccctcagaaaaaaattcatgatactcatttcttatgaatctttccagggatttttgagtcctattcaaattcctatttttaaataatttcctacacaaatgatagcataacatatgcagtgttctacaccttgcttttttacttagtagattaaaaattataggaatatcaatataatgtttttaatattttttcttttccattatgctgtagtcttacctaaactctggtgatccaaacaaaatggcttcagtggtgcagatgtcacctacatgttattctagtactagaaactgaagaccatgtggagacttcatcaaacatgggtttagttttcaccagaatggaaagacctgtacccctttttggtggtcttactgagctgggtgggtgtctgttttgagcttatttagagtcctagttttcctacttataaagtagaaatggtgagattgttttctttttctaccttaaagggagatggtaagaaacaatgaatgtcttttttcaaactttattgacaagtgattttcaagtctgtgttcaaaaatatattcatgtacctgtgatccagcaagaagggagttccagtcaagagtcactacaactgattagttgtttagagaatgagaaatggaacagtgaggaatggaggccatatttccatgacttcccttgtaaacagaagcaacagaagggacaagaggctggcctctacatcactctcaccttccaaatcttgtggaagtgcatctacttgccagaaccaaattaacttacttccaagttctggctgcttgcaggtggaactccagctgcaagggagttagggaaatgaaggtctttttttaaaagcttctcagccttcctagggaacagaaattgggtgagccaatctgcaatttctactacaggcattgagaccagttagattattgaaatattatagagagttatgaacacttaaattatgatagtggtatgacattggatagaacatgggatactttagaagtagaattgacagggcatattagttgatgaaatggagtcatttgagtctcttaatagccatgtatcataattaccaagtgaagctggtggaacatatggtctccattttacagttaaggaatataatggacagattaatattgttctctgtcatgcccacaatccctttctaaggaagactgccctactatagcagtttttatatttgtcaatttatgaatataatgaatgagagttctggtacctcctgtctttacaaatattggtgttgtcagtatttttcctttttaaccattccaatcggtgtgtagtgatgtttcattttggttttaatttgtatatccctgatagctataattgggtcatagaaattctttatacattctagatgcaagtctcttgtcggatatatgtattgagatattacacctagtctgtggcttgactgttttctttatgtcttttgatgaatagaagttttaaattttgacaaggtcaaatttatttttttcttttgtttgatattttttctctccaatttaaccccaagatttcagatattctgctctattatataaactttatatttttatatttgtgatctaccttgaattgatatgtatgttgtgaattatggatcagggttctttttttcccccatacaagtatccagtcattgtaacactgtttattgaaagaattatcctttcctcattaaattaccttgccaattagtaaaaaatcaattaaccataatggtggatctgtttctggactttctgtttggttacactgaaatgtttgtccatccttgcactcactcataccatactgccttgaattactgtagctgcatagatgctccttaagttgggattacattgtaataaacgcaatgtaagtt

SEQ ID NO: 7152 - protein, 754 aa, Homo sapiens; identical to SEQ ID NO: 1016

SEQ ID NO: 7153 - DNA, 4909 bp, Homo sapiens
acaaaaacatgatgttccctggaacaacctcccacatcacagatgtaaagacttttcttctcccaggaattcaaacttgaggctacatgtgctaggaaggggacaaaccacactaacagattccaaaggaatacctgcaatttaagaaactgcaaacgcacgaaactacataactggtggcgggcaagcgcccaagtcgcactcccgcctcatccaaggcagcctgcgtggctcccgggagcgcgcacgtcccggagcccatgccgaccgcaggcgccgtatccgcgctcgtctagcagccccggttacgcggttgcacgtcggccccagccctgaggagccggaccgatgtggaaactgctgcccgccgcgggcccggcaggaggagaaccatacagacttttgactggcgttgagtacgttgttggaaggaaaaactgtgccattctgattgaaaatgatcagtcgatcagccgaaatcatgctgtgttaactgctaacttttctgtaaccaacctggtatagaaaaacattttggaaatttctacagaaaaagtaaaattgttactagtcaaacagatgaaatccctgtattgacattaaaagataattctaagtatggtacctttgttaatgaggaaaaaatgcagaatggcttttcccgaactttgaagtcgggggatggtattacttttggagtgtttggaagtaaattcagaatagagtatgagcctttggttgcatgctcttcttgtttagatgtctctgggaaaactgctttaaatcaagctatattgcaacttggaggatttactgtaaacaattggacagaagaatgcactcaccttgtcatggtatcagtgaaagttaccattaaaacaatatgtgcactcatttgtggacgtccaattgtaaagccagaatattttactgaattcctgaaagcagttgagtccaagaagcagcctccacaaattgaaagtttttacccacctcttgatgaaccatctattggaagtaaaaatgttgatctgtcaggacggcaggaaagaaaacaaatcttcaaagggaaaacatttatatttttgaatgccaaacagcataagaaattgagttccgcagttgtctttggaggtggggaagctaggttgataacagaagagaatgaagaagaacataatttctttttggctccgggaacgtgtgttgttgatacaggaataacaaactcacagaccttaattcctgactgtcagaagaaatggattcagtcaataatggatatgctccaaaggcaaggtcttagacctattcctgaagcagaaattggattggcggtgattttcatgactacaaagaattactgtgatcctcagggccatcccagtacaggattaaagacaacaactccaggaccaagcctttcacaaggcgtgtcagttgatgaaaaactaatgccaagcgccccagtgaacactacaacatacgtagctgacacagaatcagagcaagcagatacatgggatttgagtgaaaggccaaaagaaatcaaagtctccaaaatggaacaaaaattcagaatgctttcacaagatgcacccactgtaaaggagtcctgcaaaacaagctctaataataatagtatggtatcaaatactttggctaagatgagaatcccaaactatcagctttcaccaactaaattgccaagtataaataaaagtaaagatagggcttctcagcagcagcagaccaactccatcagaaactactttcagccgtctaccaaaaaaagggaaagggatgaagaaaatcaagaaatgtcttcatgcaaatcagcaagaatagaaacgtcttgttctcttttagaacaaacacaacctgctacaccctcattgtggaaaaataaggagcagcatctatctgagaatgagcctgtggacacaaactcagacaataacttatttacagatacagatttaaaatctattgtgaaaaattctgccagtaaatctcatgctgcagaaaagctaagatcaaataaaaaaagggaaatggatgatgtggccatagaagatgaagtattggaacagttattcaaggacacaaaaccagagttagaaattgatgtgaaagttcaaaaacaggaggaagatgtcaatgttagaaaaaggccaaggatggatatagaaacaaatgacactttcagtgatgaagcagtaccagaaagtagcaaaatatctcaagaaaatgaaattgggaagaaacgtgaactcaaggaagactcactatggtcagctaaagaaatatctaacaatgacaaacttcaggatgatagtgagatgcttccaaaaaagctgttattgactgaatttagatcactggtgattaaaaactctacttccagaaatccatctggcataaatgatgattatggtcaactaaaaaatttcaagaaattcaaaaaggtcacatatcctggagcaggaaaacttccacacatcattggaggatcagatctaatagctcatcatgctcgaaagaatacagaactagaagagtggctaaggcaggaaatggaggtacaaaatcaacatgcaaaagaagagtctcttgctgatgatctttttagatacaatccttatttaaaaaggagaagataactgaggattttaaaaagaagccatggaaaaacttcctagtaagcatctacttcaggccaacaaggttatatgaatatatagtgtatagaagcgatttaagttacaatgttttatggcctaaatttattaaataaaatgcacaaaactttgattcttttgtatgtaacaattgtttgttctgttttcaggctttgtcattgcatctttttttcatttttaaatgtgttttgtttattaaatagttaatatagtcacagttcaaaattctaaatgtacgtaaggtaaagactaaagtcacccttccaccattgtcctagctacttggttcccctcagaaaaaaattcatgatactcatttcttatgaatctttccagggatttttgagtcctattcaaattcctatttttaaataatttcctacacaaatgatagcataacatatgcagtgttctacaccttgcttttttacttagtagattaaaaattataggaatatcaatataatgtttttaatattttttcttttccattatgctgtagtcttacctaaactctggtgatccaaacaaaatggcttcagtggtgcagatgtcacctacatgttattctagtactagaaactgaagaccatgtggagacttcatcaaacatgggtttagttttcaccagaatggaaagacctgtacccctttttggtggtcttactgagctgggtgggtgtctgttttgagcttatttagagtcctagttttcctacttataaagtagaaatggtgagattgttttctttttctaccttaaagggagatggtaagaaacaatgaatgtcttttttcaaactttattgacaagtgattttcaagtctgtgttcaaaaatatattcatgtacctgtgatccagcaagaagggagttccagtcaagagtcactacaactgattagttgtttagagaatgagaaatggaacagtgaggaatggaggccatatttccatgacttcccttgtaaacagaagcaacagaagggacaagaggctggcctctacatcactctcaccttccaaatcttgtggaagtgcatctacttgccagaaccaaattaacttacttccaagttctggctgcttgcaggtggaactccagctgcaagggagttagggaaatgaaggtctttttttaaaagcttctcagccttcctagggaacagaaattgggtgagccaatctgcaatttctactacaggcattgagaccagttagattattgaaatattatagagagttatgaacacttaaattatgatagtggtatgacattggatagaacatgggatactttagaagtagaattgacagggcatattagttgatgaaatggagtcatttgagtctcttaatagccatgtatcataattaccaagtgaagctggtggaacatatggtctccattttacagttaaggaatataatggacagattaatattgttctctgtcatgcccacaatccctttctaaggaagactgccctactatagcagtttttatatttgtcaatttatgaatataatgaatgagagttctggtacctcctgtctttacaaatattggtgttgtcagtatttttcctttttaaccattccaatcggtgtgtagtgatgtttcattttggttttaatttgtatatccctgatagctataattgggtcatagaaattctttatacattctagatgcaagtctcttgtcggatatatgtattgagatattacacctagtctgtggcttgactgttttctttatgtcttttgatgaatagaagttttaaattttgacaaggtcaaatttatttttttcttttgtttgatattttttctctccaatttaaccccaagatttcagatattctgctctattatataaactttatatttttatatttgtgatctaccttgaattgatatgtatgttgtgaattatggatcagggttctttttttcccccatacaagtatccagtcattgtaacactgtttattgaaagaattatcctttcctcattaaattaccttgccaattagtaaaaaatcaattaaccataatggtggatctgtttctggactttctgtttggttacactgaaatgtttgtccatccttgcactcactcataccatactgccttgaattactgtagctgcatagatgctccttaagttgggattacattgtaataaacgcaatgtaagtt

SEQ ID NO: 7154 - protein, 672 aa, Homo sapiens; identical to SEQ ID NO: 1014

SEQ ID NO: 7155 - DNA, 3006 bp, Homo sapiens
gaacaaaagcagatagagggtcacaggatatttattaggagatgattctggggttttgttttggttttgcttttttcttttttgtgtgattcagttttaaccggcatacagagtccacgaagaggaggctgagaagtgattaggaaagtaaaatggaaccaggttatgaagagccttgcacatttcagcgggtcaaatgcaagggcttgtgttttccttggtaggtgggagaagtcacgaagggtttcaaattgcatatgataagggcatagctagactttaggaagatgcactcagcacagggagtttttgattctgactctgtaaggtgctgtagaagtttagtgagtttgtatttaaaaggacttcagaggagaggtaatttagcagcagcttctaagccctgatgtgggaccaagaacacaggagcctctttaactgtggagctgctctagttgaaggtggggtaaatgttgccctcttagtctcatcagtggtctgacccccaagcactgaaatctcatttagtaaaagggttttgctggaaagagtgtttaaaaactcagcaagctagcaatatactattggttgtctttgagtggagatgggtgggagaaagctgtttagttagagctcttttgtaataatcttagcatggattgaaaatatagaggatcagttgaatgaaatattgtagaggcaagaactcagatgtggtgacctccaggatgtggaaatctctaagatgacagtgacctatcactatagcaattcattaactatatattcaccactgagcaaatgtttgaaattatgttaattttgacaggtacaaaatcaacatgcaaaagaagagtctcttgctgatgatctttttagatacaatccttatttaaaaaggagaagataactgaggattttaaaaagaagccatggaaaaacttcctagtaagcatctacttcaggccaacaaggttatatgaatatatagtgtatagaagcgatttaagttacaatgttttatggcctaaatttattaaataaaatgcacaaaactttgattcttttgtatgtaacaattgtttgttctgttttcaggctttgtcattgcatctttttttcatttttaaatgtgttttgtttattaaatagttaatatagtcacagttcaaaattctaaatgtacgtaaggtaaagactaaagtcacccttccaccattgtcctagctacttggttcccctcagaaaaaaattcatgatactcatttcttatgaatctttccagggatttttgagtcctattcaaattcctatttttaaataatttcctacacaaatgatagcataacatatgcagtgttctacaccttgcttttttacttagtagattaaaaattataggaatatcaatataatgtttttaatattttttcttttccattatgctgtagtcttacctaaactctggtgatccaaacaaaatggcttcagtggtgcagatgtcacctacatgttattctagtactagaaactgaagaccatgtggagacttcatcaaacatgggtttagttttcaccagaatggaaagacctgtacccctttttggtggtcttactgagctgggtgggtgtctgttttgagcttatttagagtcctagttttcctacttataaagtagaaatggtgagattgttttctttttctaccttaaagggagatggtaagaaacaatgaatgtcttttttcaaactttattgacaagtgattttcaagtctgtgttcaaaaatatattcatgtacctgtgatccagcaagaagggagttccagtcaagagtcactacaactgattagttgtttagagaatgagaaatggaacagtgaggaatggaggccatatttccatgacttcccttgtaaacagaagcaacagaagggacaagaggctggcctctacatcactctcaccttccaaatcttgtggaagtgcatctacttgccagaaccaaattaacttacttccaagttctggctgcttgcaggtggaactccagctgcaagggagttagggaaatgaaggtctttttttaaaagcttctcagccttcctagggaacagaaattgggtgagccaatctgcaatttctactacaggcattgagaccagttagattattgaaatattatagagagttatgaacacttaaattatgatagtggtatgacattggatagaacatgggatactttagaagtagaattgacagggcatattagttgatgaaatggagtcatttgagtctcttaatagccatgtatcataattaccaagtgaagctggtggaacatatggtctccattttacagttaaggaatataatggacagattaatattgttctctgtcatgcccacaatccctttctaaggaagactgccctactatagcagtttttatatttgtcaatttatgaatataatgaatgagagttctggtacctcctgtctttacaaatattggtgttgtcagtatttttcctttttaaccattccaatcggtgtgtagtgatgtttcattttggttttaatttgtatatccctgatagctataattgggtcatagaaattctttatacattctagatgcaagtctcttgtcggatatatgtattgagatattacacctagtctgtggcttgactgttttctttatgtcttttgatgaatagaagttttaaattttgacaaggtcaaatttatttttttcttttgtttgatattttttctctccaatttaaccccaagatttcagatattctgctctattatataaactttatatttttatatttgtgatctaccttgaattgatatgtatgttgtgaattatggatcagggttctttttttcccccatacaagtatccagtcattgtaacactgtttattgaaagaattatcctttcctcattaaattaccttgccaattagtaaaaaatcaattaaccat

SEQ ID NO: 7156 - protein, 93 aa, Homo sapiens [sequence omitted]

SEQ ID NO: 7157 - DNA, 1441 bp, Homo sapiens
ggacttactctataacagacttgacttgcttttgctgcatggctactgcttatttatgtaaatgtgtctgttttgagcttatttagagtcctagttttcctacttataaagtagaaatggtgagattgttttctttttctaccttaaagggagatggtaagaaacaatgaatgtcttttttcaaactttattgacaagtgattttcaagtctgtgttcaaaaatatattcatgtacctgtgatccagcaagaagggagttccagtcaagagtcactacaactgattagttgtttagagaatgagaaatggaacagtgaggaatggaggccatatttccatgacttcccttgtaaacagaagcaacagaagggacaagaggctggcctctacatcactctcaccttccaaatcttgtggaagtgcatctacttgccagaaccaaattaacttacttccaagttctggctgcttgcaggtggaactccagctgcaagggagttagggaaatgaaggtctttttttaaaagcttctcagccttcctagggaacagaaattgggtgagccaatctgcaatttctactacaggcattgagaccagttagattattgaaatattatagagagttatgaacacttaaattatgatagtggtatgacattggatagaacatgggatactttagaagtagaattgacagggcatattagttgatgaaatggagtcatttgagtctcttaatagccatgtatcataattaccaagtgaagctggtggaacatatggtctccattttacagttaaggaatataatggacagattaatattgttctctgtcatgcccacaatccctttctaaggaagactgccctactatagcagtttttatatttgtcaatttatgaatataatgaatgagagttctggtacctcctgtctttacaaatattggtgttgtcagtatttttcctttttaaccattccaatcggtgtgtagtgatgtttcattttggttttaatttgtatatccctgatagctataattgggtcatagaaattctttatacattctagatgcaagtctcttgtcggatatatgtattgagatattacacctagtctgtggcttgactgttttctttatgtcttttgatgaatagaagttttaaattttgacaaggtcaaatttatttttttcttttgtttgatattttttctctccaatttaaccccaagatttcagatattctgctctattatataaactttatatttttatatttgtgatctaccttgaattgatatgtatgttgtgaattatggatcagggttctttttttcccccatacaagtatccagtcattgtaacactgtttattgaaagaattatcctttcctcattaaattaccttgccaattagtaaaaaatcaattaaccat

SEQ ID NO: 7158 - protein, 93 aa, Homo sapiens [sequence omitted]

SEQ ID NO: 7159 - DNA, 4516 bp, Homo sapiens
aagtcgcactcccgcctcatccaaggcagcctgcgtggctcccgggagcgcgcacgtcccggagcccatgccgaccgcaggcgccgtatccgcgctcgtctagcagccccggttacgcggttgcacgtcggccccagccctgaggagccggaccgatgtggaaactgctgcccgccgcgggcccggcaggaggagaaccatacagacttttgactggcgttgagtacgttgttggaaggaaaaactgtgccattctgattgaaaatgatcagtcgatcagccgaaatcatgctgtgttaactgctaacttttctgtaaccaacctgagtcaaacagatgaaatccctgtattgacattaaaagataattctaagtatggtacctttgttaatgaggaaaaaatgcagaatggcttttcccgaactttgaagtcgggggatggtattacttttggagtgtttggaagtaaattcagaatagagtatgagcctttggttgcatgctcttcttgtttagatgtctctgggaaaactgctttaaatcaagctatattgcaacttggaggatttactgtaaacaattggacagaagaatgcactcaccttgtcatggtatcagtgaaagttaccattaaaacaatatgtgcactcatttgtggacgtccaattgtaaagccagaatattttactgaattcctgaaagcagttgagtccaagaagcagcctccacaaattgaaagtttttacccacctcttgatgaaccatctattggaagtaaaaatgttgatctgtcaggacggcaggaaagaaaacaaatcttcaaagggaaaacatttatatttttgaatgccaaacagcataagaaattgagttccgcagttgtctttggaggtggggaagctaggttgataacagaagagaatgaagaagaacataatttctttttggctccgggaacgtgtgttgttgatacaggaataacaaactcacagaccttaattcctgactgtcagaagaaatggattcagtcaataatggatatgctccaaaggcaaggtcttagacctattcctgaagcagaaattggattggcggtgattttcatgactacaaagaattactgtgatcctcagggccatcccagtacaggattaaagacaacaactccaggaccaagcctttcacaaggcgtgtcagttgatgaaaaactaatgccaagcgccccagtgaacactacaacatacgtagctgacacagaatcagagcaagcagatacatgggatttgagtgaaaggccaaaagaaatcaaagtctccaaaatggaacaaaaattcagaatgctttcacaagatgcacccactgtaaaggagtcctgcaaaacaagctctaataataatagtatggtatcaaatactttggctaagatgagaatcccaaactatcagctttcaccaactaaattgccaagtataaataaaagtaaagatagggcttctcagcagcagcagaccaactccatcagaaactactttcagccgtctaccaaaaaaagggaaagggatgaagaaaatcaagaaatgtcttcatgcaaatcagcaagaatagaaacgtcttgttctcttttagaacaaacacaacctgctacaccctcattgtggaaaaataaggagcagcatctatctgagaatgagcctgtggacacaaactcagacaataacttatttacagatacagatttaaaatctattgtgaaaaattctgccagtaaatctcatgctgcagaaaagctaagatcaaataaaaaaagggaaatggatgatgtggccatagaagatgaagtattggaacagttattcaaggacacaaaaccagagttagaaattgatgtgaaagttcaaaaacaggaggaagatgtcaatgttagaaaaaggccaaggatggatatagaaacaaatgacactttcagtgatgaagcagtaccagaaagtagcaaaatatctcaagaaaatgaaattgggaagaaacgtgaactcaaggaagactcactatggtcagctaaagaaatatctaacaatgacaaacttcaggatgatagtgagatgcttccaaaaaagctgttattgactgaatttagatcactggtgattaaaaactctacttccagaaatccatctggcataaatgatgattatggtcaactaaaaaatttcaagaaattcaaaaaggtcacatatcctggagcaggaaaacttccacacatcattggaggatcagatctaatagctcatcatgctcgaaagaatacagaactagaagagtggctaaggcaggaaatggaggtacaaaatcaacatgcaaaagaagagtctcttgctgatgatctttttagatacaatccttatttaaaaaggagaagataactgaggattttaaaaagaagccatggaaaaacttcctagtaagcatctacttcaggccaacaaggttatatgaatatatagtgtatagaagcgatttaagttacaatgttttatggcctaaatttattaaataaaatgcacaaaactttgattcttttgtatgtaacaattgtttgttctgttttcaggctttgtcattgcatctttttttcatttttaaatgtgttttgtttattaaatagttaatatagtcacagttcaaaattctaaatgtacgtaaggtaaagactaaagtcacccttccaccattgtcctagctacttggttcccctcagaaaaaaattcatgatactcatttcttatgaatctttccagggatttttgagtcctattcaaattcctatttttaaataatttcctacacaaatgatagcataacatatgcagtgttctacaccttgcttttttacttagtagattaaaaattataggaatatcaatataatgtttttaatattttttcttttccattatgctgtagtcttacctaaactctggtgatccaaacaaaatggcttcagtggtgcagatgtcacctacatgttattctagtactagaaactgaagaccatgtggagacttcatcaaacatgggtttagttttcaccagaatggaaagacctgtacccctttttggtggtcttactgagctgggtgggtgtctgttttgagcttatttagagtcctagttttcctacttataaagtagaaatggtgagattgttttctttttctaccttaaagggagatggtaagaaacaatgaatgtcttttttcaaactttattgacaagtgattttcaagtctgtgttcaaaaatatattcatgtacctgtgatccagcaagaagggagttccagtcaagagtcactacaactgattagttgtttagagaatgagaaatggaacagtgaggaatggaggccatatttccatgacttcccttgtaaacagaagcaacagaagggacaagaggctggcctctacatcactctcaccttccaaatcttgtggaagtgcatctacttgccagaaccaaattaacttacttccaagttctggctgcttgcaggtggaactccagctgcaagggagttagggaaatgaaggtctttttttaaaagcttctcagccttcctagggaacagaaattgggtgagccaatctgcaatttctactacaggcattgagaccagttagattattgaaatattatagagagttatgaacacttaaattatgatagtggtatgacattggatagaacatgggatactttagaagtagaattgacagggcatattagttgatgaaatggagtcatttgagtctcttaatagccatgtatcataattaccaagtgaagctggtggaacatatggtctccattttacagttaaggaatataatggacagattaatattgttctctgtcatgcccacaatccctttctaaggaagactgccctactatagcagtttttatatttgtcaatttatgaatataatgaatgagagttctggtacctcctgtctttacaaatattggtgttgtcagtatttttcctttttaaccattccaatcggtgtgtagtgatgtttcattttggttttaatttgtatatccctgatagctataattgggtcatagaaattctttatacattctagatgcaagtctcttgtcggatatatgtattgagatattacacctagtctgtggcttgactgttttctttatgtcttttgatgaatagaagttttaaattttgacaaggtcaaatttatttttttcttttgtttgatattttttctctccaatttaaccccaagatttcagatattctgctctattatataaactttatatttttatatttgtgatctaccttgaattgatatgtatgttgtgaattatggatcagggttctttttttcccccatacaagtatccagtcattgtaacactgtttattgaaagaattatcctttcctcattaaattaccttgccaattagtaaaaaatcaattaaccat

SEQ ID NO: 7160 - protein, 754 aa, Homo sapiens; identical to SEQ ID NO: 1016

SEQ ID NO: 7161 - DNA, 1060 bp, Homo sapiens
gaacaaaagcagatagagggtcacaggatatttattaggagatgattctggggttttgttttggttttgcttttttcttttttgtgtgattcagttttaaccggcatacagagtccacgaagaggaggctgagaagtgattaggaaagtaaaatggaaccaggttatgaagagccttgcacatttcagcgggtcaaatgcaagggcttgtgttttccttggtaggtgggagaagtcacgaagggtttcaaattgcatatgataagggcatagctagactttaggaagatgcactcagcacagggagtttttgattctgactctgtaaggtgctgtagaagtttagtgagtttgtatttaaaaggacttcagaggagaggtaatttagcagcagcttctaagccctgatgtgggaccaagaacacaggagcctctttaactgtggagctgctctagttgaaggtggggtaaatgttgccctcttagtctcatcagtggtctgacccccaagcactgaaatctcatttagtaaaagggttttgctggaaagagtgtttaaaaactcagcaagctagcaatatactattggttgtctttgagtggagatgggtgggagaaagctgtttagttagagctcttttgtaataatcttagcatggattgaaaatatagaggatcagttgaatgaaatattgtagaggcaagaactcagatgtggtgacctccaggatgtggaaatctctaagatgacagtgacctatcactatagcaattcattaactatatattcaccactgagcaaatgtttgaaattatgttaattttgacaggtacaaaatcaacatgcaaaagaagagtctcttgctgatgatctttttagatacaatccttatttaaaaaggagaagataactgaggattttaaaaagaagccatggaaaaacttcctagtaagcatctacttcaggccaacaaggttatatgaatatatagtgtatagaagcgatttaagttacaatgttttatggcctaaatttattaaataaaatgcacaaaactttg

SEQ ID NO: 7162 - protein, 39 aa, Homo sapiens
MHSAQGVFDSDSVRCCRSLVSLYLKGLQRRGNLAAASKP

SEQ ID NO: 7163 - DNA, 2570 bp, Homo sapiens
aagtcgcactcccgcctcatccaaggcagcctgcgtggctcccgggagcgcgcacgtcccggagcccatgccgaccgcaggcgccgtatccgcgctcgtctagcagccccggttacgcggttgcacgtcggccccagccctgaggagccggaccgatgtggaaactgctgcccgccgcgggcccggcaggaggagaaccatacagacttttgactggcgttgagtacgttgttggaaggaaaaactgtgccattctgattgaaaatgatcagtcgatcagccgaaatcatgctgtgttaactgctaacttttctgtaaccaacctgagtcaaacagatgaaatccctgtattgacattaaaagataattctaagtatggtacctttgttaatgaggaaaaaatgcagaatggcttttcccgaactttgaagtcgggggatggtattacttttggagtgtttggaagtaaattcagaatagagtatgagcctttggttgcatgctcttcttgtttagatgtctctgggaaaactgctttaaatcaagctatattgcaacttggaggatttactgtaaacaattggacagaagaatgcactcaccttgtcatggtatcagtgaaagttaccattaaaacaatatgtgcactcatttgtggacgtccaattgtaaagccagaatattttactgaattcctgaaagcagttgagtccaagaagcagcctccacaaattgaaagtttttacccacctcttgatgaaccatctattggaagtaaaaatgttgatctgtcaggacggcaggaaagaaaacaaatcttcaaagggaaaacatttatatttttgaatgccaaacagcataagaaattgagttccgcagttgtctttggaggtggggaagctaggttgataacagaagagaatgaagaagaacataatttctttttggctccgggaacgtgtgttgttgatacaggaataacaaactcacagaccttaattcctgactgtcagaagaaatggattcagtcaataatggatatgctccaaaggcaaggtcttagacctattcctgaagcagaaattggattggcggtgattttcatgactacaaagaattactgtgatcctcagggccatcccagtacaggattaaagacaacaactccaggaccaagcctttcacaaggcgtgtcagttgatgaaaaactaatgccaagcgccccagtgaacactacaacatacgtagctgacacagaatcagagcaagcagatacatgggatttgagtgaaaggccaaaagaaatcaaagtctccaaaatggaacaaaaattcagaatgctttcacaagatgcacccactgtaaaggagtcctgcaaaacaagctctaataataatagtatggtatcaaatactttggctaagatgagaatcccaaactatcagctttcaccaactaaattgccaagtataaataaaagtaaagatagggcttctcagcagcagcagaccaactccatcagaaactactttcagccgtctaccaaaaaaagggaaagggatgaagaaaatcaagaaatgtcttcatgcaaatcagcaagaatagaaacgtcttgttctcttttagaacaaacacaacctgctacaccctcattgtggaaaaataaggagcagcatctatctgagaatgagcctgtggacacaaactcagacaataacttatttacagatacagatttaaaatctattgtgaaaaattctgccagtaaatctcatgctgcagaaaagctaagatcaaataaaaaaagggaaatggatgatgtggccatagaagatgaagtattggaacagttattcaaggacacaaaaccagagttagaaattgatgtgaaagttcaaaaacaggaggaagatgtcaatgttagaaaaaggccaaggatggatatagaaacaaatgacactttcagtgatgaagcagtaccagaaagtagcaaaatatctcaagaaaatgaaattgggaagaaacgtgaactcaaggaagactcactatggtcagctaaagaaatatctaacaatgacaaacttcaggatgatagtgagatgcttccaaaaaagctgttattgactgaatttagatcactggtgattaaaaactctacttccagaaatccatctggcataaatgatgattatggtcaactaaaaaatttcaagaaattcaaaaaggtcacatatcctggagcaggaaaacttccacacatcattggaggatcagatctaatagctcatcatgctcgaaagaatacagaactagaagagtggctaaggcaggaaatggaggtacaaaatcaacatgcaaaagaagagtctcttgctgatgatctttttagatacaatccttatttaaaaaggagaagataactgaggattttaaaaagaagccatggaaaaacttcctagtaagcatctacttcaggccaacaaggttatatgaatatatagtgtatagaagcgatttaagttacaatgttttatggcctaaatttattaaataaaatgcacaaaactttg

SEQ ID NO: 7164 - protein, 754 aa, Homo sapiens; identical to SEQ ID NO: 1016

SEQ ID NO: 7165 - DNA, 1589 bp, Homo sapiens
aagtcgcactcccgcctcatccaaggcagcctgcgtggctcccgggagcgcgcacgtcccggagcccatgccgaccgcaggcgccgtatccgcgctcgtctagcagccccggttacgcggttgcacgtcggccccagccctgaggagccggaccgatgtggaaactgctgcccgccgcgggcccggcaggaggagaaccatacagacttttgactggcgttgagtacgttgttggaaggaaaaactgtgccattctgattgaaaatgatcagtcgatcagccgaaatcatgctgtgttaactgctaacttttctgtaaccaacctgagtcaaacagatgaaatccctgtattgacattaaaagataattctaagtatggtacctttgttaatgaggaaaaaatgcagaatggcttttcccgaactttgaagtcgggggatggtattacttttggagtgtttggaagtaaattcagaatagagtatgagcctttggttgcatgctcttcttgtttagatgtctctgggaaaactgctttaaatcaagctatattgcaacttggaggatttactgtaaacaattggacagaagaatgcactcaccttgtcatggtatcagtgaaagttaccattaaaacaatatgtgcactcatttgtggacgtccaattgtaaagccagaatattttactgaattcctgaaagcagttgagtccaagaagcagcctccacaaattgaaagtttttacccacctcttgatgaaccatctattggaagtaaaaatgttgatctgtcaggacggcaggaaagaaaacaaatcttcaaagggaaaacatttatatttttgaatgccaaacagcataagaaattgagttccgcagttgtctttggaggtggggaagctaggttgataacagaagagaatgaagaagaacataatttctttttggctccgggaacgtgtgttgttgatacaggaataacaaactcacagaccttaattcctgactgtcagaagaaatggattcagtcaataatggatatgctccaaaggcaaggtcttagacctattcctgaagcagaaattggattggcggtgattttcatgactacaaagaattactgtgatcctcagggccatcccagtacaggattaaagacaacaactccaggaccaagcctttcacaaggcgtgtcagttgatgaaaaactaatgccaagcgccccagtgaacactacaacatacgtagctgacacagaatcagagcaagcagatacatgggatttgagtgaaaggccaaaagaaatcaaagtctccaaaatggaacaaaaattcagaatgctttcacaagatgcacccactgtaaaggagtcctgcaaaacaagctctaataataatagtatggtatcaaatactttggctaagatgagaatcccaaactatcagctttcaccaactaaattgccaagtataaataaaagtaaagatagggcttctcagcagcagcagaccaactccatcagaaactactttcagccgtctaccaaaaaaagggaaagggatgaagaaaatcaagaaatgtcttcatgc

SEQ ID NO: 7166 - protein, 477 aa, Homo sapiens
MWKLLPAAGPAGGEPYRLLTGVEYVVGRKNCAILIENDQSISRNHAVLTANFSVTNLSQTDEIPVLTLKDNSKYGTFVNEEKMQNGFSRTLKSGDGITFGVFGSKFRIEYEPLVACSSCLDVSGKTALNQAILQLGGFTVNNWTEECTHLVMVSVKVTIKTICALICGRPIVKPEYFTEFLKAVESKKQPPQIESFYPPLDEPSIGSKNVDLSGRQERKQIFKGKTFIFLNAKQHKKLSSAVVFGGGEARLITEENEEEHNFFLAPGTCVVDTGITNSQTLIPDCQKKWIQSIMDMLQRQGLRPIPEAEIGLAVIFMTTKNYCDPQGHPSTGLKTTTPGPSLSQGVSVDEKLMPSAPVNTTTYVADTESEQADTWDLSERPKEIKVSKMEQKFRMLSQDAPTVKESCKTSSNNNSMVSNTLAKMRIPNYQLSPTKLPSINKSKDRASQQQQTNSIRNYFQPSTKKRERDEENQEMSS

SEQ ID NO: 7167 - DNA, 626 bp, Homo sapiens
atccaaggcagcctgcgtggctcccgggagcgcgcacgtcccggagcccatgccgaccgcaggcgccgtatccgcgctcgtctagcagccccggttacgcggttgcacgtcggccccagccctgaggagccggaccgatgtggaaactgctgcccgccgcgggcccggcaggaggagaaccatacagacttttgactggcgttgagtacgttgttggaaggaaaaactgtgccattctgattgaaaatgatcagtcgatcagccgaaatcatgctgtgttaactgctaacttttctgtaaccaacctggtatgttactaattttatttcactagtttccagtaagggggttgaaatcacaaaatattctcttggtttgtatgtgagagagagttcacaggatttgtcattttatagagctgtgtagacttttttaatgttaacaaaattaaatacttatattgtggcagtggtaccagtggtatttgttcattttgagatttgaagtttctatttcagtaatttactctttgttttagttagaaactcagaggaagtaggacatagttatttttatttgcttactaaacatttattgtttactattagtttggtgcaaaagtaatt

SEQ ID NO: 7168 - protein, 60 aa, Homo sapiens
MWKLLPAAGPAGGEPYRLLTGVEYVVGRKNCAILIENDQSISRNHAVLTANFSVTNLVCY

SEQ ID NO: 7169 - DNA, 586 bp, Homo sapiens
tgtaaacgctcgcagattgaatgacgaaataaaagaagaaactacagcacagtcaattttctccatgacagcctgagagatgtagctggtgctgccacttttccttcatttttccctgccttgaatatggtggtgatgcctggagcttcagcagccatcttatggccatgaaatggcaagcatgagaatgaaagaaaatgcactcatcatgaaaggaggaagagcagaagaaatctgggtcactggtgatatcaatggatagctgaagcagtgctgctctggatggaaaatgccctgggttctccgagacttaacaccccgccttgtgaacgcgagcaagattattctctctgagcagctcttttcacatgtgataagcttggcaagttgccctggattgaattctcacccactgtcttcacccaacccagcagagaagaaggcttgtgactgtgtaaggtgaaaatggatataccatttctgggaagagaaaagaagccaattaaaagtggggcatgtcattacactgaccagaaatgaacgtacctttttagaaataaagaatctgtatattcctgtggctctg

SEQ ID NO: 7170 - protein, 57 aa, Homo sapiens
MPWVLRDLTPRLVNASKIILSEQLFSHVISLASCPGLNSHPLSSPNPAEKKACDCVR

SEQ ID NO: 7171 - DNA, 866 bp, Homo sapiens
ggcttggtgaaccctcaaaaaggctgtcaaacacccagaggccttggggatcaggaaggagctatcatgtggtctttcatctaagagagaattgtcctgcctgatgggcttcaaaccaccagaacatcagttcttcctggttctgcagtagtctccaaccttcagactcaaacttcagcacctgttcttcagattttggacttgcagcctctataatcacatgagccaattccttatataaatttatttatacatgctgacagttggttctgtttctctggataaccctgactgttagagctgttacctcaaatttgttttcttatatttggtgtctgttttggagtacttacaagtgcttaaaatgttctttttcaattaggtgagtctcagtctctaagataatttttttattgttctattttatagattacatgttaatgtcaattaagctataaacattttattgctgatacattatcaaaatgcttttcaaacagccatttccaacagtctattctttggcaaaaaaacaatgccattctcttgccatggccaaatgtgagtgctactaacaggtaaactcttaatttgtaagtgaggctgaaatcttaaaatgccttcctgaaacttatacatgattgattttgtttatttgtgtaatttctttgttctatggtttcagcttcaattgctgagaaaatgtcaagattatttcctgagaatttcctttgtggctaagacaaaggagaagttttaattttactagaaactgtgaaacgaggcttttaaaaagtttcattaaaaaaaaaattagggaagaataggcatattcagaaaacctactttcatttaggctggattgg

SEQ ID NO: 7172 - protein, 40 aa, Homo sapiens
MIDFVYLCNFFVLWFQLQLLRKCQDYFLRISFVAKTKEKF

SEQ ID NO: 7173 - DNA, 406 bp, Homo sapiens
agaggaattcagaattcagcgggggtacattctcagctgatggagatggtcaaggggttaccgccagtctgtttcttgcgctgataatttttctagacattaaatctcaccatttgttcccaacaaagaaagaaagacaggaccaccagactctacagggtgatctgacactaacaacttaacaaccattctactgagtcaacaaatttctcctctgtgtacagacttcaaccgaagaatctaatactactgtgaagtgctgctgggcaggacacacgttcaggagacacagtaggggaacagatgaggccagagtggcccacagccggggtgaagagcccccaattatttataaagtgtttgctgcctcatttatgaaaataaatagtgcaaagctgttacaagt

SEQ ID NO: 7174 - protein, 59 aa, Homo sapiens
RNSEFSGGTFSADGDGQGVTASLFLALIIFLDIKSHHLFPTKKERQDHQTLQGDLTLTT

SEQ ID NO: 7175 - DNA, 496 bp, Homo sapiens
aagttaagattgccacctggaaactttgggctcctcttacctttaaggcaacaggctaagaaaggagttacagtgttatctggggtgattgaccaggactgtgaagatgaaatcagtctactactccacaacggagatggagatggtcaaggggttaccgccagtctgtttcttgcgctgataatttttctagacattaaatctcaccatttgttcccaacaaagaaagaaagacaggaccaccagactctacagggtgatctgacactaacaacttaacaaccattctactgagtcaacaaatttctcctctgtgtacagacttcaaccgaagaatctaatactactgtgaagtgctgctgggcaggacacacgttcaggagacacagtaggggaacagatgaggccagagtggcccacagccggggtgaagagcccccaattatttataaagtgtttgctgcctcatttatgaaaataaatagtgcaaagctgt

SEQ ID NO: 7176 - protein, 92 aa, Homo sapiens
KLRLPPGNFGLLLPLRQQAKKGVTVLSGVIDQDCEDEISLLLHNGDGDGQGVTASLFLALIIFLDIKSHHLFPTKKERQDHQTLQGDLTLTT

SEQ ID NO: 7177 - DNA, 3425 bp, Homo sapiens
acatgcatttccctgctgctatgtgaaatgtgcgtcttctccttccgccatgattaagtaagcaaacattttcctctaattcagattctttaaacaaaagttgcaaatgaatgtagccttcatctattgtaaaattaaagatggagatggtcaaggggttaccgccagtctgtttcttgcgctgataatttttctagacattaaatctcaccatttgttcccaacaaagaaagaaagacaggaccaccagactctacagggaagccaagaggaagaagggaaggagcccagaaatggagagaagctggactctagggatggatctggggatgctccacaaagtgcagctgtggagaatgcagaagaagagttggctagtgggacattcccactgaggagcatggcagggggaatgtctaatattcactaagagaattcttgaaatgtaacatttagatgaaactcttcaagtttccttaaaatacaaattcatgactctctttctttctctctctctctttctctctctctttggtatgttaaagtaatcaaggaaagggattttgttttataactgggttacacaggggagagaccagaatagctgaaagctgtgagacatgaagaaaattcaagatttaggagacatgcagaacatcagtgtctaggcaaaatggcagactgaccaacccccacacactgaatccctagagatattaggacagggatattgagaaaaatttacctttaagttgtaaaggacaaggcaactcaacatattgaatgccttgttgacaaccaggggctaatatttgggatgcatattgggcatagatgcacagaaaataatttatcagtgacattaataatatgacatctctttgttgagaatttactgctgtcttaatatcacaactctaaggggtcaacatccagaataaacttcttatcttacatatttaaaattatttgctaggctacatttttcttagaaaaatgcatatctgaaacagaatattgatttttttcctgggtcatacataaagaccatcagaaattaattattgaaaaaacactgctatactcattagagatatattttaattagattaattttgcattaacagtccatgagaagttacaactaacttgcaacgagacattaacatgcatcatgtttgatataagtaaaaatggaaatgattagaagtatacaaatataaagtatgttgctagtatatgcaagcttaaaaaacttttacctgatagaattagcaagagcagctatgttgagcttctttcagttaaaagtcattttcggctatgtctccctaaggatagaaatatcactgcttttgatctcatttagaattctgctcacttttaggaaagtagggctgtttggaaatggtcagccatatccttactgaatttcctagggcttgactgcacctactctagttaacaagtaagatatagttatatattgtattataacttctcaaagcacttatattttgattttccttcttttatgttcattatcttcatttggactactccatgtgacaaaagcagttatttttcttctaccccctaaactggaccacatcgatgctcttaggtccaaatcatattctttaagaaacaagtgttcactgaatgatttactgcattatataataggtactatacaagacacctgaggccccccacaccgtgaaaacagatgtttcttcctggagcttgcccaataggagagaaatttttaatttaccctttctcagtaaaccattatacaaaacagaagtgaaattatggacccagtgaactcaatctggctgacttgcaacccctatgtgttcataaacccactgaaatatataatttgttgtttatattaaatatgcactgaagcatgattagataaacattgaaagtaaattttaattttaaccatcagtggaagtatatggggtgatttaagtcattcatattagtttatttttatcaggtgttcctccttgtccatagtgaaatacaatacagagattatagcctgtggcttgacaggacatcttatagttggtaacaggactacattaaaaggaaaaaacaataaataaggatgtctaattatacagataaagaaagcaagttcactcactcctccaggacagcaccagagacaacgttagaaccaagagtttcaaaacctcgccttgtatggtttgcctgatgccatgattaaagaaaagggggtggggaactaagagaggaagccaaagagaaagaattcagtaccaaacagcaatattcagatgttttattaaataataggaggtgttttgaccttgctggtgaacagaggtgatctcaaaacatttgacagatataattaaggccataaggcaataattgcaaaagtcaaggagcccttgccacctccaaagcatcacgtgtggatgcaggaaccatattaacaacatgggtagtcaaggagaaagcagatagaataaagctgtacccagcaatataaagggacatgcaagtgtgtgttgtgcttaagagtaaacttagggaaaaaagctccccataacctcgagaaacgtttctggatctgagatatccattagcacatttagaaggtacctatttccattattgtgaaggagttgtaaatgaaataaacaactttaaataatacctcccttggtcaaactgcattaagtattccctgatggaattcattcatcatcattcaaacagaatggtttgcaactcaacctgcctagtgtggggtctggaattcccaccacagtcactgtgccttaagcactgttgcagcagaaggacttgaagtaacacatgaatatataatgccaatttgcatgtcagcatggattgttgaaattgaagttagttaattgtcacattgtaacaggaaaagaatccaagttttggagctggttggaactgagttttcatcttctttctctgctacttaactgtgttatcctgaacaagatactcaacctccatgagacacagtgaccatgtgaaatatatatgtaaaatgtctggcaaacatctgattcatgtaggtacccaaaattagatcattttcattttcttttgcttccttggaagttcaaaacaaaattctgaggtaagtttcaattaaaatgggtcaggcagacagattccagcaaggtcaaagcatccttttttctttaataaaatatctgaatatctgaacaagaaacaacttctgtttctcaaggttgaaatgatgaattattgaacttctgttgctgtttgttttctctcttatctccttactactacatataaatgagatatcttgctatcccactgatatctcaaattcagtatttcccaaataaaacgtaatcttttccaac

SEQ ID NO: 7178 - protein, 107 aa, Homo sapiens; identical to SEQ ID NO: 1018

SEQ ID NO: 7179 - DNA, 350 bp, Homo sapiens
agctttcactatagaagtgcccacgagctcttccaaacatattttcctttttaaataagcacatcttctagatggagatggtcaaggggttaccgccagtctgtttcttgcgctgataatttttctagacattaaatctcaccatttgttcccaacaaagaaagaaagacaggaccaccagatctagggatggatctggggatgctccacaaagtgcagctgtggagaatgcagaagaagagttggctagtgggacattcccactgaggagcatggcagggggaatgtctaatattcactaagagaattcttgaaatgtaacatttagatgaaactcttcaagtttcctt

SEQ ID NO: 7180 - protein, 42 aa, Homo sapiens
AHLLDGDGQGVTASLFLALIIFLDIKSHHLFPTKKERQDHQI

SEQ ID NO: 7181 - DNA, 266 bp, Homo sapiens
gaagacagaaataaaactaaaagctaattctctctggacttggaaaggaaggagtatcagagaagcagagaagagaaaaaagcttagaaagcaggaaagaagctgaaagcatttggaagacatcgtgaactctttgaaggcagaaactaaatgaaattcaccttcatatttacagggaccagcacagcctctagaacagaatgggtgctcaaatcaatatttctttaaaagaataaatgaatgaataaataaatgaatgcaagtgg

SEQ ID NO: 7182 - protein, 35 aa, Homo sapiens
KLILSGLGKEGVSEKQRREKSLESRKEAESIWKTS

SEQ ID NO: 7183 - DNA, 436 bp, Homo sapiens
ctggggatgatggtgagtggtgtcacttccacttccatccctttaatcctggagccgtgagtcctggctatgggagaaacagtgccatatatgggatgctgattcagagcatacacagtcttctggagaactttaccccaggtctgcaaagtattgttacctagttggcattgtaattgtgacttcaaaaggccgttccatcattttatcaattcagctgcttcaggatgacagataacatgcagactacctggtcatgtggccacgttctcatggtgatgtcagagggaagagtgccagcagaagtactctgcttagatcacatcttctatcatccccttgtccaaaatgctattcttggttcctgatctggtgttgccatcaacatgctaattgttcctgtacacttgcaaactcattaaacctgagaaagaca

SEQ ID NO: 7184 - protein, 59 aa, Homo sapiens
MWPRSHGDVRGKSASRSTLLRSHLLSSPCPKCYSWFLIWCCHQHANCSCTLANSLNLRK

SEQ ID NO: 7185 - DNA, 886 bp, Homo sapiens
gcccgagatggcagaacaagagctacaggtaattctgcttttccgtcccccctcaccactctcgctcgctcgcccgctcgcgccctcacctagccggaaaggtgggataagggggggcccctcacatggggcccgagctcggaggcggccgggcggcgcggagtcctcctggatcgtggcaatgggcagacacagagcagaaagtggcggacttgggcggccacagagcctttatgaccgaagatggaactgaaatgccatcctgttatcaagaaggagcataagaacagctagaggagagatgcaagattgaaatatcatggaatggactatggtttatcctctcttctggtcgtaaaacaccatcaggttgtaattgttcagatcagaaattcccaagcttttaataaagccttcagggagcctcatccaggggcaactgccctgtcattgggaataagtagagtgtgtgggaaatatgttgtccttggtaaaacctccccttaggaaagaaggcaagagaattgagtaagagaatgatgggccaaaaggagaaaatagagaaagaggctgcatgctacagagaacaagagcaaaattcaaaagcctggcacagttgggcttgaaaccatctgtgtaaaggggactaataatgctgacctcactgcatcacaaatgacagagtttaaaatgatggtgtttttaagggacctagcacgtattaagaatttaatacacattggttttcctcccttctcctagggattagggaaagcacatcactttgcttaaatgcgtataaaaaggcttcagactgcttcttaacaatgagaatctttgacagtgaatatgcaagccaaaaataaagagtggttgagaaactttg

SEQ ID NO: 7186 - protein, 81 aa, Homo sapiens
MAEQELQVILLFRPPSPLSLARPLAPSPSRKGGIRGGPSHGARARRRPGGAESSWIVAMGRHRAESGGLGRPQSLYDRRWN

SEQ ID NO: 7187 - DNA, 646 bp, Homo sapiens
ttggacccctgggcgggaaaggacggacgggttaagtagccaatcaccaattgcgctccagccagaggggcgatgttcttggggagcctggggatctggaagaagttcagtgtgaggacgagtgttaggaaataaggctgaagacagaggcaaccctggaggatcttctaacccatgtcaagcagttgagaatttatggagtgaaatagcaagccattgaagagtttcaagctttcatccagcttttaagggaaactaatatctcatgaaattgtgagggcctggaatcttcaaagagccaaggattctgccagactgagcaatagacttgatgagcattctccacttaagatctgaactatgagaagtcgaatcaaagcagttcttttgtaattccaaacagccatttagacatatgaagaaatgaaagtaaagcagttctaaagacaaggaagagggtcaatgaaaggtaagaaatcctgacaaaacaagaagaaaagtatttcctttggtcatggtgggcttgtttctaatgaggaagacttgggattctgaatattatgtatagcttattgaatagttatgtttaggttaattctatagtaaactatattagttctcattcttgcatgtgagttcgattctc

SEQ ID NO: 7188 - protein, 37 aa, Homo sapiens
WTPGRERTDGLSSQSPIALQPEGRCSWGAWGSGRSSV

SEQ ID NO: 7189 - DNA, 572 bp, Homo sapiens
gtgcacagagagcttcggtagcctgcgaagcagccattttcacttccacggagcagatgctggcctgggtgctggaatatggaaatgaggaagatcctgcctgaggatttcatgacagtgctgcgattaccgacgtgagccactgtgcccagcctcactttaaaaaaaaaaaaaggttatgaagcatctcaacacaagacctcctttgctcatcacaaccacccagtgaagcaggcaagacaacagaaactccccacctgtgatagatgtgaggcctgaagtctcccacatacccacggcagatgcaacgcacagcggtgaccaatggtgaaggatctaaaacctgaaaagaggccaaatgattcctcaaaaccacgcaagtacgaagtagcagagcggatctcaaatccaggttggtttcctttttacaactgcccaagtcatgagttcatagggcctggatggctgtaccggattgctctccagctggtctctctgcatccagaaatttctacaacctactgggaagcaagcagcatgctggagaccctcaaatacatgtgaaatgaagg

SEQ ID NO: 7190 - protein, 79 aa, Homo sapiens
MVKDLKPEKRPNDSSKPRKYEVAERISNPGWFPFYNCPSHEFIGPGWLYRIALQLVSLHPEISTTYWEASSMLETLKYM

SEQ ID NO: 7191 - DNA, 681 bp, Homo sapiens
gcagcaggcccaagagccaaggccccagggaagcagcaaaaaaattggaaggaaaccccaaaaacagcagaacctcccaccggcatccttagcctgatctggcccctccactggcctctgagtgtggagtgagacagagctgaaatggagaagccgggcttggctggaagcgaggagggtggaagtgaagtccgtcaccgctggtgggagtgtcggccacaacagtatgtcccctcctgcatagcttcctgaactgtgaccttgccactcttccatcacgaggtggtgtctgtttcaccacctcctgaagctgggcaggccctggaagtgatgctgtgctactcccaggcagagcctttcatgggcccggtggctttgctttctgcctcttggaagccggctacaatgaaggaagtttgtctatatcctgagaccactatgctgtgagcagcccgtgaacccaccggagaggtcttgcaggaggaaatggcccatggagagagagagaagccaaggatcacaaggcaccagacccagaacttttaatattacagaattttaacaatttctctgattctatactgtatctctcctatgcttaaagtctagaatcccaatggcattcattaacataatcactgatcttacaatatatatacaataaatttatatacgataaat

SEQ ID NO: 7192 - protein, 35 aa, Homo sapiens
MEKPGLAGSEEGGSEVRHRWWECRPQQYVPSCIAS

SEQ ID NO: 7193 - DNA, 803 bp, Homo sapiens
ggccaagttcccagataaaaatgagcagaagagagagaggaaacttctgggtcacgcttgtcaaagaaaaaggcatttcttccgttccacttcctcttcccaccctgctgctggaattctgatgtgctcgtgtccatcttcaaccacacaggtgaaggatctaaaacctgaaaagaggccaaatgattcctcaaaaccacgcaagtacgaagtagcagagcggatctcaaatccaggttggtttcctttttacaactgcccaagtcatgagttcatagggcctggatggctgtaccggattgctctccagctggtctctctgcatccagaaatttctacaacctactggggtaaaatctttctcaaccctgcttttcatcatcacatcttaaatatctcgagttggttccctattgccaaaaaaaatccattgtccatgtagggttcttctgccgaaacgaggaaagagtgagttaaatgttggtaggtgatatagagatagtaattaggcaatataattcgatgttgttgaaagagctgagctatgaaatgcattgtgataaaggggctgcctgtgtaagtaaatgggtataatgaggtgtaaaactccctttctctctctctttctgcttcataagcctttctgcttctcaagtccagacctgctgtttttggggtttccttccaatttttttgctgcttccctggggccttggctcttgggcctgctgcctcttcccactctacacctttggattccttatctttggctccaccttattgctccattctccaaagacaaa

SEQ ID NO: 7194 - protein, 106 aa, Homo sapiens
MCSCPSSTTQVKDLKPEKRPNDSSKPRKYEVAERISNPGWFPFYNCPSHEFIGPGWLYRIALQLVSLHPEISTTYWGKIFLNPAFHHHILNISSWFPIAKKNPLSM

SEQ ID NO: 7195 - DNA, 476 bp, Homo sapiens
aggtgaaggatctaaaacctgaaaagaggccaaatgattcctcaaaaccacgcaagtacgaagtagcagagcggatctcaaatccagcactccacgaagaggccttggctagctgcacatctccctacatgggtatgtcaagatcaccaactctgcttacagcagttcccagatgaaactcttcataatttcagatgcacctttaataccagtgaaggtttacctccaggcccacagtctgggtctttccagagacacccacagcaagatgtcacctgctttttgatgtcatcagagtcaaacacaaacacccaccactgtggtttccatgtctaattcgcaaatggctttaactttgagctggcccacaatgttgtattaaccccactcaggtatcatctttctccgtgggtgaacccatagtgacctttccttctgattcttcttttactctaagggcatgattttggcaaact

SEQ ID NO: 7196 - protein, 37 aa, Homo sapiens
MKLFIISDAPLIPVKVYLQAHSLGLSRDTHSKMSPAF

SEQ ID NO: 7197 - DNA, 3641 bp, Homo sapiens
aaggttgccctgctgatgtcatgcctgaccatatgacttgctccagccaatgaaatgtaagcagaagtgacatatgcagcatgaccagtggaagcttcgaagagctattgccaatttccaccctctctctggaaactgtcattagggttagggaaactgtcatgagatctgcatattttagatagaggctgcttgccttatttgggcacctaatgaaaaagacatggaggccaggtgcggtggctcatgtctgtaatcccagcactttgggaggccaaggcgagtggatcacctgaggtcaggagttcgagaccagcctgaccaacatggcaaaaccccgtctgtactaaaagtgcaaacacaaagggaactgcgtggcttgtttctacctgaacattgtcaagtgatttcatcctttgaaacacagttgtgaagtgtgtccagcagtctgagaacaagaagaagaagaaaatctaatccttcagggtgtctgtgtgccagccctgctctcagcacttcccatgtggaactcctttacttctcctaacaactccatgacatgggttagactgtgattgttcccatattgttggtagggaaactgaggcatgcaggtgttacagagctctctcaagtggcaagctttctgggtggttacagagtggcagagctggggtatcccatgatgtcaccacactgctatatggaaaagaacattaatcgagcacctacgtgcttgattctcttaattctgtgactgaactctcaaaacaccctgggttggtttcctttttacaactgcccaagtcatgagttcatagggcctggatggctgtaccggattgctctccagctggtctctctgcatccagaaatttctacaacctactggggtaaaatctttctcaaccctgcttttcatcatcacatcttaaatatctcgagttggttccctattgccaaaaaaaatccattgtccatgtagggttcttctgccgaaacgaggaaagagtgagttaaatgttggtaggtgatatagagatagtaattaggcaatataattcgatgttgttgaaagagctgagctatgaaatgcattgtgataaaggggctgcctgtgtaagtaaatgggtataatgaggtgtaaaactccctttctctctctctttctgcttcataagcctttctgcttctcaagtccagacctgctgtttttggggtttccttccaatttttttgctgcttccctggggccttggctcttgggcctgctgcctcttcccactctacacctttggattccttatctttggctccaccttattgctccattctccaaagacaaatccacaaggcataggattttacagaatatggggttacagaaacagcatagggaagtgtaaaagcctagaagcttcttacagacgcagccccttgtctgtagctcctgactcccacttaaatgtctgttggaagcaccctggggtagcagaacccagctcagaagatggggcttatccaccatgccttttcctaacctgacacccacccagataatcttttcaatatgcaaactagagcgtatcaccccctgctcagagcctttctgtgacctcccattttgcttcccaggactccttgctccttagccaggtctccaggtcctccgtgatcaggtctctgctcttctgcagcctcatctctgccattcttcaccttttgtgctccaacccaatctggttttcttctcatgctttgaacaccccaagtctgtctgcttcaggagcttcgtactggctaatcattcaccacagcatactcccatctatacggctggctcttatattatgggtctcagctaaaatgtcatcccttcaaagagaccttcttggaccacccccgccattctctatcctatttctctcttttattttctttgaagcacttacccactttcagaaactatctggcttgctcatgtgtttgtctctagattgtctacttcccctcctagactgtactctccacaagagagcaaagctgtgtctgttgcattcactgttgtcttcccagaagcaagcagcatgctggagaccctcaaatacatgtgaaatgaagggacaccttgtgttatttcacctgtttccacctggttcccaagtggcaagcttgcattgaggttacaaagtggcaaagctgggatatcacatgatgtcaccatgatgctatatgaaatgtaacattaattgagtacctatgtgaccagttctttaattctgtaagtgaactctcaaaaaaccctaggtaagtattatcaactcgaactttaacggatgaggaaactggaattttttaaaaaatgacttaaccaaacatcacagagctgtaaaccaggatttgaatgggtgagctgcactcagccttcatctcaagtcagtttgcctctttctccaagaagccacagttgatcctgaccacatcacatatgagttgcctggattgcagtcattcattcactaagcatcttttaggaggtcacatgccaggcaccgtgttaggtaatgatttctccaagtcacaggagccgtggttctgactttagaaagtttctcatctgatgggagggcaggcaagtaaatcagtaagggtggtccctgtcgggacactggttgagaaatacccaggaacactctgattgagaaatacccaaagtgcaaagtgacagggactagaggcatctccactggaccagagagctctggattcgtcttgagctaagtctctggaggtaggtgtcagctacaaggagaaaagctgtatattttgagatatgggatgcagggccttttagttccataaataagagaactatggtgtgaataccacatgccctgggctgaactaagtgggctctaggggaaggtatactgggcagggagtttggagaactggtttctgtctaatccttctctaactctgtgaccttgaatgcatcatttcccctctgagtctcagattctctttctggctggcatttaatgaaacctaaatattctagaccttctacttgttccataagtgctcagtcctacactcactctcctctggcaccaatatactgattactcattttatgcccagcagagcactgcgtgttttgaaatatacaaatagtgggaaacgaaatctttgttctggatgcagttataatttggaaagcgaggaaataaattataacaaggggaaaaaacagacacagagggattgaaatgcataacaatagagatgaaacacgaagagtgataaatgaagattgagtgtgcacaccttctggaggagccctgattgagtattttaaaatactactaaagtcatgccgtgtgacttctgaagctagctcctaagaagtccttgcagcttctgcctgcgactcttagaacacttgctttgaaggatgccagatgctgtcttaaaagtctgagcactctgaaaccatcatgctgtgaggaagcccaagctaaccacatgggcaaaaaagatgccctctgactgccaccatttgagacactctaattaagaactgcctcattgagcccatgaggccctgtgaatgataataataaattgtttttaaccac

SEQ ID NO: 7198 - protein, 44 aa, Homo sapiens
MPSRALRVLKYTNSGKRNLCSGCSYNLESEEINYNKGKKQTQRD

SEQ ID NO: 7199 - DNA, 2203 bp, Homo sapiens
cttctgcagcctcatctctgccattcttcaccttttgtgctccaacccaatctggttttcttctcatgctttgaacaccccaagtctgtctgcttcaggagcttcgtactggctaatcattcaccacagcatactcccatctatacggctggctcttatattatgggtctcagctaaaatgtcatcccttcaaagagaccttcttggaccacccccgccattctctatcctatttctctcttttattttctttgaagcacttacccactttcagaaactatctggcttgctcatgtgtttgtctctagattgtctacttcccctcctagactgtactctccacaagagagcaaagctgtgtctgttgcattcactgttgtcttcccagaagcaagcagcatgctggagaccctcaaatacatgtgaaatgaagggacaccttgtgttatttcacctgtttccacctggttcccaagtggcaagcttgcattgaggttacaaagtggcaaagctgggatatcacatgatgtcaccatgatgctatatgaaatgtaacattaattgagtacctatgtgaccagttctttaattctgtaagtgaactctcaaaaaaccctaggtaagtattatcaactcgaactttaacggatgaggaaactggaattttttaaaaaatgacttaaccaaacatcacagagctgtaaaccaggatttgaatgggtgagctgcactcagccttcatctcaagtcagtttgcctctttctccaagaagccacagttgatcctgaccacatcacatatgagttgcctggattgcagtcattcattcactaagcatcttttaggaggtcacatgccaggcaccgtgttaggtaatgatttctccaagtcacaggagccgtggttctgactttagaaagtttctcatctgatgggagggcaggcaagtaaatcagtaagggtggtccctgtcgggacactggttgagaaatacccaggaacactctgattgagaaatacccaaagtgcaaagtgacagggactagaggcatctccactggaccagagagctctggattcgtcttgagctaagtctctggaggtaggtgtcagctacaaggagaaaagctgtatattttgagatatgggatgcagggccttttagttccataaataagagaactatggtgtgaataccacatgccctgggctgaactaagtgggctctaggggaaggtatactgggcagggagtttggagaactggtttctgtctaatccttctctaactctgtgaccttgaatgcatcatttcccctctgagtctcagattctctttctggctggcatttaatgaaacctaaatattctagaccttctacttgttccataagtgctcagtcctacactcactctcctctggcaccaatatactgattactcattttatgcccagcagagcactgcgtgttttgaaatatacaaatagtgggaaacgaaatctttgttctggatgcagttataatttggaaagcgaggaaataaattataacaaggggaaaaaacagacacagagggattgaaatgcataacaatagagatgaaacacgaagagtgataaatgaagattgagtgtgcacaccttctggaggagccctgattgagtattttaacacagaagtgggtgagagcaaagttgtgtcagagtaagacaatgacaccaagccagatggttatcaaaatccacaggaacaaatgaagagaaccagaaattgcaaataagaaggacagagtaccagagaggagagagaggtacagagaattatggaggtggcttccgttgagtatgcagctaagtaatgattaatgcatacatataagaaactactggatgacagagaaagaaccacaagcaatttaaagaatactactaaagtcatgccgtgtgacttctgaagctagctcctaagaagtccttgcagcttctgcctgcgactcttagaacacttgctttgaaggatgccagatgctgtcttaaaagtctgagcactctgaaaccatcatgctgtgaggaagcccaagctaaccacatgggcaaaaaagatgccctctgactgccaccatttgagacactctaattaagaactgcctcattgagcccatgaggccctgtgaatgataataataaattgtttttaaccac

SEQ ID NO: 7200 - protein, 44 aa, Homo sapiens; identical to SEQ ID NO: 7198

SEQ ID NO: 7201 - DNA, 535 bp, Homo sapiens
aagcatcttttaggaggtcacatgccaggcaccgtgttagagcactgcgtgttttgaaatatacaaatagtgggaaacgaaatctttgttctggatgcagttataatttggaaagcgaggaaataaattataacaaggggaaaaaacagacacagagggattgaaatgcataacaatagagatgaaacacgaagagtgataaatgaagattgagtgtgcacaccttctggaggagccctgattgagtattttaaaatactactaaagtcatgccgtgtgacttctgaagctagctcctaagaagtccttgcagcttctgcctgcgactcttagaacacttgctttgaaggatgccagatgctgtcttaaaagtctgagcactctgaaaccatcatgctgtgaggaagcccaagctaaccacatgggcaaaaaagatgccctctgactgccaccatttgagacactctaattaagaactgcctcattgagcccatgaggccctgtgaatgataataataaattgtttttaaccact

SEQ ID NO: 7202 - protein, 53 aa, Homo sapiens [sequence omitted]

SEQ ID NO: 7203 - DNA, 614 bp, Homo sapiens
aagcatcttttaggaggtcacatgccaggcaccgtgttagagcactgcgtgttttgaaatatacaaatagtgggaaacgaaatctttgttctggatgcagttataatttggaaagcgaggaaataaattataacaaggggaaaaaacagacacagagggattgaaatgcataacaatagagatgaaacacgaagagtgataaatgaagattgagtgtgcacaccttctggaggagccctgattgagtattttaaaatactactaaagtcatgccgtgtgacttctgaagctagctcctaagaagtccttgcagcttctgcctgcgactcttagaacacttgctttgaaggatgccagatgctgtcttaaaagtctgagcactctgaaaccatcatgctgtgaggaagcccaagctaaccacatgggcaaaaaagatgccctctgactgccaccatttgagacactctaattaagaactgcctcattgagcccatgaggccctgtgaatgataataataaattgtttttaaccactatgtttttggatttgttataagtttatagataacaagaaaaagttatattagcatggtaataaaattatggatatgtgt

SEQ ID NO: 7204 - protein, 53 aa, Homo sapiens [sequence omitted]

SEQ ID NO: 7205 - DNA, 474 bp, Homo sapiens
cagagcactgcgtgttttgaaatatacaaatagtgggaaacgaaatctttgttctggatgcagttataatttggaaagcgaggaaataaattataacaaggggaaaaaacagaatactactaaagtcatgccgtgtgacttctgaagctagctcctaagaagtccttgcagcttctgcctgcgactcttagaacacttgctttgaaggatgccagatgctgtcttaaaagtctgagcactctgaaaccatcatgctgtgaggaagcccaagctaaccacatgggcaaaaaagatgccctctgactgccaccatttgagacactctaattaagaactgcctcattgagcccatgaggccctgtgaatgataataataaattgtttttaaccactatgtttttggatttgttataagtttatagataacaagaaaaagttatattagcatggtaataaaattatggatatgtgtaa

SEQ ID NO: 7206 - DNA, 574 bp, Homo sapiens
agcactgcgtgttttgaaatatacaaatagtgggaaacgaaatctttgttctggatgcagttataatttggaaagcgaggaaataaattataacaaggggaaaaaacagacacagagggattgaaatgcataacaatagagatgaaacacgaagagtgataaatgaagattgagtgtgcacaccttctggaggagccctgattgagtattttaaaatactactaaagtcatgccgtgtgacttctgaagctagctcctaagaagtccttgcagcttctgcctgcgactcttagaacacttgctttgaaggatgccagatgctgtcttaaaagtctgagcactctgaaaccatcatgctgtgaggaagcccaagctaaccacatgggcaaaaaagatgccctctgactgccaccatttgagacactctaattaagaactgcctcattgagcccatgaggccctgtgaatgataataataaattgtttttaaccactatgtttttggatttgttataagtttatagataacaagaaaaagttatattagcatggtaataaaattatggatatgtgt

SEQ ID NO: 7207 - protein, 40 aa, Homo sapiens
ALRVLKYTNSGKRNLCSGCSYNLESEEINYNKGKKQTQRD

SEQ ID NO: 7208 - DNA, 445 bp, Homo sapiens
agcatggggcctgataaatagtaagcccttggtaataattacatcttccgtgatgctagacacagagggattgaaatgcataacaatagagatgaaacacgaagagtgataaatgaagattgagtgtgcacaccttctggaggagccctgattgagtattttaaaatactactaaagtcatgccgtgtgacttctgaagctagctcctaagaagtccttgcagcttctgcctgcgactcttagaacacttgctttgaaggatgccagatgctgtcttaaaagtctgagcactctgaaaccatcatgctgtgaggaagcccaagctaaccacatgggcaaaaaagatgccctctgactgccaccatttgagacactctaattaagaactgcctcattgagcccatgaggccctgtgaatgataataataaattgtttttaaccact

SEQ ID NO: 7209 - DNA, 3273 bp, Homo sapiens
gtttctgccttccgggtttgagagtttaggaccctgggttggtggggtcagagggagagggggtaccttcctcccggaccgctgggggtgcagggcgccttgggtgtagcacccagaacaggtttctgatctctaacttggctgtgatcattgtgatggagcaagaaaaaaaactgttggtctcagattctaacagctttatggagagggagagtttgaaaagccctttcacaggagatacaagtatgaataatttggaaactgttcaccacaataattctaaggcagataaacttaaagagaaaccttcagaatggtctaaaagacatagaccacaacattataagcatgaggatgcaaaagaaatgccactgacatgggttcaagatgagatttggtgtcatgattcctatgagagtgatggcaagtcagagaattggggaaattttatagctaaagaggaggaaaaacccaatcaccaggaatgggactcaggagaacataccaatgcctgtgtccagcagaattcatcctttgtagacagaccctataaatgttccgaatgttggaaaagcttcagtaatagttctcatttgcgtactcaccagaggacccactcaggagaaaagccttataaatgctctgagtgtgcaaaatgtttttgtaacagttctcacctgattcagcatctaagaatgcacacaggagagaagccctaccagtgtggtgaatgtgggaaaagcttcagcaatacctcccatcttattatccatgagagaactcacacgggagagaaaccctacaaatgtcccgagtgtgggaagagattcagcagcagctctcaccttattcagcatcacagatcacatacaggtgaaaaaccatatgaatgttctgtctgcggaaaaggcttcagtcacagctatgtcctaatagaacatcagaggactcacactggagaaaaaccttataagtgccctgattgtgggaagagttttagtcagagttccagcctcattcgccaccagcggacacacacaggtgagaagccctacaaatgtcttgagtgtgaaaaaagctttggttgtaattctactctaataaaacatcagagaatacatacaggagaaaagccttatcaatgtccagaatgtgggaagaattttagtcgtagttcaaaccttattacacaccagaaaatgcacacaggagagaaatcctatgaaagttctgaatatgaggaaagtttgggtcagaactgcaatgtgatagaagaatgcagaatccagttaggagagaaaccatatagatgttgtgaatgtgggaagagttttggccttagctcccatctcattagacatcagagaacacatacaggagaaaaaccttacagatgttctgagtgctggaaaactttcagtcagagttccaccctggtgattcaccaaaggacacatacaggagagaaaccttataaatgtcctgattgtggtgaaagcttcagtcagagctttaaccttatcaggcaccggaggacccacataggggaaaaaccttacaaatgtaccagctgtgagaaatgcttcagcagaagtgcctacctcagtcagcatcggaaaattcacgtagaaaagccttttgagtctcccgacgttggggattttcctcatgaatggacttggaaaaactgttcaggggaaatgcccttcatctcttcattttccgtctcaaattcatcttcctgagtcccaaagcctggttggtgatggttttttcttccttgttggaccatgacaatttaggtattctgtgattgttgtgctataaagtttctttgatgtgtttgtcaaaacatttggaaaaagtcaacctcccagtttaaaggatgggaagaccccaatcaccaggttattggatctgtccagtgagagattcatccaccaaggatgaagaaaggaggacttttaaaaatttaaggtaagatagtaatagcttcaaaagaacacatacagagtaatcctgagagtaagcaaaggaaccatgagaaccgaagctagaattgctattgaattactttattttctcttcccttattgggtagagatacatcattactggcctcaggggtttacccaaagaaagggtatttttgagcaaataatgtgatttcctggctattttgttgggggcttaagatttttttttttcaaatgcatttttagtcactaaaaattaactgtcgtaccatctagaactatactgtccagtaccatagcctctagccgtatgtagctatttgtattaagattaattgaaattttaaatccagttcctcagtcacactagccactttctaagtgctcagtagctctgtgtgaccagcggctactgtattggatattatagaaggttctttcattcaagatcatcattcttgacagacccataaatatttcctataaagactgtagaagtgtgttctggagggtttgctctccaaaaagaattgtaatatagagtagaattgggatagagtattgaagacactgggtttagacattggatattttaatgattgtgtgttctaattcatgtgctgccaactgagttatctagtgatatgacctcactgtcttgaccaaagccagaatagaaggcaggattcctgaattctatcttaaaatttgcaatgaagagccttttccctaaattatcccattatgtaattcttggtcagctcaagaactgggttctttttctaataattaactcactaaatctgagccagtgtccaaggacagtttgtcattaaggagtactgagacttcttagctttggtactgacagttttcttttgcctcttgacataattggtatatggatctgataactgaggtcccatcttccctactcattcctatgggaatgatgctttggaaattattagatatatcctattcccttcctcccatttttttcctgctagtgcaaaaggtagatgagtaggaagattaggactcctgagttgcccatgatttcatctaatttttggattcagaatgtattttatgaataatatgcagagatgcatattaggaatgtgaagccagaatgggtcagttgtagctgctgcaaagttctgtagctgatggtcatttaattgcatgggggttattttatctttcatgattgtggtgcacctgatgctggcggggtatttgtgtgtttttgtattgttatttgattacaaaaataaagcaaaaactaacaaat

SEQ ID NO: 7210 - protein, 529 aa, Homo sapiens
MEQEKKLLVSDSNSFMERESLKSPFTGDTSMNNLETVHHNNSKADKLKEKPSEWSKRHRPQHYKHEDAKEMPLTWVQDEIWCHDSYESDGKSENWGNFIAKEEEKPNHQEWDSGEHTNACVQQNSSFVDRPYKCSECWKSFSNSSHLRTHQRTHSGEKPYKCSECAKCFCNSSHLIQHLRMHTGEKPYQCGECGKSFSNTSHLIIHERTHTGEKPYKCPECGKRFSSSSHLIQHHRSHTGEKPYECSVCGKGFSHSYVLIEHQRTHTGEKPYKCPDCGKSFSQSSSLIRHQRTHTGEKPYKCLECEKSFGCNSTLIKHQRIHTGEKPYQCPECGKNFSRSSNLITHQKMHTGEKSYESSEYEESLGQNCNVIEECRIQLGEKPYRCCECGKSFGLSSHLIRHQRTHTGEKPYRCSECWKTFSQSSTLVIHQRTHTGEKPYKCPDCGESFSQSFNLIRHRRTHIGEKPYKCTSCEKCFSRSAYLSQHRKIHVEKPFESPDVGDFPHEWTWKNCSGEMPFISSFSVSNSSS

SEQ ID NO: 7211 - DNA, 924 bp, Homo sapiens
ggcgctctggggccgggatcggcgtcggggtcggggttggggttggttcaccgcagcagccccagctcctgcgccctccctggactgaggtgtgctcgctttgaggagaagcctggagtgatccgctgcctcgggtcggaacgtttccattcattccgctagcatttattgagcgcttatgatatgtcagtccccggagtccgaaagaggaatcagacacagcttccctgccctgtatgttacaagtcactctgcctctgtggggagaaggcaacttcttcatgaactcgaacatcctttgcaattctgtatcagatacttggcagggtttaaaaaaacatggcacctcttataacttttcacccccaatattatgttttatctgctaataaaataattatttggtaaaacacccgcacaggcgttcacttgaccctcaaaacaactttgatttttaaaatgaggaaaatgaaaattaaagaggttaaatggcttgactaaatcacagctgtgattaaatcgtaatgatgaaaccaaaagtcaaagtcctggtctccaaatcttgtggttccccagtatgcataattatcaataactgccttgctttccaatacttttattctttcttctacaatattcctcactgttaccagtaagtttggctgtctgaactgacatcaaatttaaaaggactgcagaaaagagaatcagttcaatgtatgggaaatcatttcctgaagagaattcttcaataaactgcttattggtatctgtgagttctgttttgttaaaataatagaggagcagctgactcttttattatttttaaatttttgtgacagagtctcgctctgtggcccaggctggagtgcagtggcgcaatctcagctcactgcaacctctgcctcctagcttcaagcgatt

SEQ ID NO: 7212 - protein, 58 aa, Homo sapiens
MICQSPESERGIRHSFPALYVTSHSASVGRRQLLHELEHPLQFCIRYLAGFKKTWHLL

SEQ ID NO: 7213 - DNA, 3019 bp, Homo sapiens
gagccccgcccccggtccctcgtctgggccgagcccgcccagctggctgagacgcgtggagcctggcggcgagtgggggcgtgcgacggttactctggttactggggccgcgccgcgctggcgagagccgccgcccgcgagggatgctggtgaggaagccgtcgggagccgccgccgccatctgagggaggtaccctggaaaccaccttttatcggtggggaagtgcagtcgcggtgggcggctctgggggccagcgaaacgggaggcctctaaatctttaggttggggctgcattgccctggagccgcactcttgagtccgaggccatcttttgttggagaaggcgtcggcgttggcgttttcccgaggttgggctgtacagtgtctccgtccgcggaaaaagaagcctctgaacccgcgccggcccgcagcccccgtgccttccggccgctgctcgccgtcgccagaggctaggccacgtttcccccagtgccgaggtgtttctgtgaccctccctccactcccattcccttctgaaagggcacctgctcttggtgagaaaagaaattatagcacgaagagccagtatcagaagagtatccatcacccgcagcaaccgctcagggaacaccatcaaaaaagaaaaaaagggaatatctggatttcctgggcgaggaggagcgagtctgctcgggagctgttccagcaggcgatttttaaatactgctttctacgccctatacaacttggcttcacatacttttacactaactttatatgatttttaaaaactggtctgatcggacttctcgtcctgggacactgtttactggagtctggccggctctccgtgctcctcttggtacctcattttggggagaaccttaaacccactcgagcagataatctccgccttgaccggtgccaccaaagaagccttggaaccatgtggacttttctgggcattgccactttcacctatttttataagaagttcggggacttcatcactttggccaacagggaggtcctgttgtgcgtgctggtgttcctctcgctgggcctggtgctctcctaccgctgtcgccaccgaaacgggggtctcctcgggcgccagcagagcggctcccagttcgccctcttctcggatattctctcaggcctgcctttcattggcttcttctgggccaaatccccccctgaatcagaaaataaggagcagctcgaggccaggaggcgcagaaaaggaaccaatatttcagaaacaagcttaataggaacagctgcctgtacatcaacatcttctcagaatgacccagaagttatcatcgtgggagctggcgtgcttggctctgctttggcagctgtgctttccagagatggaagaaaggtgacagtcattgagagagacttaaaagagcctgacagaatagttggagaattcctgcagccgggtggttatcatgttctcaaagaccttggtcttggagatacagtggaaggtcttgatgcccaggttgtaaatggttacatgattcatgatcaggaaagcaaatcagaggttcagattccttaccctctgtcagaaaacaatcaagtgcagagtggaagagctttccatcacggaagattcatcatgagtctccggaaagcagctatggcagagcccaatgcaaagtttattgaaggtgttgtgttacagttattagaggaagatgatgttgtgatggggagttcagtacaaggataaagagactggagatatcaaggaactccatgctccactgactgttgttgcagatgggcttttctccaagttcaggaaaagcctggtctccaataaagtttctgtatcatctcattttgttggctttcttatgaagaatgcaccacagtttaaagcaaatcatgctgaacttattttagctaacccgagtccagttctcatctaccagatttcatccagtgaaactcgagtacttgttgacattagaggagaaatgccaaggaatttaagagaatacatggttgaaaaaatttacccacaaatacctgatcacctgaaagaaccattcttagaagccactgacaattctcatctgaggtccatgccagcaagcttccttcctccttcatcagtgaagaaacgaggtgttcttcttttgggagacgcatataatatgaggcatccacttactggtggaggaatgactgttgcttttaaagatataaaactatggagaaaactgctaaagggtatccctgacctttatgatgatgcagctattttcgaggccaaaaaatcattttactgggcaagaaaaacatctcattcctttgtcgtgaatatccttgctcaggctctttatgaattattttctgccacagatgattccctgcatcaactaagaaaagcctgttttctttatttcaaacttggtggcgaatgtgttgcgggtcctgttgggctgctttctgtattgtctcctaaccctctagttttaattggacacttctttgctgttgcaatctatgccgtgtatttttgctttaagtcagaaccttggattacaaaacctcgagcccttctcagtagtggtgctgtattgtacaaagcgtgttctgtaatatttcctctaatttactcagaaatgaagtatatggttcattaagcttaaaggggaaccatttgtgaatgaatatttggaacttaccaagtcctaagagacttttggaagaggatatatatagcatagtaccataccacttataaagtggaaactcttggaccaagatttggattaatttgtttttgaagttttttgtatataaatatgtaaatacatgctttaatttgcaatttaaaatgaaggggttaaataagttagacatttaaaagaaatgattgttaccataaattagtgctaatgctgaggagaactacagtttttcttttgaatttagtatttgagatgagttgttgggacatgcaaataaaatgaagaatgaactttcgtg

SEQ ID NO: 7214 - protein, 267 aa, Homo sapiens
MWTFLGIATFTYFYKKFGDFITLANREVLLCVLVFLSLGLVLSYRCRHRNGGLLGRQQSGSQFALFSDILSGLPFIGFFWAKSPPESENKEQLEARRRRKGTNISETSLIGTAACTSTSSQNDPEVIIVGAGVLGSALAAVLSRDGRKVTVIERDLKEPDRIVGEFLQPGGYHVLKDLGLGDTVEGLDAQVVNGYMIHDQESKSEVQIPYPLSENNQVQSGRAFHHGRFIMSLRKAAMAEPNAKFIEGVVLQLLEEDDVVMGSSVQG

SEQ ID NO: 7215 - DNA, 874 bp, Homo sapiens
gagcccgcccagctggctgagacgcgtggagcctggcggcgagtgggggcgtgcgacggttactctggtgtttctgtgaccctccctccactcccattcccttctgaaagggcacctgctcttggtgagaaaagaaattatagcacgaagagccagtatcagaagagtatccatcacccgcagcaaccgctcagggaacaccatcaaaaaagaaaaaaagggaatatctggatttcctgggcgaggaggagcgagtctgctcgggagctgttccagcaggcgatttttaaatactgctttctacgccctatacaacttggcttcacatacttttacactaactttatatgatttttaaaaactggtctgatcggacttctcgtcctgggacactgtttactggagtctggccggctctccgtgctcctcttggtacctcattttggggagaaccttaaacccactcgagcagataatctccgccttgaccggtgccaccaaagaagccttggaaccatgtggacttttctgggcattgccactttcacctatttttataagaagttcggggacttcatcactttggccaacagggaggtcctgttgtgcgtgctggtgttcctctcgctgggcctggtgctctcctaccgctgtcgccaccgaaacgggggtctcctcgggcgccagcagagcggctcccagttcgccctcttctcggatattctctcaggcctgcctttcattggcttcttctgggccaaatccccccctgaatcagaaaataaggagcagctcgaggccaggagggtaggttgatttcaaagcgggcagatgaatgtcttatttaggagtaggattgggttcactcaaatat

SEQ ID NO: 7216 - protein, 99 aa, Homo sapiens
MWTFLGIATFTYFYKKFGDFITLANREVLLCVLVFLSLGLVLSYRCRHRNGGLLGRQQSGSQFALFSDILSGLPFIGFFWAKSPPESENKEQLEARRVG

SEQ ID NO: 7217 - DNA, 5593 bp, Homo sapiens
cggccgcgacgaggggcagcggaggaccccgcagggcatcgggctcctggccaagaccccgctgagccgcccagtcaagagaaacaacgccaagtaccggcgcatccaaactttgatctacgacgccctggagagaccgcggggctgggcgctgctttaccacgcgttggtgttcctgattgtcctggggtgcttgattctggctgtcctgaccacattcaaggagtatgagactgtctcgggagactggcttctgttactggagacatttgctattttcatctttggagccgagtttgctttgaggatctgggctgctggatgttgctgccgatacaaaggctggcggggccgactgaagtttgccaggaagcccctgtgcatgttggacatctttgtgctgattgcctctgtgccagtggttgctgtgggaaaccaaggcaatgttctggccacctccctgcgaagcctgcgcttcctgcagatcctgcgcatgctgcggatggaccggagaggtggcacctggaagcttctgggctcagccatctgtgcccacagcaaagaactcatcacggcctggtacatcggtttcctgacactcatcctttcttcatttcttgtctacctggttgagaaagacgtcccagaggtggatgcacaaggagaggagatgaaagaggagtttgagacctatgcagatgccctgtggtggggcctgatcacactggccaccattggctatggagacaagacacccaaaacgtgggaaggccgtctgattgccgccaccttttccttaattggcgtctccttttttgcccttccagcgggcatcctggggtccgggctggccctcaaggtgcaggagcaacaccgtcagaagcactttgagaaaaggaggaagccagctgctgagctcattcaggctgcctggaggtattatgctaccaaccccaacaggattgacctggtggcgacatggagattttatgaatcagtcgtctcttttcctttcttcaggcaaaacagctggaggcagcatccagccaaaagctgggtctcttggatcgggttcgcctttctaatcctcgtggtagcaatactaaaggaaagctatttacccctctgaatgtagatgccatagaagaaagtccttctaaagaaccaaagcctgttggcttaaacaataaagagcgtttccgcacggccttccgcatgaaagcctacgctttctggcagagttctgaaggtaatgcctttttatctccctccctgtctcttccacttcttcctcccccaagtccacttccttcctcacctctccctttgcccacttaagaacctttgactccacaaggtaactctctcccttccctcgacaagccaacttcttgcttccctaactcctcctgtcccttgggctgaggcattgtgatgtattcccaggagtctagggctgcaggctcccaagttaggagcctggaaacctgtcaccttggtttctaagggtccgccccgaccccccgccccatgattggattgttatggaggtcaacttgaaggatggggcggtgccaggtgcaaagcaatttagagaccagggcacgggaagagtggcagaaaagcgccctctggaggctgtaggagccatggcctcatgtgcctcttttacttatgcaaagggaggacatgcagaaaagcctgtttcctcagtgtctgagcccacccaggccctcaatcctcattgtatcattcagttctctccaaggcctctgatgtgacagtgtgtgttgtttgctggcttctgtgtcctttgctggcttctggctctgggggccactctggaactgcggagctcacttctcctccctgctagccttttccctcactaccagtcatgagctgcgcacacttttgacttggacttctgggtaatagaatgagggtgccaagaaaggctgaacagcatcacagcttgagaataccgtggagtcttgcaacgtggaaataaagactctggggattgacacatccagaggcgtggaaggctttgaccgaacagtggggtccccaagccttttccaggtctgtggcctgccgttcatatgtgtgtctccctcccagatgccgggacaggtgaccccatggcggaagacaggggctatgggaatgacttccccatcgaagacatgatccccaccctgaaggccgccatccgagccgtcagaattctacaattccgtctctataaaaaaaaattcaaggagactttgaggccttacgatgtgaaggatgtgattgagcagtattctgccgggcatctcgacatgctttccaggataaagtaccttcagacgagaatagatatgattttcacccctggacctccctccacgccaaaacacaagaagtctcagaaagggtcagcattcaccttcccatcccagcaatctcccaggaatgaaccatatgtagccagaccatccacatcagaaatcgaagaccaaagcatgatggggaagtttgtaaaagttgaaagacaggttcaggacatggggaagaagctggacttcctcgtggatatgcacatgcaacacatggaacggttgcaggtgcaggtcacggagtattacccaaccaagggcacctcctcgccagctgaagcagagaagaaggaggacaacaggtattccgatttgaaaaccatcatctgcaactattctgagacaggccccccggaaccaccctacagcttccaccaggtgaccattgacaaagtcagcccctatgggttttttgcacatgaccctgtgaacctgccccgagggggacccagttctggaaaggttcaggcaactcctccttcctcagcaacaacgtatgtggagaggcccacggtcctgcctatcttgactcttctcgactcccgagtgagctgccactcccaggctgacctgcagggcccctactcggaccgaatctccccccggcagagacgtagcatcacgcgagacagtgacacacctctgtccctgatgtcggtcaaccacgaggagctggagaggtctccaagtggcttcagcatctcccaggacagagatgattatgtgttcggccccaatggggggtcgagctggatgagggagaagcggtacctcgccgagggtgagacggacacagacacggaccccttcacgcccagcggctccatgcctctgtcgtccacaggggatgggatttctgattcagtatggaccccttccaataagcccatttaaaagaggtcactggctgacccctccttgtaatgtagacagactttgtatagttcacttactcttacacccgacgcttaccagcggggacaccaatggctgcatcaaatgcatgcgtgtgcgtggtggccccacccaggcaggggcttcccacagcctcttcctccccatgtcaccacaacaaagtgcttccttttcagcatggtttgcatgactttacactatataaatggttccgctaatctcttctaggatacacatttatctgctgttcttacttttaatcacgattggaccagtacagggagaaattactgatgagccatgctatttgtctgtttggttggctggtttgggttttggtttggtaagcagagaaagtagtttaagttatttctaggatcactgccctcttgtgtaaaacgctccagcaattaactgtttttgaaagcaaggaaataattttctcaacaaaaccacattgtgtatcagtggggctgcctactgagctaacattaggaaaggaatgagatagtcattgtgtctctaaaacaaagaatttaaacaaatatttaaggcaaaaccttttaaaagctctccaaaagacctcacttggcctgatgttacttagtatcatgcctcagtttccttatctgtaaaaagtggtggtaatcccaagtgtagcatttctgatgagttatgaattggcagggagaaaacacacacacacacacacacacacacacacacacacacatacacaaagttaaaatagtttccaatttatgtagccaaggacaatggaatttatcagaagtgaagtgcccctctgggcaggagctgagttcagtgcctttaaaatgaatttccaactctcatttcttcccatgatactgaagtacaaaatatccatctaaaatagaaattaaagtcaagaaggcacacagaaattttctagtccaaggacttccttttataaatgaagaatcttaggctcaggtaaagtgacatacccagagtcactcagttgtcccatagagaaccaggactcaaaagtcaggtctgcccactctccctgaccttgtttcccctcaccacaccattcttccatttatataatgcatcctagagattgtgtcaagatatatgactttgtgtcgcgtggaaagcacccagtttatccagcaggagggggatttccacttttattgcaaaacatgcttgcttgatgcaatgcatttcagatctagaaaaaaataatgcaagcaagctacatttacagatgtgtaaacaggcaaaatttccagaaccgtccaattttacttttccaaatttatggaaccaacccagattttttaaatgaaaatactaaaaccatatgtaaccgtaagacaagctaaaatgtaagcagacagcctgggaagcactgccctactgtacaggtgtgatattaagcacaagccatcctctggcctcttatgagatgttgttattctctgaaaaactttgatggaaaaggtttctgttaggcttagactgaattagctaaatgaccatgccacagtattattgtatcactcttctcacacacctaggcactggttgtggatagttgccatggtgacaatcaagataatccagatgacctaaacaaatgtctgtatgcagctgacactgctattctccctcacagtcttgtcaagagccacagtagctatggcagacatttggttgatggtttcatcatttcctaatacgagagtctggcactatgttggagagaggaatcacttcctcagagataggttcctttcaactcacatgtcaacagttactgtacaaaaagctcagaatacagtaatgattagagcttgacccctgactttaggaacttagaaccaaagcccaaagtcccaggccaagggcagacattgtgagcagcagaagggtgttttttatggagagccccataaatggatgggtgtagaccttgaagtctgagatgggaaatataccagaatgctcaatgcatcagacatgaagccccacgggcttccatttgacatgctggcaatctgaaggacaaagggcatgggttatttgggccttttccccactccttcaatatggctgaaagtgccagtggggattacaacctaagaaaccctatgccccttcctgagggcttgattattgaatcctgatcttcctggaatctttcacttgagatgatcacctgcctaacatccaacatgttactatgctcttctttatgtacatgagttactggaaaccaacaataaaggagagtgagtcat

SEQ ID NO: 7218 - protein, 390 aa, Homo sapiens [sequence omitted]

SEQ ID NO: 7219 - DNA, 5158 bp, Homo sapiens
gacccgcgcgggatgtgaccccctgaccccctgcctggcctcccctgccccccagggggcccgcctttgcctgcttttgggggggggtggggaggggcgcgcggatcatggcattggagttcccgggcttgcagccgccgccgccgcctcgttcacgcaccccgagcgccccttcttcccagagcagcagcggagaaggcgaagcggccggcgggggcgaggcagatggggctcaaggcgcgcagggcggcgggggcggctggcggcggcggcgacgggggcggcggaggcggcggggcggctaacccagccggaggggacgcggcggcggccggcgacgaggagcggaaagtggggctggcgcccggcgacgtggagcaagtcaccttggcgctcggggccggagccgacaaagacgggaccctgctgctggagggcggcggccgcgacgaggggcagcggaggaccccgcagggcatcgggctcctggccaagaccccgctgagccgcccagtcaagagaaacaacgccaagtaccggcgcatccaaactttgatctacgacgccctggagagaccgcggggctgggcgctgctttaccacgcgttggtgttcctgattgtcctggggtgcttgattctggctgtcctgaccacattcaaggagtatgagactgtctcgggagactggcttctgttactggagacatttgctattttcatctttggagccgagtttgctttgaggatctgggctgctggatgttgctgccgatacaaaggctggcggggccgactgaagtttgccaggaagcccctgtgcatgttggacatctttgtgctgattgcctctgtgccagtggttgctgtgggaaaccaaggcaatgttctggccacctccctgcgaagcctgcgcttcctgcagatcctgcgcatgctgcggatggaccggagaggtggcacctggaagcttctgggctcagccatctgtgcccacagcaaagaactcatcacggcctggtacatcggtttcctgacactcatcctttcttcatttcttgtctacctggttgagaaagacgtcccagaggtggatgcacaaggagaggagatgaaagaggagtttgagacctatgcagatgccctgtggtggggcctgatcacactggccaccattggctatggagacaagacacccaaaacgtgggaaggccgtctgattgccgccaccttttccttaattggcgtctccttttttgcccttccagcgggcatcctggggtccgggctggccctcaaggtgcaggagcaacaccgtcagaagcactttgagaaaaggaggaagccagctgctgagctcattcaggctgcctggaggtattatgctaccaaccccaacaggattgacctggtggcgacatggagattttatgaatcagtcgtctcttttcctttcttcaggcaaaacagctggaggcagcatccagccaaaagctgggtctcttggatcgggttcgcctttctaatcctcgtggtagcaatactaaaggaaagctatttacccctctgaatgtagatgccatagaagaaagtccttctaaagaaccaaagcctgttggcttaaacaataaagagcgtttccgcacggccttccgcatgaaagcctacgctttctggcagagttctgaagatgccgggacaggtgaccccatggcggaagacaggggctatgggaatgacttccccatcgaagacatgatccccaccctgaaggccgccatccgagccgtcagaattctacaattccgtctctataaaaaaaaattcaaggagactttgaggccttacgatgtgaaggatgtgattgagcagtattctgccgggcatctcgacatgctttccaggataaagtaccttcagacgagaatagatatgattttcacccctggacctccctccacgccaaaacacaagaagtctcagaaagggtcagcattcaccttcccatcccagcaatctcccaggaatgaaccatatgtagccagaccatccacatcagaaatcgaagaccaaagcatgatggggaagtttgtaaaagttgaaagacaggttcaggacatggggaagaagctggacttcctcgtggatatgcacatgcaacacatggaacggttgcaggtgcaggtcacggagtattacccaaccaagggcacctcctcgccagctgaagcagagaagaaggaggacaacaggtattccgatttgaaaaccatcatctgcaactattctgagacaggccccccggaaccaccctacagcttccaccaggtgaccattgacaaagtcagcccctatgggttttttgcacatgaccctgtgaacctgccccgagggggacccagttctggaaaggttcaggcaactcctccttcctcagcaacaacgtatgtggagaggcccacggtcctgcctatcttgactcttctcgactcccgagtgagctgccactcccaggctgacctgcagggcccctactcggaccgaatctccccccggcagagacgtagcatcacgcgagacagtgacacacctctgtccctgatgtcggtcaaccacgaggagctggagaggtctccaagtggcttcagcatctcccaggacagagatgattatgtgttcggccccaatggggggtcgagctggatgagggagaagcggtacctcgccgagggtgagacggacacagacacggaccccttcacgcccagcggctccatgcctctgtcgtccacaggggatgggatttctgattcagtatggaccccttccaataagcccatttaaaagaggtcactggctgacccctccttgtaatgtagacagactttgtatagttcacttactcttacacccgacgcttaccagcggggacaccaatggctgcatcaaatgcatgcgtgtgcgtggtggccccacccaggcaggggcttcccacagcctcttcctccccatgtcaccacaacaaagtgcttccttttcagcatggtttgcatgactttacactatataaatggttccgctaatctcttctaggatacacatttatctgctgttcttacttttaatcacgattggaccagtacagggagaaattactgatgagccatgctatttgtctgtttggttggctggtttgggttttggtttggtaagcagagaaagtagtttaagttatttctaggatcactgccctcttgtgtaaaacgctccagcaattaactgtttttgaaagcaaggaaataattttctcaacaaaaccacattgtgtatcagtggggctgcctactgagctaacattaggaaaggaatgagatagtcattgtgtctctaaaacaaagaatttaaacaaatatttaaggcaaaaccttttaaaagctctccaaaagacctcacttggcctgatgttacttagtatcatgcctcagtttccttatctgtaaaaagtggtggtaatcccaagtgtagcatttctgatgagttatgaattggcagggagaaaacacacacacacacacacacacacacacacacacacacatacacaaagttaaaatagtttccaatttatgtagccaaggacaatggaatttatcagaagtgaagtgcccctctgggcaggagctgagttcagtgcctttaaaatgaatttccaactctcatttcttcccatgatactgaagtacaaaatatccatctaaaatagaaattaaagtcaagaaggcacacagaaattttctagtccaaggacttccttttataaatgaagaatcttaggctcaggtaaagtgacatacccagagtcactcagttgtcccatagagaaccaggactcaaaagtcaggtctgcccactctccctgaccttgtttcccctcaccacaccattcttccatttatataatgcatcctagagattgtgtcaagatatatgactttgtgtcgcgtggaaagcacccagtttatccagcaggagggggatttccacttttattgcaaaacatgcttgcttgatgcaatgcatttcagatctagaaaaaaataatgcaagcaagctacatttacagatgtgtaaacaggcaaaatttccagaaccgtccaattttacttttccaaatttatggaaccaacccagattttttaaatgaaaatactaaaaccatatgtaaccgtaagacaagctaaaatgtaagcagacagcctgggaagcactgccctactgtacaggtgtgatattaagcacaagccatcctctggcctcttatgagatgttgttattctctgaaaaactttgatggaaaaggtttctgttaggcttagactgaattagctaaatgaccatgccacagtattattgtatcactcttctcacacacctaggcactggttgtggatagttgccatggtgacaatcaagataatccagatgacctaaacaaatgtctgtatgcagctgacactgctattctccctcacagtcttgtcaagagccacagtagctatggcagacatttggttgatggtttcatcatttcctaatacgagagtctggcactatgttggagagaggaatcacttcctcagagataggttcctttcaactcacatgtcaacagttactgtacaaaaagctcagaatacagtaatgattagagcttgacccctgactttaggaacttagaaccaaagcccaaagtcccaggccaagggcagacattgtgagcagcagaagggtgttttttatggagagccccataaatggatgggtgtagaccttgaagtctgagatgggaaatataccagaatgctcaatgcatcagacatgaagccccacgggcttccatttgacatgctggcaatctgaaggacaaagggcatgggttatttgggccttttccccactccttcaatatggctgaaagtgccagtggggattacaacctaagaaaccctatgccccttcctgagggcttgattattgaatcctgatcttcctggaatctttcacttgagatgatcacctgcctaacatccaacatgttactatgctcttctttatgtacatgagttactggaaaccaacaataaaggagagtgagtcat

SEQ ID NO: 7220 - protein, 447 aa, Homo sapiens [sequence omitted]

SEQ ID NO: 7221 - DNA, 3530 bp, Homo sapiens
cggccgcgacgaggggcagcggaggaccccgcagggcatcgggctcctggccaagaccccgctgagccgcccagtcaagagaaacaacgccaagtaccggcgcatccaaactttgatctacgacgccctggagagaccgcggggctgggcgctgctttaccacgcgttggtgttcctgattgtcctggggtgcttgattctggctgtcctgaccacattcaaggagtatgagactgtctcgggagactggcttctgttactggagacatttgctattttcatctttggagccgagtttgctttgaggatctgggctgctggatgttgctgccgatacaaaggctggcggggccgactgaagtttgccaggaagcccctgtgcatgttggacatctttgtgctgattgcctctgtgccagtggttgctgtgggaaaccaaggcaatgttctggccacctccctgcgaagcctgcgcttcctgcagatcctgcgcatgctgcggatggaccggagaggtggcacctggaagcttctgggctcagccatctgtgcccacagcaaagaactcatcacggcctggtacatcggtttcctgacactcatcctttcttcatttcttgtctacctggttgagaaagacgtcccagaggtggatgcacaaggagaggagatgaaagaggagtttgagacctatgcagatgccctgtggtggggcctgatcacactggccaccattggctatggagacaagacacccaaaacgtgggaaggccgtctgattgccgccaccttttccttaattggcgtctccttttttgcccttccagcgggcatcctggggtccgggctggccctcaaggtgcaggagcaacaccgtcagaagcactttgagaaaaggaggaagccagctgctgagctcattcaggctgcctggaggtattatgctaccaaccccaacaggattgacctggtggcgacatggagattttatgaatcagtcgtctcttttcctttcttcaggcaaaacagctggaggcagcatccagccaaaagctgggtctcttggatcgggttcgcctttctaatcctcgtggtagcaatactaaaggaaagctatttacccctctgaatgtagatgccatagaagaaagtccttctaaagaaccaaagcctgttggcttaaacaataaagagcgtttccgcacggccttccgcatgaaagcctacgctttctggcagagttctgaaggtaatgcctttttatctccctccctgtctcttccacttcttcctcccccaagtccacttccttcctcacctctccctttgcccacttaagaacctttgactccacaaggtaactctctcccttccctcgacaagccaacttcttgcttccctaactcctcctgtcccttgggctgaggcattgtgatgtattcccaggagtctagggctgcaggctcccaagttaggagcctggaaacctgtcaccttggtttctaagggtccgccccgaccccccgccccatgattggattgttatggaggtcaacttgaaggatggggcggtgccaggtgcaaagcaatttagagaccagggcacgggaagagtggcagaaaagcgccctctggaggctgtaggagccatggcctcatgtgcctcttttacttatgcaaagggaggacatgcagaaaagcctgtttcctcagtgtctgagcccacccaggccctcaatcctcattgtatcattcagttctctccaaggcctctgatgtgacagtgtgtgttgtttgctggcttctgtgtcctttgctggcttctggctctgggggccactctggaactgcggagctcacttctcctccctgctagccttttccctcactaccagtcatgagctgcgcacacttttgacttggacttctgggtaatagaatgagggtgccaagaaaggctgaacagcatcacagcttgagaataccgtggagtcttgcaacgtggaaataaagactctggggattgacacatccagaggcgtggaaggctttgaccgaacagtggggtccccaagccttttccaggtctgtggcctgccgttcatatgtgtgtctccctcccagatgccgggacaggtgaccccatggcggaagacaggggctatgggaatgacttccccatcgaagacatgatccccaccctgaaggccgccatccgagccgtcagaattctacaattccgtctctataaaaaaaaattcaaggagactttgaggccttacgatgtgaaggatgtgattgagcagtattctgccgggcatctcgacatgctttccaggataaagtaccttcagacgagaatagatatgattttcacccctggacctccctccacgccaaaacacaagaagtctcagaaagggtcagcattcaccttcccatcccagcaatctcccaggaatgaaccatatgtagccagaccatccacatcagaaatcgaagaccaaagcatgatggggaagtttgtaaaagttgaaagacaggttcaggacatggggaagaagctggacttcctcgtggatatgcacatgcaacacatggaacggttgcaggtgcaggtcacggagtattacccaaccaagggcacctcctcgccagctgaagcagagaagaaggaggacaacaggtattccgatttgaaaaccatcatctgcaactattctgagacaggccccccggaaccaccctacagcttccaccaggtgaccattgacaaagtcagcccctatgggttttttgcacatgaccctgtgaacctgccccgagggggacccagttctggaaaggttcaggcaactcctccttcctcagcaacaacgtatgtggagaggcccacggtcctgcctatcttgactcttctcgactcccgagtgagctgccactcccaggctgacctgcagggcccctactcggaccgaatctccccccggcagagacgtagcatcacgcgagacagtgacacacctctgtccctgatgtcggtcaaccacgaggagctggagaggtctccaagtggcttcagcatctcccaggacagagatgattatgtgttcggccccaatggggggtcgagctggatgagggagaagcggtacctcgccgagggtgagacggacacagacacggaccccttcacgcccagcggctccatgcctctgtcgtccacaggggatgggatttctgattcagtatggaccccttccaataagcccatttaaaagaggtcactggctgacccctccttgtaatgtagacagactttgtatagttcacttactcttacacccgacgcttaccagcggggacaccaatggctgcatcaaatgcatgcgtgtgcgtggtggccccacccaggcaggggcttcccacagcctcttcctccccatgtcaccacaacaaagtgcttccttttcagcatggtttgcatgactttacactatataaatggttccgctaatctcttctaggat

SEQ ID NO: 7222 - protein, 390 aa, Homo sapiens [sequence omitted]

SEQ ID NO: 7223 - DNA, 2729 bp, Homo sapiens
ggcgacgtggagcaagtcaccttggcgctcggggccggagccgacaaagacgggaccctgctgctggagggcggcggccgcgacgaggggcagcggaggaccccgcagggcatcgggctcctggccaagaccccgctgagccgcccagtcaagagaaacaacgccaagtaccggcgcatccaaactttgatctacgacgccctggagagaccgcggggctgggcgctgctttaccacgcgttggtgttcctgattgtcctggggtgcttgattctggctgtcctgaccacattcaaggagtatgagactgtctcgggagactggcttctgttactggagacatttgctattttcatctttggagccgagtttgctttgaggatctgggctgctggatgttgctgccgatacaaaggctggcggggccgactgaagtttgccaggaagcccctgtgcatgttggacatctttgtgctgattgcctctgtgccagtggttgctgtgggaaaccaaggcaatgttctggccacctccctgcgaagcctgcgcttcctgcagatcctgcgcatgctgcggatggaccggagaggtggcacctggaagcttctgggctcagccatctgtgcccacagcaaagaactcatcacggcctggtacatcggtttcctgacactcatcctttcttcatttcttgtctacctggttgagaaagacgtcccagaggtggatgcacaaggagaggagatgaaagaggagtttgagacctatgcagatgccctgtggtggggcctgatcacactggccaccattggctatggagacaagacacccaaaacgtgggaaggccgtctgattgccgccaccttttccttaattggcgtctccttttttgcccttccagcgggcatcctggggtccgggctggccctcaaggtgcaggagcaacaccgtcagaagcactttgagaaaaggaggaagccagctgctgagctcattcaggctgcctggaggtattatgctaccaaccccaacaggattgacctggtggcgacatggagattttatgaatcagtcgtctcttttcctttcttcaggcaaaacagctggaggcagcatccagccaaaagctgggtctcttggatcgggttcgcctttctaatcctcgtggtagcaatactaaaggaaagctatttacccctctgaatgtagatgccatagaagaaagtccttctaaagaaccaaagcctgttggcttaaacaataaagagcgtttccgcacggccttccgcatgaaagcctacgctttctggcagagttctgaagatgccgggacaggtgaccccatggcggaagacaggggctatgggaatgacttccccatcgaagacatgatccccaccctgaaggccgccatccgagccgtcagaattctacaattccgtctctataaaaaaaaattcaaggagactttgaggccttacgatgtgaaggatgtgattgagcagtattctgccgggcatctcgacatgctttccaggataaagtaccttcagacgagaatagatatgattttcacccctggacctccctccacgccaaaacacaagaagtctcagaaagggtcagcattcaccttcccatcccagcaatctcccaggaatgaaccatatgtagccagaccatccacatcagaaatcgaagaccaaagcatgatggggaagtttgtaaaagttgaaagacaggttcaggacatggggaagaagctggacttcctcgtggatatgcacatgcaacacatggaacggttgcaggtgcaggtcacggagtattacccaaccaagggcacctcctcgccagctgaagcagagaagaaggaggacaacaggtattccgatttgaaaaccatcatctgcaactattctgagacaggccccccggaaccaccctacagcttccaccaggtgaccattgacaaagtcagcccctatgggttttttgcacatgaccctgtgaacctgccccgagggggacccagttctggaaaggttcaggcaactcctccttcctcagcaacaacgtatgtggagaggcccacggtcctgcctatcttgactcttctcgactcccgagtgagctgccactcccaggctgacctgcagggcccctactcggaccgaatctccccccggcagagacgtagcatcacgcgagacagtgacacacctctgtccctgatgtcggtcaaccacgaggagctggagaggtctccaagtggcttcagcatctcccaggacagagatgattatgtgttcggccccaatggggggtcgagctggatgagggagaagcggtacctcgccgagggtgagacggacacagacacggaccccttcacgcccagcggctccatgcctctgtcgtccacaggggatgggatttctgattcagtatggaccccttccaataagcccatttaaaagaggtcactggctgacccctccttgtaatgtagacagactttgtatagttcacttactcttacacccgacgcttaccagcggggacaccaatggctgcatcaaatgcatgcgtgtgcgtggtggccccacccaggcaggggcttcccacagcctcttcctccccatgtcaccacaacaaagtgcttccttttcagcatggtttgcatgactttacactatataaatggttccgctaatctcttctaggat

SEQ ID NO: 7224 - protein, 395 aa, Homo sapiens [sequence omitted]

SEQ ID NO: 7225 - DNA, 388 bp, Homo sapiens
ttttggagcacttagtagtttccaggatcttccaggcttggcaaggaatgaggtatgaccacaatcccagttctggccgatggtatgtaggcagagccaatggaggcaaacagcctctcctttcccttctttccttcttgtcacctgggatgaggatgtgaaggtgaatcttcagggaccatgcagagcgggcaacacgctggagatggcagctgagtgagaagatcaaaggagcctggttcggacagttgacatcaagattgacacatgagaaacaagatggactttgaaggaagacaaccacaacaactcctagattacacagtaaagatgcatttaagccagcatctctcagaataattccctaataaaaaaagtacttgttcat

SEQ ID NO: 7226 - protein, 37 aa, Homo sapiens
MRYDHNPSSGRWYVGRANGGKQPLLSLLSFLSPGMRM

SEQ ID NO: 7227 - DNA, 4140 bp, Homo sapiens
aattctttctgcctggtatcattaaaaaggaggtgacaatttggcctaagaaaattcacggaatccattttgaaagaaaattatgagtggaaaacacctgagttgaaaagtggggaagtttctcaatctgcttactccaaggaaattcttaaaggaattataaacacttaacctaataagttaatttttaattgtaaaatagaccatcttcaattttttgaagagccctcgtgtggaggaatgcgatctcatggaaacagtggcctaaagaaagttctcctattgctttttacttccctttgcttgaaaaaagataaacagcatagaaacctccaagaggctaccgagttctctttgaacttttttctctgcagctgcgcctggaactgctccctgctgcactttactacctctgtttataagagcaacagtccctctcctgaaaattggactgaattccaacaagtcggcaacttgcatgaagacaagatgtactgcagtgccatgctgggtatcttaaagaacaaggcattgtcctctgcagacacccaggctgcagacttcaaggactggaagaagagctttgcgtcttctctcttctctatacagacacaatctgtagcagcaaatgtgttacagatggacagaagctggggaacatggatgaagctggaaaccatcattctcagcaaactaacagaggaacagaaaagcaaacaccgtatgttctcactcatgattgggagttgaacaatgagaacacatggacacagggaggggaatattacacaccggggcctatcagagcgtgggaggctacgagagggatagcattaggagaaatacctaatgtagatgacgggttgatgggtgcagcaaaccaccatggctcatgtatacccatgtaacagacctacacattctgcacatgtatcccagaacttaaagtatgatttaaaaatatatatagagagagagatatataaattgctgagagtggattttaagtgttctcaccacacaacaaaataagtatgtgaagtaaacatatattagttagcttgatttagccatttcacactatataaatatttcaaaacaacatgttgcacactatagacaatttttattggtcaactaaaaataaaatttttaaagggagaaaataagagagaattggcatcagggttgcaaaggaatgaataaatacatgggccatgaaaaactgatcaatataagggtttgagaggaaggtgaacagtttgcaaagttgtaactttgaaagatctcccttattaatttatttgctcgtttaaaagagtcagggtacaatggaatattcaacttaatctagaagaggtagagtggactgaaattaatttccctctaacatgcatttgttgctctaatcaactatctagagctacacaaaatacatacgattttctaaaattatttaaattcttgaaggtaaatgccatttcttctcttatagatgatagaccttcagactttcacatgactctttataaatagtccccatgctcaaaacgacaaacaccactctcttagatttcaacttagcaaggcatcccaaactaaacttcacatccaagggagaaggcaaatgaaggagagtaatgaccagctatttgtttgagacaataggtacattcatcagattacctccaaacatcagccaagggattttagtttggaacaaagatagttggaatattaattattttcaaatggtggaagagctgccatagagaattagagaaaattttaaactagaagtttgcaaaaaatatattcaaataatagctttgtttttattctaaaatgtgaccttggctaagccacataatctctctgggtctctgtatgtgggagctactgataatacctgtatctctgtttcaggtgatgatcaaaatgcctattttgtgatttgtgaaatgaaatgtgctgtaggcatgtaaggtgatttttacaaataattattttcttgttgtttttgaagttccagagtacaggaaaggaaacaggaaaaacataactgaggaatagttgttaggtcggtgagacattgaaccttctaacatctgaaactgtccactaactggcaagagcatttcaataaaaagcaaacacctcatcatattgaatcatagtgaatatataaaaagacactgtacacatttcttcagatatacatactgtaattgtcattctaaattgttaaaaaattactatatatagtaattctaaaatatataatatataatacataaatatatattatatatataaattatatatatatacacacatatatattagaatggatttcacactgggttttactcccattatgtgatgcataaaaaagtaaacaacaataaaacagttaaattaatgagcttggttggttttcaaaacatgttaggcccaatatgttagagaattaatatagggattttaaaaatgtgttaaactcaacatgttcttactaataacaggggatttctgatatcaaggaccagttaatgtggttaatattttgtattagaaggaaagggaagagatgtgctgggcaaaagaggaaaatatagattttttaaaaataaatagaaatctgagctaatattaataagggtaaaaaaggaaaaagtgataacatcatgtggaacattccagaagttatgtgcagggctcagtatgggggcaacacatcaatagcatatatatacaaggccaacctcttcctctccattcccagaaatctagtagtggggcactgtatgtgtacaggtaacatgttaaatagataggctgtgctggatgctatggttgcagaatgtggttgaagaagaattgcgaagccaacaaagcaagggttggggcagagtttatgagttatatgaagtttgtgtggggactgagaattctggattttagacatcctgtgtcctgcatggcaactcctccacccccaccagtcatgtcaggtggaggccactatagcagatatagtacgcctacattaagggaaggaggtagttctacgtaatgaaaactcactttccaagttgacccttcttaatcctctgctggaaaaccagtgtactgtgatacccaagggcatggttttatcctttggtgccactattcatcatatcctcattgcattggaaaaattaattgattactcttgacttcacttttctgtcaaattaaaattccattaccattcatttgaaaagatctgatgtggtttaagtgagattatatagtgtgtggatcattgctcagcatgtgataagcactcagacattttagctaaatgaaaacaacactaataccagtactactaaaactgagccctaaagtaatcacctgagttttatttaaacaaaaacataattttcttccatctttctgtaaaattgttcaacaagaaaatattaacattcatagatgatttcagagtttataggaacttttgcatacagctcacttatcagagcaactcagttggatcctgttattaatttcctcactttagaaatgaagggactgagatcaagaaaaggaagtgacttgctcaaggatacatatacaacaagtaaccatgctaagaattctcatttgatgtgcgatttcccccaatcagtgactatagatatatatagatacatagatgtgtatatatatagatgatagatagatacgtagatggggatacagatactacacctgtgtataccatatctatgtatgtttatatgctatttgtatgttccacttcggatatcttctcacattcagatatctagtgtccacatgtttttttccctggattcctctcgaaacataatcatatggcaaataaagtgagttctgcaataaactttaagatttaatataatacattttcagggagggtgtgggcagaaaaattgtgtggctttaagttttcttagcaaataagtgacttccctcctaagatgcagctgcttttcttcattttttgtaactgttttatgtttcacgaaattgctctgtcctgattttaactgtgtcatattccagctctcagagggtagccaaaatttggaaacaaaatgttgtttt

SEQ ID NO: 7228 - protein, 169 aa, Homo sapiens; identical to SEQ ID NO: 1026

SEQ ID NO: 7229 - DNA, 541 bp, Homo sapiens
acaatctttcctccagccacacagctgcaagcttcttaggctgctcctttagcccgaactagcccctccgtttacacaataatttctgtcctactcatgccttgctttgcccagttgtgcttgatgcttgaaaccctctgtaacaaccctgaacagtagaactttctactggatgatataaagtgttagaagcactgatttgttaagaaaatttccagagtcacacagctataactggcaaagctgtacttcaaacttggaaagtcgacttctagaatccagaagtttaagccctagaccagcgtttttcaaagtgtggttcccagaccagcagcggcggtgtcacctggaacttatcacaaagacaagcttccgagccaacttcagacctactcattggaagctcaaggtggggttatgatgggatcagatacctgagtgataacaagcttttcagatgagtttatgcaggcttgagcttgaggatcattgatctatactgtgttaccttcccaaataacaagaacactcaaaagcctgt

SEQ ID NO: 7230 - protein, 79 aa, Homo sapiens
SVRSTDLLRKFPESHSYNWQSCTSNLESRLLESRSLSPRPAFFKVWFPDQQRRCHLELITKTSFRANFRPTHWKLKVGL

SEQ ID NO: 7231 - DNA, 3584 bp, Homo sapiens
ctgcattctggctgcaaaaacagctcctggtttgaaacaacttaatggagaaccaggagaaagaggggaagatggtctgcctggaaaaccaggccttcggggagaaattggggagcagggcctggcaggccgacctggagagaagggagaagcaggcctcccaggggctccaggcttcccaggtgtgagaggagagaaaggagaccagggagaaaaaggtgaactgggacttccaggactgaaaggtgaccgaggtgaaaagggtgaagctggtcctgcaggccctcccgggttacctggaactacatccctgttcacaccacatccacggatgcccggagaacaagggcccaaaggagagaagggcgatccaggcctgcctggggaaccgggactgcagggccgtcctggagaattggggcctcagggacccactggaccaccgggtgccaagggacaggaaggtgcacatggggctcctggagcagctggaaaccccggtgctcccggacatgtcggtgcccccggtcccagtggccctccaggaagtgtgggtgctcccggcctcagaggcaccccagggaaagatggggagcgtggtgagaagggtgcagcgggggaagaaggcagcccagggccagttggtcccaggggagatcctggtgctcctgggctccctgggccacccggaaaagggaaggatggagagccgggactccgtggatcacctggactccctggacccctaggaaccaagggggatcgaggagctcctgggatccctggttctcctggcagccgtggtgacccaggcattggggttgctggccctcctggcccttccggaccaccaggagacaaaggatccccgggatcacgaggcttacctggattccctggcccccagggcccagccggccgggacggtgcaccaggaaatccaggagaaagagggcctcctggcaagccgggcctctcttcactactgtctccaggggacataaatctcttggctaaggatgtgtgcaatgactgccctcctggccccccaggcctccctggtctaccaggttttaaaggggacaaaggtgtcccaggaaagccagggagagaaggcacagaagggaaaaagggagaggctgggcctccaggcctaccagggcccccaggaatagctggaccacagggaagtcaaggagaacgtggtgcagatggtgaggttgggcagaaaggtgatcagggtcatcctggagttccaggtttcatggggcccccagggaaccctgggccaccaggggcagatggaattgcaggagctgctggaccaccaggaatccaagggtcacctgggaaagaaggccctcctggcccccaaggcccatctggattacccggaatcccaggagaagaaggcaaagagggcagagatggaaagccgggtccccctggagagccgggcaaagcaggagagccaggtctaccaggaccagagggtgcccgaggcccacctggcttcaagggacacacaggcgattctggtgcacccggtccccggggagagtctggtgccatggggcttcctggtcaggaagggttaccaggaaaagatggtgacactggacccactgggccacagggtccccaaggaccaaggggcccaccgggcaagaatggatcaccgggatctccaggagagcctggcccttcaggaacccctggccagaaaggaagcaaaggggaaaatggcagcccaggacttcctggcttcctgggtccccgtgggcctccgggagaaccaggagagaaaggagtcccaggcaaggagggggtccctgggaagcctggagagcctggattcaaaggagaaaggggagatcctgggatcaaaggtgacaaaggacctcctggtggaaaaggccagcctggggaccctggaatcccaggccacaaaggccacacaggcctgatgggtccccaaggactacctggggagaatggaccagttggacccccagggcctccaggccagccgggatttccaggactgaggggggagtctccatccatggaaaccctgcgtcggcttattcaagaagagctggggaagcagcttgaaaccagactcgcctacctcctggcccagatgcccccggcgtacatgaagtcatctcaaggcagacctgggcccccagggccccctggaaaagatgggcttccaggccgggccggccccatgggggagccaggtcgtcctgggcaggggggtctggaaggaccctctggacccataggtcccaaaggtgagcgaggagccaaaggtgacccaggtgcacctggagttggcctccgaggcgagatgggaccccctggaatcccaggtcaacccggggaacctggctatgctaaagatggacttcctgggatccctggccctcaaggggagacaggaccagctggacatcctggcctcccaggacctcccggtcccccaggccaatgtgacccttcccagtgtgcctacttcgccagccttgctgcccggccgggtaatgtgaagggtccctaaaggactctggaaagccagaagactgcagtggatttctgaaacttgaactcagagcccagtgggaagccagaggtcttgaaagacttcagccatgtgttccttttttttttctttcttttatcgtttgctttttgttttattttcttgagagacctcaaaattattaaatccaacagacgctgccggtcggtcagattattattaatattattgttgttgttaattattattattatttcatatgctgatgctttgtgagttcttttccactcctttaaagttgggaaaacttgattcgtggggcaggagattgtttcttcattcttctgacagcccccatctgacgcgtaactgcccattttaaggaaactcttggtgctacaaaaccctgaccagacacttggcaaatttacctctttcttcaaaagaaaaactttaagaaaatgagccaatgggcttcattctcagtcatgcccggagatcacccaggagaaataatacaaacaccaccactgtccagagagagtaaagaagcagaaagagaaagaatttgcaaccatgaggaatgttcccacctcccgacgggacgtgcatttggaaaacacagaatcagccctcagggtgcactccagccacctcagtgctctaagctcacagaagtgaaataatgtctgtgggttggcaatggctttgtgggatcatatgtcttggccaaagatgggaaaacctatgttgaagaggcagcccttgagtgttaatttgtcttctaaactgtgtaaggccccttcaagttcctcttgttggtttcaattatattaattataaaacaagtggatgtggtgaccatccacttgtgtttccctaatgatgggcagttggccagggcactgaccagagctgggaaatttgtatctccaaggcggctctgtctctgaaataaatggcatcaagtgcatgtgtgtatgcgacatgccctgcctgaacaggtgctcaataaatccaagtttccttctcttga

SEQ ID NO: 7232 - protein, 744 aa, Homo sapiens
MPGEQGPKGEKGDPGLPGEPGLQGRPGELGPQGPTGPPGAKGQEGAHGAPGAAGNPGAPGHVGAPGPSGPPGSVGAPGLRGTPGKDGERGEKGAAGEEGSPGPVGPRGDPGAPGLPGPPGKGKDGEPGLRGSPGLPGPLGTKGDRGAPGIPGSPGSRGDPGIGVAGPPGPSGPPGDKGSPGSRGLPGFPGPQGPAGRDGAPGNPGERGPPGKPGLSSLLSPGDINLLAKDVCNDCPPGPPGLPGLPGFKGDKGVPGKPGREGTEGKKGEAGPPGLPGPPGIAGPQGSQGERGADGEVGQKGDQGHPGVPGFMGPPGNPGPPGADGIAGAAGPPGIQGSPGKEGPPGPQGPSGLPGIPGEEGKEGRDGKPGPPGEPGKAGEPGLPGPEGARGPPGFKGHTGDSGAPGPRGESGAMGLPGQEGLPGKDGDTGPTGPQGPQGPRGPPGKNGSPGSPGEPGPSGTPGQKGSKGENGSPGLPGFLGPRGPPGEPGEKGVPGKEGVPGKPGEPGFKGERGDPGIKGDKGPPGGKGQPGDPGIPGHKGHTGLMGPQGLPGENGPVGPPGPPGQPGFPGLRGESPSMETLRRLIQEELGKQLETRLAYLLAQMPPAYMKSSQGRPGPPGPPGKDGLPGRAGPMGEPGRPGQGGLEGPSGPIGPKGERGAKGDPGAPGVGLRGEMGPPGIPGQPGEPGYAKDGLPGIPGPQGETGPAGHPGLPGPPGPPGQCDPSQCAYFASLAARPGNVKGP

SEQ ID NO: 7233 - DNA, 6359 bp, Homo sapiens
cctgggcagtggcggggctggccgaggctgcggcgtttctccccaaggaagtgtcttctccgctttccctgttcttctgtttctcacacactttctatctcattctgtaactttcaagcctttccttctaactgtatgtatttagttacttgttttcaagctggttccctctctggccccctggcctggggaaagcctccacacttactgcgggtcttgtttagagtctgagtttgtgagattatttgggggagagtgggcgagtggctgacaggtgacccccaggaggaggattcctggggctggtgtcttctcccagctgctgcttccagtgggcctgggcccaggactggacctccgctggcacccctgagtgcctccctgccaggccatgctgctgtagaccctaacagcgtctcttcctggccaagagaagcctgtccccaagaacaggagagccatggccggcctccgagggaacgctgtggctggcctcctctggatgctgctgctgtggagtgggggcggcggctgccaggctcagcgggcaggttgcaaaagtgtccactacgatctggtcttcctcctggacacctcctccagcgtgggcaaggaggactttgagaaggtccggcagtgggtggccaacctggtggacaccttcgaggtgggccccgaccgcacccgtgtgggggtcgtgcgctacagcgaccggcccaccacggccttcgagttgggactctttggctcgcaggaggaggtcaaggcggctgcccggcgtctcgcctaccacgggggcaacaccaacacgggagacgcgctccgctacatcacggcccgcagcttctccccacacgccggcggccgccccagggaccgcgcctacaagcaggtggccatcctgctcaccgacggccgcagccaggacctggtgctggacgccgcggcggcagcccaccgcgctggcatccgcatctttgccgtgggcgtgggcgaggcactcaaggaggagctggaggagatcgcctcagagcccaagtccgcccacgtcttccacgtgtccgacttcaatgccatcgacaagatccggggcaagctgcggcgccgtctttgtgaaaatgtgctctgtcctagcgttcgtgtagaaggagatcgctttaagcacaccaatggaggaaccaaggaaatcacaggttttgacctgatggatttgttcagtgtgaaggaaatcttggggaagagagagaatggagctcagagttcctatgtacggatgggatccttccctgtggtgcaaagtactgaggatgtgttcccccaaggtttacctgatgagtacgcctttgtcacaaccttccggttcaggaaaacctctcggaaggaagactggtatatctggcaggtcatcgaccagtacagcatcccacaggtctccatccggctggatggtgaaaacaaggcagtcgagtacaacgctgtgggtgccatgaaagatgctgtcagggtggtcttccgaggttctcgggtcaatgacctctttgaccgggactggcacaagatggccctgagcatccaggcccagaacgtctccctgcacattgactgtgcgctggtgcagacactacccatcgaggaacgggagaacattgacatccagggcaagactgtgattggcaagcgcctctacgacagtgtgcccattgactttgacctacagcggattgtgatctattgtgactcgagacacgcagaattggagacttgttgtgatatcccctcgggtccgtgccaggtgaccgtggtgacagagcctccacctccacccccaccccagcggcctcccaccccaggcagtgaacagattgggtttttgaagaccatcaactgctcctgcccagctggagagaagggtgaaatgggagttgctggccccatggggctccctggtccaaagggagacataggagccattgggccggttggcgctcctggacctaagggagagaaaggtgatgtgggcataggaccttttggccaaggggaaaagggtgaaaagggttccctgggcctgcccggcccccctgggagagacggcagcaaaggcatgagaggggagccaggagagctgggagagccggggctgccgggtgaggtcggcatgcgggggccccaaggaccacctggactccccggacctcctggacgtgtcggagctcctggtctccaaggagaacgaggtgaaaagggaactcgaggagaaaagggagagcgaggcctggatggattccctgggaagcctggggacacaggacagcagggcaggcccggcccttctggtgtggcaggaccccagggagaaaagggtgacgtgggacctgcggggccacctggtgtaccaggctcagtggtgcagcaagagggcttgaaaggggaacagggagctccaggacccagaggtcaccaaggcgcccccggtcctccaggagctcggggtccaataggcccagaaggcagggatggacctcctggtttgcaaggtctccgagggaagaaaggtgacatgggaccacctggaatccctggattgctggggctgcagggccctccaggaccccctggtgtcccaggcccccctggaccgggaggttctccgggtttgcctggagagatcggcttcccgggaaagcctggacctcctgggcccacgggaccccctggaaaggacgggccaaatggaccaccaggtccgccaggaaccaagggagaaccaggagaaagaggggaagatggtctgcctggaaaaccaggccttcggggagaaattggggagcagggcctggcaggccgacctggagagaagggagaagcaggcctcccaggggctccaggcttcccaggtgtgagaggagagaaaggagaccagggagaaaaaggtgaactgggacttccaggactgaaaggtgaccgaggtgaaaagggtgaagctggtcctgcaggccctcccgggttacctggaactacatccctgttcacaccacatccacggatgcccggagaacaagggcccaaaggagagaagggcgatccaggcctgcctggggaaccgggactgcagggccgtcctggagaattggggcctcagggacccactggaccaccgggtgccaagggacaggaaggtgcacatggggctcctggagcagctggaaaccccggtgctcccggacatgtcggtgcccccggtcccagtggccctccaggaagtgtgggtgctcccggcctcagaggcaccccagggaaagatggggagcgtggtgagaagggtgcagcgggggaagaaggcagcccagggccagttggtcccaggggagatcctggtgctcctgggctccctgggccacccggaaaagggaaggatggagagccgggactccgtggatcacctggactccctggacccctaggaaccaaggctgcttgcggaaaagtcagagggtcagaaaactgtgcactgggagggcaatgtgttaagggggatcgaggagctcctgggatccctggttctcctggcagccgtggtgacccaggcattggggttgctggccctcctggcccttccggaccaccaggagacaaaggatccccgggatcacgaggcttacctggattccctggcccccagggcccagccggccgggacggtgcaccaggaaatccaggagaaagagggcctcctggcaagccgggcctctcttcactactgtctccaggggacataaatctcttggctaaggatgtgtgcaatgactgccctcctggccccccaggcctccctggtctaccaggttttaaaggggacaaaggtgtcccaggaaagccagggagagaaggcacagaagggaaaaagggagaggctgggcctccaggcctaccagggcccccaggaatagctggaccacagggaagtcaaggagaacgtggtgcagatggtgaggttgggcagaaaggtgatcagggtcatcctggagttccaggtttcatggggcccccagggaaccctgggccaccaggggcagatggaattgcaggagctgctggaccaccaggaatccaagggtcacctgggaaagaaggccctcctggcccccaaggcccatctggattacccggaatcccaggagaagaaggcaaagagggcagagatggaaagccgggtccccctggagagccgggcaaagcaggagagccaggtctaccaggaccagagggtgcccgaggcccacctggcttcaagggacacacaggcgattctggtgcacccggtccccggggagagtctggtgccatggggcttcctggtcaggaagggttaccaggaaaagatggtgacactggacccactgggccacagggtccccaaggaccaaggggcccaccgggcaagaatggatcaccgggatctccaggagagcctggcccttcaggaacccctggccagaaaggaagcaaaggggaaaatggcagcccaggacttcctggcttcctgggtccccgtgggcctccgggagaaccaggagagaaaggagtcccaggcaaggagggggtccctgggaagcctggagagcctggattcaaaggagaaaggggagatcctgggatcaaaggtgacaaaggacctcctggtggaaaaggccagcctggggaccctggaatcccaggccacaaaggccacacaggcctgatgggtccccaaggactacctggggagaatggaccagttggacccccagggcctccaggccagccgggatttccaggactgaggggggagtctccatccatggaaaccctgcgtcggcttattcaagaagagctggggaagcagcttgaaaccagactcgcctacctcctggcccagatgcccccggcgtacatgaagtcatctcaaggcagacctgggcccccagggccccctggaaaagatgggcttccaggccgggccggccccatgggggagccaggtcgtcctgggcaggggggtctggaaggaccctctggacccataggtcccaaaggtgagcgaggagccaaaggtgacccaggtgcacctggagttggcctccgaggcgagatgggaccccctggaatcccaggtcaacccggggaacctggctatgctaaagatggacttcctgggatccctggccctcaaggggagacaggaccagctggacatcctggcctcccaggacctcccggtcccccaggccaatgtgacccttcccagtgtgcctacttcgccagccttgctgcccggccgggtaatgtgaagggtccctaaaggactctggaaagccagaagactgcagtggatttctgaaacttgaactcagagcccagtgggaagccagaggtcttgaaagacttcagccatgtgttccttttttttttctttcttttatcgtttgctttttgttttattttcttgagagacctcaaaattattaaatccaacagacgctgccggtcggtcagattattattaatattattgttgttgttaattattattattatttcatatgctgatgctttgtgagttcttttccactcctttaaagttgggaaaacttgattcgtggggcaggagattgtttcttcattcttctgacagcccccatctgacgcgtaactgcccattttaaggaaactcttggtgctacaaaaccctgaccagacacttggcaaatttacctctttcttcaaaagaaaaactttaagaaaatgagccaatgggcttcattctcagtcatgcccggagatcacccaggagaaataatacaaacaccaccactgtccagagagagtaaagaagcagaaagagaaagaatttgcaaccatgaggaatgttcccacctcccgacgggacgtgcatttggaaaacacagaatcagccctcagggtgcactccagccacctcagtgctctaagctcacagaagtgaaataatgtctgtgggttggcaatggctttgtgggatcatatgtcttggccaaagatgggaaaacctatgttgaagaggcagcccttgagtgttaatttgtcttctaaactgtgtaaggccccttcaagttcctcttgttggtttcaattatattaattataaaacaagtggatgtggtgaccatccacttgtgtttccctaatgatgggcagttggccagggcactgaccagagctgggaaatttgtatctccaaggcggctctgtctctgaaataaatggcatcaagtgcatgtgtgtatgcgacatgccctgcctgaacaggtgctcaataaatccaagtttccttctcttga

SEQ ID NO: 7234 - protein, 1626 aa, Homo sapiens; identical to SEQ ID NO: 1028

SEQ ID NO: 7235 - DNA, 258 bp, Homo sapiens
agggtgaagctggtcctgcaggccctcccgggttacctggaactacatccctgttcacaccacatccacggatgcccgggtcccccaggccaatgtgacccttcccagtgtgcctacttcgccagccttgctgcccggccgggtaatgtgaagggtccctaaaggactctggaaagccagaagactgcagtggatttctgaaacttgaactcagagcccagtgggaagccagaggtcttgaaagacttcagccatgtg

SEQ ID NO: 7236 - protein, 53 aa, Homo sapiens
RVKLVLQALPGYLELHPCSHHIHGCPGPPGQCDPSQCAYFASLAARPGNVKGP

SEQ ID NO: 7237 - DNA, 5614 bp, Homo sapiens
ggtggactgccagcccctccctgctcaggcttgggtggaggcggaggtactttgttccccaagctgggccgctgcccctgcaggtggtcacattggtgagtggcagacagacaggtggacggagcaggtgcctgggagggtgccagggcctgtgtctgcggcccaaagtcctcctgccctcgttggtagcaggctaagctgcctcctctgagagagcccacccccatgcccagagcccacgtctccccaagtgctcactctgaccctctgctctttctcttccagctgctgctggtggccacaggctggcaccagggccctggactttagaagccgttgctgccctctctgtcacctgaagcggggccctctcccatcccacccttgccccgcctccctgcccccaccgggccggccctgcccgccgccggaccctggcatgtcaagacctggtccgcgcctgcctgcccagcccgcggaaccccggcggccccgcgagctaggatgaggggccaggccgccgccccgggccccgtctggatcctcgccccagccgtgcgccacgctggtgcagggaaagttcttcggctacttctccgcggccgccgtgttcccggccaacgcctcgcgctgctcctggacgctacgcaacccggacccgcggcgctacactctctacatgaaggtggccaaggcgcccgtgccctgcagcggccccggccgcgtgcgcacctaccagttcgactccttcctcgagtccacgcgcacctacctgggcgtggagagcttcgacgaggtgctgcggctctgcgacccctccgcacccctggccttcctgcaggccagcaagcagttcctgcagatgcggcgccagcagccgccccagcacgacgggctccggccccgggccgggccgccgggccccaccgacgacttctccgtggagtacctggtggtggggaaccgcaaccccagccgtgccgcctgccagatgctgtgccgctggctggacgcgtgtctggccggtagtcgcagctcgcacccctgcgggatcatgcagaccccctgcgcctgcctgggcggcgaggcgggcggccctgccgcgggacccctggccccccgcggggatgtctgcttgagagatgcggtggctggtggccctgaaaactgcctcaccagcctgacccaggaccggggcgggcacggcgccacaggcggctggaagctgtggtccctgtggggcgaatgcacgcgggactgcgggggaggcctccagacgcggacgcgcacctgcctgcccgcgccgggcgtggagggcggcggctgcgagggggtgctggaggagggtcgccagtgcaaccgcgaggcctgcggccccgctgggcgcaccagctcccggagccagtccctgcggtccacagatgcccggcggcgcgaggagctgggggacgagctgcagcagtttgggttcccagccccccagaccggtgacccagcagccgaggagtggtccccgtggagcgtgtgctccagcacctgcggcgagggctggcagacccgcacgcgcttctgcgtgtcctcctcctacagcacgcagtgcagcggacccctgcgcgagcagcggctgtgcaacaactctgccgtgtgcccagtgcatggtgcctgggatgagtggtcgccctggagcctctgctccagcacctgtggccgtggctttcgggatcgcacgcgcacctgcaggcccccccagtttgggggcaacccctgtgagggccctgagaagcaaaccaagttctgcaacattgccctgtgccctggccgggcagtggatggaaactggaatgagtggtcgagctggagcgcctgctccgccagctgctcccagggccgacagcagcgcacgcgtgaatgcaacgggccttcctacgggggtgcggagtgccagggccactgggtggagacccgagactgcttcctgcagcagtgcccagtggatggcaagtggcaggcctgggcgtcatggggcagttgcagcgtcacgtgtggggctggcagccagcgacgggagcgtgtctgctctgggcccttcttcgggggagcagcctgccagggcccccaggatgagtaccggcagtgcggcacccagcggtgtcccgagccccatgagatctgtgatgaggacaactttggtgctgtgatctggaaggagaccccagcgggagaggtggctgctgtccggtgtccccgcaacgccacaggactcatcctgcgacggtgtgagctggacgaggaaggcatcgcctactgggagccccccacctacatccgctgtgtttccattgactacagaaacatccagatgatgacccgggagcacctggccaaggctcagcgagggctgcctggggagggggtctcggaggtcatccagacactggtggagatctctcaggacgggaccagctacagtggggacctgctgtccaccatcgatgtcctgaggaacatgacagagattttccggagagcgtactacagccccacccctggggacgtacagaactttgtccagatccttagcaacctgttggcagaggagaatcgggacaagtgggaggaggcccagctggcgggccccaacgccaaggagctgttccggctggtggaggactttgtggacgtcatcggcttccgcatgaaggttctcagcatccataagctcccagccagcggagccactgacatcagcttccccatgaagggctggcgggccacgggtgactgggccaaggtgccagaggacagggtcactgtgtccaagagtgtcttctccacggggctgacagaggccgatgaagcatccgtgtttgtggtgggcaccgtgctctacaggaacctgggcagcttcctggccctgcagaggaacacgaccgtcctgaattctaaggtgatctccgtgactgtgaaacccccgcctcgctccctgcgcacacccttggagatcgagtttgcccacatgtataatggcaccaccaaccagacctgtatcctgtgggatgagacggatgtaccctcctcctccgcccccccgcagctcgggccctggtcgtggcgcggctgccgcacggtgcccctcgacgccctccggacgcgctgcctctgtgaccggctctccaccttcgccatcttagcccagctcagcgccgacgcgaacatggagaaggcgactctgccgtcggtgacgctcatcgtgggctgtggcgtgtcctctctcaccctgctcatgctggtcatcatctacgtgtccgtgtggaggtacattcgctcagagcgttctgtcatcctcatcaacttctgcctgtccatcatctcctccaatgccctcatcctcatcgggcagacccagacccgcaacaaggtggtgtgcacgctggtggccgccttcctgcacttcttcttcctgtcctccttctgctgggtgctcaccgaggcctggcagtcctacatggcggtgacgggccacctccggaaccgcctcatccgcaagcgcttcctctgcctgggctgggggctccctgcactggttgtggccatttctgtgggattcaccaaggccaaagggtacagcaccatgaactactgctggctctccctggaggggggactgctctatgccttcgtgggacctgccgctgccgttgtgctggtgaacatggtcattgggatcctggtgttcaacaagctcgtgtccaaagacggcatcacggacaagaagctgaaggagcgggcaggggcctccctgtggagctcctgcgtggtgctgccgctgctggcgctgacctggatgtcggctgtgctcgccgtcaccgaccgccgctccgccctcttccagatcctcttcgctgtcttcgactcgctggagggcttcgtcatcgtcatggtgcactgtatcctccgtagagaggtccaggacgctgtgaaatgccgtgtggttgaccggcaggaggagggcaacggggactcagggggctccttccagaacggccacgcccagctcatgaccgacttcgagaaggacgtggatctggcctgtagatcagtgctgaacaaggacatcgcggcctgccgcactgccaccatcacgggcacactgaagcggccgtctctgcccgaggaggagaagctgaagctggcccatgccaaggggccgcccaccaatttcaacagcctgccggccaacgtgtccaagctgcacctgcacggctcaccccgctatcccggcgggcccctgcccgacttccccaaccactcactgaccctcaagagggacaaggcgcccaagtcctccttcgtcggtgacggggacatcttcaagaagctggactcggagctgagccgggcccaggagaaggctctggacacgagctacgtgatcctgcccacggccacggccacgctgcggcccaagcccaaggaggagcccaagtacagcatccacattgaccagatgccgcagacccgcctcatccacctcagcacggcccccgaggccagcctcaatctggagccggcaccccccagcctgggggatcccggggagcctgccgcccatccgggacccagcacggggcccagcaccaagaacgagaatgtcgccaccttgtctgtgagctccctggagcggcggaagtcgcggtatgcagaactggactttgagaagatcatgcacacccggaagcggcaccaagacatgttccaggacctgaaccggaagctgcagcacgcagcggagaaggacaaggaggtgctggggccggacagcaagccggaaaagcagcagacgcccaacaagaggccctgggagagcctccggaaagcccacgggacgcccacgtgggtgaagaaggagctggagccgctgcagccgtcgccgctggagcttcgcagcgtggagtgggagaggtcgggcgccacgatcccgctggtgggccaggacatcatcgacctccagaccgaggtctgagcgggtgggcggcggccacgcactgggccacggaggagggatgctgctccgcccgctcctgccgcagacgggcacagacacgctcgcgggcagcgggccaggcccgcaccccggcctcagggcgctcagacggcggccaggcacagggcccgcagtgctgggaccagagccagatgcaggacaggaggcggcccggccagcgggcacagggcaccagaggccgaaggtgcctcagactccgccctcctcgggccgaggcccagcgggcagatgggcggacggctgtggaccgtggacaggcccagcgcggccagcgtcccagggtacccgcctgagctcctgctgcggaggagctgcctgcttggcccggccggcctggcaccgttttttaaacacccccatccctcgggaagcagccagctccccacaccttccagggccctaggcccctcctagacccaggtggagggcacagccctccgaccctcatggcccccaggggcaggactgagtcccctccaggaagaagcaggggggaatctattttttctctccttttcttttcttcaataaaaagaattaaaaacccat

SEQ ID NO: 7238 - protein, 1447 aa, Homo sapiens
MKVAKAPVPCSGPGRVRTYQFDSFLESTRTYLGVESFDEVLRLCDPSAPLAFLQASKQFLQMRRQQPPQHDGLRPRAGPPGPTDDFSVEYLVVGNRNPSRAACQMLCRWLDACLAGSRSSHPCGIMQTPCACLGGEAGGPAAGPLAPRGDVCLRDAVAGGPENCLTSLTQDRGGHGATGGWKLWSLWGECTRDCGGGLQTRTRTCLPAPGVEGGGCEGVLEEGRQCNREACGPAGRTSSRSQSLRSTDARRREELGDELQQFGFPAPQTGDPAAEEWSPWSVCSSTCGEGWQTRTRFCVSSSYSTQCSGPLREQRLCNNSAVCPVHGAWDEWSPWSLCSSTCGRGFRDRTRTCRPPQFGGNPCEGPEKQTKFCNIALCPGRAVDGNWNEWSSWSACSASCSQGRQQRTRECNGPSYGGAECQGHWVETRDCFLQQCPVDGKWQAWASWGSCSVTCGAGSQRRERVCSGPFFGGAACQGPQDEYRQCGTQRCPEPHEICDEDNFGAVIWKETPAGEVAAVRCPRNATGLILRRCELDEEGIAYWEPPTYIRCVSIDYRNIQMMTREHLAKAQRGLPGEGVSEVIQTLVEISQDGTSYSGDLLSTIDVLRNMTEIFRRAYYSPTPGDVQNFVQILSNLLAEENRDKWEEAQLAGPNAKELFRLVEDFVDVIGFRMKVLSIHKLPASGATDISFPMKGWRATGDWAKVPEDRVTVSKSVFSTGLTEADEASVFVVGTVLYRNLGSFLALQRNTTVLNSKVISVTVKPPPRSLRTPLEIEFAHMYNGTTNQTCILWDETDVPSSSAPPQLGPWSWRGCRTVPLDALRTRCLCDRLSTFAILAQLSADANMEKATLPSVTLIVGCGVSSLTLLMLVIIYVSVWRYIRSERSVILINFCLSIISSNALILIGQTQTRNKVVCTLVAAFLHFFFLSSFCWVLTEAWQSYMAVTGHLRNRLIRKRFLCLGWGLPALVVAISVGFTKAKGYSTMNYCWLSLEGGLLYAFVGPAAAVVLVNMVIGILVFNKLVSKDGITDKKLKERAGASLWSSCVVLPLLALTWMSAVLAVTDRRSALFQILFAVFDSLEGFVIVMVHCILRREVQDAVKCRVVDRQEEGNGDSGGSFQNGHAQLMTDFEKDVDLACRSVLNKDIAACRTATITGTLKRPSLPEEEKLKLAHAKGPPTNFNSLPANVSKLHLHGSPRYPGGPLPDFPNHSLTLKRDKAPKSSFVGDGDIFKKLDSELSRAQEKALDTSYVILPTATATLRPKPKEEPKYSIHIDQMPQTRLIHLSTAPEASLNLEPAPPSLGDPGEPAAHPGPSTGPSTKNENVATLSVSSLERRKSRYAELDFEKIMHTRKRHQDMFQDLNRKLQHAAEKDKEVLGPDSKPEKQQTPNKRPWESLRKAHGTPTWVKKELEPLQPSPLELRSVEWERSGATIPLVGQDIIDLQTEV

SEQ ID NO: 7239 - DNA, 3088 bp, Homo sapiens
gtatcaggctgatgactgatttctcctctcctggtctgaatttcccttctttgacctcctgccccacattcctgggtccctatgtttcactgccgcatggctctgtgtgggtccctgtctttgtgtcctcctgtcactgtggctcctggaccctgcccttcttgtcgcctgtgccctgtgtctggccacgccccgcagtggatggcaagtggcaggcctgggcgtcatggggcagttgcagcgtcacgtgtggggctggcagccagcgacgggagcgtgtctgctctgggcccttcttcgggggagcagcctgccagggcccccaggatgagtaccggcagtgcggcacccagcggtgtcccggtgaggcccctcctacctgggctgggctctggggagggctgatggcgattgggcgggcttgggctcagctgtcacccacgtggtgtgttgggggctcccgtcctgtcctcataatgatgcctgctccaggcgccttgcaccttccagagccagctgccggctctcagtaccccttcctgaacccctgtcccgggccccttggcagagccccatgagatctgtgatgaggacaactttggtgctgtgatctggaaggagaccccagcgggagaggtggctgctgtccggtgtccccgcaacgccacaggactcatcctgcgacggtgtgagctggacgaggaaggcatcgcctactgggagccccccacctacatccgctgtgtttccattgactacagaaacatccagatgatgacccgggagcacctggccaaggctcagcgagggctgcctggggagggggtctcggaggtcatccagacactggtggagatctctcaggacgggaccagctacagtggggacctgctgtccaccatcgatgtcctgaggaacatgacagagattttccggagagcgtactacagccccacccctggggacgtacagaactttgtccagatccttagcaacctgttggcagaggagaatcgggacaagtgggaggaggcccagctggcgggccccaacgccaaggagctgttccggctggtggaggactttgtggacgtcatcggcttccgcatgaaggacctgagggatgcataccaggtgacagacaacctggttctcagcatccataagctcccagccagcggagccactgacatcagcttccccatgaagggctggcgggccacgggtgactgggccaaggtgccagaggacagggtcactgtgtccaagagtgtcttctccacggggctgacagaggccgatgaagcatccgtgtttgtggtgggcaccgtgctctacaggaacctgggcagcttcctggccctgcagaggaacacgaccgtcctgaattctaaggtgatctccgtgactgtgaaacccccgcctcgctccctgcgcacacccttggagatcgagtttgcccacatgtataatggcaccaccaaccagacctgtatcctgtgggatgagacggatgtaccctcctcctccgcccccccgcagctcgggccctggtcgtggcgcggctgccgcacggtgcccctcgacgccctccggacgcgctgcctctgtgaccggctctccaccttcgccatcttagcccagctcagcgccgacgcgaacatggagaaggcgactctgccgtcggtgacgctcatcgtgggctgtggcgtgtcctctctcaccctgctcatgctggtcatcatctacgtgtccgtgtggaggtacattcgctcagagcgttctgtcatcctcatcaacttctgcctgtccatcatctcctccaatgccctcatcctcatcgggcagacccagacccgcaacaaggtggtgtgcacgctggtggccgccttcctgcacttcttcttcctgtcctccttctgctgggtgctcaccgaggcctggcagtcctacatggcggtgacgggccacctccggaaccgcctcatccgcaagcgcttcctctgcctgggctgggggctccctgcactggttgtggccatttctgtgggattcaccaaggccaaagggtacagcaccatgaactagtgaacatggtcattgggatcctggtgttcaacaagctcgtgtccaaagacggcatcacggacaagaagctgaaggagcgggcaggggcctccctgtggagctcctgcgtggtgctgccgctgctggcgctgacctggatgtcggctgtgctcgccgtcaccgaccgccgctccgccctcttccagatcctcttcgctgtcttcgactcgctggagggcttcgtcatcgtcatggtgcactgtatcctccgtagagaggtccaggacgctgtgaaatgccgtgtggttgaccggcaggaggagggcaacggggactcagggggctccttccagaacggccacgcccagctcatgaccgacttcgagaaggacgtggatctggcctgtagatcaggtgagcgcccgacaggtgagaggacagtgccagcccggccccctgcatggccccactccacgcctccgcctgtgcctcccccacatcacccatccctgtccactcctgctgcccccacccacacccagccacaccgtcaggcccacctggacccaggggacctgccctgggggcccagccttccacccccgtccacttcctgaggccgaaggagggtccatggggcatgatcagaagcttccagaacactgccctggcactcctgctgagcaggtgcctgtggagcgcctggctgcgtcccctgcccacctgacatctcttcctctgtcgtggccccagcgaggagcacagcctcaccctagtgccgctccccccccctgcctcctgcccaccgccctctagcacctgtgttctgtgccaccttcatttcctcattgccagtcccagcaggggcagaagtgagtggggctttcaggctagggggacaacggggagcaagaggaaggcggggagaaggacccaccatggagcccccggccggtgctgagcttcctggaaccaagtgcaaaaaacgaacgactgcccaataaaggaagctccgccgccc

SEQ ID NO: 7240 - protein, 438 aa, Homo sapiens
MMTREHLAKAQRGLPGEGVSEVIQTLVEISQDGTSYSGDLLSTIDVLRNMTEIFRRAYYSPTPGDVQNFVQILSNLLAEENRDKWEEAQLAGPNAKELFRLVEDFVDVIGFRMKDLRDAYQVTDNLVLSIHKLPASGATDISFPMKGWRATGDWAKVPEDRVTVSKSVFSTGLTEADEASVFVVGTVLYRNLGSFLALQRNTTVLNSKVISVTVKPPPRSLRTPLEIEFAHMYNGTTNQTCILWDETDVPSSSAPPQLGPWSWRGCRTVPLDALRTRCLCDRLSTFAILAQLSADANMEKATLPSVTLIVGCGVSSLTLLMLVIIYVSVWRYIRSERSVILINFCLSIISSNALILIGQTQTRNKVVCTLVAAFLHFFFLSSFCWVLTEAWQSYMAVTGHLRNRLIRKRFLCLGWGLPALVVAISVGFTKAKGYSTMN

SEQ ID NO: 7241 - DNA, 506 bp, Homo sapiens
aggcttccactgcaatgcaagtcacctgcctgcctcaccccggttgtgcagacacacttgcacccatgggctcaacactcaagcccatgatgtctgctcatgctctgtaaaccctgagccctaagagcacctggtgtccctgcaccccagcaactagatccgtaaccaaaccccaacctcccaggcccaaacaccctgggtcatccagtcctgaacgctggcctggcagcatggctcaggtgctcctgctcccccacacccctgcaccagcctggcttgtagtgctgagggcctggggaatggggatgctagggaggaaaatggggacagccagctccccacaccttccagggccctaggcccctcctagacccaggtggagggcacagccctccgaccctcatggcccccaggggcaggactgagtcccctccaggaagaagcaggggggaatctattttttctctccttttcttttcttcaataaaaagaattaaaaacccatc

SEQ ID NO: 7242 - protein, 42 aa, Homo sapiens [sequence omitted]

SEQ ID NO: 7243 - DNA, 997 bp, Homo sapiens
ggccaggcagctccccggcagccaggggacgggcggggcaggcaggatgggccatgccctcctcctggcccaggactcactgcccagaccccgcctgcagaagatcatgcacacccggaagcggcaccaagacatgttccaggacctgaaccggaagctgcagcacgcagcggagaaggacaaggaggtgctggggccggacagcaagccggaaaagcagcagacgcccaacaagaggccctgggagagcctccggaaagcccacgggacgcccacgtgggtgaagaaggagctggagccgctgcagccgtcgccgctggagcttcgcagcgtggagtgggagaggtcgggcgccacgatcccgctggtgggccaggacatcatcgacctccagaccgaggtctgagcgggtgggcggcggccacgcactgggccacggaggagggatgctgctccgcccgctcctgccgcagacgggcacagacacgctcgcgggcagcgggccaggcccgcaccccggcctcagggcgctcagacggcggccaggcacagggcccgcagtgctgggaccagagccagatgcaggacaggaggcggcccggccagcgggcacagggcaccagaggccgaaggtgcctcagactccgccctcctcgggccgaggcccagcgggcagatgggcggacggctgtggaccgtggacaggcccagcgcggccagcgtcccagggtacccgcctgagctcctgctgcggaggagctgcctgcttggcccggccggcctggcaccgttttttaaacacccccatccctcgggaagcagccagctccccacaccttccagggccctaggcccctcctagacccaggtggagggcacagccctccgaccctcatggcccccaggggcaggactgagtcccctccaggaagaagcaggggggaatctattttttctctccttttcttttcttcaataaaaagaattaaaaacccat

SEQ ID NO: 7244 - protein, 119 aa, Homo sapiens [sequence omitted]

SEQ ID NO: 7245 - DNA, 1629 bp, Homo sapiens
atgggctgtctggagcctctagagcagcccagactttcctatcgcccagacccagggctcgtgggagtgtccttgggtgagtgcctccccagggaggaagagctcaccagcaggatcagggccatggaggtcatggagcagagccaggtgctggagaccatcctaaaccagctggtggaacacagccagctggccgggaaggagcaggcctcagacaccgaggacagtggcatccaggagcttctgcagctcttgagcctagactcccagcaggcttcagagaaggctggtgcccagaacttccccttccacttgtacaggctggtccttcgagactgcgctggcgtggagctggtgcggaagcacatgggctgcctcctggagatgccccaccagtcctccaaccaaagggagccaggccttgatctgcacaggagatgggtcagcagcaccaccctgctgtgctatggacagatggccctgcatgccaaggagaagatcctgccctgggtggacaacgttgcctccaggatggtgtactacttctcatccagcccccacgccctggctgccaacctccagctggcccgcaaggtgatcaccctgctctacatgaagctgaaactgcggcccccccaggagctcatcagccccaacccccaggcccagctcatctccctgctggggcctacgagatgccagggtgacccttaccagtgccaccaagtgcccatagccctgggccctcctcatggcctggggctgcacctgcaggggcctgttgtcacctgtggggggctgttgtcacctgtggaggccctggacaccatttatgagctgctctacacccaggaggacaagcccacagtccactgggcctttgcaggggtcctgctggggctgctgacacagctgcattacctgtttgagctgggcatggtggagggcgtggcggagtaccaggaagacatcctggacatggagccctggacaccccgcaggacgtgcctggaagccctgaaggtcgtcttctggaccaagggctgctgggaggtgttcgcctacctcaagctgcggaagggctgggagctcttccaggccatggtcccctacaactgtgaggtcaaggcggtcttggggcaggcagccattgctcttcagagcaccgaggagcgggacagcgtcgtggccatcctcatcatcacagagtttctcaacagcccggaggtctcccagtgggcgtctcggaaaaccgtgaacaacttcctgagcatgggcctgaatcatcccagccagctggtgagggtcaggagcctgaggggcctcagcagtgccttaatgcaccccaagaaggtggtcttgctccaggtccagctgatggggctgctggacagcttcctgaagactgagcccgaggacctcacaggcctgatggagatcctgggtgacattcttcaccgcctgggcacccagggcctcggtgccatcagcgtcatgatggcccagcacctgctgcccttggtcgaggactggcccccgatagctcagttccagggttcagagcttcagcatgtgaatctggtggccagagttcagcccacagcaggggtttttctaagggaggcctga

SEQ ID NO: 7246 - protein, 542 aa, Homo sapiens [sequence omitted]

SEQ ID NO: 7247 - DNA, 291 bp, Homo sapiens
ccagtcaccccagtcctcacccggtctcctcgccacggtttaaaatagccacacatgttcaaaaatagagcaagaatgggcacgtttctgaagactatttaatgactgggacggctcaggatccaagtggaacgaaaaagtctcatgattctcattgaaaattgaattatctctgggtgccgggattccgggtgattttttttttttctgaatccttttcaaaattgtccaacgagtctgcaatgagcatggatttacccttctcagagaagaaaatacttatttaaagcc

SEQ ID NO: 7248 - DNA, 365 bp, Homo sapiens
acacaatatatccacccaatatatcccaatatttaacccaacatttccccacgcaggaagcattccagcctctggctgggcgccatcagtatcctgtcagggctggagtggggtctgagagggaagcacgtctctggagcccgcctgcaggtggctttggtgacttgacaatggcccaagtgctgccattgcagagatggggaaactgaggtaagaggaggcgaagccgagggccctgcagggacctgcatccagcatctgcgcccctgcccaggcctgaaacccgtagatcaaggttgctgcaaggacctcagcccagttcccatagcaacgccttcctgttccaccagtgaggaggtgaggct

SEQ ID NO: 7249 - protein, 64 aa, Homo sapiens [sequence omitted]

SEQ ID NO: 7250 - DNA, 2181 bp, Homo sapiens
gcagtacagcgagggcacgctgtcccgagaggccatccagcgcgagctggacctgccgcagaagcagggcgagccgctggaccagttcctgtggcgcaagcgggacctgtaccagacgctctacgtggacgcggacgaggaggagatcatccagtacgtggtgggcaccctgcagcccaagctcaagcgtttcctgcgccaccccctgcccaagaccctggagcagctcatccagaggggcatggaggtgcaggatgacctggagcaggcggccgagccggccggcccccacctcccggtggaggatgaggcggagaccctcacgcccgcccccaacagcgagtccgtggccagtgaccggacccagcccgagtagagggcatcccggagcccccagcctgcccactacatccagcctgtggctttgcccaccaggacttttgagctggggctgactcctgcaggggaagccctggtccagctgggtgccccctcgagctccgggcggactcgcacacactcgtgtcatccagatgtgagcaccgcacccagcggcaaagagccctcccccctgcagggctccacccatcaccctccctccgtctgtctttccggcctggaccccaccctccacactctcaggccatcacagaacaccccagcttcctcattctgctacaacacccaggccctctggacatccagaaaaccaagtgtccggatggcaggggccagcggccaccaagctcatgggacacccagagcagaagctagggcagagccaatgctgagggagcctcgacttccggcgccgccgccctctcccggcatccgcagagccagctgacgccctccctgcctcccagggcagctggccagcctcgggcagcgcggccccctcctcccaggggagagtagaagtcgcacacgcagcagagcagacctgatgtcccggtgcttcctggcccctcagctccagtgattcacgcccgcctggagaagaatcagagctcagctcatgactcacccatggcaggcggagggtcccagaggggctgagtcctcaaatccggctgaggcagcagctggcaccatcagagccaggagagtgacaacaggtaacggagcaccacccttccacccagaccccaccatcagctgtcccggccaaatgagctcctccccagaccccagacaccctgcggcccaggccactccccagtgttcgggctcgctgggaggctctgacggggtcggggggcctctgccttggaagaccagcgccatccaccggccccagcccctccccatggagccctggctactgtcctgcgtggtccttcactgcccactctcctgttctttcaggtctcaaggttcccacaaagtctttgctgctgtgctgggcaccacccacccctcaccttgcaggctgcctgcgtgggaggcgaagtcccaggacagcccagaggggggctacagagaggagtcggctgcagcagagggcaggagccccagcttagccctgagcgccagcgcgaggaccagggcctgccactaagcccgccccgctggccgccagctgcccgtccccagagccactgcagcaggagtcgggccctgcctccctcccagcagggaaaccccgcccgctgccaggccatcctctctgccagaggctttcatgagccccaaggctggggccacagctcctacccctgcccagcagccctgagctcagctgcaggaaggacatcccagaagccatggctcctggggcgcttccaggcattctgccctgccccgacaccagaaccctggtgctggtgggccactagcgtctgcagcctaagcaggtgctggctcagggttcatcgttctgccttgtccactgggggaccagccctgcagaccactctgacaagtcttcagcccacaccctgccagccccacagattttatttttgcacataagccataaccaatcctcaaggctggcacaggctttggggaagccctggagcctgtgaagaccctggaaacctcatgaggctgtggccaacccctgccccttgccccacacagaccaggccttaaatgtcggtccaggccctgtgcaccttaccccagagacagactctttttgtaagattttgttaataaaacactgaaacttcctgg

SEQ ID NO: 7251 - protein, 180 aa, Homo sapiens [sequence omitted]

SEQ ID NO: 7252 - DNA, 2947 bp, Homo sapiens
tcgggcgcggcgtcctccctccgcagcagccgagccggacctgcctccccgggcgtgctccgccggccccgccgccggcccgcagcgacagacaggcgctccccgcagctccgcacgggacccaggccgccggaccccagcgccggaccaccctctgtccgccccgaggagtttgccgcctgccggagcacctgcgcacagatggagctggaccaccggaccagcggcgggctccacgcctaccccgggccgcggggcgggcaggtggccaagcccaacgtgatcctgcagatcgggaagtgccgggccgagatgctggagcacgtgcggcggacgcaccggcacctgctggccgaggtgtccaagcaggtggagcgcgagctgaaggggctgcaccggtcggtcgggaagctggagagcaacctggacggctacgtgcccacgagcgactcgcagcgctggaagaagtccatcaaggcctgcctgtgccgctgccaggagaccatcgccaacctggagcgctgggtcaagcgcgagatgcacgtgtggcgcgaggtgttctaccgcctggagcgctgggccgaccgcctggagtccacgggcggcaagtacccggtgggcagcgagtcagcccgccacaccgtttccgtgggcgtggggggtcccgagagctactgccacgaggcagacggctacgactacaccgtcagcccctacgccatcaccccgcccccagccgctggcgagctgcccgggcaggagcccgccgaggcccagcagtaccagccgtgggtccccggcgaggacgggcagcccagccccggcgtggacacgcagatcttcgaggaccctcgagagttcctgagccacctagaggagtacttgcggcaggtgggcggctctgaggagtactggctgtcccagatccagaatcacatgaacgggccggccaagaagtggtgggagttcaagcagggctccgtgaagaactgggtggagttcaagaaggagttcctgcagtacagcgagggcacgctgtcccgagaggccatccagcgcgagctggacctgccgcagaagcagggcgagccgctggaccagttcctgtggcgcaagcgggacctgtaccagacgctctacgtggacgcggacgaggaggagatcatccagtacgtggtgggcaccctgcagcccaagctcaagcgtttcctgcgccaccccctgcccaagaccctggagcagctcatccagaggggcatggaggtgcaggatgacctggagcaggcggccgagccggccggcccccacctcccggtggaggatgaggcggagaccctcacgcccgcccccaacagcgagtccgtggccagtgaccggacccagcccgagtagagggcatcccggagcccccagcctgcccactacatccagcctgtggctttgcccaccaggacttttgagctggggctgactcctgcaggggaagccctggtccagctgggtgccccctcgagctccgggcggactcgcacacactcgtgtcatccagatgtgagcaccgcacccagcggcaaagagccctcccccctgcagggctccacccatcaccctccctccgtctgtctttccggcctggaccccaccctccacactctcaggccatcacagaacaccccagcttcctcattctgctacaacacccaggccctctggacatccagaaaaccaagtgtccggatggcaggggccagcggccaccaagctcatgggacacccagagcagaagctagggcagagccaatgctgagggagcctcgacttccggcgccgccgccctctcccggcatccgcagagccagctgacgccctccctgcctcccagggcagctggccagcctcgggcagcgcggccccctcctcccaggggagagtagaagtcgcacacgcagcagagcagacctgatgtcccggtgcttcctggcccctcagctccagtgattcacgcccgcctggagaagaatcagagctcagctcatgactcacccatggcaggcggagggtcccagaggggctgagtcctcaaatccggctgaggcagcagctggcaccatcagagccaggagagtgacaacaggtctcaaggttcccacaaagtctttgctgctgtgctgggcaccacccacccctcaccttgcaggctgcctgcgtgggaggcgaagtcccaggacagcccagaggggggctacagagaggagtcggctgcagcagagggcaggagccccagcttagccctgagcgccagcgcgaggaccagggcctgccactaagcccgccccgctggccgccagctgcccgtccccagagccactgcagcaggagtcgggccctgcctccctcccagcagggaaaccccgcccgctgccaggccatcctctctgccagaggctttcatgagccccaaggctggggccacagctcctacccctgcccagcagccctgagctcagctgcaggaaggacatcccagaagccatggctcctggggcgcttccaggcattctgccctgccccgacaccagaaccctggtgctggtgggccactagcgtctgcagcctaagcaggtgctggctcagggttcatcgttctgccttgtccactgggggaccagccctgcagaccactctgacaagtcttcagcccacaccctgccagccccacagattttatttttgcacataagccataaccaatcctcaaggctggcacaggctttggggaagccctggagcctgtgaagaccctggaaacctcatgaggctgtggccaacccctgccccttgccccacacagaccaggccttaaatgtcggtccaggccctgtgcaccttaccccagagacagactctttttgtaagattttgttaataaaacactgaaacttcctgg

SEQ ID NO: 7253 - protein, 84 aa, Homo sapiens
MTHPWQAEGPRGAESSNPAEAAAGTIRARRVTTGLKVPTKSLLLCWAPPTPHLAGCLRGRRSPRTAQRGATERSRLQQRAGAPA

SEQ ID NO: 7254 - DNA, 500 bp, Homo sapiens
cgcttcacaggaagcgtcccccggtggccatgacgccagtggccatgtggctgaggccctgggcagtggcttcgtgaccgaaaggccctgaacccaccccgaggccccacagctttttctccagctcagacactttctggggctcagtcttgctgcggcccttgtggcatttggcaggcagtgggtggaccatgagtgagttaggaggccgaactgcccacctctacaatgggttcccaggagagcgaacacgggacccgctcctccaggcctcagccccactctggaatgagttcaacagcaaggtacggtgagagctggcggcttcatttttggaaccagggggagagagagagagagagaggtttatgagagacctcatgagacagctcatgatggaagtgagcctgagctgcagtgaaccctgtcactgaagagacagccttcacactgtgtcttgcaggggaaaatacaactctttattaaaatttattgccctg

SEQ ID NO: 7255 - protein, 47 aa, Homo sapiens
MGSQESEHGTRSSRPQPHSGMSSTARYGESWRLHFWNQGERERERGL

SEQ ID NO: 7256 - DNA, 2868 bp, Homo sapiens
accagcctgggcaacatagggagaccccatctctacagaaagtaaaagaaaatgagccaggtgtggtggcatgtgcctgtaaccccagctactcaggaggccgaggcgggaggatccccaagcccaggagtttgaggctgcagtgagttatggcctctgcactccagcctgggtgacagagtgagagacctaatctctaaaaacaaaaaataacaaaatgtgctttggggtcaggtgtggagatcagggtcggggaggtcatgaggtaggtaggggtcaggatgtggacagtcatgggctggtgggtgtggcagccgtgaggggtgggtggtggcctgggaggcagggcctgggcagggcttctgcacttctgctgcttacccagccccctctgggttcgaggactctccttgacaagggctgagctctcgggcactgcgttggactcagctgcctactgggaggctggggagaatggacctgtgagaccttgtttgtcctcttccctgcccagctcttgtagaccccaggcctggctgtccgcagggccaggagctgcagccatggcagccaccagcctcccacatgagccccagctcccagccccacacgcccactcctttgcccatgtggtgtcagctctggcctccgcttccacacatggaccctcagaccttgcacatctgttgtttcccttgcagggcagtgatgatgacatgaaatgaggtggggtcactcctggtctcttaggcagcacgatggcctccctgctcaaggccctgcacccaggggcagattgtgggaggcccactggccatggctgggccctatcgcagagagcctgtcagcacggccatttccacacccaggctggctgggaagcaagctacgaggtgctcaaaggccctctatgtctgcaggtagccccgtcccacacaggcgaggatcgttgggcctccttagtagccaaaggaactgaggtccagagcagggaatgtgttgcccagtgtcagcatggtctgctctggggtcaggcgtcttgccctggtcctaagccaccccaagccaaggcatgtccctgggcccatttcctctctcgaggtcttgggttccctatttctgatgtgtgtgaaaggaaggcctgtcttctggggtgaccatgaggctcagtgggaggagctgccaggcttgagctgggacttggcacctggccagccttttttctatttcattgtaccttgatgggctgtcagttctgaagagaaaaaatacactaggaatccattcttcctccaccattctccctggcagagggaagtgactacacccctatggtgtggacatactgacgctcctccatgaagcagcaaagttctgttgtttcaggagactgtgggccttgaggatgtggtagtgacctcaccagaggagttggcaattcctaagtgctgcctggaggcctctacagagacataatgttggagaacttctgccacatggcagtgctgggtaagacccctctgtccccaccagtgcccttgaggttatgggtgttggtaggtctgtggcctccatttccatgacgatggtgttaaggactgcatgtttgtgtccccccccaaagtttatatgttgaaaccctgacccccaggagggtggtattaggaggtggggcctttgggaggtgactaggcttaggtgagatcgtgagggtggggctcgccgatgagatcgagtccttataagaaaaggaaggaactagagcgaggtcactttgtgctgtgtgagcatacaagaaaactgccatcttcaagctgggtgcagtggctcacgcctgtaatcccagcactggaaggccaaggcattaggattgcatgagtccaggagttcgagaccagcctaggcatgataagaccttattgctaaaaaaaaaaaaaggaaataaaatagaaaattgccatctgcaaatgagaaagccttcagccgacaccagactgccagtgcctttgattttggactttcagtccccagatctgtgaaaaattaatttatgttgtttaagacacctagcctgtggtattttgttatcgcaatccaaactgactgagacaggcagtaaggagagaacagaggttccagcctgcttcaggtccaggcagttctgccattgcccctaactcctcagtgccagtcatgggccaggcccctgggggacttggaatgagtaaaacatgcacctattgttaaggttcacctggtccagaaggggaggcagacccacctgcccaccatgacccggacagaggcgataaatacggagcacctcatggccagggcctggaggattcccaccataccctacccagcgccaataacagagggaccctggagttgtgtacacaagatagcagttcagtgcttgcacacatactagttgagaagggaaatcagggctaatgaaacagctcaactgtctggcagagccaggctccttctgccatgatacagtttggatgtttgtccctttctaatcttatatggaaatttgatccccagtgttgaaggtggggcctggtgggagatgttcctgttatcgggatggatccttcatgaatagcctggtgccatctttgtggtaacaagtgagttctcacttgattagtttctgtgagaactgtttgttaaaaagagcctggtggcacctccctcccttcttcctccttctcttgctatgtgatgctgctgccctttgccttccgtcatgagtggaagctccctgaagcccccaccagaagcaaatgctggcaccatgctgcttgtacagcctgcagaactgtgagccaaataaacctcttttctttataaatt

SEQ ID NO: 7257 - protein, 85 aa, Homo sapiens [sequence omitted]

SEQ ID NO: 7258 - DNA, 3281 bp, Homo sapiens
ggccctggtggctgtggggccacagctcagtctcccttgccctgctcatccacagcaggtgacaactgatggcttctctgccctgccctggccactggccctgtttctccccacaccctggagtggcatggtcctgtgccccgaccccacctgaggcaggagggcatgtgcagacactcaagagcccttccaggagtgggtcgcccacgggtgtggctcgggtgcccaggacggtctgtgcccgaggttcctgtcaatacaggttttattttatcacttgccgtgtcatccgaaagtgaggaaatgttttggaagggtccaccctagcctagaacaagccagagccgcaccctggctggaatgggggccaggctgagccgatctggtctcgtgttcgctggctgatcattgcagtatcagagggtggagatgtcagtctgtccacgtggagagaagttgccctccaggccgacaggaggccatgcccaccgcccctggacaggcttcgtctcagaaggctctatctgctgggctggcggccatccccgtgttgggtggaccccgagcacggttgcctgaggtccgatggcccgagagctgggactcagttcttggcctgctagcggctgaacaggccgcacatctcacttcagttgtggcctcattcagcagaatgactctggaaccatcctctgttacccgcagatcctgtcccatgggctctggccccaagatgttggggggccccacggagagttgacttggtagagttcctttctgggaagaaagtaggagtggctgaccaggccctgctcatcacccggatagaggacacggaccctgtgtggtattttggcattttggctcagagtccaatgtaccatgttgcccagaatttcatacttacggcctttacatgaatacgtcttgatcagacattcagagattagtcttaggtttccacgtaagtcactgaaaacagtaaaacaggctgcttagatttctagcagtatgtgtgctcttatccccagctgttagcacgttagtaatacttttggggaggagttgtctgtcctggtcagttttcacagaggcggttgtaagaggatgtggttattttctccatgtctgtagttgctttgcggcatctccatttcacgggcaacactcactgcctgcagctgagattccagaacgccctgtgtccacagtgattagcctcgtctttcagcgagcataaaataggtgcattgtcacggtttgaggcaggggtttgacccaggctggctgggaagcaagctacgaggtgctcaaaggccctctatgtctgcaggtagccccgtcccacacaggcgaggatcgttgggcctccttagtagccaaaggaactgaggtccagagcagggaatgtgttgcccagtgtcagcatggtctgctctggggtcaggcgtcttgccctggtcctaagccaccccaagccaaggcatgtccctgggcccatttcctctctcgaggtcttgggttccctatttctgatgtgtgtgaaaggaaggcctgtcttctggggtgaccatgaggctcagtgggaggagctgccaggcttgagctgggacttggcacctggccagccttttttctatttcattgtaccttgatgggctgtcagttctgaagagaaaaaatacactaggaatccattcttcctccaccattctccctggcagagggaagtgactacacccctatggtgtggacatactgacgctcctccatgaagcagcaaagttctgttgtttcaggagactgtgggccttgaggatgtggtagtgacctcaccagaggagttggcaattcctaagtgctgcctggaggcctctacagagacataatgttggagaacttctgccacatggcagtgctgggtaagacccctctgtccccaccagtgcccttgaggttatgggtgttggtaggtctgtggcctccatttccatgacgatggtgttaaggactgcatgtttgtgtccccccccaaagtttatatgttgaaaccctgacccccaggagggtggtattaggaggtggggcctttgggaggtgactaggcttaggtgagatcgtgagggtggggctcgccgatgagatcgagtccttataagaaaaggaaggaactagagcgaggtcactttgtgctgtgtgagcatacaagaaaactgccatcttcaagctgggtgcagtggctcacgcctgtaatcccagcactggaaggccaaggcattaggattgcatgagtccaggagttcgagaccagcctaggcatgataagaccttattgctaaaaaaaaaaaaaggaaataaaatagaaaattgccatctgcaaatgagaaagccttcagccgacaccagactgccagtgcctttgattttggactttcagtccccagatctgtgaaaaattaatttatgttgtttaagacacctagcctgtggtattttgttatcgcaatccaaactgactgagacaggcagtaaggagagaacagaggttccagcctgcttcaggtccaggcagttctgccattgcccctaactcctcagtgccagtcatgggccaggcccctgggggacttggaatgagtaaaacatgcacctattgttaaggttcacctggtccagaaggggaggcagacccacctgcccaccatgacccggacagaggcgataaatacggagcacctcatggccagggcctggaggattcccaccataccctacccagcgccaataacagagggaccctggagttgtgtacacaagatagcagttcagtgcttgcacacatactagttgagaagggaaatcagggctaatgaaacagctcaactgtctggcagagccaggctccttctgccatgatacagtttggatgtttgtccctttctaatcttatatggaaatttgatccccagtgttgaaggtggggcctggtgggagatgttcctgttatcgggatggatccttcatgaatagcctggtgccatctttgtggtaacaagtgagttctcacttgattagtttctgtgagaactgtttgttaaaaagagcctggtggcacctccctcccttcttcctccttctcttgctatgtgatgctgctgccctttgccttccgtcatgagtggaagctccctgaagcccccaccagaagcaaatgctggcaccatgctgcttgtacagcctgcagaactgtgagccaaataaacctcttttctttataaatt

SEQ ID NO: 7259 - protein, 92 aa, Homo sapiens [sequence omitted]

SEQ ID NO: 7260 - DNA, 4402 bp, Homo sapiens
gcgggcgctgcgtgccgtgttccggagccagcagcaggtgaggaggcggcgtggtgccctcggggctgtggtcaaggttgaagccctccaggagggccctggtggctgtggggccacagctcagtctcccttgccctgctcatccacagcaggtgacaactgatggcttctctgccctgccctggccactggccctgtttctccccacaccctggagtggcatggtcctgtgccccgaccccacctgaggcaggagggcatgtgcagacactcaagagcccttccaggagtgggtcgcccacgggtgtggctcgggtgcccaggacggtctgtgcccgaggttcctgtcaatacaggttttattttatcacttgccgtgtcatccgaaagtgaggaaatgttttggaagggtccaccctagcctagaacaagccagagccgcaccctggctggaatgggggccaggctgagccgatctggtctcgtgttcgctggctgatcattgcagtatcagagggtggagatgtcagtctgtccacgtggagagaagttgccctccaggccgacaggaggccatgcccaccgcccctggacaggcttcgtctcagaaggctctatctgctgggctggcggccatccccgtgttgggtggaccccgagcacggttgcctgaggtccgatggcccgagagctgggactcagttcttggcctgctagcggctgaacaggccgcacatctcacttcagttgtggcctcattcagcagaatgactctggaaccatcctctgttacccgcagatcctgtcccatgggctctggccccaagatgttggggggccccacggagagttgacttggtagagttcctttctgggaagaaagtaggagtggctgaccaggccctgctcatcacccggatagaggacacggaccctgtgtggtattttggcattttggctcagagtccaatgtaccatgttgcccagaatttcatacttacggcctttacatgaatacgtcttgatcagacattcagagattagtcttaggtttccacgtaagtcactgaaaacagtaaaacaggctgcttagatttctagcagtatgtgtgctcttatccccagctgttagcacgttagtaatacttttggggaggagttgtctgtcctggtcagttttcacagaggcggttgtaagaggatgtggttattttctccatgtctgtagttgctttgcggcatctccatttcacgggcaacaatagggagaccccatctctacagaaagtaaaagaaaatgagccaggtgtggtggcatgtgcctgtaaccccagctactcaggaggccgaggcgggaggatccccaagcccaggagtttgaggctgcagtgagttatggcctctgcactccagcctgggtgacagagtgagagacctaatctctaaaaacaaaaaataacaaaatgtgctttggggtcaggtgtggagatcagggtcggggaggtcatgaggtaggtaggggtcaggatgtggacagtcatgggctggtgggtgtggcagccgtgaggggtgggtggtggcctgggaggcagggcctgggcagggcttctgcacttctgctgcttacccagccccctctgggttcgaggactctccttgacaagggctgagctctcgggcactgcgttggactcagctgcctactgggaggctggggagaatggacctgtgagaccttgtttgtcctcttccctgcccagctcttgtagaccccaggcctggctgtccgcagggccaggagctgcagccatggcagccaccagcctcccacatgagccccagctcccagccccacacgcccactcctttgcccatgtggtgtcagctctggcctccgcttccacacatggaccctcagaccttgcacatctgttgtttcccttgcagggcagtgatgatgacatgaaatgaggtggggtcactcctgtttagggatgagactggggcccagggaggggcaggtgtgaagttgctgagggcagagggagacccagggctacctgctcctaatgaccagcctcacgttctccactgctcactccctgccgttcaccagctgcatgaccttgagcagtgcactcaactgtaaacagaggtgaaaacactcctttaccaactgttttaggggccactcttgtttgaggccttgaacctcctttcagttccgtggtggtcctgagcctctgaatctgggtatggcccctgctgggtcctggtctcttaggcagcacgatggcctccctgctcaaggccctgcacccaggggcagattgtgggaggcccactggccatggctgggccctatcgcagagagcctgtcagcacggccatttccacacccaggctggctgggaagcaagctacgaggtgctcaaaggccctctatgtctgcaggtagccccgtcccacacaggcgaggatcgttgggcctccttagtagccaaaggaactgaggtccagagcagggaatgtgttgcccagtgtcagcatggtctgctctggggtcaggcgtcttgccctggtcctaagccaccccaagccaaggcatgtccctgggcccatttcctctctcgaggtcttgggttccctatttctgatgtgtgtgaaaggaaggcctgtcttctggggtgaccatgaggctcagtgggaggagctgccaggcttgagctgggacttggcacctggccagccttttttctatttcattgtaccttgatgggctgtcagttctgaagagaaaaaatacactaggaatccattcttcctccaccattctccctggcagagggaagtgactacacccctatggtgtggacatactgacgctcctccatgaagcagcaaagttctgttgtttcaggagactgtgggccttgaggatgtggtagtgacctcaccagaggagttggcaattcctaagtgctgcctggaggcctctacagagacataatgttggagaacttctgccacatggcagtgctgggtaagacccctctgtccccaccagtgcccttgaggttatgggtgttggtaggtctgtggcctccatttccatgacgatggtgttaaggactgcatgtttgtgtccccccccaaagtttatatgttgaaaccctgacccccaggagggtggtattaggaggtggggcctttgggaggtgactaggcttaggtgagatcgtgagggtggggctcgccgatgagatcgagtccttataagaaaaggaaggaactagagcgaggtcactttgtgctgtgtgagcatacaagaaaactgccatcttcaagctgggtgcagtggctcacgcctgtaatcccagcactggaaggccaaggcattaggattgcatgagtccaggagttcgagaccagcctaggcatgataagaccttattgctaaaaaaaaaaaaaggaaataaaatagaaaattgccatctgcaaatgagaaagccttcagccgacaccagactgccagtgcctttgattttggactttcagtccccagatctgtgaaaaattaatttatgttgtttaagacacctagcctgtggtattttgttatcgcaatccaaactgactgagacaggcagtaaggagagaacagaggttccagcctgcttcaggtccaggcagttctgccattgcccctaactcctcagtgccagtcatgggccaggcccctgggggacttggaatgagtaaaacatgcacctattgttaaggttcacctggtccagaaggggaggcagacccacctgcccaccatgacccggacagaggcgataaatacggagcacctcatggccagggcctggaggattcccaccataccctacccagcgccaataacagagggaccctggagttgtgtacacaagatagcagttcagtgcttgcacacatactagttgagaagggaaatcagggctaatgaaacagctcaactgtctggcagagccaggctccttctgccatgatacagtttggatgtttgtccctttctaatcttatatggaaatttgatccccagtgttgaaggtggggcctggtgggagatgttcctgttatcgggatggatccttcatgaatagcctggtgccatctttgtggtaacaagtgagttctcacttgattagtttctgtgagaactgtttgttaaaaagagcctggtggcacctccctcccttcttcctccttctcttgctatgtgatgctgctgccctttgccttccgtcatgagtggaagctccctgaagcccccaccagaagcaaatgctggcaccatgctgcttgtacagcctgcagaactgtgagccaaataaacctcttttctttataaatt

SEQ ID NO: 7261 - protein, 57 aa, Homo sapiens [sequence omitted]

SEQ ID NO: 7262 - DNA, 6518 bp, Homo sapiens
gggggtagcgggaagggaggcagaagggggacggccccctgctgccacgtcgccagcagaggttgtgtgtggagttcagaaaagactccaaaagctgaccaggacggcggaggagatcctggtgagggcgaggaggtccgatggcccgagagctgggactcagttcttggcctgctagcggctgaacaggccgcacatctcacttcagttgtggcctcattcagcagaatgactctggaaccatcctctgttacccgcagatcctgtcccatgggctctggccccaagatgttggggggccccacggagagttgacttggtagagttcctttctgggaagaaagtaggagtggctgaccaggccctgctcatcacccggatagaggacacggaccctgtgtggtattttggcattttggctcagagtccaatgtaccatgttgcccagaatttcatacttacggcctttacatgaatacgtcttgatcagacattcagagattagtcttaggtttccacgtaagtcactgaaaacagtaaaacaggctgcttagatttctagcagtatgtgtgctcttatccccagctgttagcacgttagtaatacttttggggaggagttgtctgtcctggtcagttttcacagaggcggttgtaagaggatgtggttattttctccatgtctgtagttgctttgcggcatctccatttcacgggcaacactcactgcctgcagctgagattccagaacgccctgtgtccacagtgattagcctcgtctttcagcgagcataaaataggtgcattgtccttttcttttcttgaggcagggtctcactctgttgaccaggctggagtgaagtggtgtgatcccagctcactgcagcctcgacctccctggcttgagtgatcctcccgccccagcctcctgagtagctgggactagaggcacgcaccaccgcgcctacctttttattttttttgtagagacagggtctcactgtgttgcccaggctggtcttgaactcttggcctcaagcgatcctccttcctcatccttctaaagtgctgggattacaggtgtgagccacagcactcggcctaaataggtttttcttgctatgttattttcagtgctttgcccttgaattcttttcctctcttaaattcatatcatttggccgagtcagcacgtagtttgcattccagcgtctgctgttgattccactgaaacctctgttctcatgaaggagaggatttggctcgctgtggtttctcgtactttcacatctctgtagatacaggggcaaaagtcattgctgacagagccctatctatgtcctggaagtgtgtgtttcttgctttgaatgcatgtgtgaagattataaaagccaaatagtttttaaagatctcggtgctgaacgacagtcccagttcccatttgtgtcccattgtctttgtggtgtcacccgcactgtttgcttcattgtctggggaacttctgcacatccatgtactttgtgccatttctgggctcacgtgtcactcctaatagagcctcttaaccaagactgctggattgcagctgcttgaggcaacacaggaggttagaacatgtcccgagggctctgaaacagtaggacatcctgggtgggtggagctggggagggcatgggcaggccagctggccgagctcctggctggctctcctgagtcctctggacatggcttgtccctgtgagactgtagctcttcaggacctgagctcttcccgttcttgacctgctcttgtgctgactgtgctgggctgatgggtaggcgcttgtccccagtgagtggctgtgtcctcagggtgcccctcttccagaccaactgcagcaaggcctggagcctgactctaggtgcagcccttgtggctggaatcccttgtgccacccaggggactcgggccctgctcctcctgcagcccctcctcacctgggctcgctgctggagtgaggtttttagggagcccagagcgtactcatctctgagctgctgggcccagctgcctggtgcatacctcttgcctcggtcctgtcccccagaacgctttatggagactgccgtgtcctccgagcactttgttttcacttcctgacccgtctcagaagctcaagtggttgaatgttttagcctcagaatctttttccccaagccctctcaggtggagccccgctgtaccagacaccacagcacagctctgtgaggctgtgtctcttcactctgtttctggggctgctgaggcccctgggaagccctggagcttgccagagcagagcgagaaagtctctggtcctgtttaaatgcctccgcgttttatctgtgagcaccaggctggagccactccctgtcttctcacagtgcccctgcaagttgcagcctcagttttccagtggctcgtggggtagcaggtgctgcgtcatatggtttgggacctctgtggctgcttccagcctgctaatagaacctctttccaccactgccttcatctttggggtggcacccctgagtgctcaggcctgagggcgctcctgtgtcctcactcgggacaggcagcctccactctgggagctcccatccctcgggatgcccaggagaggccatactttcagggtggcatggtgaattcaggggttaggatgggtaggtggtctttcagccccttctgcgttggggttggtttacagaacacctgtcctgcctgtgccagcctggccttctgcgagcaccccaggcacgctgtcctggaagttgtctgtctcctgcataggagggtctagagcagaccttgccctgggcctgtctgtgcgtgacttccatatgcttcattcgtgctcagccatggctgagcatgcgatggagagcacctggaccgcccctgacgtcgcaggccactgttcttatccagtgggccaagtgattgattgctagtggtggggttgattggaagaaaggaagtcgcagcccctgcccacggcttccccagctcgctggggttggaggactgtcatcagttgtccccagttaaagtccatttggaggaggttcagggtcccagtggctggatgtgcttgtggagggacacggtttgaggcaggggtttgcagaaggtgtagactgcatccattcttgggaggctgtggcacagggcagtgacaacttgggacaaatcaagacccgtccacactgcacctcagggacctcacctcacgccccacataaatgtgcttattggggggccgggtgtggtggcttctgcctgaaatcccagtactctggaaggccacggcaggaggatcactttagttcaggagtttgaaaccagcctgggcaacatagggagaccccatctctacagaaagtaaaagaaaatgagccaggtgtggtggcatgtgcctgtaaccccagctactcaggaggccgaggcgggaggatccccaagcccaggagtttgaggctgcagtgagttatggcctctgcactccagcctgggtgacagagtgagagacctaatctctaaaaacaaaaaataacaaaatgtgctttggggtcaggtgtggagatcagggtcggggaggtcatgaggtaggtaggggtcaggatgtggacagtcatgggctggtgggtgtggcagccgtgaggggtgggtggtggcctgggaggcagggcctgggcagggcttctgcacttctgctgcttacccagccccctctgggttcgaggactctccttgacaagggctgagctctcgggcactgcgttggactcagctgcctactgggaggctggggagaatggacctgtgagaccttgtttgtcctcttccctgcccagctcttgtagaccccaggcctggctgtccgcagggccaggagctgcagccatggcagccaccagcctcccacatgagccccagctcccagccccacacgcccactcctttgcccatgtggtgtcagctctggcctccgcttccacacatggaccctcagaccttgcacatctgttgtttcccttgcagggcagtgatgatgacatgaaatgaggtggggtcactcctgtttagggatgagactggggcccagggaggggcaggtgtgaagttgctgagggcagagggagacccagggctacctgctcctaatgaccagcctcacgttctccactgctcactccctgccgttcaccagctgcatgaccttgagcagtgcactcaactgtaaacagaggtgaaaacactcctttaccaactgttttaggggccactcttgtttgaggccttgaacctcctttcagttccgtggtggtcctgagcctctgaatctgggtatggcccctgctgggtcctggtctcttaggcagcacgatggcctccctgctcaaggccctgcacccaggggcagattgtgggaggcccactggccatggctgggccctatcgcagagagcctgtcagcacggccatttccacacccaggctggctgggaagcaagctacgaggtgctcaaaggccctctatgtctgcaggtagccccgtcccacacaggcgaggatcgttgggcctccttagtagccaaaggaactgaggtccagagcagggaatgtgttgcccagtgtcagcatggtctgctctggggtcaggcgtcttgccctggtcctaagccaccccaagccaaggcatgtccctgggcccatttcctctctcgaggtcttgggttccctatttctgatgtgtgtgaaaggaaggcctgtcttctggggtgaccatgaggctcagtgggaggagctgccaggcttgagctgggacttggcacctggccagccttttttctatttcattgtaccttgatgggctgtcagttctgaagagaaaaaatacactaggaatccattcttcctccaccattctccctggcagagggaagtgactacacccctatggtgtggacatactgacgctcctccatgaagcagcaaagttctgttgtttcaggagactgtgggccttgaggatgtggtagtgacctcaccagaggagttggcaattcctaagtgctgcctggaggcctctacagagacataatgttggagaacttctgccacatggcagtgctgggtaagacccctctgtccccaccagtgcccttgaggttatgggtgttggtaggtctgtggcctccatttccatgacgatggtgttaaggactgcatgtttgtgtccccccccaaagtttatatgttgaaaccctgacccccaggagggtggtattaggaggtggggcctttgggaggtgactaggcttaggtgagatcgtgagggtggggctcgccgatgagatcgagtccttataagaaaaggaaggaactagagcgaggtcactttgtgctgtgtgagcatacaagaaaactgccatcttcaagctgggtgcagtggctcacgcctgtaatcccagcactggaaggccaaggcattaggattgcatgagtccaggagttcgagaccagcctaggcatgataagaccttattgctaaaaaaaaaaaaaggaaataaaatagaaaattgccatctgcaaatgagaaagccttcagccgacaccagactgccagtgcctttgattttggactttcagtccccagatctgtgaaaaattaatttatgttgtttaagacacctagcctgtggtattttgttatcgcaatccaaactgactgagacaggcagtaaggagagaacagaggttccagcctgcttcaggtccaggcagttctgccattgcccctaactcctcagtgccagtcatgggccaggcccctgggggacttggaatgagtaaaacatgcacctattgttaaggttcacctggtccagaaggggaggcagacccacctgcccaccatgacccggacagaggcgataaatacggagcacctcatggccagggcctggaggattcccaccataccctacccagcgccaataacagagggaccctggagttgtgtacacaagatagcagttcagtgcttgcacacatactagttgagaagggaaatcagggctaatgaaacagctcaactgtctggcagagccaggctccttctgccatgatacagtttggatgtttgtccctttctaatcttatatggaaatttgatccccagtgttgaaggtggggcctggtgggagatgttcctgttatcgggatggatccttcatgaatagcctggtgccatctttgtggtaacaagtgagttctcacttgattagtttctgtgagaactgtttgttaaaaagagcctggtggcacctccctcccttcttcctccttctcttgctatgtgatgctgctgccctttgccttccgtcatgagtggaagctccctgaagcccccaccagaagcaaatgctggcaccatgctgcttgtacagcctgcagaactgtgagccaaataaacctcttttctttataaatt

SEQ ID NO: 7263 - protein, 132 aa, Homo sapiens [sequence omitted]

SEQ ID NO: 7264 - DNA, 5520 bp, Homo sapiens
aggccaggcgtgtgtcctgcaagtgctaggaccagccacccctccccatggcctccaagccggctgccgggaagagcagaggggagaagcggaagagggtggtgctgacactgaaggagaagattgacatctgcacgcgcctggagaagggcgagagccggaaggcactgatgcaggagtacaatgtgggcatgtccaccctctacgacatcagggcccacaaggcgcagctgctccggttcttcgccagctcggactccaacaaggcgctggagcagcggcgcacgctgcacacgcccaagctggagcacctggaccgcgtcctgtacgagtggttcctggggaagcgctccgagggcgtccccgtgtcaggccccatgctcatcgagaaggccaaggacttctacgagcagatgcagctcactgagccctgcgtgttctccggagggtggctttggcgctttaaggccagacacggcattaaaaagctagatgcatccagtgaaaagcagtcagccgaccaccaggccgcggagcagttctgtgcgtttttcaggagcttggctgctgagcacgggctgtccgccgagcaggtttacaacgctgatgagaccggccttttctggcggtgcctgccaaatcccactccggaaggcggggctgtgcctggccccaagcagggcaaggaccggctgaccgtgctgatgtgtgccaacgccacgggctcccacaggctcaagcccttggccatcgggaagtgcagcggtcccagggctttcaaaggcatccagcacctgcccgtcgcctataaggcccaggggaatgcctgggtggacaaggagattttttccgattggttccatcatatctttgtgccctcggtgagagagcacttcagaaccataggtttgccggaagacagcaaagccgttctcttgctggacagctcccgggctcacccgcaggaggccgagctggtgtccagtaacgttttcaccatcttcctgcctgccagcgtggcctcattggtgcagcccatggagcagggcattcggagagatttcatgaggaacttcattaaccctccggtccccctgcagggcccccatgcccgctacaacatgaacgatgccatattcagcgtggcctgtgcctggaacgcagtccctagccacgtcttcaggcgggcctggaggaagctgtggccgtcggttgcgtttgccgaaggctcctcctctgaggaggagttggaggcagagtgcttcccagtgaagccccacaacaagtcctttgcacacatcctggagcttgtgaaggaaggctcctcctgcccgggccagcttcgccagcgccaggccgccagctggggggtagcgggaagggaggcagaagggggacggccccctgctgccacgtcgccagcagaggttgtgtgtggagttcagaaaagactccaaaagctgaccaggacggcggaggagatcctggtgagggcgaggaggtggcctgggagcaggcggccgtggcctttgacgcagtcctgcgctttgcggagcggcagccatgcttcagtgcgcaggaagtggggcagctgcgggcgctgcgtgccgtgttccggagccagcagcaggtgaggaggcggcgtggtgccctcggggctgtggtcaaggttgaagccctccaggagggccctggtggctgtggggccacagctcagtctcccttgccctgctcatccacagcaggtgacaactgatggcttctctgccctgccctggccactggccctgtttctccccacaccctggagtggcatggtcctgtgccccgaccccacctgaggcaggagggcatgtgcagacactcaagagcccttccaggagtgggtcgcccacgggtgtggctcgggtgcccaggacggtctgtgcccgaggttcctgtcaatacaggttttattttatcacttgccgtgtcatccgaaagtgaggaaatgttttggaagggtccaccctagcctagaacaagccagagccgcaccctggctggaatgggggccaggctgagccgatctggtctcgtgttcgctggctgatcattgcagtatcagagggtggagatgtcagtctgtccacgtggagagaagttgccctccaggccgacaggaggccatgcccaccgcccctggacaggcttcgtctcagaaggctctatctgctgggctggcggccatccccgtgttgggtggaccccgagcacggttgcctgaggtccgatggcccgagagctgggactcagttcttggcctgctagcggctgaacaggccgcacatctcacttcagttgtggcctcattcagcagaatgactctggaaccatcctctgttacccgcagatcctgtcccatgggctctggccccaagatgttggggggccccacggagagttgacttggtagagttcctttctgggaagaaagtaggagtggctgaccaggccctgctcatcacccggatagaggacacggaccctgtgtggtattttggcattttggctcagagtccaatgtaccatgttgcccagaatttcatacttacggcctttacatgaatacgtcttgatcagacattcagagattagtcttaggtttccacgtaagtcactgaaaacagtaaaacaggctgcttagatttctagcagtatgtgtgctcttatccccagctgttagcacgttagtaatacttttggggaggagttgtctgtcctggtcagttttcacagaggcggttgtaagaggatgtggttattttctccatgtctgtagttgctttgcggcatctccatttcacgggcaacactcactgcctgcagctgagattccagaacgccctgtgtccacagtgattagcctcgtctttcagcgagcataaaataggtgcattgtccttttcttttcttgaggcagggtctcactctgttgaccaggctggagtgaagtggtgtgatcccagctcactgcagcctcgacctccctggcttgagtgatcctcccgccccagcctcctgagtagctgggactagaggcacgcaccaccgcgcctacctttttattttttttgtagagacagggtctcactgtgttgcccaggctggtcttgaactcttggcctcaagcgatcctccttcctcatccttctaaagtgctgggattacaggtgtgagccacagcactcggcctaaataggtttttcttgctatgttattttcagtgctttgcccttgaattcttttcctctcttaaattcatatcatttggccgagtcagcacgtagtttgcattccagcgtctgctgttgattccactgaaacctctgttctcatgaaggagaggatttggctcgctgtggtttctcgtactttcacatctctgtagatacaggggcaaaagtcattgctgacagagccctatctatgtcctggaagtgtgtgtttcttgctttgaatgcatgtgtgaagattataaaagccaaatagtttttaaagatctcggtgctgaacgacagtcccagttcccatttgtgtcccattgtacaggcgaggatcgttgggcctccttagtagccaaaggaactgaggtccagagcagggaatgtgttgcccagtgtcagcatggtctgctctggggtcaggcgtcttgccctggtcctaagccaccccaagccaaggcatgtccctgggcccatttcctctctcgaggtcttgggttccctatttctgatgtgtgtgaaaggaaggcctgtcttctggggtgaccatgaggctcagtgggaggagctgccaggcttgagctgggacttggcacctggccagccttttttctatttcattgtaccttgatgggctgtcagttctgaagagaaaaaatacactaggaatccattcttcctccaccattctccctggcagagggaagtgactacacccctatggtgtggacatactgacgctcctccatgaagcagcaaagttctgttgtttcaggagactgtgggccttgaggatgtggtagtgacctcaccagaggagttggcaattcctaagtgctgcctggaggcctctacagagacataatgttggagaacttctgccacatggcagtgctgggtaagacccctctgtccccaccagtgcccttgaggttatgggtgttggtaggtctgtggcctccatttccatgacgatggtgttaaggactgcatgtttgtgtccccccccaaagtttatatgttgaaaccctgacccccaggagggtggtattaggaggtggggcctttgggaggtgactaggcttaggtgagatcgtgagggtggggctcgccgatgagatcgagtccttataagaaaaggaaggaactagagcgaggtcactttgtgctgtgtgagcatacaagaaaactgccatcttcaagctgggtgcagtggctcacgcctgtaatcccagcactggaaggccaaggcattaggattgcatgagtccaggagttcgagaccagcctaggcatgataagaccttattgctaaaaaaaaaaaaaggaaataaaatagaaaattgccatctgcaaatgagaaagccttcagccgacaccagactgccagtgcctttgattttggactttcagtccccagatctgtgaaaaattaatttatgttgtttaagacacctagcctgtggtattttgttatcgcaatccaaactgactgagacaggcagtaaggagagaacagaggttccagcctgcttcaggtccaggcagttctgccattgcccctaactcctcagtgccagtcatgggccaggcccctgggggacttggaatgagtaaaacatgcacctattgttaaggttcacctggtccagaaggggaggcagacccacctgcccaccatgacccggacagaggcgataaatacggagcacctcatggccagggcctggaggattcccaccataccctacccagcgccaataacagagggaccctggagttgtgtacacaagatagcagttcagtgcttgcacacatactagttgagaagggaaatcagggctaatgaaacagctcaactgtctggcagagccaggctccttctgccatgatacagtttggatgtttgtccctttctaatcttatatggaaatttgatccccagtgttgaaggtggggcctggtgggagatgttcctgttatcgggatggatccttcatgaatagcctggtgccatctttgtggtaacaagtgagttctcacttgattagtttctgtgagaactgtttgttaaaaagagcctggtggcacctccctcccttcttcctccttctcttgctatgtgatgctgctgccctttgccttccgtcatgagtggaagctccctgaagcccccaccagaagcaaatgctggcaccatgctgcttgtacagcctgcagaactgtgagccaaataaacctcttttctttataaatt

SEQ ID NO: 7265 - protein, 101 aa, Homo sapiens
MCEDYKSQIVFKDLGAERQSQFPFVSHCTGEDRWASLVAKGTEVQSRECVAQCQHGLLWGQASCPGPKPPQAKACPWAHFLSRGLGFPISDVCERKACLLG

SEQ ID NO: 7266 - DNA, 3590 bp, Homo sapiens
ggactggaggagaaccgagtggccggcacttccggccggcggcggctgctccgggtgagcaggcccctgaagtgctgtgcctggagataccattgtggaccctggagaggcacctgctgcttatgcggtaaaacctctaccaccccaaacctggtcagtttgaggggagccgctgccatagtatccacagagaaggccggagttccagccgtgtggagcagcagaggggagtctgacagggtcacctcctacacagagagaattggcagctgactgcactgccaggagccaaggcctaggtgtgtggagcctggaagaccagggatacctgaggcaggaggtgcagcgtgtggagtgagaaacccgagagggactggggcctgtgctcaggatcagcagagcaggcaggcagagtggagagggagagacggagccccagaaggggagcaggaggagagggaagtagtggcagcagcccaggccaggcgtgtgtcctgcaagtgctaggaccagccacccctccccatggcctccaagccggctgccgggaagagcagaggggagaagcggaagagggtggtgctgacactgaaggagaagattgacatctgcacgcgcctggagaagggcgagagccggaaggcactgatgcaggagtacaatgtgggcatgtccaccctctacgacatcagggcccacaaggcgcagctgctccggttcttcgccagctcggactccaacaaggcgctggagcagcggcgcacgctgcacacgcccaagctggagcacctggaccgcgtcctgtacgagtggttcctggggaagcgctccgagggcgtccccgtgtcaggccccatgctcatcgagaaggccaaggacttctacgagcagatgcagctcactgagccctgcgtgttctccggagggtggctttggcgctttaaggccagacacggcattaaaaagctagatgcatccagtgaaaagcagtcagccgaccaccaggccgcggagcagttctgtgcgtttttcaggagcttggctgctgagcacgggctgtccgccgagcaggtttacaacgctgatgagaccggccttttctggcggtgcctgccaaatcccactccggaaggcggggctgtgcctggccccaagcagggcaaggaccggctgaccgtgctgatgtgtgccaacgccacgggctcccacaggctcaagcccttggccatcgggaagtgcagcggtcccagggctttcaaaggcatccagcacctgcccgtcgcctataaggcccaggggaatgcctgggtggacaaggagattttttccgattggttccatcatatctttgtgccctcggtgagagagcacttcagaaccataggtttgccggaagacagcaaagccgttctcttgctggacagctcccgggctcacccgcaggaggccgagctggtgtccagtaacgttttcaccatcttcctgcctgccagcgtggcctcattggtgcagcccatggagcagggcattcggagagatttcatgaggaacttcattaaccctccggtccccctgcagggcccccatgcccgctacaacatgaacgatgccatattcagcgtggcctgtgcctggaacgcagtccctagccacgtcttcaggcgggcctggaggaagctgtggccgtcggttgcgtttgccgaaggctcctcctctgaggaggagttggaggcagagtgcttcccagtgaagccccacaacaagtcctttgcacacatcctggagcttgtgaaggaaggctcctcctgcccgggccagcttcgccagcgccaggccgccagctggggggtagcgggaagggaggcagaagggggacggccccctgctgccacgtcgccagcagaggttgtgtgtggagttcagaaaagactccaaaagctgaccaggacggcggaggagatcctggtgagggcgaggaggtggcctgggagcaggcggccgtggcctttgacgcagtcctgcgctttgcggagcggcagccatgcttcagtgcgcaggaagtggggcagctgcgggcgctgcgtgccgtgttccggagccagcagcaggagactgtgggccttgaggatgtggtagtgacctcaccagaggagttggcaattcctaagtgctgcctggaggcctctacagagacataatgttggagaacttctgccacatggcagtgctgggtaagacccctctgtccccaccagtgcccttgaggttatgggtgttggtaggtctgtggcctccatttccatgacgatggtgttaaggactgcatgtttgtgtccccccccaaagtttatatgttgaaaccctgacccccaggagggtggtattaggaggtggggcctttgggaggtgactaggcttaggtgagatcgtgagggtggggctcgccgatgagatcgagtccttataagaaaaggaaggaactagagcgaggtcactttgtgctgtgtgagcatacaagaaaactgccatcttcaagctgggtgcagtggctcacgcctgtaatcccagcactggaaggccaaggcattaggattgcatgagtccaggagttcgagaccagcctaggcatgataagaccttattgctaaaaaaaaaaaaaggaaataaaatagaaaattgccatctgcaaatgagaaagccttcagccgacaccagactgccagtgcctttgattttggactttcagtccccagatctgtgaaaaattaatttatgttgtttaagacacctagcctgtggtattttgttatcgcaatccaaactgactgagacaggcagtaaggagagaacagaggttccagcctgcttcaggtccaggcagttctgccattgcccctaactcctcagtgccagtcatgggccaggcccctgggggacttggaatgagtaaaacatgcacctattgttaaggttcacctggtccagaaggggaggcagacccacctgcccaccatgacccggacagaggcgataaatacggagcacctcatggccagggcctggaggattcccaccataccctacccagcgccaataacagagggaccctggagttgtgtacacaagatagcagttcagtgcttgcacacatactagttgagaagggaaatcagggctaatgaaacagctcaactgtctggcagagccaggctccttctgccatgatacagtttggatgtttgtccctttctaatcttatatggaaatttgatccccagtgttgaaggtggggcctggtgggagatgttcctgttatcgggatggatccttcatgaatagcctggtgccatctttgtggtaacaagtgagttctcacttgattagtttctgtgagaactgtttgttaaaaagagcctggtggcacctccctcccttcttcctccttctcttgctatgtgatgctgctgccctttgccttccgtcatgagtggaagctccctgaagcccccaccagaagcaaatgctggcaccatgctgcttgtacagcctgcagaactgtgagccaaataaacctcttttctttataaatt

SEQ ID NO: 7267 - protein, 536 aa, Homo sapiens
MASKPAAGKSRGEKRKRVVLTLKEKIDICTRLEKGESRKALMQEYNVGMSTLYDIRAHKAQLLRFFASSDSNKALEQRRTLHTPKLEHLDRVLYEWFLGKRSEGVPVSGPMLIEKAKDFYEQMQLTEPCVFSGGWLWRFKARHGIKKLDASSEKQSADHQAAEQFCAFFRSLAAEHGLSAEQVYNADETGLFWRCLPNPTPEGGAVPGPKQGKDRLTVLMCANATGSHRLKPLAIGKCSGPRAFKGIQHLPVAYKAQGNAWVDKEIFSDWFHHIFVPSVREHFRTIGLPEDSKAVLLLDSSRAHPQEAELVSSNVFTIFLPASVASLVQPMEQGIRRDFMRNFINPPVPLQGPHARYNMNDAIFSVACAWNAVPSHVFRRAWRKLWPSVAFAEGSSSEEELEAECFPVKPHNKSFAHILELVKEGSSCPGQLRQRQAASWGVAGREAEGGRPPAATSPAEVVCGVQKRLQKLTRTAEEILVRARRWPGSRRPWPLTQSCALRSGSHASVRRKWGSCGRCVPCSGASSRRLWALRMW

SEQ ID NO: 7268 - DNA, 4480 bp, Homo sapiens
cccagacaccaccgagtgctgagtcctccagcctgtctagagcgtcccgaacgctttatggagactgccgtgtcctccgagcactttgttttcacttcctgacccgtctcagaagctcaagtggttgaatgttttagcctcagaatctttttccccaagccctctcaggtggagccccgctgtaccagacaccacagcacagctctgtgaggctgtgtctcttcactctgtttctggggctgctgaggcccctgggaagccctggagcttgccagagcagagcgagaaagtctctggtcctgtttaaatgcctccgcgttttatctgtgagcaccaggctggagccactccctgtcttctcacagtgcccctgcaagttgcagcctcagttttccagtggctcgtggggtagcaggtgctgcgtcatatggtttgggacctctgtggctgcttccagcctgctaatagaacctctttccaccactgccttcatctttggggtggcacccctgagtgctcaggcctgagggcgctcctgtgtcctcactcgggacaggcagcctccactctgggagctcccatccctcgggatgcccaggagaggccatactttcagggtggcatggtgaattcaggggttaggatgggtaggtggtctttcagccccttctgcgttggggttggtttacagaacacctgtcctgcctgtgccagcctggccttctgcgagcaccccaggcacgctgtcctggaagttgtctgtctcctgcataggagggtctagagcagaccttgccctgggcctgtctgtgcgtgacttccatatgcttcattcgtgctcagccatggctgagcatgcgatggagagcacctggaccgcccctgacgtcgcaggccactgttcttatccagtgggccaagtgattgattgctagtggtggggttgattggaagaaaggaagtcgcagcccctgcccacggcttccccagctcgctggggttggaggactgtcatcagttgtccccagttaaagtccatttggaggaggttcagggtcccagtggctggatgtgcttgtggagggacacggtttgaggcaggggtttgcagaaggtgtagactgcatccattcttgggaggctgtggcacagggcagtgacaacttgggacaaatcaagacccgtccacactgcacctcagggacctcacctcacgccccacataaatgtgcttattggggggccgggtgtggtggcttctgcctgaaatcccagtactctggaaggccacggcaggaggatcactttagttcaggagtttgaaaccagcctgggcaacatagggagaccccatctctacagaaagtaaaagaaaatgagccaggtgtggtggcatgtgcctgtaaccccagctactcaggaggccgaggcgggaggatccccaagcccaggagtttgaggctgcagtgagttatggcctctgcactccagcctgggtgacagagtgagagacctaatctctaaaaacaaaaaataacaaaatgtgctttggggtcaggtgtggagatcagggtcggggaggtcatgaggtaggtaggggtcaggatgtggacagtcatgggctggtgggtgtggcagccgtgaggggtgggtggtggcctgggaggcagggcctgggcagggcttctgcacttctgctgcttacccagccccctctgggttcgaggactctccttgacaagggctgagctctcgggcactgcgttggactcagctgcctactgggaggctggggagaatggacctgtgagaccttgtttgtcctcttccctgcccagctcttgtagaccccaggcctggctgtccgcagggccaggagctgcagccatggcagccaccagcctcccacatgagccccagctcccagccccacacgcccactcctttgcccatgtggtgtcagctctggcctccgcttccacacatggaccctcagaccttgcacatctgttgtttcccttgcagggcagtgatgatgacatgaaatgaggtggggtcactcctgtttagggatgagactggggcccagggaggggcaggtgtgaagttgctgagggcagagggagacccagggctacctgctcctaatgaccagcctcacgttctccactgctcactccctgccgttcaccagctgcatgaccttgagcagtgcactcaactgtaaacagaggtgaaaacactcctttaccaactgttttaggggccactcttgtttgaggccttgaacctcctttcagttccgtggtggtcctgagcctctgaatctgggtatggcccctgctgggtcctggtctcttaggcagcacgatggcctccctgctcaaggccctgcacccaggggcagattgtgggaggcccactggccatggctgggccctatcgcagagagcctgtcagcacggccatttccacacccaggctggctgggaagcaagctacgaggtgctcaaaggccctctatgtctgcaggtagccccgtcccacacaggcgaggatcgttgggcctccttagtagccaaaggaactgaggtccagagcagggaatgtgttgcccagtgtcagcatggtctgctctggggtcaggcgtcttgccctggtcctaagccaccccaagccaaggcatgtccctgggcccatttcctctctcgaggtcttgggttccctatttctgatgtgtgtgaaaggaaggcctgtcttctggggtgaccatgaggctcagtgggaggagctgccaggcttgagctgggacttggcacctggccagccttttttctatttcattgtaccttgatgggctgtcagttctgaagagaaaaaatacactaggaatccattcttcctccaccattctccctggcagagggaagtgactacacccctatggtgtggacatactgacgctcctccatgaagcagcaaagttctgttgtttcaggagactgtgggccttgaggatgtggtagtgacctcaccagaggagttggcaattcctaagtgctgcctggaggcctctacagagacataatgttggagaacttctgccacatggcagtgctgggtaagacccctctgtccccaccagtgcccttgaggttatgggtgttggtaggtctgtggcctccatttccatgacgatggtgttaaggactgcatgtttgtgtccccccccaaagtttatatgttgaaaccctgacccccaggagggtggtattaggaggtggggcctttgggaggtgactaggcttaggtgagatcgtgagggtggggctcgccgatgagatcgagtccttataagaaaaggaaggaactagagcgaggtcactttgtgctgtgtgagcatacaagaaaactgccatcttcaagctgggtgcagtggctcacgcctgtaatcccagcactggaaggccaaggcattaggattgcatgagtccaggagttcgagaccagcctaggcatgataagaccttattgctaaaaaaaaaaaaaggaaataaaatagaaaattgccatctgcaaatgagaaagccttcagccgacaccagactgccagtgcctttgattttggactttcagtccccagatctgtgaaaaattaatttatgttgtttaagacacctagcctgtggtattttgttatcgcaatccaaactgactgagacaggcagtaaggagagaacagaggttccagcctgcttcaggtccaggcagttctgccattgcccctaactcctcagtgccagtcatgggccaggcccctgggggacttggaatgagtaaaacatgcacctattgttaaggttcacctggtccagaaggggaggcagacccacctgcccaccatgacccggacagaggcgataaatacggagcacctcatggccagggcctggaggattcccaccataccctacccagcgccaataacagagggaccctggagttgtgtacacaagatagcagttcagtgcttgcacacatactagttgagaagggaaatcagggctaatgaaacagctcaactgtctggcagagccaggctccttctgccatgatacagtttggatgtttgtccctttctaatcttatatggaaatttgatccccagtgttgaaggtggggcctggtgggagatgttcctgttatcgggatggatccttcatgaatagcctggtgccatctttgtggtaacaagtgagttctcacttgattagtttctgtgagaactgtttgttaaaaagagcctggtggcacctccctcccttcttcctccttctcttgctatgtgatgctgctgccctttgccttccgtcatgagtggaagctccctgaagcccccaccagaagcaaatgctggcaccatgctgcttgtacagcctgcagaactgtgagccaaataaacctcttttctttataaatt

SEQ ID NO: 7269 - protein, 132 aa, Homo sapiens [sequence omitted]

SEQ ID NO: 7270 - DNA, 692 bp, Homo sapiens
agcaataaggtcttatcatgcctaggctggtctcgaactcctggactcatgcaatcctaatgccttggccttccagtgctgggattacaggcgcagaagccaccacacccggccccccaataagcacatttatgtggggcgtgaggtgaggtccctgaggtgcagtgtggacgggtcttgatttgtcccaagttgtcactgccctgtgccacagcctcccaagaatggatgcagtctacaccttctgcaaacccctgcctcaaaccgtgtccctccacaagcacatccagccactgggaccctgaacctcctccaaatggactttaactggggacaactgatgacagtcctccaaccccagcgagctggggaagccgtgggcaggggctgcgacttcctttcttccaatcaaccccaccactagcaatcaatcacttggcccactggataagaacagtggcctgcgacgtcaggggcggtccaggtgctctccatcgcatgctcagccatggctgagcacgaatgaagcatatggaagtcacgcacagacaggcccagggcaaggtctgctctagaccctcctatgcaggagacagacaacttccaggacagcgtgcctggggtgctcgcagaaggccaggctggcacaggcaggacaggtgttctgtaaaccaaccccaacgcagaagggg

SEQ ID NO: 7271 - protein, 43 aa, Homo sapiens [sequence omitted]

SEQ ID NO: 7272 - DNA, 8109 bp, Homo sapiens
tgtgcctggagataccattgtggaccctggagaggcacctgctgcttatgcggtaaaacctctaccaccccaaacctggtcagtttgaggggagccgctgccatagtatccacagagaaggccggagttccagccgtgtggagcagcagaggggagtctgacagggtcacctcctacacagagagaattggcagctgactgcactgccaggagccaaggcctaggtgtgtggagcctggaagaccagggatacctgaggcaggaggtgcagcgtgtggagtgagaaacccgagagggactggggcctgtgctcaggatcagcagagcaggcaggcagagtggagagggagagacggagccccagaaggggagcaggaggagagggaagtagtggcagcagcccaggccaggcgtgtgtcctgcaagtgctaggaccagccacccctccccatggcctccaagccggctgccgggaagagcagaggggagaagcggaagagggtggtgctgacactgaaggagaagattgacatctgcacgcgcctggagaagggcgagagccggaaggcactgatgcaggagtacaatgtgggcatgtccaccctctacgacatcagggcccacaaggcgcagctgctccggttcttcgccagctcggactccaacaaggcgctggagcagcggcgcacgctgcacacgcccaagctggagcacctggaccgcgtcctgtacgagtggttcctggggaagcgctccgagggcgtccccgtgtcaggccccatgctcatcgagaaggccaaggacttctacgagcagatgcagctcactgagccctgcgtgttctccggagggtggctttggcgctttaaggccagacacggcattaaaaagctagatgcatccagtgaaaagcagtcagccgaccaccaggccgcggagcagttctgtgcgtttttcaggagcttggctgctgagcacgggctgtccgccgagcaggtttacaacgctgatgagaccggccttttctggcggtgcctgccaaatcccactccggaaggcggggctgtgcctggccccaagcagggcaaggaccggctgaccgtgctgatgtgtgccaacgccacgggctcccacaggctcaagcccttggccatcgggaagtgcagcggtcccagggctttcaaaggcatccagcacctgcccgtcgcctataaggcccaggggaatgcctgggtggacaaggagattttttccgattggttccatcatatctttgtgccctcggtgagagagcacttcagaaccataggtttgccggaagacagcaaagccgttctcttgctggacagctcccgggctcacccgcaggaggccgagctggtgtccagtaacgttttcaccatcttcctgcctgccagcgtggcctcattggtgcagcccatggagcagggcattcggagagatttcatgaggaacttcattaaccctccggtccccctgcagggcccccatgcccgctacaacatgaacgatgccatattcagcgtggcctgtgcctggaacgcagtccctagccacgtcttcaggcgggcctggaggaagctgtggccgtcggttgcgtttgccgaaggctcctcctctgaggaggagttggaggcagagtgcttcccagtgaagccccacaacaagtcctttgcacacatcctggagcttgtgaaggaaggctcctcctgcccgggccagcttcgccagcgccaggccgccagctggggggtagcgggaagggaggcagaagggggacggccccctgctgccacgtcgccagcagaggttgtgtgtggagttcagaaaagactccaaaagctgaccaggacggcggaggagatcctggtgagggcgaggaggtggcctgggagcaggcggccgtggcctttgacgcagtcctgcgctttgcggagcggcagccatgcttcagtgcgcaggaagtggggcagctgcgggcgctgcgtgccgtgttccggagccagcagcaggtgaggaggcggcgtggtgccctcggggctgtggtcaaggttgaagccctccaggagggccctggtggctgtggggccacagctcagtctcccttgccctgctcatccacagcaggtgacaactgatggcttctctgccctgccctggccactggccctgtttctccccacaccctggagtggcatggtcctgtgccccgaccccacctgaggcaggagggcatgtgcagacactcaagagcccttccaggagtgggtcgcccacgggtgtggctcgggtgcccaggacggtctgtgcccgaggttcctgtcaatacaggttttattttatcacttgccgtgtcatccgaaagtgaggaaatgttttggaagggtccaccctagcctagaacaagccagagccgcaccctggctggaatgggggccaggctgagccgatctggtctcgtgttcgctggctgatcattgcagtatcagagggtggagatgtcagtctgtccacgtggagagaagttgccctccaggccgacaggaggccatgcccaccgcccctggacaggcttcgtctcagaaggctctatctgctgggctggcggccatccccgtgttgggtggaccccgagcacggttgcctgaggtccgatggcccgagagctgggactcagttcttggcctgctagcggctgaacaggccgcacatctcacttcagttgtggcctcattcagcagaatgactctggaaccatcctctgttacccgcagatcctgtcccatgggctctggccccaagatgttggggggccccacggagagttgacttggtagagttcctttctgggaagaaagtaggagtggctgaccaggccctgctcatcacccggatagaggacacggaccctgtgtggtattttggcattttggctcagagtccaatgtaccatgttgcccagaatttcatacttacggcctttacatgaatacgtcttgatcagacattcagagattagtcttaggtttccacgtaagtcactgaaaacagtaaaacaggctgcttagatttctagcagtatgtgtgctcttatccccagctgttagcacgttagtaatacttttggggaggagttgtctgtcctggtcagttttcacagaggcggttgtaagaggatgtggttattttctccatgtctgtagttgctttgcggcatctccatttcacgggcaacactcactgcctgcagctgagattccagaacgccctgtgtccacagtgattagcctcgtctttcagcgagcataaaataggtgcattgtccttttcttttcttgaggcagggtctcactctgttgaccaggctggagtgaagtggtgtgatcccagctcactgcagcctcgacctccctggcttgagtgatcctcccgccccagcctcctgagtagctgggactagaggcacgcaccaccgcgcctacctttttattttttttgtagagacagggtctcactgtgttgcccaggctggtcttgaactcttggcctcaagcgatcctccttcctcatccttctaaagtgctgggattacaggtgtgagccacagcactcggcctaaataggtttttcttgctatgttattttcagtgctttgcccttgaattcttttcctctcttaaattcatatcatttggccgagtcagcacgtagtttgcattccagcgtctgctgttgattccactgaaacctctgttctcatgaaggagaggatttggctcgctgtggtttctcgtactttcacatctctgtagatacaggggcaaaagtcattgctgacagagccctatctatgtcctggaagtgtgtgtttcttgctttgaatgcatgtgtgaagattataaaagccaaatagtttttaaagatctcggtgctgaacgacagtcccagttcccatttgtgtcccattgtctttgtggtgtcacccgcactgtttgcttcattgtctggggaacttctgcacatccatgtactttgtgccatttctgggctcacgtgtcactcctaatagagcctcttaaccaagactgctggattgcagctgcttgaggcaacacaggaggttagaacatgtcccgagggctctgaaacagtaggacatcctgggtgggtggagctggggagggcatgggcaggccagctggccgagctcctggctggctctcctgagtcctctggacatggcttgtccctgtgagactgtagctcttcaggacctgagctcttcccgttcttgacctgctcttgtgctgactgtgctgggctgatgggtaggcgcttgtccccagtgagtggctgtgtcctcagggtgcccctcttccagaccaactgcagcaaggcctggagcctgactctaggtgcagcccttgtggctggaatcccttgtgccacccaggggactcgggccctgctcctcctgcagcccctcctcacctgggctcgctgctggagtgaggtttttagggagcccagagcgtactcatctctgagctgctgggcccagctgcctggtgcatacctcttgcctcggtcctgtcccccagaacgctttatggagactgccgtgtcctccgagcactttgttttcacttcctgacccgtctcagaagctcaagtggttgaatgttttagcctcagaatctttttccccaagccctctcaggtggagccccgctgtaccagacaccacagcacagctctgtgaggctgtgtctcttcactctgtttctggggctgctgaggcccctgggaagccctggagcttgccagagcagagcgagaaagtctctggtcctgtttaaatgcctccgcgttttatctgtgagcaccaggctggagccactccctgtcttctcacagtgcccctgcaagttgcagcctcagttttccagtggctcgtggggtagcaggtgctgcgtcatatggtttgggacctctgtggctgcttccagcctgctaatagaacctctttccaccactgccttcatctttggggtggcacccctgagtgctcaggcctgagggcgctcctgtgtcctcactcgggacaggcagcctccactctgggagctcccatccctcgggatgcccaggagaggccatactttcagggtggcatggtgaattcaggggttaggatgggtaggtggtctttcagccccttctgcgttggggttggtttacagaacacctgtcctgcctgtgccagcctggccttctgcgagcaccccaggcacgctgtcctggaagttgtctgtctcctgcataggagggtctagagcagaccttgccctgggcctgtctgtgcgtgacttccatatgcttcattcgtgctcagccatggctgagcatgcgatggagagcacctggaccgcccctgacgtcgcaggccactgttcttatccagtgggccaagtgattgattgctagtggtggggttgattggaagaaaggaagtcgcagcccctgcccacggcttccccagctcgctggggttggaggactgtcatcagttgtccccagttaaagtccatttggaggaggttcagggtcccagtggctggatgtgcttgtggagggacacggtttgaggcaggggtttgcagaaggtgtagactgcatccattcttgggaggctgtggcacagggcagtgacaacttgggacaaatcaagacccgtccacactgcacctcagggacctcacctcacgccccacataaatgtgcttattggggggccgggtgtggtggcttctgcctgaaatcccagtactctggaaggccacggcaggaggatcactttagttcaggagtttgaaaccagcctgggcaacatagggagaccccatctctacagaaagtaaaagaaaatgagccaggtgtggtggcatgtgcctgtaaccccagctactcaggaggccgaggcgggaggatccccaagcccaggagtttgaggctgcagtgagttatggcctctgcactccagcctgggtgacagagtgagagacctaatctctaaaaacaaaaaataacaaaatgtgctttggggtcaggtgtggagatcagggtcggggaggtcatgaggtaggtaggggtcaggatgtggacagtcatgggctggtgggtgtggcagccgtgaggggtgggtggtggcctgggaggcagggcctgggcagggcttctgcacttctgctgcttacccagccccctctgggttcgaggactctccttgacaagggctgagctctcgggcactgcgttggactcagctgcctactgggaggctggggagaatggacctgtgagaccttgtttgtcctcttccctgcccagctcttgtagaccccaggcctggctgtccgcagggccaggagctgcagccatggcagccaccagcctcccacatgagccccagctcccagccccacacgcccactcctttgcccatgtggtgtcagctctggcctccgcttccacacatggaccctcagaccttgcacatctgttgtttcccttgcagggcagtgatgatgacatgaaatgaggtggggtcactcctgtttagggatgagactggggcccagggaggggcaggtgtgaagttgctgagggcagagggagacccagggctacctgctcctaatgaccagcctcacgttctccactgctcactccctgccgttcaccagctgcatgaccttgagcagtgcactcaactgtaaacagaggtgaaaacactcctttaccaactgttttaggggccactcttgtttgaggccttgaacctcctttcagttccgtggtggtcctgagcctctgaatctgggtatggcccctgctgggtcctggtctcttaggcagcacgatggcctccctgctcaaggccctgcacccaggggcagattgtgggaggcccactggccatggctgggccctatcgcagagagcctgtcagcacggccatttccacacccaggctggctgggaagcaagctacgaggtgctcaaaggccctctatgtctgcaggtagccccgtcccacacaggcgaggatcgttgggcctccttagtagccaaaggaactgaggtccagagcagggaatgtgttgcccagtgtcagcatggtctgctctggggtcaggcgtcttgccctggtcctaagccaccccaagccaaggcatgtccctgggcccatttcctctctcgaggtcttgggttccctatttctgatgtgtgtgaaaggaaggcctgtcttctggggtgaccatgaggctcagtgggaggagctgccaggcttgagctgggacttggcacctggccagccttttttctatttcattgtaccttgatgggctgtcagttctgaagagaaaaaatacactaggaatccattcttcctccaccattctccctggcagagggaagtgactacacccctatggtgtggacatactgacgctcctccatgaagcagcaaagttctgttgtttcaggagactgtgggccttgaggatgtggtagtgacctcaccagaggagttggcaattcctaagtgctgcctggaggcctctacagagacataatgttggagaacttctgccacatggcagtgctgggtaagacccctctgtccccaccagtgcccttgaggttatgggtgttggtaggtctgtggcctccatttccatgacgatggtgttaaggactgcatgtttgtgtccccccccaaagtttatatgttgaaaccctgacccccaggagggtggtattaggaggtggggcctttgggaggtgactaggcttaggtgagatcgtgagggtggggctcgccgatgagatcgagtccttataagaaaaggaaggaactagagcgaggtcactttgtgctgtgtgagcatacaagaaaactgccatcttcaagctgggtgcagtggctcacgcctgtaatcccagcactggaaggccaaggcattaggattgcatgagtccaggagttcgagaccagcctaggcatgataagaccttattgct

SEQ ID NO: 7273 - protein, 528 aa, Homo sapiens [sequence omitted]

SEQ ID NO: 7274 - DNA, 2979 bp, Homo sapiens
gcccctgaagtgctgtgcctggagataccattgtggaccctggagaggcacctgctgcttatgcgagagaattggcagctgactgcactgccaggagccaaggcctaggtgtgtggagcctggaagaccagggatacctgaggcaggaggtgcagcgtgtggagtgagaaacccgagagggactggggcctgtgctcaggatcagcagagcaggcaggcagagtggagagggagagacggagccccagaaggggagcaggaggagagggaagtagtggcagcagcccaggccaggcgtgtgtcctgcaagtgctaggaccagccacccctccccatggcctccaagccggctgccgggaagagcagaggggagaagcggaagagggtggtgctgacactgaaggagaagattgacatctgcacgcgcctggagaagggcgagagccggaaggcactgatgcaggagtacaatgtgggcatgtccaccctctacgacatcagggcccacaaggcgcagctgctccggttcttcgccagctcggactccaacaaggcgctggagcagcggcgcacgctgcacacgcccaagctggagcacctggaccgcgtcctgtacgagtggttcctggggaagcgctccgagggcgtccccgtgtcaggccccatgctcatcgagaaggccaaggacttctacgagcagatgcagctcactgagccctgcgtgttctccggagggtggctttggcgctttaaggccagacacggcattaaaaagctagatgcatccagtgaaaagcagtcagccgaccaccaggccgcggagcagttctgtgcgtttttcaggagcttggctgctgagcacgggctgtccgccgagcaggtttacaacgctgatgagaccggccttttctggcggtgcctgccaaatcccactccggaaggcggggctgtgcctggccccaagcagggcaaggaccggctgaccgtgctgatgtgtgccaacgccacgggctcccacaggctcaagcccttggccatcgggaagtgcagcggtcccagggctttcaaaggcatccagcacctgcccgtcgcctataaggcccaggggaatgcctgggtggacaaggagattttttccgattggttccatcatatctttgtgccctcggtgagagagcacttcagaaccataggtttgccggaagacagcaaagccgttctcttgctggacagctcccgggctcacccgcaggaggccgagctggtgtccagtaacgttttcaccatcttcctgcctgccagcgtggcctcattggtgcagcccatggagcagggcattcggagagatttcatgaggaacttcattaaccctccggtccccctgcagggcccccatgcccgctacaacatgaacgatgccatattcagcgtggcctgtgcctggaacgcagtccctagccacgtcttcaggcgggcctggaggaagctgtggccgtcggttgcgtttgccgaaggctcctcctctgaggaggagttggaggcagagtgcttcccagtgaagccccacaacaagtcctttgcacacatcctggagcttgtgaaggaaggctcctcctgcccgggccagcttcgccagcgccaggccgccagctggggggtagcgggaagggaggcagaagggggacggccccctgctgccacgtcgccagcagaggttgtgtgtggagttcagaaaagactccaaaagctgaccaggacggcggaggagatcctggtgagggcgaggaggtggcctgggagcaggcggccgtggcctttgacgcagtcctgcgctttgcggagcggcagccatgcttcagtgcgcaggaagtggggcagctgcgggcgctgcgtgccgtgttccggagccagcagcaggtgaggaggcggcgtggtgccctcggggctgtggtcaaggttgaagccctccaggagggccctggtggctgtggggccacagctcagtctcccttgccctgctcatccacagcaggtgacaactgatggcttctctgccctgccctggccactggccctgtttctccccacaccctggagtggcatggtcctgtgccccgaccccacctgaggcaggagggcatgtgcagacactcaagagcccttccaggagtgggtcgcccacgggtgtggctcgggtgcccaggacggtctgtgcccgaggttcctgtcaatacaggttttattttatcacttgccgtgtcatccgaaagtgaggaaatgttttggaagggtccaccctagcctagaacaagccagagccgcaccctggctggaatgggggccaggctgagccgatctggtctcgtgttcgctggctgatcattgcagtatcagagggtggagatgtcagtctgtccacgtggagagaagttgccctccaggccgacaggaggccatgcccaccgcccctggacaggcttcgtctcagaaggctctatctgctgggctggcggccatccccgtgttgggtggaccccgagcacggttgcctgaggtccgatggcccgagagctgggactcagttcttggcctgctagcggctgaacaggccgcacatctcacttcagttgtggcctcattcagcagaatgactctggaaccatcctctgttacccgcagatcctgtcccatgggctctggccccaagatgttggggggccccacggagagttgacttggtagagttcctttctgggaagaaagtaggagtggctgaccaggccctgctcatcacccggatagaggacacggaccctgtgtggtattttggcattttggctcagagtccaatgtaccatgttgcccagaatttcatacttacggcctttacatgaatacgtcttgatcagacattcagagattagtcttaggtttccacgtaagtcactgaaaacagtaaaacaggctgcttagatttct

SEQ ID NO: 7275 - protein, 528 aa, Homo sapiens [sequence omitted]

SEQ ID NO: 7276 - DNA, 1661 bp, Homo sapiens
gacagtgaaccctgcgctgaaggcgttggggctcctgcagttctggggcagccacaggcgcccagggtttcgtgccgatcagcccaggacggtcttcccggtgcagtttctgatgcggggagggcagtgctgccttccggtcaccaggaccagtgctcagcccgcctgcttgacccccttacttagctggggtccaatccatacccaatttagatgattcagacgatgggatttgaaacttttgaactgggtgcgacttaagcactgccctgctgtgctactcctgcaaagcccaggtgagcaacgaggactgcctgcaggtggagaactgcacccagctgggggagcagtgctggaccgcgcgcatccgtgagtggggggacgacagccgccaggcctaggtctctgccactgaactattaatctttctggccatctgtccgcatctgtgtgctgttttccttccacctgtccccgacccgtcccgcacctgcacccccaacaatcacccagcatctgtccctccagccatcctcctccatctgccactcctccactcatctgtccctccccatcctccatcttccactcctccacccatctgtccctccccatccctgagctcacttactcactcaccccatttctgacgctcagcgggtggtccatctgcctcggacatctggatagggctgagaccagggccgagaccaggccctcgcactgcttgcaatcctgaggccagcccagggggactctagagcattaggcagggtgggacaggaggaggcctggggcaggtcaggcaggtgagcacacagggcagccccatccccggatcccgctgctccccaggcgcagttggcctcctgaccgtcatcagcaaaggctgcagcttgaactgcgtggatgactcacaggactactacgtgggcaagaagaacatcacgtgctgtgacaccgacttgtgcaacgccagcggggcccatgccctgcagccggctgctgccatccttgcgctgctccctgcactcggcctgctgctctggggacccggccagctctaggctctggggggccccgctgcagcccacactgggtgtggtgccccaggcctctgtgccactcctcacacacccggcccagtgggagcctgtcctggttcctgaggcacatcctaacgcaagtctgaccatgtatgtctgcgcccctgtcccccaccctgaccctcccatggccctctccaggactcccacccggcagatcggctctattgacacagatccgcctgcagatggcccctccaaccctctctgctgctgtttccatggcccagcattctccacccttaaccctgtgctcaggcacctcttcccccaggaagccttccctgcccaccccatctatgacttgagccaggtctggtccgtggtgtcccccgcacccagcaggggacaggcactcaggagggcccggtaaaggctgagatgaagtggactgagtagaactggaggacaggagtcgacgtgagttcctgggagtctccagagatggggcctggaggcctggaggaaggggccaggcctcacattcgtggggctccctgaatggcagcctcagcacagcgtaggcccttaataaacacctgttggataagccag

SEQ ID NO: 7277 - protein, 189 aa, Homo sapiens
MTHRTTTWARRTSRAVTPTCATPAGPMPCSRLLPSLRCSLHSACCSGDPASSRLWGAPLQPTLGVVPQASVPLLTHPAQWEPVLVPEAHPNASLTMYVCAPVPHPDPPMALSRTPTRQIGSIDTDPPADGPSNPLCCCFHGPAFSTLNPVLRHLFPQEAFPAHPIYDLSQVWSVVSPAPSRGQALRRAR

SEQ ID NO: 7278 - DNA, 1162 bp, Homo sapiens
gcgctgaaggcgttggggctcctgcagttctggggcagccacaggcgcccagggtttcgtgccgatcagcccaggacggtcttcccggtgcagtttctgatgcggggagggcagtgctgccttccggtcaccaggaccagtgctcagcccgcctgcttgacccccttacttagctggggtccaatccatacccaatttagatgattcagacgatgggatttgaaacttttgaactgggtgcgacttaagcactgccctgctgtgctactcctgcaaagcccaggtgagcaacgaggactgcctgcaggtggagaactgcacccagctgggggagcagtgctggaccgcgcgcatccgcgcagttggcctcctgaccgtcatcagcaaaggctgcagcttgaactgcgtggatgactcacaggactactacgtgggcaagaagaacatcacgtgctgtgacaccgacttgtgcaacgccagcggggcccatgccctgcagccggctgctgccatccttgcgctgctccctgcactcggcctgctgctctggggacccggccagctctaggctctggggggccccgctgcagcccacactgggtgtggtgccccaggcctctgtgccactcctcacacacccggcccagtgggagcctgtcctggttcctgaggcacatcctaacgcaagtctgaccatgtatgtctgcgcccctgtcccccaccctgaccctcccatggccctctccaggactcccacccggcagatcggctctattgacacagatccgcctgcagatggcccctccaaccctctctgctgctgtttccatggcccagcattctccacccttaaccctgtgctcaggcacctcttcccccaggaagccttccctgcccaccccatctatgacttgagccaggtctggtccgtggtgtcccccgcacccagcaggggacaggcactcaggagggcccggtaaaggctgagatgaagtggactgagtagaactggaggacaggagtcgacgtgagttcctgggagtctccagagatggggcctggaggcctggaggaaggggccaggcctcacattcgtggggctccctgaatggcagcctcagcacagcgtaggcccttaataaacacctgttggataagccag

SEQ ID NO: 7279 - protein, 189 aa, Homo sapiens; identical to SEQ ID NO: 7277

SEQ ID NO: 7280 - DNA, 709 bp, Homo sapiens
cacctgcctgacctgccccaggcctcctcctgtcccaccctgcctaatgctctagagtccccctgggctggcctcaggattgcaagcagtgcgagggcctggtctcggccctggtctcagccctatccagatgtccgaggcagatggaccacccgctgagcgtcagaaatgggtgccagaatggacttggtctttgagaagagatccaaggttccctgagtaatgttccatgccaatctccactccccaccagcagcacccaagtcctgggagaccaagtgatcccgtccctgaggtggtaagcagtcacaccagggatggaaccagccttcctgtcccaggagaccctgccttgggaacccccatccagcggccctgggttctagtcccaccatgtgcctgttgcctccagggactccagattttcctgtttgctcttggccttctgcccacccaccccactgccatgggcccaaagcagccgggttccctggagatcctgtcttccacctagtgcagggcatgaggccggggccaggacagccggaccaggccctggggcttctgggagctgactcaccttgcagggagtcccaccaccaccttctggggccccacacggtcccatgctggaacacacatccctgtgtgtaattttttttatttcatgcagcattaattaaaaaaataaagatagcatgtcacttgc

SEQ ID NO: 7281 - protein, 94 aa, Homo sapiens
MPISTPHQQHPSPGRPSDPVPEVVSSHTRDGTSLPVPGDPALGTPIQRPWVLVPPCACCLQGLQIFLFALGLLPTHPTAMGPKQPGSLEILSST

SEQ ID NO: 7282 - DNA, 571 bp, Homo sapiens
agttcaagctgcagcctttgctgatgacggtcaggaggccaactgcgcctggggagcagcgggatccggggatggggctgccctgtgtgctcacctgcctgacctgccccaggcctcctcctgtcccaccctgcctaatgctctagagtccccctgggctggcctcaggattgcaagcagtgcgagggcctggtctcggccctggtctcagccctatccagatgtccgaggcagatggaccacccgctgagcgtcagaaatgggttgcctccagggactccagattttcctgtttgctcttggccttctgcccacccaccccactgccatgggcccaaagcagccgggttccctggagatcctgtcttccacctagtgcagggcatgaggccggggccaggacagccggaccaggccctggggcttctgggagctgactcaccttgcagggagtcccaccaccaccttctggggccccacacggtcccatgctggaacacacatccctgtgtgtaattttttttatttcatgcagcattaattaaaaaaataaagatagcatgtcacttgc

SEQ ID NO: 7283 - protein, 93 aa, Homo sapiens
MDHPLSVRNGLPPGTPDFPVCSWPSAHPPHCHGPKAAGFPGDPVFHLVQGMRPGPGQPDQALGLLGADSPCRESHHHLLGPHTVPCWNTHPCV

SEQ ID NO: 7284 - DNA, 590 bp, Homo sapiens
cacctgcctgacctgccccaggcctcctcctgtcccaccctgcctaatgctctagagtccccctgggctggcctcaggattgcaagcagtgcgagggcctggtctcggccctggtctcagccctatccagatgtccgaggcagatggaccacccgctgagcgtcagaaatgggaactctggaacagccagcgttaacatcaacacaggccttcagtctgatgagaaacatttaccatctattgtctcggaagcctgctacctggaggcttcatctgatgataaagccttggtctccacaaccccgtataacccagacattcctttctattgataactcttgcaagcgattgccaaccagaagatgtttaaatccacctataacctggaagcccccagttccagctgcccacctttctggactaaaccaatgtatatcttcaatatatttgattgatgtctcatgtctccctaaaatgggtaccatcaagctgtgcactgaccaccttgggcacatgttctcagggtctcctgggggctgtgtcacaggccatggtccctcatatttggctcagaataaatgtcttcaaat

SEQ ID NO: 7285 - protein, 139 aa, Homo sapiens
MGTLEQPALTSTQAFSLMRNIYHLLSRKPATWRLHLMIKPWSPQPRITQTFLSIDNSCKRLPTRRCLNPPITWKPPVPAAHLSGLNQCISSIYLIDVSCLPKMGTIKLCTDHLGHMFSGSPGGCVTGHGPSYLAQNKCL

SEQ ID NO: 7286 - DNA, 1815 bp, Homo sapiens
cacctgcctgacctgccccaggcctcctcctgtcccaccctgcctaatgctctagagtccccctgggctggcctcaggattgcaagcagtgcgagggcctggtctcggccctggtctcagccctatccagatgtccgaggcagatggaccacccgctgagcgtcagaaatgggtccctcggtggctgcttttgtgaccgtgtgtttcagaagaggaagctgcggctgtgggggtgactgaacccgggaccctgggtcgggagggtcccacctcaagcagagcagctccctgggacccttggaagctgcagtgctgggactgggccggatgtagacccccgggtcctcgcaggacacccccagcacctcccccttgtgccccaaaaaccacttcttagcctgaggcttcctgtcccatgtctcccagctcctcatcagcatctctgcccatccatccgtcagtctgtctacctgccccctaggagccaggccctgccccacggtggtgaaggagagtgactccgtgctgcccctgcaagccccggtcacaggggacggcagggaacaggtcgctgcctggtcgtgccaagagcttccctggaggagcggaggctagggcaagagcctcacccccttcctctcccttcctccttccttcccctcctctccgtgtgccctgcaggtatccctctggcctccccggctcacccctgctcccttccctgctgggggccagccaaggcctcacctggctgcagggccaagcctgccatcaacagggcaagcagcacagccttcgtggtcactggtgggctgtggtggagagggcctcaggtgactttatatggcctcaaatggggagaggctggactgcccacagtcaacaccagcgggtttcctggagccagtgagggccccggggctgggcaggtccgagtctcctccctgagcgacctgcacctccctctccctttgtccttctttccacctctggaggacagagcctacccagggccatatctcagccaccccgggctgagggctgaaacgtcctcaagacccagattatgcctctcccacctcccccacctcacagtgcaaggccagacaagggagaccctttctccagactcctccaggcctcggccttccagccaaggatgagggcacctccctgggccctgtgctcctatagaagctgtgccgccctctggggcccacggcccgcagggtgatgagccttggtcacagcgtcactgacagatcattagcaggtgctgcaaaggacaggggcaggggctgttccggtataaaccaaaagtaacattctaaggccccccagccatctgagtggaaccctcctcttggcaagggctttccgaagttaacctgaaaaactggttcaggccatgacagcaaagggttggatagcctcattatccctcctcccttcagaactctggaacagccagcgttaacatcaacacaggccttcagtctgatgagaaacatttaccatctattgtctcggaagcctgctacctggaggcttcatctgatgataaagccttggtctccacaaccccgtataacccagacattcctttctattgataactcttgcaagcgattgccaaccagaagatgtttaaatccacctataacctggaagcccccagttccagctgcccacctttctggactaaaccaatgtatatcttcaatatatttgattgatgtctcatgtctccctaaaatgggtaccatcaagctgtgcactgaccaccttgggcacatgttctcagggtctcctggg

SEQ ID NO: 7287 - protein, 30 aa, Homo sapiens
MDHPLSVRNGSLGGCFCDRVFQKRKLRLWG

SEQ ID NO: 7288 - DNA, 1655 bp, Homo sapiens
gcagttcaagctgcagcctttgctgatgacggtcaggaggccaactgcgcctggggagcagcgggatccggggatggggctgccctgtgtgctcacctgcctgacctgccccaggcctcctcctgtcccaccctgcctaatgctctagagtccccctgggctggcctcaggattgcaagcagtgcgagggcctggtctcggccctggtctcagccctatccagatgtccgaggcagatggaccacccgctgagcgtcagaaatgggctcctcatcagcatctctgcccatccatccgtcagtctgtctacctgccccctaggagccaggccctgccccacggtggtgaaggagagtgactccgtgctgcccctgcaagccccggtcacaggggacggcagggaacaggtcgctgcctggtcgtgccaagagcttccctggaggagcggaggctagggcaagagcctcacccccttcctctcccttcctccttccttcccctcctctccgtgtgccctgcaggtatccctctggcctccccggctcacccctgctcccttccctgctgggggccagccaaggcctcacctggctgcagggccaagcctgccatcaacagggcaagcagcacagccttcgtggtcactggtgggctgtggtggagagggcctcaggtgactttatatggcctcaaatggggagaggctggactgcccacagtcaacaccagcgggtttcctggagccagtgagggccccggggctgggcaggtccgagtctcctccctgagcgacctgcacctccctctccctttgtccttctttccacctctggaggacagagcctacccagggccatatctcagccaccccgggctgagggctgaaacgtcctcaagacccagattatgcctctcccacctcccccacctcacagtgcaaggccagacaagggagaccctttctccagactcctccaggcctcggccttccagccaaggatgagggcacctccctgggccctgtgctcctatagaagctgtgccgccctctggggcccacggcccgcagggtgatgagccttggtcacagcgtcactgacagatcattagcaggtgctgcaaaggacaggggcaggggctgttccggtataaaccaaaagtaacattctaaggccccccagccatctgagtggaaccctcctcttggcaagggctttccgaagttaacctgaaaaactggttcaggccatgacagcaaagggttggatagcctcattatccctcctcccttcagaactctggaacagccagcgttaacatcaacacaggccttcagtctgatgagaaacatttaccatctattgtctcggaagcctgctacctggaggcttcatctgatgataaagccttggtctccacaaccccgtataacccagacattcctttctattgataactcttgcaagcgattgccaaccagaagatgtttaaatccacctataacctggaagcccccagttccagctgcccacctttctggactaaaccaatgtatatcttcaatatatttgattgatgtctcatgtctccctaaaatgggtaccatcaagctgtgcactgaccaccttgggcacatgttctcagggtctcctggg

SEQ ID NO: 7289 - protein, 72 aa, Homo sapiens
MDHPLSVRNGLLISISAHPSVSLSTCPLGARPCPTVVKESDSVLPLQAPVTGDGREQVAAWSCQELPWRSGG

SEQ ID NO: 7290 - DNA, 1864 bp, Homo sapiens
agagggcggcacagcttctataggagcacagggcccagggaggtgccctcatccttggctggaaggccgaggcctggaggagtctggagaaagggtctcccttgtctggccttgcactgtgaggtgggggaggtgggagaggcataatctgggtcttgaggacgtttcagccctcagcccggggtggctgagatatggccctgggtaggctctgtcctccagaggtggaaagaaggacaaagggagagggaggtgcaggtcgctcagggaggagactcggacctgcccagccccggggccctcactggctccaggaaacccgctggtgttgactgtgggcagtccagcctctccccatttgaggccatataaagtcacctgaggccctctccaccacagcccaccagtgaccacgaaggctgtgctgcttgccctgttgatggcaggcttggccctgcagccaggcactgccctgctgtgctactcctgcaaagcccaggtgagcaacgaggactgcctgcaggtggagaactgcacccagctgggggagcagtgctggaccgcgcgcatccgtgagtggggggacgacagccgccaggcctaggtctctgccactgaactattaatctttctggccatctgtccgcatctgtgtgctgttttccttccacctgtccccgacccgtcccgcacctgcacccccaacaatcacccagcatctgtccctccagccatcctcctccatctgccactcctccactcatctgtccctccccatcctccatcttccactcctccacccatctgtccctccccatccctgagctcacttactcactcaccccatttctgacgctcagcgggtggtccatctgcctcggacatctggatagggctgagaccagggccgagaccaggccctcgcactgcttgcaatcctgaggccagcccagggggactctagagcattaggcagggtgggacaggaggaggcctggggcaggtcaggcaggtgagcacacagggcagccccatccccggatcccgctgctccccaggcgcagttggcctcctgaccgtcatcagcaaaggctgcagcttgaactgcgtggatgactcacaggactactacgtgggcaagaagaacatcacgtgctgtgacaccgacttgtgcaacgccagcggggcccatgccctgcagccggctgctgccatccttgcgctgctccctgcactcggcctgctgctctggggacccggccagctctaggctctggggggccccgctgcagcccacactgggtgtggtgccccaggcctctgtgccactcctcacacacccggcccagtgggagcctgtcctggttcctgaggcacatcctaacgcaagtctgaccatgtatgtctgcgcccctgtcccccaccctgaccctcccatggccctctccaggactcccacccggcagatcggctctattgacacagatccgcctgcagatggcccctccaaccctctctgctgctgtttccatggcccagcattctccacccttaaccctgtgctcaggcacctcttcccccaggaagccttccctgcccaccccatctatgacttgagccaggtctggtccgtggtgtcccccgcacccagcaggggacaggcactcaggagggcccggtaaaggctgagatgaagtggactgagtagaactggaggacaggagtcgacgtgagttcctgggagtctccagagatggggcctggaggcctggaggaaggggccaggcctcacattcgtggggctccctgaatggcagcctcagcacagcgtaggcccttaataaacacctgttggataagccag

SEQ ID NO: 7291 - protein, 54 aa, Homo sapiens
MAGLALQPGTALLCYSCKAQVSNEDCLQVENCTQLGEQCWTARIREWGDDSRQA

SEQ ID NO: 7292 - DNA, 1378 bp, Homo sapiens
agagggcggcacagcttctataggagcacagggcccagggaggtgccctcatccttggctggaaggccgaggcctggaggagtctggagaaagggtctcccttgtctggccttgcactgtgaggtgggggaggtgggagaggcataatctgggtcttgaggacgtttcagccctcagcccggggtggctgagatatggccctgggtaggctctgtcctccagaggtggaaagaaggacaaagggagagggaggtgcaggtcgctcagggaggagactcggacctgcccagccccggggccctcactggctccaggaaacccgctggtgttgactgtgggcagtccagcctctccccatttgaggccatataaagtcacctgaggccctctccaccacagcccaccagtgaccacgaaggctgtgctgcttgccctgttgatggcaggcttggccctgcagccaggcactgccctgctgtgctactcctgcaaagcccaggtgagcaacgaggactgcctgcaggtggagaactgcacccagctgggggagcagtgctggaccgcgcgcatccgcgcagttggcctcctgaccgtcatcagcaaaggctgcagcttgaactgcgtggatgactcacaggactactacgtgggcaagaagaacatcacgtgctgtgacaccgacttgtgcaacgccagcggggcccatgccctgcagccggctgctgccatccttgcgctgctccctgcactcggcctgctgctctggggacccggccagctctaggctctggggggccccgctgcagcccacactgggtgtggtgccccaggcctctgtgccactcctcacacacccggcccagtgggagcctgtcctggttcctgaggcacatcctaacgcaagtctgaccatgtatgtctgcgcccctgtcccccaccctgaccctcccatggccctctccaggactcccacccggcagatcggctctattgacacagatccgcctgcagatggcccctccaaccctctctgctgctgtttccatggcccagcattctccacccttaaccctgtgctcaggcacctcttcccccaggaagccttccctgcccaccccatctatgacttgagccaggtctggtccgtggtgtcccccgcacccagcaggggacaggcactcaggagggcccggtaaaggctgagatgaagtggactgagtagaactggaggacaggagtcgacgtgagttcctgggagtctccagagatggggcctggaggcctggaggaaggggccaggcctcacattcgtggggctccctgaatggcagcctcagcacagcgtaggcccttaataaacacctgttggataagccag

SEQ ID NO: 7293 - protein, 114 aa, Homo sapiens
MAGLALQPGTALLCYSCKAQVSNEDCLQVENCTQLGEQCWTARIRAVGLLTVISKGCSLNCVDDSQDYYVGKKNITCCDTDLCNASGAHALQPAAAILALLPALGLLLWGPGQL

SEQ ID NO: 7294 - DNA, 844 bp, Homo sapiens
caggcactgccctgctgtgctactcctgcaaagcccaggcgcagttggcctcctgaccgtcatcagcaaaggctgcagcttgaactgcgtggatgactcacaggactactacgtgggcaagaagaacatcacgtgctgtgacaccgacttgtgcaacgccagcggggcccatgccctgcagccggctgctgccatccttgcgctgctccctgcactcggcctgctgctctggggacccggccagctctaggctctggggggccccgctgcagcccacactgggtgtggtgccccaggcctctgtgccactcctcacacacccggcccagtgggagcctgtcctggttcctgaggcacatcctaacgcaagtctgaccatgtatgtctgcgcccctgtcccccaccctgaccctcccatggccctctccaggactcccacccggcagatcggctctattgacacagatccgcctgcagatggcccctccaaccctctctgctgctgtttccatggcccagcattctccacccttaaccctgtgctcaggcacctcttcccccaggaagccttccctgcccaccccatctatgacttgagccaggtctggtccgtggtgtcccccgcacccagcaggggacaggcactcaggagggcccggtaaaggctgagatgaagtggactgagtagaactggaggacaggagtcgacgtgagttcctgggagtctccagagatggggcctggaggcctggaggaaggggccaggcctcacattcgtggggctccctgaatggcagcctcagcacagcgtaggcccttaataaacacctgttggataagccag

SEQ ID NO: 7295 - protein, 189 aa, Homo sapiens; identical to SEQ ID NO: 7277

SEQ ID NO: 7296 - DNA, 542 bp, Homo sapiens
ctcagcgggtggtccatctgcctcggacatctggatagggctgagaccagggccgagaccaggccctcgcactgcttgcaatcctgagcccctgtcccccaccctgaccctcccatggccctctccaggactcccacccggcagatcggctctattgacacagatccgcctgcagatggcccctccaaccctctctgctgctgtttccatggcccagcattctccacccttaaccctgtgctcaggcacctcttcccccaggaagccttccctgcccaccccatctatgacttgagccaggtctggtccgtggtgtcccccgcacccagcaggggacaggcactcaggagggcccggtaaaggctgagatgaagtggactgagtagaactggaggacaggagtcgacgtgagttcctgggagtctccagagatggggcctggaggcctggaggaaggggccaggcctcacattcgtggggctccctgaatggcagcctcagcacagcgtaggcccttaataaacacctgttggataagccag

SEQ ID NO: 7297 - protein, 81 aa, Homo sapiens
MALSRTPTRQIGSIDTDPPADGPSNPLCCCFHGPAFSTLNPVLRHLFPQEAFPAHPIYDLSQVWSVVSPAPSRGQALRRAR

SEQ ID NO: 7298 - DNA, 1036 bp, Homo sapiens
attataatgagctaaaagctattcaggggcgagttatcagaggtgagcccgtgctcttcagcggagaagatcccctacctggccgccggccactttctgtgggccgtggggtcctcaaggagacggcccttgggctcaggggctgcgtttccacacgcgcctttcccagggctcccgcgcccgttcctgcctggccgccggccgctccaacagcagcacaaggcgggactcagaaccggcgttcagggccgccagcggccgcgaggccctgagatgaggctccaaagaccccgacaggccccggcgggtgggaggcgcgcgccccggggcgggcggggctccccctaccggccagacccggggagaggcgcgcggaggctgcgaaggttccagaagggcggggagggggcgccgcgcgctgaccctccctgggcaccgctggggacgatggcgctgctcgccttgctgctggtcgtggccctaccgcgggtgtggacagacgccaacctgactgcgagacaacgagatccagaggactcccagcgaacggacgagggtgacaatagagtgtggtgtcatgtttgtgagagagaaaacactttcgagtgccagaacccaaggaggtgcaaatggacagagccatactgcgttatagcggccgtgaaaatatttccacgttttttcatggttgcgaagcagtgctccgctggttgtgcagcgatggagagacccaagccagaggagaagcggtttctcctggaagagcccatgcccttcttttacctcaagtgttgtaaaattcgctactgcaatttagaggggccacctatcaactcatcagtgttcaaagaatatgctgggagcatgggtgagagctgtggtgggctgtggctggccatcctcctgctgctggcctccattgcagccggcctcagcctgtcttgagccacgggactgccacagactgagccttccggagcatggactcgctccagaccgttgtcacctgttgcattaaacttgttttctgttgatt

SEQ ID NO: 7299 - protein, 223 aa, Homo sapiens; identical to SEQ ID NO: 1040

SEQ ID NO: 7300 - DNA, 1738 bp, Homo sapiens
attataatgagctaaaagctattcaggggcgagttatcagaggtgagcccgtgctcttcagcggagaagatcccctacctggccgccggccactttctgtgggccgtggggtcctcaaggagacggcccttgggctcaggggctgcgtttccacacgcgcctttcccagggctcccgcgcccgttcctgcctggccgccggccgctccaacagcagcacaaggcgggactcagaaccggcgttcagggccgccagcggccgcgaggccctgagatgaggctccaaagaccccgacaggccccggcgggtgggaggcgcgcgccccggggcgggcggggctccccctaccggccagacccggggagaggcgcgcggaggctgcgaaggttccagaagggcggggagggggcgccgcgcgctgaccctccctgggcaccgctggggacgatggcgctgctcgccttgctgctggtcgtggccctaccgcgggtgtggacagacgccaacctgactgcgagacaacgagatccagaggactcccagcgaacggacgagggtgacaatagagtgtggtgtcatgtttgtgagagagaaaacactttcgagtgccagaacccaaggaggtgcaaatggacagagccatactgcgttatagcggccgtgaaaatatttccacgttttttcatggttgcgaagcagtgctccgctggttgtgcagcgatggagagacccaagccagaggagaagcggtttctcctggaagagcccatgcccttcttttacctcaagtgttgtaaaattcgctactgcaatttagaggggccacctatcaactcatcagtgttcaaagaatatgctgggagcatgggtgagagctgtggtgggctgtggctggccatcctcctgctgctggcctccattgcagccggcctcagcctgtcttgagccacgggactgccacagactgagccttccggagcatggactcgctccagaccgttgtcacctgttgcattaaacttgttttctgttgattacctcttggtttgacttcccagggtcttgggatgggagagtggggatcaggtgcagttggctcttaaccctcaagggttctttaactcacattcagaggaagtccagatctcctgagtagtgattttggtgacaagtttttctctttgaaatcaaaccttgtaactcatttattgctgatggccactcttttccttgactcccctctgcctctgagggcttcagtattgatggggagggaggcctaagtaccactcatggagagtatgtgctgagatgcttccgacctttcaggtgacgcaggaacactgggggagtctgaatgattggggtgaagacatccctggagtgaaggactcctcagcatggggggcagtggggcacacgttagggctgcccccattccagtggtggaggcgctgtggatggctgcttttcctcaacctttcctaccagattccaggaggcagaagataactaattgtgttgaagaaacttagacttcacccaccagctggcacaggtgcacagattcataaattcccacacgtgtgtgttcaacatctgaaacttaggccaagtagagagcatcagggtaaatggcgttcatttctctgttaagatgcagccatccatggggagctgagaaatcagactcaaagttccaccaaaaacaaatacaaggggacttcaaaagttcacg

SEQ ID NO: 7301 - protein, 223 aa, Homo sapiens; identical to SEQ ID NO: 1040

SEQ ID NO: 7302 - DNA, 2652 bp, Homo sapiens
attataatgagctaaaagctattcaggggcgagttatcagaggtgagcccgtgctcttcagcggagaagatcccctacctggccgccggccactttctgtgggccgtggggtcctcaaggagacggcccttgggctcaggggctgcgtttccacacgcgcctttcccagggctcccgcgcccgttcctgcctggccgccggccgctccaacagcagcacaaggcgggactcagaaccggcgttcagggccgccagcggccgcgaggccctgagatgaggctccaaagaccccgacaggccccggcgggtgggaggcgcgcgccccggggcgggcggggctccccctaccggccagacccggggagaggcgcgcggaggctgcgaaggttccagaagggcggggagggggcgccgcgcgctgaccctccctgggcaccgctggggacgatggcgctgctcgccttgctgctggtcgtggccctaccgcgggtgtggacagacgccaacctgactgcgagacaacgagatccagaggactcccagcgaacggacgagggtgacaatagagtgtggtgtcatgtttgtgagagagaaaacactttcgagtgccagaacccaaggaggtgcaaatggacagagccatactgcgttatagcggccgtgaggagatcttcagggctcgtgaattctgattccgcccagcagtcactctccagcccttcggtatccacgaagttggtggggtgctgaggtgatgcttcagactcagtgtggcccacatcgactttataacttaatatggcaaaatgatttgtacagtgatgtataagatgaagtgtggtcatgagacaagacccccagctcagagtcgagccaggcccaccaagaggccagctccacaccctgggtgatggccagaatggctgggagtcatgtgtctgtctgtggtcacaaaggcctgagccaaccctgtgtttgagaagttgagacctgtttgttcccaaacagcaacccctagacccgcattcccagtgcatatggacaggccataccacgcagaagccagcccttccctgaagcagcattcaacacacaggcctggccctcgtcctcccgactcccccttggtgccccagttgactgtgcacctttgagcagggccgccaggggtgaggctttgacccagacagaagggcctcggtgtcaggcattggaattgcgtgattgccttctctcggtctttatttcctattagaaatatttccacgttttttcatggttgcgaagcagtgctccgctggttgtgcagcgatggagagacccaagccagaggagaagcggtttctcctggaagagcccatgcccttcttttacctcaagtgttgtaaaattcgctactgcaatttagaggggccacctatcaactcatcagtgttcaaagaatatgctgggagcatgggtgagagctgtggtgggctgtggctggccatcctcctgctgctggcctccattgcagccggcctcagcctgtcttgagccacgggactgccacagactgagccttccggagcatggactcgctccagaccgttgtcacctgttgcattaaacttgttttctgttgattacctcttggtttgacttcccagggtcttgggatgggagagtggggatcaggtgcagttggctcttaaccctcaagggttctttaactcacattcagaggaagtccagatctcctgagtagtgattttggtgacaagtttttctctttgaaatcaaaccttgtaactcatttattgctgatggccactcttttccttgactcccctctgcctctgagggcttcagtattgatggggagggaggcctaagtaccactcatggagagtatgtgctgagatgcttccgacctttcaggtgacgcaggaacactgggggagtctgaatgattggggtgaagacatccctggagtgaaggactcctcagcatggggggcagtggggcacacgttagggctgcccccattccagtggtggaggcgctgtggatggctgcttttcctcaacctttcctaccagattccaggaggcagaagataactaattgtgttgaagaaacttagacttcacccaccagctggcacaggtgcacagattcataaattcccacacgtgtgtgttcaacatctgaaacttaggccaagtagagagcatcagggtaaatggcgttcatttctctgttaagatgcagccatccatggggagctgagaaatcagactcaaagttccaccaaaaacaaatacaaggggacttcaaaagttcacgaaaaaattgaattaaaagataaaaattaaaaaatgttttatttctcagcatgagctccatcaaggtcgagacgcttctgcaagtaatggtaccagccattcagttcatccctaaagaattgggcaccctgggaatttaaccatgccacttcagtctttgtgacgttattaactgaagaaaagtgggtgccctttaaagattttttaaaattataaaacagaagtaaccaaatcaggcctggaaggtgtatgcctagtgatttcccattgaaactctcacaaaactggccttgtttgatgagaggaatgagcaggagcattgtc

SEQ ID NO: 7303 - protein, 158 aa, Homo sapiens
MRLQRPRQAPAGGRRAPRGGRGSPYRPDPGRGARRLRRFQKGGEGAPRADPPWAPLGTMALLALLLVVALPRVWTDANLTARQRDPEDSQRTDEGDNRVWCHVCERENTFECQNPRRCKWTEPYCVIAAVRRSSGLVNSDSAQQSLSSPSVSTKLVGC

SEQ ID NO: 7304 - DNA, 2701 bp, Homo sapiens
attataatgagctaaaagctattcaggggcgagttatcagaggtgagcccgtgctcttcagcggagaagatcccctacctggccgccggccactttctgtgggccgtggggtcctcaaggagacggcccttgggctcaggggctgcgtttccacacgcgcctttcccagggctcccgcgcccgttcctgcctggccgccggccgctccaacagcagcacaaggcgggactcagaaccggcgttcagggccgccagcggccgcgaggccctgagatgaggctccaaagaccccgacaggccccggcgggtgggaggcgcgcgccccggggcgggcggggctccccctaccggccagacccggggagaggcgcgcggaggctgcgaaggttccagaagggcggggagggggcgccgcgcgctgaccctccctgggcaccgctggggacgatggcgctgctcgccttgctgctggtcgtggccctaccgcgggtgtggacagacgccaacctgactgcgagacaacgagatccagaggactcccagcgaacggacgagggtgacaatagagtgtggtgtcatgtttgtgagagagaaaacactttcgagtgccagaacccaaggaggtgcaaatggacagagccatactgcgttatagcggccgtgaaaatatttccacgttttttcatggttgcgaagcagtgctccgctggttgtgcagcgatggagagacccaagccagaggagaagcggtttctcctggaagagcccatgcccttcttttacctcaagtgttgtaaaattcgctactgcaatttagaggggccacctatcaactcatcagtgttcaaagaatatgctgggagcatgggtgagagctgtggtgggctgtggctggccatcctcctgctgctggcctccattgcagccggcctcagcctgtcttgagccacgggactgccacagactgagccttccggagcatggactcgctccagaccgttgtcacctgttgcattaaacttgttttctgttgattacctcttggtttgacttcccagggtcttgggatgggagagtggggatcaggtgcagttggctcttaaccctcaagggttctttaactcacattcagaggaagtccagatctcctgagtagtgattttggtgacaagtttttctctttgaaatcaaaccttgtaactcatttattgctgatggccactcttttccttgactcccctctgcctctgagggcttcagtattgatggggagggaggcctaagtaccactcatggagagtatgtgctgagatgcttccgacctttcaggtgacgcaggaacactgggggagtctgaatgattggggtgaagacatccctggagtgaaggactcctcagcatggggggcagtggggcacacgttagggctgcccccattccagtggtggaggcgctgtggatggctgcttttcctcaacctttcctaccagattccaggaggcagaagataactaattgtgttgaagaaacttagacttcacccaccagctggcacaggtgcacagattcataaattcccacacgtgtgtgttcaacatctgaaacttaggccaagtagagagcatcagggtaaatggcgttcatttctctgttaagatgcagccatccatggggagctgagaaatcagactcaaagttccaccaaaaacaaatacaaggggacttcaaaagttcacgaaaaaattgaattaaaagataaaaattaaaaaatgttttatttctcagcatgagctccatcaaggtcgagacgcttctgcaagtaatggtaccagccattcagttcatccctaaagaattgggcaccctgggaatttaaccatgccacttcagtctttgtgacgttattaactgaagaaaagtgggtgccctttaaagattttttaaaattataaaacagaagtaaccaaatcaggcctggaaggtgtatgcctagtgatttcccattgaaactctcacaaaactggccttgtttgatgagaggaatgagcaggagcattgtcatggtggagaagggctctctggtgaagctttccggggtgacgatttcctgggtgttttcctgctaaatcgttggctgactttctctatacactctcataataagatgttactgttctttggccctccagaaagtcaataagcaagatgccttgagcattcacaaaacggttgccacgacctttgcccttgacatgtctgcttttactctgatgggaccacgcccacctctaggtagtcattgctttgcttgtgctttgccttcaggagtgtactggttaagccacatttcatctccggctataattatatgaagaaatgcttcaggatcttgattccacttgtttaaaatggccatagaacgcttttctcttatctgcagctgagctgggagaaagttttggcacccaccgagtggacagtttactcaactttaatttcagtcagaattgtgtaagctgaacaccttgggatacctacagcgttggctattgtttctgctgctattaatcagtcctcttaaattagggcacaaacaagatgaattgtttcctcacagactgatgtggctggcctgctgctgtggacttcctctccaacatcatctcttctcttcttccaatgagttatccacttacttaa

SEQ ID NO: 7305 - protein, 223 aa, Homo sapiens; identical to SEQ ID NO: 1040

SEQ ID NO: 7306 - DNA, 3388 bp, Homo sapiens
gtgctcttcagcggagaagatcccctacctggccgccggccactttctgtgggccgtggggtcctcaaggagacggcccttgggctcaggggctgcgtttccacacgcgcctttcccagggctcccgcgcccgttcctgcctggccgccggccgctccaacagcagcacaaggcgggactcagaaccggcgttcagggccgccagcggccgcgaggccctgagatgaggctccaaagaccccgacaggccccggcgggtgggaggcgcgcgccccggggcgggcggggctccccctaccggccagacccggggagaggcgcgcggaggctgcgaaggttccagaagggcggggagggggcgccgcgcgctgaccctccctgggcaccgctggggacgatggcgctgctcgccttgctgctggtcgtggccctaccgcgggtgtggacagacgccaacctgactgcgagacaacgagatccagaggactcccagcgaacggacgagggtgacaatagagtgtggtgtcatgtttgtgagagagaaaacactttcgagtgccagaacccaaggaggtgcaaatggacagagccatactgcgttatagcggccgtgagtgagtatcttcgctcttgttggggacccaaaggcaggtgaacagagggctttcaggaatcagggctgtctagttttcctcaatggggaataactaatagaaagtagcctttttttttttttattttctgagacggagtcaggctggagtgcagtggtgtgatctcggctcactgcaacctcgccttccgggttcaagcgattctcctgcctcagcctccagagtagctggtattatggatgcgcgccaccacactggctaattttttatttttagtagaggtggggtttcaccatgttggtcaggctggtctcgaactcctgacctcaggtgacccacccgccctcggccccccaaagtgctgggattacaagcgtaagccaccgcgccctgcctttttttccctttaaaatgtgaagagcaaagtcctcagaggccagagagaggtgtaggaactgtgctagtgtaaggcagtgcctgctacagtgggtccagatgaaatactgggaggtaggaagaaaatctggatttcatatcatccatttttaaatgaaaaattaagctttaatagtgttaaatgcgccacagagaacagtgtctatgtcactcttacaagagatgcacaaaaccaaggtgtacagccttcaagtgtgttctcaaaggagggtgcatgccttaaaaattgtggagaccactgctctgtcatctgtgattcccctgaaaacctctgggtacatgaagccctccccaaggggaatctggacacccagcacattctgcccacagggagatcttcagggctcgtgaattctgattccgcccagcagtcactctccagcccttcggtatccacgaagttggtggggtgctgaggtgatgcttcagactcagtgtggcccacatcgactttataacttaatatggcaaaatgatttgtacagtgatgtataagatgaagtgtggtcatgagacaagacccccagctcagagtcgagccaggcccaccaagaggccagctccacaccctgggtgatggccagaatggctgggagtcatgtgtctgtctgtggtcacaaaggcctgagccaaccctgtgtttgagaagttgagacctgtttgttcccaaacagcaacccctagacccgcattcccagtgcatatggacaggccataccacgcagaagccagcccttccctgaagcagcattcaacacacaggcctggccctcgtcctcccgactcccccttggtgccccagttgactgtgcacctttgagcagggccgccaggggtgaggctttgacccagacagaagggcctcggtgtcaggcattggaattgcgtgattgccttctctcggtctttatttcctattagaaatatttccacgttttttcatggttgcgaagcagtgctccgctggttgtgcagcgatggagagacccaagccagaggagaagcggtttctcctggaagagcccatgcccttcttttacctcaagtgttgtaaaattcgctactgcaatttagaggggccacctatcaactcatcagtgttcaaagaatatgctgggagcatgggtgagagctgtggtgggctgtggctggccatcctcctgctgctggcctccattgcagccggcctcagcctgtcttgagccacgggactgccacagactgagccttccggagcatggactcgctccagaccgttgtcacctgttgcattaaacttgttttctgttgattacctcttggtttgacttcccagggtcttgggatgggagagtggggatcaggtgcagttggctcttaaccctcaagggttctttaactcacattcagaggaagtccagatctcctgagtagtgattttggtgacaagtttttctctttgaaatcaaaccttgtaactcatttattgctgatggccactcttttccttgactcccctctgcctctgagggcttcagtattgatggggagggaggcctaagtaccactcatggagagtatgtgctgagatgcttccgacctttcaggtgacgcaggaacactgggggagtctgaatgattggggtgaagacatccctggagtgaaggactcctcagcatggggggcagtggggcacacgttagggctgcccccattccagtggtggaggcgctgtggatggctgcttttcctcaacctttcctaccagattccaggaggcagaagataactaattgtgttgaagaaacttagacttcacccaccagctggcacaggtgcacagattcataaattcccacacgtgtgtgttcaacatctgaaacttaggccaagtagagagcatcagggtaaatggcgttcatttctctgttaagatgcagccatccatggggagctgagaaatcagactcaaagttccaccaaaaacaaatacaaggggacttcaaaagttcacgaaaaaattgaattaaaagataaaaattaaaaaatgttttatttctcagcatgagctccatcaaggtcgagacgcttctgcaagtaatggtaccagccattcagttcatccctaaagaattgggcaccctgggaatttaaccatgccacttcagtctttgtgacgttattaactgaagaaaagtgggtgccctttaaagattttttaaaattataaaacagaagtaaccaaatcaggcctggaaggtgtatgcctagtgatttcccattgaaactctcacaaaactggccttgtttgatgagaggaatgagcaggagcattgtc

SEQ ID NO: 7307 - protein, 143 aa, Homo sapiens
MRLQRPRQAPAGGRRAPRGGRGSPYRPDPGRGARRLRRFQKGGEGAPRADPPWAPLGTMALLALLLVVALPRVWTDANLTARQRDPEDSQRTDEGDNRVWCHVCERENTFECQNPRRCKWTEPYCVIAAVSEYLRSCWGPKGR

SEQ ID NO: 7308 - DNA, 5684 bp, Homo sapiens
gaagacgcggcctggccctggccgttcggcccttcgtctgagcgcaaaggctccagcacctccgcggccgaagccgcgggacttttcgtggaaaatgggacccagcccgatcgccagcggcgctgcagcggactctgcgggaacctagcttctgctccaggacctccagggccaccccagctcgcagggcgttcgcagcggctcagggcgaatcacgctcatggtccccgtgcgcattttcagccccagccggtctttccagagacacatagaaggtgccatctatgaggaacaggccttcaccagacatcaaatctgttggcatcttgatctttgacttctccaccgccagaactagatcaagacatgaaacccatgttcaagatactttccagtgtgtcttcatgtgatcctctgagtccagccatcaggctaccagcagctcttggaaaccctgacatacttattcttagaagactgctttccggactcaaagtggaacctcaaattttcaattttctttgtttttaaagcctacacataggtgatgatatatacatgcatatatattttggagaatttataattctgaaaacaatgctggtcttatggaacccatccattcccctttccccgtgtgtgctccgagctgtggtggcacgtgaaaaggggtccttccagcagtggcccacagccctgggctgcttacttgctcacttcatttacaagagcaagaaatacacattcttgtgttgtttaagtcattatgatgtggggatttccattactcacacacctgatctagtagtaacacagtagcctattttagcaatatcatttattcaataatccattctttccccattagttttgagccttcatttattgtgtactaagttctggttatttttagtggttgtaatctccttctttcctactctcttaatcatgggattgccaatatctgctctgtgtttctgtgccatctatagcctctggccttggtactgcttcaaaactgatatttctaaccttactttgacttctccattcagtgaagttcccatagttcatcactcaactgctctctttccatcgtgaccttctgaactagctcacacccagatgtacttttgttatctgcctttccccctcataaacatgggctgctgctggggaaaatccactaccgaactcttgcaggtctctgcaaatgtttaatgccctgtcttagccatgacctccacaatgctgggctatcctatgttatgtcccctaagatatcccttctctcttacctttggggatagtcctaagcttccatcatggcactcaaagtccaaccttatttgtaccctcattctctgagcagacaccaccgtattctgtttcacagagaaaatgtgactgctggggataattctttcaacttcctggcctcttcctatacatgatctttctctgtattcttgcctattgctcttccatgttgatagaagtgtctgttctccttgtcagtgtctcggccttggatctgtcccctagactattctgcctgtgtaaggaccttccctgaccagctgggccaccatctcctgcttctccaatccctcactctagactgactcttaacctttggtcaacaatacttgagcttttacattcataatggagcatctgtgttgaaccttgttcttttctagacactaccctccgttctgtcttccatccatggtgacttttctagaaagagcatctatcacactggagacagcaaactccttgatccattctaattcctaaccctgcaataattttctatctcccttactcaagtaattgggagtgctcctagtgttaccagagacccagcagttcccaatttcgaatttttccgtattcacatttcttgacttgctatgattttacatcacagattacatccttcatttgaagagactctaatggaaggctgccatggaaactctctcatgtggctgacctcctacctcacttgctctttctgaatgaagttcccacttttgcctgccttaatgaaagtaatgctccccaaactcaagcccagggctgcgaattggaagcagctggggctactgtttctgggtgctggtgtgaatggcaggatgtgaacaccagcctgtgacgggcaaaaagatggacacacaggcagagcctgacaggtgctggtggtcctatctggtcctgagttgctgggaccctccttgcccactgcccctagaatggactttggcctcaggttcgaagtgttcagatgtgactgagatgagccttttccccatgcctcaggaatagcgaagaaactctatctggaaggttccccaggcttccccacccagcagcctctggtattagaccaggcagtggctggccaggatggtggggacagaagggagacaaaggtgagcagtgggtggggtcacatcctccctgacattgaatagacaacatggggaggaaggatgagtgatctttagaatgttcatggaaaatgcatattgggaaaaagaatgcatgaatttcaaattgttttgcaacaaaataaacttgtactaacttgtgaaaacacgtccgaacaggatctagtttgaggccctaagaagtataagacaacagtttgaacagagctcctatcagacacatgaattctgctaaaattgaaaccagaacaaacatgcaattgatggtgaagcttggctggaaacatggtgaaatcattgatgatttattgaaagtttatagggacaatgcctcaaagaaatcagcaatttaagtaagtggataactcattggaagaagagaagagatgatgttggagaggaagtccacagcagcaggccagccacatcagtctgtgaggaaacaattcatcttgtttgtgccctaatttaagaggactgattaatagcagcagaaacaatagccaacgctgtaggtatcccaaggtgttcagcttacacaattctgactgaaattaaagttgagtaaactgtccactcggtgggtgccaaaactttctcccagctcagctgcagataagagaaaagcgttctatggccattttaaacaagtggaatcaagatcctgaagcatttcttcatataattatagccggagatgaaatgtggcttaaccagtacactcctgaaggcaaagcacaagcaaagcaatgactacctagaggtgggcgtggtcccatcagagtaaaagcagacatgtcaagggcaaaggtcgtggcaaccgttttgtgaatgctcaaggcatcttgcttattgactttctggagggccaaagaacagtaacatcttattatgagagtgtatagagaaagtcagccaacgatttagcaggaaaacacccaggaaatcgtcaccccggaaagcttcaccagagagcccttctccaccatgacaatgctcctgctcattcctctcatcaaacaaggccagttttgtgagagtttcaatgggaaatcactaggcatacaccttccaggcctgatttggttacttctgttttataattttaaaaaatctttaaagggcacccacttttcttcagttaataacgtcacaaagactgaagtggcatggttaaattcccagggtgcccaattctttagggatgaactgaatggctggtaccattacttgcagaagcgtctcgaccttgatggagctcatgctgagaaataaaacattttttaatttttatcttttaattcaattttttcgtgaacttttgaagtccccttgtatttgtttttggtggaactttgagtctgatttctcagctccccatggatggctgcatcttaacagagaaatgaacgccatttaccctgatgctctctacttggcctaagtttcagatgttgaacacacacgtgtgggaatttatgaatctgtgcacctgtgccagctggtgggtgaagtctaagtttcttcaacacaattagttatcttctgcctcctggaatctggtaggaaaggttgaggaaaagcagccatccacagcgcctccaccactggaatgggggcagccctaacgtgtgccccactgccccccatgctgaggagtccttcactccagggatgtcttcaccccaatcattcagactcccccagtgttcctgcgtcacctgaaaggtcggaagcatctcagcacatactctccatgagtggtacttaggcctccctccccatcaatactgaagccctcagaggcagaggggagtcaaggaaaagagtggccatcagcaataaatgagttacaaggtttgatttcaaagagaaaaacttgtcaccaaaatcactactcaggagatctggacttcctctgaatgtgagttaaagaacccttgagggttaagagccaactgcacctgatccccactctcccatcccaagaccctgggaagtcaaaccaagaggtaatcaacagaaaacaagtttaatgcaacaggtgacaacggtctggagcgagtccatgctccggaaggctcagtctgtggcagtcccgtggctcaagacaggctgaggccggctgcaatggaggccagcagcaggaggatggccagccacagcccaccacagctctcacccatgctcccagcatattctttgaacactgatgagttgataggtggcccctctaaattgcagtagcgaattttacaacacttgaggtaaaagaagggcatgggctcttccaggagaaaccgcttctcctctggcttgggtctctccatcgctgcacaaccagcggagcactgcttcgcaaccatgaaaaaacgtggaaatatttctaataggaaataaagaccgagagaaggcaatcacgcaattccaatgcctgacaccgaggcccttctgtctgggtcaaagcctcacccctggcggccctgctcaaaggtgcacagtcaactggggcaccaagggggagtcgggaggacgagggccaggcctgtgtgttgaatgctgcttcagggaagggctggcttctgcgtggtatggcctgtccatatgcactgggaatgcgggtctaggggttgctgtttgggaacaaacaggtctcaacttctcaaacacagggttggctcaggcctttgtgaccacagacagacacatgactcccagccattctggccatcacccagggtgtggagctggcctcttggtgggcctggctcgactctgagctgggggtcttgtctcatgaccacacttcatcttatacatcactgtacaaatcattttgccatattaagttataaagtcgatgtgggccacactgagtctgaagcatcacctcagcaccccaccaacttcgtggataccgaagggctggagagtgactgctgggcggaatcagaattcacgagccctgaagatctccctgtgggcagaatgtgctgggtgtccagattccccttggggagggcttcatgtacccagaggttttcaggggaatcacagatgacagagcagtggtctccacaatttttaaggcatgcaccctcctttgagaacacacttgaaggctgtacaccttggttttgtgcatctcttgtaagagtgacatagacactgttctctgtggcgcatttaacactattaaagcttaatttttcatttaaaaatgga

SEQ ID NO: 7309 - protein, 41 aa, Homo sapiens
MRNRPSPDIKSVGILIFDFSTARTRSRHETHVQDTFQCVFM

SEQ ID NO: 7310 - DNA, 531 bp, Homo sapiens
gttcggcccttcgtctgagcgcaaaggctccagcacctccgcggccgaagccgcgggacttttcgtggaaaatgggacccagcccgatcgccagcggcgctgcagcggactctgcgggaacctagcttctgctccaggacctccagggccaccccagctcgcagggcgttcgcagcggctcagggcgaatcacgctcatggtccccgtgcgcattttcagccccagccggggagggacccagagctggaggcttagccctggagataccggtgaagatggatgaatgagaaaccagttggagcttccaaggcctgtcgtccatcaggagaagcaaaaggttttattctagagacaagtccttccaactgtacagctgatggagtagccaaggaaacctggtctttccagagacacatagaaggtgccatctatgaggaacaggccttcaccagacatcaaatctgttggcatcttgatctttgacttctccaccgccagaactgtgagcaataaatttctgttctttacaa

SEQ ID NO: 7311 - protein, 67 aa, Homo sapiens
MNEKPVGASKACRPSGEAKGFILETSPSNCTADGVAKETWSFQRHIEGAIYEEQAFTRHQICWHLDL

SEQ ID NO: 7312 - DNA, 1112 bp, Homo sapiens
gagaaggtcgcgccacggtgggcggggctccgggcccctccccctcggccgccctcgcgctgtggttcgctccgggcgcgctgcgctcgtgagttcccaggaggcctggcgggcaccgtaaccagcgccgcggacaccggcaccggcgccacggactccgcaggaccccgcgcccgccgccgccgctatgctggggctgctggtggcgttgctggccctggggctcgctgtctttgcgctgctggacgtctggtacctggtgcgccttccgtgcgccgtgctgcgcgcgcgcctgctgcagccgcgcgtccgtgacctgctagctgagcagcgcttcccgggccgcgtgctgccctcggacttggacctgctgctgcacatgaacaacgcgcgctacctgcgcgaggccgactttgcgcgcgtcgcgcacctgacccgctgcggggtgctcggggcgctgagggagttgcgggcgcacacggtgctggcggcctcgtgcgcgcgccaccgccgctcgctgcgcctgctggagcccttcgaggtgcgcacccgcctgctgggctgggacgaccgcgcgttctacctggaggcgcgctttgtcagcctgcgggacggcttcgtgtgcgcgctgctgcgcttccggcagcacctgctgggcacctcacccgagcgcgtcgtgcagcacctgtgccagcgcagggtggagccccctgagctgcccgctgatctgcagcactggatctcctacaacgaggccagcagccagctgctccgcatggagagtgggctcagtgatgtcaccaaggaccagtgaccgccaccttcacaccgtctgccctggccaccatcctgggcctgggggctgcccacagatgggcagtctcagccatactctgttccagctggagtagcctcctgaccagcctggcccaccctgctccacccactgggcccccccagttattgatacccctctgtgctgggctccacgctaggcagaaggaggagtggcattggcatcctgacccagctctgccctcaagccaccatgggaaagctgcaacctttctgttttatttaaagaaagcccaacattaaagggttttcattgc

SEQ ID NO: 7313 - protein, 208 aa, Homo sapiens; identical to SEQ ID NO: 1042

SEQ ID NO: 7314 - DNA, 2307 bp, Homo sapiens
gagaaggtcgcgccacggtgggcggggctccgggcccctccccctcggccgccctcgcgctgtggttcgctccgggcgcgctgcgctcgtgagttcccaggaggcctggcgggcaccgtaaccagcgccgcggacaccggcaccggcgccacggactccgcaggaccccgcgcccgccgccgccgctatgctggggctgctggtggcgttgctggccctggggctcgctgtctttgcgctgctggacgtctggtacctggtgcgccttccgtgcgccgtgctgcgcgcgcgcctgctgcagccgcgcgtccgtgacctgctagctgagcagcgcttcccgggccgcgtgctgccctcggacttggacctgctgctgcacatgaacaacgcgcgctacctgcgcgaggccgactttgcgcgcgtcgcgcacctgacccgctgcggggtgctcggggcgctgagggagttgcgggcgcacacggtgctggcggcctcgtgcgcgcgccaccgccgctcgctgcgcctgctggagcccttcgaggtgcgcacccgcctgctgggctgggacgaccgcgcgttctacctggaggcgcgctttgtcagcctgcgggacggcttcgtgtgcgcgctgctgcgcttccggcagcacctgctgggcacctcacccgagcgcgtcgtgcagcacctgtgccagcgcagggtggagccccctgagctgcccgctgatctgcagcactggatctcctacaacgaggccagcagccagctgctccgcatggagagtgggctcagtgatgtcaccaaggaccagtgaccgccaccttcacaccgtctgccctggccaccatcctgggcctgggggctgcccacagatgggcagtctcagccatactctgttccagctggagtagcctcctgaccagcctggcccaccctgctccacccactgggcccccccagttattgatacccctctgtgctgggctccacgctaggcagaaggaggagtggcattggcatcctgacccagctctgccctcaaggtggggatggatgggcaaaggagagtcctgcctggccctacgatgaggccactcatgtgggcctaggtaggggaggatggtgcctggagcagagggacccacaagtgcctcccgagcctagatcctggctcggaccactgcaagggccgaggcagggccagaccagagcatcctgggtacaggcctgggctctccagggcctgggcctgattcaggtgcagtgggcactcctgaagggtcagagcggcatctgccaggcagcccctctggcttccgctgaggtggttgcaggcctggggcagagcctgggtggtcagaggccggggctagaggcagatggaagggaggcatttgctgacagaggacggggcacccgggctccccactgcagtcggccttgcctcctcctcctcctctacctccagtcaggctggacgggagggtagccttgtggctgagaggggtcagactaggtggcacaggggctcctggaaagacagcaggcttcctgctgggcgttcccttgttggagggaatagagtgggggtgggactctgcaggggtgtccttgtccactcgcacccctcgccgcccaccagggccatgctctgtgacttgggctgatccccaccctttctgggcctacagcaccacaggccgctgtacccccttagagctgcccctctctggcctggccggcaggcgtcttcttaactcctctgtcctctatattcagcatgttccttgtcagctgctgggccggccctgccttgcgctagcagagcctctcctggcagcttctcaggtctccctaatggagacaccaggctactaggacactggctggggccaccccctcctgcctaatgcctcaccttacagctggggaaactgaggcctggaatggcccagagtcaccaaggcaaagttggggctggtcccagcctgaggctccagctgatgccctcagctcccagagagggggtgccccatctagctgggtgcaggggtcactgcttgtcagctcagggccctgtgcccgcttgcctgttcccctacatctgtgcctgcacatccagaactgcctccttgccgctgcctccaggaagcccaccttgagccagagtcaagggctgcagcactgcccgatagaacacgcccgccctcactgctgttcttgccttacagccaccatgggaaagctgcaacctttctgttttatttaaagaaagcccaacattaaagggttttcattgcaagcgtg

SEQ ID NO: 7315 - protein, 208 aa, Homo sapiens; identical to SEQ ID NO: 1042

SEQ ID NO: 7316 - DNA, 1388 bp, Homo sapiens
gagaaggtcgcgccacggtgggcggggctccgggcccctccccctcggccgccctcgcgctgtggttcgctccgggcgcgctgcgctcgtgagttcccaggaggcctggcgggcaccgtaaccagcgccgcggacaccggcaccggcgccacggactccgcaggaccccgcgcccgccgccgccgctatgctggggctgctggtggcgttgctggccctggggctcgctgtctttgcgctgctggacgtctggtacctggtgcgccttccgtgcgccgtgctgcgcgcgcgcctgctgcagccgcgcgtccgtgacctgctagctgagcagcgcttcccgggccgcgtgctgccctcggacttggacctgctgctgcacatgaacaacgcgcgctacctgcgcgaggccgactttgcgcgcgtcgcgcacctgacccgctgcggggtgctcggggcgctgagggagttgcgggcgcacacggtgctggcggcctcgtgcgcgcgccaccgccgctcgctgcgcctgctggagcccttcgaggtgcgcacccgcctgctgggctgggacgaccgcgcgttctacctggaggcgcgctttgtcagcctgcgggacggcttcgtgtgcgcgctgctgcgcttccggcagcacctgctgggcacctcacccgagcgcgtcgtgcagcacctgtgccagcgcagggtggagccccctgagctgcccgctgatctgcagcactggatctcctacaacgaggccagcagccagctgctccgcatggagagtgggctcagtgatgtcaccaaggaccagtgaccgccaccttcacaccgtctgccctggccaccatcctgggcctgggggctgcccacagatgggcagtctcagccatactctgttccagctggagtagcctcctgaccagcctggcccaccctgctccacccactgggcccccccagttattgatacccctctgtgctgggctccacgctaggcagaaggaggagtggcattggcatcttctcaggtctccctaatggagacaccaggctactaggacactggctggggccaccccctcctgcctaatgagctcccagagagggggtgccccatctagctgggtgcaggggtcactgcttgtcagctcagggccctgtgcccgcttgcctgttcccctacatctgtgcctgcacatccagaactgcctccttgccgctgcctccaggaagcccaccttgagccagagtcaagggctgcagcactgcccgatagaacacgcccgccctcactgctgttcttgccttacagccaccatgggaaagctgcaacctttctgttttatttaaagaaagcccaacattaaagggttttcattgcaagcgtg

SEQ ID NO: 7317 - protein, 208 aa, Homo sapiens; identical to SEQ ID NO: 1042

SEQ ID NO: 7318 - DNA, 2208 bp, Homo sapiens
gagaaggtcgcgccacggtgggcggggctccgggcccctccccctcggccgccctcgcgctgtggttcgctccgggcgcgctgcgctcgtgagttcccaggaggcctggcgggcaccgtaaccagcgccgcggacaccggcaccggcgccacggactccgcaggaccccgcgcccgccgccgccgctatgctggggctgctggtggcgttgctggccctggggctcgctgtctttgcgctgctggacgtctggtacctggtgcgccttccgtgcgccgtgctgcgcgcgcgcctgctgcagccgcgcgtccgtgacctgctagctgagcagcgcttcccgggccgcgtgctgccctcggacttggacctgctgctgcacatgaacaacgcgcgctacctgcgcgaggccgactttgcgcgcgtcgcgcacctgacccgctgcggggtgctcggggcgctgagggagttgcgggcgcacacggtgctggcggcctcgtgcgcgcgccaccgccgctcgctgcgcctgctggagcccttcgaggtgcgcacccgcctgctgggctgggacgaccgcgcgttctacctggaggcgcgctttgtcagcctgcgggacggcttcgtgtgcgcgctgctgcgcttccggcagcacctgctgggcacctcacccgagcgcgtcgtgcagcacctgtgccagcgcagggtggagccccctgagctgcccgctgatctgcagcactggatctcctacaacgaggccagcagccagctgctccgcatggagagtgggctcagtgatgtcaccaaggaccagtgaccgccaccttcacaccgtctgccctggccaccatcctgggcctgggggctgcccacagatgggcagtctcagccatactctgttccagctggagtagcctcctgaccagcctggcccaccctgctccacccactgggcccccccagttattgatacccctctgtgctgggctccacgctaggcagaaggaggagtggcattggcatcctgacccagctctgccctcaaggtggggatggatgggcaaaggagagtcctgcctggccctacgatgaggccactcatgtgggcctaggtaggggaggatggtgcctggagcagagggacccacaagtgcctcccgagcctagatcctggctcggaccactgcaagggccgaggcagggccagaccagagcatcctgggtacaggcctgggctctccagggcctgggcctgattcaggtgcagtgggcactcctgaagggtcagagcggcatctgccaggcagcccctctggcttccgctgaggtggttgcaggcctggggcagagcctgggtggtcagaggccggggctagaggcagatggaagggaggcatttgctgacagaggacggggcacccgggctccccactgcagtcggccttgcctcctcctcctcctctacctccagtcaggctggacgggagggtagccttgtggctgagaggggtcagactaggtggcacaggggctcctggaaagacagcaggcttcctgctgggcgttcccttgttggagggaatagagtgggggtgggactctgcaggggtgtccttgtccactcgcacccctcgccgcccaccagggccatgctctgtgacttgggctgatccccaccctttctgggcctacagcaccacaggccgctgtacccccttagagctgcccctctctggcctggccggcaggcgtcttcttaactcctctgtcctctatattcagcatgttccttgtcagctgctgggccggccctgccttgcgctagcagagcctctcctggcagcttctcaggtctccctaatggagacaccaggctactaggacactggctggggccaccccctcctgcctaatgagctcccagagagggggtgccccatctagctgggtgcaggggtcactgcttgtcagctcagggccctgtgcccgcttgcctgttcccctacatctgtgcctgcacatccagaactgcctccttgccgctgcctccaggaagcccaccttgagccagagtcaagggctgcagcactgcccgatagaacacgcccgccctcactgctgttcttgccttacagccaccatgggaaagctgcaacctttctgttttatttaaagaaagcccaacattaaagggttttcattgcaagcgtg

SEQ ID NO: 7319 - protein, 208 aa, Homo sapiens; identical to SEQ ID NO: 1042

SEQ ID NO: 7320 - DNA, 2107 bp, Homo sapiens
ccctcggccgccctcgcgctgtggttcgctccgggcgcgctgcgctcgtgagttcccaggaggcctggcgggcaccgtaaccagcgccgcggacaccggcaccggcgccacggactccgcaggaccccgcgcccgccgccgccgctatgctggggctgctggtggcgttgctggccctggggctcgctgtctttgcgctgctggacgtctggtacctggtgcgccttccgtgcgccgtgctgcgcgcgcgcctgctgcagccgcgcgtccgtgacctgctagctgagcagcgcttcccgggccgcgtgctgccctcggacttggacctgctgctgcacatgaacaacgcgcgctacctgcgcgaggccgactttgcgcgcgtcgcgcacctgacccgctgcggggtgctcggggcgctgagggagttgcgggcgcacacggtgctggcggcctcgtgcgcgcgccaccgccgctcgctgcgcctgctggagcccttcgaggtggagccccctgagctgcccgctgatctgcagcactggatctcctacaacgaggccagcagccagctgctccgcatggagagtgggctcagtgatgtcaccaaggaccagtgaccgccaccttcacaccgtctgccctggccaccatcctgggcctgggggctgcccacagatgggcagtctcagccatactctgttccagctggagtagcctcctgaccagcctggcccaccctgctccacccactgggcccccccagttattgatacccctctgtgctgggctccacgctaggcagaaggaggagtggcattggcatcctgacccagctctgccctcaaggtggggatggatgggcaaaggagagtcctgcctggccctacgatgaggccactcatgtgggcctaggtaggggaggatggtgcctggagcagagggacccacaagtgcctcccgagcctagatcctggctcggaccactgcaagggccgaggcagggccagaccagagcatcctgggtacaggcctgggctctccagggcctgggcctgattcaggtgcagtgggcactcctgaagggtcagagcggcatctgccaggcagcccctctggcttccgctgaggtggttgcaggcctggggcagagcctgggtggtcagaggccggggctagaggcagatggaagggaggcatttgctgacagaggacggggcacccgggctccccactgcagtcggccttgcctcctcctcctcctctacctccagtcaggctggacgggagggtagccttgtggctgagaggggtcagactaggtggcacaggggctcctggaaagacagcaggcttcctgctgggcgttcccttgttggagggaatagagtgggggtgggactctgcaggggtgtccttgtccactcgcacccctcgccgcccaccagggccatgctctgtgacttgggctgatccccaccctttctgggcctacagcaccacaggccgctgtacccccttagagctgcccctctctggcctggccggcaggcgtcttcttaactcctctgtcctctatattcagcatgttccttgtcagctgctgggccggccctgccttgcgctagcagagcctctcctggcagcttctcaggtctccctaatggagacaccaggctactaggacactggctggggccaccccctcctgcctaatgcctcaccttacagctggggaaactgaggcctggaatggcccagagtcaccaaggcaaagttggggctggtcccagcctgaggctccagctgatgccctcagctcccagagagggggtgccccatctagctgggtgcaggggtcactgcttgtcagctcagggccctgtgcccgcttgcctgttcccctacatctgtgcctgcacatccagaactgcctccttgccgctgcctccaggaagcccaccttgagccagagtcaagggctgcagcactgcccgatagaacacgcccgccctcactgctgttcttgccttacagccaccatgggaaagctgcaacctttctgttttatttaaagaaagcccaacattaaagggttttcattgcaagcgtg

SEQ ID NO: 7321 - protein, 155 aa, Homo sapiens
MLGLLVALLALGLAVFALLDVWYLVRLPCAVLRARLLQPRVRDLLAEQRFPGRVLPSDLDLLLHMNNARYLREADFARVAHLTRCGVLGALRELRAHTVLAASCARHRRSLRLLEPFEVEPPELPADLQHWISYNEASSQLLRMESGLSDVTKDQ

SEQ ID NO: 7322 - DNA, 420 bp, Homo sapiens
ctcggccgccctcgcgctgtggttcgctccgggcgcgctgcgctcgtgagttcccaggaggcctggcgggcaccgtaaccagcgccgcggacaccggcaccggcgccacggactccgcaggaccccgcgcccgccgccgccgctatgctggggctgctggtggcgttgctggccctggggctcgctgtctttgcgctgctggacgtctggtacctggtgcgccttccgtgcgccgtgctgcgcgcgcgcctgctgcagccgcgcgtccgtgacctgctagctgagcagcgcttcccgggccgcgtgctgccctcggacttggacccgctgcggggtgctcggggcgctgagggagttgcgggcgcacacggtgctggcggcctcgtgcgcgcgccaccgccgctcgctgcgcctgctgga

SEQ ID NO: 7323 - protein, 91 aa, Homo sapiens
MLGLLVALLALGLAVFALLDVWYLVRLPCAVLRARLLQPRVRDLLAEQRFPGRVLPSDLDPLRGARGAEGVAGAHGAGGLVRAPPPLAAPA

SEQ ID NO: 7324 - DNA, 2304 bp, Homo sapiens
tgttgagaggctggcctgcggtgatgtggccaaagaggaagagctgggctggggtgagtgttggtcacatggttgaaactaggtggggaggggagtggtccaggggagagtccaggcccagctctgctgggacttgccatgggggtcacgactcatctgcagggaaggtctgggctttatctctgagcacctctgtgtgctgctcaccctgaagtgggggtgggcctgtgcctggcctgtcccctcatcctgggagctcccaatgcccatctgcaaggctgtggacccctcaggagtggcctggagcctggctcccattgccacatggtggctgtgtgtgtggagagggttgatagtggagtggtcaggcccaggctgccctgggggatgaagtgccatcctctgggtgccctggagaaagaagagaactcagtgagccctgtctggtactttcctggaggagggctcccatgctggccctccacccctctgtcccctgtcaccctgaggcctctggatttcctctctgcccttcccaacctgccaacttcacgggtttctggctgggttctggggatggcccctaggggagacgggccaggcacaagcggggctgtgtcaaggtgggtatgcaggggtagcacaagtgtgcagagcctggggaggcatgggcaaagcatggcaggcggcggggcaggggatcttggaaggtcacgggctggggagcagtgtgggcagcggcccagaggtgggaaggccgtagcttagctgggtgtcccctttctgtcctctgcaggtggagccccctgagctgcccgctgatctgcagcactggatctcctacaacgaggccagcagccagctgctccgcatggagagtgggctcagtgatgtcaccaaggaccagtgaccgccaccttcacaccgtctgccctggccaccatcctgggcctgggggctgcccacagatgggcagtctcagccatactctgttccagctggagtagcctcctgaccagcctggcccaccctgctccacccactgggcccccccagttattgatacccctctgtgctgggctccacgctaggcagaaggaggagtggcattggcatcctgacccagctctgccctcaaggtggggatggatgggcaaaggagagtcctgcctggccctacgatgaggccactcatgtgggcctaggtaggggaggatggtgcctggagcagagggacccacaagtgcctcccgagcctagatcctggctcggaccactgcaagggccgaggcagggccagaccagagcatcctgggtacaggcctgggctctccagggcctgggcctgattcaggtgcagtgggcactcctgaagggtcagagcggcatctgccaggcagcccctctggcttccgctgaggtggttgcaggcctggggcagagcctgggtggtcagaggccggggctagaggcagatggaagggaggcatttgctgacagaggacggggcacccgggctccccactgcagtcggccttgcctcctcctcctcctctacctccagtcaggctggacgggagggtagccttgtggctgagaggggtcagactaggtggcacaggggctcctggaaagacagcaggcttcctgctgggcgttcccttgttggagggaatagagtgggggtgggactctgcaggggtgtccttgtccactcgcacccctcgccgcccaccagggccatgctctgtgacttgggctgatccccaccctttctgggcctacagcaccacaggccgctgtacccccttagagctgcccctctctggcctggccggcaggcgtcttcttaactcctctgtcctctatattcagcatgttccttgtcagctgctgggccggccctgccttgcgctagcagagcctctcctggcagcttctcaggtctccctaatggagacaccaggctactaggacactggctggggccaccccctcctgcctaatgagctcccagagagggggtgccccatctagctgggtgcaggggtcactgcttgtcagctcagggccctgtgcccgcttgcctgttcccctacatctgtgcctgcacatccagaactgcctccttgccgctgcctccaggaagcccaccttgagccagagtcaagggctgcagcactgcccgatagaacacgcccgccctcactgctgttcttgccttacagccaccatgggaaagctgcaacctttctgttttatttaaagaaagcccaacattaaagggttttcattgcaagcgtg

SEQ ID NO: 7325 - protein, 86 aa, Homo sapiens
MSSQRGGAPSSWVQGSLLVSSGPCARLPVPLHLCLHIQNCLLAAASRKPTLSQSQGLQHCPIEHARPHCCSCLTATMGKLQPFCFI

SEQ ID NO: 7326 - DNA, 537 bp, Homo sapiens; identical to SEQ ID NO: 1043

SEQ ID NO: 7327 - protein, 103 aa, Homo sapiens; identical to SEQ ID NO: 1044

SEQ ID NO: 7328 - DNA, 592 bp, Homo sapiens
agtctgtcgccacctcacttggtgtctgctgtccccgccaggcaagcctggggtgagagcacagaggagtgggccgggaccatgcgggggacgcggctggcgctcctggcgctggtgctggctgcctgcggagagctggcgccggccctgcgctgctacgtctgtccggagcccacaggagtgtcggactgtgtcaccatcgccacctgcaccaccaacgaaaccatgtgcaagaccacactctactcccgggagatagtgtaccccttccagggggactccacggtgaccaagtcctgtgccagcaagtgtaagccctcggatgtggatggcatcggccagaccctgcccgtgtcctgctgcaatactgagctgtgcaatgtagacggggcgcccgctctgaacagcctccactgcggggccctcacgctcctcccactcttgagcctccgactgtagagtccccgcccacccccatggccctatgcggcccagccccgaatgccttgaagaagtgccccctgcaccaggactcctgagtctcctttctgggcacagacctgccctgctgcatctctgacctcgtcgatgt

SEQ ID NO: 7329 - protein, 125 aa, Homo sapiens; identical to SEQ ID NO: 1046

SEQ ID NO: 7330 - DNA, 533 bp, Homo sapiens
ccagtctgtcgccacctcacttggtgtctgctgtccccgccaggcaagcctggggtgagagcacagaggagtgggccgggaccatgcgggggacgcggctggcgctcctggcgctggtgctggctgcctgcggagagctggcgccggccctgcgctgctacgtctgtccggagcccacaggagtgtcggactgtgtcaccatcgccacctgcaccaccaacgaaaccatgtgcaagaccacactctactcccgggagatagtgtaccccttccagggggactccacggtgaccaagtcctgtgccagcaagtgtaagccctcggatgtggatggcatcggccagaccctgcccgtgtcctgctgcaatactgagctgtgcaatgtagacggggcgcccgctctgaacagcctccactgcggggccctcacgctcctcccactcttgagcctccgactgtagagtccccgcccacccccatggccctatgcggcccagccccgaatgccttgaagaagtgccccctgcaccagg

SEQ ID NO: 7331 - protein, 125 aa, Homo sapiens; identical to SEQ ID NO: 1046

SEQ ID NO: 7332 - DNA, 670 bp, Homo sapiens
tctgaattatctagcattaaaaaacctcctctttttacatcgaaacctctcattcagttggcatgcctttggctgtagcgagagaggtgatgatccagccttatcctgttctctccacagtgctccacggcggctgccagtgagccctgtccctctcctgcagatctgagaagtgctccattgtcacctcaattcttgagcttatctgggtatctccagcgcaccctgtttatgtcttcttctgtgcccggggctactctgaaagttgtcctgcacctgagtgtccggcggccctgcctgagacaccccctccttgtggagcagcttaacaattgcatcagctttctcctgtgctgattcttcatgagaacgttgccaaggcgctgtggagacaccgtttctctagttgtgcagctgcaaggtcacagacagagaaactcaagtcgtaaaacatgtttttccttcaaaaggaagaaatgatgtaaggaatgtctcaattcattgaatcactgtctttgtttctcgcttctgtaacatgcttccccctgcaccgatctccccccaccccgcgaaatgcttaaaaggtaacttaactctttgttcagagctcagtcctttggatgttaacccgactgggctggtgcacctaaataataaatatcctcctcaa

SEQ ID NO: 7333 - protein, 38 aa, Homo sapiens
MRTLPRRCGDTVSLVVQLQGHRQRNSSRKTCFSFKRKK

SEQ ID NO: 7334 - DNA, 603 bp, Homo sapiens
cggccagggcgccgacagcccgacctcaccaggagaacatgcagctcggcactgggctcctgctggccgccgtcctgagcctgcagctggctgcagccgaagccatatggtgtcaccagtgcacgggcttcggagggtgctcccatggatccagatgcctgagggactccacccactgtgtcaccactgccacccgggtcctcagcaacaccgaggatttgcctctggtcaccaagatgtgccacataggctgccccgatatccccagcctgggcctgggcccctacgtatccatcgcttgctgccagaccagcctctgcaaccatgactgacggctgccctcctccaggcccccggacgctcagcccccacagcccccacagcctggcgccagggctcacagctgcccctccctcgagactggccagcccacctctcccggcctctgcagccaccgtccagcaccgcttgtcctagggaagtcctgcgtggagtcttgcctcaatctgctgccgtccaagcctggggcccatcgtgcctgccgccccttcaggtcccgacctccccacaataaaatgtgattggatcgtgtggtacaagcta

SEQ ID NO: 7335 - protein, 97 aa, Homo sapiens; identical to SEQ ID NO: 1052

SEQ ID NO: 7336 - DNA, 1294 bp, Homo sapiens
ttagggtagaagaaaaggttttatttttctttctcacattggaaaaaatgaaaactttcggacccatgaaattttattacattttgccaaaaacagaaccaataacataagtattcaaagttatgtaaagataattatttaatatgaacattatgatggtgagagggaccacggagcaaggggctgccttgcaggcctgccttccagctttgctacagggaccagaagcgggagctgagcgcaggggaggcaggcggaggccatgggcagcgaggcgggtgcgccaaagggcgccagttccggagctgctgggcctgggctgcaggagggcggagctggggccgcaaggctggtgccggccgacaaacgacgcggcgcgggcgagtgggcggaggcggctgcggggaaggctgggctgccgcgggacgcggtgaagatagcctgcggagtgtccgggctgaacacggttgcagcactcccagtagaccaggagctccgggaggcagggccggccccacgtcctctgcgcaccaccctgagttggatcctctgtgcgccacctgagttggatccagggctagctgctgttgacctccccactcccacgctgccctcctgcctgcagccatgacgcccctgctcaccctgatcctggtggtcctcatgggcttacctctggcccaggccttggactgccacgtgtgtgcctacaacggagacaactgcttcaaccccatgcgctgcccggctatggttgcctactgcatgaccacgcgcacctctgcagccgaagccatatggtgtcaccagtgcacgggcttcggagggtgctcccatggatccagatgcctgagggactccacccactgtgtcaccactgccacccgggtcctcagcaacaccgaggatttgcctctggtcaccaagatgtgccacataggctgccccgatatccccagcctgggcctgggcccctacgtatccatcgcttgctgccagaccagcctctgcaaccatgactgacggctgccctcctccaggcccccggacgctcagcccccacagcccccacagcctggcgccagggctcacagctgcccctccctcgagactggccagcccacctctcccggcctctgcagccaccgtccagcaccgcttgtcctagggaagtcctgcgtggagtcttgcctcaatctgctgccgtccaagcctggggcccatcgtgcctgccgccccttcaggtcccgacctccccacaataaaatgtgattggatcgtgtggtacaagcta

SEQ ID NO: 7337 - protein, 131 aa, Homo sapiens; identical to SEQ ID NO: 1048

SEQ ID NO: 7338 - DNA, 869 bp, Homo sapiens
cacgacctcacttcgaggccttgacctttcgatgctgtgtgggatcccaaaagtgtccggctttgatgggctgatcagcccctcgcctgtccagggctatttatggggaggggcccagtcaggcagggagcactgagcagatgggagctgtggccaagcccaccttctgggaagccctaggagaggcccctgcctcagtctgcccctggtgtgctggggcagggggaagacaaggaatgcccgcaggtggggtggtggggagactcttaggaggaaaggctcctccaggcctagtcacgcttcctactgaggccaggagctgccaggaccggtacgggatcagggctgtgggaggagggcctttggcaccggcccctgtgctaggaagtctgccaggcccgagttggagccaccccctgcaggggagggggcggctctgcctcagcaggccccagggcccccgaagtcacagaagctttttcgggtccagcaaggggtgtgtgtcctctcagtcaaaccccttgacgtttcccaccccctcacggggagggcaccaggcctgaagctggcaggagctagggccatgctatatttggtgggtcctggacgctgacccggccagcgcctgagcttcatttgcatcttgaggagtaaggggtggtgaaatgggaatgctggtctggctcagctggtcgtgggcataagtgcccgctgaatggatggcatctctccctcctgtcttatgttctggggtccaggtgcttcccagggccatgcccctgctgctaatgcttgccctaacccttaccctaaccagcgtccagcgtcgtctcaccgagccgtaaataaatcaacagattcgcattgtc

SEQ ID NO: 7339 - protein, 140 aa, Homo sapiens [sequence omitted]

SEQ ID NO: 7340 - DNA, 3868 bp, Homo sapiens
ctaccggcgagcggccgcgggtgactcccaggcgcggcggtacctcacggtggtgaaggtcacagggttgcagcactcccagtagaccaggagctccgggaggcagggccggccccacgtcctctgcgcaccaccctgagttggatcctctgtgcgccacctgagttggatccagggctagctgctgttgacctccccactcccacgctgccctcctgcctgcagccatgacgcccctgctcaccctgatcctggtggtcctcatgggcttacctctgggtaagatggacaaaggacagagggatgggcagacccactttgagggcagatgggctgacagtagggaaggaggctagaattcccagcgacaacccctccttctagccccctgccccggggaaggtgacgggctgggggcctgatgggctggaggaggggcctctcatgttctgtgacccccgttcccttcccgcccatctgccaaccccagcccaggccttggactgccacgtgtgtgcctacaacggagacaactgcttcaaccccatgcgctgcccggctatggttgcctactgcatgaccacgcgcacctgtgagtctgggggccctgcgtggccctgcctggggagcacgaaggggaggttctgccctgcccctgagcatgcgggggtcctgaggaaggaggctctcctgttcccggatcctgtctgggagctccaggctgaggggccctgccctgatggctgtggatgctggggtggggccagctgggtctcctgcccctcttagcggagctggctcaccgccccgcccctctgcagactacacccccaccaggatgaaggtcagtaagtcctgcgtgccccgctgcttcgagactgtgtatgatggctactccaagcacgcgtccaccacctcctgctgccagtacgacctctgcaacggcaccggccttgccaccccggccaccctggccctggcccccatcctcctggccaccctctggggtctcctctaaagcccccgaggcagacccactcaagaacaaagctctcgagacacactgctacaccctcgcacccagctcaccctgcctcaccctccacactccctgcgacctcctcagccatgcccagggtcaggactgtgggcaagaagacacccgacctcccccaaccaccacacgacctcacttcgaggccttgacctttcgatgctgtgtgggatcccaaaagtgtccggctttgatgggctgatcagcccctcgcctgtccagggctatttatggggaggggcccagtcaggcagggagcactgagcagatgggagctgtggccaagcccaccttctgggaagccctaggagaggcccctgcctcagtctgcccctggtgtgctggggcagggggaagacaaggaatgcccgcaggtggggtggtggggagactcttaggaggaaaggctcctccaggcctagtcacgcttcctactgaggccaggagctgccaggaccggtacgggatcagggctgtgggaggagggcctttggcaccggcccctgtgctaggaagtctgccaggcccgagttggagccaccccctgcaggggagggggcggctctgcctcagcaggccccagggcccccgaagtcacagaagctttttcgggtccagcaaggggtgtgtgtcctctcagtcaaacccccctacccccagtggttgtggctgtagccctaagcctggagagcaggaccggcccggggtgtctgggaggctgccaggtgcctcccagagctcccaagggcccccacctgcaagtgccagcctcagggcagtgcccaaatgaggccctctcagctgcagccagcgatgccttgggatgcttaccgggagggaggcggctttgggctcctaagtccttgggagaggctgggagcagtcactgcgcggcttgcgcaagcccattgtcgggttgggtggcttcctcagccagggctgggagggactccaggatcaggtcctccctgtctcgagtctcagtggggtgatggggaggagacctggccacccatggctcaggggcagctgagaacaaggacctgctggagctggaagtgctgtggtgttgaggggtggggtgggcagcttctcacacctgcctcctgcctccttctgtccacctttccaccaccctgacctgtcccagccccacacatggttctgcctggctggcctgcccttggcacctggcgtagagcacacagaaggcactcagctaatgctgggcaggcccactcatggggagtgcgtggctgtgcagcaccagggaaccggcacagcagcgccggcagaaatcacagcagtaaacttgtccgggttgtatgcatcaaggtggcgatggacgtgggtccccccactgcactgtggccctgagcactgtatagcagcccggcaatgggagccattatcttgcccctttgacagaggaggacacagaggcacagggaggtgaagtagctgccccacactagtgcctcctcgctcactcaccaccccctgcaccacagtgcagccgcttctcccaccagctggggttccttggacccccaagcctgggaagggggaggtgagtttacaaaatggaaagcttaaaaggagaaaagtggaaccagaggtttgagaagccctgagtggtagagtaaggcctccagcgctgcctctgggtgcagggcagagtggcagaggagagggggagaggcactgggcaccatgggggcccagttcccacttcggggatctctctcgcagaaccgagggtccccttcatgggggtagatgcccagggctagctgttgccactgtctgtgtggacctgagtcctggacatgcccgagtgactcaggagtggctgcttgggcgggctctgtcaccctaggatgttatacattctgggaactggacaggagtggctgcttgggcgggctctggcaccctgggatgttatacattctgggaactggacaggagtggctgcttgggtgggctctggcaccctgggatgttatacattctgggaactgcaatcagccactagagaagtcggagctacaggaagtgaccctggggtgggacctggggacatggccaggtcagcatggggacacccggctccagcaggagctctggtctgtcctggggtctttgggggcagggctgcggccctgggcaggcttcctccaggcggaggtcctggggaagtgggggagccaggccagctgccgcctcccccactatgtagcatctgattcgtcatctctcatgaaggcgatttggttcataactctgaaactctgaaaaaggtcaaaagaagcagagaggccctcggtggatatgccagcttttctgccggtgctttctcccactactctgggtggtctgctctcctcttcaaacctcagctcgcagggagggcctgaatctgccagcccctcaggatctccttccctctgggccctccccagccttaaggagcctcccagacagaagggtggacagagccacctgggcagcccgagagacacacgggggtcctccctgtggacagccctgccagcttccgcccagccctgagcttcatttgcatcttgaggagtaaggggtggtgaaatgggaatgctggtctggctcagctggtcgtgggcataagtgcccgctgaatggatggcatctctccctcctgtcttatgttctggggtccaggtgcttcccagggccatgcccctgctgctaatgcttgccctaacccttaccctaaccagcgtccagcgtcgtctcaccgagccgtaaataaatcaacagattcgcattgtc

SEQ ID NO: 7341 - protein, 173 aa, Homo sapiens
MGAVAKPTFWEALGEAPASVCPWCAGAGGRQGMPAGGVVGRLLGGKAPPGLVTLPTEARSCQDRYGIRAVGGGPLAPAPVLGSLPGPSWSHPLQGRGRLCLSRPQGPRSHRSFFGSSKGCVSSQSNPPTPSGCGCSPKPGEQDRPGVSGRLPGASQSSQGPPPASASLRAVPK

SEQ ID NO: 7342 - DNA, 2890 bp, Homo sapiens
ggcacctaccggcgagcggccgcgggtgactcccaggcgcggcggtacctcacggtggtgaaggtcacagggttgcagcactcccagtagaccaggagctccgggaggcagggccggccccacgtcctctgcgcaccaccctgagttggatcctctgtgcgccacctgagttggatccagggctagctgctgttgacctccccactcccacgctgccctcctgcctgcagccatgacgcccctgctcaccctgatcctggtggtcctcatgggcttacctctggcccaggccttggactgccacgtgtgtgcctacaacggagacaactgcttcaaccccatgcgctgcccggctatggttgcctactgcatgaccacgcgcacctgtgagacccctgggggatcagggaatgagggtctccaccccaggggtctccttgcagtgagtctatatgcaggcctgcgttctgctcctggggctggttctgagtgcccagcttcagtctcctgagaacatgaggatgggagggggcagagtcttgctgagggcacacccagttcccgctggaggaggacagtgccagtcttctgcaaagggaccttgggtgggaacgggcccggagcgggaggaacgtgactccccagagggaagatgggcatcatactgggcccagagctgggaaggagttgctgccagcacagggtgggcctggactcccctcgcccctacccccagtggttgtggctgtagccctaagcctggagagcaggaccggcccggggtgtctgggaggctgccaggtgcctcccagagctcccaagggcccccacctgcaagtgccagcctcagggcagtgcccaaatgaggccctctcagctgcagccagcgatgccttgggatgcttaccgggagggaggcggctttgggctcctaagtccttgggagaggctgggagcagtcactgcgcggcttgcgcaagcccattgtcgggttgggtggcttcctcagccagggctgggagggactccaggatcaggtcctccctgtctcgagtctcagtggggtgatggggaggagacctggccacccatggctcaggggcagctgagaacaaggacctgctggagctggaagtgctgtggtgttgaggggtggggtgggcagcttctcacacctgcctcctgcctccttctgtccacctttccaccaccctgacctgtcccagccccacacatggttctgcctggctggcctgcccttggcacctggcgtagagcacacagaaggcactcagctaatgctgggcaggcccactcatggggagtgcgtggctgtgcagcaccagggaaccggcacagcagcgccggcagaaatcacagcagtaaacttgtccgggttgtatgcatcaaggtggcgatggacgtgggtccccccactgcactgtggccctgagcactgtatagcagcccggcaatgggagccattatcttgcccctttgacagaggaggacacagaggcacagggaggtgaagtagctgccccacactagtgcctcctcgctcactcaccaccccctgcaccacagtgcagccgcttctcccaccagctggggttccttggacccccaagcctgggaagggggaggtgagtttacaaaatggaaagcttaaaaggagaaaagtggaaccagaggtttgagaagccctgagtggtagagtaaggcctccagcgctgcctctgggtgcagggcagagtggcagaggagagggggagaggcactgggcaccatgggggcccagttcccacttcggggatctctctcgcagaaccgagggtccccttcatgggggtagatgcccagggctagctgttgccactgtctgtgtggacctgagtcctggacatgcccgagtgactcaggagtggctgcttgggcgggctctgtcaccctaggatgttatacattctgggaactggacaggagtggctgcttgggcgggctctggcaccctgggatgttatacattctgggaactggacaggagtggctgcttgggtgggctctggcaccctgggatgttatacattctgggaactgcaatcagccactagagaagtcggagctacaggaagtgaccctggggtgggacctggggacatggccaggtcagcatggggacacccggctccagcaggagctctggtctgtcctggggtctttgggggcagggctgcggccctgggcaggcttcctccaggcggaggtcctggggaagtgggggagccaggccagctgccgcctcccccactatgtagcatctgattcgtcatctctcatgaaggcgatttggttcataactctgaaactctgaaaaaggtcaaaagaagcagagaggccctcggtggatatgccagcttttctgccggtgctttctcccactactctgggtggtctgctctcctcttcaaacctcagctcgcagggagggcctgaatctgccagcccctcaggatctccttccctctgggccctccccagccttaaggagcctcccagacagaagggtggacagagccacctgggcagcccgagagacacacgggggtcctccctgtggacagccctgccagcttccgcccagccctgagcttcatttgcatcttgaggagtaaggggtggtgaaatgggaatgctggtctggctcagctggtcgtgggcataagtgcccgctgaatggatggcatctctccctcctgtcttatgttctggggtccaggtgcttcccagggccatgcccctgctgctaatgcttgccctaacccttaccctaaccagcgtccagcgtcgtctcaccgagccgtaaataaatcaacagattcgcattgtc

SEQ ID NO: 7343 - protein, 92 aa, Homo sapiens
MTPLLTLILVVLMGLPLAQALDCHVCAYNGDNCFNPMRCPAMVAYCMTTRTCETPGGSGNEGLHPRGLLAVSLYAGLRSAPGAGSECPASVS

SEQ ID NO: 7344 - DNA, 1625 bp, Homo sapiens
gagggggttgggaagctcgaagccgcaggcctgactctggcctttggcatcctggggttggcctgggcaaatgtgtcgtgagagacggatttgttgttctcgggaaggcggttgcagcactcccagtagaccaggagctccgggaggcagggccggccccacgtcctctgcgcaccaccctgagttggatcctctgtgcgccacctgagttggatccagggctagctgctgttgacctccccactcccacgctgccctcctgcctgcagccatgacgcccctgctcaccctgatcctggtggtcctcatgggcttacctctggcccaggccttggactgccacgtgtgtgcctacaacggagacaactgcttcaaccccatgcgctgcccggctatggttgcctactgcatgaccacgcgcacctactacacccccaccaggatgaaggtcagtaagtcctgcgtgccccgctgcttcgagactgtgtatgatggctactccaagcacgcgtccaccacctcctgctgccagtacgacctctgcaacggcaccggccttgccaccccggccaccctggccctggcccccatcctcctggccaccctctggggtctcctctaaagcccccgaggcagacccactcaagaacaaagctctcgagacacactgctacaccctcgcacccagctcaccctgcctcaccctccacactccctgcgacctcctcagccatgcccagggtcaggactgtgggcaagaagacacccgacctcccccaaccaccacacgacctcacttcgaggccttgacctttcgatgctgtgtgggatcccaaaagtgtccggctttgatgggctgatcagcccctcgcctgtccagggctatttatggggaggggcccagtcaggcagggagcactgagcagatgggagctgtggccaagcccaccttctgggaagccctaggagaggcccctgcctcagtctgcccctggtgtgctggggcagggggaagacaaggaatgcccgcaggtggggtggtggggagactcttaggaggaaaggctcctccaggcctagtcacgcttcctactgaggccaggagctgccaggaccggtacgggatcagggctgtgggaggagggcctttggcaccggcccctgtgctaggaagtctgccaggcccgagttggagccaccccctgcaggggagggggcggctctgcctcagcaggccccagggcccccgaagtcacagaagctttttcgggtccagcaaggggtgtgtgtcctctcagtcaaaccccttgacgtttcccaccccctcacggggagggcaccaggcctgaagctggcaggagctagggccatgctatatttggtgggtcctggacgctgacccggccagcgctattctgggcagggagggaaaggggcagagcaggtggtcccccgagtcctggtccccaaccacagcaggacccagccgagcaaggcaaaagacgcaggactgggggatgcgcgcacaggctgggggttgggagcagcctggggccggcgcgggcctgggcgtgggaaggcggagcatgccaccctctcgtggccgtgcgggggcgggagtgggg

SEQ ID NO: 7345 - protein, 116 aa, Homo sapiens; identical to SEQ ID NO: 1050

SEQ ID NO: 7346 - DNA, 1739 bp, Homo sapiens
ggggccggggcaggcctggggcggggcctgcggtgagctcgcgctgggcgggctgttccgggggcgggactgggctgggcctgcggtgagcatcaggcgatgcggcacgggtgctgcgggacacacagacacgcctacgattagactcaggcaggcacctaccggcgagcggccgcgggtgactcccaggcgcggcggtacctcacggtggtgaaggtcacagggttgcagcactcccagtagaccaggagctccgggaggcagggccggccccacgtcctctgcgcaccaccctgagttggatcctctgtgcgccacctgagttggatccagggctagctgctgttgacctccccactcccacgctgccctcctgcctgcagccatgacgcccctgctcaccctgatcctggtggtcctcatgggcttacctctggcccaggccttggactgccacgtgtgtgcctacaacggagacaactgcttcaaccccatgcgctgcccggctatggttgcctactgcatgaccacgcgcacctactacacccccaccaggatgaaggtcagtaagtcctgcgtgccccgctgcttcgagactgtgtatgatggctactccaagcacgcgtccaccacctcctgctgccagtacgacctctgcaacggcaccggccttgccaccccggccaccctggccctggcccccatcctcctggccaccctctggggtctcctctaaagcccccgaggcagacccactcaagaacaaagctctcgagacacactgctacaccctcgcacccagctcaccctgcctcaccctccacactccctgcgacctcctcagccatgcccagggtcaggactgtgggcaagaagacacccgacctcccccaaccaccacacgacctcacttcgaggccttgacctttcgatgctgtgtgggatcccaaaagtgtccggctttgatgggctgatcagcccctcgcctgtccagggctatttatggggaggggcccagtcaggcagggagcactgagcagatgggagctgtggccaagcccaccttctgggaagccctaggagaggcccctgcctcagtctgcccctggtgtgctggggcagggggaagacaaggaatgcccgcaggtggggtggtggggagactcttaggaggaaaggctcctccaggcctagtcacgcttcctactgaggccaggagctgccaggaccggtacgggatcagggctgtgggaggagggcctttggcaccggcccctgtgctaggaagtctgccaggcccgagttggagccaccccctgcaggggagggggcggctctgcctcagcaggccccagggcccccgaagtcacagaagctttttcgggtccagcaaggggtgtgtgtcctctcagtcaaaccccttgacgtttcccaccccctcacggggagggcaccaggcctgaagctggcaggagctagggccatgctatatttggtgggtcctggacgctgacccggccagcgctattctgggcagggagggaaaggggcagagcaggtggtcccccgagtcctggtccccaaccacagcaggacccagccgagcaaggcaaaagacgcaggactgggggatgcgcgcacaggctgggggttgggagcagcctggggccggcgcgggcctgggcgtgggaaggcggagcatgccaccctctcgtggccgtgcgggggcgggagtgggg

SEQ ID NO: 7347 - protein, 116 aa, Homo sapiens; identical to SEQ ID NO: 1050

SEQ ID NO: 7348 - DNA, 1982 bp, Homo sapiens
tttagggtagaagaaaaggttttatttttctttctcacattggaaaaaatgaaaactttcggacccatgaaattttattacattttgccaaaaacagaaccaataacataagtattcaaagttatgtaaagataattatttaatatgaacattatgatggtgagagggaccacggagcaaggggctgccttgcaggcctgccttccagctttgctacagggaccagaagcgggagctgagcgcaggggaggcaggcggaggccatgggcagcgaggcgggtgcgccaaagggcgccagttccggagctgctgggcctgggctgcaggagggcggagctggggccgcaaggctggtgccggccgacaaacgacgcggcgcgggcgagtgggcggaggcggctgcggggaaggctgggctgccgcgggacgcggtgaagatagcctgcggagtgtccgggctgaacacggttgcagcactcccagtagaccaggagctccgggaggcagggccggccccacgtcctctgcgcaccaccctgagttggatcctctgtgcgccacctgagttggatccagggctagctgctgttgacctccccactcccacgctgccctcctgcctgcagccatgacgcccctgctcaccctgatcctggtggtcctcatgggcttacctctggcccaggccttggactgccacgtgtgtgcctacaacggagacaactgcttcaaccccatgcgctgcccggctatggttgcctactgcatgaccacgcgcacctactacacccccaccaggatgaaggtcagtaagtcctgcgtgccccgctgcttcgagactgtgtatgatggctactccaagcacgcgtccaccacctcctgctgccagtacgacctctgcaacggcaccggccttgccaccccggccaccctggccctggcccccatcctcctggccaccctctggggtctcctctaaagcccccgaggcagacccactcaagaacaaagctctcgagacacactgctacaccctcgcacccagctcaccctgcctcaccctccacactccctgcgacctcctcagccatgcccagggtcaggactgtgggcaagaagacacccgacctcccccaaccaccacacgacctcacttcgaggccttgacctttcgatgctgtgtgggatcccaaaagtgtccggctttgatgggctgatcagcccctcgcctgtccagggctatttatggggaggggcccagtcaggcagggagcactgagcagatgggagctgtggccaagcccaccttctgggaagccctaggagaggcccctgcctcagtctgcccctggtgtgctggggcagggggaagacaaggaatgcccgcaggtggggtggtggggagactcttaggaggaaaggctcctccaggcctagtcacgcttcctactgaggccaggagctgccaggaccggtacgggatcagggctgtgggaggagggcctttggcaccggcccctgtgctaggaagtctgccaggcccgagttggagccaccccctgcaggggagggggcggctctgcctcagcaggccccagggcccccgaagtcacagaagctttttcgggtccagcaaggggtgtgtgtcctctcagtcaaaccccttgacgtttcccaccccctcacggggagggcaccaggcctgaagctggcaggagctagggccatgctatatttggtgggtcctggacgctgacccggccagcgctattctgggcagggagggaaaggggcagagcaggtggtcccccgagtcctggtccccaaccacagcaggacccagccgagcaaggcaaaagacgcaggactgggggatgcgcgcacaggctgggggttgggagcagcctggggccggcgcgggcctgggcgtgggaaggcggagcatgccaccctctcgtggccgtgcgggggcgggagtgggg

SEQ ID NO: 7349 - protein, 122 aa, Homo sapiens
MGSEAGAPKGASSGAAGPGLQEGGAGAARLVPADKRRGAGEWAEAAAGKAGLPRDAVKIACGVSGLNTVAALPVDQELREAGPAPRPLRTTLSWILCAPPELDPGLAAVDLPTPTLPSCLQP

SEQ ID NO: 7350 - DNA, 222 bp, Homo sapiens
gggactgggctgggcctgcggtgagcatcaggcgatgcggcacgggtgctgcgggacacacagacacgcctacgattagactcaggcaggcacctaccggcgagcggccgcgggtgactcccaggcgcggcggtacctcacggtggtgaaggtcacagcccaggccttggactgccacgtgtgtgcctacaacggagacaactgcttcaaccccatgcgctg

SEQ ID NO: 7351 - protein, 34 aa, Homo sapiens
LPGAAVPHGGEGHSPGLGLPRVCLQRRQLLQPHA

SEQ ID NO: 7352 - DNA, 302 bp, Homo sapiens
catggccagccatccggcccccagggccctgcttgggatggggctgcagaccacctcccatgggacctctgcaccaaccatcccctggggttgcagcactcccagtagaccaggagctccgggaggcagggccggccccacgtcctctgcgcaccaccctgagttggatcctctgtgcgccacctgagttggatccagggctagctgctgttgacctccccactcccacgctgccctcctgcctgcagccatgacgcccctgctcaccctgatcctggtggtcctcatgggcttacctctgg

SEQ ID NO: 7353 - protein, 64 aa, Homo sapiens
MGPLHQPSPGVAALPVDQELREAGPAPRPLRTTLSWILCAPPELDPGLAAVDLPTPTLPSCLQP

SEQ ID NO: 7354 - DNA, 416 bp, Homo sapiens
ggggaatctggtgaagaaggactgtgcggagtcgtgcacacccagctacaccctgcaaggccaggtcagcagcggcaccagctccacccagtgctgccaggaggacctgtgcaatgagaagctgcacaacgctgcacccacccgcaccgccctcgcccacagtgccctcagcctggggctggccctgagcctcctggccgtcatcttagcccccagcctgtgaccttccccccagggaaggcccctcatgcctttccttccctttctctggggattccacacctctcttccccactgcatggaaggtggaggacagaagccctgtggatccccggatttcacactccttctgttttgttgccgtttatttttgtactcaaatctctacatggagataaatgatttaaaccagtgtg

SEQ ID NO: 7355 - protein, 55 aa, Homo sapiens [sequence omitted]

SEQ ID NO: 7356 - DNA, 1293 bp, Homo sapiens
cgagtgtcagatttacaatgtttcagaatctgaggatcttagaactgactcctggagtcacggaccctgagagagtggagcagggggttgtcttgagatgcttctcactgggagagcggccatctagtccctgccaccagcccctcccggtccccaggtctcccccagcacagcccaggacagcccaaaggccaccaagcccttcctgtcataggctcagagcagccaagctggctgcccccggggccttagctccgtcaggccctcagaaacatagccatctcctccagggacatcccctggggtggggacaagagccagtgtcctcttggcagtcgcagagctccctgagaccttggaggaaaggcttgcaacacaccctagacaggggcagggcaggacacctcttccaagccggcccaggctggaatacatgtcccctgaggctgcactcagggcacatgccctgccaggacccagagcccgggtttgggggcctagggcaagggcagcagggcctctgtccaggaggggtctctgcaggtgggggagcaggccctgctgagtcaccaggaggcctctgttgggcccgctgagccggactccctccccgccagcccttaccctgcgctgccacgtgtgcaccagctccagcaactgcaagcattctgtggtctgcccggccagctctcgcttctgcaagaccacgaacacagtggagcctctgagggggaatctggtgaagaaggactgtgcggagtcgtgcacacccagctacaccctgcaaggccaggtcagcagcggcaccagctccacccagtgctgccaggaggacctgtgcaatgagaagctgcacaacgctgcacccacccgcaccgccctcgcccacagtgccctcagcctggggctggccctgagcctcctggccgtcatcttagcccccagcctgtgaccttccccccagggaaggcccctcatgcctttccttccctttctctggggattccacacctctcttccccagccgcaacgggggtgccaggagccccaggctgagggcttccccgaaagtctgggaccaggtccaggtgggcatggaatgctgatgacttggagcaggccccacagaccccacagaggatgaagccaccccacagaggatgcagcccccagctgcatggaaggtggaggacagaagccctgtggatccccggatttcacactccttctgttttgttgccgtttatttttgtactcaaatctctacatggagataaatgatttaaaccagtg

SEQ ID NO: 7357 - protein, 192 aa, Homo sapiens [sequence omitted]

SEQ ID NO: 7358 - DNA, 815 bp, Homo sapiens
gacgacatcagagatgaggacagcattgctgctccttgcagccctggctgtggctacagggccaggtgggggagcaggccctgctgagtcaccaggaggcctctgttgggcccgctgagccggactccctccccgccagcccttaccctgcgctgccacgtgtgcaccagctccagcaactgcaagcattctgtggtctgcccggccagctctcgcttctgcaagaccacgaacacagtggagcctctgagggggaatctggtgaagaaggactgtgcggagtcgtgcacacccagctacaccctgcaaggccaggtcagcagcggcaccagctccacccagtgctgccaggaggacctgtgcaatgagaagctgcacaacgctgcacccacccgcaccgccctcgcccacagtgccctcagcctggggctggccctgagcctcctggccgtcatcttagcccccagcctgtgaccttccccccagggaaggcccctcatgcctttccttccctttctctggggattccacacctctcttccccagccgcaacgggggtgccaggagccccaggctgagggcttccccgaaagtctgggaccaggtccaggtgggcatggaatgctgatgacttggagcaggccccacagaccccacagaggatgaagccaccccacagaggatgcagcccccagctgcatggaaggtggaggacagaagccctgtggatccccggatttcacactccttctgttttgttgccgtttatttttgtactcaaatctctacatggagataaatgatttaaaccagtg

SEQ ID NO: 7359 - protein, 34 aa, Homo sapiens
MRTALLLLAALAVATGPGGGAGPAESPGGLCWAR

SEQ ID NO: 7360 - DNA, 804 bp, Homo sapiens
gcccacccccgcccagcccgtgcctataaggccttggcaatgcaggggcccgcactgctcccagacgacatcagagatgaggacagcattgctgctccttgcagccctggctgtggctacagggccagcccttaccctgcgctgccacgtgtgcaccagctccagcaactgcaagcattctgtggtctgcccggccagctctcgcttctgcaagaccacgaacacagtggagcctctgagggggaatctggtgaagaaggactgtgcggagtcgtgcacacccagctacaccctgcaaggccaggtcagcagcggcaccagctccacccagtgctgccaggaggacctgtgcaatgagaagctgcacaacgctgcacccacccgcaccgccctcgcccacagtgccctcagcctggggctggccctgagcctcctggccgtcatcttagcccccagcctgtgaccttccccccagggaaggcccctcatgcctttccttccctttctctggggattccacacctctcttccccagccgcaacgggggtgccaggagccccaggctgagggcttccccgaaagtctgggaccaggtccaggtgggcatggaatgctgatgacttggagcaggccccacagaccccacagaggatgaagccaccccacagaggatgcagcccccagctgcatggaaggtggaggacagaagccctgtggatccccggatttcacactccttctgttttgttgccgtttatttttgtactcaaatctctacatggagataaatgatttaaaccagtg

SEQ ID NO: 7361 - protein, 128 aa, Homo sapiens; identical to SEQ ID NO: 1058

SEQ ID NO: 7362 - DNA, 1055 bp, Homo sapiens
ttaaaggtactttggctgggcgcagtggctcgcgcctgtaatcccagcaatttgggaggccgaggcaggtggatcacgaggtcaggagatcgagaccatcctggctaacacggtgaaaccccatctctactaaaaatacaaaaaattatctgggcgtggtggcaggcgcctgtagtcccagctactcgggaggctgaggcaggagaatggcgtgaacccgggaggcagagcttgtagtgagctgagatcacgccactgcactccagcctgggtgacagagcatgactccgtctcaaaaaaaaaacaaaaaaaaactacttcaggctcatcttgtgttcccgcattccatccctagaatcagccctttctccaagtagtgctcattccctgcgctgccacgtgtgcaccagctccagcaactgcaagcattctgtggtctgcccggccagctctcgcttctgcaagaccacgaacacagtggagcctctgagggggaatctggtgaagaaggactgtgcggagtcgtgcacacccagctacaccctgcaaggccaggtcagcagcggcaccagctccacccagtgctgccaggaggacctgtgcaatgagaagctgcacaacgctgcacccacccgcaccgccctcgcccacagtgccctcagcctggggctggccctgagcctcctggccgtcatcttagcccccagcctgtgaccttccccccagggaaggcccctcatgcctttccttccctttctctggggattccacacctctcttccccagccgcaacgggggtgccaggagccccaggctgagggcttccccgaaagtctgggaccaggtccaggtgggcatggaatgctgatgacttggagcaggccccacagaccccacagaggatgaagccaccccacagaggatgcagcccccagctgcatggaaggtggaggacagaagccctgtggatccccggatttcacactccttctgttttgttgccgtttatttttgtactcaaatctctacatggagataaatgatttaaaccagtg

SEQ ID NO: 7363 - protein, 55 aa, Homo sapiens
MPFLPFLWGFHTSLPQPQRGCQEPQAEGFPESLGPGPGGHGMLMTWSRPHRPHRG

SEQ ID NO: 7364 - DNA, 430 bp, Homo sapiens
caagcgaaagccaggcaggtctccccctgaaacctctgcacaggtccaggctcctgcgtgaagtgatgctcctctttgccttactcctagccatggagctcccattggtggcagccagtgccaccatgcgcgctcagtggacttacagtttgagatgccatgactgtgcggtcataaatgacttcaactgtcccaacattagagtatgtccgtatcatattaggcgctgtatgacaatctccattcagctttccagtggggacagagctgctgtgtgtccagggcctcatccaactttcttccagcctggagcatggatccccacacaggtgaccgactccaagcatcagcctctccctgcccacctgaccaggcgccaccctctccacgggccaggaaacatcctccccagtgccatcaaccgccccac

SEQ ID NO: 7365 - protein, 120 aa, Homo sapiens
MLLFALLLAMELPLVAASATMRAQWTYSLRCHDCAVINDFNCPNIRVCPYHIRRCMTISIQLSSGDRAAVCPGPHPTFFQPGAWIPTQVTDSKHQPLPAHLTRRHPLHGPGNILPSAINR

SEQ ID NO: 7366 - DNA, 723 bp, Homo sapiens
gtcggcgcgggaggctcagatggctggaggcggcgggcacgcacactgcggggctccgaggggcacaggtccaggctcctgcgtgaagtgatgctcctctttgccttactcctagccatggagctcccattggtggcagccagtgccaccatgcgcgctcagtggacttacagtttgagatgccatgactgtgcggtcataaatgacttcaactgtcccaacattagagtatgtccgtatcatattaggcgctgtatgacaatctccattcgcataaattctcgtgaactacttgtttataagaactgtacaaacaactgcacatttgtatatgcagctgaacagcctcctgaagccccaggaaaaatcttcaaaactaatagcttctactgggtttgttgttgtaatagcatggtttgcaatgcaggaggacctactaatcttgaaagggacatgttacccgatgaagtaactgaggaggagcttccagaaggaactgtgaggctgggggtatcaaaactgttgctgagttttgcctctatcatagtcagcaatatattgccatgaggaccccaccttggagggtctgaccatcttcacctgttccgcagagaaatgttgctctccattattcccttctaagccagagacccttatccactgctcctctaggtggcccatttatggtttgttgtaagagaaaaattaaaaaaatattgttta

SEQ ID NO: 7367 - protein, 158 aa, Homo sapiens; identical to SEQ ID NO: 1060

SEQ ID NO: 7368 - DNA, 3105 bp, Homo sapiens
gtggggaatggaggccacagggaggggtcggggattcctcaccttcctgccagggagattggtgcgaggctggggctgggctgggctgatccggagaatttgggatgagagcagggagacttgggtgtcggggcagtctgggcaggaggaggacactgaaggatgtctcccagcaccaaagtctgagggctgcctcccgctccccggataggcgacaactgtatccagaaaatctatcaggaactggccttcagccgccctcaacagtacaccagcatcgtggcggagctcctgttgaatgcggaactgtcgccagatgccatcaaggccaactctatggaactcactgcagggagcgtggacacggtcaggccggcaaccagccccacccagagagggtgatgccaagcctgcctcccaggcactgcctgccaatgtcacacggcgcccacgtgtcccatccccaggctatgggccccacatttcttacttgggattgtgatgtgataaacacgtttgcaggttgccatggttggaatggggggttcctttctgtggaggactcagggaaaggggtttggatgggcattaggatttgaagtcttgggctctgtcgttctcagggtatgcatgtctgcacccctcacagggaggttgtcctgggaggggtgtcccgggggctgagtcctcctgtgcaaggtctgaccctgcagctgtgtctcctgcagacggtgtttcccttgctgatgacgctctttgagctggctcggaaccccaacgtgcagcaggccctgcgccaggagagcctggccgccgcagccagcatcagtgaacatccccagaaggcaaccaccgagctgcccttgctgcgtgcggccctcaaggagaccttgcggctctaccctgtgggtctgtttctggagcgagtggcgagctcagacttggtgcttcagaactaccacatcccagctggggtgctgaaacacctccaggtggagacactaacccaagaggacataaagatggtctacagcttcatattgaggcccagcatgttccccctcctcaccttcagagccatcaactaatcacgtctctgcacccagggtcccagcctggccaccagcctccctttctgcctgaccccaggccacccctcttctctcccacatgcacagcttcctgagtcacccctctgtctaaccagccccagcacaaatggaactcccgagggcctctaggaccagggtttgccaggctaagcagcaatgccagggcacagctggggaagatcttgctgaccttgtccccagccccacctggccctttctccagcaagcactgtcctctgggcagtttgcccccatccctcccagtgctggctccaggctcctcgtgtggccatacaagggtgctgtggttttgtcccttgccttcctgcctagtctcacatgtccctgttcctcttcccctggccagggcccctgcgcagactgtcagagtcattaagcgggatcccagcatctcagagtccagtcaagttccctcctgcagcctgacccctaggcagctcgagcatgccctgagctctctgaaagttgtcaccctggaatagggtcctgcagggtagaataaaaaggcccctgtggtcacttgtcctgacatccccattttcaagtgatacaactgagtctcgagggacgtgtgttccccagctgatcgtgtcagcctcatgccccaggcctcatctttcatggaccaggccttgttccaggagtgggtgttgggtcctctgcttcctgtgctgtcccctggggaaggtcccgaggatgctgtcaggagatggaagagtcatgtggggtgggaacctggggtgtggttccagaaatgtttttggcaacaggagagacaggattgggccaacaaggactcagacgagttttattgactcatttctctggttgatacggagccatgtcatgtgccacgacctggggtgggcacagggaggctgcagtttcctgcgtgaacctgccttgggcctcatctgctcctagcccagcagagagagttgacccctcctgaactggccactccccagtgctcccgtgcagggagaggaagcacccagtttgagagtgtacccagccagactgtctttatctccatggattttcatcagggcaaagatcacagcagccagctcctggtggctgatgaggatcagagcatttgttcccccatgaaaggggaaatccctatggcatcattccagtggtggtcagtagatccaggacgccctgcaggactcagcctgtacagggagatgaagtgccccaggttgggagcacacctagctagagttatttgtgttaatctattcaggatgctctaagaaaacgccatagactgggttgctgacaaacatcagaattctatttctcatggttctgaaggcttagaaggctaagatcaaggtgtcagcaggttctgtgtctggtgaggacccacctcttgtttcatagataaaaccttcttgctgtgtcctcacatggtggaaaagggcaagacagctcacagagacctcttttataaggacgccagttccattcaagagggcactgcctgcattcccttcccccctcaaaggcccggccctgctattatcgtcaccttggtgactagatttcagcctatgaattctggaggcggacacaaaaattcagattaaactactctgcttctgtttctctaaaatctacatccttctcatatacaaaatacatgcatttctccccagtagccccaaatatcaactcattttagcatcaactttaaaattgtagtccaaagtgtgatttaaatgttatctgagtcaaacatgggtaagactcaaggtacaatttatcctgagtccaactgttcttgctgcgaacctatgaaatcaaacatgttatgtgcttccaaaatacagtggttggagaggcataggataaacattcccattccagaaaggagaaacaggaaagaagaaaggagtaacaagtttcaagcaactccaaaattgaatgtgacaaacagtattaaaccttaagcctcaagaat

SEQ ID NO: 7369 - protein, 153 aa, Homo sapiens
MHVCTPHREVVLGGVSRGLSPPVQGLTLQLCLLQTVFPLLMTLFELARNPNVQQALRQESLAAAASISEHPQKATTELPLLRAALKETLRLYPVGLFLERVASSDLVLQNYHIPAGVLKHLQVETLTQEDIKMVYSFILRPSMFPLLTFRAIN

SEQ ID NO: 7370 - DNA, 2560 bp, Homo sapiens
gccgccgcagccagcatcagtgaacatccccagaaggcaaccaccgagctgcccttgctgcgtgcggccctcaaggagaccttgcggaagggtgcagagagcacaggaagccccatccagctgaggaccctttctatggatgcccccacctccaggctctaccctgtgggtctgtttctggagcgagtggcgagctcagacttggtgcttcagaactaccacatcccagctgggacattggtgcgcgtgttcctctactctctgggtcgcaaccccgccttgttcccgaggcctgagcgctataacccccagcgctggctagacatcaggggctccggcaggaacttctaccacgtgccctttggctttggcatgcgccagtgccttgggcggcgcctggcagaggcagagatgctgctgctgctgcaccatgtgctgaaacacctccaggtggagacactaacccaagaggacataaagatggtctacagcttcatattgaggcccagcatgttccccctcctcaccttcagagccatcaactaatcacgtctctgcacccagggtcccagcctggccaccagcctccctttctgcctgaccccaggccacccctcttctctcccacatgcacagcttcctgagtcacccctctgtctaaccagccccagcacaaatggaactcccgagggcctctaggaccagggtttgccaggctaagcagcaatgccagggcacagctggggaagatcttgctgaccttgtccccagccccacctggccctttctccagcaagcactgtcctctgggcagtttgcccccatccctcccagtgctggctccaggctcctcgtgtggccatacaagggtgctgtggttttgtcccttgccttcctgcctagtctcacatgtccctgttcctcttcccctggccagggcccctgcgcagactgtcagagtcattaagcgggatcccagcatctcagagtccagtcaagttccctcctgcagcctgacccctaggcagctcgagcatgccctgagctctctgaaagttgtcaccctggaatagggtcctgcagggtagaataaaaaggcccctgtggtcacttgtcctgacatccccattttcaagtgatacaactgagtctcgagggacgtgtgttccccagctgatcgtgtcagcctcatgccccaggcctcatctttcatggaccaggccttgttccaggagtgggtgttgggtcctctgcttcctgtgctgtcccctggggaaggtcccgaggatgctgtcaggagatggaagagtcatgtggggtgggaacctggggtgtggttccagaaatgtttttggcaacaggagagacaggattgggccaacaaggactcagacgagttttattgactcatttctctggttgatacggagccatgtcatgtgccacgacctggggtgggcacagggaggctgcagtttcctgcgtgaacctgccttgggcctcatctgctcctagcccagcagagagagttgacccctcctgaactggccactccccagtgctcccgtgcagggagaggaagcacccagtttgagagtgtacccagccagactgtctttatctccatggattttcatcagggcaaagatcacagcagccagctcctggtggctgatgaggatcagagcatttgttcccccatgaaaggggaaatccctatggcatcattccagtggtggtcagtagatccaggacgccctgcaggactcagcctgtacagggagatgaagtgccccaggttgggagcacacctagctagagttatttgtgttaatctattcaggatgctctaagaaaacgccatagactgggttgctgacaaacatcagaattctatttctcatggttctgaaggcttagaaggctaagatcaaggtgtcagcaggttctgtgtctggtgaggacccacctcttgtttcatagataaaaccttcttgctgtgtcctcacatggtggaaaagggcaagacagctcacagagacctcttttataaggacgccagttccattcaagagggcactgcctgcattcccttcccccctcaaaggcccggccctgctattatcgtcaccttggtgactagatttcagcctatgaattctggaggcggacacaaaaattcagattaaactactctgcttctgtttctctaaaatctacatccttctcatatacaaaatacatgcatttctccccagtagccccaaatatcaactcattttagcatcaactttaaaattgtagtccaaagtgtgatttaaatgttatctgagtcaaacatgggtaagactcaaggtacaatttatcctgagtccaactgttcttgctgcgaacctatgaaatcaaacatgttatgtgcttccaaaatacagtggttggagaggcataggataaacattcccattccagaaaggagaaacaggaaagaagaaaggagtaacaagtttcaagcaactccaaaattgaatgtgacaaacagtattaaaccttaagcctcaag

SEQ ID NO: 7371 - protein, 136 aa, Homo sapiens
MDAPTSRLYPVGLFLERVASSDLVLQNYHIPAGTLVRVFLYSLGRNPALFPRPERYNPQRWLDIRGSGRNFYHVPFGFGMRQCLGRRLAEAEMLLLLHHVLKHLQVETLTQEDIKMVYSFILRPSMFPLLTFRAIN

SEQ ID NO: 7372 - DNA, 3559 bp, Homo sapiens
attgcagctgaacagggtggagggagcattggaatggcactcagggcaaaggcagaggtgtgcatggcagtgccctggctgtccctgcaaagggcacaggcactgggcacgagagccgcccgggtccccaggacagtgctgccctttgaagccatgccccggcgtccaggcaacaggtggctgaggctgctgcagatctggagggagcagggttatgaggacctgcacctggaagtacaccagaccttccaggaactagggcccattttcaggtacgacttgggaggagcaggcatggtgtgtgtgatgctgccggaggacgtggagaagctgcaacaggtggacagcctgcatccccacaggatgagcctggagccctgggtggcctacagacaacatcgtgggcacaaatgtggcgtgttcttgctgaatgggcctgaatggcgcttcaaccgattgcggctgaatccagaagtgctgtcgcccaacgctgtgcagaggttcctcccgatggtggatgcagtggccagggacttctcccaggccctgaagaagaaggtgctgcagaacgcccgggggagcctgaccctggacgtccagcccagcatcttccactacaccatagaagccagcaacttggctctttttggagagcggctgggcctggttggccacagccccagttctgccagcctgaacttcctccatgccctggaggtcatgttcaaatccaccgtccagctcatgttcatgcccaggagcctgtctcgctggaccagccccaaggtgtggaaggagcactttgaggcctgggactgcatcttccagtacggcgacaactgtatccagaaaatctatcaggaactggccttcagccgccctcaacagtacaccagcatcgtggcggagctcctgttgaatgcggaactgtcgccagatgccatcaaggccaactctatggaactcactgcagggagcgtggacacgacggtgtttcccttgctgatgacgctctttgagctggctcggaaccccaacgtgcagcaggccctgcgccaggagagcctggccgccgcagccagcatcagtgaacatccccagaaggcaaccaccgagctgcccttgctgcgtgcggccctcaaggagaccttgcggctctaccctgtgggtctgtttctggagcgagtggcgagctcagacttggtgcttcagaactaccacatcccagctgggacattggtgcgcgtgttcctctactctctgggtcgcaaccccgccttgttcccgaggcctgagcgctataacccccagcgctggctagacatcaggggctccggcaggaacttctaccacgtgccctttggctttggcatgcgccagtgccttgggcggcgcctggcagaggcagagatgctgctgctgctgcaccatgtgctgaaacacctccaggtggagacactaacccaagaggacataaagatggtctacagcttcatattgaggcccagcatgttccccctcctcaccttcagagccatcaactaatcacgtctctgcacccagggtcccagcctggccaccagcctccctttctgcctgaccccaggccacccctcttctctcccacatgcacagcttcctgagtcacccctctgtctaaccagccccagcacaaatggaactcccgagggcctctaggaccagggtttgccaggctaagcagcaatgccagggcacagctggggaagatcttgctgaccttgtccccagccccacctggccctttctccagcaagcactgtcctctgggcagtttgcccccatccctcccagtgctggctccaggctcctcgtgtggccatacaagggtgctgtggttttgtcccttgccttcctgcctagtctcacatgtccctgttcctcttcccctggccagggcccctgcgcagactgtcagagtcattaagcgggatcccagcatctcagagtccagtcaagttccctcctgcagcctgacccctaggcagctcgagcatgccctgagctctctgaaagttgtcaccctggaatagggtcctgcagggtagaataaaaaggcccctgtggtcacttgtcctgacatccccattttcaagtgatacaactgagtctcgagggacgtgtgttccccagctgatcgtgtcagcctcatgccccaggcctcatctttcatggaccaggccttgttccaggagtgggtgttgggtcctctgcttcctgtgctgtcccctggggaaggtcccgaggatgctgtcaggagatggaagagtcatgtggggtgggaacctggggtgtggttccagaaatgtttttggcaacaggagagacaggattgggccaacaaggactcagacgagttttattgactcatttctctggttgatacggagccatgtcatgtgccacgacctggggtgggcacagggaggctgcagtttcctgcgtgaacctgccttgggcctcatctgctcctagcccagcagagagagttgacccctcctgaactggccactccccagtgctcccgtgcagggagaggaagcacccagtttgagagtgtacccagccagactgtctttatctccatggattttcatcagggcaaagatcacagcagccagctcctggtggctgatgaggatcagagcatttgttcccccatgaaaggggaaatccctatggcatcattccagtggtggtcagtagatccaggacgccctgcaggactcagcctgtacagggagatgaagtgccccaggttgggagcacacctagctagagttatttgtgttaatctattcaggatgctctaagaaaacgccatagactgggttgctgacaaacatcagaattctatttctcatggttctgaaggcttagaaggctaagatcaaggtgtcagcaggttctgtgtctggtgaggacccacctcttgtttcatagataaaaccttcttgctgtgtcctcacatggtggaaaagggcaagacagctcacagagacctcttttataaggacgccagttccattcaagagggcactgcctgcattcccttcccccctcaaaggcccggccctgctattatcgtcaccttggtgactagatttcagcctatgaattctggaggcggacacaaaaattcagattaaactactctgcttctgtttctctaaaatctacatccttctcatatacaaaatacatgcatttctccccagtagccccaaatatcaactcattttagcatcaactttaaaattgtagtccaaagtgtgatttaaatgttatctgagtcaaacatgggtaagactcaaggtacaatttatcctgagtccaactgttcttgctgcgaacctatgaaatcaaacatgttatgtgcttccaaaatacagtggttggagaggcataggataaacattcccattccagaaaggagaaacaggaaagaagaaaggagtaacaagtttcaagcaactccaaaattgaatgtgacaaacagtattaaaccttaagcctcaag

SEQ ID NO: 7373 - protein, 503 aa, Homo sapiens; identical to SEQ ID NO: 1064

SEQ ID NO: 7374 - DNA, 3361 bp, Homo sapiens
attgcagctgaacagggtggagggagcattggaatggcactcagggcaaaggcagaggtgtgcatggcagtgccctggctgtccctgcaaagggcacaggcactgggcacgagagccgcccgggtccccaggacagtgctgccctttgaagccatgccccggcgtccaggcaacaggtggctgaggctgctgcagatctggagggagcagggttatgaggacctgcacctggaagtacaccagaccttccaggaactagggcccattttcaggtacgacttgggaggagcaggcatggtgtgtgtgatgctgccggaggacgtggagaagctgcaacaggtggacagcctgcatccccacaggatgagcctggagccctgggtggcctacagacaacatcgtgggcacaaatgtggcgtgttcttgctgaatgggcctgaatggcgcttcaaccgattgcggctgaatccagaagtgctgtcgcccaacgctgtgcagaggttcctcccgatggtggatgcagtggccagggacttctcccaggccctgaagaagaaggtgctgcagaacgcccgggggagcctgaccctggacgtccagcccagcatcttccactacaccatagaagccagcaacttggctctttttggagagcggctgggcctggttggccacagccccagttctgccagcctgaacttcctccatgccctggaggtcatgttcaaatccaccgtccagctcatgttcatgcccaggagcctgtctcgctggaccagccccaaggtgtggaaggagcactttgaggcctgggactgcatcttccagtacggcgacaactgtatccagaaaatctatcaggaactggccttcagccgccctcaacagtacaccagcatcgtggcggagctcctgttgaatgcggaactgtcgccagatgccatcaaggccaactctatggaactcactgcagggagcgtggacacgacggtgtttcccttgctgatgacgctctttgagctggctcggaaccccaacgtgcagcaggccctgcgccaggagagcctggccgccgcagccagcatcagtgaacatccccagaaggcaaccaccgagctgcccttgctgcgtgcggccctcaaggagaccttgcggctctaccctgtgggtctgtttctggagcgagtggcgagctcagacttggtgcttcagaactaccacatcccagctggggtgctgaaacacctccaggtggagacactaacccaagaggacataaagatggtctacagcttcatattgaggcccagcatgttccccctcctcaccttcagagccatcaactaatcacgtctctgcacccagggtcccagcctggccaccagcctccctttctgcctgaccccaggccacccctcttctctcccacatgcacagcttcctgagtcacccctctgtctaaccagccccagcacaaatggaactcccgagggcctctaggaccagggtttgccaggctaagcagcaatgccagggcacagctggggaagatcttgctgaccttgtccccagccccacctggccctttctccagcaagcactgtcctctgggcagtttgcccccatccctcccagtgctggctccaggctcctcgtgtggccatacaagggtgctgtggttttgtcccttgccttcctgcctagtctcacatgtccctgttcctcttcccctggccagggcccctgcgcagactgtcagagtcattaagcgggatcccagcatctcagagtccagtcaagttccctcctgcagcctgacccctaggcagctcgagcatgccctgagctctctgaaagttgtcaccctggaatagggtcctgcagggtagaataaaaaggcccctgtggtcacttgtcctgacatccccattttcaagtgatacaactgagtctcgagggacgtgtgttccccagctgatcgtgtcagcctcatgccccaggcctcatctttcatggaccaggccttgttccaggagtgggtgttgggtcctctgcttcctgtgctgtcccctggggaaggtcccgaggatgctgtcaggagatggaagagtcatgtggggtgggaacctggggtgtggttccagaaatgtttttggcaacaggagagacaggattgggccaacaaggactcagacgagttttattgactcatttctctggttgatacggagccatgtcatgtgccacgacctggggtgggcacagggaggctgcagtttcctgcgtgaacctgccttgggcctcatctgctcctagcccagcagagagagttgacccctcctgaactggccactccccagtgctcccgtgcagggagaggaagcacccagtttgagagtgtacccagccagactgtctttatctccatggattttcatcagggcaaagatcacagcagccagctcctggtggctgatgaggatcagagcatttgttcccccatgaaaggggaaatccctatggcatcattccagtggtggtcagtagatccaggacgccctgcaggactcagcctgtacagggagatgaagtgccccaggttgggagcacacctagctagagttatttgtgttaatctattcaggatgctctaagaaaacgccatagactgggttgctgacaaacatcagaattctatttctcatggttctgaaggcttagaaggctaagatcaaggtgtcagcaggttctgtgtctggtgaggacccacctcttgtttcatagataaaaccttcttgctgtgtcctcacatggtggaaaagggcaagacagctcacagagacctcttttataaggacgccagttccattcaagagggcactgcctgcattcccttcccccctcaaaggcccggccctgctattatcgtcaccttggtgactagatttcagcctatgaattctggaggcggacacaaaaattcagattaaactactctgcttctgtttctctaaaatctacatccttctcatatacaaaatacatgcatttctccccagtagccccaaatatcaactcattttagcatcaactttaaaattgtagtccaaagtgtgatttaaatgttatctgagtcaaacatgggtaagactcaaggtacaatttatcctgagtccaactgttcttgctgcgaacctatgaaatcaaacatgttatgtgcttccaaaatacagtggttggagaggcataggataaacattcccattccagaaaggagaaacaggaaagaagaaaggagtaacaagtttcaagcaactccaaaattgaatgtgacaaacagtattaaaccttaagcctcaag

SEQ ID NO: 7375 - protein, 437 aa, Homo sapiens; identical to SEQ ID NO: 1066

SEQ ID NO: 7376 - DNA, 407 bp, Homo sapiens
gacggtgtttcccttgctgatgacgctctttgagctggctcggaaccccaacgtgcagcaggccctgcgccaggagagcctggccgccgcagccagcatcagtgaacatccccagaaggcaaccaccgagctgcccttgctgcgtgcggccctcaaggagaccttgcggctctaccctgtgggtctgtttctggagcgagtggcgagctcagacttggtgcttcagaactaccacatcccagctatgaaatcaaacatgttatgtgcttccaaaatacagtggttggagaggcataggataaacattcccattccagaaaggagaaacaggaaagaagaaaggagtaacaagtttcaagcaactccaaaattgaatgtgacaaacagtattaaaccttaagcctcaa

SEQ ID NO: 7377 - protein, 126 aa, Homo sapiens
MTLFELARNPNVQQALRQESLAAAASISEHPQKATTELPLLRAALKETLRLYPVGLFLERVASSDLVLQNYHIPAMKSNMLCASKIQWLERHRINIPIPERRNRKEERSNKFQATPKLNVTNSIKP

SEQ ID NO: 7378 - DNA, 715 bp, Homo sapiens
cctcttctctcccacatgcacagcttcctgagtcacccctctgtctaaccagccccagcacaaatggaactcccgagggcctctaggaccagggtttgccaggctaagcagcaatgccagggcacagctggggaagatcttgctgaccttgtccccagccccacctggccctttctccagcaagcactgtcctctgggcagtttgcccccatccctcccagtgctggctccaggctcctcgtgtggccatacaagggtgctgtggttttgtcccttgccttcctgccctgctattatcgtcaccttggtgactagatttcagcctatgaattctggaggcggacacaaaaattcagattaaactactctgcttctgtttctctaaaatctacatccttctcatatacaaaatacatgcatttctccccagtagccccaaatatcaactcattttagcatcaactttaaaattgtagtccaaagtgtgatttaaatgttatctgagtcaaacatgggtaagactcaaggtacaatttatcctgagtccaactgttcttgctgcgaacctatgaaatcaaacatgttatgtgcttccaaaatacagtggttggagaggcataggataaacattcccattccagaaaggagaaacaggaaagaagaaaggagtaacaagtttcaagcaactccaaaattgaatgtgacaaacagtatt

SEQ ID NO: 7379 - protein, 83 aa, Homo sapiens
MELPRASRTRVCQAKQQCQGTAGEDLADLVPSPTWPFLQQALSSGQFAPIPPSAGSRLLVWPYKGAVVLSLAFLPCYYRHLGD

SEQ ID NO: 7380 - DNA, 1883 bp, Homo sapiens
ctgtatccagaaaatctatcaggaactggccttcagccgccctcaacagtacaccacctccctttctgcctgaccccaggccacccctcttctctcccacatgcacagcttcctgagtcacccctctgtctaaccagccccagcacaaatggaactcccgagggcctctaggaccagggtttgccaggctaagcagcaatgccagggcacagctggggaagatcttgctgaccttgtccccagccccacctggccctttctccagcaagcactgtcctctgggcagtttgcccccatccctcccagtgctggctccaggctcctcgtgtggccatacaagggtgctgtggttttgtcccttgccttcctgcctagtctcacatgtccctgttcctcttcccctggccagggcccctgcgcagactgtcagagtcattaagcgggatcccagcatctcagagtccagtcaagttccctcctgcagcctgacccctaggcagctcgagcatgccctgagctctctgaaagttgtcaccctggaatagggtcctgcagggtagaataaaaaggcccctgtggtcacttgtcctgacatccccattttcaagtgatacaactgagtctcgagggacgtgtgttccccagctgatcgtgtcagcctcatgccccaggcctcatctttcatggaccaggccttgttccaggagtgggtgttgggtcctctgcttcctgtgctgtcccctggggaaggtcccgaggatgctgtcaggagatggaagagtcatgtggggtgggaacctggggtgtggttccagaaatgtttttggcaacaggagagacaggattgggccaacaaggactcagacgagttttattgactcatttctctggttgatacggagccatgtcatgtgccacgacctggggtgggcacagggaggctgcagtttcctgcgtgaacctgccttgggcctcatctgctcctagcccagcagagagagttgacccctcctgaactggccactccccagtgctcccgtgcagggagaggaagcacccagtttgagagtgtacccagccagactgtctttatctccatggattttcatcagggcaaagatcacagcagccagctcctggtggctgatgaggatcagagcatttgttcccccatgaaaggggaaatccctatggcatcattccagtggtggtcagtagatccaggacgccctgcaggactcagcctgtacagggagatgaagtgccccaggttgggagcacacctagctagagttatttgtgttaatctattcaggatgctctaagaaaacgccatagactgggttgctgacaaacatcagaattctatttctcatggttctgaaggcttagaaggctaagatcaaggtgtcagcaggttctgtgtctggtgaggacccacctcttgtttcatagataaaaccttcttgctgtgtcctcacatggtggaaaagggcaagacagctcacagagacctcttttataaggacgccagttccattcaagagggcactgcctgcattcccttcccccctcaaaggcccggccctgctattatcgtcaccttggtgactagatttcagcctatgaattctggaggcggacacaaaaattcagattaaactactctgcttctgtttctctaaaatctacatccttctcatatacaaaatacatgcatttctccccagtagccccaaatatcaactcattttagcatcaactttaaaattgtagtccaaagtgtgatttaaatgttatctgagtcaaacatgggtaagactcaaggtacaatttatcctgagtccaactgttcttgctgcgaacctatgaaatcaaacatg

SEQ ID NO: 7381 - protein, 96 aa, Homo sapiens
MELPRASRTRVCQAKQQCQGTAGEDLADLVPSPTWPFLQQALSSGQFAPIPPSAGSRLLVWPYKGAVVLSLAFLPSLTCPCSSSPGQGPCADCQSH

SEQ ID NO: 7382 - DNA, 3597 bp, Homo sapiens
cattggaatggcactcagggcaaaggcagaggtgtgcatggcagtgccctggctgtccctgcaaagggcacaggcactgggcacgagagccgcccgggtccccaggacagtgctgccctttgaagccatgccccggcgtccaggcaacaggtggctgaggctgctgcagatctggagggagcagggttatgaggacctgcacctggaagtacaccagaccttccaggaactagggcccattttcaggtcccggcactctgcatcctttggaagatggggaaggagtgcagcacgtgctggtctgtggcgctgccagggcaggggatggtgcagagcaaatcccagctcgctgcagagagggcaggactcagaggcactgaagtacgacttgggaggagcaggcatggtgtgtgtgatgctgccggaggacgtggagaagctgcaacaggtggacagcctgcatccccacaggatgagcctggagccctgggtggcctacagacaacatcgtgggcacaaatgtggcgtgttcttgctaaatgtggctgacaggggaaattcctccccaccattccctgggggcatccatggagcccccacgcactctggctgtaggaatgggcctgaatggcgcttcaaccgattgcggctgaatccagaagtgctgtcgcccaacgctgtgcagaggttcctcccgatggtggatgcagtggccagggacttctcccaggccctgaagaagaaggtgctgcagaacgcccgggggagcctgaccctggacgtccagcccagcatcttccactacaccatagaagccagcaacttggctctttttggagagcggctgggcctggttggccacagccccagttctgccagcctgaacttcctccatgccctggaggtcatgttcaaatccaccgtccagctcatgttcatgcccaggagcctgtctcgctggaccagccccaaggtgtggaaggagcactttgaggcctgggactgcatcttccagtacggcgacaactgtatccagaaaatctatcaggaactggccttcagccgccctcaacagtacaccagcatcgtggcggagctcctgttgaatgcggaactgtcgccagatgccatcaaggccaactctatggaactcactgcagggagcgtggacacgacggtgtttcccttgctgatgacgctctttgagctggctcggaaccccaacgtgcagcaggccctgcgccaggagagcctggccgccgcagccagcatcagtgaacatccccagaaggcaaccaccgagctgcccttgctgcgtgcggccctcaaggagaccttgcggctctaccctgtgggtctgtttctggagcgagtggcgagctcagacttggtgcttcagaactaccacatcccagctgggacattggtgcgcgtgttcctctactctctgggtcgcaaccccgccttgttcccgaggcctgagcgctataacccccagcgctggctagacatcaggggctccggcaggaacttctaccacgtgccctttggctttggcatgcgccagtgccttgggcggcgcctggcagaggcagagatgctgctgctgctgcaccatgtgctgaaacacctccaggtggagacactaacccaagaggacataaagatggtctacagcttcatattgaggcccagcatgttccccctcctcaccttcagagccatcaactaatcacgtctctgcacccagggtcccagcctggccaccagcctccctttctgcctgaccccaggccacccctcttctctcccacatgcacagcttcctgagtcacccctctgtctaaccagccccagcacaaatggaactcccgagggcctctaggaccagggtttgccaggctaagcagcaatgccagggcacagctggggaagatcttgctgaccttgtccccagccccacctggccctttctccagcaagcactgtcctctgggcagtttgcccccatccctcccagtgctggctccaggctcctcgtgtggccatacaagggtgctgtggttttgtcccttgccttcctgcctagtctcacatgtccctgttcctcttcccctggccagggcccctgcgcagactgtcagagtcattaagcgggatcccagcatctcagagtccagtcaagttccctcctgcagcctgacccctaggcagctcgagcatgccctgagctctctgaaagttgtcaccctggaatagggtcctgcagggtagaataaaaaggcccctgtggtcacttgtcctgacatccccattttcaagtgatacaactgagtctcgagggacgtgtgttccccagctgatcgtgtcagcctcatgccccaggcctcatctttcatggaccaggccttgttccaggagtgggtgttgggtcctctgcttcctgtgctgtcccctggggaaggtcccgaggatgctgtcaggagatggaagagtcatgtggggtgggaacctggggtgtggttccagaaatgtttttggcaacaggagagacaggattgggccaacaaggactcagacgagttttattgactcatttctctggttgatacggagccatgtcatgtgccacgacctggggtgggcacagggaggctgcagtttcctgcgtgaacctgccttgggcctcatctgctcctagcccagcagagagagttgacccctcctgaactggccactccccagtgctcccgtgcagggagaggaagcacccagtttgagagtgtacccagccagactgtctttatctccatggattttcatcagggcaaagatcacagcagccagctcctggtggctgatgaggatcagagcatttgttcccccatgaaaggggaaatccctatggcatcattccagtggtggtcagtagatccaggacgccctgcaggactcagcctgtacagggagatgaagtgccccaggttgggagcacacctagctagagttatttgtgttaatctattcaggatgctctaagaaaacgccatagactgggttgctgacaaacatcagaattctatttctcatggttctgaaggcttagaaggctaagatcaaggtgtcagcaggttctgtgtctggtgaggacccacctcttgtttcatagataaaaccttcttgctgtgtcctcacatggtggaaaagggcaagacagctcacagagacctcttttataaggacgccagttccattcaagagggcactgcctgcattcccttcccccctcaaaggcccggccctgctattatcgtcaccttggtgactagatttcagcctatgaattctggaggcggacacaaaaattcagattaaactactctgcttctgtttctctaaaatctacatccttctcatatacaaaatacatgcatttctccccagtagccccaaatatcaactcattttagcatcaactttaaaattgtagtccaaagtgtgatttaaatgttatctgagtcaaacatgggtaagactcaaggtacaatttatcctgagtccaactgttcttgctgcgaacctatgaaatcaaacatg

SEQ ID NO: 7383 - protein, 574 aa, Homo sapiens
MALRAKAEVCMAVPWLSLQRAQALGTRAARVPRTVLPFEAMPRRPGNRWLRLLQIWREQGYEDLHLEVHQTFQELGPIFRSRHSASFGRWGRSAARAGLWRCQGRGWCRANPSSLQRGQDSEALKYDLGGAGMVCVMLPEDVEKLQQVDSLHPHRMSLEPWVAYRQHRGHKCGVFLLNVADRGNSSPPFPGGIHGAPTHSGCRNGPEWRFNRLRLNPEVLSPNAVQRFLPMVDAVARDFSQALKKKVLQNARGSLTLDVQPSIFHYTIEASNLALFGERLGLVGHSPSSASLNFLHALEVMFKSTVQLMFMPRSLSRWTSPKVWKEHFEAWDCIFQYGDNCIQKIYQELAFSRPQQYTSIVAELLLNAELSPDAIKANSMELTAGSVDTTVFPLLMTLFELARNPNVQQALRQESLAAAASISEHPQKATTELPLLRAALKETLRLYPVGLFLERVASSDLVLQNYHIPAGTLVRVFLYSLGRNPALFPRPERYNPQRWLDIRGSGRNFYHVPFGFGMRQCLGRRLAEAEMLLLLHHVLKHLQVETLTQEDIKMVYSFILRPSMFPLLTFRAIN

SEQ ID NO: 7384 - DNA, 2131 bp, Homo sapiens
gagcattggaatggcactcagggcaaaggcagaggtgtgcatggcagtgccctggctgtccctgcaaagggcacaggcactgggcacgagagccgcccgggtccccaggacagtgctgccctttgaagccatgccccggcgtccaggcaacaggtggctgaggctgctgcagatctggagggagcagggttatgaggacctgcacctggaagtacaccagaccttccaggaactagggcccattttcaggtacgacttgggaggagcaggcatggtgtgtgtgatgctgccggaggacgtggagaagctgcaacaggtggacagcctgcatccccacaggatgagcctggagccctgggtggcctacagacaacatcgtgggcacaaatgtggcgtgttcttgtcccgagggcctctaggaccagggtttgccaggctaagcagcaatgccagggcacagctggggaagatcttgctgaccttgtccccagccccacctggccctttctccagcaagcactgtcctctgggcagtttgcccccatccctcccagtgctggctccaggctcctcgtgtggccatacaagggtgctgtggttttgtcccttgccttcctgcctagtctcacatgtccctgttcctcttcccctggccagggcccctgcgcagactgtcagagtcattaagcgggatcccagcatctcagagtccagtcaagttccctcctgcagcctgacccctaggcagctcgagcatgccctgagctctctgaaagttgtcaccctggaatagggtcctgcagggtagaataaaaaggcccctgtggtcacttgtcctgacatccccattttcaagtgatacaactgagtctcgagggacgtgtgttccccagctgatcgtgtcagcctcatgccccaggcctcatctttcatggaccaggccttgttccaggagtgggtgttgggtcctctgcttcctgtgctgtcccctggggaaggtcccgaggatgctgtcaggagatggaagagtcatgtggggtgggaacctggggtgtggttccagaaatgtttttggcaacaggagagacaggattgggccaacaaggactcagacgagttttattgactcatttctctggttgatacggagccatgtcatgtgccacgacctggggtgggcacagggaggctgcagtttcctgcgtgaacctgccttgggcctcatctgctcctagcccagcagagagagttgacccctcctgaactggccactccccagtgctcccgtgcagggagaggaagcacccagtttgagagtgtacccagccagactgtctttatctccatggattttcatcagggcaaagatcacagcagccagctcctggtggctgatgaggatcagagcatttgttcccccatgaaaggggaaatccctatggcatcattccagtggtggtcagtagatccaggacgccctgcaggactcagcctgtacagggagatgaagtgccccaggttgggagcacacctagctagagttatttgtgttaatctattcaggatgctctaagaaaacgccatagactgggttgctgacaaacatcagaattctatttctcatggttctgaaggcttagaaggctaagatcaaggtgtcagcaggttctgtgtctggtgaggacccacctcttgtttcatagataaaaccttcttgctgtgtcctcacatggtggaaaagggcaagacagctcacagagacctcttttataaggacgccagttccattcaagagggcactgcctgcattcccttcccccctcaaaggcccggccctgctattatcgtcaccttggtgactagatttcagcctatgaattctggaggcggacacaaaaattcagattaaactactctgcttctgtttctctaaaatctacatccttctcatatacaaaatacatgcatttctccccagtagccccaaatatcaactcattttagcatcaactttaaaattgtagtccaaagtgtgatttaaatgttatctgagtcaaacatgggtaagactcaaggtacaatttatcctgagtccaactgttcttgctgcgaacctatgaaatcaaacatg

SEQ ID NO: 7385 - protein, 260 aa, Homo sapiens
MALRAKAEVCMAVPWLSLQRAQALGTRAARVPRTVLPFEAMPRRPGNRWLRLLQIWREQGYEDLHLEVHQTFQELGPIFRYDLGGAGMVCVMLPEDVEKLQQVDSLHPHRMSLEPWVAYRQHRGHKCGVFLSRGPLGPGFARLSSNARAQLGKILLTLSPAPPGPFSSKHCPLGSLPPSLPVLAPGSSCGHTRVLWFCPLPSCLVSHVPVPLPLARAPAQTVRVIKRDPSISESSQVPSCSLTPRQLEHALSSLKVVTLE

SEQ ID NO: 7386 - DNA, 905 bp, Homo sapiens
gtggggaatggaggccacagggaggggtcggggattcctcaccttcctgccagggagattggtgcgaggctggggctgggctgggctgatccggagaatttgggatgagagcagggagacttgggtgtcggggcagtctgggcaggaggaggacactgaaggatgtctcccagcaccaaagtctgagggctgcctcccgctccccggataggcgacaactgtatccagaaaatctatcaggaactggccttcagccgccctcaacagtacaccagcatcgtggcggagctcctgttgaatgcggaactgtcgccagatgccatcaaggccaactctatggaactcactgcagggagcgtggacacggtcaggccggcaaccagccccacccagagagggtgatgccaagcctgcctcccaggcactgcctgccaatgtcacacggcgcccacgtgtcccatccccaggctatgggccccacatttcttacttgggattgtgatgtgataaacacgtttgcaggttgccatggttggaatggggggttcctttctgtggaggactcagggaaaggggtttggatgggcattaggatttgaagtcttgggctctgtcgttctcagggtatgcatgtctgcacccctcacagggaggttgtcctgggaggggtgtcccgggggctgagtcctcctgtgcaaggtctgaccctgcagctgtgtctcctgcagacggtgtttcccttgctgatgacgctctttgagctggctcggaaccccaacgtgcagcaggccctgcgccaggagagcctggccgccgcagccagcatcagtgaacatccccagaaggcaaccaccgagctgcccttgctgcgtgcggccctcaaggagaccttgcggctctaccct

SEQ ID NO: 7387 - protein, 92 aa, Homo sapiens
MHVCTPHREVVLGGVSRGLSPPVQGLTLQLCLLQTVFPLLMTLFELARNPNVQQALRQESLAAAASISEHPQKATTELPLLRAALKETLRLY

SEQ ID NO: 7388 - DNA, 642 bp, Homo sapiens
gggagcattggaatggcactcagggcaaaggcagaggtgtgcatggcagtgccctggctgtccctgcaaagggcacaggcactgggcacgagagccgcccgggtccccaggacagtgctgccctttgaagccatgccccggcgtccaggcaacaggtggctgaggctgctgcagatctggagggagcagggttatgaggacctgcacctggaagtacaccagaccttccaggaactagggcccattttcaggtcccggcactctgcatcctttggaagatggggaaggagtgcagcacgtgctggtctgtggcgctgccagggcaggggatggtgcagagcaaatcccagctcgctgcagagagggcaggactcagaggcactgaagtacgacttgggaggagcaggcatggtgtgtgtgatgctgccggaggacgtggagaagctgcaacaggtggacagcctgcatccccacaggatgagcctggagccctgggtggcctacagacaacatcgtgggcacaaatgtggcgtgttcttgctgccctgcgccaggagagcctggccgccgcagccagcatcagtgaacatccccagaaggcaaccaccgagctgcccttgctgcgtgcggccctcaaggaga

SEQ ID NO: 7389 - protein, 209 aa, Homo sapiens
MALRAKAEVCMAVPWLSLQRAQALGTRAARVPRTVLPFEAMPRRPGNRWLRLLQIWREQGYEDLHLEVHQTFQELGPIFRSRHSASFGRWGRSAARAGLWRCQGRGWCRANPSSLQRGQDSEALKYDLGGAGMVCVMLPEDVEKLQQVDSLHPHRMSLEPWVAYRQHRGHKCGVFLLPCARRAWPPQPASVNIPRRQPPSCPCCVRPSR

SEQ ID NO: 7390 - DNA, 557 bp, Homo sapiens
gtgtgacattggcaggcagtgcctgggaggcaggcttggcatcaccctctctgggtggggctggttgccggcctgaccgtgtccacgctccctgcagtgagttccatagagttggccttgatggcatctggcgacagttccgcattcaacaggagctccgccacgatgctggtgtactgttgagggcggctgaaggccagttcctgatagattttctggatacagttgtcgcctatccggggagcgggaggcagccctcagactttggtgctgggagacatccttcagtgtcctcctcctgcccagactgccccgacacccaagtctccctgctctcatcccaaattctccggatcagcccagcccagccccagcctcgcaccaatctccctggcaggaagtgcaatcaaactagaactcaggattaagaaactcactcaaaaccgctcaattacatggaaactgagcaacctgctcctgaatgactactgggtacgtaacaaaatgaaggcagaaataaagatgttcttgaaaccaacgagaacaaagacacagca

SEQ ID NO: 7391 - protein, 141 aa, Homo sapiens [sequence omitted]

SEQ ID NO: 7392 - DNA, 2930 bp, Homo sapiens
ggaatggcactcagggcaaaggcagaggtgtgcgtggcagcgccctggctgtccctgcaaagggcacgggcactgggcactagagccgctcgggcccctaggacggtgctgccgtttgaagccatgccccagcatccaggcaacaggtggctgaggctgctgcagatctggagggagcagggttatgagcacctgcacctggagatgcaccagaccttccaggagctggggcccattttcaggtacaacttgggaggaccacgcatggtgtgtgtgatgctgccggaggatgtggagaagctgcaacaggtggacagcctgcatccctgcaggatgatcctggagccctgggtggcctacagacaacatcgtgggcacaaatgtggcgtgttcttgttgaatgggcctgaatggcgcttcaaccgattgcggctgaacccagatgtgctgtcgcccaaggccgtgcagaggttcctcccgatggtggatgcagtggccagggacttctcccaggccctgaagaagaaggtgctgcagaacgcccgggggagcctgaccctggacgtccagcccagcatcttccactacaccatagaagccagcaacttagctctttttggagagcggctgggcctggttggccacagccccagttctgccagcctgaacttcctccatgccctggaggtcatgttcaaatccaccgtccagctcatgttcatgcccaggagcctgtctcgctggatcagccccaaggtgtggaaggagcactttgaggcctgggactgcatcttccagtacggtgacaactgtatccagaaaatctaccaggaactggccttcaaccgccctcaacactacacaggcatcgtggcggagctcctgttgaaggcggaactgtcactagaagccatcaaggccaactctatggaactcactgcagggagcgtggacacgacagcgtttcccttgctgatgacgctctttgagctggctcggaaccccgacgtgcagcagatcctgcgccaggagagcctggccgccgcagccagcatcagtgaacatccccagaaggcaaccaccgagctgcccttgctgcgggcggccctcaaggagaccttgcggctctaccctgtgggtctgtttttggagcgagtggtgagctcagacttggtgcttcagaactaccacatcccagctgggacattggtacaggttttcctctactcgctgggtcgcaatgccgccttgttcccgaggcctgagcggtataatccccagcgctggctagacatcaggggctccggcaggaacttccaccacgtgccctttggctttggcatgcgccagtgcctcgggcggcgcctggcagaggcagagatgctgctgctgctgcaccacgtgctgaagcacttcctggtggagacactaactcaagaggacataaagatggtctacagcttcatattgaggcctggcacgtcccccctcctcactttcagagcgattaactagtcttgcatctgcacccagggtcccagcctggccaccagcttccctctgcctgaccccaggccacctgtcttctctcccacgtgcacagcttcctgagtcacccctctgtccagccagctcctgcacaaatggaactccccagggcctccaggactggggcttgccaggcttgtcaaatagcaaggccagggcacagctggagacgatcttgctggcagggcctggccttgtccccagctccacctggccccttctccagcaagcagtgccctctggacagcttgactctactcccagcgctggctccaggctcctcatgaggccatgcaagggtgctgtgattttgtcccttgccttcctgcctagtctcacatgtccctgtccctctcgccctggccagggcctctgtgcagacagtgtcagagtcattaagcgggatcccagcatctcagagtccagtcaagttccctcctgcagcctgaccccaggcagctcgagcatgccctgagctctctgaaagttgtcaccctggaatacgatcctgcagggtagactaaaaaggcccctgtggtcacttatcctgacacattttcaagtgatacaactgagtctcgaggggcgtgtgttccccagctgatcatgtcagcctcatgccccaggcctcgtctttcatggaccaggtcttgttcaagcagcgagtgttgggtcctctgcttcctgagctgtcccctggagaaggtcccgaggatgctgtcaggagatggaagagtcatgtggggtgggaacctggggtgtggttccagaaatgtttttggcaacaggagagacaggattgggccaacaaggactcagatgagttttattgactcattcctctggttgatacggagccatgtcatgtgccacgacctggggtgggcacagggaggctgcagttccctacgtgaacctgccttgggcctcatctgctcctagcccagcagagagagttgacccctcctgaactggccactccccagtgctcctgtgcagggataggaagtgccccagggtgagaacgtgcccagccacatcatctttatctcctgggattttcattagggcaaagatctcagcagccagctcctggtagctgatgaggatcagagcgtttgttcccccatgaaaggggaaatacttaggtaatcattccaggtgtgttcagtagttccaggactcagggactcaggccagtcaccctgtgaccgcaggttgctttcccaccctgggcaatgcagtgcagcatgggaaaggaataagggggcaacaaggtgcacagacctcagagatggcttccttgtttatggggctctcacagatacccatccaactcctctagtcagcactagatcatgggatcctaaaataaaccttgg

SEQ ID NO: 7393 - protein, 503 aa, Homo sapiens; identical to SEQ ID NO: 1068

SEQ ID NO: 7394 - DNA, 1296 bp, Homo sapiens
ggctccttgggatagatggggaagctgaggcccagaagggggctgagaccacctcccagtttccccagtgaggtggcgcctgagccacggccaggcccggcctccttccacccggccctgctgtgcgcgcggcgggtgctgacctggcgaggccggacaggggaccaggtcggggtgaccgtcactgacacctggacagtcctcgttgtgttcggggtgggaagcccacggggaagagtgtatcacagccattgggaactttcttcacccatcaaagcctcagggctgaagcatcctgaacaagaactcaggagagtgaaagaaacagttacctgtcggctgcagctggtaccagctccccaccccgtacagagaccgaagcgtcctctctctccccatcacccagcaccagactctgccccgcgacctcagcctgcacctgcttcctggctccatccagccttccagcctcactagatcatcatgggccactggccaacacacagggcagtgccgagcccaggccgtggtcacacatggctgggttagtagctgaaaacattgtttttcactggcctcacagtaatggcacctgcccccattttctgtgattgaatttttggatcctgctaccaggttatgatagattttatggtatgtctcaagatattgagataaaggtaataaaacagctataaagtcctggctcaagaagtgttacaaacccaagcagggtaaatacaagaaaactgcacccagacacaacatagtaaaattgctgaaaaccaaagatgaatagaacacttaacagttggaggaaaaaagccacattaccttcataaggacaccaatcacactaacatctgacttcgaaatagaaatataaaagccaaactacaagggaatgtgatcttcaaaatattgaaagaatttaattgttaagtgaaataattaactgccaacctaaattctattcctagtggaaatactctccaagaataaaggtgaaataaatacagactcacacaagagaaatcaagagcgttcttcctcaggagacatgagctgattggtatagaagaggtgtttgaaacgtccttagagggagggctagagacacagggaggagaaaccttcagaacacaccttccattgagggccaaaaaagtcaactatcgattctttgaaagtgccccaaactcgtaaatctctggtgatgctgaccaaaaaaacaatgaaggaaggcaccctgtgatggggaaggaaaaggggagattgctggagatctgtggatat

SEQ ID NO: 7395 - protein, 153 aa, Homo sapiens
MGKLRPRRGLRPPPSFPSEVAPEPRPGPASFHPALLCARRVLTWRGRTGDQVGVTVTDTWTVLVVFGVGSPRGRVYHSHWELSSPIKASGLKHPEQELRRVKETVTCRLQLVPAPHPVQRPKRPLSPHHPAPDSAPRPQPAPASWLHPAFQPH

SEQ ID NO: 7396 - DNA, 874 bp, Homo sapiens
ggatagatggggaagctgaggcccagaagggggctgagaccacctcccagtttccccagtgaggtggcgcctgagccacggccaggcccggcctccttccacccggccctgctgtgcgcgcggcgggtgctgacctggcgaggccggacaggggaccaggtcggggtgaccgtcactgacacctggacagtcctcgttgtgttcggggtgggaagcccacggatcttcagagggaaggcaccaggagtggactgcgggacacccagagtggactgcaggaggacacagaagctaggctgaagcgggaggaagctgggaaccctgcacggggccactgcgcactgggactcgttactggtccccaagactcagggagaatggggaagagtgtatcacagccattgggaactttcttcacccatcaaagcctcagggctgaagcatcctgaacaagaactcaggagagtgaaagaaacagttacctgtcggctgcagctggtaccagctccccaccccgtacagagaccgaagcgtcctctctctccccatcacccagcaccagactctgccccgcgacctcagcctgcacctgcttcctggctccatccagccttccagcctcactagatcatcatgggccactggccaacacacagggcagtgccgagcccaggccgtggtcacacatggctgggttagtagctgaaaacattgtttttcactggcctcacagtaatggcacctgcccccattttctgtgattgaatttttggatcctgctaccaggttatgatagattttatggtatgtctcaagatattgagataaaggtaataaaacagctataaagtcctggctcaagaagtgttacaaa

SEQ ID NO: 7397 - protein, 97 aa, Homo sapiens
MGKLRPRRGLRPPPSFPSEVAPEPRPGPASFHPALLCARRVLTWRGRTGDQVGVTVTDTWTVLVVFGVGSPRIFRGKAPGVDCGTPRVDCRRTQKLG

SEQ ID NO: 7398 - DNA, 1788 bp, Homo sapiens
gggtccccgcgccgcccaggcctaccccggctccttgggatagatggggaagctgaggcccagaagggggctgagaccacctcccagtttccccagtgaggtggcgcctgagccacggccaggcccggcctccttccacccggccctgctgtgcgcgcggcgggtgctgacctggcgaggccggacaggggaccaggtcggggtgaccgtcactgacacctggacagtcctcgttgtgttcggggtgggaagcccacggtgagtctggggacccaagatcttattttcctttctgtcacccccgcttggttttggattccgtgacagctggacccggcttctgcgtgatcttcagagggaaggcaccaggagtggactgcgggacacccagagtggactgcaggaggacacagaagctaggctgaagcgggaggaagctgggaaccctgcacggggccactgcgcactgggactcgttactggtccccaagactcagggagaatgggtgagttgaactggcaaggaggagcccactgtcattacgggcctctggaatcccggcaggaggagattaaccacatggacattcgaggtggcagagagagctgcctagagaaggtgcgggggcagcagccagctgaggcagagcccggagggtttggtgcaggagcgtctgtagtggagggccatcccccaggctcaaattcctcccataggagattttagccctaggggagctgttgtatgtgatctttgtggggtggtcttgcccatcagatggggccagtctgacccgagcatgccttggtctgctggcctctcccagggccccggcctggccacgcctgcttgcagggcagctctgggtgccctgggggcctgcagcatagcttctgcactggcagaccatgcctgattggtggagagctccagcagggcagcccccacatccctgtgccagcctgcccactgcctcccacactgtagcttctccagggcccactgtcaccccccatcttgcttttgccagtgcatgtctgtgcaggtgggttttgctttccttgcccgccagtgtacctgtgtgtttgcaccctgccctgccattgctgtggcaggagtaccgtttgcccaacgccccctgctgactgccattgcagttggagccttggcagacacagagccagccagccccacctcccttgcaccccactcttgcaccaacactgttgcgggagtgaaactaggcacggaatagggaccaccctgcctgtggggcacaaagaatgccacaggcctgggcctgccggtgctccacctccatcccaacaccaccgccagcatggctgttgccagcagggggccctgccccccaggtgctttcgtctgccactgtggtgaacacctgcacagaggcaggcaccccagcacttgctagcaccctgccacagccgatgaacgtgcaccctgtgctgctgccaccacggctgctggcatgtgcaagcaagaatggatcccgctgccactgcactgcaaaatgcactggctggcaccacctatcagagtgtagtgaccggtagtgaggagcaccttgatccctcagtgcagttgattcctaacctccgggagccagagaacaaagttggtgcctgatacaagtaccccagttagagcacacagtctgggagttgggaactgagccttggccccctaaaatcatccagaaacaaagccagtcagctgaatccaacttatactacaatcaaatcctcaaggtcatcaaataggat

SEQ ID NO: 7399 - protein, 72 aa, Homo sapiens
MGKLRPRRGLRPPPSFPSEVAPEPRPGPASFHPALLCARRVLTWRGRTGDQVGVTVTDTWTVLVVFGVGSPR

SEQ ID NO: 7400 - DNA, 759 bp, Homo sapiens
gtcggcgagcccgcggtgggggtccccgcgccgcccaggcctaccccggctccttgggatagatggggaagctgaggcccagaagggggctgagaccacctcccagtttccccagtgaggtggcgcctgagccacggccaggcccggcctccttccacccggccctgctgtgcgcgcggcgggtgctgacctggcgaggccggacaggggaccaggtcggggtgaccgtcactgacacctggacagtcctcgttgtgttcggggtgggaagcccacggaagacatcaacacaggagactcccaagactgctggggccaaatgtggcaggtggacgtctccccgccaccgagcaagccatcagttctgcagcggacaccagccgagtgtcctccaacaccattccggtacctgcagatagcgtcagatccagacacctacacacacacacacacacacacacacacacacatatgcacacacatgagctgcgagggccagcctctggaacttcttaccgactggcccgacgttgaggttcccactgttagaggaacgcttgctcaccaggcctctggtttaatgaaacatgaccagagtgactccatcttgaagtgagtaggaggcactcacaaggcacctataaggttaatgcttatggtctaaaaatagccatgtctcaagctggacaccaattataattacagaatatttgtggccatatggggcatctcccagcaagcccgcagactgtccagata

SEQ ID NO: 7401 - protein, 118 aa, Homo sapiens
MGKLRPRRGLRPPPSFPSEVAPEPRPGPASFHPALLCARRVLTWRGRTGDQVGVTVTDTWTVLVVFGVGSPRKTSTQETPKTAGAKCGRWTSPRHRASHQFCSGHQPSVLQHHSGTCR

SEQ ID NO: 7402 - DNA, 1337 bp, Homo sapiens
gaacagcccagcctggagcgggaagcagggacaagatgacctcaggaatcccaggctgcgggggtgcctgcgtcctcccctcccgagctccactccgcaggcgagacccccaacactgctccccgacactctccgaggcacccctcctccgtgctcacacccaaacacgtctgctcacccgtgggcttcccaccccgaacacaacgaggactgtccaggtgtcagtgacggtcaccccgacctggtcccctgtccggcctcgccaggacaggctgctttggtttgtgacctccaggcaggacggccatcctctccagaatgaagatcttcttgccagtgctgctggctgcccttctgggtgtggagcgagccagctcgctgatgtgcttctcctgcttgaaccagaagagcaatctgtactgcctgaagccgaccatctgctccgaccaggacaactactgcgtgactgtgtctgctagtgccggcattgggaatctcgtgacatttggccacagcctgagcaagacctgttccccggcctgccccatcccagaaggcgtcaatgttggtgtggcttccatgggcatcagctgctgccagagctttctgtgcaatttcagtgcggccgatggcgggctgcgggcaagcgtcaccctgctgggtgccgggctgctgctgagcctgctgccggccctgctgcggtttggcccctgaccgcccagaccctgtcccccgatcccccagctcaggaaggaaagcccagccctttctggatcccacagtgtatgggagcccctgactcctcacgtgcctgatctgtgcccttggtcccaggtcaggcccaccccctgcacctccacctgccccagcccctgcctctgccccaagtggggccagctgccctcacttctggggtggatgatgtgaccttccttgggggaccgcggaagggacgagggttccctggagtcttacggtccaacatcaggaccaagtcccatggacatgctgacagggtccccagggagaccgtgtcagtagggatgtgtgcctggctgtgtacgtgggtgtgcagtgcacgtgagagcacgtggcggcttctgggggccatgtttggggagggaggtgtgccagcagcctggagagcctcagtccctgtagccccctgccctggcacagctgcatgcacttcaagggcagcctttgggggttggggtttctgccacttccgggtctaggccctgccccaaatccagccagtcctgccccagcccacccccacattggagccctcctgctgctttggtgcctcaaataaatacagatgtcccccagct

SEQ ID NO: 7403 - protein, 147 aa, Homo sapiens
MTSGIPGCGGACVLPSRAPLRRRDPQHCSPTLSEAPLLRAHTQTRLLTRGLPTPNTTRTVQVSVTVTPTWSPVRPRQDRLLWFVTSRQDGHPLQNEDLLASAAGCPSGCGASQLADVLLLLEPEEQSVLPEADHLLRPGQLLRDCVC

SEQ ID NO: 7404 - DNA, 1725 bp, Homo sapiens
gaacagcccagcctggagcgggaagcagggacaagatgacctcaggaatcccaggctgcgggggtgcctgcgtcctcccctcccgagctccactccgcaggcgagacccccaacactgctccccgacactctccgaggcacccctcctccgtgctcacacccaaacacgtctgctcacccgtgggcttcccaccccgaacacaacgaggactgtccaggtgtcagtgacggtcaccccgacctggtcccctgtccggcctcgccaggacaggctgctttggtttgtgacctccaggcaggacggccatcctctccagaatgaagatcttcttgccagtgctgctggctgcccttctgggtgtggagcgagccagctcgctgatgtgcttctcctgcttgaaccagaagagcaatctgtactgcctgaagccgaccatctgctccgaccaggacaactactgcgtgactgtgtctgctagtgccggcattgggaatctcgtgacatttggccacagcctgagcaagacctgttccccggcctgccccatcccagaaggcgtcaatgttggtgtggcttccatgggcatcagctgctgccagagctttctgtgcaatttcagtgcggccgatggcgggctgcgggcaagcgtcaccctgctgggtgccgggctgctgctgagcctgctgccggccctgctgcggtttggcccctgaccgcccagaccctgtcccccgatcccccagctcaggaaggaaagcccagccctttctggatcccacagtgtatgggagcccctgactcctcacgtgcctgatctgtgcccttggtcccaggtcaggcccaccccctgcacctccacctgccccagcccctgcctctgccccaagtggggccagctgccctcacttctggggtggatgatgtgaccttccttgggggaccgcggaagggacgagggttccctggagtcttacggtccaacatcaggaccaagtcccatggacatgctgacagggtccccagggagaccgtgtcagtagggatgtgtgcctggctgtgtacgtgggtgtgcagtgcacgtgagagcacgtggcggcttctgggggccatgtttggggagggaggtgtgccagcagcctggagagcctcagtccctgtagccccctgccctggcacagctgcatgcacttcaagggcagcctttgggggttggggtttctgccacttccgggtctaggccctgccccaaatccagccagtcctgccccagcccacccccacattggagccctcctgctgctttggtgcctcaaataaatacagatgtcccccagcttcctgctctgagtgtggctgccccttgcggggagaggcagagcaccccaggtttggagggtcctggggtcttctgtggtatggcccaggggggtggtgggggaggaggagtcgtcccctgagccacagccagctgcttgcctgacctcagagggagcccctccccagtgctctgccctttcttctgccccaggttcagcaggtcaagtgagttcctcctcccacagcggaaggaggtgttggggggcatggaggaaagaaagcgggtgcaagaaggagcacgctcaggctggggcagcacccagggccgtaggacttgggaatggagggtgtctgtctggacccgctggtgcagagggtacaaaagctgggctggggcaggacagacg

SEQ ID NO: 7405 - protein, 147 aa, Homo sapiens; identical to SEQ ID NO: 7403

SEQ ID NO: 7406 - DNA, 1181 bp, Homo sapiens
cccggggccgcgcggctgcctgggaggctccgggccagccgcggtccagagcgcgcgaggttcggggagctcggccaggctgctggtacctgcgtccgcccggcgagcaggacaggctgctttggtttgtgacctccaggcaggacggccatcctctccagaatgaagatcttcttgccagtgctgctggctgcccttctgggtgtggagcgagccagctcgctgatgtgcttctcctgcttgaaccagaagagcaatctgtactgcctgaagccgaccatctgctccgaccaggacaactactgcgtgactgtgtctgctagtgccggcattgggaatctcgtgacatttggccacagcctgagcaagacctgttccccggcctgccccatcccagaaggcgtcaatgttggtgtggcttccatgggcatcagctgctgccagagctttctgtgcaatttcagtgcggccgatggcgggctgcgggcaagcgtcaccctgctgggtgccgggctgctgctgagcctgctgccggccctgctgcggtttggcccctgaccgcccagaccctgtcccccgatcccccagctcaggaaggaaagcccagccctttctggatcccacagtgtatgggagcccctgactcctcacgtgcctgatctgtgcccttggtcccaggtcaggcccaccccctgcacctccacctgccccagcccctgcctctgccccaagtggggccagctgccctcacttctggggtggatgatgtgaccttccttgggggaccgcggaagggacgagggttccctggagtcttacggtccaacatcaggaccaagtcccatggacatgctgacagggtccccagggagaccgtgtcagtagggatgtgtgcctggctgtgtacgtgggtgtgcagtgcacgtgagagcacgtggcggcttctgggggccatgtttggggagggaggtgtgccagcagcctggagagcctcagtccctgtagccccctgccctggcacagctgcatgcacttcaagggcagcctttgggggttggggtttctgccacttccgggtctaggccctgccccaaatccagccagtcctgccccagcccacccccacattggagccctcctgctgctttggtgcctcaaataaatacagatgtcccccagct

SEQ ID NO: 7407 - protein, 131 aa, Homo sapiens; identical to SEQ ID NO: 1070

SEQ ID NO: 7408 - DNA, 1569 bp, Homo sapiens
cccggggccgcgcggctgcctgggaggctccgggccagccgcggtccagagcgcgcgaggttcggggagctcggccaggctgctggtacctgcgtccgcccggcgagcaggacaggctgctttggtttgtgacctccaggcaggacggccatcctctccagaatgaagatcttcttgccagtgctgctggctgcccttctgggtgtggagcgagccagctcgctgatgtgcttctcctgcttgaaccagaagagcaatctgtactgcctgaagccgaccatctgctccgaccaggacaactactgcgtgactgtgtctgctagtgccggcattgggaatctcgtgacatttggccacagcctgagcaagacctgttccccggcctgccccatcccagaaggcgtcaatgttggtgtggcttccatgggcatcagctgctgccagagctttctgtgcaatttcagtgcggccgatggcgggctgcgggcaagcgtcaccctgctgggtgccgggctgctgctgagcctgctgccggccctgctgcggtttggcccctgaccgcccagaccctgtcccccgatcccccagctcaggaaggaaagcccagccctttctggatcccacagtgtatgggagcccctgactcctcacgtgcctgatctgtgcccttggtcccaggtcaggcccaccccctgcacctccacctgccccagcccctgcctctgccccaagtggggccagctgccctcacttctggggtggatgatgtgaccttccttgggggaccgcggaagggacgagggttccctggagtcttacggtccaacatcaggaccaagtcccatggacatgctgacagggtccccagggagaccgtgtcagtagggatgtgtgcctggctgtgtacgtgggtgtgcagtgcacgtgagagcacgtggcggcttctgggggccatgtttggggagggaggtgtgccagcagcctggagagcctcagtccctgtagccccctgccctggcacagctgcatgcacttcaagggcagcctttgggggttggggtttctgccacttccgggtctaggccctgccccaaatccagccagtcctgccccagcccacccccacattggagccctcctgctgctttggtgcctcaaataaatacagatgtcccccagcttcctgctctgagtgtggctgccccttgcggggagaggcagagcaccccaggtttggagggtcctggggtcttctgtggtatggcccaggggggtggtgggggaggaggagtcgtcccctgagccacagccagctgcttgcctgacctcagagggagcccctccccagtgctctgccctttcttctgccccaggttcagcaggtcaagtgagttcctcctcccacagcggaaggaggtgttggggggcatggaggaaagaaagcgggtgcaagaaggagcacgctcaggctggggcagcacccagggccgtaggacttgggaatggagggtgtctgtctggacccgctggtgcagagggtacaaaagctgggctggggcaggacagacg

SEQ ID NO: 7409 - protein, 131 aa, Homo sapiens; identical to SEQ ID NO: 1070

SEQ ID NO: 7410 - DNA, 1466 bp, Homo sapiens
cggggccgcgcggctgcctgggaggctccgggccagccgcggtccagagcgcgcgaggttcggggagctcggccaggctgctggtacctgcgtccgcccggcggcctccccgaatgtttccaaagatctggggcgggagcgggcggagactgccgccaggagcctcccggccgccccagggctgcgcagccactggagcccatcacccaactccagacgctcctggctcctctacgtgggccgggagggacagccttgaggactaggggagggggcacgggaccttgcagagctcctggccggaaagggaggattgaccgcccccggcatatcaccccggagcactggaacccgcccccgcttcttgttttggcactggtggtgcttgcgagcaggacaggctgctttggtttgtgacctccaggcaggacggccatcctctccagaatgaagatcttcttgccagtgctgctggctgcccttctgggtgtggagcgagccagctcgctgatgtgcttctcctgcttgaaccagaagagcaatctgtactgcctgaagccgaccatctgctccgaccaggacaactactgcgtgactgtgtctgctagtgccggcattgggaatctcgtgacatttggccacagcctgagcaagacctgttccccggcctgccccatcccagaaggcgtcaatgttggtgtggcttccatgggcatcagctgctgccagagctttctgtgcaatttcagtgcggccgatggcgggctgcgggcaagcgtcaccctgctgggtgccgggctgctgctgagcctgctgccggccctgctgcggtttggcccctgaccgcccagaccctgtcccccgatcccccagctcaggaaggaaagcccagccctttctggatcccacagtgtatgggagcccctgactcctcacgtgcctgatctgtgcccttggtcccaggtcaggcccaccccctgcacctccacctgccccagcccctgcctctgccccaagtggggccagctgccctcacttctggggtggatgatgtgaccttccttgggggaccgcggaagggacgagggttccctggagtcttacggtccaacatcaggaccaagtcccatggacatgctgacagggtccccagggagaccgtgtcagtagggatgtgtgcctggctgtgtacgtgggtgtgcagtgcacgtgagagcacgtggcggcttctgggggccatgtttggggagggaggtgtgccagcagcctggagagcctcagtccctgtagccccctgccctggcacagctgcatgcacttcaagggcagcctttgggggttggggtttctgccacttccgggtctaggccctgccccaaatccagccagtcctgccccagcccacccccacattggagccctcctgctgctttggtgcctcaaataaatacagatgtcccccagct

SEQ ID NO: 7411 - protein, 131 aa, Homo sapiens; identical to SEQ ID NO: 1070

SEQ ID NO: 7412 - DNA, 1854 bp, Homo sapiens
cggggccgcgcggctgcctgggaggctccgggccagccgcggtccagagcgcgcgaggttcggggagctcggccaggctgctggtacctgcgtccgcccggcggcctccccgaatgtttccaaagatctggggcgggagcgggcggagactgccgccaggagcctcccggccgccccagggctgcgcagccactggagcccatcacccaactccagacgctcctggctcctctacgtgggccgggagggacagccttgaggactaggggagggggcacgggaccttgcagagctcctggccggaaagggaggattgaccgcccccggcatatcaccccggagcactggaacccgcccccgcttcttgttttggcactggtggtgcttgcgagcaggacaggctgctttggtttgtgacctccaggcaggacggccatcctctccagaatgaagatcttcttgccagtgctgctggctgcccttctgggtgtggagcgagccagctcgctgatgtgcttctcctgcttgaaccagaagagcaatctgtactgcctgaagccgaccatctgctccgaccaggacaactactgcgtgactgtgtctgctagtgccggcattgggaatctcgtgacatttggccacagcctgagcaagacctgttccccggcctgccccatcccagaaggcgtcaatgttggtgtggcttccatgggcatcagctgctgccagagctttctgtgcaatttcagtgcggccgatggcgggctgcgggcaagcgtcaccctgctgggtgccgggctgctgctgagcctgctgccggccctgctgcggtttggcccctgaccgcccagaccctgtcccccgatcccccagctcaggaaggaaagcccagccctttctggatcccacagtgtatgggagcccctgactcctcacgtgcctgatctgtgcccttggtcccaggtcaggcccaccccctgcacctccacctgccccagcccctgcctctgccccaagtggggccagctgccctcacttctggggtggatgatgtgaccttccttgggggaccgcggaagggacgagggttccctggagtcttacggtccaacatcaggaccaagtcccatggacatgctgacagggtccccagggagaccgtgtcagtagggatgtgtgcctggctgtgtacgtgggtgtgcagtgcacgtgagagcacgtggcggcttctgggggccatgtttggggagggaggtgtgccagcagcctggagagcctcagtccctgtagccccctgccctggcacagctgcatgcacttcaagggcagcctttgggggttggggtttctgccacttccgggtctaggccctgccccaaatccagccagtcctgccccagcccacccccacattggagccctcctgctgctttggtgcctcaaataaatacagatgtcccccagcttcctgctctgagtgtggctgccccttgcggggagaggcagagcaccccaggtttggagggtcctggggtcttctgtggtatggcccaggggggtggtgggggaggaggagtcgtcccctgagccacagccagctgcttgcctgacctcagagggagcccctccccagtgctctgccctttcttctgccccaggttcagcaggtcaagtgagttcctcctcccacagcggaaggaggtgttggggggcatggaggaaagaaagcgggtgcaagaaggagcacgctcaggctggggcagcacccagggccgtaggacttgggaatggagggtgtctgtctggacccgctggtgcagagggtacaaaagctgggctggggcaggacagacg

SEQ ID NO: 7413 - protein, 131 aa, Homo sapiens; identical to SEQ ID NO: 1070

SEQ ID NO: 7414 - DNA, 1033 bp, Homo sapiens
gcgcggctgcctgggaggctccgggccagccgcggtccagagcgcgcgaggttcggggagctcggccaggctgctggtacctgcgtccgcccggcgagcaggacaggctgctttggtttgtgacctccaggcaggacggccatcctctccagaatgaagatcttcttgccagtgctgctggctgcccttctgggtgtggagcgagccagctcgctgatgtgcttctcctgcttgaaccagaagagcaatctgtactgcctgaagccgaccatctgctccgaccaggacaactactgcgtgactgtgtctgctagtgccggcattgggaatctcgtgacatttggccacagcctgagcaagacctgttccccggcctgccccatcccagaaggcgtcaatgttggtgtggcttccatgggcatcagctgctgccagagctttctgtgcaatttcagtgcgccctttctggatcccacagtgtatgggagcccctgactcctcacgtgcctgatctgtgcccttggtcccaggtcaggcccaccccctgcacctccacctgccccagcccctgcctctgccccaagtggggccagctgccctcacttctggggtggatgatgtgaccttccttgggggaccgcggaagggacgagggttccctggagtcttacggtccaacatcaggaccaagtcccatggacatgctgacagggtccccagggagaccgtgtcagtagggatgtgtgcctggctgtgtacgtgggtgtgcagtgcacgtgagagcacgtggcggcttctgggggccatgtttggggagggaggtgtgccagcagcctggagagcctcagtccctgtagccccctgccctggcacagctgcatgcacttcaagggcagcctttgggggttggggtttctgccacttccgggtctaggccctgccccaaatccagccagtcctgccccagcccacccccacattggagccctcctgctgctttggtgcctcaaataaatacagatgtcccccagct

SEQ ID NO: 7415 - protein, 113 aa, Homo sapiens
MKIFLPVLLAALLGVERASSLMCFSCLNQKSNLYCLKPTICSDQDNYCVTVSASAGIGNLVTFGHSLSKTCSPACPIPEGVNVGVASMGISCCQSFLCNFSAPFLDPTVYGSP

SEQ ID NO: 7416 - DNA, 1421 bp, Homo sapiens
gcgcggctgcctgggaggctccgggccagccgcggtccagagcgcgcgaggttcggggagctcggccaggctgctggtacctgcgtccgcccggcgagcaggacaggctgctttggtttgtgacctccaggcaggacggccatcctctccagaatgaagatcttcttgccagtgctgctggctgcccttctgggtgtggagcgagccagctcgctgatgtgcttctcctgcttgaaccagaagagcaatctgtactgcctgaagccgaccatctgctccgaccaggacaactactgcgtgactgtgtctgctagtgccggcattgggaatctcgtgacatttggccacagcctgagcaagacctgttccccggcctgccccatcccagaaggcgtcaatgttggtgtggcttccatgggcatcagctgctgccagagctttctgtgcaatttcagtgcgccctttctggatcccacagtgtatgggagcccctgactcctcacgtgcctgatctgtgcccttggtcccaggtcaggcccaccccctgcacctccacctgccccagcccctgcctctgccccaagtggggccagctgccctcacttctggggtggatgatgtgaccttccttgggggaccgcggaagggacgagggttccctggagtcttacggtccaacatcaggaccaagtcccatggacatgctgacagggtccccagggagaccgtgtcagtagggatgtgtgcctggctgtgtacgtgggtgtgcagtgcacgtgagagcacgtggcggcttctgggggccatgtttggggagggaggtgtgccagcagcctggagagcctcagtccctgtagccccctgccctggcacagctgcatgcacttcaagggcagcctttgggggttggggtttctgccacttccgggtctaggccctgccccaaatccagccagtcctgccccagcccacccccacattggagccctcctgctgctttggtgcctcaaataaatacagatgtcccccagcttcctgctctgagtgtggctgccccttgcggggagaggcagagcaccccaggtttggagggtcctggggtcttctgtggtatggcccaggggggtggtgggggaggaggagtcgtcccctgagccacagccagctgcttgcctgacctcagagggagcccctccccagtgctctgccctttcttctgccccaggttcagcaggtcaagtgagttcctcctcccacagcggaaggaggtgttggggggcatggaggaaagaaagcgggtgcaagaaggagcacgctcaggctggggcagcacccagggccgtaggacttgggaatggagggtgtctgtctggacccgctggtgcagagggtacaaaagctgggctggggcaggacagacg

SEQ ID NO: 7417 - protein, 113 aa, Homo sapiens; identical to SEQ ID NO: 7415

SEQ ID NO: 7418 - DNA, 1082 bp, Homo sapiens
ctgcctgggaggctccgggccagccgcggtccagagcgcgcgaggttcggggagctcggccaggctgctggtacctgcgtccgcccggcgagcaggacaggctgctttggtttgtgacctccaggcaggacggccatcctctccagaatgaagatcttcttgccagtgctgctggctgcccttctgggtgtggagcgagccagctcgctgatgtgcttctcctgcttgaaccagaagagcaatctgtactgcctgaagccgaccatctgctccgaccaggacaactactgcgtgactgtgtctgctagtgccggcattgggaatctcgtgacatttggccacagcctgagcaagacctgttccccggcctgccccatcccagaaggcgtcaatgttggtgtggcttccatgggcatcagctgctgccagagctttctgtgcaatttcagtgcggccgatggcgggctgcgggcaagcgtcaccctgctgggtgccgggctgctgctgagcctgctgccggccctgctgcggtttggcccctgacctcctcacgtgcctgatctgtgcccttggtcccaggtcaggcccaccccctgcacctccacctgccccagcccctgcctctgccccaagtggggccagctgccctcacttctggggtggatgatgtgaccttccttgggggaccgcggaagggacgagggttccctggagtcttacggtccaacatcaggaccaagtcccatggacatgctgacagggtccccagggagaccgtgtcagtagggatgtgtgcctggctgtgtacgtgggtgtgcagtgcacgtgagagcacgtggcggcttctgggggccatgtttggggagggaggtgtgccagcagcctggagagcctcagtccctgtagccccctgccctggcacagctgcatgcacttcaagggcagcctttgggggttggggtttctgccacttccgggtctaggccctgccccaaatccagccagtcctgccccagcccacccccacattggagccctcctgctgctttggtgcctcaaataaatacagatgtcccccagct

SEQ ID NO: 7419 - protein, 131 aa, Homo sapiens; identical to SEQ ID NO: 1070

SEQ ID NO: 7420 - DNA, 1470 bp, Homo sapiens
ctgcctgggaggctccgggccagccgcggtccagagcgcgcgaggttcggggagctcggccaggctgctggtacctgcgtccgcccggcgagcaggacaggctgctttggtttgtgacctccaggcaggacggccatcctctccagaatgaagatcttcttgccagtgctgctggctgcccttctgggtgtggagcgagccagctcgctgatgtgcttctcctgcttgaaccagaagagcaatctgtactgcctgaagccgaccatctgctccgaccaggacaactactgcgtgactgtgtctgctagtgccggcattgggaatctcgtgacatttggccacagcctgagcaagacctgttccccggcctgccccatcccagaaggcgtcaatgttggtgtggcttccatgggcatcagctgctgccagagctttctgtgcaatttcagtgcggccgatggcgggctgcgggcaagcgtcaccctgctgggtgccgggctgctgctgagcctgctgccggccctgctgcggtttggcccctgacctcctcacgtgcctgatctgtgcccttggtcccaggtcaggcccaccccctgcacctccacctgccccagcccctgcctctgccccaagtggggccagctgccctcacttctggggtggatgatgtgaccttccttgggggaccgcggaagggacgagggttccctggagtcttacggtccaacatcaggaccaagtcccatggacatgctgacagggtccccagggagaccgtgtcagtagggatgtgtgcctggctgtgtacgtgggtgtgcagtgcacgtgagagcacgtggcggcttctgggggccatgtttggggagggaggtgtgccagcagcctggagagcctcagtccctgtagccccctgccctggcacagctgcatgcacttcaagggcagcctttgggggttggggtttctgccacttccgggtctaggccctgccccaaatccagccagtcctgccccagcccacccccacattggagccctcctgctgctttggtgcctcaaataaatacagatgtcccccagcttcctgctctgagtgtggctgccccttgcggggagaggcagagcaccccaggtttggagggtcctggggtcttctgtggtatggcccaggggggtggtgggggaggaggagtcgtcccctgagccacagccagctgcttgcctgacctcagagggagcccctccccagtgctctgccctttcttctgccccaggttcagcaggtcaagtgagttcctcctcccacagcggaaggaggtgttggggggcatggaggaaagaaagcgggtgcaagaaggagcacgctcaggctggggcagcacccagggccgtaggacttgggaatggagggtgtctgtctggacccgctggtgcagagggtacaaaagctgggctggggcaggacagacg

SEQ ID NO: 7421 - protein, 131 aa, Homo sapiens; identical to SEQ ID NO: 1070

SEQ ID NO: 7422 - DNA, 1034 bp, Homo sapiens
gctccgggccagccgcggtccagagcgcgcgaggttcggggagctcggccaggctgctggtacctgcgtccgcccggcgagcaggacaggctgctttggtttgtgacctccaggcaggacggccatcctctccagaatgaagatcttcttgccagtgctgctggctgcccttctgggtgtggagcgagccagctcgctgatgtgcttctcctgcttgaaccagaagagcaatctgtactgcctgaagccgaccatctgctccgaccaggacaactactgcgtgactgtgtctgctagtgccggcattgggaatctcgtgacatttggccacagcctgagcaagacctgttccccggcctgccccatcccagaaggcgtcaatgttggtgtggcttccatgggcatcagctgctgccagaaccctgtcccccgatcccccagctcaggaaggaaagcccagccctttctggatcccacagtgtatgggagcccctgactcctcacgtgcctgatctgtgcccttggtcccaggtcaggcccaccccctgcacctccacctgccccagcccctgcctctgccccaagtggggccagctgccctcacttctggggtggatgatgtgaccttccttgggggaccgcggaagggacgagggttccctggagtcttacggtccaacatcaggaccaagtcccatggacatgctgacagggtccccagggagaccgtgtcagtagggatgtgtgcctggctgtgtacgtgggtgtgcagtgcacgtgagagcacgtggcggcttctgggggccatgtttggggagggaggtgtgccagcagcctggagagcctcagtccctgtagccccctgccctggcacagctgcatgcacttcaagggcagcctttgggggttggggtttctgccacttccgggtctaggccctgccccaaatccagccagtcctgccccagcccacccccacattggagccctcctgctgctttggtgcctcaaataaatacagatgtcccccagct

SEQ ID NO: 7423 - protein, 119 aa, Homo sapiens
MKIFLPVLLAALLGVERASSLMCFSCLNQKSNLYCLKPTICSDQDNYCVTVSASAGIGNLVTFGHSLSKTCSPACPIPEGVNVGVASMGISCCQNPVPRSPSSGRKAQPFLDPTVYGSP

SEQ ID NO: 7424 - DNA, 1422 bp, Homo sapiens
gctccgggccagccgcggtccagagcgcgcgaggttcggggagctcggccaggctgctggtacctgcgtccgcccggcgagcaggacaggctgctttggtttgtgacctccaggcaggacggccatcctctccagaatgaagatcttcttgccagtgctgctggctgcccttctgggtgtggagcgagccagctcgctgatgtgcttctcctgcttgaaccagaagagcaatctgtactgcctgaagccgaccatctgctccgaccaggacaactactgcgtgactgtgtctgctagtgccggcattgggaatctcgtgacatttggccacagcctgagcaagacctgttccccggcctgccccatcccagaaggcgtcaatgttggtgtggcttccatgggcatcagctgctgccagaaccctgtcccccgatcccccagctcaggaaggaaagcccagccctttctggatcccacagtgtatgggagcccctgactcctcacgtgcctgatctgtgcccttggtcccaggtcaggcccaccccctgcacctccacctgccccagcccctgcctctgccccaagtggggccagctgccctcacttctggggtggatgatgtgaccttccttgggggaccgcggaagggacgagggttccctggagtcttacggtccaacatcaggaccaagtcccatggacatgctgacagggtccccagggagaccgtgtcagtagggatgtgtgcctggctgtgtacgtgggtgtgcagtgcacgtgagagcacgtggcggcttctgggggccatgtttggggagggaggtgtgccagcagcctggagagcctcagtccctgtagccccctgccctggcacagctgcatgcacttcaagggcagcctttgggggttggggtttctgccacttccgggtctaggccctgccccaaatccagccagtcctgccccagcccacccccacattggagccctcctgctgctttggtgcctcaaataaatacagatgtcccccagcttcctgctctgagtgtggctgccccttgcggggagaggcagagcaccccaggtttggagggtcctggggtcttctgtggtatggcccaggggggtggtgggggaggaggagtcgtcccctgagccacagccagctgcttgcctgacctcagagggagcccctccccagtgctctgccctttcttctgccccaggttcagcaggtcaagtgagttcctcctcccacagcggaaggaggtgttggggggcatggaggaaagaaagcgggtgcaagaaggagcacgctcaggctggggcagcacccagggccgtaggacttgggaatggagggtgtctgtctggacccgctggtgcagagggtacaaaagctgggctggggcaggacagacg

SEQ ID NO: 7425 - protein, 119 aa, Homo sapiens; identical to SEQ ID NO: 7423

SEQ ID NO: 7426 - DNA, 1267 bp, Homo sapiens
cagagcgcgcgaggttcggggagctcggccaggctgctggtacctgcgtccgcccggcgagcaggacaggctgctttggtttgtgacctccaggcaggacggccatcctctccagaatgaagatcttcttgccagtgctgctggctgcccttctgggtgtggagcgagccagctcgctgatgtgcttctcctgcttgaaccagaagagcaatctgtactgcctgaagccgaccatctgctccgaccaggacaactactgcgtgactgtgtctgctagtgccggcattggtgagtgccaggcctcagaccgtgccttcctcccctggccatctccctagcccgggccggggctcagcagaggccattgctgtctgtctgcagccgtctgtctctcccctgacagcctcatttcccatgcagggaatctcgtgacatttggccacagcctgagcaagacctgttccccggcctgccccatcccagaaggcgtcaatgttggtgtggcttccatgggcatcagctgctgccagagctttctgtgcaatttcagtgcggccgatggcgggctgcgggcaagcgtcaccctgctgggtgccgggctgctgctgagcctgctgccggccctgctgcggtttggcccctgaccgcccagaccctgtcccccgatcccccagctcaggaaggaaagcccagccctttctggatcccacagtgtatgggagcccctgactcctcacgtgcctgatctgtgcccttggtcccaggtcaggcccaccccctgcacctccacctgccccagcccctgcctctgccccaagtggggccagctgccctcacttctggggtggatgatgtgaccttccttgggggaccgcggaagggacgagggttccctggagtcttacggtccaacatcaggaccaagtcccatggacatgctgacagggtccccagggagaccgtgtcagtagggatgtgtgcctggctgtgtacgtgggtgtgcagtgcacgtgagagcacgtggcggcttctgggggccatgtttggggagggaggtgtgccagcagcctggagagcctcagtccctgtagccccctgccctggcacagctgcatgcacttcaagggcagcctttgggggttggggtttctgccacttccgggtctaggccctgccccaaatccagccagtcctgccccagcccacccccacattggagccctcctgctgctttggtgcctcaaataaatacagatgtcccccagct

SEQ ID NO: 7427 - protein, 73 aa, Homo sapiens
MKIFLPVLLAALLGVERASSLMCFSCLNQKSNLYCLKPTICSDQDNYCVTVSASAGIGECQASDRAFLPWPSP

SEQ ID NO: 7428 - DNA, 1655 bp, Homo sapiens
cagagcgcgcgaggttcggggagctcggccaggctgctggtacctgcgtccgcccggcgagcaggacaggctgctttggtttgtgacctccaggcaggacggccatcctctccagaatgaagatcttcttgccagtgctgctggctgcccttctgggtgtggagcgagccagctcgctgatgtgcttctcctgcttgaaccagaagagcaatctgtactgcctgaagccgaccatctgctccgaccaggacaactactgcgtgactgtgtctgctagtgccggcattggtgagtgccaggcctcagaccgtgccttcctcccctggccatctccctagcccgggccggggctcagcagaggccattgctgtctgtctgcagccgtctgtctctcccctgacagcctcatttcccatgcagggaatctcgtgacatttggccacagcctgagcaagacctgttccccggcctgccccatcccagaaggcgtcaatgttggtgtggcttccatgggcatcagctgctgccagagctttctgtgcaatttcagtgcggccgatggcgggctgcgggcaagcgtcaccctgctgggtgccgggctgctgctgagcctgctgccggccctgctgcggtttggcccctgaccgcccagaccctgtcccccgatcccccagctcaggaaggaaagcccagccctttctggatcccacagtgtatgggagcccctgactcctcacgtgcctgatctgtgcccttggtcccaggtcaggcccaccccctgcacctccacctgccccagcccctgcctctgccccaagtggggccagctgccctcacttctggggtggatgatgtgaccttccttgggggaccgcggaagggacgagggttccctggagtcttacggtccaacatcaggaccaagtcccatggacatgctgacagggtccccagggagaccgtgtcagtagggatgtgtgcctggctgtgtacgtgggtgtgcagtgcacgtgagagcacgtggcggcttctgggggccatgtttggggagggaggtgtgccagcagcctggagagcctcagtccctgtagccccctgccctggcacagctgcatgcacttcaagggcagcctttgggggttggggtttctgccacttccgggtctaggccctgccccaaatccagccagtcctgccccagcccacccccacattggagccctcctgctgctttggtgcctcaaataaatacagatgtcccccagcttcctgctctgagtgtggctgccccttgcggggagaggcagagcaccccaggtttggagggtcctggggtcttctgtggtatggcccaggggggtggtgggggaggaggagtcgtcccctgagccacagccagctgcttgcctgacctcagagggagcccctccccagtgctctgccctttcttctgccccaggttcagcaggtcaagtgagttcctcctcccacagcggaaggaggtgttggggggcatggaggaaagaaagcgggtgcaagaaggagcacgctcaggctggggcagcacccagggccgtaggacttgggaatggagggtgtctgtctggacccgctggtgcagagggtacaaaagctgggctggggcaggacagacg

SEQ ID NO: 7429 - protein, 73 aa, Homo sapiens; identical to SEQ ID NO: 7427

SEQ ID NO: 7430 - DNA, 1069 bp, Homo sapiens
caggctgctttggtttgtgacctccaggcaggacggccatcctctccagaatgaagatcttcttgccagtgctgctggctgcccttctgggtgtggagcgagccagctcgctgatgtgcttctcctgcttgaaccagaagagcaatctgtactgcctgaagccgaccatctgctccgaccaggacaactactgcgtgactgtgtctgctagtgccggcattgggaatctcgtgacatttggccacagcctgagcaagacctgttccccggcctgccccatcccagaaggcgtcaatgttggtgtggcttccatgggcatcagctgctgccagagctttctgtgcaatttcagtgcggccgatggcgggctgcgggcaagcgtcaccctgctgggtgccgggctgctgctgagcctgctgccggccctgctgcggtttggcccctgaccgcccagaccctgtcccccgatcccccagctcaggaaggaaagcccagccctttctggatcccacagtgtatgggagcccctgactcctcacgtgcctgatctgtgcccttggtcccaggtcaggcccaccccctgcacctccacctgccccagcccctgcctctgccccaagtggggccagctgccctcacttctggggtggatgatgtgaccttccttgggggaccgcggaagggacgagggttccctggagtcttacggtccaacatcaggaccaagtcccatggacatgctgacagggtccccagggagaccgtgtcagtagggatgtgtgcctggctgtgtacgtgggtgtgcagtgcacgtgagagcacgtggcggcttctgggggccatgtttggggagggaggtgtgccagcagcctggagagcctcagtccctgtagccccctgccctggcacagctgcatgcacttcaagggcagcctttgggggttggggtttctgccacttccgggtctaggccctgccccaaatccagccagtcctgccccagcccacccccacattggagccctcctgctgctttggtgcctcaaataaatacagatgtcccccagct

SEQ ID NO: 7431 - protein, 131 aa, Homo sapiens; identical to SEQ ID NO: 1070

SEQ ID NO: 7432 - DNA, 1457 bp, Homo sapiens
caggctgctttggtttgtgacctccaggcaggacggccatcctctccagaatgaagatcttcttgccagtgctgctggctgcccttctgggtgtggagcgagccagctcgctgatgtgcttctcctgcttgaaccagaagagcaatctgtactgcctgaagccgaccatctgctccgaccaggacaactactgcgtgactgtgtctgctagtgccggcattgggaatctcgtgacatttggccacagcctgagcaagacctgttccccggcctgccccatcccagaaggcgtcaatgttggtgtggcttccatgggcatcagctgctgccagagctttctgtgcaatttcagtgcggccgatggcgggctgcgggcaagcgtcaccctgctgggtgccgggctgctgctgagcctgctgccggccctgctgcggtttggcccctgaccgcccagaccctgtcccccgatcccccagctcaggaaggaaagcccagccctttctggatcccacagtgtatgggagcccctgactcctcacgtgcctgatctgtgcccttggtcccaggtcaggcccaccccctgcacctccacctgccccagcccctgcctctgccccaagtggggccagctgccctcacttctggggtggatgatgtgaccttccttgggggaccgcggaagggacgagggttccctggagtcttacggtccaacatcaggaccaagtcccatggacatgctgacagggtccccagggagaccgtgtcagtagggatgtgtgcctggctgtgtacgtgggtgtgcagtgcacgtgagagcacgtggcggcttctgggggccatgtttggggagggaggtgtgccagcagcctggagagcctcagtccctgtagccccctgccctggcacagctgcatgcacttcaagggcagcctttgggggttggggtttctgccacttccgggtctaggccctgccccaaatccagccagtcctgccccagcccacccccacattggagccctcctgctgctttggtgcctcaaataaatacagatgtcccccagcttcctgctctgagtgtggctgccccttgcggggagaggcagagcaccccaggtttggagggtcctggggtcttctgtggtatggcccaggggggtggtgggggaggaggagtcgtcccctgagccacagccagctgcttgcctgacctcagagggagcccctccccagtgctctgccctttcttctgccccaggttcagcaggtcaagtgagttcctcctcccacagcggaaggaggtgttggggggcatggaggaaagaaagcgggtgcaagaaggagcacgctcaggctggggcagcacccagggccgtaggacttgggaatggagggtgtctgtctggacccgctggtgcagagggtacaaaagctgggctggggcaggacagacg

SEQ ID NO: 7433 - protein, 131 aa, Homo sapiens; identical to SEQ ID NO: 1070

SEQ ID NO: 7434 - DNA, 765 bp, Homo sapiens
gctttggtttgtgacctccaggcaggacggccatcctctccagaatgaagatcttcttgccagtgctgctggctgcccttctgggtgtggagcgagccagctcgctgatgtgcttctcctgcttgaaccagaagagcaatctgtactgcctgaagccgaccatctgctccgaccaggacaactactgcgtgactgtgtctgctagtgccggcattgggaatctcgtgacatttggccacagcctgagcaagacctgttccccggcctgcccaccccctgcacctccacctgccccagcccctgcctctgccccaagtggggccagctgccctcacttctggggtggatgatgtgaccttccttgggggaccgcggaagggacgagggttccctggagtcttacggtccaacatcaggaccaagtcccatggacatgctgacagggtccccagggagaccgtgtcagtagggatgtgtgcctggctgtgtacgtgggtgtgcagtgcacgtgagagcacgtggcggcttctgggggccatgtttggggagggaggtgtgccagcagcctggagagcctcagtccctgtagccccctgccctggcacagctgcatgcacttcaagggcagcctttgggggttggggtttctgccacttccgggtctaggccctgccccaaatccagccagtcctgccccagcccacccccacattggagccctcctgctgctttggtgcctcaaataaatacagatgtcccccagct

SEQ ID NO: 7435 - protein, 101 aa, Homo sapiens
MKIFLPVLLAALLGVERASSLMCFSCLNQKSNLYCLKPTICSDQDNYCVTVSASAGIGNLVTFGHSLSKTCSPACPPPAPPPAPAPASAPSGASCPHFWGG

SEQ ID NO: 7436 - DNA, 800 bp, Homo sapiens
agatcttcttgccagtgctgctggctgcccttctgggtgtggagcgaggtgagctgctgccagagctttctgtgcaatttcagtgcggccgatggcgggctgcgggcaagcgtcaccctgctgggtgccgggctgctgctgagcctgctgccggccctgctgcggtttggcccctgaccgcccagaccctgtcccccgatcccccagctcaggaaggaaagcccagccctttctggatcccacagtgtatgggagcccctgactcctcacgtgcctgatctgtgcccttggtcccaggtcaggcccaccccctgcacctccacctgccccagcccctgcctctgccccaagtggggccagctgccctcacttctggggtggatgatgtgaccttccttgggggaccgcggaagggacgagggttccctggagtcttacggtccaacatcaggaccaagtcccatggacatgctgacagggtccccagggagaccgtgtcagtagggatgtgtgcctggctgtgtacgtgggtgtgcagtgcacgtgagagcacgtggcggcttctgggggccatgtttggggagggaggtgtgccagcagcctggagagcctcagtccctgtagccccctgccctggcacagctgcatgcacttcaagggcagcctttgggggttggggtttctgccacttccgggtctaggccctgccccaaatccagccagtcctgccccagcccacccccacattggagccctcctgctgctttggtgcctcaaataaatacagatgtcccccagct

SEQ ID NO: 7437 - protein, 64 aa, Homo sapiens
MCAWLCTWVCSARESTWRLLGAMFGEGGVPAAWRASVPVAPCPGTAACTSRAAFGGWGFCHFRV

SEQ ID NO: 7438 - DNA, 1188 bp, Homo sapiens
agatcttcttgccagtgctgctggctgcccttctgggtgtggagcgaggtgagctgctgccagagctttctgtgcaatttcagtgcggccgatggcgggctgcgggcaagcgtcaccctgctgggtgccgggctgctgctgagcctgctgccggccctgctgcggtttggcccctgaccgcccagaccctgtcccccgatcccccagctcaggaaggaaagcccagccctttctggatcccacagtgtatgggagcccctgactcctcacgtgcctgatctgtgcccttggtcccaggtcaggcccaccccctgcacctccacctgccccagcccctgcctctgccccaagtggggccagctgccctcacttctggggtggatgatgtgaccttccttgggggaccgcggaagggacgagggttccctggagtcttacggtccaacatcaggaccaagtcccatggacatgctgacagggtccccagggagaccgtgtcagtagggatgtgtgcctggctgtgtacgtgggtgtgcagtgcacgtgagagcacgtggcggcttctgggggccatgtttggggagggaggtgtgccagcagcctggagagcctcagtccctgtagccccctgccctggcacagctgcatgcacttcaagggcagcctttgggggttggggtttctgccacttccgggtctaggccctgccccaaatccagccagtcctgccccagcccacccccacattggagccctcctgctgctttggtgcctcaaataaatacagatgtcccccagcttcctgctctgagtgtggctgccccttgcggggagaggcagagcaccccaggtttggagggtcctggggtcttctgtggtatggcccaggggggtggtgggggaggaggagtcgtcccctgagccacagccagctgcttgcctgacctcagagggagcccctccccagtgctctgccctttcttctgccccaggttcagcaggtcaagtgagttcctcctcccacagcggaaggaggtgttggggggcatggaggaaagaaagcgggtgcaagaaggagcacgctcaggctggggcagcacccagggccgtaggacttgggaatggagggtgtctgtctggacccgctggtgcagagggtacaaaagctgggctggggcaggacagacg

SEQ ID NO: 7439 - protein, 64 aa, Homo sapiens; identical to SEQ ID NO: 7437

SEQ ID NO: 7440 - DNA, 419 bp, Homo sapiens
gggaatctcgtgacatttggccacagcctgagcaagacctgttccccggcctgccccatcccagaaggcgtcaatgttggtgtggcttccatgggcatcagctgctgccagagctttctgtgcaatttcagtgcggccgatggcgggctgcgggcaagcgtcaccctgctgggtgccgggctgctgctgagcctgctgccggccctgctgcggtttggcccctgaccgcccagaccctgtcccccgatcccccagctcaggaaggaaagcccagccctttctggatcccacagtgtatgggagcccctgactcctcacgtgcctgatctgtgcccttggtcccaggtcaggcccaccccccccacattggagccctcctgctgctttggtgcctcaaataaatacagatgtcccccagc

SEQ ID NO: 7441 - protein, 44 aa, Homo sapiens
MGISCCQSFLCNFSAADGGLRASVTLLGAGLLLSLLPALLRFGP

SEQ ID NO: 7442 - DNA, 470 bp, Homo sapiens
gggaatctcgtgacatttggccacagcctgagcaagacctgttccccggcctgccccatcccagaaggcgtcaatgttggtgtggcttccatgggcatcagctgctgccagagctttctgtgcaatttcagtgcggccgatggcgggctgcgggcaagcgtcaccctgctgggtgccgggctgctgctgagcctgctgccggccctgctgcggtttggcccctgaccgcccagaccctgtcccccgatcccccagccccacattggagccctcctgctgctttggtgcctcaaataaatacagatgtcccccagcttcctgctctgagtgtggctgccccttgcggggagaggcagagcaccccaggtttggagggtcctggggtcttctgtggtatggcccaggggggtggtgggggaggaggagtcgtcccctgagccacagccagctgcttgcctgacctcagaggg

SEQ ID NO: 7443 - protein, 44 aa, Homo sapiens; identical to SEQ ID NO: 7441

SEQ ID NO: 7444 - DNA, 962 bp, Homo sapiens
ggggtttctgccacttccgggtctaggccctgccccaaatccagccagtcctgccccagcccacccccacattggagccctcctgctgctttggtgcctcaaataaatacagatgtcccccagcttcctgctctgagtgtggctgccccttgcggggagaggcagagcaccccaggtttggagggtcctggggtcttctgtggtatggcccaggggggtggtgggggaggaggagtcgtcccctgagccacagccagctgcttgcctgacctcagagggagcccctccccagtgctctgccctttcttctgccccaggttcagcaggtcaagtgagttcctcctcccacagcggaaggaggtgttggggggcatggaggaaagaaagcgggtgcaagaaggagcacgctcaggctggggcagcacccagggccgtaggacttgggaatggagggtgtctgtctggacccgctggtgcagagggtacaaaagctgggctggggcaggacagacgggccggagtgtagtgagtggcctgtgggaggggcagggggctcccacgcagaagctctgggcagcagccctgacccatccgtgcctggactgcagtgctgcccgcttccccctggcaaacaggtggcagcctcctgacagaggaagccggcccaggccgccgtgtctgcagttgggtgctgtgcgctgcccagagggctctttgggctggagagagaaaacaagaacagacacccagtggaggtggctttgctggagggacagacagttgatcatagtggagctggtgagaggaagctgcacccaaaagccatggccgggaacctggatctgactgcagggaaacagaagcgtggtgggcgctgggcgatgatggaatttctaacaaatgctttgtttctgctaaagctaacttgcgcttccatctctggcatctcctccacttcccag

SEQ ID NO: 7445 - protein, 157 aa, Homo sapiens
MEERKRVQEGARSGWGSTQGRRTWEWRVSVWTRWCRGYKSWAGAGQTGRSVVSGLWEGQGAPTQKLWAAALTHPCLDCSAARFPLANRWQPPDRGSRPRPPCLQLGAVRCPEGSLGWREKTRTDTQWRWLCWRDRQLIIVELVRGSCTQKPWPGTWI

SEQ ID NO: 7446 - DNA, 1060 bp, Homo sapiens
attacaaggcggaagtcctgcccgagaggacagtccccaggccttgctaagcatgcgtggtatcaagaggtgcattgaggcgctcctgcagcctcctcccggcacgggactcctcacaacccccagcctcagcttccctgacagggcaggggctcactcttctccactccgggccaggaacgcagcctgcttgccttttgtccaattgggtgctctttctttgcgactgatacaaagtgggaacaaactccgcttccggtgatgcccgggccccaggaggctgggggagaagtgcacgctgcccagccttcaacctgaactgcccccagcacttccgagccccgacccctgcagctgtgagggcccaggggctgctggctgccaggaccaccgcattgcagaggtctcccttgcagcaagagatctgggagtccacaacggcacttaacctgccctctgccctggcaccccagggactcactgccaaagacgctcactttctgggagacacagaccccatccaggaaggggcacgagaccacgctgcaggaggccccttccaagaccgccaagcatctgtagcagcgcagaccctgagctgggagagagggcaagaaaacacacccctggtggagatttaagatgctaatgacacatgcgacgtatgagcaagcaggtgcagctactgcacgtgtgcacccagaggacccccccagaacatgcttcctagcaacacctctgcccacccgctgattctctcggcaccacgggaaccaccttctctactctcactgaacacccctgggatgtatctgtaaaaattggaacacctttcggctagaaaccagaggaagccgctcatgacacccgggagctcacagaggctctgaagtttctattcaagaaaacaactccagatggggctgatctggaagacaagtaacatcttccttttcttggtgctcgcctgccgtgctctaggtgcttttagagatgctggtctgtgtgctagggaagcgatgaaccatactgttagtctattaaacataactcaacctgg

SEQ ID NO: 7447 - protein, 32 aa, Homo sapiens
MLPSNTSAHPLILSAPREPPSLLSLNTPGMYL

SEQ ID NO: 7448 - DNA, 578 bp, Homo sapiens
atgcgtggtatcaagaggtgcattgaggcgctcctgcagcctcctcccggcacgggactcctcacaacccccagcctcagcttccctgacagggcaggggctcactcttctccactccgggccaggaacgcagcctgcttgccttttgtccaattgggtgctctttctttgcgactgatacaaagtgggaacaaactccgcttccggtgatgcccgggccccaggaggctgggggagaagtgcacgctgcccagccttcaacctgaactgcccccagcacttccgagccccgacccctgcagctgtgaggggagaccagtctaacccctgacacggggcatcatgggagccctagccagggcacagaaatgacaggcctggcccacaccacaggatggctggtggccgcaggagctctgcctcttggtgaccatccagaggctctctgacaaccctactcagatgttccctggagccacatggcaagagttctgccagaagagccatgagcctggcactctgtgggttctggtccctgggggggcacccgtgccccaggagcacctccccaaggccat

SEQ ID NO: 7449 - protein, 69 aa, Homo sapiens
MRGIKRCIEALLQPPPGTGLLTTPSLSFPDRAGAHSSPLRARNAACLPFVQLGALSLRLIQSGNKLRFR

SEQ ID NO: 7450 - DNA, 595 bp, Homo sapiens
atgcgtggtatcaagaggtgcattgaggcgctcctgcagcctcctcccggcacgggactcctcacaacccccagcctcagcttccctgacagggcaggggctcactcttctccactccgggccaggaacgcagcctgcttgccttttgtccaattgggtgctctttctttgcgactgatacaaagtgggaacaaactccgcttccggtgatgcccgggccccaggaggctgggggagaagtgcacgctgcccagccttcaacctgaactgcccccagcacttccgagccccgacccctgcagctgtgagggaagccccgacctctgccctggccacatccttcccctgatctcatggctgaaaagccacaccagaattcctgcaattcagtgaggcagctcttcaaaaccaagcagctggtgacgcacagggacagagggtaggcctgcgggggagagggcgggaaaggccctcacagcagggcccagaggaagactgaccccaggctgagcaggagctgtacgcacagggcccaggggctgctggctgccaggaccaccgcattgcagaggtctcccttgcagcaagagatctg

SEQ ID NO: 7451 - protein, 69 aa, Homo sapiens; identical to SEQ ID NO: 7449

SEQ ID NO: 7452 - DNA, 1214 bp, Homo sapiens
atgcgtggtatcaagaggtgcattgaggcgctcctgcagcctcctcccggcacgggactcctcacaacccccagcctcagcttccctgacagggcaggggctcactcttctccactccgggccaggaacgcagcctgcttgccttttgtccaattgggtgctctttctttgcgactgatacaaagtgggaacaaactccgcttccggtgatgcccgggccccaggaggctgggggagaagtgcacgctgcccagccttcaacctgaactgcccccagcacttccgagccccgacccctgcagctgtgagggaagccccgacctctgccctggccacatccttcccctgatctcatggctgaaaagccacaccagaattcctgcaattcagtgaggcagctcttcaaaaccaagcagctggtgacgcacagggacagagggagctgtacgcacagggcccaggggctgctggctgccaggaccaccgcattgcagaggtctcccttgcagcaagagatctgggagtccacaacggcacttgttcttccaggcaggtaactcactgaatgctcacagcctgcgcctctcctgcatggagctgaacctgccctctgccctggcaccccagggactcactgccaaagacgctcactttctgggagacacagaccccatccaggaaggggcacgagaccacgctgcaggaggccccttccaagaccgccaagcatctgtagcagcgcagaccctgagctgggagagagggcaagaaaacacacccctggtggagatttaagatgctaatgacacatgcgacgtatgagcaagcaggtgcagctactgcacgtgtgcacccagaggacccccccagaacatgcttcctagcaacacctctgcccacccgctgattctctcggcaccacgggaaccaccttctctactctcactgaacacccctgggatgtatctgtaaaaattggaacacctttcggctagaaaccagaggaagccgctcatgacacccgggagctcacagaggctctgaagtttctattcaagaaaacaactccagatggggctgatctggaagacaagtaacatcttccttttcttggtgctcgcctgccgtgctctaggtgcttttagagatgctggtctgtgtgctagggaagcgatgaaccatactgttagtctattaaacataactcaacctgg

SEQ ID NO: 7453 - protein, 67 aa, Homo sapiens
MELNLPSALAPQGLTAKDAHFLGDTDPIQEGARDHAAGGPFQDRQASVAAQTLSWERGQENTPLVEI

SEQ ID NO: 7454 - DNA, 1875 bp, Homo sapiens
tgcgtggtatcaagaggtgcattgaggcgctcctgcagcctcctcccggcacgggactcctcacaacccccagcctcagcttccctgacagggcaggggctcactcttctccactccgggccaggaacgcagcctgcttgccttttgtccaattgggtgctctttctttgcgactgatacaaagtgggaacaaactccgcttccggtgatgcccgggccccaggaggctgggggagaagtgcacgctgcccagccttcaacctgaactgcccccagcacttccgagccccgacccctgcagctgtgagggaagccccgacctctgccctggccacatccttcccctgatctcatggctgaaaagccacaccagaattcctgcaattcagtgaggcagctcttcaaaaccaagcagctggtgacgcacagggacagagggagctgtacgcacagggcccaggggctgctggctgccaggaccaccgcattgcagaggtctcccttgcagcaagagatctgggagtccacaacggcacttaacctgccctctgccctggcaccccagggactcactgccaaagacgctcactttctgggagacacagaccccatccaggaaggggcacgagaccacgctgcaggaggccccttccaagaccgccaagcatctgtagcagcgcagaccctgagctgggagagagggcaaggattctctcggcaccacgggaaccaccttctctactctcactgaacacccctgggatgtatctgtaaaaattggaacacctttcggctagaaaccagaggaagccgctcatgacacccgggagctcacagaggctctgaagtttctattcaagaaaacaactccagatggggctgatctggaagacaagtaacatcttccttttcttggtgctcgcctgccgtgctctaggtgcttttagagatgctggtctgtgtgctagggaagcgatgaaccatactgttagtctattaaacataactcaacctggctggctttccatgactaccaaacgctgggaatatgccagacctgtgcccgtggaagactctggcctcccagcacacctccaggaacaaactccctggcccgcaggatagggatagcagccccaaccgtcaatacaaagggattttactgagtgggctcatgggttctttaagttccccctcttaacgatcaacggtaattcaaacgtcccaaaaggagaaatgctttcttagcatatcttttacctggagtatttccccttctgcctttacagcaatcatgccagttctaccacttttgcaagaaagctccaagagagtcagtgtagctgaaactttgtcactgggtcacctatctagtccatatgtctgcaggaattatactgataaatggacaactcaccatgcaatcaatctcccgctctatcctgttccctgaccggcatggtttctacttcctgtcagcacaactaggacgtctggtttctgctgggctgccctctcatgggaagcctttaatcactctagctcaatatatcctctggggaccatcaacatttcctattaaagataactacacctggccgagcgcggtggctaacgcctgtaatcccagaactttgggaagccaaggcgggtggatcacaaagtcgggagatcaagaccatcctggctaacacagtgaaacccctcctctactaaaaatacaaaaaattagccaggcgtggtggtgggtgcctgtaatcccagctacttgggaggctgaggcaagagaatggcgaacctaggaggcagagtttgcagtgagctgagatggtgccactgcactccagcctgggggacagagctacactccatccc

SEQ ID NO: 7455 - protein, 132 aa, Homo sapiens; identical to SEQ ID NO: 1072

SEQ ID NO: 7456 - DNA, 786 bp, Homo sapiens
tgcagcctcctcccggcacgggactcctcacaacccccagcctcagcttccctgacagggcaggggctcactcttctccactccgggccaggaacgcagcctgcttgccttttgtccaattgggtgctctttctttgcgactgatacaaagtgggaacaaactccgcttccggtgatgcccgggccccaggaggctgggggagaagtgcacgctgcccagccttcaacctgaactgcccccagcacttccgagccccgacccctgcagctgtgagaaaacacacccctggtggagatttaagatgctaatgacacatgcgacgtatgagcaagcaggtgcagctactgcacgtgtgcacccagaggacccccccagaacatgcttcctagcaacacctctgcccacccgctgattctctcggcaccacgggaaccaccttctctactctcactgaacacccctgggatgtatctgtaaaaattggaacacctttcggctagaaatggaatcatgatatgttgcctggctggtcttgaactcctgagctcaagtgatcctcccacctcagcctctcaaagtactgggattacagtcatgagccactgtgtctggcacaagcaaatattaaaacaatgaaagtacaatggaatagaggtaggtaaatgaagttatgctgtgtaatgttctgaattgttcatgagtgtgggcggcaagccacccaggtgccgaggcaagagaccaagggcacaagctgttccagtataataaagaaaatatatagaata

SEQ ID NO: 7457 - protein, 32 aa, Homo sapiens; identical to SEQ ID NO: 7447

SEQ ID NO: 7458 - DNA, 2138 bp, Homo sapiens
aaacagggaccccggggacgacggctgtctcctcaaacagggaccacgaggatgatggctgtctcctcaaacaggaaccccggggacgatggctgtctcctcaaacagggaccccggggacgacggctgtctcctcaaacagggaccccggggacgacggctgtctcctcaaacagggaccccggggacgatggctgtctcctcaaacaggaatcccgaggacgacggctgtctcctcaaacaggagccctggggacaacggctgtctcctcgaacaggaaccccgaggatgatggctgtcttctcaaacaggagccccggggatgacggctgtctcctcaaacagggaccatgaggatgatggctgtcttctcaaacaggagccccgaggacgacggctgtctcctcaaacagggaccccgaggacgatggctgtcttctcaaacaggagccccggggacgacggctgtctcctcaaacaggagccccggggacgacggctgtctcctcaaacaggaaccccgaggacgacggctgtctcctcaaacagggaccccgaggatgatggctgtcttctcaaacaggagccccggggatgacggctgtctcctcaaacaggaaccccgaggatgacggctgtctcctcgaacaggagccccggggacgacggctgtctcctcgaacagggaccccgaggacgacagctgtctcctcaaacagggaccccaagaatgacggctgtctcctcaaacaggaaccccgaggacgacggctgtctcctcaaacaggaaccccggggacgacggctgtctcctcaaacaggaaccccgaggacgacggctgtctcctcaaacaggaaccccggggacgacggctgtctcctcaaacagggaccccgaggacgacggctgtctcctcaaacagggaccccggggacgacggctgtctcctcaaacagggaccccggggacgacggctgtctcctcaaacaggaaccccgaggacgacggctgtctcctcaaacaggaaccccggggatgacggctgtctcctcaaacagggaccccggggacgacggctgtctcctcaaacagggaccacgaggacgacggctgtctcctcaaacaggaatcccgaggacgacggctgtctcctcaaacagggaccccggggacgacggctgtctcctcaaacaggaaccccgaggacgacggctgtctcctcaaacaggaatcccgaggacgacgactgtctcctcaaacagggaccccggggacgacggctgtctcctcaaacagggaccccgaggacgacggctgtctcctcaaacaggaaccccgaggacgacggctgtctcctcaaacaggaaccccgaggacgacggctgtctcctcaaacagggaccacgaggacgacggctgtctcctcaaacaggaatcccgaggacgacggctgtctcctcaaacagggaccccggggaggacggctgtctcctcaaacaggaatcccgaggacgacggctgtctcctcaaacagggaccacgaggacgacggctgtctcctcaaagaggaatcccgaggacgacggctgtctcctcaaacaggaaccccgaggacgacggctgtcttctctaacaggagccccggggacgacggctgtctcctcaaacaggaaccccggggacgacggctgtctcctcaaacagggaccccgaggacgacggctgtctcctcaaacaggaacccccagaatgacggctgtcttctcaaacaggaacttcggaagccagaagcagacactgccctctgaccacagctgccaggagaacgtttgagacctcttcttgggtgctttaagctgacatgtccaccatcaagtcttctcactgtggggacagcttccccaacatccatgctgccgggtcttccgccagccatgccgcctcctgagtctgtattccatgccgggtcttccgccagccatgccgcctcctgagtctgtattccatgccgggtcttccgccagccatgccgcctcctgagtctatattccaccctttattccatcacatgtaaaaacaagtgaccttcctttccccaccacacgtaaaaacaagtgaccttcctttccccaccac

SEQ ID NO: 7459 - protein, 404 aa, Homo sapiens
MTAVSSNRNPEDDGCLLEQEPRGRRLSPRTGTPRTTAVSSNRDPKNDGCLLKQEPRGRRLSPQTGTPGTTAVSSNRNPEDDGCLLKQEPRGRRLSPQTGTPRTTAVSSNRDPGDDGCLLKQGPRGRRLSPQTGTPRTTAVSSNRNPGDDGCLLKQGPRGRRLSPQTGTTRTTAVSSNRNPEDDGCLLKQGPRGRRLSPQTGTPRTTAVSSNRNPEDDDCLLKQGPRGRRLSPQTGTPRTTAVSSNRNPEDDGCLLKQEPRGRRLSPQTGTTRTTAVSSNRNPEDDGCLLKQGPRGGRLSPQTGIPRTTAVSSNRDHEDDGCLLKEESRGRRLSPQTGTPRTTAVFSNRSPGDDGCLLKQEPRGRRLSPQTGTPRTTAVSSNRNPQNDGCLLKQELRKPEADTAL

SEQ ID NO: 7460 - DNA, 1630 bp, Homo sapiens
gtctcctcgaacaggaaccccgaggatgatggctgtcttctcaaacaggagccccggggatgacggctgtctcctcaaacagggaccatgaggatgatggctgtcttctcaaacaggagccccgaggacgacggctgtctcctcaaacagggaccccgaggacgatggctgtcttctcaaacaggagccccggggacgacggctgtctcctcaaacaggagccccggggacgacggctgtctcctcaaacaggaaccccgaggacgacggctgtctcctcaaacagggaccccgaggatgatggctgtcttctcaaacaggagccccggggatgacggctgtctcctcaaacaggaaccccgaggatgacggctgtctcctcgaacaggagccccggggacgacggctgtctcctcgaacagggaccccgaggacgacagctgtctcctcaaacagggaccccaagaatgacggctgtctcctcaaacaggaaccccgaggacgacggctgtctcctcaaacaggaaccccggggacgacggctgtctcctcaaacaggaaccccgaggacgacggctgtctcctcaaacaggaaccccggggacgacggctgtctcctcaaacagggaccccgaggacgacggctgtctcctcaaacagggaccccggggacgacggctgtctcctcaaacagggaccccggggacgacggctgtctcctcaaacaggaaccccgaggacgacggctgtctcctcaaacaggaaccccggggatgacggctgtctcctcaaacagggaccccggggacgacggctgtctcctcaaacagggaccacgaggacgacggctgtctcctcaaacaggaatcccgaggacgacggctgtctcctcaaacagggaccccggggacgacggctgtctcctcaaacaggaaccccgaggacgacggctgtctcctcaaacaggaatcccgaggacgacgactgtctcctcaaacagggaccccggggacgacggctgtctcctcaaacagggaccccgaggacgacggctgtctcctcaaacaggaaccccgaggacgacggctgtctcctcaaacaggaaccccgaggacgacggctgtctcctcaaacagggaccacgaggacgacggctgtctcctcaaacaggaatcccgaggacgacggctgtctcctcaaacagggaccccggggaggacggctgtctcctcaaacaggaatcccgaggacgacggctgtctcctcaaacagggaccacgaggacgacggctgtctcctcaaagaggaatcccgaggacgacggctgtctcctcaaacaggaaccccgaggacgacggctgtcttctctaacaggagccccggggacgacggctgtctcctcaaacaggaaccccggggacgacggctgtctcctcaaacagggaccccgaggacgacggctgtctcctcaaacaggaacccccagaatgacggctgtcttctcaaacaggaacttcggaagccagaagcagacactgctgacatgtccaccatcaagtcttctcactgtggggacagcttccccaacatccatgctgccgggtcttccgccagccatgccgcctcctga

SEQ ID NO: 7461 - protein, 432 aa, Homo sapiens
MTAVSSNRNPEDDGCLLEQEPRGRRLSPRTGTPRTTAVSSNRDPKNDGCLLKQEPRGRRLSPQTGTPGTTAVSSNRNPEDDGCLLKQEPRGRRLSPQTGTPRTTAVSSNRDPGDDGCLLKQGPRGRRLSPQTGTPRTTAVSSNRNPGDDGCLLKQGPRGRRLSPQTGTTRTTAVSSNRNPEDDGCLLKQGPRGRRLSPQTGTPRTTAVSSNRNPEDDDCLLKQGPRGRRLSPQTGTPRTTAVSSNRNPEDDGCLLKQEPRGRRLSPQTGTTRTTAVSSNRNPEDDGCLLKQGPRGGRLSPQTGIPRTTAVSSNRDHEDDGCLLKEESRGRRLSPQTGTPRTTAVFSNRSPGDDGCLLKQEPRGRRLSPQTGTPRTTAVSSNRNPQNDGCLLKQELRKPEADTADMSTIKSSHCGDSFPNIHAAGSSASHAAS

SEQ ID NO: 7462 - DNA, 890 bp, Homo sapiens
atggtgggtgcaaatctgaaggaactgccagtcttggggggcccctttctcgcagtggagctgaatggtgctgagggcggggaccccggggacgacggctgtctcctcaaacagggaccccggggacgacggctgtctcctcaaacagggaccacgaggatgatggctgtctcctcaaacaggaaccccggggacgatggctgtctcctcaaacagggaccccggggacgacggctgtctcctcaaacagggaccccggggacgacggctgtctcctcaaacagggaccccggggacgatggctgtctcctcaaacaggaatcccgaggacgacggctgtctcctcaaacaggagccctggggacaacggctgtctcctcgaacaggaaccccgaggatgatggctgtcttctcaaacaggagccccggggatgacggctgtctcctcaaacagggaccatgaggatgatggctgtcttctcaaacaggagccccgaggacgacggctgtctcctcaaacagggaccccgaggacgatggctgtcttctcaaacaggagccccggggacgacggctgtctcctcaaacaggagccccggggacgacggctgtctcctcaaacaggaaccccgaggacgacggctgtctcctcaaacagggaccccgaggatgatggctgtcttctcaaacaggagccccggggatgacggctgtctcctcaaacaggaaccccgaggatgacggctgtctcctcgaacaggagccccggggacgacggctgtctcctcgaacagggaccccgaggacgacagctgtctcctcaaacagggaccccaagaatgacggctgtctcctcaaacaggaaccccgaggacgacggctgtctcctc

SEQ ID NO: 7463 - protein, 144 aa, Homo sapiens
MVGANLKELPVLGGPFLAVELNGAEGGDPGDDGCLLKQGPRGRRLSPQTGTTRMMAVSSNRNPGDDGCLLKQGPRGRRLSPQTGTPGTTAVSSNRDPGDDGCLLKQESRGRRLSPQTGALGTTAVSSNRNPEDDGCLLKQEPRG

SEQ ID NO: 7464 - DNA, 267 bp, Homo sapiens; identical to SEQ ID NO: 1073

SEQ ID NO: 7465 - protein, 88 aa, Homo sapiens; identical to SEQ ID NO: 1074

SEQ ID NO: 7466 - DNA, 2407 bp, Homo sapiens
ctccctccctcttcccccttcccctctccctgcagccgcgtccacactgcgccgcccgggcagcccagagcgcggcgcgcacgggcaccggcggcgagtgccgcggccactgcccctcccgggaccccctgtacgccgtccgcgccgtccagggtcacaccggcgacggaacccgccggcagcaattagccagcatcccggggtcggcccccagaagcattccccggcccaggacgaggatgaacaggacaggcgaggcacaaagtcgcaactgaactttttagaaacattatttgtgtgtgtatgtgtgtagcaggggagaatgagctgatgccgagggtccagccaccccgcctctgcctcctcctccccctgccgccgctgccctcgcagacgcgcgcgcacacacggcacttgggccgggtttccgcgctccgtccccccgtttggatgggggttttcatttccgaaggaggcacagcccgcggagcgctctgaagggctggagccccaagttactcctcgccagcgccggccgcccgctgtcactcgcgctggccggccgggggaagggacccgcacgccgggctttgttgtggaaatcccggttacctggtcccttatttcgcgtgagtctttggcgtccacgaccttgagtctgacggaaagtcagtcggcctcaagccatgctggccacaggacccagtgcagccctgcttcccgcaccgtgggtctttcctgatagctgcaggcttgagattgcagcctcaggataggacacgttcagatgccttccagactacacacactatgcttagattcgagagtctttcctgaccttaaaatttgtcccttgcttactttcacactgcagaagatttatatatatattcatcattatttttgcagcagtacaagtggaaacttcaaaaaaatcattccctttcatgtcctggtctttttaagtcttgatatgtaaccattttcataaatgtccaaacagagattgtcattccccttaaaaacagaaacaaaacacaaaactagtgcttgtgaaaacacacagcgcaaagacaattatcctattgcattaaaaaaaaaatcagtctgcctagagacatttcattggctgcattgtcttaattccctaacgaaactgcatcaaaatgtcagttgtaatttagcctctgatcagctgttaaatattatttaaatatttacaggtcctgtggggtatctcccattacccatgtcgccctcaaattacataagcgatcataaaataagaagaaaaaaaaaggtctttagtagatcacagcagagttaccactgataagagtgttggctttgttcagttgtttctaaattaccagccgtcaagcacagtagcccctaaaaccaattttgagcaaggataaattcaactccctcatctgagaaccttgactttccagttgccttgaagtattgggaatagtaactgtacattttcaatttaattatttggtattttatttgactgtcttggccatgtcattttatggaagcatttttaaatagcactttttgttagtggtgtggaatttctgcggttattatttttttttttttttgcaacagatgaagcaaaaaaaaaaaagcactcattggagaaatagtgagtgtaaaaagagatttattttgtacagacagcaaagtatcctgtgtaatgttgctgacataaagcactttgggggaaaaaagtggaaatctgttttccataaatcacacagactcttgtacatagttatatacactcacgtagagaaatgaactgcatatatcatactggatatggggccgattttactctagaggcacatctggtgcttattgtcataaatcttttaaagaattaggtacacttttttctattaatatgtatagttttgtgatttgtcacagttatgtttcatataatcataagttattttgtcttgttcatgaagtcctttttttatgtcaaaagtaaaatgaagggattgtgcacttggtacagaataaaactggaaatagagaagacgccctcctgcctaaaatcctccttcagcctgtcggtttaaaacacaatggcaaccatcattgtttgtttgtttgtttttttgttttgttttaccatcagcctcttacatactgggaatggtaattataattaaaggcagatgatgcgggagggaatgttcaagtccagctttaaaatgctgcattgctttgggccagagctgtagcctggatttaattatagatatgaggaggaaatggcagtaaaaatgaatgtctccctgagtcctttacatgttgggagtgtccataaataaaacatgaagttttatttcatcagatttaattaaagcttttatacatgttt

SEQ ID NO: 7467 - protein, 73 aa, Homo sapiens [sequence omitted]

SEQ ID NO: 7468 - DNA, 847 bp, Homo sapiens
ctccctccctcttcccccttcccctctccctgcagccgcgtccacactgcgccgcccgggcagcccagagcgcggcgcgcacgggcaccggcggcgagtgccgcggccactgcccctcccgggaccccctgtacgccgtccgcgccgtccagggtcacaccggcgacggaacccgccggcagcaattagccagcatcccggggtcggcccccagaagcattccccggcccaggacgaggatgaacaggacaggcgaggcacaaagtcgcaactgaactttttagaaacattatttgtgtgtgtatgtgtgtagcaggggagaatgagctgatgccgagggtccagccaccccgcctctgcctcctcctccccctgccgccgctgccctcgcagacgcgcgcgcacacacggcacttgggccgggtttccgcgctccgtccccccgtttggatgggggttttcatttccgaaggaggcacagcccgcggagcgctctgaagggctggagccccaagttactcctcgccagcgccggccgcccgctgtcactcgcgctggccggccgggggaagggacccgcacgccgggctttgttgtggaaatcccggttacctggtcccttatttcgcgtgagtctttggcgtccacgaccttgagtctgacggaaagtcagtcggcctcaagcatgaagcaggagtggtcccagggctacagggccctcccttcgctctccaaccacggctctcagaatggccttgatctaggggatctccttagccttcctcccgggacatccatgtccagcaatagtgtctctaactcattaccatcctacctttttggcacg

SEQ ID NO: 7469 - protein, 64 aa, Homo sapiens
MCVAGENELMPRVQPPRLCLLLPLPPLPSQTRAHTRHLGRVSALRPPVWMGVFISEGGTARGAL

SEQ ID NO: 7470 - DNA, 4258 bp, Homo sapiens
attggccaagggcttcctggccccaacccacctcccgcctccagggcgccgcttaaagtgtgcggagcaggtgccttgggtggagccacaactttgcgcgagtgtcttggttgagcgcagcgcccattcattgcccgcgagcgtccatccatctgtccggccgactgtccagcgaaaggggctccaggccgggcgcagccgccacccgggggaccgaggccaggagaggggccaagagcgcggctgacccttgcgggccggggcaggggacggtggccgcggccatgcagtcctgtgccagggcgtgggggctgcgcctgggccgcggggtcgggggcggccgccgcctggctgggggatcggggccgtgctgggcgccgcggagccgggacagcagcagtggcggcggggacagcgccgcggctggggcctcgcgcctcctggagcgccttctgcccagacacgacgacttcgctcggaggcacatcggccctggggacaaagaccagagagagatgctgcagaccttggggctggcgagcattgatgaattgatcgagaagacggtccctgccaacatccgtttgaaaagacccttgaaaatggaagaccctgtttgtgaaaatgaaatccttgcaactctgcatgccatttcaagcaaaaaccagatctggagatcgtatattggcatgggctattataactgctcagtgccacagacgattttgcggaacttactggagaactcaggatggatcacccagtatactccataccagcctgaggtgtctcaggggaggctggagagtttactcaactaccagaccatggtgtgtgacatcacaggcctggacatggccaatgcatccctgctggatgaggggactgcagccgcagaggcactgcagctgtgctacagacacaacaagaggaggaaatttctcgttgatccccgttgccacccacagacaatagctgttgtccagactcgagccaaatatactggagtcctcactgagctgaagttaccctgtgaaatggacttcagtggaaaagatgtcagtggagtgttgttccagtacccagacacggaggggaaggtggaagactttacggaactcgtggagagagctcatcagagtgggagcctggcctgctgtgctactgaccttttagctttgtgcatcttgaggccacctggagaatttggggtagacatcgccctgggcagctcccagagatttggagtgccactgggctatgggggaccccatgcagcattttttgctgtccgagaaagcttggtgagaatgatgcctggaagaatggtgggggtaacaagagatgccactgggaaagaagtgtatcgtcttgctcttcaaaccagggagcaacacattcggagagacaaggctaccagcaacatctgtacagctcaggccctcttggcgaatatggctgccatgtttgcaatctaccatggttcccatgggctggagcatattgctaggagggtacataatgccactttgattttgtcagaaggtctcaagcgagcagggcatcaactccagcatgacctgttctttgataccttgaagattcagtgtggctgctcagtgaaggaggtcttgggcagggccgctcagcggcagatcaattttcggctttttgaggatggcacacttggtatttctcttgatgaaacagtcaatgaaaaagatctggacgatttgttgtggatctttggttgtgagtcatctgcagaactggttgctgaaagcatgggagaggagtgcagaggtattccagggtctgtgttcaagaggaccagcccgttcctcacccatcaagtgttcaacagctaccactctgaaacaaacattgtccggtacatgaagaaactggaaaataaagacatttcccttgttcacagcatgattccactgggatcctgcaccatgaaactgaacagttcgtctgaactcgcacctatcacatggaaagaatttgcaaacatccacccctttgtgcctctggatcaagctcaaggatatcagcagcttttccgagagcttgagaaggatttgtgtgaactcacaggttatgaccaggtctgtttccagccaaacagcggagcccagggagaatatgctggactggccactatccgagcctacttaaaccagaaaggagaggggcacagaacggtttgcctcattccgaaatcagcacatgggaccaacccagcaagtgcccacatggcaggcatgaagattcagcctgtggaggtggataaatatgggaatatcgatgcagttcacctcaaggccatggtggataagcacaaggagaacctagcagctatcatgattacatacccatccaccaatggggtgtttgaagagaacatcagtgacgtgtgtgacctcatccatcaacatggaggacaggtctacctagacggggcaaatatgaatgctcaggtgggaatctgtcgccctggagacttcgggtctgatgtctcgcacctaaatcttcacaagaccttctgcattccccacggaggaggtggtcctggcatggggcccatcggagtgaagaaacatctcgccccgtttttgcccaatcatcccgtcatttcactaaagcggaatgaggatgcctgtcctgtgggaaccgtcagtgcggccccatggggctccagttccatcttgcccatttcctgggcttatatcaagatgatgggaggcaagggtcttaaacaagccacggaaactgcgatattaaatgccaactacatggccaagcgattagaaacacactacagaattcttttcaggggtgcaagaggttatgtgggtcatgaatttattttggacacgagacccttcaaaaagtctgcaaatattgaggctgtggatgtggccaagagactccaggattatggatttcacgcccctaccatgtcctggcctgtggcagggaccctcatggtggagcccactgagtcggaggacaaggcagagctggacagattctgtgatgccatgatcagcattcggcaggaaattgctgacattgaggagggccgcatcgaccccagggtcaatccgctgaagatgtctccacactccctgacctgcgttacatcttcccactgggaccggccttattccagagaggtggcagcattcccactccccttcgtgaaaccagagaacaaattctggccaacgattgcccggattgatgacatatatggagatcagcacctggtttgtacctgcccacccatggaagtttatgagtctccattttctgaacaaaagagggcgtcttcttagtcctctgtccctaagtttaaaggactgatttgatgcctctccccagagcatttgataagcaagaaagatttcatctcccaccccagcctcaagtaggagttttatatactgtgtatatctctgtaatctctgtcaaggtaaatgtaaatacagtagctggagggagtcgaagctgatggttggaagacggatttgctttggtattctgcttccacatgtgccagttgcctggattgggagccattttgtgttttgcgtagaaagttttaggaactttaacttttaatgtggcaagtttgcagatgtcatagaggctatcctggagacttaatagacatttttttgttccaaaagagtccatgtggactgtgccatctgtgggaaatcccagggcaaatgtttacattttgtataccctgaagaactctttttcctctaatatgcctaatctgtaatcacatttctgagtgttctcctctttttctgtgtgaggtttttttttttttaatctgcatttattagtattctaataaaagcatcttgatcggaagaatgcctttctcttggtgtactttatagttttaccaccgttacaacctagattcagtgggagctgaagggcaatgagaacacccaacccaatagccattgttacatcatcagttttgccttcgactggctgaagaaacagttgtcttggtcaacagtgaaaaccactttgaccctttttgttggaactgagttagagtgcatgtaactgtactccagctatggaaggtcaatcaaatagcaatttatcttttctcatttaagtccagaggtaataagccaagcactggtgctccttcagttttcccgctctgccctcctttgcataaaattttcatccgcatggtctcaagaaggctgtt

SEQ ID NO: 7471 - protein, 1020 aa, Homo sapiens; identical to SEQ ID NO: 1076

SEQ ID NO: 7472 - DNA, 3898 bp, Homo sapiens
attggccaagggcttcctggccccaacccacctcccgcctccagggcgccgcttaaagtgtgcggagcaggtgccttgggtggagccacaactttgcgcgagtgtcttggttgagcgcagcgcccattcattgcccgcgagcgtccatccatctgtccggccgactgtccagcgaaaggggctccaggccgggcgcagccgccacccgggggaccgaggccaggagaggggccaagagcgcggctgacccttgcgggccggggcaggggacggtggccgcggccatgcagtcctgtgccagggcgtgggggctgcgcctgggccgcggggtcgggggcggccgccgcctggctgggggatcggggccgtgctgggcgccgcggagccgggacagcagcagtggcggcggggacagcgccgcggctggggcctcgcgcctcctggagcgccttctgcccagacacgacgacttcgctcggaggcacatcggccctggggacaaagaccagagagagatgctgcagaccttggggctggcgagcattgatgaattgatcgagaagacggtccctgccaacatccgtttgaaaagacccttgaaaatggaagaccctgtttgtgaaaatgaaatccttgcaactctgcatgccatttcaagcaaaaaccagatctggagatcgtatattggcatgggctattataactgctcagtgccacagacgattttgcggaacttactggagaactcaggatggatcacccagtatactccataccagcctgaggtgtctcaggggaggctggagagtttactcaactaccagaccatggtgtgtgacatcacaggcctggacatggccaatgcatccctgctggatgaggggactgcagccgcagaggcactgcagctgtgctacagacacaacaagaggaggaaatttctcgttgatccccgttgccacccacagacaatagctgttgtccagactcgagccaaatatactggagtcctcactgagctgaagttaccctgtgaaatggacttcagtggaaaagatgtcagtggagtgttgttccagtacccagacacggaggggaaggtggaagactttacggaactcgtggagagagctcatcagagtgggagcctggcctgctgtgctactgaccttttagctttgtgcatcttgaggccacctggagaatttggggtagacatcgccctgggcagctcccagagatttggagtgccactgggctatgggggaccccatgcagcattttttgctgtccgagaaagcttggtgagaatgatgcctggaagaatggtgggggtaacaagagatgccactgggaaagaagtgtatcgtcttgctcttcaaaccagggagcaacacattcggagagacaaggctaccagcaacatctgtacagctcaggccctcttggcgaatatggctgccatgtttgcaatctaccatggttcccatgggctggagcatattgctaggagggtacataatgccactttgattttgtcagaaggtctcaagcgagcagggcatcaactccagcatgacctgttctttgataccttgaagattcagtgtggctgctcagtgaaggaggtcttgggcagggccgctcagcggcagatcaattttcggctttttgaggatggcacacttggtatttctcttgatgaaacagtcaatgaaaaagatctggacgatttgttgtggatctttggttgtgagtcatctgcagaactggttgctgaaagcatgggagaggagtgcagaggtattccagggtctgtgttcaagaggaccagcccgttcctcacccatcaagtgttcaacagctaccactctgaaacaaacattgtccggtacatgaagaaactggaaaataaagacatttcccttgttcacagcatgattccactgggatcctgcaccatgaaactgaacagttcgtctgaactcgcacctatcacatggaaagaatttgcaaacatccacccctttgtgcctctggatcaagctcaaggatatcagcagcttttccgagagcttgagaaggatttgtgtgaactcacaggttatgaccaggtctgtttccagccaaacagcggagcccagggagaatatgctggactggccactatccgagcctacttaaaccagaaaggagaggggcacagaacggtttgcctcattccgaaatcagcacatgggaccaacccagcaagtgcccacatggcaggcatgaagattcagcctgtggaggtggataaatatgggaatatcgatgcagttcacctcaaggccatggtggataagcacaaggagaacctagcagctatcatgattacatacccatccaccaatggggtgtttgaagagaacatcagtgacgtgtgtgacctcatccatcaacatggaggacaggtctacctagacggggcaaatatgaatgctcaggtgggaatctgtcgccctggagacttcgggtctgatgtctcgcacctaaatcttcacaagaccttctgcattccccacggaggaggtggtcctggcatggggcccatcggagtgaagaaacatctcgccccgtttttgcccaatcatcccgtcatttcactaaagcggaatgaggatgcctgtcctgtgggaaccgtcagtgcggccccatggggctccagttccatcttgcccatttcctgggcttatatcaagatgatgggaggcaagggtcttaaacaagccacggaaactgcgatattaaatgccaactacatggccaagcgattagaaacacactacagaattcttttcaggggtgcaagaggttatgtgggtcatgaatttattttggacacgagacccttcaaaaagtctgcaaatattgaggctgtggatgtggccaagagactccaggattatggatttcacgcccctaccatgtcctggcctgtggcagggaccctcatggtggagcccactgagtcggaggacaaggcagagctggacagattctgtgatgccatgatcagcattcggcaggaaattgctgacattgaggagggccgcatcgaccccagggtcaatccgctgaagatgtctccacactccctgacctgcgttacatcttcccactgggaccggccttattccagagaggtggcagcattcccactccccttcgtgaaaccagagaacaaattctggccaacgattgcccggattgatgacatatatggagatcagcacctggtttgtacctgcccacccatggaagtttatgagtctccattttctgaacaaaagagggcgtcttcttagtcctctgtccctaagtttaaaggactgatttgatgcctctccccagagcatttgataagcaagaaagatttcatctcccaccccagcctcaagtaggagttttatatactgtgtatatctctgtaatctctgtcaaggtaaatgtaaatacagtagctggagggagtcgaagctgatggttggaagacggatttgctttggtattctgcttccacatgtgccagttgcctggattgggagccattttgtgttttgcgtagaaagttttaggaactttaacttttaatgtggcaagtttgcagatgtcatagaggctatcctggagacttaatagacatttttttgttccaaaagagtccatgtggactgtgccatctgtgggaaatcccagggcaaatgtttacattttgtataccctgaagaactctttttcctctaatatgcctaatctgtaatcacatttctgagtgttctcctctttttctgtgtgaggtttttttttttttaatctgcatttattagtattctaataaaagcatcttgatcggaag

SEQ ID NO: 7473 - protein, 1020 aa, Homo sapiens; identical to SEQ ID NO: 1076

SEQ ID NO: 7474 - DNA, 2401 bp, Homo sapiens
cggcgccgccagccagcctcggcggggagagtgcagtttattctgggcctgtgtggaatagaaagacaattctttatttgactggtaggaaagaaaagagaagactcctcagggtttccaaggaggactggagcggctgctttagtgaagaagtgaagaatcaaggaagtaaaggacctgtctcaaagtcacacaactaggaaatcttgaggagtctgatacttttcatcctccagctataaaatcatcttgtagggggaagctgtacattggtggaaaataaaaggcaagcagttcctggcccgtgatattccagttagaggtgtctgactgacagcatgttggcaccgagggaagcgatgggcttcggctccaggtttctgtcctgagaccacagcagaatgtgccttggacaaaggcttggactccttgatcttctggtaacttcaaaaatctggtctcagggtggtgaactttttcttcgaattcctaacctgtgagcttacgaaaaagggagcatgcctgtcttattctcagtgcctcatgggaaataaaagattgggagatgatagctacctgatgatggtgcctgtccattaactgaacaactgtggttttgaacttcttgaggccagggactgtgtctgaaaacaccgacggtggctaactcaagggagacgtctggtgaacacccgtgggatctaaagaacaagctctgaaagtgttccagctgaaatttcagatcggacagactcgctgcggctccggaggcagtgattccaagctgctcgcgcacgctgctgccaagctgcaggatggtgcacgtagccaggctgctgctgctgctcctcactttcttcctccgcacggatgctgagacacctccaaggtttacacgaacacccgttgatcagacaggggtctctggcggagttgcctctttcatctgccaagctacgggagacccaagacctaaaattgtctggaacaaaaaaggaaagaaagtcagcaatcagagatttgaggtaatagagtttgacgatgggtctggatcagttctcagaatacaacccttacggactccgagggatgaggccatttatgaatgtgtggcctcaaataatgtgggagaaataagtgtatccaccagactcacagttttgcgggaagatcaaattcccaggggcttccctaccattgacatgggcccacagttgaaggtggttgagcgtactcgcacggccaccatgctttgtgcagccagtggtaatccggatccagaaatcacttggtttaaagatttcttacctgtggacacaagcaacaacaatggtcgtattaagcagttacgatcaggtactgatttttctccctcttctctttctctgttacttaatgggtggtccatgtttgtgatgtcatagcctgtttcagagtctgtctttctccttttctctgtgtgttttgcagcttctgtttaatccacattgctcactgctgtgactgtatttttggtaattttttaatttactgctttttcgcagtatttgatggatccattttctcctctttctttcttctttctctgttttcttttgaaacaaatttatttcaacattggacttcattcagaacttgcaaggagatccaatggttgtatccattaaaaaataaaatgttcatattaaaccctaaaatgtttcaattttattaaagtatgttttctgctatcttttctacatttgaactcatcaaagtaccaaagtttagtaagtctgggcacatctgctttcttttcactaatacataaaaacacagaaacgttatctcatgagtaaccagatgtatgtttttaaaagtctttagaaaataccagtaaaaggaggggatttttattaatactatgataataacattgtgagtgaacattttctacacattagccacagtagtgtgcgcccgtcaaggtttttgaaccctccagtgactggatctacagaagtctgcttttggtgtagactccagcttttgctgttttctctctctctttacccttttctccttttcccattcccatcccaagtttatgcctttgctctcttagattaaaagtagagataattctaaatttcttaagttttagagcctgtccctaggtaatttcacagggatatataataataagctgtttactttgacattggtagtaatattggtatagaattctaagttgtttaactgcctgtcttcccagaattctcagcttttgacctgtcctgtgatgttaaagcgtcttgttaactgcctcttttgcttgttgtcagcagaattgtgtagattagcattctgttattgtaaatgaagaattaattattcacatgtaacatagatgatttagtat

SEQ ID NO: 7475 - protein, 202 aa, Homo sapiens
MVHVARLLLLLLTFFLRTDAETPPRFTRTPVDQTGVSGGVASFICQATGDPRPKIVWNKKGKKVSNQRFEVIEFDDGSGSVLRIQPLRTPRDEAIYECVASNNVGEISVSTRLTVLREDQIPRGFPTIDMGPQLKVVERTRTATMLCAASGNPDPEITWFKDFLPVDTSNNNGRIKQLRSGTDFSPSSLSLLLNGWSMFVMS

SEQ ID NO: 7476 - DNA, 2833 bp, Homo sapiens
cagatggggcgggaggaggggagacccggcacccaccggcccagagctgcctgacgcggcctgggcggaccccgccgcccgggtgcctaggcacgattccagggatccagggtaaagcggttcgcgcgggaacaggaggatatgtcaggcacaggctattccccatcactatagccacagaggactggtccagatgcggatcccgatctgtgcttcttcagatggttggataccaagaaagctgctcaggaaaccttacaacacaatggaaaaaacattggagctcctggttaagccttcagactccaggaggcacaccattgggctcctcaagttctcacccctttggtctcagactgaattataccaccaacttccctggttctccaccttgcagatggcagattgtggaacttcttggcctccatagttgcatgaagcaattctcatattaattcgccacttacatatctatacatattctcttgggtctgtttctctggagaaccctgacttatacatgaccttcatgtatagctaaataacaatgtattaatattttccacagaggtgtcatgtctctgtatattaaatgatccaaggccaggcgcggtggctcacgcctgtaatcccagcactttgggaggccaaggtgggcagaggaggtcaggagtttgagaccagcctggccaatatggtgaaacaccttctctactaaaaaaatgttagctgggcatggtggcgcacacctgtaatcccagccacttgagaggctgaggagggagaattgctagaacctgggagatggaagttgcagtgagccaagattatgccactgcactccagcctgggtgacagagcgtgacactgtctcaataaaaataaaaatatatgatacagattcatcaaaattataaaactacctcagtttttaaaaaacatgtttgtcactgttttatggtatctgattgcaaaattacaataatgatggctagtatttattagttgatgaaacacaaccataatttgtaaggtatagtaattcccatcaactttagaaactgaattagcaatcaaaactatatatatccattcttttaattatttttaaaagcctataataaggatgttaaaggtaaagctaagttttcaataataaccctaaaataactgcattatgcatatcctttggaaagaaagagagcaatgagggatggatttaaaatattctatctaccaagttattttatgcaaatagtttttaaaataacatcatataaattaacaaagatcagggcaagttccttaatcaaagtaaaatattaaatataattttaaagagaaaatttaatagttcctatgagttttttgcctattttgaccttaaaaattaataaacagttatcacattcaagatcttacctatacatatctacttaagacactgtaaattttgcttcttctgatactgagtaatgttgcattttcttttataaatgagacataaggatgatagcaaccacacatgcacactccagagattgttctaacttccctccaccccttcttttgaaacagggtcttgctctgttgcccagcctgtatcacaatctcagctcactgcaaccacctctcgaagtcaagcaattatcccacctcagcctcctaagaagctgggaccacaggcgagagccaccacacctggcttattgttttttgcatgtttagtagagatgaggtttcgccatgttgcccaggctggtcttgaactcctgagctcgagcgatctgccaccctctgcatcccaaagtgttaggattacaggtgtgagctgcatgcctggcctaactttttcaggtgtattaacactatgccatctaaattttgcatctaacaaaactcattttcagaaaacaggttgattggaggtcatggaacggttaaatattagagctgagacttgtatccaggcagtctggctcctgagtctctgtgcttaaccaatattcagtgttatacaaatcgttttcttaactctgtatgccttttctttcctaagttcagaggcttccgaaaaatttagctgaaagtgagaaattcctattcagtgaatggagactatagagtagagccggtgccaaaggataattgtgggaccgtctcagagaactaagtttcaatttttaaagtgggtcttttaatttatatttctatttgagtcattttgtattttatttattttcatatgaccaatcatcttgtgttccacatatctaatgatataatcaaaaattatatagaaaagagttaaacaaatttatgattttttctaactaaattatttacaagtctgttctattaccataatttactatatttgctaattttcccttttgtaaaattatttttatctattcacattttcttatttcctaccttcatctataaacaggagaaaaaaattatgtaaagccagtgcctctcttttataataaggggtcaactatttggaacctccataagatttcccccttttttagtgaaggacaatatgtttttcaggtacttactcccgacctttggtttatatgtaatgatattgtggcaggaaaaaaatatagtggcctttatatataccacaggctttatgtacattttaaatatttaaaattgtaaaatgttaaaaatgtaagtaaaaggaaaacaagatgacaaccatatcattatgagactattatttttagcattataaacttacagatgataagccaattatactatttctttttatggaacgatatgtaaagtaaataaaagtaacaagtatatacac

SEQ ID NO: 7477 - protein, 78 aa, Homo sapiens
MRIPICASSDGWIPRKLLRKPYNTMEKTLELLVKPSDSRRHTIGLLKFSPLWSQTELYHQLPWFSTLQMADCGTSWPP

SEQ ID NO: 7478 - DNA, 553 bp, Homo sapiens
agtgctccaggaggcagagaaaatgaaggaaaacagctttctacagctcttacccccacaacccccatctctctgtaacttaatttttcttctcaagtttcgaacaagtacagatagaacaacttgttttctaatctttttctctttttctcattcctcttctttctttattcttcttttcccccctctttttgtttccttttcctgactcttgaaaaccatggcaagtgcttattatttcagttgaatatgttaaaaattgttatcaagaagttgattttttgtgtataaaaatggtgaactaagatactgttaaaagagtggaataaatgaagaggagagacagaagaaccaaagatgggaaaaggactggaaaagaaaaagagactaaaaggaagaggctgaaaacttaaaaaattggatgaaaattatgaagatagtctgacatgatatattaagagctctgaatgatgcctagggatgtagaagaggagaaaaacacttgaggaagagagaccaaagagaattctactttgaccctggcttaagagtg

SEQ ID NO: 7479 - protein, 61 aa, Homo sapiens
MKENSFLQLLPPQPPSLCNLIFLLKFRTSTDRTTCFLIFFSFSHSSSFFILLFPPLFVSFS

SEQ ID NO: 7480 - DNA, 2331 bp, Homo sapiens
ctgttcctctaagggaagagagaccaaagagaattctactttgaccctggcttaagagtggaacatagatgtctataaaactatgtggtaccagcatgttatgaagaataagcaagaagaaagagaaggagaagaagcaggaggaggaggagagaaggaaagggaggaggaggaggagaaaaagatggtggtagaggaggaggagaagaagaagaaggaggagaaggagaaggagaagaaggagcaggaggaggaggaagaagaagaagaggagaagggaactcacatgctacctgtgtgagtcacatgtcagtgcaatttctggaggtcaattgtagccctgaagtctcagaacaatggcaaaaagaaatacggagggcatgatacatttggcagactaaaattctcaagattcctatgcagtcgagttttaccatatgactgagttccaacaaagaaatatgagtagaagattgtataagcatcatttttgacccagggctttaagaagcagactatggaaatgatgttagacaaaaagcaaatttgagcaattttgttattcgggttcaaaatgggtcgtaaagcagcagagacaactctcaaaacatcagcaacacatttggcgcgggaactgctaatgaacgtacagtggagtggtggttcaagaagttttgcgaaggaaacgagaggcttgaagacgaagagtgtagtggccagccattggaagtagacaacgacaaattgagagcaatcattgaagctgatcctcttacaactacaggagaagttgccaaggaactcaccatcaatcattctatagtagtttggcatttgaagcagatcggaaaggtgaaaaagcttgataagtgaatgcctcatgaacagagcaaaaattttaaaacattgttgttttgaagtgacgtcttctcttattttacacaacaatgaaccatttctggatcgaattatgacatgtgatgaaaagtggattttatatgacaagctgcaaaaaccagctcagtggttggatggagaagaagcttcaaagcacttcccaaagctgaacttgcaccaacaaaagctcatggtcacaatttggtggtctgccgccagcctgatctactacagctttcggaatcccagcgaaaccattatgtctgagaaatatgctcagcaaatcgatgagatgtgccaaaaacttcaaggcctgcagccggcattggtcaaccaaaaggatccaattcttctctaccacaacgcctgaccacatgtcacataaccaacccttcaaaagttgaataaattggtctacaaaattgccttatctgccatattcacctgacctctcaccaaccaactaccacttcttcagtttgtctcttccagaatcaaagctataaaactacaaatggttctccaaatggagccccagatgcagtccatgactaagatctactgcggacctctggaccggcctgctagcccagctcccacattaatgacatcaaaggcacccctcccgaggaaatctcaactgcatgacacctactacgccccaattcagcaggaagcagttagagtggtcgttggccaacctccccaacagcacttgggttttctgttgagatgggggactgagagacaggactagctggatttcctaggccaactaagaatccctaagcctagctgggaaggtgactacacccacctttaaccactaggcttgcaacttagctcacacccgaccaatcaggtagtaaagagagcttgctaaaatgctaattaggcaaaaacaggaggtaaagaaatagccagtcatctatcgcctgacagcacaaggggcgggacaatgatcaggatataaactcaggcattcaagccagcaatggctacccactttgggtcccctcccattttatgggagctctgttttcactctattaaatctttcaactaccaaaaaaaaaaaaaaagaaaagaaaaacaattaacttttttatatatcagttaaattcatccatgatgttttttatgttttctgtattcttactggtcatttttctatttgttctatcaagtatccaggaatatgtgttaaagatgtccacttcaattgtgaatttcttgagttgttctttcagttttgttctttttttaccttatgcattttgaagttgtattatttcctgcatacaaatgtagaattgtggtgtcattcttttggagtaaaccatgatcattactggcatgacttacttacttactatctatctagacatgttgattgcttcaatttctactttaatcttaataaaaatacaccaa

SEQ ID NO: 7481 - protein, 72 aa, Homo sapiens
MWYQHVMKNKQEEREGEEAGGGGEKEREEEEEKKMVVEEEEKKKKEEKEKEKKEQEEEEEEEEEKGTHMLPV

SEQ ID NO: 7482 - DNA, 315 bp, Homo sapiens
gaagttgtgagagggagggattaaaattaggcaactattttacaaaacaatacttgcgtgtcactttgctcagtaatgtctttttagccatgtggatttttagttcatcaagtctaattctcttgtatcctttattgcaggctacctgtgtgagtcacatgtcagtgcaatttctggaggtcaattgtagccctgaagtctcagaacaatggcaaaaagaaatacggagggcatgatacatttgttttagtggaacttccacatcttcaggtgagacctctagacagtaaccaccaaatgattgtgagaggtgaa

SEQ ID NO: 7483 - protein, 48 aa, Homo sapiens
MWIFSSSSLILLYPLLQATCVSHMSVQFLEVNCSPEVSEQWQKEIRRA

SEQ ID NO: 7484 - DNA, 595 bp, Homo sapiens
atgtctggtgctaccgtgaagcctatgagcttccagtatcagatgagtcagagagaggggaacataactttcaacagtgaagtcaaaacagatgtaaataagattgaggaatttcttgaagaagtcttaagccctcccacgtacttaaagccttcaccaaaacacccagaatcaaatactgctggaatggacatctttgccaaattctctgcatatatcaagaattcaaggccagaggctaatgaagcactggagaggggtctcctgaaaaccctgcagaaactggatgaatatctgaattctcctctccctgatgaaattgatgaaaatagtatggaggacgttaagttttctaaacgtaaatttctggacagcaatgaaatgacattagctgattgcaatctgctgtcaaagctgcatattgtcaaggttgtggccaaaaaaatcgcaactttgatattccaaaagaaatgactgtcatctggagatacctaactaactaatgcatacagtagggatgagttcaccagtacctgtcccagtgatgaggaggttgaaatagcatatagtgatgtagccaaaagactcaccaagt

SEQ ID NO: 7485 - protein, 157 aa, Homo sapiens
MSGATVKPMSFQYQMSQREGNITFNSEVKTDVNKIEEFLEEVLSPPTYLKPSPKHPESNTAGMDIFAKFSAYIKNSRPEANEALERGLLKTLQKLDEYLNSPLPDEIDENSMEDVKFSKRKFLDSNEMTLADCNLLSKLHIVKVVAKKIATLIFQKK

SEQ ID NO: 7486 - DNA, 435 bp, Homo sapiens
ggtctctaacccaggctggagttcattggcacaatctcagctcattacagccttgacctcctggactcaagccatcctcccacctcggcctcccaagtagctgaaaccacagctcacaattctctgatgggcttgcctactcatttagcccttcatgaagtccctgagctgcctttttcatctggagtctccatgcacaacggtgaaaagtgcatcttttatctcacctgagacagtgtcttgctgtatcacaaagccagatccagtgctgggatcacagcttgttgcagcctccaactcctgggctcatggaatcctcttgcctcagcttccctagcagctggaactacagaaaaacagacatttgaaaggagtactttgccatcgtttttatttgttaatgttcagaaattaataaataatacttcataattt

SEQ ID NO: 7487 - protein, 60 aa, Homo sapiens
MKSLSCLFHLESPCTTVKSASFISPETVSCCITKPDPVLGSQLVAASNSWAHGILLPQLP

SEQ ID NO: 7488 - DNA, 717 bp, Homo sapiens
agtggttcttctgaggaaaaccagctgaagtattacagaaagaggaaatgctgcagagacccagccggaaacagtgctggccagctcacgcctgacccacccttattctaagcatagggtctgcctctgaagagctaaagacttcctgaaatttaaaaattagtgcttttatttgcttgtcctgctaagaccgtaggcaaaggccatcctcctcccattgacagtttagagtgggcagaaacaaccacggttaccctagaagtaaatccagagctgcgggacgctggaggacaaaaccaaccttccagggaagccgaggagaagtcatgccttcaaaaggtgtctgcctttttttttttcaccctctctcctctaacctgtttgtaactgggaaatgaaatagttttggtttgcaagctgtcgccagggagtggagcaagactttgtaataaacaagagcaactgccagagcccccagcgagcctctccaaggccagactgccaagaaaagctggcagtgtgacagcaagtttcattcagcgtggccggtggtcactgaggagcgaccatgaggaggatggccagagggggtaccccccagtctcaccttggggaagagtacagcctcctattagtgagctgtgtgggctattaaaattcccccaggctgagtgtttcaggaaacaccataaataaataaaattgtctgtgtgtgtg

SEQ ID NO: 7489 - protein, 76 aa, Homo sapiens
KLVLLFACPAKTVGKGHPPPIDSLEWAETTTVTLEVNPELRDAGGQNQPSREAEEKSCLQKVSAFFFFTLSPLTCL

SEQ ID NO: 7490 - DNA, 739 bp, Homo sapiens
agtggttcttctgaggaaaaccagctgaagtattacagaaagaggaaatgctgcagagacccagccggaaacagtgctggccagctcacgcctgacccacccttattctaagcatagggtctgcctctgaagagctaaagacttcctgaaatttaaaaattagtgcttttatttgcttgtcctgctaagaccgtaggcaaaggccatcctcctcccattgacagtttagagtgggcagaaacaaccacggttaccctagaagtaaatccagagctgcgggacgctggaggacaaaaccaaccttccagggaagccgaggagaagtcatgccttcaaaaggtgtctgcctttttttttttcaccctctctcctctaacctgtttgtaactgggaaatgaaatagttttggtttgcaagctgtcgccagggagtggagcaagactttgtaataaacaagagcaactgccagagcccccagcgagcctctccaaggccagactgccaagaaaagctggcagtgtgacagcaagtttcattcagcgtggccggtggtcactgaggagcgaccatgaggaggatggccagagggggtaccccccagtctcaccttggggaagagtacagcctcctattagtgagctgtgtgggctattaaaattcccccaggctgagtgtttcaggaaacaccataaataaataaaattgtctgtgtgtgtgtgtgtgtgtgtgtgtgtgtgtg

SEQ ID NO: 7491 - protein, 76 aa, Homo sapiens; identical to SEQ ID NO: 7489

SEQ ID NO: 7492 - DNA, 446 bp, Homo sapiens
agtggttcttctgaggaaaaccagctgaagtattacagaaagaggaaatgctgcagagacccagccggaaacagtgctggccagctcacgcctgacccacccttattctaagcatagggtctgcctctgaagagctaaagacttcctgaaatttaaaaattagtgcttttatttgcttgtcctgctaagaccgtaggcaaaggccatcctcctcccattgacagtttagagtgggcagaaacaaccacggttaccctagaagtaaatccagagctgcgggacgctggaggacaaaaccaaccttccagggaagccgaggagaagtcatgccttcaaaagacggagttttgctctgtcacccaggctggagtgcaatggcccgatctcgcctcactgcaacctccacctcccgagttcaagagattctcctgcctcagcctcccagg

SEQ ID NO: 7493 - protein, 39 aa, Homo sapiens
MPSKDGVLLCHPGWSAMARSRLTATSTSRVQEILLPQPP

SEQ ID NO: 7494 - DNA, 2113 bp, Homo sapiens
agtggttcttctgaggaaaaccagctgaagtattacagaaagaggaaatgctgcagagacccagccggaaacagtgctggccagctcacgcctgacccacccttattctaagcatagggtctgcctctgaagagctaaagacttcctgaaatttaaaaattagtgcttttatttgcttgtcctgctaagaccgtaggcaaaggccatcctcctcccattgacagtttagagtgggcagaaacaaccacggttaccctagaagtaaatccagagctgcgggacgctggaggacaaaaccaaccttccagggaagccgaggagaagtcatgccttcaaaagatgaagaaactgacatctggagaagttgaagtaatttgcacaaagattcacttggctaacggagttttgctctgtcacccaggctggagtgcaatggcccgatctcgcctcactgcaacctccacctcccgagttcaagagattctcctgcctcagcctcccaggggctgggaagttcaagatccaggcctcagaagatttggggtttggtgagggccatcttctcactgtagccttacatggtggaagaggtaaggcagctctctggaacctcttttataagggcactaatccctttcatgagaactcagcccttatgaactcatcgcctcctaaattctctacctcctaacaccatcactttgacaatcagatttcaacatatgaatttgtgggagtcaccagcattgagactatagcaaccccttattagaaataattcatgaggaactgaaactgttaggaaaccactgtgtaaatgctgggaaacaaagtcagataaataatgctgataattacctgactgcttttggaactgtccttttttgtgaacatgagactacatcattgtcagttgattgcagaagaaccactatgatattataatggggtcctgactccatgactgtgtaattcatggctttctaacggtttattattgacctaactttgcagctcccctagatcccctaactccaccatcttgggttgcaaccaatgacctgttattgcaaaacaggtaatctcacttagataagtattaatcagaggggcttgacttccagagttcatttcaatggttttcaactcatttgtagagtttaacatcagtagccctttctcttccataggagggagatgaaccatcctgtttgttcaataatcagtgagagcgtggctttaacgtctcttccactcctttctagttcaggtctttcttaacttgatggagatagcttgggccagggagggcagagtgaagatgagatggcaaaaaaaaaaaagttttgatcagcagcattgactctgtgctaaatactgtgctcagctctttggatgttatttcattgaaatggaaagaacactgtaaagttgtcttgtgaggcacactttcctgttgaggaaataaaagcattaaataacttgcccccaaatacaaagctattaggattgaaacaaagacttgagcccgggatctatctaatttcaaggtccttgttttttttctactacatttctctttgagatacagttactcaaaggtgtccaaacttcagttaatgtcaacctctgcctcactctggtcctggtgcctttcccatgttcctgagaagatcatgtggcacacttctctaaacgtctctgtgccatatctcttgggatcaaaaggccattccaataattcttctgcatttcttaatgtatgctcagatggccctggtttgcatttagagaaaggaagctaagaccttggtgataactaaatatttatatctattttttgattatgtgcttgtatttaattaagtgggtgcctactgttgtgaaaatacttttgaatacaattctgaagttgtgccagggaactctgacaatgggtatgctgggagctgtctgatttccttgtcctagacaactcatacaatgcagtagaaaaagaattctttattcccactgcctttccttagcccttcttcagagcaggggaagtgtgactgtagctttaaatagtttaaatagtccttcaaatacggcaaataaaacagtatcaatg

SEQ ID NO: 7495 - protein, 70 aa, Homo sapiens
MKKLTSGEVEVICTKIHLANGVLLCHPGWSAMARSRLTATSTSRVQEILLPQPPRGWEVQDPGLRRFGVW

SEQ ID NO: 7496 - DNA, 5710 bp, Homo sapiens
tagtgcacctgtgaaaatggtaaaatgattgttttggaatttttggatctgacgttgatttagggatgaatggtttgagttttatttgtcaaaatttgctgtttttatatctacaggattttttttcctataagcataaaatcaaagttggctactgttatttactgtgatgtaatgaatttgaactgccctgattgaaaagtttgcatttaggaaattataacgtggaaaaactgagcatatgattaacatctcccagctctttaaaacagaattaggattttgtttttagtactggctgttaccagtgttttaaaggaatttcttgagtgaagcgatcattttacaaaattagagaagcaagtagtatggtgattggcaggaatttctcagatttgaatcaagttctgatgttaaaatggaagattctgtttaaagcttgtattttcaaggaatacttataaacatttttatcaggcatcttcctgtttctcttaaatacttccttttttgacttaaaaatgttagccagtgaatgcttgacaaatttgtgtttttgtccttttcagttgtcactcagcccagtccatcagtttctcagcccagtacttctcagagtgaagaaaaagctcctgaattgcccaaaccaaagaaaaacagatgtttcatgtgcagaaagaaagttggtcttacagggtttgactgccgatgtggaaatttgttttgtggacttcaccgttactctgacaagcacaactgtccgtatgattacaaagcagaagctgcagcaaaaatcagaaaagagaatccagttgttgtggctgaaaaaattcagagaatataaattacttcttgtgaagagactgaaactttgtttttattttaatatatcgtaggaaaacattaaagagcagatgcatggccatttttctttgatgttctccagagttttacattacacttgtctgtcttataattgatattttaggatgtttgggtgtttgttacaggcagaattggatagatacagccctacaaatgtatatgccctcccctgaaaaaaattggatgaaaatctgcacagcaaagtgaaacacacagataataggaacaaaatgtagttcccatgtgccaaacaaaataaatgaaatctctgcatgtttgcagcatatctgccttttgggaatgtaatcaaggtataatctttggctagtgttatgtgcctgtatttttttaaaatggtacaccagaaaaggactggcagtctacttctaccatagttaaacttcaccctctttaatttcacaacatattctttggaagcaggaagaaatgctcataaagaggatcagaccttctttcccgtgaaaccagtatttggcgccatatataagcctggttaaattggtcatctaaagctgtcaaataagacattctgtgaaaggtaaacatcgaaactggttataagtaaaaccatcaagccaacaacagggtcttgagataacctttgaagcttattgtactggcctgcaccagaagatgtctgcattactcattgctaaaaatgtgtagcacagaactgcactaggattaatttgtttacaagaagaaatttaaactctacgtttggttttcacatacagcagctctattgaataacatgcatctgaattttaagttgcaaaggtatctgaataatttttcatgtgcatcttttgtcgaatgttttggttcaagaaagaatgtttaaagctttttaaaagacttcagttcttaatgtaactgtacccttctgcatggaaaatcataaccaacatggctgcagtagacttcttagtggtatccagcaccacttgcagagggctgctttatcatattgtacttgggtgtaggactctagtgttcttgggtgtattgcatgggctgcattatctacagcattgtacaataacaactagaaaaggcagtatacttcactgatgcttgtctggtaataatcacttctgtgttataatggaaggttttttgtgatgtatgaaacttgtgttttttatatataaatgagtatagttagtgttgtggtaatgcctgttttcatctgtaaatagttaagtatgtacacgaggcactacttctgatttattgcaatgttcagtcctagtttttacttttattcttaaagcattcagttttgctttcaattttatgtaccttagttctgagttagacctgcagatgtgtacagatagttcatatttatgtattgcacataatcatgctattcagcattgatgctatattgtattatgtaaataataaaagccatgtacagagggaaacttcacttgttcattgggtttttaagccatagttggagtcctaaagggggaaaattagaaaatgttactttacatggctatataattttttttcctttgccatcgctgaacttgttcaagtgataatcaagagatattagaagcatttgcaggtatgatacctgataggcagtttatttttgaagaattcaataggcacctttgggattaaaacaattttaaaatttgagaaagatgaaatttgaacaattatggcctacctcgcttctccatgttgtaaaagatgatgttttatgacaattctgaagaagaaagtaggtatgacttagtttacaaaaagagttctgttttatttctgttttgggtttggctctaatacagagattcacccatggacttggtctctgtagcgtttatgccagatcataaagaacaaggggtgacaggtacatgttgactttacctggggtaaatgattaccagagtgcaactgttgcttctctgtgatggagtttggggtggaaataccctagttttatctgtcagttctttgcatgctgctacttttgcttcaagttagggaggtacatatgtatgtcaaagttcctatactgacatagggtagtatttctctgaatatgaaaagtcacaattgagttgaaaatttagaagttgaagatttagaagggcaacttaatttttcaagttaaaaatggaagtaagagtggtatagagaaggtaagatgagccctcggactccatcactctgaaggtctgagtagtagcaagagatagatttttgtttggccaggctgcagtgcaatggcgtaatcttggctcactgcaacctctgcctcctgggttcaagtgattctcctgcctctgcctcctaagtagctgggatcacaggcaccagccaccacgcccagctaatttttgtatttttaatagagacagtttctccatgttggtcaggctggtcttgaactcctgacctcaggtgagctgcccgcctcggcctcccaaagtgctgggattacaggcgtgaggcaccgcacccggccaatcagttttttttgttttttttttgtttgtttgttttacaagaaacattaaaccagatcagaacaaagatttgtcagggttgtccattgactggggagaaagggaatcagtgtgtaaggcacctgagaggactcagttctacccaaattcttgcattcaaacctgaatgcaaggccatgaagtcctttgaaatgtacagatattaagcaatttaataatataccatgtttcccttacataagcagacaaatatttacacccccatgacctgaagttttgttaggctgtgaccacatgaattcgcagtataaatgggtgagtcctttttgaaaacctcatcttcagtgtgcctgatctgtaaaactagagcctcaggtttgatcctaggtaggcttcccacaacgtggggaaaattagtttgtgagggaaagctgtttctgagcattatggcatagtgattaagatgagggaccctggaaccagcccgtgattttgggcaagttattttaggtccactttggactgcttcatctcttaaatgaagacagcaaccaccttcaggagtgtgaaggtgacaacacttaaaactgtgcctggcacattgtatttgctattgtcttaatgttctggaataatggtttccataacttgggaagaaaactttgagaacaggattggttacatcaagttgtatagtgaaaagataaagatttgttatttaaacttgcagtttaaagtcattagaatcattcttttccgtaaggctttctttgcaagagatctgcattaaataaagttgctaggaaataactaaaattggggaaataatctaataatagcaagatgttaagcatactattattgtattttgggggttggtaataacattcacatggatttatcaatacacactgagaagcaaagcctctcaagctgtcccatatcctccatttcaaaggcacacatacattttaggtaactcataatttagaaaggttatttaatcttttccacatgtaaatatttgaatatgtacaaagacttgatttgactcttgtctgtttttgttttgttttgtttgtttgagacagaggctccgtcgcccaggctggagtaaaatggcatggtctcagctcactgcaagttccgcctcccgggttcacgccattctcctggctcagcctccggagtagttgggactacaggcacccgtcaccacacctggctaatgttttttgttttttgggtttttttgtatttttagtagagagagggtttcaccgtgttagccagggtggtctcgatctcctgacctcatgatccgcccaccccggcctcccaaaatgctgggattacaggtgtgagccactgcgcctggccgactcttgtctgtttgaatgcaaagttctcaatagtggtttttgtccataagtattaacttataattttggagagtgataggtatggttgctggttgattagcaataagattatgtagccttaaactagctagaagagtttgcatgggtgaggcaacaggctgttaacaaaaagaaactggaaatacagtttcccctgtttgtttctcctgtttgtacaatctgctttaaaaacaagtgaacatgcaccatgtcagtcatggtgaatcggccaacagccagcccttgccagttgacatcacagtctaagatgggaaactggtacagatagacatgaagagagcttagcagtggttgaggtggtgactaaatatacagtcattgaataaataccgtgtagcaaatgtaaaaaaaaaaaaaaaagtacaacagaatacaaaagtgccatttaatattttatagctatttctatgcacaagtgctggttttaaatttatataaaagcaaagactgtttctgtgttttcttccagagtatttctgttacagccatagaagtaaagttaataaatgtaagactttttttgttttgttttgtgccataaatgtaagactccattttgtctgcaactgctaagtgccactttccttttattatgggtagggatgttgctaaggatacttaagtagttaagagcaagatgaaagaagttacagattattttctagttggctaatctgtgttgaatacattttttatgatgatttttattgacaccacaggacctcagcctgtatatattgataatgtaaccaaagctgctcaggaattggggtaatttttcagtcaactcagaagttaacaggaaatccttgttacacattcttaaattttagataagtgcaagaactattaacaaaataacat

SEQ ID NO: 7497 - protein, 124 aa, Homo sapiens
MLASECLTNLCFCPFQLSLSPVHQFLSPVLLRVKKKLLNCPNQRKTDVSCAERKLVLQGLTADVEICFVDFTVTLTSTTVRMITKQKLQQKSEKRIQLLWLKKFREYKLLLVKRLKLCFYFNIS

SEQ ID NO: 7498 - DNA, 6292 bp, Homo sapiens
catcctccacaggactcgctcttcccagctccaccctaggggccgactgccaggccagtggctgggctccgcgagaaggcacagcaacccgtctcggccccgcctcctggacctactgacagggcaccgggggcgtggccttgggcccgcgacgtcaccgcgctccccgccgccgccgccgccgccggggttttcgctgacgcacgggtcccgccccctccccctcttttccctcacagcccgggcgccgggcggcgagtgcgttagtcggccgggacgcggagctgtgtgcatctcctacgcgggctcgctcgctcccgggagccgcgcagcttccccggcggtggcaggagcggcgaagagcgccatcagcgggcccttacggccccaggcctcgcggcgcgcggtccgctcgccctcctcgtccgcccaacctgcggcctgtggaggcgtgaggcgacgacaggcgagcgcctcgagcagcgttagccgctgcggccgccggtcctccctccacctcctcctcggccccccctcgcttccctcctcccacttcccgagctccggcgtgtcccggccacgctcgacgctgctgcaggaacaaaggaagaccccgcggcggcggcggcgccacctccgcctgctgctccgacccgctcccggcccgcggcggcggcaccagggcgcccggctcagccttcccggaggcctcggcccggcctcatcgtgccggcttcgcgcgcgaacccggctttcgcatttgggaccctgcaggcagaaaaatatggctcaggagactaaccagaccccggggcccatgctgtgtagcacaggatgtggcttttatggaaatcctaggacaaatggaatgtgttcagtttgctacaaagaacatcttcagaggcagcaaaatagtggcagaatgagcccaatgggaacagctagtggttccaacagtcctacctcagattctgcatctgtacagagagcagacactagcttaaacaactgtgaaggtgctgctggcagcacatctgaaaaatcaagaaatgtgcctgtggctgccttgcctgtaactcagcaaatgacagaaatgagcatttcaagagaggacaaaataactaccccgaaaacagaggtgtcagagccagttgtcactcagcccagtccatcagtttctcagcccagtacttctcagagtgaagaaaaagctcctgaattgcccaaaccaaagaaaaacagatgtttcatgtgcagaaagaaagttggtcttacagggtttgactgccgatgtggaaatttgttttgtggacttcaccgttactctgacaagcacaactgtccgtatgattacaaagcagaagctgcagcaaaaatcagaaaagagaatccagttgttgtggctgaaaaaattcagagaatataaattacttcttgtgaagagactgaaactttgtttttattttaatatatcgtaggaaaacattaaagagcagatgcatggccatttttctttgatgttctccagagttttacattacacttgtctgtcttataattgatattttaggatgtttgggtgtttgttacaggcagaattggatagatacagccctacaaatgtatatgccctcccctgaaaaaaattggatgaaaatctgcacagcaaagtgaaacacacagataataggaacaaaatgtagttcccatgtgccaaacaaaataaatgaaatctctgcatgtttgcagcatatctgccttttgggaatgtaatcaaggtataatctttggctagtgttatgtgcctgtatttttttaaaatggtacaccagaaaaggactggcagtctacttctaccatagttaaacttcaccctctttaatttcacaacatattctttggaagcaggaagaaatgctcataaagaggatcagaccttctttcccgtgaaaccagtatttggcgccatatataagcctggttaaattggtcatctaaagctgtcaaataagacattctgtgaaaggtaaacatcgaaactggttataagtaaaaccatcaagccaacaacagggtcttgagataacctttgaagcttattgtactggcctgcaccagaagatgtctgcattactcattgctaaaaatgtgtagcacagaactgcactaggattaatttgtttacaagaagaaatttaaactctacgtttggttttcacatacagcagctctattgaataacatgcatctgaattttaagttgcaaaggtatctgaataatttttcatgtgcatcttttgtcgaatgttttggttcaagaaagaatgtttaaagctttttaaaagacttcagttcttaatgtaactgtacccttctgcatggaaaatcataaccaacatggctgcagtagacttcttagtggtatccagcaccacttgcagagggctgctttatcatattgtacttgggtgtaggactctagtgttcttgggtgtattgcatgggctgcattatctacagcattgtacaataacaactagaaaaggcagtatacttcactgatgcttgtctggtaataatcacttctgtgttataatggaaggttttttgtgatgtatgaaacttgtgttttttatatataaatgagtatagttagtgttgtggtaatgcctgttttcatctgtaaatagttaagtatgtacacgaggcactacttctgatttattgcaatgttcagtcctagtttttacttttattcttaaagcattcagttttgctttcaattttatgtaccttagttctgagttagacctgcagatgtgtacagatagttcatatttatgtattgcacataatcatgctattcagcattgatgctatattgtattatgtaaataataaaagccatgtacagagggaaacttcacttgttcattgggtttttaagccatagttggagtcctaaagggggaaaattagaaaatgttactttacatggctatataattttttttcctttgccatcgctgaacttgttcaagtgataatcaagagatattagaagcatttgcaggtatgatacctgataggcagtttatttttgaagaattcaataggcacctttgggattaaaacaattttaaaatttgagaaagatgaaatttgaacaattatggcctacctcgcttctccatgttgtaaaagatgatgttttatgacaattctgaagaagaaagtaggtatgacttagtttacaaaaagagttctgttttatttctgttttgggtttggctctaatacagagattcacccatggacttggtctctgtagcgtttatgccagatcataaagaacaaggggtgacaggtacatgttgactttacctggggtaaatgattaccagagtgcaactgttgcttctctgtgatggagtttggggtggaaataccctagttttatctgtcagttctttgcatgctgctacttttgcttcaagttagggaggtacatatgtatgtcaaagttcctatactgacatagggtagtatttctctgaatatgaaaagtcacaattgagttgaaaatttagaagttgaagatttagaagggcaacttaatttttcaagttaaaaatggaagtaagagtggtatagagaaggtaagatgagccctcggactccatcactctgaaggtctgagtagtagcaagagatagatttttgtttggccaggctgcagtgcaatggcgtaatcttggctcactgcaacctctgcctcctgggttcaagtgattctcctgcctctgcctcctaagtagctgggatcacaggcaccagccaccacgcccagctaatttttgtatttttaatagagacagtttctccatgttggtcaggctggtcttgaactcctgacctcaggtgagctgcccgcctcggcctcccaaagtgctgggattacaggcgtgaggcaccgcacccggccaatcagttttttttgttttttttttgtttgtttgttttacaagaaacattaaaccagatcagaacaaagatttgtcagggttgtccattgactggggagaaagggaatcagtgtgtaaggcacctgagaggactcagttctacccaaattcttgcattcaaacctgaatgcaaggccatgaagtcctttgaaatgtacagatattaagcaatttaataatataccatgtttcccttacataagcagacaaatatttacacccccatgacctgaagttttgttaggctgtgaccacatgaattcgcagtataaatgggtgagtcctttttgaaaacctcatcttcagtgtgcctgatctgtaaaactagagcctcaggtttgatcctaggtaggcttcccacaacgtggggaaaattagtttgtgagggaaagctgtttctgagcattatggcatagtgattaagatgagggaccctggaaccagcccgtgattttgggcaagttattttaggtccactttggactgcttcatctcttaaatgaagacagcaaccaccttcaggagtgtgaaggtgacaacacttaaaactgtgcctggcacattgtatttgctattgtcttaatgttctggaataatggtttccataacttgggaagaaaactttgagaacaggattggttacatcaagttgtatagtgaaaagataaagatttgttatttaaacttgcagtttaaagtcattagaatcattcttttccgtaaggctttctttgcaagagatctgcattaaataaagttgctaggaaataactaaaattggggaaataatctaataatagcaagatgttaagcatactattattgtattttgggggttggtaataacattcacatggatttatcaatacacactgagaagcaaagcctctcaagctgtcccatatcctccatttcaaaggcacacatacattttaggtaactcataatttagaaaggttatttaatcttttccacatgtaaatatttgaatatgtacaaagacttgatttgactcttgtctgtttttgttttgttttgtttgtttgagacagaggctccgtcgcccaggctggagtaaaatggcatggtctcagctcactgcaagttccgcctcccgggttcacgccattctcctggctcagcctccggagtagttgggactacaggcacccgtcaccacacctggctaatgttttttgttttttgggtttttttgtatttttagtagagagagggtttcaccgtgttagccagggtggtctcgatctcctgacctcatgatccgcccaccccggcctcccaaaatgctgggattacaggtgtgagccactgcgcctggccgactcttgtctgtttgaatgcaaagttctcaatagtggtttttgtccataagtattaacttataattttggagagtgataggtatggttgctggttgattagcaataagattatgtagccttaaactagctagaagagtttgcatgggtgaggcaacaggctgttaacaaaaagaaactggaaatacagtttcccctgtttgtttctcctgtttgtacaatctgctttaaaaacaagtgaacatgcaccatgtcagtcatggtgaatcggccaacagccagcccttgccagttgacatcacagtctaagatgggaaactggtacagatagacatgaagagagcttagcagtggttgaggtggtgactaaatatacagtcattgaataaataccgtgtagcaaatgtaaaaaaaaaaaaaaaagtacaacagaatacaaaagtgccatttaatattttatagctatttctatgcacaagtgctggttttaaatttatataaaagcaaagactgtttctgtgttttcttccagagtatttctgttacagccatagaagtaaagttaataaatgtaagactttttttgttttgttttgtgccataaatgtaagactccattttgtctgcaactgctaagtgccactttccttttattatgggtagggatgttgctaaggatacttaagtagttaagagcaagatgaaagaagttacagattattttctagttggctaatctgtgttgaatacattttttatgatgatttttattgacaccacaggacctcagcctgtatatattgataatgtaaccaaagctgctcaggaattggggtaatttttcagtcaactcagaagttaacaggaaatccttgttacacattcttaaattttagataagtgcaagaactattaacaaaataacat

SEQ ID NO: 7499 - protein, 213 aa, Homo sapiens; identical to SEQ ID NO: 1080

SEQ ID NO: 7500 - DNA, 2343 bp, Homo sapiens
tagtgcacctgtgaaaatggtaaaatgattgttttggaatttttggatctgacgttgatttagggatgaatggtttgagttttatttgtcaaaatttgctgtttttatatctacaggattttttttcctataagcataaaatcaaagttggctactgttatttactgtgatgtaatgaatttgaactgccctgattgaaaagtttgcatttaggaaattataacgtggaaaaactgagcatatgattaacatctcccagctctttaaaacagaattaggattttgtttttagtactggctgttaccagtgttttaaaggaatttcttgagtgaagcgatcattttacaaaattagagaagcaagtagtatggtgattggcaggaatttctcagatttgaatcaagttctgatgttaaaatggaagattctgtttaaagcttgtattttcaaggaatacttataaacatttttatcaggcatcttcctgtttctcttaaatacttccttttttgacttaaaaatgttagccagtgaatgcttgacaaatttgtgtttttgtccttttcagttgtcactcagcccagtccatcagtttctcagcccagtacttctcagagtgaagaaaaagctcctgaattgcccaaaccaaagaaaaacagatgtttcatgtgcagaaagaaagttggtcttacagggtttgactgccgatgtggaaatttgttttgtggacttcaccgttactctgacaagcacaactgtccgtatgattacaaagcagaagctgcagcaaaaatcagaaaagagaatccagttgttgtggctgaaaaaattcagagaatataaattacttcttgtgaagagactgaaactttgtttttattttaatatatcgtaggaaaacattaaagagcagatgcatggccatttttctttgatgttctccagagttttacattacacttgtctgtcttataattgatattttaggatgtttgggtgtttgttacaggcagaattggatagatacagccctacaaatgtatatgccctcccctgaaaaaaattggatgaaaatctgcacagcaaagtgaaacacacagataataggaacaaaatgtagttcccatgtgccaaacaaaataaatgaaatctctgcatgtttgcagcatatctgccttttgggaatgtaatcaaggtataatctttggctagtgttatgtgcctgtatttttttaaaatggtacaccagaaaaggactggcagtctacttctaccatagttaaacttcaccctctttaatttcacaacatattctttggaagcaggaagaaatgctcataaagaggatcagaccttctttcccgtgaaaccagtatttggcgccatatataagcctggttaaattggtcatctaaagctgtcaaataagacattctgtgaaaggtaaacatcgaaactggttataagtaaaaccatcaagccaacaacagggtcttgagataacctttgaagcttattgtactggcctgcaccagaagatgtctgcattactcattgctaaaaatgtgtagcacagaactgcactaggattaatttgtttacaagaagaaatttaaactctacgtttggttttcacatacagcagctctattgaataacatgcatctgaattttaagttgcaaaggtatctgaataatttttcatgtgcatcttttgtcgaatgttttggttcaagaaagaatgtttaaagctttttaaaagacttcagttcttaatgtaactgtacccttctgcatggaaaatcataaccaacatggctgcagtagacttcttagtggtatccagcaccacttgcagagggctgctttatcatattgtacttgggtgtaggactctagtgttcttgggtgtattgcatgggctgcattatctacagcattgtacaataacaactagaaaaggcagtatacttcactgatgcttgtctggtaataatcacttctgtgttataatggaaggttttttgtgatgtatgaaacttgtgttttttatatataaatgagtatagttagtgttgtggtaatgcctgttttcatctgtaaatagttaagtatgtacacgaggcactacttctgatttattgcaatgttcagtcctagtttttacttttattcttaaagcattcagttttgctttcaattttatgtaccttagttctgagttagacctgcagatgtgtacagatagttcatatttatgtattgcacataatcatgctattcagcattgatgctatattgtattatgtaaataataaaagccatgtacagagggaaacttc

SEQ ID NO: 7501 - protein, 124 aa, Homo sapiens; identical to SEQ ID NO: 7497

SEQ ID NO: 7502 - DNA, 2925 bp, Homo sapiens
catcctccacaggactcgctcttcccagctccaccctaggggccgactgccaggccagtggctgggctccgcgagaaggcacagcaacccgtctcggccccgcctcctggacctactgacagggcaccgggggcgtggccttgggcccgcgacgtcaccgcgctccccgccgccgccgccgccgccggggttttcgctgacgcacgggtcccgccccctccccctcttttccctcacagcccgggcgccgggcggcgagtgcgttagtcggccgggacgcggagctgtgtgcatctcctacgcgggctcgctcgctcccgggagccgcgcagcttccccggcggtggcaggagcggcgaagagcgccatcagcgggcccttacggccccaggcctcgcggcgcgcggtccgctcgccctcctcgtccgcccaacctgcggcctgtggaggcgtgaggcgacgacaggcgagcgcctcgagcagcgttagccgctgcggccgccggtcctccctccacctcctcctcggccccccctcgcttccctcctcccacttcccgagctccggcgtgtcccggccacgctcgacgctgctgcaggaacaaaggaagaccccgcggcggcggcggcgccacctccgcctgctgctccgacccgctcccggcccgcggcggcggcaccagggcgcccggctcagccttcccggaggcctcggcccggcctcatcgtgccggcttcgcgcgcgaacccggctttcgcatttgggaccctgcaggcagaaaaatatggctcaggagactaaccagaccccggggcccatgctgtgtagcacaggatgtggcttttatggaaatcctaggacaaatggaatgtgttcagtttgctacaaagaacatcttcagaggcagcaaaatagtggcagaatgagcccaatgggaacagctagtggttccaacagtcctacctcagattctgcatctgtacagagagcagacactagcttaaacaactgtgaaggtgctgctggcagcacatctgaaaaatcaagaaatgtgcctgtggctgccttgcctgtaactcagcaaatgacagaaatgagcatttcaagagaggacaaaataactaccccgaaaacagaggtgtcagagccagttgtcactcagcccagtccatcagtttctcagcccagtacttctcagagtgaagaaaaagctcctgaattgcccaaaccaaagaaaaacagatgtttcatgtgcagaaagaaagttggtcttacagggtttgactgccgatgtggaaatttgttttgtggacttcaccgttactctgacaagcacaactgtccgtatgattacaaagcagaagctgcagcaaaaatcagaaaagagaatccagttgttgtggctgaaaaaattcagagaatataaattacttcttgtgaagagactgaaactttgtttttattttaatatatcgtaggaaaacattaaagagcagatgcatggccatttttctttgatgttctccagagttttacattacacttgtctgtcttataattgatattttaggatgtttgggtgtttgttacaggcagaattggatagatacagccctacaaatgtatatgccctcccctgaaaaaaattggatgaaaatctgcacagcaaagtgaaacacacagataataggaacaaaatgtagttcccatgtgccaaacaaaataaatgaaatctctgcatgtttgcagcatatctgccttttgggaatgtaatcaaggtataatctttggctagtgttatgtgcctgtatttttttaaaatggtacaccagaaaaggactggcagtctacttctaccatagttaaacttcaccctctttaatttcacaacatattctttggaagcaggaagaaatgctcataaagaggatcagaccttctttcccgtgaaaccagtatttggcgccatatataagcctggttaaattggtcatctaaagctgtcaaataagacattctgtgaaaggtaaacatcgaaactggttataagtaaaaccatcaagccaacaacagggtcttgagataacctttgaagcttattgtactggcctgcaccagaagatgtctgcattactcattgctaaaaatgtgtagcacagaactgcactaggattaatttgtttacaagaagaaatttaaactctacgtttggttttcacatacagcagctctattgaataacatgcatctgaattttaagttgcaaaggtatctgaataatttttcatgtgcatcttttgtcgaatgttttggttcaagaaagaatgtttaaagctttttaaaagacttcagttcttaatgtaactgtacccttctgcatggaaaatcataaccaacatggctgcagtagacttcttagtggtatccagcaccacttgcagagggctgctttatcatattgtacttgggtgtaggactctagtgttcttgggtgtattgcatgggctgcattatctacagcattgtacaataacaactagaaaaggcagtatacttcactgatgcttgtctggtaataatcacttctgtgttataatggaaggttttttgtgatgtatgaaacttgtgttttttatatataaatgagtatagttagtgttgtggtaatgcctgttttcatctgtaaatagttaagtatgtacacgaggcactacttctgatttattgcaatgttcagtcctagtttttacttttattcttaaagcattcagttttgctttcaattttatgtaccttagttctgagttagacctgcagatgtgtacagatagttcatatttatgtattgcacataatcatgctattcagcattgatgctatattgtattatgtaaataataaaagccatgtacagagggaaacttc

SEQ ID NO: 7503 - protein, 213 aa, Homo sapiens; identical to SEQ ID NO: 1080

SEQ ID NO: 7504 - DNA, 1758 bp, Homo sapiens
catcctccacaggactcgctcttcccagctccaccctaggggccgactgccaggccagtggctgggctccgcgagaaggcacagcaacccgtctcggccccgcctcctggacctactgacagggcaccgggggcgtggccttgggcccgcgacgtcaccgcgctccccgccgccgccgccgccgccggggttttcgctgacgcacgggtcccgccccctccccctcttttccctcacagcccgggcgccgggcggcgagtgcgttagtcggccgggacgcggagctgtgtgcatctcctacgcgggctcgctcgctcccgggagccgcgcagcttccccggcggtggcaggagcggcgaagagcgccatcagcgggcccttacggccccaggcctcgcggcgcgcggtccgctcgccctcctcgtccgcccaacctgcggcctgtggaggcgtgaggcgacgacaggcgagcgcctcgagcagcgttagccgctgcggccgccggtcctccctccacctcctcctcggccccccctcgcttccctcctcccacttcccgagctccggcgtgtcccggccacgctcgacgctgctgcaggaacaaaggaagaccccgcggcggcggcggcgccacctccgcctgctgctccgacccgctcccggcccgcggcggcggcaccagggcgcccggctcagccttcccggaggcctcggcccggcctcatcgtgccggcttcgcgcgcgaacccggctttcgcatttgggaccctgcaggcagaaaaatatggctcaggagactaaccagaccccggggcccatgctgtgtagcacaggatgtggcttttatggaaatcctaggacaaatggaatgtgttcagtttgctacaaagaacatcttcagaggcagcaaaatagtggcagaatgagcccaatgggaacagctagtggttccaacagtcctacctcagattctgcatctgtacagagagcagacactagcttaaacaactgtgaaggtgctgctggcagcacatctgaaaaatcaagaaatgtgcctgtggctgccttgcctgtaactcagcaaatgacagaaatgagcatttcaagagaggacaaaataactaccccgaaaacagaggtgtcagagccagttgtcactcagcccagtccatcagtttctcagcccagtacttctcagagtgaagaaaaagctcctgaattgcccaaaccaaagaaaaacagatgtttcatgtgcagaaagaaagttggtcttacagggtttgactgccgatgtggaaatttgttttgtggacttcaccgttactctgacaagcacaactgtccgtatgattacaaagcagaagctgcagcaaaaatcagaaaagagaatccagttgttgtggctgaaaaaattcagagaatataaattacttcttgtgaagagactgaaactttgtttttattttaatatatcgtaggaaaacattaaagagcagatgcatggccatttttctttgatgttctccagagttttacattacacttgtctgtcttataattgatattttaggatgtttgggtgtttgttacaggcagaattggatagatacagccctacaaatgtatatgccctcccctgaaaaaaattggatgaaaatctgcacagcaaagtgaaacacacagataataggaacaaaatgtagttcccatgtgccaaacaaaataaatgaaatctctgcatgtttgcagcatatctgc

SEQ ID NO: 7505 - protein, 213 aa, Homo sapiens; identical to SEQ ID NO: 1080

SEQ ID NO: 7506 - DNA, 1367 bp, Homo sapiens
gagtttcgtaaaccagctgaccctaaattcttagagatttacttgttggtgccagggtagcaggaagggctaccagttctcttttcagccttatatgaagatgtttcagcattaaaaagtacagatgctctgcctcagcagatttgtcaaattactgatgaagcccagatatgtacaggtgttttaagaaaactttattcatccagtttaaagaactacctataaatatcaagactcagtgataattgtgattagccaattaagtaaaaacatttgaaatggtctgcctgtagtgcagcagagtgaaaagttaaagataccagtttcccaaattgattaaaacataaccctgagagctaacagaccttttcataaattgaaaccaagaatagtgataggtaaaaataccctaataattgataaaatttctttttgggtttttttttggtcctaaaacagtttgcttttataaaggcaacaaaatattgataattatctctgcccaccctttttaatgattaacggaatttgggcttttgttaaaacttgcgtagcaattacaacggtataccgatgattatattagactatattttggtgataacactaatttctgaaatttcgtttcatctatagcagaaaaatatggctcaggagactaaccagaccccggggcccatgctgtgtagcacaggatgtggcttttatggaaatcctaggacaaatggaatgtgttcagtttgctacaaagaacatcttcagaggcagcaaaatagtggcagaatgagcccaatgggaacagctagtggttccaacagtcctacctcagattctgcatctgtacagagagcagacactagcttaaacaactgtgaaggtgctgctggcagcacatctgaaaaatcaagaaatgtgcctgtggctgccttgcctgtaactcagcaaatgacagaaatgagcatttcaagagaggacaaaataactaccccgaaaacagaggtgtcagagccagttgtcactcagcccagtccatcagtttctcagcccagtacttctcagagtgaagaaaaagctcctgaattgcccaaaccaaagaaaaacagatgtttcatgtgcagaaagaaagttggtcttacagggtttgactgccgatgtggaaatttgttttgtggacttcaccgttactctgacaagcacaactgtccgtatgattacaaagcagaagctgcagcaaaaatcagaaaagagaatccagttgttgtggctgaaaaaattcagagaatataaattacttcttgtgaagagactgaaactttgtttttattttaatatatcgtaggaaaacattaaagagcagatgcatggcc

SEQ ID NO: 7507 - protein, 213 aa, Homo sapiens; identical to SEQ ID NO: 1080

SEQ ID NO: 7508 - DNA, 1506 bp, Homo sapiens
catcctccacaggactcgctcttcccagctccaccctaggggccgactgccaggccagtggctgggctccgcgagaaggcacagcaacccgtctcggccccgcctcctggacctactgacagggcaccgggggcgtggccttgggcccgcgacgtcaccgcgctccccgccgccgccgccgccgccggggttttcgctgacgcacgggtcccgccccctccccctcttttccctcacagcccgggcgccgggcggcgagtgcgttagtcggccgggacgcggagctgtgtgcatctcctacgcgggctcgctcgctcccgggagccgcgcagcttccccggcggtggcaggagcggcgaagagcgccatcagcgggcccttacggccccaggcctcgcggcgcgcggtccgctcgccctcctcgtccgcccaacctgcggcctgtggaggcgtgaggcgacgacaggcgagcgcctcgagcagcgttagccgctgcggccgccggtcctccctccacctcctcctcggccccccctcgcttccctcctcccacttcccgagctccggcgtgtcccggccacgctcgacgctgctgcaggaacaaaggaagaccccgcggcggcggcggcgccacctccgcctgctgctccgacccgctcccggcccgcggcggcggcaccagggcgcccggctcagccttcccggaggcctcggcccggcctcatcgtgccggcttcgcgcgcgaacccggctttcgcatttgggaccctgcaggcagaaaaatatggctcaggagactaaccagaccccggggcccatgctgtgtagcacaggatgtggcttttatggaaatcctaggacaaatggaatgtgttcagtttgctacaaagaacatcttcagaggcagcaaaatagtggcagaatgagcccaatgggaacagctagtggttccaacagtcctacctcagattctgcatctgtacagagagcagacactagcttaaacaactgtgaaggtgctgctggcagcacatctgaaaaatcaagaaatgtgcctgtggctgccttgcctgtaactcagcaaatgacagaaatgagcatttcaagagaggacaaaataactaccccgaaaacagaggtgtcagagccagttgtcactcagcccagtccatcagtttctcagcccagtacttctcagagtgaagaaaaagctcctgaattgcccaaaccaaagaaaaacagatgtttcatgtgcagaaagaaagttggtcttacagggtttgactgccgatgtggaaatttgttttgtggacttcaccgttactctgacaagcacaactgtccgtatgattacaaagcagaagctgcagcaaaaatcagaaaagagaatccagttgttgtggctgaaaaaattcagagaatataaattacttcttgtgaagagactgaaactttgtttttattttaatatatcgtaggaaaacattaaagagcagatgcatggcc

SEQ ID NO: 7509 - protein, 213 aa, Homo sapiens; identical to SEQ ID NO: 1080

SEQ ID NO: 7510 - DNA, 1039 bp, Homo sapiens
aattaccaggggtctggccaggtcaaaattggttagtccccttctcccatcttctaattttggtagttaatacttgttaaaacatcgttttttaataactcactaaaaagtgtattctagtatgtagttggaaaaaatgactgaccacaagttacagcacacgaattttcctttaagcaaatgctctcaaatatgctttttgtacatatgcttatacatgtttaagatgacatgaaaaccctccacaactttattttaaaataatttttctttaatatgtattttctcatccagaggaaaacttattaataatttagcacagcgttttaacaagacttttagaaaagcaaatcttccttggaaacaaatgcttgctatgtaaagctttttctggtaacccagcattgaatattaaccattactaaaggttatgtgtatatattgactttaatacattgaatttgagcttggaacggttttattattttctggtatgaggaagacaagcacttgttaaaattaatagtgcctttggctgagaaatctggttcataatttgtgtattgcaggttcctaggcactggctttgacatactctgaaacttcaaatggagaacgtaaaaggagtttcgtaaaccagctgaccctaaattcttagagatttacttgttggtgccagggtagcaggaagggctaccagttctcttttcagccttatatgaagatgtttcagcattaaaaagtacagatgctctgcctcagcagatttgtcaaattactgatgaagcccagatatgtacagaaaaatatggctcaggagactaaccagaccccggggcccatgctgtgtagcacaggatgtggcttttatggaaatcctaggacaaatggaatgtgttcagtttgctacaaagaacatcttcagaggcagcaaaatagtggcagaatgagcccaatgggaacagctagtggttccaacagtcctacctcagattctgcatctgtacagagagcagacactagcttaaacaactgtgaa

SEQ ID NO: 7511 - protein, 96 aa, Homo sapiens
MLCLSRFVKLLMKPRYVQKNMAQETNQTPGPMLCSTGCGFYGNPRTNGMCSVCYKEHLQRQQNSGRMSPMGTASGSNSPTSDSASVQRADTSLNNC

SEQ ID NO: 7512 - DNA, 1209 bp, Homo sapiens
aaaataatttttctttaatatgtattttctcatccagaggaaaacttattaataatttagcacagcgttttaacaagacttttagaaaagcaaatcttccttggaaacaaatgcttgctatgtaaagctttttctggtaacccagcattgaatattaaccattactaaaggttatgtgtatatattgactttaatacattgaatttgagcttggaacggttttattattttctggtatgaggaagacaagcacttgttaaaattaatagtgcctttggctgagaaatctggttcataatttgtgtattgcaggttcctaggcactggctttgacatactctgaaacttcaaatggagaacgtaaaaggagtttcgtaaaccagctgaccctaaattcttagagatttacttgttggtgccagggtagcaggaagggctaccagttctcttttcagccttatatgaagatgtttcagcattaaaaagtacagatgctctgcctcagcagatttgtcaaattactgatgaagcccagatatgtacaggtgttttaagaaaactttattcatccagtttaaagaactacctataaatatcaagactcagtgataattgtgattagccaattaagtaaaaacatttgaaatggtctgcctgtagtgcagcagagtgaaaagttaaagataccagtttcccaaattgattaaaacataaccctgagagctaacagaccttttcataaattgaaaccaagaatagtgataggtaaaaataccctaataattgataaaatttctttttgggtttttttttggtcctaaaacagtttgcttttataaaggcaacaaaatattgataattatctctgcccaccctttttaatgattaacggaatttgggcttttgttaaaacttgcgtagcaattacaacggtataccgatgattatattagactatattttggtgataacactaatttctgaaatttcgtttcatctatagcagaaaaatatggctcaggagactaaccagaccccggggcccatgctgtgtagcacaggatgtggcttttatggaaatcctaggacaaatggaatgtgttcagtttgctacaaagaacatcttcagaggcagcaaaatagtggcagaatgagcccaatgggaacagctagtggttccaacagtcctacctcagattctgcatctgt

SEQ ID NO: 7513 - protein, 64 aa, Homo sapiens
MAQETNQTPGPMLCSTGCGFYGNPRTNGMCSVCYKEHLQRQQNSGRMSPMGTASGSNSPTSDSA

SEQ ID NO: 7514 - DNA, 4934 bp, Homo sapiens
cacagcccgggcgccgggcggcgagtgcgttagtcggccgggacgcggagctgtgtgcatctcctacgcgggctcgctcgctcccgggagccgcgcagcttccccggcggtggcaggagcggcgaagagcgccatcagcgggcccttacggccccaggcctcgcggcgcgcggtccgctcgccctcctcgtccgcccaacctgcggcctgtggaggcgtgaggcgacgacaggcgagcgcctcgagcagcgttagccgctgcggccgccggtcctccctccacctcctcctcggccccccctcgcttccctcctcccacttcccgagctccggcgtgtcccggccacgctcgacgctgctgcaggaacaaaggaagaccccgcggcggcggcggcgccacctccgcctgctgctccgacccgctcccggcccgcggcggcggcaccagggcgcccggctcagccttcccggaggcctcggcccggcctcatcgtgccggcttcgcgcgcgaacccggctttcgcatttgggaccctgcagggtgagtgatacggggctgcgggtgggagccgggctccttgttgccgggccgggggcgggagggagcccgcccgccagcccaggaagcacaaagacggaggcgtcatcctgtcgtcgtggcccgagacctggctcccggcgtccctggctcgctccacagcacggtcgggaaacaatgcacggcgtgccgcctctgcggggccggcctctaggccgctcgcctccgcggcggcgcccggcgtgggcaccacgacccagagaaacaaagaggccgaggcggcggccgcgccccctgcccgttgcagccccccctagctctcccctaagaggagccgttcggggtcgggggtcgggggtcggggatccgcgtggggcctgcaggcgaagggctggccgggcctgctgagctgctgttctgcatgactcagtggttttcggagagggccctgttgggctttattgagtgaggcctttgcttagagggggatggggtatcagtgggacccgaacttgttccaaaatccattggaacatggggccgggggttctcggcgtcgtcttttgggcttctcgacgtcgctgcgtttttatcctgagatccgttttcatggaggaaatggaacacctcctttgtttggtgcatttaggctgatgaatgtgaaattttttgctcgctttccacgcactccgtggaggtgtgttttcggggaagggtcggattatctttattgattgagtgtctcctaagggatagcatctaaggagataccaagataaaggaacatataggtcacacatccccgttcttaaacctgggatttagatacagacttctaaaaacataaacgaatgtattttattccttatttttaggattttttttaaagagtaggctttcagaactcagttggtgaaaatactgcaattttatctttgaagttttttgttaaaatgtttccccacacccccctaaaaaattaaggattctttgtagttgtctcctgttttctatctcccaggccctgaaaaggagcctttaaaagtcaattctactccatttggcaaagagggaactgaaatctggaaagtaaggacttgcccaaggtcactgacttagtggcagactagagacttgaactcaggtctccattcccaggtgagtgggaattcatgccatctcatcacatcatgtgcacctgaaagaactgtattccataggtgtaaaagctctttgttcagaattggaattggagaattgttcagttacactcgggtgtttttttaagctgtaagttagaggaagccataaactttataaaatctgcattctagctatacctgatagagctgacacgtgcatgctcaagttgctaattactttaaaggcaataaatagtaatggtatttttttctaaaatacaaggggaatgcaatacctaatgggaacacacatcccccacttcatcccctaaatcctcactaaatgaggattcttttttacactgtctccactgtgcttagttttttatcaacaaccttgaccattttagctttgactatgctttcatcttctagattgagattgttctgtagtttttcctacattaggaaaaaactagcagccctttttttgttttcttatgttagatatatgaacgctgcatccttagttcttggggttgtgtaggagttggcaggctttgagatataaatagaagctgatttcagaggcccctgttgactaggctttatgtgagagcctccatccagctcagcttgtcacattgcagccttgtgacaggctgaagcgccctcccatgtgatctgagcttctgagaaatattaaagcaagctgtgcacatgtgatggcatttaaaagctggctttctaggggaaaaaaatctaaaagatgggaacccatgtagaagactcatgtcctggtacctcttgtgtgtctcgcagttgaaagttatttataatgaaatgaaggtagacatgttctctgaagcaaagttggaatactttgttatctctgagtgtgtgaaatctttagatggagtatcctccattttatctaaaacaaatattttaagaatcagattaactaaaattacttaggtaggttgatcgcttggccttaaactttaaagccaatgtcacatgagactgggcctcagtgtagaaaatgtaagctagcatacttaaactggttttaaggagtgacccaactttcatgcatagggcaaacattcacacatattttgtgcgtggtgggcatgcaaatacatacatatttatcatttgaaagcattttttgctcctattatgctcatttaaaaacccagctgaaagtgtttattaataaacttcctaagtgatgttgaaatgtttacactaccctgctccaaaatgagtcagctaaattccagttaatatttaaagagacagtgtcaactaaattaatactgttgttaaaagtaagttgtggatcttggtcactccacacaagctagattgtcttaatatttgtatggtgcacttttacttacaaaagggaagataaaatgttttggggaataattaccaggggtctggccaggtcaaaattggttagtccccttctcccatcttctaattttggtagttaatacttgttaaaacatcgttttttaataactcactaaaaagtgtattctagtatgtagttggaaaaaatgactgaccacaagttacagcacacgaattttcctttaagcaaatgctctcaaatatgctttttgtacatatgcttatacatgtttaagatgacatgaaaaccctccacaactttattttaaaataatttttctttaatatgtattttctcatccagaggaaaacttattaataatttagcacagcgttttaacaagacttttagaaaagcaaatcttccttggaaacaaatgcttgctatgtaaagctttttctggtaacccagcattgaatattaaccattactaaaggttatgtgtatatattgactttaatacattgaatttgagcttggaacggttttattattttctggtatgaggaagacaagcacttgttaaaattaatagtgcctttggctgagaaatctggttcataatttgtgtattgcaggttcctaggcactggctttgacatactctgaaacttcaaatggagaacgtaaaaggagtttcgtaaaccagctgaccctaaattcttagagatttacttgttggtgccagggtagcaggaagggctaccagttctcttttcagccttatatgaagatgtttcagcattaaaaagtacagatgctctgcctcagcagatttgtcaaattactgatgaagcccagatatgtacaggtgttttaagaaaactttattcatccagtttaaagaactacctataaatatcaagactcagtgataattgtgattagccaattaagtaaaaacatttgaaatggtctgcctgtagtgcagcagagtgaaaagttaaagataccagtttcccaaattgattaaaacataaccctgagagctaacagaccttttcataaattgaaaccaagaatagtgataggtaaaaataccctaataattgataaaatttctttttgggtttttttttggtcctaaaacagtttgcttttataaaggcaacaaaatattgataattatctctgcccaccctttttaatgattaacggaatttgggcttttgttaaaacttgcgtagcaattacaacggtataccgatgattatattagactatattttggtgataacactaatttctgaaatttcgtttcatctatagcagaaaaatatggctcaggagactaaccagaccccggggcccatgctgtgtagcacaggatgtggcttttatggaaatcctaggacaaatggaatgtgttcagtttgctacaaagaacatcttcagaggcagcaaaatagtggcagaatgagcccaatgggtaagttatttccaaggaaaaacacatttgaaagaactggtggacagaaatacagaaccaagaattggggctgagaatgctgaaagcacatggagagaacacctgataagagcttgaaattcaagcaacagcccaagtgcttgacatgactgatcaggaatgaatgactatctacaagcatcttatagcttttcagttttcttttttggggttattttgtttcacacttgtgttcattggattgactttttaatattttttgtttggatactcaagtataggattacagcacagtgaatgcttatatcactaacctaattaaatgcaagtatttattactacgtcttgatactaagtgagtttttgtagtgttcattggttccttacaaatccttt

SEQ ID NO: 7515 - protein, 81 aa, Homo sapiens [sequence omitted]

SEQ ID NO: 7516 - DNA, 319 bp, Homo sapiens
gttagtcggccgggacgcggagctgtgtgcatctcctacgcgggctcgctcgctcccgggagccgcgcagcttccccggcggtggcaggagcgagcgcctcgagcagcgttagccgctgcggccgccggtcctccctccacctcctcctcggccccccctcgcttccctcctcccacttcccgagctccggcgtgtcccggccacgctcgacgctgctgcaggaacaaaggaagaccccgcggcggcggcggcgccacctccgcctgctgctccgacccgctcccggcccgcggcggcggcaccagggcgcccggctca

SEQ ID NO: 7517 - protein, 105 aa, Homo sapiens
VSRPGRGAVCISYAGSLAPGSRAASPAVAGASASSSVSRCGRRSSLHLLLGPPSLPSSHFPSSGVSRPRSTLLQEQRKTPRRRRRHLRLLLRPAPGPRRRHQGAR

SEQ ID NO: 7518 - DNA, 637 bp, Homo sapiens
gaagtgctggggttataggcgtgagccacggcgcctgtttgtttttttttttctaatcagaggttttgctcttgtcgcccaggctggagtgcaatggtgtgatcttgtctcactgcaacttctgcctcccaggttcaagtgattctcctgcctcagcctcccaagtaactgtgatttcaggtgcccgccactacacccggctaatttttgtatttttagtagaggcggggttttgccatgttggccaggctggtctcaaaactcctgacctcaggagttcggcctccgaaagtgctgggattacaggcatgagccactgtgcccggcctagaaaactggtgtttccaacaagtcctttggtgctgctggtgctactgcgggccttctgaggagactttgagaaccgctgcatcaggattatcagcctggtaactcctggccgaagaaatgcacacccttcatttggctaaaagaaagaatttccaatattcataaagaaaacacaacttgtgggttctccaagcaggagaggaaaaatcatgttccagtctattcctgtaactaatgaagggctcaggtttcaaagaccctctgtcctttggcctgtactggagtctgacttgtccagcagcacatt

SEQ ID NO: 7519 - protein, 31 aa, Homo sapiens
MFQSIPVTNEGLRFQRPSVLWPVLESDLSSS

SEQ ID NO: 7520 - DNA, 1781 bp, Homo sapiens
atcgcaagaaaacaggaacactgaaagacatgggctccttctcagatcttagagaacaaaagaaagaactaaatggagatgtgggaatcacaaggccatagtttagggtctcgcagtgccattggcaacaaagcctgagagcctaggcgatagaggcagaacacccagaggagaagccccttccccttgcaccgtgagcctggtgtttgcagcttggtagcagtggcaacagaacaatcagctctcctacaataaaccagggacggaacaaacaacagcagcagcggtcgcagggaaacagaatctgtgttggcgtgcagggagcaggcagcgtctgcaaagtagcgctggcaaccacaacagagaggccagcaacaggaggagcaggaggagccctggaacaagtacagttgactctgaacaagtcaggtttgaactgcatgggtccactcatatgaagatttctttcaacgaaagctaccccgagtgtgcctgcctttcctgcctccccttccacctcctgcacctctaccatccctgccacccctaagacagcaaggccagtctcttctctctccccctcctccttcagcctattcaacttgaagatgacaaggatgaagagctttatgatgatctacttccccttaatgaacagctggagtgcaatggtgtgatcttgtctcactgcaacttctgcctcccaggttcaagtgattctcctgcctcagcctcccaagtaactgtgatttcaggtgcccgccactacacccggctaatttttgtatttttagtagaggcggggttttgccatgttggccaggctggtctcaaaactcctgacctcaggagttcggcctccgaaagtgctgggattacaggcatgagccactgtgcccggcctagaaaactggtgtttccaacaagtcctttggtgctgctggtgctactgcgggccttctgaggagactttgagaaccgctgcatcaggattatcagcctggtaactcctggccgaagaaatgcacacccttcatttggctaaaagaaagaatttccaatattcataaagaaaacacaacttgtgggttctccaagcaggagaggaaaaatcatgttccagtctattcctgtaactaatgaagggctcaggtttcaaaggtaagttaattgtcagacccactttattgtacccagtgtccttgggaaacataattatttattggaaatatgtcacaactaacataagtcttaaaaatttgttaaattagaaacaaaatattgtatttgctgatatgttaaaacataagggcctaacatttagaattgcacttctcatactcacaacatgtactcaaaatgctgttaacatctactttgatgattgttttgggtttacttgaatctaatgtttccatttaataattccttttttttcccctttccttttttcaatcaatcctttctcttttctatgttctatattcatgttatcttagaattccattttggccttctaggttctttacttcttcctccagcctgtcattttcatgtcttcagtgatttctcagacttctcacagaaagttaaccatttttgtgcatcttgaaacttttaacctttgatttgaagataaatgctaataaataaatataattcttatgaatacattatgcacaatgttaaattcaaaatgactgacatgtttcatgctgtgtgctatagatatgctaaacttcatttcaaacagactaaataaaacacatggaactacatgc

SEQ ID NO: 7521 - protein, 67 aa, Homo sapiens
MFPFNNSFFFPFPFFNQSFLFSMFYIHVILEFHFGLLGSLLLPPACHFHVFSDFSDFSQKVNHFCAS

SEQ ID NO: 7522 - DNA, 549 bp, Homo sapiens
aaacagaatctgtgttggcgtgcagggagcaggcagcgtctgcaaagtagcgctggcaaccacaacagagaggccagcaacaggaggagcaggaggagcccaatgaagcgtgctgtggaggacaaagagcagcagaggcaggaagcagtgacaaggagtgagctgggaaattccagctgccctcctgtcctacttacaaggaatagcctggaacaagtacagttgactctgaacaagtcaggtttgaactgcatgggtccactcatatgaagatttctttcaacgaaagctaccccgagtgtgcctgcctttcctgcctccccttccacctcctgcacctctaccatccctgccacccctaagacagcaaggccagtctcttctctctccccctcctccttcagcctattcaacttgaagatgacaaggatgaagagctttatgatgatctacttccccttaatgaacagctggagtgcaatggtgtgatcttgtctcactgcaacttctgcctcccaggttcaagtgattctcctgcctcagcctccc

SEQ ID NO: 7523 - protein, 55 aa, Homo sapiens
MKRAVEDKEQQRQEAVTRSELGNSSCPPVLLTRNSLEQVQLTLNKSGLNCMGPLI

SEQ ID NO: 7524 - DNA, 3201 bp, Homo sapiens; identical to SEQ ID NO: 1081

SEQ ID NO: 7525 - protein, 760 aa, Homo sapiens; identical to SEQ ID NO: 1082

SEQ ID NO: 7526 - DNA, 462 bp, Homo sapiens
ctgtgcaggtgtgtggtgatctgctccttagagatatgtggaattttccggtaacgacgctaattagtatatcctcgtgtccaccaccacataggattccaaacatctggtttataatcctggctctgcactaaatggctatgtggcctcagttttctcacctgtaaaatcaagagcctggaacaagtacagttgactctgaacaagtcaggtttgaactgcatgggtccactcatatgaagatttctttcaacgaaagctaccccgagtgtgcctgcctttcctgcctccccttccacctcctgcacctctaccatccctgccacccctaagacagcaaggccagtctcttctctctccccctcctccttcagcctattcaacttgaagatgacaaggatgaagagctttatgatgatctacttccccttaatgaacagtaaatatattttttcttcctta

SEQ ID NO: 7527 - protein, 32 aa, Homo sapiens
MWNFPVTTLISISSCPPPHRIPNIWFIILALH

SEQ ID NO: 7528 - DNA, 762 bp, Homo sapiens
agtccactggagtgggagtttccaaatcagatgtgtcagcttttcctaacaactcgcagagtgattaaagaattttaaagcaagtaatttcactgtgactcccctaggttatgagcagcccaagaggaggaacaatggtagctccagaagttctaacaggaagaggaaagggtcagagattttattaagaaaagaattttggaggagtaatcagcggatttgacttgaaacaatagctgcagaatatgtttaattttgaagatctacacttttatttcagagaagtatggaggggcacaatgagtaaatacaaatgtttggtccactatcttggatcagaaggctagccgaacatcttggattccactgagctaattgacattgtataataatgaaaaaaataaacaaatttctcaagactcaaaatatctaagaatgtaggtcaagaacatttaagagggggaagatgggtgtaaatatctgagaacattctggggaaaggagttacagtgatgaacaaagaagacatatttgagaagtgaagaatacagacaactactcagaagggaggatcacttgagcccaggaattagaggctgcaatgagctatggtcatgccattgtattccagcctaggaggcaaagtgagaccctgtctcttctcttttgtttattttatagatggtccatcagtcactagtgaaaaaatttatatacgtgcacatgcatacacacaggcatactgatacagtttggctgtgt

SEQ ID NO: 7529 - protein, 45 aa, Homo sapiens
MVMPLYSSLGGKVRPCLFSFVYFIDGPSVTSEKIYIRAHAYTQAY

SEQ ID NO: 7530 - DNA, 545 bp, Homo sapiens
aagtaaataccaacaactgcttcacaaaggttccacatatatgttcctgcttgatgtatcctcttagctgtttcaaaggtaaccctcaaatatatgtgtagctttgacttcaccatcttctcaggtctgtagggctgtctcctgaatgtcaatgaatagtgaaactcgtcatttagttgtgaaattcagaaaactgtaagagtcctggagttgtcctttaccctgctgatcaaatcctgttgatgttatctaccacatcagatggtttttttgctcgatcagtgatcagcaaaagggctgttctgtgtattgtatgatattcaccagcatccctgaccactacccactagatgctaagtgtgatctctaaactagcaactagcgcctccaggtaatttgtcagaaatgcaaattctcaggccccatccacgacctactaaatcaatgatacccagatatctgcattttaacaaggtttccgtgccaaggtgcagtggctataatcccagcactttgggaggccaaggagagaggcttgctttagc

SEQ ID NO: 7531 - protein, 45 aa, Homo sapiens
MQILRPHPRPTKSMIPRYLHFNKVSVPRCSGYNPSTLGGQGERLA

SEQ ID NO: 7532 - DNA, 2739 bp, Homo sapiens
cgtggagtggtctggtgaatgcttaaggagctgcagaagggaagtacaaatcaaagtggaggaaaaagaagacgagactgaggaaagctcaagtgaagaggaagaggaggtggaagataagctacctcgaagagagagcttgagaccaaagaggaaacggaccagagatgttatcaatgaggatgacccagaacctgaaccagaggatgaagaaacaaggaaggcaagagaaaaagagaggaggaggaggctaaagagaggagcggaggcaaaaaaatttgtgagtgaaaatgaaggggctcttgggaaaggaaaaggaaaacggtggtttgcatttaagatgatgatggccaagaaatgggcaaaattcctccgtgattttgagaacttcaaagctgcgtgtgtcccatgggaaaataaaatcaaggctattgaaagtcagtttggctcctcagtggcctcatacttcctcttcttgagatggatgtatggagtcaatatggttctctttatcctgacatttagcctcatcatgttgccagagtacctctggggtttgccatatggcagtttacctaggaaaaccgttcccagagccgaagaggcatcggcagcaaactttggtgtgttgtacgacttcaatggtttggcacaatattccgttctcttttatggctattatgacaataaacgaacaattggatggatgaatttcaggttgccgctctcctattttctagtggggattatgtgcattggatacagctttctggttgtcctcaaagcaatgaccaaaaacattggtgatgatggaggtggagatgacaacactttcaatttcagctggaaggtctttaccagctgggactacctgatcggcaatcctgaaacagcagacaacaaatttaattctatcacaatgaactttaaggaagctatcacagaagaaaaagcagcccaagtagaagaaaacgtccacttgatcagattcctgaggtttctggctaacttcttcgtgtttctaacacttggagggagtggatacctcatcttttgggctgtgaagcgatcccaggaatttgcacagcaagatcctgacacccttgggtggtgggaaaaaaatgaaatgaacatggttatgtccctcctagggatgttctgtccaacattgtttgacttatttgctgaattagaagactaccatcctctcatcgctttgaaatggctactgggacgcatttttgctcttcttttaggcaatttatacgtatttattcttgcattaatggatgagattaacaacaagattgaagaggagaagctagtaaaggccaatattaccctttgggaagccaatatgatcaaggcctacaatgcatcattctctgaaaatagcactggaccacccttttttgttcaccctgcagatgtacctcgaggaccttgctgggaaacaatggtgggacaggagtttgtgaggctgacagtctctgatgttctgaccacctacgtcacaatcctcattggggactttctaagggcatgttttgtgaggttttgcaattattgctggtgctgggacttggagtatggatatccttcatacaccgaattcgacatcagtggcaacgtcctcgctctgatcttcaaccaaggcatgatctgatctgtcctgaattattaaacctttgggtgctgacagacaccggacccctctgcaaatgctaaaaccgtcttgcttctgtcacacaaagacaactctccagggctccatcgtcctgccatgggatgactgttaaattcctgtgcctgactaggtgaatcaatatggaaaagatattataaaaatattgtttcctcctttgtcaggatgggctccttctttgctcccagcctcccaggcatcaatatccttcgactccatacatccatgtacttccagtgctgggccgttatgtgctgcaatgttcctgaggccagggtcttcaaagcttccagatcaaataacttctacctgggcatgctactgctcatcctcttcctgtccacaatgcctgtcttgtacatgatcgtgtccctcccaccatcttttgattgtggtccattcagtggcaaaaatagaatgtttgaagtcattggagagaccctggagcacgatttcccaagctggatggcgaagatcttgagacagctttcaaaccctgggctggtcattgctgtcattttggtgatggttttggccatctattatctcaatgctactgccaagggccagaaggcagcgaatctggatctcaaaaagaagatgaaaatgcaagctttggagaacaaaatgcgaaacaagaaaatggcagctgcacgagcagctgcagctgctggtcgccagtaataagtatcctgagagcccagaaaaggtacactttgccttgctgtttaaaagtaatgcaatatgtgaacgcccagagaacaagcactgtggaactgctattttcctgttctacccttgatggattttcaaggtcatgctggccaattaaggcatcatcagtcctacctgagcaacaagaatctaaactttattccaagtcagaaactgtttctgcagagccactctctcccctgctccatttcgtgactttttttttttttttaacaaattgagtttagaagtgagtgtaatccagcaatacagtttactggtttagttggtgggttaattaaaaaaaatttgctcatatg

SEQ ID NO: 7533 - protein, 441 aa, Homo sapiens
MMMAKKWAKFLRDFENFKAACVPWENKIKAIESQFGSSVASYFLFLRWMYGVNMVLFILTFSLIMLPEYLWGLPYGSLPRKTVPRAEEASAANFGVLYDFNGLAQYSVLFYGYYDNKRTIGWMNFRLPLSYFLVGIMCIGYSFLVVLKAMTKNIGDDGGGDDNTFNFSWKVFTSWDYLIGNPETADNKFNSITMNFKEAITEEKAAQVEENVHLIRFLRFLANFFVFLTLGGSGYLIFWAVKRSQEFAQQDPDTLGWWEKNEMNMVMSLLGMFCPTLFDLFAELEDYHPLIALKWLLGRIFALLLGNLYVFILALMDEINNKIEEEKLVKANITLWEANMIKAYNASFSENSTGPPFFVHPADVPRGPCWETMVGQEFVRLTVSDVLTTYVTILIGDFLRACFVRFCNYCWCWDLEYGYPSYTEFDISGNVLALIFNQGMI

SEQ ID NO: 7534 - DNA, 2535 bp, Homo sapiens
cgtggagtggtctggtgaatgcttaaggagctgcagaagggaagtacaaatcaaagtggaggaaaaagaagacgagactgaggaaagctcaagtgaagaggaagaggaggtggaagataagctacctcgaagagagagcttgagaccaaagaggaaacggaccagagatgttatcaatgaggatgacccagaacctgaaccagaggatgaagaaacaaggaaggcaagagaaaaagagaggaggaggaggctaaagagaggagcggaggcaaaaaaatttgtgagtgaaaatgaaggggctcttgggaaaggaaaaggaaaacggtggtttgcatttaagatgatgatggccaagaaatgggcaaaattcctccgtgattttgagaacttcaaagctgcgtgtgtcccatgggaaaataaaatcaaggctattgaaagtcagtttggctcctcagtggcctcatacttcctcttcttgagatggatgtatggagtcaatatggttctctttatcctgacatttagcctcatcatgttgccagagtacctctggggtttgccatatggcagtttacctaggaaaaccgttcccagagccgaagaggcatcggcagcaaactttggtgtgttgtacgacttcaatggtttggcacaatattccgttctcttttatggctattatgacaataaacgaacaattggatggatgaatttcaggttgccgctctcctattttctagtggggattatgtgcattggatacagctttctggttgtcctcaaagcaatgaccaaaaacattggtgatgatggaggtggagatgacaacactttcaatttcagctggaaggtctttaccagctgggactacctgatcggcaatcctgaaacagcagacaacaaatttaattctatcacaatgaactttaaggaagctatcacagaagaaaaagcagcccaagtagaagaaaacgtccacttgatcagattcctgaggtttctggctaacttcttcgtgtttctaacacttggagggagtggatacctcatcttttgggctgtgaagcgatcccaggaatttgcacagcaagatcctgacacccttgggtggtgggaaaaaaatgaaatgaacatggttatgtccctcctagggatgttctgtccaacattgtttgacttatttgctgaattagaagactaccatcctctcatcgctttgaaatggctactgggacgcatttttgctcttcttttaggcaatttatacgtatttattcttgcattaatggatgagattaacaacaagattgaagaggagaagctagtaaaggccaatattaccctttgggaagccaatatgatcaaggcctacaatgcatcattctctgaaaatagcactggaccacccttttttgttcaccctgcagatgtacctcgaggaccttgctgggaaacaatggtgggacaggagtttgtgaggctgacagtctctgatgttctgaccacctacgtcacaatcctcattggggactttctaagggcatgttttgtgaggttttgcaattattgctggtgctgggacttggagtatggatatccttcatacaccgaattcgacatcagtggcaacgtcctcgctctgatcttcaaccaaggcatgatctggatgggctccttctttgctcccagcctcccaggcatcaatatccttcgactccatacatccatgtacttccagtgctgggccgttatgtgctgcaatgttcctgaggccagggtcttcaaagcttccagatcaaataacttctacctgggcatgctactgctcatcctcttcctgtccacaatgcctgtcttgtacatgatcgtgtccctcccaccatcttttgattgtggtccattcagtggcaaaaatagaatgtttgaagtcattggagagaccctggagcacgatttcccaagctggatggcgaagatcttgagacagctttcaaaccctgggctggtcattgctgtcattttggtgatggttttggccatctattatctcaatgctactgccaagggccagaaggcagcgaatctggatctcaaaaagaagatgaaaatgcaagctttggagaacaaaatgcgaaacaagaaaatggcagctgcacgagcagctgcagctgctggtcgccagtaataagtatcctgagagcccagaaaaggtacactttgccttgctgtttaaaagtaatgcaatatgtgaacgcccagagaacaagcactgtggaactgctattttcctgttctacccttgatggattttcaaggtcatgctggccaattaaggcatcatcagtcctacctgagcaacaagaatctaaactttattccaagtcagaaactgtttctgcagagccactctctcccctgctccatttcgtgactttttttttttttttaacaaattgagtttagaagtgagtgtaatccagcaatacagtttactggtttagttggtgggttaattaaaaaaaatttgctcatatg

SEQ ID NO: 7535 - protein, 614 aa, Homo sapiens
MMMAKKWAKFLRDFENFKAACVPWENKIKAIESQFGSSVASYFLFLRWMYGVNMVLFILTFSLIMLPEYLWGLPYGSLPRKTVPRAEEASAANFGVLYDFNGLAQYSVLFYGYYDNKRTIGWMNFRLPLSYFLVGIMCIGYSFLVVLKAMTKNIGDDGGGDDNTFNFSWKVFTSWDYLIGNPETADNKFNSITMNFKEAITEEKAAQVEENVHLIRFLRFLANFFVFLTLGGSGYLIFWAVKRSQEFAQQDPDTLGWWEKNEMNMVMSLLGMFCPTLFDLFAELEDYHPLIALKWLLGRIFALLLGNLYVFILALMDEINNKIEEEKLVKANITLWEANMIKAYNASFSENSTGPPFFVHPADVPRGPCWETMVGQEFVRLTVSDVLTTYVTILIGDFLRACFVRFCNYCWCWDLEYGYPSYTEFDISGNVLALIFNQGMIWMGSFFAPSLPGINILRLHTSMYFQCWAVMCCNVPEARVFKASRSNNFYLGMLLLILFLSTMPVLYMIVSLPPSFDCGPFSGKNRMFEVIGETLEHDFPSWMAKILRQLSNPGLVIAVILVMVLAIYYLNATAKGQKAANLDLKKKMKMQALENKMRNKKMAAARAAAAAGRQ

SEQ ID NO: 7536 - DNA, 547 bp, Homo sapiens
agtggtctggtgaatgcttaaggagctgcagaagggaagtccctctccaaactagccagccactgagaccttctgacaggacacccccaggatgtcacccaaaaaagttgggacagaacaagtcaactggcaagtccattgctcagcttgttgaaatactctgcacagaatgcaaggaaaaactgttttcatgaggtagcccatgaagcgatgaagcaaggcaaatttatctgcctggataacctcctgtatgctgttttcactccatggagagtcaacacaacagacttctgagttgtattatcgagctccttcaacagggcattgctgtaagatcctagatcccacactccatggtgtgatgttttagccaagtctggaagtagcacaggccctaaaatctcatgattgcaggttgtcaactctgctgtaggcttgccacttcaagggcaagtggttggttggggctgggatttgggcagagccatagaaagaaagggaacattcaagggaatttgatgatgtgcatgatgtctctgtctgatac

SEQ ID NO: 7537 - protein, 46 aa, Homo sapiens
MIAGCQLCCRLATSRASGWLGLGFGQSHRKKGNIQGNLMMCMMSLS

SEQ ID NO: 7538 - DNA, 574 bp, Homo sapiens
aaaatttgggaatccacattcacctatttgagtcggtgaaccacaatggaaatggaaatctagatacatttatttaaatgatgggctatgaaatatgtattccatgatgcatcccatcacgatgtggagaattgctagactgtgctgtcagatgtgtaataatagttattaaaaactaagaataagcttggtagtgggaggaagcactttctgacattactcattgaatcaagtgctatgtttaggtgaagaggaagaggaggtggaagataagctacctcgaagagagagcttgagaccaaagaggaaacggaccagagatgttatcaatgaggatgacccagaacctgaaccagaggatgaagaaacaaggaaggcaagagaaaaagagaggaggaggaggctaaagagaggagcagaagaagaagaaattgatgaagaggaattggaaagattgaaggcagagttagatgagaaaagacaaataattgctactgtcaaatgcaaaccatggaagatggagaagaaaattgaagttctcaaggaggcaaaaaaatttgtgagtgaaaatgaa

SEQ ID NO: 7539 - DNA, 3624 bp, Homo sapiens
ctctcagcgctctctctccatctctcccctctctttctctctcgctgctcccttcctccctgtaactgaacagtgaaaattcacattgtggatccgctaacaggcacagatgtcatgtgaaaacgcacatgctctgccatccacaccgcctttctttcttttctttctgtttccttttttcccccttgttccttctccctcttctttgtaactaacaaaaccaccaccaactcctcctcctgctgctgcccttcctcctcctcctcagtccaagtgatcacaaaagaaatcttctgagccggaggcggtggcattttttaaaaagcaagcacattggagagaaagaaaaagaaaaacaaaaccaaaacaaaacccaggcaccagacagccagaacatttttttttcacccttcctgaaaacaaacaaacaaacaaacaatcatcaaaacagtcaccaccaacatcaaaactgttaacatagcggcggcggcggcaaacgtcaccctgcagccacggcgtccgcctaaagggatggttttctcggcagagcagctcttcgccgaccaccttcttcactcgtgctgagcgggatttttgggctctccggggttcgggctgggagcagcttcatgactacgcggagcgggagagcggccacaccatgcgagcacaaattgaagtgataccatgcaaaatttgtggcgataagtcctctgggatccactacggagtcatcacatgtgaaggctgcaagggattctttaggaggagccagcagaacaatgcttcttattcctgcccaaggcagagaaactgtttaattgacagaacgaacagaaaccgttgccaacactgccgactgcagaagtgtcttgccctaggaatgtcaagagatgctgtgaagtttgggaggatgtccaagaagcaaagggacagcctgtatgctgaggtgcagaagcaccagcagcggctgcaggaacagcggcagcagcagagtggggaggcagaagcccttgccagggtgtacagcagcagcattagcaacggcctgagcaacctgaacaacgagaccagcggcacttatgccaacgggcacgtcattgacctgcccaagtctgagggttattacaacgtcgattccggtcagccgtcccctgatcagtcaggacttgacatgactggaatcaaacagataaagcaagaacctatctatgacctcacatccgtacccaacttgtttacctatagctctttcaacaatgggcagttagcaccagggataaccatgactgaaatcgaccgaattgcacagaacatcattaagtcccatttggagacatgtcaatacaccatggaagagctgcaccagctggcgtggcagacccacacctatgaagaaattaaagcatatcaaagcaagtccagggaagcactgtggcaacaatgtgccatccagatcactcacgccatccaatacgtggtggagtttgcaaagcggataacaggcttcatggagctctgtcaaaatgatcaaattctacttctgaagtcaggttgcttggaagtggttttagtgagaatgtgccgtgccttcaacccattaaacaacactgttctgtttgaaggaaaatatggaggaatgcaaatgttcaaagccttaggttctgatgacctagtgaatgaagcatttgactttgcaaagaatttgtgttccttgcagctgaccgaggaggagatcgctttgttctcatctgctgttctgatatctccagaccgagcctggcttatagaaccaaggaaagtccagaagcttcaggaaaaaatttattttgcacttcaacatgtgattcagaagaatcacctggatgatgagaccttggcaaagttaatagccaagataccaaccatcacggcagtttgcaacttgcacggggagaagctgcaggtatttaagcaatctcatccagagatagtgaatacactgtttcctccgttatacaaggagctctttaatcctgactgtgccaccggctgcaaatgaaggggacaagagaactgtctcatagtcatggaatgcatcaccattaagacaaaagcaatgtgttcatgaagacttaagaaaaatgtcactactgcaacattaggaatgtcctgcacttaatagaattatttttcaccgctacagtttgaagaatgtaaatatgcacctgagtggggctcttttatttgtttgtttgtttttgaaatgaccataaatatacaaatataggacactgggtgttatcctttttttaattttattcgggtatgttttgggagacaactgtttatagaattttattgtagatatatacaagaaaagagcggtactttacatgattacttttcctgttgattgttcaaatataatttaagaaaattccacttaataggcttacctatttctatgtttttaggtagttgatgcatgtgtaaatttgtagctgtcttggaaagtactgtgcatgtatgtaataagtatataatatgtgagaatattatatatgactattacttatacatgcacatgcactgtggcttaaataccatacctactagcaatggaggttcagtcaggctctcttctatgatttaccttctgtgttatatgttacctttatgttagacaatcaggattttgttttcccagccagagttttcatctatagtcaatggcaggacggtaccaactcagagttaagtctacaaaggaataaacataatgtgtggcctctatatacaaactctatttctgtcaatgacatcaaagccttgtcaagatggttcatattgggaaggagacagtattttaagccattttcctgtttcaagaattaggccacagataacattgcaaggtccaagacttttttgaccaaacagtagatattttctatttttcaccagaacacataaaaacactttttttcttttggatttctggttgtgaaacaagcttgatttcagtgcttattgtgtcttcaactgaaaaatacaatctgtggattatgactaccagcaatttttttctaggaaagttaaaagaataaatcagaacccagggcaacaatgccatttcatgtaaacattttctctctcaccatgttttggcaagaaaaggtagaaagagaagacccagagtgaagaagtaattctttatattcctttctttaatgtatttgttaggaaaagtggcaataaagggggaggcatattataaaatgctataatataaaaatgtagcaaaaacttgacagactagaaaaaaaaagatctgtgttattctagggaactaatgtaccccaaagccaaaactaattcctgtgaagtttacagttacatcatccatttaccctagaattatttttttagcaacttttagaaataaagaatacaactgtgacattaggatcagagattttagacttccttgtacaaattctcacttctccacctgctcaccaatgaaattaatcataagaaaagcatatattccaagaaatttgttctgcctgtgtcctggaggcctatacctctgttattttctgatacaaaataaaacttaaaaaaaagaaaacaagctaa

SEQ ID NO: 7540 - protein, 459 aa, Homo sapiens; identical to SEQ ID NO: 1084

SEQ ID NO: 7541 - DNA, 4456 bp, Homo sapiens
agtgaaaagtatcatatttttcagttagacttttaattgctacgtcaaaatgtgtgagaaccagctcaaaactaaagctgacgccactgcacaaattgaagtgataccatgcaaaatttgtggcgataagtcctctgggatccactacggagtcatcacatgtgaaggctgcaagggattctttaggaggagccagcagaacaatgcttcttattcctgcccaaggcagagaaactgtttaattgacagaacgaacagaaaccgttgccaacactgccgactgcagaagtgtcttgccctaggaatgtcaagagatgctgtgaagtttgggaggatgtccaagaagcaaagggacagcctgtatgctgaggtgcagaagcaccagcagcggctgcaggaacagcggcagcagcagagtggggaggcagaagcccttgccagggtgtacagcagcagcattagcaacggcctgagcaacctgaacaacgagaccagcggcacttatgccaacgggcacgtcattgacctgcccaagtctgagggttattacaacgtcgattccggtcagccgtcccctgatcagtcaggacttgacatgactggaatcaaacagataaagcaagaacctatctatgacctcacatccgtacccaacttgtttacctatagctctttcaacaatgggcagttagcaccagggataaccatgactgaaatcgaccgaattgcacagaacatcattaagtcccatttggagacatgtcaatacaccatggaagagctgcaccagctggcgtggcagacccacacctatgaagaaattaaagcatatcaaagcaagtccagggaagcactgtggcaacaatgtgccatccagatcactcacgccatccaatacgtggtggagtttgcaaagcggataacaggcttcatggagctctgtcaaaatgatcaaattctacttctgaagtcaggttgcttggaagtggttttagtgagaatgtgccgtgccttcaacccattaaacaacactgttctgtttgaaggaaaatatggaggaatgcaaatgttcaaagccttaggttctgatgacctagtgaatgaagcatttgactttgcaaagaatttgtgttccttgcagctgaccgaggaggagatcgctttgttctcatctgctgttctgatatctccagaccgagcctggcttatagaaccaaggaaagtccagaagcttcaggaaaaaatttattttgcacttcaacatgtgattcagaagaatcacctggatgatgagaccttggcaaagttaatagccaagataccaaccatcacggcagtttgcaacttgcacggggagaagctgcaggtatttaagcaatctcatccagagatagtgaatacactgtttcctccgttatacaaggagctctttaatcctgactgtgccaccggctgcaaatgaaggggacaagagaactgtctcatagtcatggaatgcatcaccattaagacaaaagcaatgtgttcatgaagacttaagaaaaatgtcactactgcaacattaggaatgtcctgcacttaatagaattatttttcaccgctacagtttgaagaatgtaaatatgcacctgagtggggctcttttatttgtttgtttgtttttgaaatgaccataaatatacaaatataggacactgggtgttatcctttttttaattttattcgggtatgttttgggagacaactgtttatagaattttattgtagatatatacaagaaaagagcggtactttacatgattacttttcctgttgattgttcaaatataatttaagaaaattccacttaataggcttacctatttctatgtttttaggtagttgatgcatgtgtaaatttgtagctgtcttggaaagtactgtgcatgtatgtaataagtatataatatgtgagaatattatatatgactattacttatacatgcacatgcactgtggcttaaataccatacctactagcaatggaggttcagtcaggctctcttctatgatttaccttctgtgttatatgttacctttatgttagacaatcaggattttgttttcccagccagagttttcatctatagtcaatggcaggacggtaccaactcagagttaagtctacaaaggaataaacataatgtgtggcctctatatacaaactctatttctgtcaatgacatcaaagccttgtcaagatggttcatattgggaaggagacagtattttaagccattttcctgtttcaagaattaggccacagataacattgcaaggtccaagacttttttgaccaaacagtagatattttctatttttcaccagaacacataaaaacactttttttcttttggatttctggttgtgaaacaagcttgatttcagtgcttattgtgtcttcaactgaaaaatacaatctgtggattatgactaccagcaatttttttctaggaaagttaaaagaataaatcagaacccagggcaacaatgccatttcatgtaaacattttctctctcaccatgttttggcaagaaaaggtagaaagagaagacccagagtgaagaagtaattctttatattcctttctttaatgtatttgttaggaaaagtggcaataaagggggaggcatattataaaatgctataatataaaaatgtagcaaaaacttgacagactagaaaaaaaaagatctgtgttattctagggaactaatgtaccccaaagccaaaactaattcctgtgaagtttacagttacatcatccatttaccctagaattatttttttagcaacttttagaaataaagaatacaactgtgacattaggatcagagattttagacttccttgtacaaattctcacttctccacctgctcaccaatgaaattaatcataagaaaagcatatattccaagaaatttgttctgcctgtgtcctggaggcctatacctctgttattttctgatacaaaataaaacttaaaaaaaagaaaacaagctaagagagaagtttgtgtataagacaatgaaaattatggtctcctgtaagtatatcccagccaccaactcctaaagaactgcccttttctccatattaaacacacacacacttacacacacacacatacaaacccctgctttgtaaagtttccatcagtggaaactttgatttctttttttaatctcttatgctctcctgaagttcatggttgagcaccatctccaagataccacagaactcttgattgatgatcaaaacagtagtgtcatcttttccttttagaaaacggaacattttctcacctcatgattgatgaattctaaaccaatggggaaaaacaaaaaggctttaaaataatgaatctgtttctcaactactgttatattcaattaatttaactacattgaaccaaattacctttggttctaagaagacagctgtagactgcttattatgctgctacagggactcaattctttttggtgtaaatgtcactcctgctagctctttgtataaagaattaattcccagagtcatatttccttctaatggaaagattactctactgattgctaggaaaacagggtaatggaaggcactcaattaaaccaagccgtttccaaatgcaatgtatgttttatgattggcttgtgataggcgatgcttcatgtgtctacttggtgtttccctttgagctttgaacttatgtcaaactttgttttcattgttctgttggcctagtgttttccattgtcagcctgtaattcctgctcagttgcagagggaattatttatttcctccaatttaccttagaggatttaaattggctcaattgatgaagtggctcagaattttttcctcccttttcccatgggtgatataggaaaaagattgttccccacatttaccttgggaggtactgctttgaatttgtgttgtttccactagcgttaagcatttcactgggacggcatggaccttttgaagctgggaggaaggaaacagagctagcatctgaaccagagcaaaacaatggcaaccaggacatactcatcccacttagttgagagaagagatttctagtttgggttacagttgcccaaccttccctttaaagagaatccagtcatgttttcaatggtaaaaagccttaaaaagctgcccttcgaagatctcctatgactgcatgtcaaggtattttgtacctacaatcccagaacttggttccttccccatgaggactaacaaatgttcacaacaatcatgatcaagtgtgcactggaagaaaaaatccacaatctgggcttctcacttcgtgcttcataaatgacaatcactgcttgatgcagatgttgcactgtatccactcagggatgtttccttaaaaaaaaaaaatacatcaagaaggagg

SEQ ID NO: 7542 - protein, 470 aa, Homo sapiens
MCENQLKTKADATAQIEVIPCKICGDKSSGIHYGVITCEGCKGFFRRSQQNNASYSCPRQRNCLIDRTNRNRCQHCRLQKCLALGMSRDAVKFGRMSKKQRDSLYAEVQKHQQRLQEQRQQQSGEAEALARVYSSSISNGLSNLNNETSGTYANGHVIDLPKSEGYYNVDSGQPSPDQSGLDMTGIKQIKQEPIYDLTSVPNLFTYSSFNNGQLAPGITMTEIDRIAQNIIKSHLETCQYTMEELHQLAWQTHTYEEIKAYQSKSREALWQQCAIQITHAIQYVVEFAKRITGFMELCQNDQILLLKSGCLEVVLVRMCRAFNPLNNTVLFEGKYGGMQMFKALGSDDLVNEAFDFAKNLCSLQLTEEEIALFSSAVLISPDRAWLIEPRKVQKLQEKIYFALQHVIQKNHLDDETLAKLIAKIPTITAVCNLHGEKLQVFKQSHPEIVNTLFPPLYKELFNPDCATGCK

SEQ ID NO: 7543 - DNA, 1869 bp, Homo sapiens
acacccactttccttattagggcagagtcgggtgcccagagccggcggccgggcgaggggtggggcggggagccctgggcgagacggtcgagggcgcaagcacagcctccgccgcagccgcctcagagcggcaggagggagcagtcggtcgctgcgccccggcgggccactttcccgggaccccgctcgtcttccttgggccgagattttccactgcgcccctccgagtacccgggttccaaacccctagccacgacatggaagaatttttgcaacgcgccaaatctaaactgaatcgaagcaaacgcttggagaaggtccatgtggttattgggcctaaatcgtgtgacttggattctctcatttctaccttcacatatgcttactttctagacaaggtcagtccaccaggggttctgtgtttaccagtgctgaacataccaagaactgaattcaactacttcaccgagacgaggtttattttagaagagctaaatatttccgaatcattccacatattccgggatgaaattaacctgcatcagctaaatgatgaagggaagttatcgataacacttgttggcagcagtgtgctggcgagtgaagacaaaactttagaatcagcagttgtcaaagtcattaatccggttgagcagagcgatgccaacgttgagttccgagagtcttcctcttctctcgtgctaaaggagattctccaagaggctcctgagctcatcaccgagcaactggctcatcgcctcagaggtagcattcttttcaagtggatgaccatggaatcagagaagatctcagagaagcaggaggaaattctttctatcctggaagaaaaatttcctaacttgcctccaagagaggacatcatcaacgtcctacaggagacccagttcagtgctcagggtttaagtattgaacagacaatgttgaaagatctaaaggagctgtcagatggagaaataaaagtggccattagtactgtgagcatgaaccttgaggtaagggtgggaatgcttttttagcattgattgatttcccacaattgcagtctgagcaactggaatgtaactctctccattggataagtccatgatagtcctttgcttctttgtgatacatttgacttggaatatagtggcaggttattatttgggtgaaaacactatgctaagtcaatgaaaaatgccaaacctggattctcaagatgaatgctctttcattcatctcagtaaaacaaagcctaaaacaaacactcagatgtgggtgtatatttaacctgtttaatagcaattatgatatgtgtgattaggttcacttccatattttctgtgtaccaccctgtattgttcatagaacttttcttaaaaaaaaaaaagaaaaaagaaaaaaaagcaagttgtcttttgatcttcaaaactatttgaatgcatgccattttggtaatcagtggtgacaactcaagtattacttaacaaggaacctccttccaaactgttaactgaatggctcagagcgaatgctacttttgtctttatgtgtttccttggtgagttatcttttgtctactttgggagttttcaatgacttatatgttaatcttaattaacctaactaatgggaactatattttacagaggcacatttgtgcatttgtagaagtctgtgtatttctttactgttgtattgtctttaccaggttatctacatttggttgggcacttagctcttaggtcgagtttatggagatgaaatatgctctataggaatttgtgttttggtttttagaattgtgtgttgccattcttttttttttctttttctttgaggtggagtcttgctctgtcacccaggctg

SEQ ID NO: 7544 - protein, 259 aa, Homo sapiens; identical to SEQ ID NO: 1088

SEQ ID NO: 7545 - DNA, 7345 bp, Homo sapiens
agagcgcgcccccagcgctgtgcccgccgcgacccgggccatgggctggtgctccggagcgtgccgggcgctctctccccgcgcgggggcaccagagccctcggaagtgtcaggcactgcggtgtattttccccgttctcttttaaatgactgcggaaaaacagattccgagccgcaaaagggaagacggattctcagacaaggcttgcaaatgccccgcagccatcatttaactgcacccgcagaatagttacggtttgtcacccgaccctcccggatcgcctaatttgtccctagtgagaccccgaggctctgcccgcgcctggcttcttcgtagctggatgcatatcgtgctccgggcagcgcgggcgcagggcacgcgttcgcgcacaccctagcacacatgaacacgcgcaagagctgaaccaagcacggtttccatttcaaaaagggagacagcctctaccgcgattgtagaagagactgtggtgtgaattagggaccgggaggcgtcgaacggaggaacggttcatcttagagactaattttctggagtttctgcccctgctctgcgtcagccctcacgtcacttcgccagcagtagcagaggcggcggcggcggctcccggaattgggttggagcaggagcctcgctggctgcttcgctcgcgctctacgcgctcagtccccggcggtagcaggagcctggacccaggcgccgccggcgggcgtgaggcgccggagcccggcctcgaggtgcataccggacccccattcgcatctaacaaggaatctgcgccccagagagtcccgggagcgccgccggtcggtgcccggcgcgccgggccatgcagcgacggccgccgcggagctccgagcagcggtagcgcccccctgtaaagcggttcgctatgccggggccactgtgaaccctgccgcctgccggaacactcttcgctccggaccagctcagcctctgataagctggactcggcacgcccgcaacaagcaccgaggagttaagagagccgcaagcgcagggaaggcctccccgcacgggtgggggaaagcggccggtgcagcgcggggacaggcactcgggctggcactggctgctagggatgtcgtcctggataaggtggcatggacccgccatggcgcggctctggggcttctgctggctggttgtgggcttctggagggccgctttcgcctgtcccacgtcctgcaaatgcagtgcctctcggatctggtgcagcgacccttctcctggcatcgtggcatttccgagattggagcctaacagtgtagatcctgagaacatcaccgaaattttcatcgcaaaccagaaaaggttagaaatcatcaacgaagatgatgttgaagcttatgtgggactgagaaatctgacaattgtggattctggattaaaatttgtggctcataaagcatttctgaaaaacagcaacctgcagcacatcaattttacccgaaacaaactgacgagtttgtctaggaaacatttccgtcaccttgacttgtctgaactgatcctggtgggcaatccatttacatgctcctgtgacattatgtggatcaagactctccaagaggctaaatccagtccagacactcaggatttgtactgcctgaatgaaagcagcaagaatattcccctggcaaacctgcagatacccaattgtggtttgccatctgcaaatctggccgcacctaacctcactgtggaggaaggaaagtctatcacattatcctgtagtgtggcaggtgatccggttcctaatatgtattgggatgttggtaacctggtttccaaacatatgaatgaaacaagccacacacagggctccttaaggataactaacatttcatccgatgacagtgggaagcagatctcttgtgtggcggaaaatcttgtaggagaagatcaagattctgtcaacctcactgtgcattaccaccactggtgcattccattcactgtgaaaggcaaccccaaaccagcgcttcagtggttctataacggggcaatattgaatgagtccaaatacatctgtactaaaatacatgttaccaatcacacggagtaccacggctgcctccagctggataatcccactcacatgaacaatggggactacactctaatagccaagaatgagtatgggaaggatgagaaacagatttctgctcacttcatgggctggcctggaattgacgatggtgcaaacccaaattatcctgatgtaatttatgaagattatggaactgcagcgaatgacatcggggacaccacgaacagaagtaatgaaatcccttccacagacgtcactgataaaaccggtcgggaacatctctcggtctatgctgtggtggtgattgcgtctgtggtgggattttgccttttggtaatgctgtttctgcttaagttggcaagacactccaagtttggcatgaaaggttttgttttgtttcataagatcccactggatgggtagctgaaataaaggaaaagacagagaaaggggctgtggtgcttgttggttgatgctgccatgtaagctggactcctgggactgctgttggcttatcccgggaagtgctgcttatctggggttttctggtagatgtgggcggtgtttggaggctgtactatatgaagcctgcatatactgtgagctgtgattggggaacaccaatgcagaggtaactctcaggcagctaagcagcacctcaagaaaacatgttaaattaatgcttctcttcttacagtagttcaaatacaaaactgaaatgaaatcccattggattgtacttctcttctgaaaagtgtgctttttgaccctactggacatttattgacttaattgcttctgtttattaaaattgacctgcaaagttaaaaaaaaattaaagttgagaacaggtataagtgcacactgaatagtctaatctacatgtaacacatattttagtgtgattttctatactctaatcagcactgaattcagagggtttgactttttcatctataacacagtgactaaaagagttaagggtatatataccatcactttgggacttggtagtattattaaaaggttatttccttcactgtcaataaaagtccaaatgtttagcttaggtctgagagtcaaacaatgttaaggattgtcttaaagttccttagccagcaaaacaaaacaaaacaaaacaaacaaatgaaaaacgtttaaaaagaagaagaagaaaaaaaacaagaacaagcagcaacagctgttttgttggggctatagatttaagttaggcatagtcaatttcagaataactaagagtggaatatatgcatatggtgaaattataaccttgcccttttttatttgccctctgcgatccacctgctttttagaagtctgccgagtgagaaggccacagtatctcatgctgtttgcattacagaactgcagcttttctactctgaaaaggcctgggagcagaatggctggcctgctgtgagcaggagaggagattctaagaaggatagtcccccctacaacatactgtcatactgctgggttttcatgggtaggaaagcttgtcctgaccccagcagcaaagaggtggcaggtcgctaatgaatatatgctttataatgtccttcttcattgctgagagggcagccttagagctgtggatttctgcatcccccctgagtctgacccatggacacctgtttcattcactttagcatcacagtgacctttgtatgctctgttcagtctgtgtcaggcagtatgcttgtcctgaagagaggtttggctatccccaccccaccccaccccaccctgttccttttttatcaggaggacttcagagccaggcctgcagcattttgtttgaaaacacaatcagctctgacagttagacatgcacacagacgccatagctggattggaaacattgatgttttaaaaatttattttttttggaaatagttgcacaaatgctgcaatttagctttaaggttctatagatttttaactagtccaacacagtcagaaacattgttttgaatcctctgtaaaccaaggcattaatcttaataaaccaggatccatttaggtaccacttgatataaaaaggatatccataatgaatattttatactgcatcctttacattagccactaaatacgttattgcttgatgaagacctttcacagaatcctatggattgcagcatttcacttggctacttcatacccatgccttaaagaggggcagtttctcaaaagcagaaacatgccgccagttctcaagttttcctcctaactccatttgaatgtaagggcagctggcccccaatgtggggaggtccgaacattttctgaattcccattttcttgttcgcggctaaatgacagtttctgtcattacttagattccgatctttcccaaaggtgttgatttacaaagaggccagctaatagcagaaatcatgaccctgaaagagagatgaaattcaagctgtgagccaggcaggagctcagtatggcaaaggttcttgagaatcagccatttggtacaaaaaagatttttaaagcttttatgttataccatggagccatagaaaggctatggattgtttaagaactattttaaagtgttccagacccaaaaaggaaaaataaaaaaaaaggaatatttgtacccaacagctagaaggattgcaaggtagatttttgttttaaaatggagagaagtggacagataaggccatttaatatatcaaagatcagttgacatctcctagggaatgatgaaaacagcaggctattagaaaattatttcatatagttctcgtgttcttttcttttttttaatccctgaagggatgatcagtaacatagcttctcttttctgtactctagaccaccccttttcatcattttgctttttatgtctcccataagaaatgtgctttttagagcttcctaatgcatgtgttgcattattgcagcattagaaaaggagaggtagcatttttgctgaaatcgggcctgtcactctccaataaaggttctggcacttcaatgccaggcaggtctcctaaatgaacagaatgatctgtgtgagccgatgcctgcccttccagaggggccactgtccccagccgcagccaactgtgtcccacaggaatgggagcctaggtttccaaatcttgtgattctttaggagaaacatgaaacctggatttcgtgtgaaatgtcccgattgttaaaaagttggctcaattatttttaaaacattttgtaagccaacaaaagtctgtgggctgccagtttattacttttgtcttaaaacatgatcattgttctctcacggtatccttctgtcttcccgttgcaaattcacttttctttcttcctgacattgccattgagggctttgttaccacaagctaagaaactgagtttaacagcccagttatctgcaacatgtcaattacctttgctcctctcctgtgattcccaccatgctgtgaccctcagctgtctccctttgctgggaattctgcaccaatgtctcccctcaacccattccctggttggtcctactcccgtgtggccagagacatcctagcaaatccttcctcctattatatctgacactaatttcttttcaacagcgctcatgtctcttggcccagtcaggtgctgccaggtttagataggaaagtacatgtcccattttcatgggtgcccttaatgtggtccacgtcctatatcttattatatttactcatggctcaatgggggcctccagagaccctctcaggctgctgagctagactaaggaatgcatccaccgtcatcacatgagacactgactctgtgacgacaaaagtacaaacagtctgaggctaagaaaggttcatctcacaacaggaaaaacaaatctcaacacacattagagataattgattcaggggttttctctcccagtctcccagcagggactgatttcatttctgacccactaggttttctttccagaaataggtagcaaggacaagaactaaacaatcccagccccacccagcaacacagaacacaggagtttgcttttggcttctcactctccaagtaaccctgaattaggcccagaatggctgaggcttggagcatctcctcagacagagcagaggcgacacctcttcaggggtgtgtggagtaaatagctcgaagagctgaagacagaaaaccagtttcacgccaggtgcgagagagagcataatggagggaagcccgctttctctctcctcttcttttctctttatttctttagagcacttgacttttttttctctctctctctagtattctaaactgaccccatgaccaactgagaatttatttttgtttcattggttgtttcacagaattagaacacacacgactttttattcctccattgcaaaatggaatcaagatactacacaagacctgtgctttcttcctttgcatgatttacacctccgcctgttttggtgctagctgtctagaacttctctcttggtttgaatctgattccttcacactacactagaagtttatttcatcttgttttgtctagactccagatacagagggacagctggactgaggacaagcaattccatctagcatagggtctctcagggttggtgcatccagccacatgggcagggccagtcacatctagtctatgtccccagagcccttggagttgcgcagcttagctgacttgactccaaggaaattagtacagaagtaaccactctattaagtgtgttctgctatgttcacatgcctgtagtacctgcaaaccatgccaggttcatctaaagacataggggaagattaaggactcttttggacagaccatgaattgaatttgctgccaggtgctgccagactgaatttggctgacagaactcccagcccaggaaagttccatgacaatgactgtcgcagaaggaaatttcccactaaagtcagtccattttcaagttttggtcttcagagacaaaagaacgtcccagccacctgattttgatggtgaggtaactctaagttgaattcaggctagtgttgcagtatagctttggcatgttcatgagtgagcacccagaatgtgttgaaccaacccccacccctaactactgactatgactgcagtgggtttttatggggaaaaaaagtgtgaaaagcaaaaagaaaggaacagagattttttatcacctttattgtaagacagtccatttatgaattgagtataaacacat

SEQ ID NO: 7546 - protein, 464 aa, Homo sapiens
MSSWIRWHGPAMARLWGFCWLVVGFWRAAFACPTSCKCSASRIWCSDPSPGIVAFPRLEPNSVDPENITEIFIANQKRLEIINEDDVEAYVGLRNLTIVDSGLKFVAHKAFLKNSNLQHINFTRNKLTSLSRKHFRHLDLSELILVGNPFTCSCDIMWIKTLQEAKSSPDTQDLYCLNESSKNIPLANLQIPNCGLPSANLAAPNLTVEEGKSITLSCSVAGDPVPNMYWDVGNLVSKHMNETSHTQGSLRITNISSDDSGKQISCVAENLVGEDQDSVNLTVHYHHWCIPFTVKGNPKPALQWFYNGAILNESKYICTKIHVTNHTEYHGCLQLDNPTHMNNGDYTLIAKNEYGKDEKQISAHFMGWPGIDDGANPNYPDVIYEDYGTAANDIGDTTNRSNEIPSTDVTDKTGREHLSVYAVVVIASVVGFCLLVMLFLLKLARHSKFGMKGFVLFHKIPLDG

SEQ ID NO: 7547 - DNA, 7645 bp, Homo sapiens
agagcgcgcccccagcgctgtgcccgccgcgacccgggccatgggctggtgctccggagcgtgccgggcgctctctccccgcgcgggggcaccagagccctcggaagtgtcaggcactgcggtgtattttccccgttctcttttaaatgactgcggaaaaacagattccgagccgcaaaagggaagacggattctcagacaaggcttgcaaatgccccgcagccatcatttaactgcacccgcagaatagttacggtttgtcacccgaccctcccggatcgcctaatttgtccctagtgagaccccgaggctctgcccgcgcctggcttcttcgtagctggatgcatatcgtgctccgggcagcgcgggcgcagggcacgcgttcgcgcacaccctagcacacatgaacacgcgcaagagctgaaccaagcacggtttccatttcaaaaagggagacagcctctaccgcgattgtagaagagactgtggtgtgaattagggaccgggaggcgtcgaacggaggaacggttcatcttagagactaattttctggagtttctgcccctgctctgcgtcagccctcacgtcacttcgccagcagtagcagaggcggcggcggcggctcccggaattgggttggagcaggagcctcgctggctgcttcgctcgcgctctacgcgctcagtccccggcggtagcaggagcctggacccaggcgccgccggcgggcgtgaggcgccggagcccggcctcgaggtgcataccggacccccattcgcatctaacaaggaatctgcgccccagagagtcccgggagcgccgccggtcggtgcccggcgcgccgggccatgcagcgacggccgccgcggagctccgagcagcggtagcgcccccctgtaaagcggttcgctatgccggggccactgtgaaccctgccgcctgccggaacactcttcgctccggaccagctcagcctctgataagctggactcggcacgcccgcaacaagcaccgaggagttaagagagccgcaagcgcagggaaggcctccccgcacgggtgggggaaagcggccggtgcagcgcggggacaggcactcgggctggcactggctgctagggatgtcgtcctggataaggtggcatggacccgccatggcgcggctctggggcttctgctggctggttgtgggcttctggagggccgctttcgcctgtcccacgtcctgcaaatgcagtgcctctcggatctggtgcagcgacccttctcctggcatcgtggcatttccgagattggagcctaacagtgtagatcctgagaacatcaccgaaattttcatcgcaaaccagaaaaggttagaaatcatcaacgaagatgatgttgaagcttatgtgggactgagaaatctgacaattgtggattctggattaaaatttgtggctcataaagcatttctgaaaaacagcaacctgcagcacatcaattttacccgaaacaaactgacgagtttgtctaggaaacatttccgtcaccttgacttgtctgaactgatcctggtgggcaatccatttacatgctcctgtgacattatgtggatcaagactctccaagaggctaaatccagtccagacactcaggatttgtactgcctgaatgaaagcagcaagaatattcccctggcaaacctgcagatacccaattgtggtttgccatctgcaaatctggccgcacctaacctcactgtggaggaaggaaagtctatcacattatcctgtagtgtggcaggtgatccggttcctaatatgtattgggatgttggtaacctggtttccaaacatatgaatgaaacaagccacacacagggctccttaaggataactaacatttcatccgatgacagtgggaagcagatctcttgtgtggcggaaaatcttgtaggagaagatcaagattctgtcaacctcactgtgcattaccaccactggtgcattccattcactgtgaaaggcaaccccaaaccagcgcttcagtggttctataacggggcaatattgaatgagtccaaatacatctgtactaaaatacatgttaccaatcacacggagtaccacggctgcctccagctggataatcccactcacatgaacaatggggactacactctaatagccaagaatgagtatgggaaggatgagaaacagatttctgctcacttcatgggctggcctggaattgacgatggtgcaaacccaaattatcctgatgtaatttatgaagattatggaactgcagcgaatgacatcggggacaccacgaacagaagtaatgaaatcccttccacagacgtcactgataaaaccggtcgggaacatctctcggtctatgctgtggtggtgattgcgtctgtggtgggattttgccttttggtaatgctgtttctgcttaagttggcaagacactccaagtttggcatgaaaggttttgttttgtttcataagatcccactggatgggtagctgaaataaaggaaaagacagagaaaggggctgtggtgcttgttggttgatgctgccatgtaagctggactcctgggactgctgttggcttatcccgggaagtgctgcttatctggggttttctggtagatgtgggcggtgtttggaggctgtactatatgaagcctgcatatactgtgagctgtgattggggaacaccaatgcagaggtaactctcaggcagctaagcagcacctcaagaaaacatgttaaattaatgcttctcttcttacagtagttcaaatacaaaactgaaatgaaatcccattggattgtacttctcttctgaaaagtgtgctttttgaccctactggacatttattgacttaattgcttctgtttattaaaattgacctgcaaagttaaaaaaaaattaaagttgagaacaggtataagtgcacactgaatagtctaatctacatgtaacacatattttagtgtgattttctatactctaatcagcactgaattcagagggtttgactttttcatctataacacagtgactaaaagagttaagggtatatataccatcactttgggacttggtagtattattaaaaggttatttccttcactgtcaataaaagtccaaatgtttagcttaggtctgagagtcaaacaatgttaaggattgtcttaaagttccttagccagcaaaacaaaacaaaacaaaacaaacaaatgaaaaacgtttaaaaagaagaagaagaaaaaaaacaagaacaagcagcaacagctgttttgttggggctatagatttaagttaggcatagtcaatttcagaataactaagagtggaatatatgcatatggtgaaattataaccttgcccttttttatttgccctctgcgatccacctgctttttagaagtctgccgagtgagaaggccacagtatctcatgctgtttgcattacagaactgcagcttttctactctgaaaaggcctgggagcagaatggctggcctgctgtgagcaggagaggagattctaagaaggatagtcccccctacaacatactgtcatactgctgggttttcatgggtaggaaagcttgtcctgaccccagcagcaaagaggtggcaggtcgctaatgaatatatgctttataatgtccttcttcattgctgagagggcagccttagagctgtggatttctgcatcccccctgagtctgacccatggacacctgtttcattcactttagcatcacagtgacctttgtatgctctgttcagtctgtgtcaggcagtatgcttgtcctgaagagaggtttggctatccccaccccaccccaccccaccctgttccttttttatcaggaggacttcagagccaggcctgcagcattttgtttgaaaacacaatcagctctgacagttagacatgcacacagacgccatagctggattggaaacattgatgttttaaaaatttattttttttggaaatagttgcacaaatgctgcaatttagctttaaggttctatagatttttaactagtccaacacagtcagaaacattgttttgaatcctctgtaaaccaaggcattaatcttaataaaccaggatccatttaggtaccacttgatataaaaaggatatccataatgaatattttatactgcatcctttacattagccactaaatacgttattgcttgatgaagacctttcacagaatcctatggattgcagcatttcacttggctacttcatacccatgccttaaagaggggcagtttctcaaaagcagaaacatgccgccagttctcaagttttcctcctaactccatttgaatgtaagggcagctggcccccaatgtggggaggtccgaacattttctgaattcccattttcttgttcgcggctaaatgacagtttctgtcattacttagattccgatctttcccaaaggtgttgatttacaaagaggccagctaatagcagaaatcatgaccctgaaagagagatgaaattcaagctgtgagccaggcaggagctcagtatggcaaaggttcttgagaatcagccatttggtacaaaaaagatttttaaagcttttatgttataccatggagccatagaaaggctatggattgtttaagaactattttaaagtgttccagacccaaaaaggaaaaataaaaaaaaaggaatatttgtacccaacagctagaaggattgcaaggtagatttttgttttaaaatggagagaagtggacagataaggccatttaatatatcaaagatcagttgacatctcctagggaatgatgaaaacagcaggctattagaaaattatttcatatagttctcgtgttcttttcttttttttaatccctgaagggatgatcagtaacatagcttctcttttctgtactctagaccaccccttttcatcattttgctttttatgtctcccataagaaatgtgctttttagagcttcctaatgcatgtgttgcattattgcagcattagaaaaggagaggtagcatttttgctgaaatcgggcctgtcactctccaataaaggttctggcacttcaatgccaggcaggtctcctaaatgaacagaatgatctgtgtgagccgatgcctgcccttccagaggggccactgtccccagccgcagccaactgtgtcccacaggaatgggagcctaggtttccaaatcttgtgattctttaggagaaacatgaaacctggatttcgtgtgaaatgtcccgattgttaaaaagttggctcaattatttttaaaacattttgtaagccaacaaaagtctgtgggctgccagtttattacttttgtcttaaaacatgatcattgttctctcacggtatccttctgtcttcccgttgcaaattcacttttctttcttcctgacattgccattgagggctttgttaccacaagctaagaaactgagtttaacagcccagttatctgcaacatgtcaattacctttgctcctctcctgtgattcccaccatgctgtgaccctcagctgtctccctttgctgggaattctgcaccaatgtctcccctcaacccattccctggttggtcctactcccgtgtggccagagacatcctagcaaatccttcctcctattatatctgacactaatttcttttcaacagcgctcatgtctcttggcccagtcaggtgctgccaggtttagataggaaagtacatgtcccattttcatgggtgcccttaatgtggtccacgtcctatatcttattatatttactcatggctcaatgggggcctccagagaccctctcaggctgctgagctagactaaggaatgcatccaccgtcatcacatgagacactgactctgtgacgacaaaagtacaaacagtctgaggctaagaaaggttcatctcacaacaggaaaaacaaatctcaacacacattagagataattgattcaggggttttctctcccagtctcccagcagggactgatttcatttctgacccactaggttttctttccagaaataggtagcaaggacaagaactaaacaatcccagccccacccagcaacacagaacacaggagtttgcttttggcttctcactctccaagtaaccctgaattaggcccagaatggctgaggcttggagcatctcctcagacagagcagaggcgacacctcttcaggggtgtgtggagtaaatagctcgaagagctgaagacagaaaaccagtttcacgccaggtgcgagagagagcataatggagggaagcccgctttctctctcctcttcttttctctttatttctttagagcacttgacttttttttctctctctctctagtattctaaactgaccccatgaccaactgagaatttatttttgtttcattggttgtttcacagaattagaacacacacgactttttattcctccattgcaaaatggaatcaagatactacacaagacctgtgctttcttcctttgcatgatttacacctccgcctgttttggtgctagctgtctagaacttctctcttggtttgaatctgattccttcacactacactagaagtttatttcatcttgttttgtctagactccagatacagagggacagctggactgaggacaagcaattccatctagcatagggtctctcagggttggtgcatccagccacatgggcagggccagtcacatctagtctatgtccccagagcccttggagttgcgcagcttagctgacttgactccaaggaaattagtacagaagtaaccactctattaagtgtgttctgctatgttcacatgcctgtagtacctgcaaaccatgccaggttcatctaaagacataggggaagattaaggactcttttggacagaccatgaattgaatttgctgccaggtgctgccagactgaatttggctgacagaactcccagcccaggaaagttccatgacaatgactgtcgcagaaggaaatttcccactaaagtcagtccattttcaagttttggtcttcagagacaaaagaacgtcccagccacctgattttgatggtgaggtaactctaagttgaattcaggctagtgttgcagtatagctttggcatgttcatgagtgagcacccagaatgtgttgaaccaacccccacccctaactactgactatgactgcagtgggtttttatggggaaaaaaagtgtgaaaagcaaaaagaaaggaacagagattttttatcacctttattgtaagacagtccatttatgaattgagtataaacacatacaaagtaacaagagattcctaagaaacgcaaatccttgagtttcacgcacttcatgttcaaccatttgctgtaatccagaggcagcctgtgaatcattctcatgccctgttttttttttttttttcctataatgttctgggtttaaaagccatcttttccacattttctgtaaataatggataatcattttaaaaatttttatttttagtgctgttttaacaatgtagatagatcataaatgtacttgctgaattcaatcatttttaacaagccaataaagtttgataattcatctcca

SEQ ID NO: 7548 - protein, 464 aa, Homo sapiens; identical to SEQ ID NO: 7546

SEQ ID NO: 7549 - DNA, 8816 bp, Homo sapiens
agagcgcgcccccagcgctgtgcccgccgcgacccgggccatgggctggtgctccggagcgtgccgggcgctctctccccgcgcgggggcaccagagccctcggaagtgtcaggcactgcggtgtattttccccgttctcttttaaatgactgcggaaaaacagattccgagccgcaaaagggaagacggattctcagacaaggcttgcaaatgccccgcagccatcatttaactgcacccgcagaatagttacggtttgtcacccgaccctcccggatcgcctaatttgtccctagtgagaccccgaggctctgcccgcgcctggcttcttcgtagctggatgcatatcgtgctccgggcagcgcgggcgcagggcacgcgttcgcgcacaccctagcacacatgaacacgcgcaagagctgaaccaagcacggtttccatttcaaaaagggagacagcctctaccgcgattgtagaagagactgtggtgtgaattagggaccgggaggcgtcgaacggaggaacggttcatcttagagactaattttctggagtttctgcccctgctctgcgtcagccctcacgtcacttcgccagcagtagcagaggcggcggcggcggctcccggaattgggttggagcaggagcctcgctggctgcttcgctcgcgctctacgcgctcagtccccggcggtagcaggagcctggacccaggcgccgccggcgggcgtgaggcgccggagcccggcctcgaggtgcataccggacccccattcgcatctaacaaggaatctgcgccccagagagtcccgggagcgccgccggtcggtgcccggcgcgccgggccatgcagcgacggccgccgcggagctccgagcagcggtagcgcccccctgtaaagcggttcgctatgccggggccactgtgaaccctgccgcctgccggaacactcttcgctccggaccagctcagcctctgataagctggactcggcacgcccgcaacaagcaccgaggagttaagagagccgcaagcgcagggaaggcctccccgcacgggtgggggaaagcggccggtgcagcgcggggacaggcactcgggctggcactggctgctagggatgtcgtcctggataaggtggcatggacccgccatggcgcggctctggggcttctgctggctggttgtgggcttctggagggccgctttcgcctgtcccacgtcctgcaaatgcagtgcctctcggatctggtgcagcgacccttctcctggcatcgtggcatttccgagattggagcctaacagtgtagatcctgagaacatcaccgaaattttcatcgcaaaccagaaaaggttagaaatcatcaacgaagatgatgttgaagcttatgtgggactgagaaatctgacaattgtggattctggattaaaatttgtggctcataaagcatttctgaaaaacagcaacctgcagcacatcaattttacccgaaacaaactgacgagtttgtctaggaaacatttccgtcaccttgacttgtctgaactgatcctggtgggcaatccatttacatgctcctgtgacattatgtggatcaagactctccaagaggctaaatccagtccagacactcaggatttgtactgcctgaatgaaagcagcaagaatattcccctggcaaacctgcagatacccaattgtggtttgccatctgcaaatctggccgcacctaacctcactgtggaggaaggaaagtctatcacattatcctgtagtgtggcaggtgatccggttcctaatatgtattgggatgttggtaacctggtttccaaacatatgaatgaaacaagccacacacagggctccttaaggataactaacatttcatccgatgacagtgggaagcagatctcttgtgtggcggaaaatcttgtaggagaagatcaagattctgtcaacctcactgtgcattttgcaccaactatcacatttctcgaatctccaacctcagaccaccactggtgcattccattcactgtgaaaggcaaccccaaaccagcgcttcagtggttctataacggggcaatattgaatgagtccaaatacatctgtactaaaatacatgttaccaatcacacggagtaccacggctgcctccagctggataatcccactcacatgaacaatggggactacactctaatagccaagaatgagtatgggaaggatgagaaacagatttctgctcacttcatgggctggcctggaattgacgatggtgcaaacccaaattatcctgatgtaatttatgaagattatggaactgcagcgaatgacatcggggacaccacgaacagaagtaatgaaatcccttccacagacgtcactgataaaaccggtcgggaacatctctcggtctatgctgtggtggtgattgcgtctgtggtgggattttgccttttggtaatgctgtttctgcttaagttggcaagacactccaagtttggcatgaaaggcccagcctccgttatcagcaatgatgatgactctgccagcccactccatcacatctccaatgggagtaacactccatcttcttcggaaggtggcccagatgctgtcattattggaatgaccaagatccctgtcattgaaaatccccagtactttggcatcaccaacagtcagctcaagccagacacatggcccagaggttcccccaagaccgcctgataataatttggtatttggaggctcctgtgtcactgcaggaactaaaggaggctaaatccatgcctgatggaggagaagagttctatggttatctgcaaattctggccagacaacatcttgacgtcactccttagcttccataacctagccaagcaagaagttgcctttccaagacaaagcagtgtgctctaatgactaacccctcaaagtactatgccactttaactatagacccatctcctcgatcaatcaggatggcaagatggagctgaggagctcagcaacatcaagtctggagttggtctttaactcaactagctcgtttagacgtgtctgaacaccacatcacctgacagcacggggtggtttcccagtaaaatttacaaactcagctcaagggcagctgtgttgctttcctttccttgactgctgagaaactttttgacagggaacaatggaaacacaccttctgagctgaaacaaacaaacagaaacaaaacatactaaccagcaaaatccccaaatcatcaatcttgggttctcttgaagggcaggagtgtgttttatcttctcccgtcggagcaaacactatagatgtcctccctaaaattctgtcttccctagagcagccttgtaaattagctagggtcctagggttgaggcctaaatcaacttaaaattgtctctaaatatgtacctggatgtgtttgtacttgcagagcatgccctcttcatgtgcctagggctagtaactccctgtggcagaggcatgtaaagtattctgactttttttttttcaacttaattccatttccaatgaaatggatttttaaaaattttctccagagtgtgccatacttctccagctattatagttaatgtgtgtgtatccttgtgtatatgtgtgtttgtgtgtgcatatgtgttttcctagtggttacatgcttactaggcaattatgtaaataagcacagattcataggccagctaggcctgaggaaagaagacattataaagggagggagtattttaacattagctaaagctatcacacaaggcacccattctgctcccctcaacagccacagcccacttcgtccttgtcttaccaataaggggaaaggctggaggtgatatttttcacagaaccgcagaggttttgaacatatttgcaacattactttgagtacacatgagcaaaaattctgaattacatccaggaccccagaagctcattagatcaaagagtgcggggcccctcagagttaccagagattatctgcagacttcagtgcaatcgaatgaccatggtccattttgatggtcagaggtaggactgaaaaacgggtagaaacaattgctttagcgcttccttctgtactttgcctattaatgttttgtctttcaaaaatatattttctcctaattgtttaattggccaaataatggctgctttgggagttgtttgtatgccttggaaggccatggcctgcactttaaaaataagctaagtccattctgcccagcacgagcattaggacagagaatgcacttattttaggatccttaaaaattgcttcttttatggcacactgggttgacgactcatctcgtgggagccttcatggcacattgctgctgttctgcaggtcccaatacaattccttccccctctcagtgccacggcccccccattgctagctacaacaatttgatatcatattcccttttcaactccaaaggagatgataagaagctatcaaataatgctttaaaaaagcaacttgagtttcttaaaagaaaggaaatgaatacatgctgcataattacatttaaaatgtaagccatgttattataagccgcactgagatgaagatttgttagcaaaccagtttcaagcacactcacagtgaagtaaaatcatgtttttagcatctgaccattgggtaatattattctttgttatcaaaagagaaatatcacccaagtatagtatacttagacctcctagaggaaacactccagtcctaagcttggtgtctgaaaagaaaaacaaaaataaagattatggatttaggtcagggagacagagtgatattctgaagactgtgtttactccctcatcatcggccaaccaagatggagttctgcatcctgcacatatcagacatttcagtccaatttcaccaaagcatcagtgatgttctagaagcatcccagcagatggaggatcctaatgtatttgttctgggtatttcccaaggcccagcctgactggagtgtgtgtaccaacaggatgaatccaatcaagctacgcccccattttggtttcggattggccactcttgcatgtgctagtagattgtggaccaggaccagctgagcaaacacagttgcagagtagcctcctatgttgctaagaagctcctgctacccaggtgctttgaacaattgagtgctccctctggttaagtagagatggcaccaccggagtttttcttggatgtgaggctcaatcctttacggcagctattataacaaagtgaaggttttctccctgggaaatgcagcttttctctgtctttactaattctgccagcctgtgagagtaaccaccgtagctgggcttcttctcagattaattgtcatgccaggtctccttcctggggagctgtgatgctgctctgaggttgattgctgaggttgtagtgggtttttgtttgtttttgtttagtttttcttgattgttcttctttctcttgaatggcaagagaagaaacactttctctaacccacggccaggaaggaaatggggagagagctacttcttagttcaacctggttgccacataaaggaatctctctccttggactcagcccctaactggaagcaagagccactgccctctgagactgagagagcagcccgaggaggagatgaatccattctgccctttgtttgggtttgcttcctgtcagtgagagaatgctgaggcagttcctgttatgtgaaactttcatttttaaaaccaggacagtcctaaacagactggaatgagttggtcaatcccagttggtataggcccaatgatttttgctagtaagataggattgtcttcctcacccaaaatgccttcaagtgccctaaaatgggtattttaaaataagaataaataatgtagatttagtagaaaacctggaaaacataagaaacaaagatgaaacgaaaagtcccatgtaattccaccagttagagttaaccactgatatcgtttggatatatggctttctagtcttgtggatatccttttaatctcttgtaatataaagtctgaccatatgtgtccttgcatttgtttgtactggactctgttaatatttctatagtaatggctcactttggggagattgtgctgcacagtgtgtaggaagcacattgggtgtattattcccagttttgtattttgtatttccttggagatgtgcaggggttaagagcgggggtctggccatagctggccacgtcagactctcatatggtaagtatcacagagcacatgaggcctgtgttatgcgctggaaagactcaggaaatgagaggctctcttgttctgacaaggcaggctgagagctctcatttagggtcatcactccagataactccaaatgcagtttattgctcaactgaagcagatgatcactttttgcctccaagttcttcaccctagctagctcctttcaaagagccgagtatgctggatcttaaagggccaaactagttacatctcatacatttcctgatgtttagggatgccttcacttccatcaaggataccttggctgtgcaaggacctctgatagctggagtctccttttggtcactcccagctttgcttaaacttgatggagtttgctgtccagtgatccccggatctttcatcatgaaagccttccttcctctcctgatgtctcaggcctctagacctagactggggttctggcaaggaggcctctatcaatagtatgacatccaataatatgttagtgttgatattttgcacagtaatattaagtttaagagattataaaaatgagttcaaatgaataagttcctgtgatgtaagagattagatatgtgtgatttcagaaccaaaggcaggggggaatcccagaaagaaaacaataatataatcctagtttctatatattatttttattcattactgtatatgggtagagatcaatattctttcttatgctgttactattaattaacacattttttaaccatgccattgaacttttgggtgcattaaagtggaacccaagctcctcattagataataatggcatttggactgagtgccatattcctaaatttccaataaagtggttgatatagagaggacaggataaagccctatagtgtgcagttatatcaaaacagctagtctccactttagggaatgcctttactagagattacatgaaatgtctgcttataaaataagcagagatggcaccactaagcagccacctgaattgttttcctacaggaatgattacttttcagatccatttatgttttcatgctcaatacttactccccttccctgcaacacccaaagagtttacttttgcaagtcatttggtcttcagtctactactgaggaatagagaggcactaactgctttacccaggatcagaactcatgttcttaccttctattaatagagtacttgagccagatggactaactggtctcacattttctctatcttggttttacttccataaacatcaatatctttacccacatgatttttccatcctcccatttttttccatatgtattagggttcaggaactatgatgctaatgatcacatttcttcctagttcctaatttcattagtgccatttcctgatatctacagaaacaattatcaatacatgtagctgcttgagccttatttagaaggctagcctttcttttccaagtgctgtcagaatgtatacatttagtctgtctttttcccttttaggagtctttgttctgggttgatggcaaaattcctctttttacatgtgagatttttgatttcactgaattctacctagatttttatggacattggattttaaagaggaaaacactcattttcttagtaagatattggtgatacatagctatgccattgatttccatactcctgagctttggggagggagacagtggccaagtagcaggcagaataagatcatcactcatgtcctgaatcaatcacactttccttctcggattgtgtatatgctctgccacttcctacatattacatcctgagtttttaagtaaagtggatcttagccagatttgagtctaatggctgattcatcggcatagttcttggcgttaacatctcagtgtcctctttagttctctttgaggattcatgtcattgagggcctttgtgcctccacttgtctcagtatgaggaagaactttggtgtgagggcggagctatgtgaagggttgctgggttgggggattagttcatatggtccccatgccatctatttacttttggagagaggggactttgagtgggtgggtatggatagatgttcctcaaggaaaccctgctggctaatgggcactacatctgtgtattactgtgattctctctgtaagctccccatgtggccaaggacccccctcctaccagggcacttcctgccacctcattgcactggtctcaaccattcagcctgctgctgctgcaccatgttgggctgcggtaggatagggaaggggttctgttgattgctaaatgttgcctaactttatttccctctcccacatttcatgcaagggagcggacctaacacatgacttgcattctcttcctatgttcagaaactccagggcttgcccacgtgtatgtatgagtgaccaatggagcttggaattctttatctatatgatctgtccgaaaatgagatcttttgtactggaatttgtgatgtagttgatcattcagagccaaacgcatataccaataaagacaagactgtcatata

SEQ ID NO: 7550 - protein, 537 aa, Homo sapiens; identical to SEQ ID NO: 1096

SEQ ID NO: 7551 - DNA, 8864 bp, Homo sapiens
agagcgcgcccccagcgctgtgcccgccgcgacccgggccatgggctggtgctccggagcgtgccgggcgctctctccccgcgcgggggcaccagagccctcggaagtgtcaggcactgcggtgtattttccccgttctcttttaaatgactgcggaaaaacagattccgagccgcaaaagggaagacggattctcagacaaggcttgcaaatgccccgcagccatcatttaactgcacccgcagaatagttacggtttgtcacccgaccctcccggatcgcctaatttgtccctagtgagaccccgaggctctgcccgcgcctggcttcttcgtagctggatgcatatcgtgctccgggcagcgcgggcgcagggcacgcgttcgcgcacaccctagcacacatgaacacgcgcaagagctgaaccaagcacggtttccatttcaaaaagggagacagcctctaccgcgattgtagaagagactgtggtgtgaattagggaccgggaggcgtcgaacggaggaacggttcatcttagagactaattttctggagtttctgcccctgctctgcgtcagccctcacgtcacttcgccagcagtagcagaggcggcggcggcggctcccggaattgggttggagcaggagcctcgctggctgcttcgctcgcgctctacgcgctcagtccccggcggtagcaggagcctggacccaggcgccgccggcgggcgtgaggcgccggagcccggcctcgaggtgcataccggacccccattcgcatctaacaaggaatctgcgccccagagagtcccgggagcgccgccggtcggtgcccggcgcgccgggccatgcagcgacggccgccgcggagctccgagcagcggtagcgcccccctgtaaagcggttcgctatgccggggccactgtgaaccctgccgcctgccggaacactcttcgctccggaccagctcagcctctgataagctggactcggcacgcccgcaacaagcaccgaggagttaagagagccgcaagcgcagggaaggcctccccgcacgggtgggggaaagcggccggtgcagcgcggggacaggcactcgggctggcactggctgctagggatgtcgtcctggataaggtggcatggacccgccatggcgcggctctggggcttctgctggctggttgtgggcttctggagggccgctttcgcctgtcccacgtcctgcaaatgcagtgcctctcggatctggtgcagcgacccttctcctggcatcgtggcatttccgagattggagcctaacagtgtagatcctgagaacatcaccgaaattttcatcgcaaaccagaaaaggttagaaatcatcaacgaagatgatgttgaagcttatgtgggactgagaaatctgacaattgtggattctggattaaaatttgtggctcataaagcatttctgaaaaacagcaacctgcagcacatcaattttacccgaaacaaactgacgagtttgtctaggaaacatttccgtcaccttgacttgtctgaactgatcctggtgggcaatccatttacatgctcctgtgacattatgtggatcaagactctccaagaggctaaatccagtccagacactcaggatttgtactgcctgaatgaaagcagcaagaatattcccctggcaaacctgcagatacccaattgtggtttgccatctgcaaatctggccgcacctaacctcactgtggaggaaggaaagtctatcacattatcctgtagtgtggcaggtgatccggttcctaatatgtattgggatgttggtaacctggtttccaaacatatgaatgaaacaagccacacacagggctccttaaggataactaacatttcatccgatgacagtgggaagcagatctcttgtgtggcggaaaatcttgtaggagaagatcaagattctgtcaacctcactgtgcattttgcaccaactatcacatttctcgaatctccaacctcagaccaccactggtgcattccattcactgtgaaaggcaaccccaaaccagcgcttcagtggttctataacggggcaatattgaatgagtccaaatacatctgtactaaaatacatgttaccaatcacacggagtaccacggctgcctccagctggataatcccactcacatgaacaatggggactacactctaatagccaagaatgagtatgggaaggatgagaaacagatttctgctcacttcatgggctggcctggaattgacgatggtgcaaacccaaattatcctgatgtaatttatgaagattatggaactgcagcgaatgacatcggggacaccacgaacagaagtaatgaaatcccttccacagacgtcactgataaaaccggtcgggaacatctctcggtctatgctgtggtggtgattgcgtctgtggtgggattttgccttttggtaatgctgtttctgcttaagttggcaagacactccaagtttggcatgaaagatttctcatggtttggatttgggaaagtaaaatcaagacaaggtgttggcccagcctccgttatcagcaatgatgatgactctgccagcccactccatcacatctccaatgggagtaacactccatcttcttcggaaggtggcccagatgctgtcattattggaatgaccaagatccctgtcattgaaaatccccagtactttggcatcaccaacagtcagctcaagccagacacatggcccagaggttcccccaagaccgcctgataataatttggtatttggaggctcctgtgtcactgcaggaactaaaggaggctaaatccatgcctgatggaggagaagagttctatggttatctgcaaattctggccagacaacatcttgacgtcactccttagcttccataacctagccaagcaagaagttgcctttccaagacaaagcagtgtgctctaatgactaacccctcaaagtactatgccactttaactatagacccatctcctcgatcaatcaggatggcaagatggagctgaggagctcagcaacatcaagtctggagttggtctttaactcaactagctcgtttagacgtgtctgaacaccacatcacctgacagcacggggtggtttcccagtaaaatttacaaactcagctcaagggcagctgtgttgctttcctttccttgactgctgagaaactttttgacagggaacaatggaaacacaccttctgagctgaaacaaacaaacagaaacaaaacatactaaccagcaaaatccccaaatcatcaatcttgggttctcttgaagggcaggagtgtgttttatcttctcccgtcggagcaaacactatagatgtcctccctaaaattctgtcttccctagagcagccttgtaaattagctagggtcctagggttgaggcctaaatcaacttaaaattgtctctaaatatgtacctggatgtgtttgtacttgcagagcatgccctcttcatgtgcctagggctagtaactccctgtggcagaggcatgtaaagtattctgactttttttttttcaacttaattccatttccaatgaaatggatttttaaaaattttctccagagtgtgccatacttctccagctattatagttaatgtgtgtgtatccttgtgtatatgtgtgtttgtgtgtgcatatgtgttttcctagtggttacatgcttactaggcaattatgtaaataagcacagattcataggccagctaggcctgaggaaagaagacattataaagggagggagtattttaacattagctaaagctatcacacaaggcacccattctgctcccctcaacagccacagcccacttcgtccttgtcttaccaataaggggaaaggctggaggtgatatttttcacagaaccgcagaggttttgaacatatttgcaacattactttgagtacacatgagcaaaaattctgaattacatccaggaccccagaagctcattagatcaaagagtgcggggcccctcagagttaccagagattatctgcagacttcagtgcaatcgaatgaccatggtccattttgatggtcagaggtaggactgaaaaacgggtagaaacaattgctttagcgcttccttctgtactttgcctattaatgttttgtctttcaaaaatatattttctcctaattgtttaattggccaaataatggctgctttgggagttgtttgtatgccttggaaggccatggcctgcactttaaaaataagctaagtccattctgcccagcacgagcattaggacagagaatgcacttattttaggatccttaaaaattgcttcttttatggcacactgggttgacgactcatctcgtgggagccttcatggcacattgctgctgttctgcaggtcccaatacaattccttccccctctcagtgccacggcccccccattgctagctacaacaatttgatatcatattcccttttcaactccaaaggagatgataagaagctatcaaataatgctttaaaaaagcaacttgagtttcttaaaagaaaggaaatgaatacatgctgcataattacatttaaaatgtaagccatgttattataagccgcactgagatgaagatttgttagcaaaccagtttcaagcacactcacagtgaagtaaaatcatgtttttagcatctgaccattgggtaatattattctttgttatcaaaagagaaatatcacccaagtatagtatacttagacctcctagaggaaacactccagtcctaagcttggtgtctgaaaagaaaaacaaaaataaagattatggatttaggtcagggagacagagtgatattctgaagactgtgtttactccctcatcatcggccaaccaagatggagttctgcatcctgcacatatcagacatttcagtccaatttcaccaaagcatcagtgatgttctagaagcatcccagcagatggaggatcctaatgtatttgttctgggtatttcccaaggcccagcctgactggagtgtgtgtaccaacaggatgaatccaatcaagctacgcccccattttggtttcggattggccactcttgcatgtgctagtagattgtggaccaggaccagctgagcaaacacagttgcagagtagcctcctatgttgctaagaagctcctgctacccaggtgctttgaacaattgagtgctccctctggttaagtagagatggcaccaccggagtttttcttggatgtgaggctcaatcctttacggcagctattataacaaagtgaaggttttctccctgggaaatgcagcttttctctgtctttactaattctgccagcctgtgagagtaaccaccgtagctgggcttcttctcagattaattgtcatgccaggtctccttcctggggagctgtgatgctgctctgaggttgattgctgaggttgtagtgggtttttgtttgtttttgtttagtttttcttgattgttcttctttctcttgaatggcaagagaagaaacactttctctaacccacggccaggaaggaaatggggagagagctacttcttagttcaacctggttgccacataaaggaatctctctccttggactcagcccctaactggaagcaagagccactgccctctgagactgagagagcagcccgaggaggagatgaatccattctgccctttgtttgggtttgcttcctgtcagtgagagaatgctgaggcagttcctgttatgtgaaactttcatttttaaaaccaggacagtcctaaacagactggaatgagttggtcaatcccagttggtataggcccaatgatttttgctagtaagataggattgtcttcctcacccaaaatgccttcaagtgccctaaaatgggtattttaaaataagaataaataatgtagatttagtagaaaacctggaaaacataagaaacaaagatgaaacgaaaagtcccatgtaattccaccagttagagttaaccactgatatcgtttggatatatggctttctagtcttgtggatatccttttaatctcttgtaatataaagtctgaccatatgtgtccttgcatttgtttgtactggactctgttaatatttctatagtaatggctcactttggggagattgtgctgcacagtgtgtaggaagcacattgggtgtattattcccagttttgtattttgtatttccttggagatgtgcaggggttaagagcgggggtctggccatagctggccacgtcagactctcatatggtaagtatcacagagcacatgaggcctgtgttatgcgctggaaagactcaggaaatgagaggctctcttgttctgacaaggcaggctgagagctctcatttagggtcatcactccagataactccaaatgcagtttattgctcaactgaagcagatgatcactttttgcctccaagttcttcaccctagctagctcctttcaaagagccgagtatgctggatcttaaagggccaaactagttacatctcatacatttcctgatgtttagggatgccttcacttccatcaaggataccttggctgtgcaaggacctctgatagctggagtctccttttggtcactcccagctttgcttaaacttgatggagtttgctgtccagtgatccccggatctttcatcatgaaagccttccttcctctcctgatgtctcaggcctctagacctagactggggttctggcaaggaggcctctatcaatagtatgacatccaataatatgttagtgttgatattttgcacagtaatattaagtttaagagattataaaaatgagttcaaatgaataagttcctgtgatgtaagagattagatatgtgtgatttcagaaccaaaggcaggggggaatcccagaaagaaaacaataatataatcctagtttctatatattatttttattcattactgtatatgggtagagatcaatattctttcttatgctgttactattaattaacacattttttaaccatgccattgaacttttgggtgcattaaagtggaacccaagctcctcattagataataatggcatttggactgagtgccatattcctaaatttccaataaagtggttgatatagagaggacaggataaagccctatagtgtgcagttatatcaaaacagctagtctccactttagggaatgcctttactagagattacatgaaatgtctgcttataaaataagcagagatggcaccactaagcagccacctgaattgttttcctacaggaatgattacttttcagatccatttatgttttcatgctcaatacttactccccttccctgcaacacccaaagagtttacttttgcaagtcatttggtcttcagtctactactgaggaatagagaggcactaactgctttacccaggatcagaactcatgttcttaccttctattaatagagtacttgagccagatggactaactggtctcacattttctctatcttggttttacttccataaacatcaatatctttacccacatgatttttccatcctcccatttttttccatatgtattagggttcaggaactatgatgctaatgatcacatttcttcctagttcctaatttcattagtgccatttcctgatatctacagaaacaattatcaatacatgtagctgcttgagccttatttagaaggctagcctttcttttccaagtgctgtcagaatgtatacatttagtctgtctttttcccttttaggagtctttgttctgggttgatggcaaaattcctctttttacatgtgagatttttgatttcactgaattctacctagatttttatggacattggattttaaagaggaaaacactcattttcttagtaagatattggtgatacatagctatgccattgatttccatactcctgagctttggggagggagacagtggccaagtagcaggcagaataagatcatcactcatgtcctgaatcaatcacactttccttctcggattgtgtatatgctctgccacttcctacatattacatcctgagtttttaagtaaagtggatcttagccagatttgagtctaatggctgattcatcggcatagttcttggcgttaacatctcagtgtcctctttagttctctttgaggattcatgtcattgagggcctttgtgcctccacttgtctcagtatgaggaagaactttggtgtgagggcggagctatgtgaagggttgctgggttgggggattagttcatatggtccccatgccatctatttacttttggagagaggggactttgagtgggtgggtatggatagatgttcctcaaggaaaccctgctggctaatgggcactacatctgtgtattactgtgattctctctgtaagctccccatgtggccaaggacccccctcctaccagggcacttcctgccacctcattgcactggtctcaaccattcagcctgctgctgctgcaccatgttgggctgcggtaggatagggaaggggttctgttgattgctaaatgttgcctaactttatttccctctcccacatttcatgcaagggagcggacctaacacatgacttgcattctcttcctatgttcagaaactccagggcttgcccacgtgtatgtatgagtgaccaatggagcttggaattctttatctatatgatctgtccgaaaatgagatcttttgtactggaatttgtgatgtagttgatcattcagagccaaacgcatataccaataaagacaagactgtcatata

SEQ ID NO: 7552 - protein, 553 aa, Homo sapiens; identical to SEQ ID NO: 1094

SEQ ID NO: 7553 - DNA, 5991 bp, Homo sapiens
agagcgcgcccccagcgctgtgcccgccgcgacccgggccatgggctggtgctccggagcgtgccgggcgctctctccccgcgcgggggcaccagagccctcggaagtgtcaggcactgcggtgtattttccccgttctcttttaaatgactgcggaaaaacagattccgagccgcaaaagggaagacggattctcagacaaggcttgcaaatgccccgcagccatcatttaactgcacccgcagaatagttacggtttgtcacccgaccctcccggatcgcctaatttgtccctagtgagaccccgaggctctgcccgcgcctggcttcttcgtagctggatgcatatcgtgctccgggcagcgcgggcgcagggcacgcgttcgcgcacaccctagcacacatgaacacgcgcaagagctgaaccaagcacggtttccatttcaaaaagggagacagcctctaccgcgattgtagaagagactgtggtgtgaattagggaccgggaggcgtcgaacggaggaacggttcatcttagagactaattttctggagtttctgcccctgctctgcgtcagccctcacgtcacttcgccagcagtagcagaggcggcggcggcggctcccggaattgggttggagcaggagcctcgctggctgcttcgctcgcgctctacgcgctcagtccccggcggtagcaggagcctggacccaggcgccgccggcgggcgtgaggcgccggagcccggcctcgaggtgcataccggacccccattcgcatctaacaaggaatctgcgccccagagagtcccgggagcgccgccggtcggtgcccggcgcgccgggccatgcagcgacggccgccgcggagctccgagcagcggtagcgcccccctgtaaagcggttcgctatgccggggccactgtgaaccctgccgcctgccggaacactcttcgctccggaccagctcagcctctgataagctggactcggcacgcccgcaacaagcaccgaggagttaagagagccgcaagcgcagggaaggcctccccgcacgggtgggggaaagcggccggtgcagcgcggggacaggcactcgggctggcactggctgctagggatgtcgtcctggataaggtggcatggacccgccatggcgcggctctggggcttctgctggctggttgtgggcttctggagggccgctttcgcctgtcccacgtcctgcaaatgcagtgcctctcggatctggtgcagcgacccttctcctggcatcgtggcatttccgagattggagcctaacagtgtagatcctgagaacatcaccgaaattttcatcgcaaaccagaaaaggttagaaatcatcaacgaagatgatgttgaagcttatgtgggactgagaaatctgacaattgtggattctggattaaaatttgtggctcataaagcatttctgaaaaacagcaacctgcagcacatcaattttacccgaaacaaactgacgagtttgtctaggaaacatttccgtcaccttgacttgtctgaactgatcctggtgggcaatccatttacatgctcctgtgacattatgtggatcaagactctccaagaggctaaatccagtccagacactcaggatttgtactgcctgaatgaaagcagcaagaatattcccctggcaaacctgcagatacccaattgtggtttgccatctgcaaatctggccgcacctaacctcactgtggaggaaggaaagtctatcacattatcctgtagtgtggcaggtgatccggttcctaatatgtattgggatgttggtaacctggtttccaaacatatgaatgaaacaagccacacacagggctccttaaggataactaacatttcatccgatgacagtgggaagcagatctcttgtgtggcggaaaatcttgtaggagaagatcaagattctgtcaacctcactgtgcattttgcaccaactatcacatttctcgaatctccaacctcagaccaccactggtgcattccattcactgtgaaaggcaaccccaaaccagcgcttcagtggttctataacggggcaatattgaatgagtccaaatacatctgtactaaaatacatgttaccaatcacacggagtaccacggctgcctccagctggataatcccactcacatgaacaatggggactacactctaatagccaagaatgagtatgggaaggatgagaaacagatttctgctcacttcatgggctggcctggaattgacgatggtgcaaacccaaattatcctgatgtaatttatgaagattatggaactgcagcgaatgacatcggggacaccacgaacagaagtaatgaaatcccttccacagacgtcactgataaaaccggtcgggaacatctctcggtctatgctgtggtggtgattgcgtctgtggtgggattttgccttttggtaatgctgtttctgcttaagttggcaagacactccaagtttggcatgaaaggcccagcctccgttatcagcaatgatgatgactctgccagcccactccatcacatctccaatgggagtaacactccatcttcttcggaaggtggcccagatgctgtcattattggaatgaccaagatccctgtcattgaaaatccccagtactttggcatcaccaacagtcagctcaagccagacacatttgttcagcacatcaagcgacataacattgttctgaaaagggagctaggcgaaggagcctttggaaaagtgttcctagctgaatgctataacctctgtcctgagcaggacaagatcttggtggcagtgaagaccctgaaggatgccagtgacaatgcacgcaaggacttccaccgtgaggccgagctcctgaccaacctccagcatgagcacatcgtcaagttctatggcgtctgcgtggagggcgaccccctcatcatggtctttgagtacatgaagcatggggacctcaacaagttcctcagggcacacggccctgatgccgtgctgatggctgagggcaacccgcccacggaactgacgcagtcgcagatgctgcatatagcccagcagatcgccgcgggcatggtctacctggcgtcccagcacttcgtgcaccgcgatttggccaccaggaactgcctggtcggggagaacttgctggtgaaaatcggggactttgggatgtcccgggacgtgtacagcactgactactacagggtgagtagctgtgcagatcagagaccccagggacctctttccctgcgggacccctgctgtatttgtttgctgaggctgtcataacaaaatatcatgactgggtggcttaaacgacagacatgtgtttctcatggctctggaggctggaagtccaagctcaaggtgtgagtgggattggttcctcctgaggcctcgctccttggcttgcaggtggctgccttctcactatgccctcacattgggatggtgacaacccaatccttccctttaggcctaaatttcttcttttaaggacaccagtcagattggattgcatcccaccctaatggtctttttaacttaatcacctacttaaagtcttgtctccaaatacagtcacattttgaggccctggaggtgaggttatcaacgtataaattttggggggacgcaggtcagcccatagcacccaccctgctcttggcactccagcgtggtgggtgagatctccaagagtgaagtcctcagtgtgagaatccttccagagaaaactgagggcctgggggaattcctggtgaggttaaaggatgctgaggtttggctttgattctgtgaaagtatgcctggagcctttgtttgagatttgaacaaaagtgaacttgttcacataaataatagtacaccggactttggaagttccctccaagcgccatcttggttgaaagcggtttagcttggtgagatggaagaagttttatcctgcctgttcctagacacttccacacagcttgtctggtgtttccaccactgaaatcactgagaggcagagttacagacagtgactcagatccactgatgacctagaactggcccccgggatatgttaactttgttaactgagattttggaactcggacatgagagaaaagggaatttctggaaatgttgaagttgtgatatttagagtgaagattcggggtggtgttctaccactttgattttctaccaaccctcaatttgattttcttgtgtgttttgctgtttttcaaggagagaggaagggaaaaggaaggaagggaataaatgtgctggtgtctatagcttaacagcataaagcacagaactggctacctttcataatagggtagggctggtgaagatgctggctttgctcttctcattgttatttatttttgaggaggcaccttctcagtttatttcctgttccccttcctgcagtcttgctcacctctatggcctctgcgttttagtggggtgaactttgctataattagtgtaagaaaattaatctattgtcgtgctccattattcttcatttgactgttttgtggtgttttttttttttcttggtcaccttgataagcatcatttacattttgtgtggcaaaaaggaatagagaccacatggaaaaagattctcttgggtgtatttgcaggagatgggggcacactcttaacttcaggtgttcaaaatgtagcttaaaagcagtgactagtttgttcaagatatttaaaacgtggggagactttacctaccagagatggtctcctctgctagttctacaccttaatgaaagttctcccttccttgatgggggcagggaaacacatggatgattctccgaagaaaagctttgctgatcttggtgagcacccaagggagggacatgtggcccaggcaaaggctttctctctgcagtattagtaaagggttcaacgtgcctggcacaaaaagtgagtgcttgttaagtttttccacctaattattacccaaatcaatagacatacacttcatctccaaagctaggacttaactggatggaacctggcatcctcctctctaggaatctccaaaaataatttaaagaaaaatacctaaaatctcaacaataaaaagataaatcactcaattcgaaagtaggagaaggttctgaatagacatttctccaaagacaacatccacatggtcaataagcacatgaaaagatgggtgacatcattagtctttagggaaaatgcaaagaaaactcacaataagacaccatttcacaccccctgagatgactacaatagcaagtgttagccaggctgcagaaaaattgaaactctggtactctcctggtgggaatgtgaaatggtgcagctgctttggaaaaccgtttggtagttcctcaaaatgttcaacatagagttaccatgtaattcagtaattctactgctaggcatgtacccaagagaactgaaataatatgttcccacaaaaacttgaacacaaatgtgcatggtagtattactattaatagctaaaaagtggaaacaagtttattgtccatcaactgattaatgaataaacaaaatgcggtaatccatacaatggaatattattcagcagtacaaaagaataaagtactgattcatgctgcaacacagataaacctctaaaacagtgtgctaagtgaaagaagtcagacacaaaaggccacataccatatgattccatttatatgaaatgtccagaataggcaaatccatagagacaggaagtagattaatggttaccgggagatgggggcagggaagaatgggaattgactgctactgcgtacagggtttcttttgggggtgatgaaaatgtgctagaactatatacagtggtggcaattgtacaacattaatcatatacaaaaaaaaaacactgaatcattcactttaaaggctaaatattttggtacctgaattatatctc

SEQ ID NO: 7554 - protein, 735 aa, Homo sapiens
MSSWIRWHGPAMARLWGFCWLVVGFWRAAFACPTSCKCSASRIWCSDPSPGIVAFPRLEPNSVDPENITEIFIANQKRLEIINEDDVEAYVGLRNLTIVDSGLKFVAHKAFLKNSNLQHINFTRNKLTSLSRKHFRHLDLSELILVGNPFTCSCDIMWIKTLQEAKSSPDTQDLYCLNESSKNIPLANLQIPNCGLPSANLAAPNLTVEEGKSITLSCSVAGDPVPNMYWDVGNLVSKHMNETSHTQGSLRITNISSDDSGKQISCVAENLVGEDQDSVNLTVHFAPTITFLESPTSDHHWCIPFTVKGNPKPALQWFYNGAILNESKYICTKIHVTNHTEYHGCLQLDNPTHMNNGDYTLIAKNEYGKDEKQISAHFMGWPGIDDGANPNYPDVIYEDYGTAANDIGDTTNRSNEIPSTDVTDKTGREHLSVYAVVVIASVVGFCLLVMLFLLKLARHSKFGMKGPASVISNDDDSASPLHHISNGSNTPSSSEGGPDAVIIGMTKIPVIENPQYFGITNSQLKPDTFVQHIKRHNIVLKRELGEGAFGKVFLAECYNLCPEQDKILVAVKTLKDASDNARKDFHREAELLTNLQHEHIVKFYGVCVEGDPLIMVFEYMKHGDLNKFLRAHGPDAVLMAEGNPPTELTQSQMLHIAQQIAAGMVYLASQHFVHRDLATRNCLVGENLLVKIGDFGMSRDVYSTDYYRVSSCADQRPQGPLSLRDPCCICLLRLS

SEQ ID NO: 7555 - DNA, 9214 bp, Homo sapiens
agagcgcgcccccagcgctgtgcccgccgcgacccgggccatgggctggtgctccggagcgtgccgggcgctctctccccgcgcgggggcaccagagccctcggaagtgtcaggcactgcggtgtattttccccgttctcttttaaatgactgcggaaaaacagattccgagccgcaaaagggaagacggattctcagacaaggcttgcaaatgccccgcagccatcatttaactgcacccgcagaatagttacggtttgtcacccgaccctcccggatcgcctaatttgtccctagtgagaccccgaggctctgcccgcgcctggcttcttcgtagctggatgcatatcgtgctccgggcagcgcgggcgcagggcacgcgttcgcgcacaccctagcacacatgaacacgcgcaagagctgaaccaagcacggtttccatttcaaaaagggagacagcctctaccgcgattgtagaagagactgtggtgtgaattagggaccgggaggcgtcgaacggaggaacggttcatcttagagactaattttctggagtttctgcccctgctctgcgtcagccctcacgtcacttcgccagcagtagcagaggcggcggcggcggctcccggaattgggttggagcaggagcctcgctggctgcttcgctcgcgctctacgcgctcagtccccggcggtagcaggagcctggacccaggcgccgccggcgggcgtgaggcgccggagcccggcctcgaggtgcataccggacccccattcgcatctaacaaggaatctgcgccccagagagtcccgggagcgccgccggtcggtgcccggcgcgccgggccatgcagcgacggccgccgcggagctccgagcagcggtagcgcccccctgtaaagcggttcgctatgccggggccactgtgaaccctgccgcctgccggaacactcttcgctccggaccagctcagcctctgataagctggactcggcacgcccgcaacaagcaccgaggagttaagagagccgcaagcgcagggaaggcctccccgcacgggtgggggaaagcggccggtgcagcgcggggacaggcactcgggctggcactggctgctagggatgtcgtcctggataaggtggcatggacccgccatggcgcggctctggggcttctgctggctggttgtgggcttctggagggccgctttcgcctgtcccacgtcctgcaaatgcagtgcctctcggatctggtgcagcgacccttctcctggcatcgtggcatttccgagattggagcctaacagtgtagatcctgagaacatcaccgaaattttcatcgcaaaccagaaaaggttagaaatcatcaacgaagatgatgttgaagcttatgtgggactgagaaatctgacaattgtggattctggattaaaatttgtggctcataaagcatttctgaaaaacagcaacctgcagcacatcaattttacccgaaacaaactgacgagtttgtctaggaaacatttccgtcaccttgacttgtctgaactgatcctggtgggcaatccatttacatgctcctgtgacattatgtggatcaagactctccaagaggctaaatccagtccagacactcaggatttgtactgcctgaatgaaagcagcaagaatattcccctggcaaacctgcagatacccaattgtggtttgccatctgcaaatctggccgcacctaacctcactgtggaggaaggaaagtctatcacattatcctgtagtgtggcaggtgatccggttcctaatatgtattgggatgttggtaacctggtttccaaacatatgaatgaaacaagccacacacagggctccttaaggataactaacatttcatccgatgacagtgggaagcagatctcttgtgtggcggaaaatcttgtaggagaagatcaagattctgtcaacctcactgtgcattttgcaccaactatcacatttctcgaatctccaacctcagaccaccactggtgcattccattcactgtgaaaggcaaccccaaaccagcgcttcagtggttctataacggggcaatattgaatgagtccaaatacatctgtactaaaatacatgttaccaatcacacggagtaccacggctgcctccagctggataatcccactcacatgaacaatggggactacactctaatagccaagaatgagtatgggaaggatgagaaacagatttctgctcacttcatgggctggcctggaattgacgatggtgcaaacccaaattatcctgatgtaatttatgaagattatggaactgcagcgaatgacatcggggacaccacgaacagaagtaatgaaatcccttccacagacgtcactgataaaaccggtcgggaacatctctcggtctatgctgtggtggtgattgcgtctgtggtgggattttgccttttggtaatgctgtttctgcttaagttggcaagacactccaagtttggcatgaaaggcccagcctccgttatcagcaatgatgatgactctgccagcccactccatcacatctccaatgggagtaacactccatcttcttcggaaggtggcccagatgctgtcattattggaatgaccaagatccctgtcattgaaaatccccagtactttggcatcaccaacagtcagctcaagccagacacatttgttcagcacatcaagcgacataacattgttctgaaaagggagctaggcgaaggagcctttggaaaagtgttcctagctgaatgctataacctctgtcctgagcaggacaagatcttggtggcagtgaagaccctgaaggatgccagtgacaatgcacgcaaggacttccaccgtgaggccgagctcctgaccaacctccagcatgagcacatcgtcaagttctatggcgtctgcgtggagggcgaccccctcatcatggtctttgagtacatgaagcatggggacctcaacaagttcctcagggcacacggccctgatgccgtgctgatggctgagggcaacccgcccacggaactgacgcagtcgcagatgctgcatatagcccagcagatcgccgcgggcatggtctacctggcgtcccagcacttcgtgcaccgcgatttggccaccaggaactgcctggtcggggagaacttgctggtgaaaatcggggactttgggatgtcccgggacgtgtacagcactgactactacagggtcggtggccacacaatgctgcccattcgctggatgcctccagagagcatcatgtacaggaaattcacgacggaaagcgacgtctggagcctgggggtcgtgttgtgggagattttcacctatggcaaacagccctggtaccagctgtcaaacaatgaggtgatagagtgtatcactcagggccgagtcctgcagcgaccccgcacgtgcccccaggaggtgtatgagctgatgctggggtgctggcagcgagagccccacatgaggaagaacatcaagggcatccataccctccttcagaacttggccaaggcatctccggtctacctggacattctaggctagggcccttttccccagaccgatccttcccaacgtactcctcagacgggctgagaggatgaacatcttttaactgccgctggaggccaccaagctgctctccttcactctgacagtattaacatcaaagactccgagaagctctcgagggaagcagtgtgtacttcttcatccatagacacagtattgacttctttttggcattatctctttctctctttccatctcccttggttgttcctttttctttttttaaattttctttttcttttttttttcgtcttccctgcttcacgattcttaccctttcttttgaatcaatctggcttctgcattactattaactctgcatagacaaaggccttaacaaacgtaatttgttatatcagcagacactccagtttgcccaccacaactaacaatgccttgttgtattcctgcctttgatgtggatgaaaaaaagggaaaacaaatatttcacttaaactttgtcacttctgctgtacagatatcgagagtttctatggattcacttctatttatttattattattactgttcttattgtttttggatggcttaagcctgtgtataaaaaagaaaacttgtgttcaatctgtgaagcctttatctatgggagattaaaaccagagagaaagaagatttattatgaaccgcaatatgggaggaacaaagacaaccactgggatcagctggtgtcagtccctacttaggaaatactcagcaactgttagctgggaagaatgtattcggcaccttcccctgaggacctttctgaggagtaaaaagactactggcctctgtgccatggatgattcttttcccatcaccagaaatgatagcgtgcagtagagagcaaagatggcttccgtgagacacaagatggcgcatagtgtgctcggacacagttttgtcttcgtaggttgtgatgatagcactggtttgtttctcaagcgctatccacagaacctttgtcaacttcagttgaaaagaggtggattcatgtccagagctcatttcggggtcaggtgggaaagccaagaacttggaaaagataagacaagctataaattcggaggcaagtttcttttacaatgaacttttcagatctcacttccctccgacccctaacttccatgcccacccgtccttttaactgtgcaagcaaaattgtgcatggtcttcgtcgattaataccttgtgtgcagacactactgctccagacgtcgtttccctgataggtagagcagatccataaaaaggtatgacttatacaattaggggaagctaatggagtttattagctgagtatcaatgtctctgcgttgtacggtggtgatgggttttaatgaatatggaccctgaagcctggaaatcctcatccacgtcgaacccacaggactgtgggaagggcagaatcaatccctaagggaaaggaaacctcaccctgagggcatcacatgcactcatgttcagtgtacacaggtcaagtcccttgctctgggctctagttgggagagtggtttcattccaagtgtactccattgtcagtatgctgtttttgtttccttcactccattcaaaaagtcaaaatacaaaatttggcacagcatgccaacgggaggctgtgcccagaccaagcactggaagtgtgcttctaggcatagtcattggttttgcaaaaagagggctcaaatttaaatagaaatttacagctatttgaatggtcagatataccaagaaagaaaaatatttctgttcctcaagaaaacttgctaccctctgtgaggggaattttgctaaacttgacatctttataacatgagccagattgaaagggagtgattttcattcatcttaggtcatgttatttcatatttgtttctgaaggtgcgatagctctgttttaggttttgcttgcgcctgttaattactggaacaccttatttttcattaaaggctttgaaagccaattctcaaaaattcaaaagtgcaaattaacagaacaaaaggaaatccagtagcaactgcagtcaagcgagggagttgacaagataaaccttacgtccattcaagttatatgctggcctatgagagatgagagttgggtcgtttgttctctttgttgatgattttaaaaaaaccctctagaatacacataataacataatgaaagccatatctccatgatatatatgtgcacatatatatacatacatgtgcatgtatgtatcatattaaggacccatggtactcttaaaacactgtagaactctgtgacgcagtaaggaaggggcagatttgtacaaaaacttttctagattccatcagcaaaaaccaacacaggtttgtcacgctgcatgtctggccagctaatctcgggggaaaagctacaagttatttattttattttaagagaataaagtaggtaataatttaagggatcaaattcaaggaggaatgtgcaattttagagcaaagatttgtttaaggcaaatgagactttgggagcatcccattccagttttgtcttttttttctctgaaagaaaaaagcaaaaaataaaataaaattccacttataccttctgacaagtccctaaaggtcttgaaataaaaggttctatgcaagtgcaaagttttatagttatttttattgctgattattactattactatctctgttgtcttaagagtatgtgctgatttcagagacatctcaaattgaaagaatatcagattgcttttaaagtagctgaacgagccacagaatatctgaaattattcattgttgttcctccaccaccccctttctcatggtctgatttttagaagagtggcatcctcgttctaaaatgtaatgatcaccaaatacggccttccatcaaatttgtgaaaactacaacagtataacagtgacaaacctaattctctagcccaaacctggtctgacaatcatttccatttagaagtcattgaatagttttccaaacactttccatgtgtgttagcaaattattcctattttgtgtagatgaggacgttgagactcagagacattcagaggcacgctagaggtctccagcctagcttccagcaccattgggactgaatccaagtactctcactctgaacttcgtggttctgtccactagagactctaatatgcaaacaagcagttcaggaaagaaagcatgctaacacattcatgaagcagtatatgaagttagaagaacaaaaggaaatacaggagatgacaagcaactgagatattgtgatatataatcatgctcttagcttcagctaaattcagctaaattcttgtacactgaaccaatgtcataatcaggcttatttagaaaacactttgaactatgctataaaagattatatcagaattcatattatacatgtgttcacatcagcgctacctgtgatgttttcatgtatttatgtatgtgttataaatacttgatttatacatatacaaatgcacatacgtagtgtgtttgtgtgtttatgtataaatttataggcacacaataatagaggtaattataagtaggatgcggtatgaataatttgcttaaaatatgctaaataaccaaaactgtttaacgtcatgttgctgttagtgcttccatactccacgtgggtaggactacatcacacttttcaactctgtgcagtactgcatgggtggaagacatatttaagataatgtgcttcccaaaacaactgaataaaagccatcccactacattgagtgctttctctggctccttgcaaagaaagatactttttgtaatggtccaggaaaggaacattgctttctttttgtctttcagcacatttgtattatgctcaccttgtctctgtctcactgtgacccctttacacttgagttcagagttcaagcattccaaatataaattggaatgttggcagcccagtggcttgaaggccaatgatgagcagtccaagaccccacagcgagatgagcaactcttaggaattcccacatcctagagtgaatgcaccaactaacagtatagaatgctgtccttttcaaagcgtcctaacagcaggattacctggtcaagtatggactttctttgaatctttcttttcacaaattggactgcctgtaataccaataacattgttgtatctaactaaataaatgactgcatatacacacataccctcaattctcttgcttccccattttctttttcatcccctgtctcaggacttttattttcaatgttgacctttggtttggccatatatcactgttataggaaatctcatgagaggaatggctagtgacccaactctccaaatgtctaagttagtagttacagctgattttttatgatgcataattggaatgtggagcctctgaggttgtgatagcttgtacatgaatttcaaatgtcattctaaagaatgaggggtgggagggatttatagttagaaacgacagtgcaggaaggggtattttcttgttgtcagggctggaatgaatcactgctgctcaagtcaaaggttcttgaatatccttagtttttgcatttcccctccttttcctttgacctttatttatttaattatgtatttatttatttatttatatacttttgctccattcagcacaaacacaaagcaaagcaaaaaaaaaaatatatatatatatatctgtatatgtgttgtaggcaaaacactgtgaatttcacaacaaccaccaccaagcaactattttgccatcttaacatacatctcaggagacgaaatgagaaaagatggggatgtcattttttagtctatgcgtttgaggccaggtccatgtttatttatttctttagtctatgcattaatgaaaatgatcctgagtggaggttagctgaacgttcaatgtactggagcaagcatcataaaagctgctagtagccatgtgtttgaacaggaaaaatattacagaaaatgaaatgtaaaggcctatatcttgcagcttgtatatcttactattgcttaaaaaatgtataaagcagctggaaatgttttaaatacaaggtctttgaattaaatgtggattttaaatatgtaatcccttgacaaatgaccaaattatggtgaactattgctccctgcgttctttgatcattacctatgacttacaaatctgcctggagatgtggacattctgcatttgcttctgtatctggagagatgtttgtatatatccaggccgtatacacacacatttccatatctctctacagatatatttccccttcaatcgtgacctggtatttggaactctccttttcatttggcttatcttccttttaatgtgatgtctctgtgctaatacttaccagttcttgttttgcaatctgttttgaggtccattgctttactaagacccactgcatcttggctgatttcaaagtgacacctgaatacagtgtttaaaaaaaaaaaagttttgtttgtaaatcatgtgaccagcttctctcaacctgacatggaaagtctcttgtactacagtgtatttaataaaaatgatgtcttacaataaataacatactccaaaagagagac

SEQ ID NO: 7556 - protein, 822 aa, Homo sapiens; identical to SEQ ID NO: 1092

SEQ ID NO: 7557 - DNA, 9262 bp, Homo sapiens
agagcgcgcccccagcgctgtgcccgccgcgacccgggccatgggctggtgctccggagcgtgccgggcgctctctccccgcgcgggggcaccagagccctcggaagtgtcaggcactgcggtgtattttccccgttctcttttaaatgactgcggaaaaacagattccgagccgcaaaagggaagacggattctcagacaaggcttgcaaatgccccgcagccatcatttaactgcacccgcagaatagttacggtttgtcacccgaccctcccggatcgcctaatttgtccctagtgagaccccgaggctctgcccgcgcctggcttcttcgtagctggatgcatatcgtgctccgggcagcgcgggcgcagggcacgcgttcgcgcacaccctagcacacatgaacacgcgcaagagctgaaccaagcacggtttccatttcaaaaagggagacagcctctaccgcgattgtagaagagactgtggtgtgaattagggaccgggaggcgtcgaacggaggaacggttcatcttagagactaattttctggagtttctgcccctgctctgcgtcagccctcacgtcacttcgccagcagtagcagaggcggcggcggcggctcccggaattgggttggagcaggagcctcgctggctgcttcgctcgcgctctacgcgctcagtccccggcggtagcaggagcctggacccaggcgccgccggcgggcgtgaggcgccggagcccggcctcgaggtgcataccggacccccattcgcatctaacaaggaatctgcgccccagagagtcccgggagcgccgccggtcggtgcccggcgcgccgggccatgcagcgacggccgccgcggagctccgagcagcggtagcgcccccctgtaaagcggttcgctatgccggggccactgtgaaccctgccgcctgccggaacactcttcgctccggaccagctcagcctctgataagctggactcggcacgcccgcaacaagcaccgaggagttaagagagccgcaagcgcagggaaggcctccccgcacgggtgggggaaagcggccggtgcagcgcggggacaggcactcgggctggcactggctgctagggatgtcgtcctggataaggtggcatggacccgccatggcgcggctctggggcttctgctggctggttgtgggcttctggagggccgctttcgcctgtcccacgtcctgcaaatgcagtgcctctcggatctggtgcagcgacccttctcctggcatcgtggcatttccgagattggagcctaacagtgtagatcctgagaacatcaccgaaattttcatcgcaaaccagaaaaggttagaaatcatcaacgaagatgatgttgaagcttatgtgggactgagaaatctgacaattgtggattctggattaaaatttgtggctcataaagcatttctgaaaaacagcaacctgcagcacatcaattttacccgaaacaaactgacgagtttgtctaggaaacatttccgtcaccttgacttgtctgaactgatcctggtgggcaatccatttacatgctcctgtgacattatgtggatcaagactctccaagaggctaaatccagtccagacactcaggatttgtactgcctgaatgaaagcagcaagaatattcccctggcaaacctgcagatacccaattgtggtttgccatctgcaaatctggccgcacctaacctcactgtggaggaaggaaagtctatcacattatcctgtagtgtggcaggtgatccggttcctaatatgtattgggatgttggtaacctggtttccaaacatatgaatgaaacaagccacacacagggctccttaaggataactaacatttcatccgatgacagtgggaagcagatctcttgtgtggcggaaaatcttgtaggagaagatcaagattctgtcaacctcactgtgcattttgcaccaactatcacatttctcgaatctccaacctcagaccaccactggtgcattccattcactgtgaaaggcaaccccaaaccagcgcttcagtggttctataacggggcaatattgaatgagtccaaatacatctgtactaaaatacatgttaccaatcacacggagtaccacggctgcctccagctggataatcccactcacatgaacaatggggactacactctaatagccaagaatgagtatgggaaggatgagaaacagatttctgctcacttcatgggctggcctggaattgacgatggtgcaaacccaaattatcctgatgtaatttatgaagattatggaactgcagcgaatgacatcggggacaccacgaacagaagtaatgaaatcccttccacagacgtcactgataaaaccggtcgggaacatctctcggtctatgctgtggtggtgattgcgtctgtggtgggattttgccttttggtaatgctgtttctgcttaagttggcaagacactccaagtttggcatgaaagatttctcatggtttggatttgggaaagtaaaatcaagacaaggtgttggcccagcctccgttatcagcaatgatgatgactctgccagcccactccatcacatctccaatgggagtaacactccatcttcttcggaaggtggcccagatgctgtcattattggaatgaccaagatccctgtcattgaaaatccccagtactttggcatcaccaacagtcagctcaagccagacacatttgttcagcacatcaagcgacataacattgttctgaaaagggagctaggcgaaggagcctttggaaaagtgttcctagctgaatgctataacctctgtcctgagcaggacaagatcttggtggcagtgaagaccctgaaggatgccagtgacaatgcacgcaaggacttccaccgtgaggccgagctcctgaccaacctccagcatgagcacatcgtcaagttctatggcgtctgcgtggagggcgaccccctcatcatggtctttgagtacatgaagcatggggacctcaacaagttcctcagggcacacggccctgatgccgtgctgatggctgagggcaacccgcccacggaactgacgcagtcgcagatgctgcatatagcccagcagatcgccgcgggcatggtctacctggcgtcccagcacttcgtgcaccgcgatttggccaccaggaactgcctggtcggggagaacttgctggtgaaaatcggggactttgggatgtcccgggacgtgtacagcactgactactacagggtcggtggccacacaatgctgcccattcgctggatgcctccagagagcatcatgtacaggaaattcacgacggaaagcgacgtctggagcctgggggtcgtgttgtgggagattttcacctatggcaaacagccctggtaccagctgtcaaacaatgaggtgatagagtgtatcactcagggccgagtcctgcagcgaccccgcacgtgcccccaggaggtgtatgagctgatgctggggtgctggcagcgagagccccacatgaggaagaacatcaagggcatccataccctccttcagaacttggccaaggcatctccggtctacctggacattctaggctagggcccttttccccagaccgatccttcccaacgtactcctcagacgggctgagaggatgaacatcttttaactgccgctggaggccaccaagctgctctccttcactctgacagtattaacatcaaagactccgagaagctctcgagggaagcagtgtgtacttcttcatccatagacacagtattgacttctttttggcattatctctttctctctttccatctcccttggttgttcctttttctttttttaaattttctttttcttttttttttcgtcttccctgcttcacgattcttaccctttcttttgaatcaatctggcttctgcattactattaactctgcatagacaaaggccttaacaaacgtaatttgttatatcagcagacactccagtttgcccaccacaactaacaatgccttgttgtattcctgcctttgatgtggatgaaaaaaagggaaaacaaatatttcacttaaactttgtcacttctgctgtacagatatcgagagtttctatggattcacttctatttatttattattattactgttcttattgtttttggatggcttaagcctgtgtataaaaaagaaaacttgtgttcaatctgtgaagcctttatctatgggagattaaaaccagagagaaagaagatttattatgaaccgcaatatgggaggaacaaagacaaccactgggatcagctggtgtcagtccctacttaggaaatactcagcaactgttagctgggaagaatgtattcggcaccttcccctgaggacctttctgaggagtaaaaagactactggcctctgtgccatggatgattcttttcccatcaccagaaatgatagcgtgcagtagagagcaaagatggcttccgtgagacacaagatggcgcatagtgtgctcggacacagttttgtcttcgtaggttgtgatgatagcactggtttgtttctcaagcgctatccacagaacctttgtcaacttcagttgaaaagaggtggattcatgtccagagctcatttcggggtcaggtgggaaagccaagaacttggaaaagataagacaagctataaattcggaggcaagtttcttttacaatgaacttttcagatctcacttccctccgacccctaacttccatgcccacccgtccttttaactgtgcaagcaaaattgtgcatggtcttcgtcgattaataccttgtgtgcagacactactgctccagacgtcgtttccctgataggtagagcagatccataaaaaggtatgacttatacaattaggggaagctaatggagtttattagctgagtatcaatgtctctgcgttgtacggtggtgatgggttttaatgaatatggaccctgaagcctggaaatcctcatccacgtcgaacccacaggactgtgggaagggcagaatcaatccctaagggaaaggaaacctcaccctgagggcatcacatgcactcatgttcagtgtacacaggtcaagtcccttgctctgggctctagttgggagagtggtttcattccaagtgtactccattgtcagtatgctgtttttgtttccttcactccattcaaaaagtcaaaatacaaaatttggcacagcatgccaacgggaggctgtgcccagaccaagcactggaagtgtgcttctaggcatagtcattggttttgcaaaaagagggctcaaatttaaatagaaatttacagctatttgaatggtcagatataccaagaaagaaaaatatttctgttcctcaagaaaacttgctaccctctgtgaggggaattttgctaaacttgacatctttataacatgagccagattgaaagggagtgattttcattcatcttaggtcatgttatttcatatttgtttctgaaggtgcgatagctctgttttaggttttgcttgcgcctgttaattactggaacaccttatttttcattaaaggctttgaaagccaattctcaaaaattcaaaagtgcaaattaacagaacaaaaggaaatccagtagcaactgcagtcaagcgagggagttgacaagataaaccttacgtccattcaagttatatgctggcctatgagagatgagagttgggtcgtttgttctctttgttgatgattttaaaaaaaccctctagaatacacataataacataatgaaagccatatctccatgatatatatgtgcacatatatatacatacatgtgcatgtatgtatcatattaaggacccatggtactcttaaaacactgtagaactctgtgacgcagtaaggaaggggcagatttgtacaaaaacttttctagattccatcagcaaaaaccaacacaggtttgtcacgctgcatgtctggccagctaatctcgggggaaaagctacaagttatttattttattttaagagaataaagtaggtaataatttaagggatcaaattcaaggaggaatgtgcaattttagagcaaagatttgtttaaggcaaatgagactttgggagcatcccattccagttttgtcttttttttctctgaaagaaaaaagcaaaaaataaaataaaattccacttataccttctgacaagtccctaaaggtcttgaaataaaaggttctatgcaagtgcaaagttttatagttatttttattgctgattattactattactatctctgttgtcttaagagtatgtgctgatttcagagacatctcaaattgaaagaatatcagattgcttttaaagtagctgaacgagccacagaatatctgaaattattcattgttgttcctccaccaccccctttctcatggtctgatttttagaagagtggcatcctcgttctaaaatgtaatgatcaccaaatacggccttccatcaaatttgtgaaaactacaacagtataacagtgacaaacctaattctctagcccaaacctggtctgacaatcatttccatttagaagtcattgaatagttttccaaacactttccatgtgtgttagcaaattattcctattttgtgtagatgaggacgttgagactcagagacattcagaggcacgctagaggtctccagcctagcttccagcaccattgggactgaatccaagtactctcactctgaacttcgtggttctgtccactagagactctaatatgcaaacaagcagttcaggaaagaaagcatgctaacacattcatgaagcagtatatgaagttagaagaacaaaaggaaatacaggagatgacaagcaactgagatattgtgatatataatcatgctcttagcttcagctaaattcagctaaattcttgtacactgaaccaatgtcataatcaggcttatttagaaaacactttgaactatgctataaaagattatatcagaattcatattatacatgtgttcacatcagcgctacctgtgatgttttcatgtatttatgtatgtgttataaatacttgatttatacatatacaaatgcacatacgtagtgtgtttgtgtgtttatgtataaatttataggcacacaataatagaggtaattataagtaggatgcggtatgaataatttgcttaaaatatgctaaataaccaaaactgtttaacgtcatgttgctgttagtgcttccatactccacgtgggtaggactacatcacacttttcaactctgtgcagtactgcatgggtggaagacatatttaagataatgtgcttcccaaaacaactgaataaaagccatcccactacattgagtgctttctctggctccttgcaaagaaagatactttttgtaatggtccaggaaaggaacattgctttctttttgtctttcagcacatttgtattatgctcaccttgtctctgtctcactgtgacccctttacacttgagttcagagttcaagcattccaaatataaattggaatgttggcagcccagtggcttgaaggccaatgatgagcagtccaagaccccacagcgagatgagcaactcttaggaattcccacatcctagagtgaatgcaccaactaacagtatagaatgctgtccttttcaaagcgtcctaacagcaggattacctggtcaagtatggactttctttgaatctttcttttcacaaattggactgcctgtaataccaataacattgttgtatctaactaaataaatgactgcatatacacacataccctcaattctcttgcttccccattttctttttcatcccctgtctcaggacttttattttcaatgttgacctttggtttggccatatatcactgttataggaaatctcatgagaggaatggctagtgacccaactctccaaatgtctaagttagtagttacagctgattttttatgatgcataattggaatgtggagcctctgaggttgtgatagcttgtacatgaatttcaaatgtcattctaaagaatgaggggtgggagggatttatagttagaaacgacagtgcaggaaggggtattttcttgttgtcagggctggaatgaatcactgctgctcaagtcaaaggttcttgaatatccttagtttttgcatttcccctccttttcctttgacctttatttatttaattatgtatttatttatttatttatatacttttgctccattcagcacaaacacaaagcaaagcaaaaaaaaaaatatatatatatatatctgtatatgtgttgtaggcaaaacactgtgaatttcacaacaaccaccaccaagcaactattttgccatcttaacatacatctcaggagacgaaatgagaaaagatggggatgtcattttttagtctatgcgtttgaggccaggtccatgtttatttatttctttagtctatgcattaatgaaaatgatcctgagtggaggttagctgaacgttcaatgtactggagcaagcatcataaaagctgctagtagccatgtgtttgaacaggaaaaatattacagaaaatgaaatgtaaaggcctatatcttgcagcttgtatatcttactattgcttaaaaaatgtataaagcagctggaaatgttttaaatacaaggtctttgaattaaatgtggattttaaatatgtaatcccttgacaaatgaccaaattatggtgaactattgctccctgcgttctttgatcattacctatgacttacaaatctgcctggagatgtggacattctgcatttgcttctgtatctggagagatgtttgtatatatccaggccgtatacacacacatttccatatctctctacagatatatttccccttcaatcgtgacctggtatttggaactctccttttcatttggcttatcttccttttaatgtgatgtctctgtgctaatacttaccagttcttgttttgcaatctgttttgaggtccattgctttactaagacccactgcatcttggctgatttcaaagtgacacctgaatacagtgtttaaaaaaaaaaaagttttgtttgtaaatcatgtgaccagcttctctcaacctgacatggaaagtctcttgtactacagtgtatttaataaaaatgatgtcttacaataaataacatactccaaaagagagac

SEQ ID NO: 7558 - protein, 838 aa, Homo sapiens; identical to SEQ ID NO: 1098

SEQ ID NO: 7559 - DNA, 2337 bp, Homo sapiens
atgccctacgtgggggtgggcatcgcggggagtgaatccacgatctgggaatggctacatcccactaattttctggagtttctgcccctgctctgcgtcagccctcacgtcacttcgccagcagtagcagaggcggcggcggcggctcccggaattgggttggagcaggagcctcgctggctgcttcgctcgcgctctacgcgctcagtccccggcggtagcaggagcctggacccaggcgccgccggcgggcgtgaggcgccggagcccggcctcgaggtgcataccggacccccattcgcatctaacaaggaatctgcgccccagagagtcccgggagcgccgccggtcggtgcccggcgcgccgggccatgcagcgacggccgccgcggagctccgagcagcggtagcgcccccctgtaaagcggttcgctatgccggggccactgtgaaccctgccgcctgccggaacactcttcgctccggaccagctcagcctctgataagctggactcggcacgcccgcaacaagcaccgaggagttaagagagccgcaagcgcagggaaggcctccccgcacgggtgggggaaagcggccggtgcagcgcggggacaggcactcgggctggcactggctgctagggatgtcgtcctggataaggtggcatggacccgccatggcgcggctctggggcttctgctggctggttgtgggcttctggagggccgctttcgcctgtcccacgtcctgcaaatgcagtgcctctcggatctggtgcagcgacccttctcctggcatcgtggcatttccgagattggagcctaacagtgtagatcctgagaacatcaccgaaattttcatcgcaaaccagaaaaggttagaaatcatcaacgaagatgatgttgaagcttatgtgggactgagaaatctgacaattgtggattctggattaaaatttgtggctcataaagcatttctgaaaaacagcaacctgcagcacatcaattttacccgaaacaaactgacgagtttgtctaggaaacatttccgtcaccttgacttgtctgaactgatcctggtgggcaatccatttacatgctcctgtgacattatgtggatcaagactctccaagaggctaaatccagtccagacactcaggatttgtactgcctgaatgaaagcagcaagaatattcccctggcaaacctgcagatacccaattgtggtttgccatctgcaaatctggccgcacctaacctcactgtggaggaaggaaagtctatcacattatcctgtagtgtggcaggtgatccggttcctaatatgtattgggatgttggtaacctggtttccaaacatatgaatgaaacaagccacacacagggctccttaaggataactaacatttcatccgatgacagtgggaagcagatctcttgtgtggcggaaaatcttgtaggagaagatcaagattctgtcaacctcactgtgcattttgcaccaactatcacatttctcgaatctccaacctcagaccaccactggtgcattccattcactgtgaaaggcaaccccaaaccagcgcttcagtggttctataacggggcaatattgaatgagtccaaatacatctgtactaaaatacatgttaccaatcacacggagtaccacggctgcctccagctggataatcccactcacatgaacaatggggactacactctaatagccaagaatgagtatgggaaggatgagaaacagatttctgctcacttcatgggctggcctggaattgacgatggtgcaaacccaaattatcctgatgtaatttatgaagattatggaactgcagcgaatgacatcggggacaccacgaacagaagtaatgaaatcccttccacagacgtcactgataaaaccggtcgggaacatctctcggtctatgctgtggtggtgattgcgtctgtggtgggattttgccttttggtaatgctgtttctgcttaagttggcaagacactccaagtttggcatgaaaggtaagaagggttgtgtttatttagcttcttatgtggatcatttttggcttatgactaatgctaattaccactaaagaaggaagtggctagatttatgatgattaggttttaaggctaaaaaaatagcaacaaggctttgatactacaaatcaagacggagcaaaataatgttgattactcagcactacccacttttccatgagaacagttgtcccgggagacagaactgggttcttgagtatcaagggactaataaagatatgacaaagaaatagtacttgatgtttcttttgctcc

SEQ ID NO: 7560 - protein, 489 aa, Homo sapiens
MSSWIRWHGPAMARLWGFCWLVVGFWRAAFACPTSCKCSASRIWCSDPSPGIVAFPRLEPNSVDPENITEIFIANQKRLEIINEDDVEAYVGLRNLTIVDSGLKFVAHKAFLKNSNLQHINFTRNKLTSLSRKHFRHLDLSELILVGNPFTCSCDIMWIKTLQEAKSSPDTQDLYCLNESSKNIPLANLQIPNCGLPSANLAAPNLTVEEGKSITLSCSVAGDPVPNMYWDVGNLVSKHMNETSHTQGSLRITNISSDDSGKQISCVAENLVGEDQDSVNLTVHFAPTITFLESPTSDHHWCIPFTVKGNPKPALQWFYNGAILNESKYICTKIHVTNHTEYHGCLQLDNPTHMNNGDYTLIAKNEYGKDEKQISAHFMGWPGIDDGANPNYPDVIYEDYGTAANDIGDTTNRSNEIPSTDVTDKTGREHLSVYAVVVIASVVGFCLLVMLFLLKLARHSKFGMKGKKGCVYLASYVDHFWLMTNANYH

SEQ ID NO: 7561 - DNA, 2383 bp, Homo sapiens
atgccctacgtgggggtgggcatcgcggggagtgaatccacgatctgggaatggctacatcccactaattttctggagtttctgcccctgctctgcgtcagccctcacgtcacttcgccagcagtagcagaggcggcggcggcggctcccggaattgggttggagcaggagcctcgctggctgcttcgctcgcgctctacgcgctcagtccccggcggtagcaggagcctggacccaggcgccgccggcgggcgtgaggcgccggagcccggcctcgaggtgcataccggacccccattcgcatctaacaaggaatctgcgccccagagagtcccgggagcgccgccggtcggtgcccggcgcgccgggccatgcagcgacggccgccgcggagctccgagcagcggtagcgcccccctgtaaagcggttcgctatgccggggccactgtgaaccctgccgcctgccggaacactcttcgctccggaccagctcagcctctgataagctggactcggcacgcccgcaacaagcaccgaggagttaagagagccgcaagcgcagggaaggcctccccgcacgggtgggggaaagcggccggtgcagcgcggggacaggcactcgggctggcactggctgctagggatgtcgtcctggataaggtggcatggacccgccatggcgcggctctggggcttctgctggctggttgtgggcttctggagggccgctttcgcctgtcccacgtcctgcaaatgcagtgcctctcggatctggtgcagcgacccttctcctggcatcgtggcatttccgagattggagcctaacagtgtagatcctgagaacatcaccgaaattttcatcgcaaaccagaaaaggttagaaatcatcaacgaagatgatgttgaagcttatgtgggactgagaaatctgacaattgtggattctggattaaaatttgtggctcataaagcatttctgaaaaacagcaacctgcagcacatcaattttacccgaaacaaactgacgagtttgtctaggaaacatttccgtcaccttgacttgtctgaactgatcctggtgggcaatccatttacatgctcctgtgacattatgtggatcaagactctccaagaggctaaatccagtccagacactcaggatttgtactgcctgaatgaaagcagcaagaatattcccctggcaaacctgcagatacccaattgtggtttgccatctgcaaatctggccgcacctaacctcactgtggaggaaggaaagtctatcacattatcctgtagtgtggcaggtgatccggttcctaatatgtattgggatgttggtaacctggtttccaaacatatgaatgaaacaagccacacacagggctccttaaggataactaacatttcatccgatgacagtgggaagcagatctcttgtgtggcggaaaatcttgtaggagaagatcaagattctgtcaacctcactgtgcattttgcaccaactatcacatttctcgaatctccaacctcagaccaccactggtgcattccattcactgtgaaaggcaaccccaaaccagcgcttcagtggttctataacggggcaatattgaatgagtccaaatacatctgtactaaaatacatgttaccaatcacacggagtaccacggctgcctccagctggataatcccactcacatgaacaatggggactacactctaatagccaagaatgagtatgggaaggatgagaaacagatttctgctcacttcatgggctggcctggaattgacgatggtgcaaacccaaattatcctgatgtaatttatgaagattatggaactgcagcgaatgacatcggggacaccacgaacagaagtaatgaaatcccttccacagacgtcactgataaaaccggtcgggaacatctctcggtctatgctgtggtggtgattgcgtctgtggtgggattttgccttttggtaatgctgtttctgcttaagttggcaagacactccaagtttggcatgaaaggttttgttttgtttcataagatcccactggatgggtagctgaaataaaggaaaagacagagaaaggggctgtggtgcttgttggttgatgctgccatgtaagctggactcctgggactgctgttggcttatcccgggaagtgctgcttatctggggttttctggtagatgtgggcggtgtttggaggctgtactatatgaagcctgcatatactgtgagctgtgattggggaacaccaatgcagaggtaactctcaggcagctaagcagcacctcaagaaaacatgttaaattaatgcttctcttcttacagtagttcaaatacaaaactgaaatgaaatccc

SEQ ID NO: 7562 - protein, 477 aa, Homo sapiens; identical to SEQ ID NO: 1090

SEQ ID NO: 7563 - DNA, 2516 bp, Homo sapiens
atgccctacgtgggggtgggcatcgcggggagtgaatccacgatctgggaatggctacatcccactaattttctggagtttctgcccctgctctgcgtcagccctcacgtcacttcgccagcagtagcagaggcggcggcggcggctcccggaattgggttggagcaggagcctcgctggctgcttcgctcgcgctctacgcgctcagtccccggcggtagcaggagcctggacccaggcgccgccggcgggcgtgaggcgccggagcccggcctcgaggtgcataccggacccccattcgcatctaacaaggaatctgcgccccagagagtcccgggagcgccgccggtcggtgcccggcgcgccgggccatgcagcgacggccgccgcggagctccgagcagcggtagcgcccccctgtaaagcggttcgctatgccggggccactgtgaaccctgccgcctgccggaacactcttcgctccggaccagctcagcctctgataagctggactcggcacgcccgcaacaagcaccgaggagttaagagagccgcaagcgcagggaaggcctccccgcacgggtgggggaaagcggccggtgcagcgcggggacaggcactcgggctggcactggctgctagggatgtcgtcctggataaggtggcatggacccgccatggcgcggctctggggcttctgctggctggttgtgggcttctggagggccgctttcgcctgtcccacgtcctgcaaatgcagtgcctctcggatctggtgcagcgacccttctcctggcatcgtggcatttccgagattggagcctaacagtgtagatcctgagaacatcaccgaaattttcatcgcaaaccagaaaaggttagaaatcatcaacgaagatgatgttgaagcttatgtgggactgagaaatctgacaattgtggattctggattaaaatttgtggctcataaagcatttctgaaaaacagcaacctgcagcacatcaattttacccgaaacaaactgacgagtttgtctaggaaacatttccgtcaccttgacttgtctgaactgatcctggtgggcaatccatttacatgctcctgtgacattatgtggatcaagactctccaagaggctaaatccagtccagacactcaggatttgtactgcctgaatgaaagcagcaagaatattcccctggcaaacctgcagatacccaattgtggtttgccatctgcaaatctggccgcacctaacctcactgtggaggaaggaaagtctatcacattatcctgtagtgtggcaggtgatccggttcctaatatgtattgggatgttggtaacctggtttccaaacatatgaatgaaacaagccacacacagggctccttaaggataactaacatttcatccgatgacagtgggaagcagatctcttgtgtggcggaaaatcttgtaggagaagatcaagattctgtcaacctcactgtgcattttgcaccaactatcacatttctcgaatctccaacctcagaccaccactggtgcattccattcactgtgaaaggcaaccccaaaccagcgcttcagtggttctataacggggcaatattgaatgagtccaaatacatctgtactaaaatacatgttaccaatcacacggagtaccacggctgcctccagctggataatcccactcacatgaacaatggggactacactctaatagccaagaatgagtatgggaaggatgagaaacagatttctgctcacttcatgggctggcctggaattgacgatggtgcaaacccaaattatcctgatgtaatttatgaagattatggaactgcagcgaatgacatcggggacaccacgaacagaagtaatgaaatcccttccacagacgtcactgataaaaccggtcgggaacatctctcggtctatgctgtggtggtgattgcgtctgtggtgggattttgccttttggtaatgctgtttctgcttaagttggcaagacactccaagtttggcatgaaaggttttgttttgtttcataagatcccactggatgggtagctgaaataaaggaaaagacagagaaaggggctgtggtgcttgttggttgatgctgccatgtaagctggactcctgggactgctgttggcttatcccgggaagtgctgcttatctggggttttctggtagatgtgggcggtgtttggaggctgtactatatgaagcctgcatatactgtgagctgtgattggggaacaccaatgcagaggtaactctcaggcagctaagcagcacctcaagaaaacatgttaaattaatgcttctcttcttacagtagttcaaatacaaaactgaaatgaaatcccattggattgtacttctcttctgaaaagtgtgctttttgaccctactggacatttattgacttaattgcttctgtttattaaaattgacctgcaaagttaaaaaaaaattaaagttgagaacaggtataagtgc

SEQ ID NO: 7564 - protein, 477 aa, Homo sapiens; identical to SEQ ID NO: 1090

SEQ ID NO: 7565 - DNA, 6907 bp, Homo sapiens
atgccctacgtgggggtgggcatcgcggggagtgaatccacgatctgggaatggctacatcccactaattttctggagtttctgcccctgctctgcgtcagccctcacgtcacttcgccagcagtagcagaggcggcggcggcggctcccggaattgggttggagcaggagcctcgctggctgcttcgctcgcgctctacgcgctcagtccccggcggtagcaggagcctggacccaggcgccgccggcgggcgtgaggcgccggagcccggcctcgaggtgcataccggacccccattcgcatctaacaaggaatctgcgccccagagagtcccgggagcgccgccggtcggtgcccggcgcgccgggccatgcagcgacggccgccgcggagctccgagcagcggtagcgcccccctgtaaagcggttcgctatgccggggccactgtgaaccctgccgcctgccggaacactcttcgctccggaccagctcagcctctgataagctggactcggcacgcccgcaacaagcaccgaggagttaagagagccgcaagcgcagggaaggcctccccgcacgggtgggggaaagcggccggtgcagcgcggggacaggcactcgggctggcactggctgctagggatgtcgtcctggataaggtggcatggacccgccatggcgcggctctggggcttctgctggctggttgtgggcttctggagggccgctttcgcctgtcccacgtcctgcaaatgcagtgcctctcggatctggtgcagcgacccttctcctggcatcgtggcatttccgagattggagcctaacagtgtagatcctgagaacatcaccgaaattttcatcgcaaaccagaaaaggttagaaatcatcaacgaagatgatgttgaagcttatgtgggactgagaaatctgacaattgtggattctggattaaaatttgtggctcataaagcatttctgaaaaacagcaacctgcagcacatcaattttacccgaaacaaactgacgagtttgtctaggaaacatttccgtcaccttgacttgtctgaactgatcctggtgggcaatccatttacatgctcctgtgacattatgtggatcaagactctccaagaggctaaatccagtccagacactcaggatttgtactgcctgaatgaaagcagcaagaatattcccctggcaaacctgcagatacccaattgtggtttgccatctgcaaatctggccgcacctaacctcactgtggaggaaggaaagtctatcacattatcctgtagtgtggcaggtgatccggttcctaatatgtattgggatgttggtaacctggtttccaaacatatgaatgaaacaagccacacacagggctccttaaggataactaacatttcatccgatgacagtgggaagcagatctcttgtgtggcggaaaatcttgtaggagaagatcaagattctgtcaacctcactgtgcattttgcaccaactatcacatttctcgaatctccaacctcagaccaccactggtgcattccattcactgtgaaaggcaaccccaaaccagcgcttcagtggttctataacggggcaatattgaatgagtccaaatacatctgtactaaaatacatgttaccaatcacacggagtaccacggctgcctccagctggataatcccactcacatgaacaatggggactacactctaatagccaagaatgagtatgggaaggatgagaaacagatttctgctcacttcatgggctggcctggaattgacgatggtgcaaacccaaattatcctgatgtaatttatgaagattatggaactgcagcgaatgacatcggggacaccacgaacagaagtaatgaaatcccttccacagacgtcactgataaaaccggtcgggaacatctctcggtctatgctgtggtggtgattgcgtctgtggtgggattttgccttttggtaatgctgtttctgcttaagttggcaagacactccaagtttggcatgaaaggttttgttttgtttcataagatcccactggatgggtagctgaaataaaggaaaagacagagaaaggggctgtggtgcttgttggttgatgctgccatgtaagctggactcctgggactgctgttggcttatcccgggaagtgctgcttatctggggttttctggtagatgtgggcggtgtttggaggctgtactatatgaagcctgcatatactgtgagctgtgattggggaacaccaatgcagaggtaactctcaggcagctaagcagcacctcaagaaaacatgttaaattaatgcttctcttcttacagtagttcaaatacaaaactgaaatgaaatcccattggattgtacttctcttctgaaaagtgtgctttttgaccctactggacatttattgacttaattgcttctgtttattaaaattgacctgcaaagttaaaaaaaaattaaagttgagaacaggtataagtgcacactgaatagtctaatctacatgtaacacatattttagtgtgattttctatactctaatcagcactgaattcagagggtttgactttttcatctataacacagtgactaaaagagttaagggtatatataccatcactttgggacttggtagtattattaaaaggttatttccttcactgtcaataaaagtccaaatgtttagcttaggtctgagagtcaaacaatgttaaggattgtcttaaagttccttagccagcaaaacaaaacaaaacaaaacaaacaaatgaaaaacgtttaaaaagaagaagaagaaaaaaaacaagaacaagcagcaacagctgttttgttggggctatagatttaagttaggcatagtcaatttcagaataactaagagtggaatatatgcatatggtgaaattataaccttgcccttttttatttgccctctgcgatccacctgctttttagaagtctgccgagtgagaaggccacagtatctcatgctgtttgcattacagaactgcagcttttctactctgaaaaggcctgggagcagaatggctggcctgctgtgagcaggagaggagattctaagaaggatagtcccccctacaacatactgtcatactgctgggttttcatgggtaggaaagcttgtcctgaccccagcagcaaagaggtggcaggtcgctaatgaatatatgctttataatgtccttcttcattgctgagagggcagccttagagctgtggatttctgcatcccccctgagtctgacccatggacacctgtttcattcactttagcatcacagtgacctttgtatgctctgttcagtctgtgtcaggcagtatgcttgtcctgaagagaggtttggctatccccaccccaccccaccccaccctgttccttttttatcaggaggacttcagagccaggcctgcagcattttgtttgaaaacacaatcagctctgacagttagacatgcacacagacgccatagctggattggaaacattgatgttttaaaaatttattttttttggaaatagttgcacaaatgctgcaatttagctttaaggttctatagatttttaactagtccaacacagtcagaaacattgttttgaatcctctgtaaaccaaggcattaatcttaataaaccaggatccatttaggtaccacttgatataaaaaggatatccataatgaatattttatactgcatcctttacattagccactaaatacgttattgcttgatgaagacctttcacagaatcctatggattgcagcatttcacttggctacttcatacccatgccttaaagaggggcagtttctcaaaagcagaaacatgccgccagttctcaagttttcctcctaactccatttgaatgtaagggcagctggcccccaatgtggggaggtccgaacattttctgaattcccattttcttgttcgcggctaaatgacagtttctgtcattacttagattccgatctttcccaaaggtgttgatttacaaagaggccagctaatagcagaaatcatgaccctgaaagagagatgaaattcaagctgtgagccaggcaggagctcagtatggcaaaggttcttgagaatcagccatttggtacaaaaaagatttttaaagcttttatgttataccatggagccatagaaaggctatggattgtttaagaactattttaaagtgttccagacccaaaaaggaaaaataaaaaaaaaggaatatttgtacccaacagctagaaggattgcaaggtagatttttgttttaaaatggagagaagtggacagataaggccatttaatatatcaaagatcagttgacatctcctagggaatgatgaaaacagcaggctattagaaaattatttcatatagttctcgtgttcttttcttttttttaatccctgaagggatgatcagtaacatagcttctcttttctgtactctagaccaccccttttcatcattttgctttttatgtctcccataagaaatgtgctttttagagcttcctaatgcatgtgttgcattattgcagcattagaaaaggagaggtagcatttttgctgaaatcgggcctgtcactctccaataaaggttctggcacttcaatgccaggcaggtctcctaaatgaacagaatgatctgtgtgagccgatgcctgcccttccagaggggccactgtccccagccgcagccaactgtgtcccacaggaatgggagcctaggtttccaaatcttgtgattctttaggagaaacatgaaacctggatttcgtgtgaaatgtcccgattgttaaaaagttggctcaattatttttaaaacattttgtaagccaacaaaagtctgtgggctgccagtttattacttttgtcttaaaacatgatcattgttctctcacggtatccttctgtcttcccgttgcaaattcacttttctttcttcctgacattgccattgagggctttgttaccacaagctaagaaactgagtttaacagcccagttatctgcaacatgtcaattacctttgctcctctcctgtgattcccaccatgctgtgaccctcagctgtctccctttgctgggaattctgcaccaatgtctcccctcaacccattccctggttggtcctactcccgtgtggccagagacatcctagcaaatccttcctcctattatatctgacactaatttcttttcaacagcgctcatgtctcttggcccagtcaggtgctgccaggtttagataggaaagtacatgtcccattttcatgggtgcccttaatgtggtccacgtcctatatcttattatatttactcatggctcaatgggggcctccagagaccctctcaggctgctgagctagactaaggaatgcatccaccgtcatcacatgagacactgactctgtgacgacaaaagtacaaacagtctgaggctaagaaaggttcatctcacaacaggaaaaacaaatctcaacacacattagagataattgattcaggggttttctctcccagtctcccagcagggactgatttcatttctgacccactaggttttctttccagaaataggtagcaaggacaagaactaaacaatcccagccccacccagcaacacagaacacaggagtttgcttttggcttctcactctccaagtaaccctgaattaggcccagaatggctgaggcttggagcatctcctcagacagagcagaggcgacacctcttcaggggtgtgtggagtaaatagctcgaagagctgaagacagaaaaccagtttcacgccaggtgcgagagagagcataatggagggaagcccgctttctctctcctcttcttttctctttatttctttagagcacttgacttttttttctctctctctctagtattctaaactgaccccatgaccaactgagaatttatttttgtttcattggttgtttcacagaattagaacacacacgactttttattcctccattgcaaaatggaatcaagatactacacaagacctgtgctttcttcctttgcatgatttacacctccgcctgttttggtgctagctgtctagaacttctctcttggtttgaatctgattccttcacactacactagaagtttatttcatcttgttttgtctagactccagatacagagggacagctggactgaggacaagcaattccatctagcatagggtctctcagggttggtgcatccagccacatgggcagggccagtcacatctagtctatgtccccagagcccttggagttgcgcagcttagctgacttgactccaaggaaattagtacagaagtaaccactctattaagtgtgttctgctatgttcacatgcctgtagtacctgcaaaccatgccaggttcatctaaagacataggggaagattaaggactcttttggacagaccatgaattgaatttgctgccaggtgctgccagactgaatttggctgacagaactcccagcccaggaaagttccatgacaatgactgtcgcagaaggaaatttcccactaaagtcagtccattttcaagttttggtcttcagagacaaaagaacgtcccagccacctgattttgatggtgaggtaactctaagttgaattcaggctagtgttgcagtatagctttggcatgttcatgagtgagcacccagaatgtgttgaaccaacccccacccctaactactgactatgactgcagtgggtttttatggggaaaaaaagtgtgaaaagcaaaaagaaaggaacagagattttttatcacctttattgtaagacagtccatttatgaattgagtataaacacat

SEQ ID NO: 7566 - protein, 477 aa, Homo sapiens; identical to SEQ ID NO: 1090

SEQ ID NO: 7567 - DNA, 7207 bp, Homo sapiens
atgccctacgtgggggtgggcatcgcggggagtgaatccacgatctgggaatggctacatcccactaattttctggagtttctgcccctgctctgcgtcagccctcacgtcacttcgccagcagtagcagaggcggcggcggcggctcccggaattgggttggagcaggagcctcgctggctgcttcgctcgcgctctacgcgctcagtccccggcggtagcaggagcctggacccaggcgccgccggcgggcgtgaggcgccggagcccggcctcgaggtgcataccggacccccattcgcatctaacaaggaatctgcgccccagagagtcccgggagcgccgccggtcggtgcccggcgcgccgggccatgcagcgacggccgccgcggagctccgagcagcggtagcgcccccctgtaaagcggttcgctatgccggggccactgtgaaccctgccgcctgccggaacactcttcgctccggaccagctcagcctctgataagctggactcggcacgcccgcaacaagcaccgaggagttaagagagccgcaagcgcagggaaggcctccccgcacgggtgggggaaagcggccggtgcagcgcggggacaggcactcgggctggcactggctgctagggatgtcgtcctggataaggtggcatggacccgccatggcgcggctctggggcttctgctggctggttgtgggcttctggagggccgctttcgcctgtcccacgtcctgcaaatgcagtgcctctcggatctggtgcagcgacccttctcctggcatcgtggcatttccgagattggagcctaacagtgtagatcctgagaacatcaccgaaattttcatcgcaaaccagaaaaggttagaaatcatcaacgaagatgatgttgaagcttatgtgggactgagaaatctgacaattgtggattctggattaaaatttgtggctcataaagcatttctgaaaaacagcaacctgcagcacatcaattttacccgaaacaaactgacgagtttgtctaggaaacatttccgtcaccttgacttgtctgaactgatcctggtgggcaatccatttacatgctcctgtgacattatgtggatcaagactctccaagaggctaaatccagtccagacactcaggatttgtactgcctgaatgaaagcagcaagaatattcccctggcaaacctgcagatacccaattgtggtttgccatctgcaaatctggccgcacctaacctcactgtggaggaaggaaagtctatcacattatcctgtagtgtggcaggtgatccggttcctaatatgtattgggatgttggtaacctggtttccaaacatatgaatgaaacaagccacacacagggctccttaaggataactaacatttcatccgatgacagtgggaagcagatctcttgtgtggcggaaaatcttgtaggagaagatcaagattctgtcaacctcactgtgcattttgcaccaactatcacatttctcgaatctccaacctcagaccaccactggtgcattccattcactgtgaaaggcaaccccaaaccagcgcttcagtggttctataacggggcaatattgaatgagtccaaatacatctgtactaaaatacatgttaccaatcacacggagtaccacggctgcctccagctggataatcccactcacatgaacaatggggactacactctaatagccaagaatgagtatgggaaggatgagaaacagatttctgctcacttcatgggctggcctggaattgacgatggtgcaaacccaaattatcctgatgtaatttatgaagattatggaactgcagcgaatgacatcggggacaccacgaacagaagtaatgaaatcccttccacagacgtcactgataaaaccggtcgggaacatctctcggtctatgctgtggtggtgattgcgtctgtggtgggattttgccttttggtaatgctgtttctgcttaagttggcaagacactccaagtttggcatgaaaggttttgttttgtttcataagatcccactggatgggtagctgaaataaaggaaaagacagagaaaggggctgtggtgcttgttggttgatgctgccatgtaagctggactcctgggactgctgttggcttatcccgggaagtgctgcttatctggggttttctggtagatgtgggcggtgtttggaggctgtactatatgaagcctgcatatactgtgagctgtgattggggaacaccaatgcagaggtaactctcaggcagctaagcagcacctcaagaaaacatgttaaattaatgcttctcttcttacagtagttcaaatacaaaactgaaatgaaatcccattggattgtacttctcttctgaaaagtgtgctttttgaccctactggacatttattgacttaattgcttctgtttattaaaattgacctgcaaagttaaaaaaaaattaaagttgagaacaggtataagtgcacactgaatagtctaatctacatgtaacacatattttagtgtgattttctatactctaatcagcactgaattcagagggtttgactttttcatctataacacagtgactaaaagagttaagggtatatataccatcactttgggacttggtagtattattaaaaggttatttccttcactgtcaataaaagtccaaatgtttagcttaggtctgagagtcaaacaatgttaaggattgtcttaaagttccttagccagcaaaacaaaacaaaacaaaacaaacaaatgaaaaacgtttaaaaagaagaagaagaaaaaaaacaagaacaagcagcaacagctgttttgttggggctatagatttaagttaggcatagtcaatttcagaataactaagagtggaatatatgcatatggtgaaattataaccttgcccttttttatttgccctctgcgatccacctgctttttagaagtctgccgagtgagaaggccacagtatctcatgctgtttgcattacagaactgcagcttttctactctgaaaaggcctgggagcagaatggctggcctgctgtgagcaggagaggagattctaagaaggatagtcccccctacaacatactgtcatactgctgggttttcatgggtaggaaagcttgtcctgaccccagcagcaaagaggtggcaggtcgctaatgaatatatgctttataatgtccttcttcattgctgagagggcagccttagagctgtggatttctgcatcccccctgagtctgacccatggacacctgtttcattcactttagcatcacagtgacctttgtatgctctgttcagtctgtgtcaggcagtatgcttgtcctgaagagaggtttggctatccccaccccaccccaccccaccctgttccttttttatcaggaggacttcagagccaggcctgcagcattttgtttgaaaacacaatcagctctgacagttagacatgcacacagacgccatagctggattggaaacattgatgttttaaaaatttattttttttggaaatagttgcacaaatgctgcaatttagctttaaggttctatagatttttaactagtccaacacagtcagaaacattgttttgaatcctctgtaaaccaaggcattaatcttaataaaccaggatccatttaggtaccacttgatataaaaaggatatccataatgaatattttatactgcatcctttacattagccactaaatacgttattgcttgatgaagacctttcacagaatcctatggattgcagcatttcacttggctacttcatacccatgccttaaagaggggcagtttctcaaaagcagaaacatgccgccagttctcaagttttcctcctaactccatttgaatgtaagggcagctggcccccaatgtggggaggtccgaacattttctgaattcccattttcttgttcgcggctaaatgacagtttctgtcattacttagattccgatctttcccaaaggtgttgatttacaaagaggccagctaatagcagaaatcatgaccctgaaagagagatgaaattcaagctgtgagccaggcaggagctcagtatggcaaaggttcttgagaatcagccatttggtacaaaaaagatttttaaagcttttatgttataccatggagccatagaaaggctatggattgtttaagaactattttaaagtgttccagacccaaaaaggaaaaataaaaaaaaaggaatatttgtacccaacagctagaaggattgcaaggtagatttttgttttaaaatggagagaagtggacagataaggccatttaatatatcaaagatcagttgacatctcctagggaatgatgaaaacagcaggctattagaaaattatttcatatagttctcgtgttcttttcttttttttaatccctgaagggatgatcagtaacatagcttctcttttctgtactctagaccaccccttttcatcattttgctttttatgtctcccataagaaatgtgctttttagagcttcctaatgcatgtgttgcattattgcagcattagaaaaggagaggtagcatttttgctgaaatcgggcctgtcactctccaataaaggttctggcacttcaatgccaggcaggtctcctaaatgaacagaatgatctgtgtgagccgatgcctgcccttccagaggggccactgtccccagccgcagccaactgtgtcccacaggaatgggagcctaggtttccaaatcttgtgattctttaggagaaacatgaaacctggatttcgtgtgaaatgtcccgattgttaaaaagttggctcaattatttttaaaacattttgtaagccaacaaaagtctgtgggctgccagtttattacttttgtcttaaaacatgatcattgttctctcacggtatccttctgtcttcccgttgcaaattcacttttctttcttcctgacattgccattgagggctttgttaccacaagctaagaaactgagtttaacagcccagttatctgcaacatgtcaattacctttgctcctctcctgtgattcccaccatgctgtgaccctcagctgtctccctttgctgggaattctgcaccaatgtctcccctcaacccattccctggttggtcctactcccgtgtggccagagacatcctagcaaatccttcctcctattatatctgacactaatttcttttcaacagcgctcatgtctcttggcccagtcaggtgctgccaggtttagataggaaagtacatgtcccattttcatgggtgcccttaatgtggtccacgtcctatatcttattatatttactcatggctcaatgggggcctccagagaccctctcaggctgctgagctagactaaggaatgcatccaccgtcatcacatgagacactgactctgtgacgacaaaagtacaaacagtctgaggctaagaaaggttcatctcacaacaggaaaaacaaatctcaacacacattagagataattgattcaggggttttctctcccagtctcccagcagggactgatttcatttctgacccactaggttttctttccagaaataggtagcaaggacaagaactaaacaatcccagccccacccagcaacacagaacacaggagtttgcttttggcttctcactctccaagtaaccctgaattaggcccagaatggctgaggcttggagcatctcctcagacagagcagaggcgacacctcttcaggggtgtgtggagtaaatagctcgaagagctgaagacagaaaaccagtttcacgccaggtgcgagagagagcataatggagggaagcccgctttctctctcctcttcttttctctttatttctttagagcacttgacttttttttctctctctctctagtattctaaactgaccccatgaccaactgagaatttatttttgtttcattggttgtttcacagaattagaacacacacgactttttattcctccattgcaaaatggaatcaagatactacacaagacctgtgctttcttcctttgcatgatttacacctccgcctgttttggtgctagctgtctagaacttctctcttggtttgaatctgattccttcacactacactagaagtttatttcatcttgttttgtctagactccagatacagagggacagctggactgaggacaagcaattccatctagcatagggtctctcagggttggtgcatccagccacatgggcagggccagtcacatctagtctatgtccccagagcccttggagttgcgcagcttagctgacttgactccaaggaaattagtacagaagtaaccactctattaagtgtgttctgctatgttcacatgcctgtagtacctgcaaaccatgccaggttcatctaaagacataggggaagattaaggactcttttggacagaccatgaattgaatttgctgccaggtgctgccagactgaatttggctgacagaactcccagcccaggaaagttccatgacaatgactgtcgcagaaggaaatttcccactaaagtcagtccattttcaagttttggtcttcagagacaaaagaacgtcccagccacctgattttgatggtgaggtaactctaagttgaattcaggctagtgttgcagtatagctttggcatgttcatgagtgagcacccagaatgtgttgaaccaacccccacccctaactactgactatgactgcagtgggtttttatggggaaaaaaagtgtgaaaagcaaaaagaaaggaacagagattttttatcacctttattgtaagacagtccatttatgaattgagtataaacacatacaaagtaacaagagattcctaagaaacgcaaatccttgagtttcacgcacttcatgttcaaccatttgctgtaatccagaggcagcctgtgaatcattctcatgccctgttttttttttttttttcctataatgttctgggtttaaaagccatcttttccacattttctgtaaataatggataatcattttaaaaatttttatttttagtgctgttttaacaatgtagatagatcataaatgtacttgctgaattcaatcatttttaacaagccaataaagtttgataattcatctcca

SEQ ID NO: 7568 - protein, 477 aa, Homo sapiens; identical to SEQ ID NO: 1090

SEQ ID NO: 7569 - DNA, 8339 bp, Homo sapiens
atgccctacgtgggggtgggcatcgcggggagtgaatccacgatctgggaatggctacatcccactaattttctggagtttctgcccctgctctgcgtcagccctcacgtcacttcgccagcagtagcagaggcggcggcggcggctcccggaattgggttggagcaggagcctcgctggctgcttcgctcgcgctctacgcgctcagtccccggcggtagcaggagcctggacccaggcgccgccggcgggcgtgaggcgccggagcccggcctcgaggtgcataccggacccccattcgcatctaacaaggaatctgcgccccagagagtcccgggagcgccgccggtcggtgcccggcgcgccgggccatgcagcgacggccgccgcggagctccgagcagcggtagcgcccccctgtaaagcggttcgctatgccggggccactgtgaaccctgccgcctgccggaacactcttcgctccggaccagctcagcctctgataagctggactcggcacgcccgcaacaagcaccgaggagttaagagagccgcaagcgcagggaaggcctccccgcacgggtgggggaaagcggccggtgcagcgcggggacaggcactcgggctggcactggctgctagggatgtcgtcctggataaggtggcatggacccgccatggcgcggctctggggcttctgctggctggttgtgggcttctggagggccgctttcgcctgtcccacgtcctgcaaatgcagtgcctctcggatctggtgcagcgacccttctcctggcatcgtggcatttccgagattggagcctaacagtgtagatcctgagaacatcaccgaaattttcatcgcaaaccagaaaaggttagaaatcatcaacgaagatgatgttgaagcttatgtgggactgagaaatctgacaattgtggattctggattaaaatttgtggctcataaagcatttctgaaaaacagcaacctgcagcacatcaattttacccgaaacaaactgacgagtttgtctaggaaacatttccgtcaccttgacttgtctgaactgatcctggtgggcaatccatttacatgctcctgtgacattatgtggatcaagactctccaagaggctaaatccagtccagacactcaggatttgtactgcctgaatgaaagcagcaagaatattcccctggcaaacctgcagatacccaattgtggtttgccatctgcaaatctggccgcacctaacctcactgtggaggaaggaaagtctatcacattatcctgtagtgtggcaggtgatccggttcctaatatgtattgggatgttggtaacctggtttccaaacatatgaatgaaacaagccacacacagggctccttaaggataactaacatttcatccgatgacagtgggaagcagatctcttgtgtggcggaaaatcttgtaggagaagatcaagattctgtcaacctcactgtgcattttgcaccaactatcacatttctcgaatctccaacctcagaccaccactggtgcattccattcactgtgaaaggcaaccccaaaccagcgcttcagtggttctataacggggcaatattgaatgagtccaaatacatctgtactaaaatacatgttaccaatcacacggagtaccacggctgcctccagctggataatcccactcacatgaacaatggggactacactctaatagccaagaatgagtatgggaaggatgagaaacagatttctgctcacttcatgggctggcctggaattgacgatggtgcaaacccaaattatcctgatgtaatttatgaagattatggaactgcagcgaatgacatcggggacaccacgaacagaagtaatgaaatcccttccacagacgtcactgataaaaccggtcgggaacatctctcggtctatgctgtggtggtgattgcgtctgtggtgggattttgccttttggtaatgctgtttctgcttaagttggcaagacactccaagtttggcatgaaaggcccagcctccgttatcagcaatgatgatgactctgccagcccactccatcacatctccaatgggagtaacactccatcttcttcggaaggtggcccagatgctgtcattattggaatgaccaagatccctgtcattgaaaatccccagtactttggcatcaccaacagtcagctcaagccagacacatggcccagaggttcccccaagaccgcctgataataatttggtatttggaggctcctgtgtcactgcaggaactaaaggaggctaaatccatgcctgatggaggagaagagttctatggttatctgcaaattctggccagacaacatcttgacgtcactccttagcttccataacctagccaagcaagaagttgcctttccaagacaaagcagtgtgctctaatgactaacccctcaaagtactatgccactttaactatagacccatctcctcgatcaatcaggatggcaagatggagctgaggagctcagcaacatcaagtctggagttggtctttaactcaactagctcgtttagacgtgtctgaacaccacatcacctgacagcacggggtggtttcccagtaaaatttacaaactcagctcaagggcagctgtgttgctttcctttccttgactgctgagaaactttttgacagggaacaatggaaacacaccttctgagctgaaacaaacaaacagaaacaaaacatactaaccagcaaaatccccaaatcatcaatcttgggttctcttgaagggcaggagtgtgttttatcttctcccgtcggagcaaacactatagatgtcctccctaaaattctgtcttccctagagcagccttgtaaattagctagggtcctagggttgaggcctaaatcaacttaaaattgtctctaaatatgtacctggatgtgtttgtacttgcagagcatgccctcttcatgtgcctagggctagtaactccctgtggcagaggcatgtaaagtattctgactttttttttttcaacttaattccatttccaatgaaatggatttttaaaaattttctccagagtgtgccatacttctccagctattatagttaatgtgtgtgtatccttgtgtatatgtgtgtttgtgtgtgcatatgtgttttcctagtggttacatgcttactaggcaattatgtaaataagcacagattcataggccagctaggcctgaggaaagaagacattataaagggagggagtattttaacattagctaaagctatcacacaaggcacccattctgctcccctcaacagccacagcccacttcgtccttgtcttaccaataaggggaaaggctggaggtgatatttttcacagaaccgcagaggttttgaacatatttgcaacattactttgagtacacatgagcaaaaattctgaattacatccaggaccccagaagctcattagatcaaagagtgcggggcccctcagagttaccagagattatctgcagacttcagtgcaatcgaatgaccatggtccattttgatggtcagaggtaggactgaaaaacgggtagaaacaattgctttagcgcttccttctgtactttgcctattaatgttttgtctttcaaaaatatattttctcctaattgtttaattggccaaataatggctgctttgggagttgtttgtatgccttggaaggccatggcctgcactttaaaaataagctaagtccattctgcccagcacgagcattaggacagagaatgcacttattttaggatccttaaaaattgcttcttttatggcacactgggttgacgactcatctcgtgggagccttcatggcacattgctgctgttctgcaggtcccaatacaattccttccccctctcagtgccacggcccccccattgctagctacaacaatttgatatcatattcccttttcaactccaaaggagatgataagaagctatcaaataatgctttaaaaaagcaacttgagtttcttaaaagaaaggaaatgaatacatgctgcataattacatttaaaatgtaagccatgttattataagccgcactgagatgaagatttgttagcaaaccagtttcaagcacactcacagtgaagtaaaatcatgtttttagcatctgaccattgggtaatattattctttgttatcaaaagagaaatatcacccaagtatagtatacttagacctcctagaggaaacactccagtcctaagcttggtgtctgaaaagaaaaacaaaaataaagattatggatttaggtcagggagacagagtgatattctgaagactgtgtttactccctcatcatcggccaaccaagatggagttctgcatcctgcacatatcagacatttcagtccaatttcaccaaagcatcagtgatgttctagaagcatcccagcagatggaggatcctaatgtatttgttctgggtatttcccaaggcccagcctgactggagtgtgtgtaccaacaggatgaatccaatcaagctacgcccccattttggtttcggattggccactcttgcatgtgctagtagattgtggaccaggaccagctgagcaaacacagttgcagagtagcctcctatgttgctaagaagctcctgctacccaggtgctttgaacaattgagtgctccctctggttaagtagagatggcaccaccggagtttttcttggatgtgaggctcaatcctttacggcagctattataacaaagtgaaggttttctccctgggaaatgcagcttttctctgtctttactaattctgccagcctgtgagagtaaccaccgtagctgggcttcttctcagattaattgtcatgccaggtctccttcctggggagctgtgatgctgctctgaggttgattgctgaggttgtagtgggtttttgtttgtttttgtttagtttttcttgattgttcttctttctcttgaatggcaagagaagaaacactttctctaacccacggccaggaaggaaatggggagagagctacttcttagttcaacctggttgccacataaaggaatctctctccttggactcagcccctaactggaagcaagagccactgccctctgagactgagagagcagcccgaggaggagatgaatccattctgccctttgtttgggtttgcttcctgtcagtgagagaatgctgaggcagttcctgttatgtgaaactttcatttttaaaaccaggacagtcctaaacagactggaatgagttggtcaatcccagttggtataggcccaatgatttttgctagtaagataggattgtcttcctcacccaaaatgccttcaagtgccctaaaatgggtattttaaaataagaataaataatgtagatttagtagaaaacctggaaaacataagaaacaaagatgaaacgaaaagtcccatgtaattccaccagttagagttaaccactgatatcgtttggatatatggctttctagtcttgtggatatccttttaatctcttgtaatataaagtctgaccatatgtgtccttgcatttgtttgtactggactctgttaatatttctatagtaatggctcactttggggagattgtgctgcacagtgtgtaggaagcacattgggtgtattattcccagttttgtattttgtatttccttggagatgtgcaggggttaagagcgggggtctggccatagctggccacgtcagactctcatatggtaagtatcacagagcacatgaggcctgtgttatgcgctggaaagactcaggaaatgagaggctctcttgttctgacaaggcaggctgagagctctcatttagggtcatcactccagataactccaaatgcagtttattgctcaactgaagcagatgatcactttttgcctccaagttcttcaccctagctagctcctttcaaagagccgagtatgctggatcttaaagggccaaactagttacatctcatacatttcctgatgtttagggatgccttcacttccatcaaggataccttggctgtgcaaggacctctgatagctggagtctccttttggtcactcccagctttgcttaaacttgatggagtttgctgtccagtgatccccggatctttcatcatgaaagccttccttcctctcctgatgtctcaggcctctagacctagactggggttctggcaaggaggcctctatcaatagtatgacatccaataatatgttagtgttgatattttgcacagtaatattaagtttaagagattataaaaatgagttcaaatgaataagttcctgtgatgtaagagattagatatgtgtgatttcagaaccaaaggcaggggggaatcccagaaagaaaacaataatataatcctagtttctatatattatttttattcattactgtatatgggtagagatcaatattctttcttatgctgttactattaattaacacattttttaaccatgccattgaacttttgggtgcattaaagtggaacccaagctcctcattagataataatggcatttggactgagtgccatattcctaaatttccaataaagtggttgatatagagaggacaggataaagccctatagtgtgcagttatatcaaaacagctagtctccactttagggaatgcctttactagagattacatgaaatgtctgcttataaaataagcagagatggcaccactaagcagccacctgaattgttttcctacaggaatgattacttttcagatccatttatgttttcatgctcaatacttactccccttccctgcaacacccaaagagtttacttttgcaagtcatttggtcttcagtctactactgaggaatagagaggcactaactgctttacccaggatcagaactcatgttcttaccttctattaatagagtacttgagccagatggactaactggtctcacattttctctatcttggttttacttccataaacatcaatatctttacccacatgatttttccatcctcccatttttttccatatgtattagggttcaggaactatgatgctaatgatcacatttcttcctagttcctaatttcattagtgccatttcctgatatctacagaaacaattatcaatacatgtagctgcttgagccttatttagaaggctagcctttcttttccaagtgctgtcagaatgtatacatttagtctgtctttttcccttttaggagtctttgttctgggttgatggcaaaattcctctttttacatgtgagatttttgatttcactgaattctacctagatttttatggacattggattttaaagaggaaaacactcattttcttagtaagatattggtgatacatagctatgccattgatttccatactcctgagctttggggagggagacagtggccaagtagcaggcagaataagatcatcactcatgtcctgaatcaatcacactttccttctcggattgtgtatatgctctgccacttcctacatattacatcctgagtttttaagtaaagtggatcttagccagatttgagtctaatggctgattcatcggcatagttcttggcgttaacatctcagtgtcctctttagttctctttgaggattcatgtcattgagggcctttgtgcctccacttgtctcagtatgaggaagaactttggtgtgagggcggagctatgtgaagggttgctgggttgggggattagttcatatggtccccatgccatctatttacttttggagagaggggactttgagtgggtgggtatggatagatgttcctcaaggaaaccctgctggctaatgggcactacatctgtgtattactgtgattctctctgtaagctccccatgtggccaaggacccccctcctaccagggcacttcctgccacctcattgcactggtctcaaccattcagcctgctgctgctgcaccatgttgggctgcggtaggatagggaaggggttctgttgattgctaaatgttgcctaactttatttccctctcccacatttcatgcaagggagcggacctaacacatgacttgcattctcttcctatgttcagaaactccagggcttgcccacgtgtatgtatgagtgaccaatggagcttggaattctttatctatatgatctgtccgaaaatgagatcttttgtactggaatttgtgatgtagttgatcattcagagccaaacgcatataccaataaagacaagactgtcatata

SEQ ID NO: 7570 - protein, 537 aa, Homo sapiens; identical to SEQ ID NO: 1096

SEQ ID NO: 7571 - DNA, 4594 bp, Homo sapiens
atgccctacgtgggggtgggcatcgcggggagtgaatccacgatctgggaatggctacatcccactaattttctggagtttctgcccctgctctgcgtcagccctcacgtcacttcgccagcagtagcagaggcggcggcggcggctcccggaattgggttggagcaggagcctcgctggctgcttcgctcgcgctctacgcgctcagtccccggcggtagcaggagcctggacccaggcgccgccggcgggcgtgaggcgccggagcccggcctcgaggtgcataccggacccccattcgcatctaacaaggaatctgcgccccagagagtcccgggagcgccgccggtcggtgcccggcgcgccgggccatgcagcgacggccgccgcggagctccgagcagcggtagcgcccccctgtaaagcggttcgctatgccggggccactgtgaaccctgccgcctgccggaacactcttcgctccggaccagctcagcctctgataagctggactcggcacgcccgcaacaagcaccgaggagttaagagagccgcaagcgcagggaaggcctccccgcacgggtgggggaaagcggccggtgcagcgcggggacaggcactcgggctggcactggctgctagggatgtcgtcctggataaggtggcatggacccgccatggcgcggctctggggcttctgctggctggttgtgggcttctggagggccgctttcgcctgtcccacgtcctgcaaatgcagtgcctctcggatctggtgcagcgacccttctcctggcatcgtggcatttccgagattggagcctaacagtgtagatcctgagaacatcaccgaaattttcatcgcaaaccagaaaaggttagaaatcatcaacgaagatgatgttgaagcttatgtgggactgagaaatctgacaattgtggattctggattaaaatttgtggctcataaagcatttctgaaaaacagcaacctgcagcacatcaattttacccgaaacaaactgacgagtttgtctaggaaacatttccgtcaccttgacttgtctgaactgatcctggtgggcaatccatttacatgctcctgtgacattatgtggatcaagactctccaagaggctaaatccagtccagacactcaggatttgtactgcctgaatgaaagcagcaagaatattcccctggcaaacctgcagatacccaattgtggtttgccatctgcaaatctggccgcacctaacctcactgtggaggaaggaaagtctatcacattatcctgtagtgtggcaggtgatccggttcctaatatgtattgggatgttggtaacctggtttccaaacatatgaatgaaacaagccacacacagggctccttaaggataactaacatttcatccgatgacagtgggaagcagatctcttgtgtggcggaaaatcttgtaggagaagatcaagattctgtcaacctcactgtgcattttgcaccaactatcacatttctcgaatctccaacctcagaccaccactggtgcattccattcactgtgaaaggcaaccccaaaccagcgcttcagtggttctataacggggcaatattgaatgagtccaaatacatctgtactaaaatacatgttaccaatcacacggagtaccacggctgcctccagctggataatcccactcacatgaacaatggggactacactctaatagccaagaatgagtatgggaaggatgagaaacagatttctgctcacttcatgggctggcctggaattgacgatggtgcaaacccaaattatcctgatgtaatttatgaagattatggaactgcagcgaatgacatcggggacaccacgaacagaagtaatgaaatcccttccacagacgtcactgataaaaccggtcgggaacatctctcggtctatgctgtggtggtgattgcgtctgtggtgggattttgccttttggtaatgctgtttctgcttaagttggcaagacactccaagtttggcatgaaaggcccagcctccgttatcagcaatgatgatgactctgccagcccactccatcacatctccaatgggagtaacactccatcttcttcggaaggtggcccagatgctgtcattattggaatgaccaagatccctgtcattgaaaatccccagtactttggcatcaccaacagtcagctcaagccagacacatttgttcagcacatcaagcgacataacattgttctgaaaagggagctaggcgaaggagcctttggaaaagtgttcctagctgaatgctataacctctgtcctgagcaggacaagatcttggtggcagtgaagaccctgaaggatgccagtgacaatgcacgcaaggacttccaccgtgaggccgagctcctgaccaacctccagcatgagcacatcgtcaagttctatggcgtctgcgtggagggcgaccccctcatcatggtctttgagtacatgaagcatggggacctcaacaagttcctcagggcacacggccctgatgccgtgctgatggctgagggcaacccgcccacggaactgacgcagtcgcagatgctgcatatagcccagcagatcgccgcgggcatggtctacctggcgtcccagcacttcgtgcaccgcgatttggccaccaggaactgcctggtcggggagaacttgctggtgaaaatcggggactttgggatgtcccgggacgtgtacagcactgactactacagggtcggtggccacacaatgctgcccattcgctggatgcctccagagagcatcatgtacaggaaattcacgacggaaagcgacgtctggagcctgggggtcgtgttgtgggagattttcacctatggcaaacagccctggtaccagctgtcaaacaatgaggtgatagagtgtatcactcagggccgagtcctgcagcgaccccgcacgtgcccccaggaggtgtatgagctgatgctggggtgctggcagcgagagccccacatgaggaagaacatcaagggcatccataccctccttcagaacttggccaaggcatctccggtctacctggacattctaggctagggcccttttccccagaccgatccttcccaacgtactcctcagacgggctgagaggatgaacatcttttaactgccgctggaggccaccaagctgctctccttcactctgacagtattaacatcaaagactccgagaagctctcgagggaagcagtgtgtacttcttcatccatagacacagtattgacttctttttggcattatctctttctctctttccatctcccttggttgttcctttttctttttttaaattttctttttcttttttttttcgtcttccctgcttcacgattcttaccctttcttttgaatcaatctggcttctgcattactattaactctgcatagacaaaggccttaacaaacgtaatttgttatatcagcagacactccagtttgcccaccacaactaacaatgccttgttgtattcctgcctttgatgtggatgaaaaaaagggaaaacaaatatttcacttaaactttgtcacttctgctgtacagatatcgagagtttctatggattcacttctatttatttattattattactgttcttattgtttttggatggcttaagcctgtgtataaaaaagaaaacttgtgttcaatctgtgaagcctttatctatgggagattaaaaccagagagaaagaagatttattatgaaccgcaatatgggaggaacaaagacaaccactgggatcagctggtgtcagtccctacttaggaaatactcagcaactgttagctgggaagaatgtattcggcaccttcccctgaggacctttctgaggagtaaaaagactactggcctctgtgccatggatgattcttttcccatcaccagaaatgatagcgtgcagtagagagcaaagatggcttccgtgagacacaagatggcgcatagtgtgctcggacacagttttgtcttcgtaggttgtgatgatagcactggtttgtttctcaagcgctatccacagaacctttgtcaacttcagttgaaaagaggtggattcatgtccagagctcatttcggggtcaggtgggaaagccaagaacttggaaaagataagacaagctataaattcggaggcaagtttcttttacaatgaacttttcagatctcacttccctccgacccctaacttccatgcccacccgtccttttaactgtgcaagcaaaattgtgcatggtcttcgtcgattaataccttgtgtgcagacactactgctccagacgtcgtttccctgataggtagagcagatccataaaaaggtatgacttatacaattaggggaagctaatggagtttattagctgagtatcaatgtctctgcgttgtacggtggtgatgggttttaatgaatatggaccctgaagcctggaaatcctcatccacgtcgaacccacaggactgtgggaagggcagaatcaatccctaagggaaaggaaacctcaccctgagggcatcacatg

SEQ ID NO: 7572 - protein, 822 aa, Homo sapiens; identical to SEQ ID NO: 1092

SEQ ID NO: 7573 - DNA, 7179 bp, Homo sapiens
aaaagggagacagcctctaccgcgattgtagaagagataattttctggagtttctgcccctgctctgcgtcagccctcacgtcacttcgccagcagtagcagaggcggcggcggcggctcccggaattgggttggagcaggagcctcgctggctgcttcgctcgcgctctacgcgctcagtccccggcggtagcaggagcctggacccaggcgccgccggcgggcgtgaggcgccggagcccggcctcgaggtgcataccggacccccattcgcatctaacaaggaatctgcgccccagagagtcccgggagcgccgccggtcggtgcccggcgcgccgggccatgcagcgacggccgccgcggagctccgagcagcggtagcgcccccctgtaaagcggttcgctatgccggggccactgtgaaccctgccgcctgccggaacactcttcgctccggaccagctcagcctctgataagctggactcggcacgcccgcaacaagcaccgaggagttaagagagccgcaagcgcagggaaggcctccccgcacgggtgggggaaagcggccggtgcagcgcggggacaggcactcgggctggcactggctgctagggatgtcgtcctggataaggtggcatggacccgccatggcgcggctctggggcttctgctggctggttgtgggcttctggagggccgctttcgcctgtcccacgtcctgcaaatgcagtgcctctcggatctggtgcagcgacccttctcctggcatcgtggcatttccgagattggagcctaacagtgtagatcctgagaacatcaccgaaattttcatcgcaaaccagaaaaggttagaaatcatcaacgaagatgatgttgaagcttatgtgggactgagaaatctgacaattgtggattctggattaaaatttgtggctcataaagcatttctgaaaaacagcaacctgcagcacatcaattttacccgaaacaaactgacgagtttgtctaggaaacatttccgtcaccttgacttgtctgaactgatcctggtgggcaatccatttacatgctcctgtgacattatgtggatcaagactctccaagaggctaaatccagtccagacactcaggatttgtactgcctgaatgaaagcagcaagaatattcccctggcaaacctgcagatacccaattgtggtttgccatctgcaaatctggccgcacctaacctcactgtggaggaaggaaagtctatcacattatcctgtagtgtggcaggtgatccggttcctaatatgtattgggatgttggtaacctggtttccaaacatatgaatgaaacaagccacacacagggctccttaaggataactaacatttcatccgatgacagtgggaagcagatctcttgtgtggcggaaaatcttgtaggagaagatcaagattctgtcaacctcactgtgcattttgcaccaactatcacatttctcgaatctccaacctcagaccaccactggtgcattccattcactgtgaaaggcaaccccaaaccagcgcttcagtggttctataacggggcaatattgaatgagtccaaatacatctgtactaaaatacatgttaccaatcacacggagtaccacggctgcctccagctggataatcccactcacatgaacaatggggactacactctaatagccaagaatgagtatgggaaggatgagaaacagatttctgctcacttcatgggctggcctggaattgacgatggtgcaaacccaaattatcctgatgtaatttatgaagattatggaactgcagcgaatgacatcggggacaccacgaacagaagtaatgaaatcccttccacagacgtcactgataaaaccggtcgggaacatctctcggtctatgctgtggtggtgattgcgtctgtggtgggattttgccttttggtaatgctgtttctgcttaagttggcaagacactccaagtttggcatgaaaggttttgttttgtttcataagatcccactggatgggtagctgaaataaaggaaaagacagagaaaggggctgtggtgcttgttggttgatgctgccatgtaagctggactcctgggactgctgttggcttatcccgggaagtgctgcttatctggggttttctggtagatgtgggcggtgtttggaggctgtactatatgaagcctgcatatactgtgagctgtgattggggaacaccaatgcagaggtaactctcaggcagctaagcagcacctcaagaaaacatgttaaattaatgcttctcttcttacagtagttcaaatacaaaactgaaatgaaatcccattggattgtacttctcttctgaaaagtgtgctttttgaccctactggacatttattgacttaattgcttctgtttattaaaattgacctgcaaagttaaaaaaaaattaaagttgagaacaggtataagtgcacactgaatagtctaatctacatgtaacacatattttagtgtgattttctatactctaatcagcactgaattcagagggtttgactttttcatctataacacagtgactaaaagagttaagggtatatataccatcactttgggacttggtagtattattaaaaggttatttccttcactgtcaataaaagtccaaatgtttagcttaggtctgagagtcaaacaatgttaaggattgtcttaaagttccttagccagcaaaacaaaacaaaacaaaacaaacaaatgaaaaacgtttaaaaagaagaagaagaaaaaaaacaagaacaagcagcaacagctgttttgttggggctatagatttaagttaggcatagtcaatttcagaataactaagagtggaatatatgcatatggtgaaattataaccttgcccttttttatttgccctctgcgatccacctgctttttagaagtctgccgagtgagaaggccacagtatctcatgctgtttgcattacagaactgcagcttttctactctgaaaaggcctgggagcagaatggctggcctgctgtgagcaggagaggagattctaagaaggatagtcccccctacaacatactgtcatactgctgggttttcatgggtaggaaagcttgtcctgaccccagcagcaaagaggtggcaggtcgctaatgaatatatgctttataatgtccttcttcattgctgagagggcagccttagagctgtggatttctgcatcccccctgagtctgacccatggacacctgtttcattcactttagcatcacagtgacctttgtatgctctgttcagtctgtgtcaggcagtatgcttgtcctgaagagaggtttggctatccccaccccaccccaccccaccctgttccttttttatcaggaggacttcagagccaggcctgcagcattttgtttgaaaacacaatcagctctgacagttagacatgcacacagacgccatagctggattggaaacattgatgttttaaaaatttattttttttggaaatagttgcacaaatgctgcaatttagctttaaggttctatagatttttaactagtccaacacagtcagaaacattgttttgaatcctctgtaaaccaaggcattaatcttaataaaccaggatccatttaggtaccacttgatataaaaaggatatccataatgaatattttatactgcatcctttacattagccactaaatacgttattgcttgatgaagacctttcacagaatcctatggattgcagcatttcacttggctacttcatacccatgccttaaagaggggcagtttctcaaaagcagaaacatgccgccagttctcaagttttcctcctaactccatttgaatgtaagggcagctggcccccaatgtggggaggtccgaacattttctgaattcccattttcttgttcgcggctaaatgacagtttctgtcattacttagattccgatctttcccaaaggtgttgatttacaaagaggccagctaatagcagaaatcatgaccctgaaagagagatgaaattcaagctgtgagccaggcaggagctcagtatggcaaaggttcttgagaatcagccatttggtacaaaaaagatttttaaagcttttatgttataccatggagccatagaaaggctatggattgtttaagaactattttaaagtgttccagacccaaaaaggaaaaataaaaaaaaaggaatatttgtacccaacagctagaaggattgcaaggtagatttttgttttaaaatggagagaagtggacagataaggccatttaatatatcaaagatcagttgacatctcctagggaatgatgaaaacagcaggctattagaaaattatttcatatagttctcgtgttcttttcttttttttaatccctgaagggatgatcagtaacatagcttctcttttctgtactctagaccaccccttttcatcattttgctttttatgtctcccataagaaatgtgctttttagagcttcctaatgcatgtgttgcattattgcagcattagaaaaggagaggtagcatttttgctgaaatcgggcctgtcactctccaataaaggttctggcacttcaatgccaggcaggtctcctaaatgaacagaatgatctgtgtgagccgatgcctgcccttccagaggggccactgtccccagccgcagccaactgtgtcccacaggaatgggagcctaggtttccaaatcttgtgattctttaggagaaacatgaaacctggatttcgtgtgaaatgtcccgattgttaaaaagttggctcaattatttttaaaacattttgtaagccaacaaaagtctgtgggctgccagtttattacttttgtcttaaaacatgatcattgttctctcacggtatccttctgtcttcccgttgcaaattcacttttctttcttcctgacattgccattgagggctttgttaccacaagctaagaaactgagtttaacagcccagttatctgcaacatgtcaattacctttgctcctctcctgtgattcccaccatgctgtgaccctcagctgtctccctttgctgggaattctgcaccaatgtctcccctcaacccattccctggttggtcctactcccgtgtggccagagacatcctagcaaatccttcctcctattatatctgacactaatttcttttcaacagcgctcatgtctcttggcccagtcaggtgctgccaggtttagataggaaagtacatgtcccattttcatgggtgcccttaatgtggtccacgtcctatatcttattatatttactcatggctcaatgggggcctccagagaccctctcaggctgctgagctagactaaggaatgcatccaccgtcatcacatgagacactgactctgtgacgacaaaagtacaaacagtctgaggctaagaaaggttcatctcacaacaggaaaaacaaatctcaacacacattagagataattgattcaggggttttctctcccagtctcccagcagggactgatttcatttctgacccactaggttttctttccagaaataggtagcaaggacaagaactaaacaatcccagccccacccagcaacacagaacacaggagtttgcttttggcttctcactctccaagtaaccctgaattaggcccagaatggctgaggcttggagcatctcctcagacagagcagaggcgacacctcttcaggggtgtgtggagtaaatagctcgaagagctgaagacagaaaaccagtttcacgccaggtgcgagagagagcataatggagggaagcccgctttctctctcctcttcttttctctttatttctttagagcacttgacttttttttctctctctctctagtattctaaactgaccccatgaccaactgagaatttatttttgtttcattggttgtttcacagaattagaacacacacgactttttattcctccattgcaaaatggaatcaagatactacacaagacctgtgctttcttcctttgcatgatttacacctccgcctgttttggtgctagctgtctagaacttctctcttggtttgaatctgattccttcacactacactagaagtttatttcatcttgttttgtctagactccagatacagagggacagctggactgaggacaagcaattccatctagcatagggtctctcagggttggtgcatccagccacatgggcagggccagtcacatctagtctatgtccccagagcccttggagttgcgcagcttagctgacttgactccaaggaaattagtacagaagtaaccactctattaagtgtgttctgctatgttcacatgcctgtagtacctgcaaaccatgccaggttcatctaaagacataggggaagattaaggactcttttggacagaccatgaattgaatttgctgccaggtgctgccagactgaatttggctgacagaactcccagcccaggaaagttccatgacaatgactgtcgcagaaggaaatttcccactaaagtcagtccattttcaagttttggtcttcagagacaaaagaacgtcccagccacctgattttgatggtgaggtaactctaagttgaattcaggctagtgttgcagtatagctttggcatgttcatgagtgagcacccagaatgtgttgaaccaacccccacccctaactactgactatgactgcagtgggtttttatggggaaaaaaagtgtgaaaagcaaaaagaaaggaacagagattttttatcacctttattgtaagacagtccatttatgaattgagtataaacacatacaaagtaacaagagattcctaagaaacgcaaatccttgagtttcacgcacttcatgttcaaccatttgctgtaatccagaggcagcctgtgaatcattctcatgccctgttttttttttttttttcctataatgttctgggtttaaaagccatcttttccacattttctgtaaataatggataatcattttaaaaatttttatttttagtgctgttttaacaatgtagatagatcataaatgtacttgctgaattcaatcatttttaacaagccaataaagtttgataattcatctcca

SEQ ID NO: 7574 - protein, 477 aa, Homo sapiens; identical to SEQ ID NO: 1090

SEQ ID NO: 7575 - DNA, 839 bp, Homo sapiens
ttgcaccaactatcacatttctcgaatctccaacctcagaccaccactggtgcattccattcactgtgaaaggcaaccccaaaccagcgcttcagtggttctataacggggcaatattgaatgagtccaaatacatctgtactaaaatacatgttaccaatcacacggagtaccacggctgcctccagctggataatcccactcacatgaacaatggggactacactctaatagccaagaatgagtatgggaaggatgagtgcaaacccaaattatcctgatgtaatttatgaagattatggaactgcagcgaatgacatcggggacaccacgaacagaagtaatgaaatcccttccacagacgtcactgataaaaccggtcgggaacatctctcggtctatgctgtggtggtgattgcgtctgtggtgggattttgccttttggtaatgctgtttctgcttaagttggcaagacactccaagtttggcatgaaaggttttgttttgtttcataagatcccactggatgggtagctgaaataaaggaaaagacagagaaaggggctgtggtgcttgttggttgatgctgccatgtaagctggactcctgggactgctgttggcttatcccgggaagtgctgcttatctggggttttctggtagatgtgggcggtgtttggaggctgtactatatgaagcctgcatatactgtgagctgtgattggggaacaccaatgcagaggtaactctcaggcagctaagcagcacctcaagaaaacatgttaaattaatgcttctcttcttacagtagttcaaatacaaaactgaaatgaaatccc

SEQ ID NO: 7576 - protein, 97 aa, Homo sapiens
MSMGRMSANPNYPDVIYEDYGTAANDIGDTTNRSNEIPSTDVTDKTGREHLSVYAVVVIASVVGFCLLVMLFLLKLARHSKFGMKGFVLFHKIPLDG

SEQ ID NO: 7577 - DNA, 972 bp, Homo sapiens
ttgcaccaactatcacatttctcgaatctccaacctcagaccaccactggtgcattccattcactgtgaaaggcaaccccaaaccagcgcttcagtggttctataacggggcaatattgaatgagtccaaatacatctgtactaaaatacatgttaccaatcacacggagtaccacggctgcctccagctggataatcccactcacatgaacaatggggactacactctaatagccaagaatgagtatgggaaggatgagtgcaaacccaaattatcctgatgtaatttatgaagattatggaactgcagcgaatgacatcggggacaccacgaacagaagtaatgaaatcccttccacagacgtcactgataaaaccggtcgggaacatctctcggtctatgctgtggtggtgattgcgtctgtggtgggattttgccttttggtaatgctgtttctgcttaagttggcaagacactccaagtttggcatgaaaggttttgttttgtttcataagatcccactggatgggtagctgaaataaaggaaaagacagagaaaggggctgtggtgcttgttggttgatgctgccatgtaagctggactcctgggactgctgttggcttatcccgggaagtgctgcttatctggggttttctggtagatgtgggcggtgtttggaggctgtactatatgaagcctgcatatactgtgagctgtgattggggaacaccaatgcagaggtaactctcaggcagctaagcagcacctcaagaaaacatgttaaattaatgcttctcttcttacagtagttcaaatacaaaactgaaatgaaatcccattggattgtacttctcttctgaaaagtgtgctttttgaccctactggacatttattgacttaattgcttctgtttattaaaattgacctgcaaagttaaaaaaaaattaaagttgagaacaggtataagtgc

SEQ ID NO: 7578 - protein, 97 aa, Homo sapiens; identical to SEQ ID NO: 7576

SEQ ID NO: 7579 - DNA, 5363 bp, Homo sapiens
ttgcaccaactatcacatttctcgaatctccaacctcagaccaccactggtgcattccattcactgtgaaaggcaaccccaaaccagcgcttcagtggttctataacggggcaatattgaatgagtccaaatacatctgtactaaaatacatgttaccaatcacacggagtaccacggctgcctccagctggataatcccactcacatgaacaatggggactacactctaatagccaagaatgagtatgggaaggatgagtgcaaacccaaattatcctgatgtaatttatgaagattatggaactgcagcgaatgacatcggggacaccacgaacagaagtaatgaaatcccttccacagacgtcactgataaaaccggtcgggaacatctctcggtctatgctgtggtggtgattgcgtctgtggtgggattttgccttttggtaatgctgtttctgcttaagttggcaagacactccaagtttggcatgaaaggttttgttttgtttcataagatcccactggatgggtagctgaaataaaggaaaagacagagaaaggggctgtggtgcttgttggttgatgctgccatgtaagctggactcctgggactgctgttggcttatcccgggaagtgctgcttatctggggttttctggtagatgtgggcggtgtttggaggctgtactatatgaagcctgcatatactgtgagctgtgattggggaacaccaatgcagaggtaactctcaggcagctaagcagcacctcaagaaaacatgttaaattaatgcttctcttcttacagtagttcaaatacaaaactgaaatgaaatcccattggattgtacttctcttctgaaaagtgtgctttttgaccctactggacatttattgacttaattgcttctgtttattaaaattgacctgcaaagttaaaaaaaaattaaagttgagaacaggtataagtgcacactgaatagtctaatctacatgtaacacatattttagtgtgattttctatactctaatcagcactgaattcagagggtttgactttttcatctataacacagtgactaaaagagttaagggtatatataccatcactttgggacttggtagtattattaaaaggttatttccttcactgtcaataaaagtccaaatgtttagcttaggtctgagagtcaaacaatgttaaggattgtcttaaagttccttagccagcaaaacaaaacaaaacaaaacaaacaaatgaaaaacgtttaaaaagaagaagaagaaaaaaaacaagaacaagcagcaacagctgttttgttggggctatagatttaagttaggcatagtcaatttcagaataactaagagtggaatatatgcatatggtgaaattataaccttgcccttttttatttgccctctgcgatccacctgctttttagaagtctgccgagtgagaaggccacagtatctcatgctgtttgcattacagaactgcagcttttctactctgaaaaggcctgggagcagaatggctggcctgctgtgagcaggagaggagattctaagaaggatagtcccccctacaacatactgtcatactgctgggttttcatgggtaggaaagcttgtcctgaccccagcagcaaagaggtggcaggtcgctaatgaatatatgctttataatgtccttcttcattgctgagagggcagccttagagctgtggatttctgcatcccccctgagtctgacccatggacacctgtttcattcactttagcatcacagtgacctttgtatgctctgttcagtctgtgtcaggcagtatgcttgtcctgaagagaggtttggctatccccaccccaccccaccccaccctgttccttttttatcaggaggacttcagagccaggcctgcagcattttgtttgaaaacacaatcagctctgacagttagacatgcacacagacgccatagctggattggaaacattgatgttttaaaaatttattttttttggaaatagttgcacaaatgctgcaatttagctttaaggttctatagatttttaactagtccaacacagtcagaaacattgttttgaatcctctgtaaaccaaggcattaatcttaataaaccaggatccatttaggtaccacttgatataaaaaggatatccataatgaatattttatactgcatcctttacattagccactaaatacgttattgcttgatgaagacctttcacagaatcctatggattgcagcatttcacttggctacttcatacccatgccttaaagaggggcagtttctcaaaagcagaaacatgccgccagttctcaagttttcctcctaactccatttgaatgtaagggcagctggcccccaatgtggggaggtccgaacattttctgaattcccattttcttgttcgcggctaaatgacagtttctgtcattacttagattccgatctttcccaaaggtgttgatttacaaagaggccagctaatagcagaaatcatgaccctgaaagagagatgaaattcaagctgtgagccaggcaggagctcagtatggcaaaggttcttgagaatcagccatttggtacaaaaaagatttttaaagcttttatgttataccatggagccatagaaaggctatggattgtttaagaactattttaaagtgttccagacccaaaaaggaaaaataaaaaaaaaggaatatttgtacccaacagctagaaggattgcaaggtagatttttgttttaaaatggagagaagtggacagataaggccatttaatatatcaaagatcagttgacatctcctagggaatgatgaaaacagcaggctattagaaaattatttcatatagttctcgtgttcttttcttttttttaatccctgaagggatgatcagtaacatagcttctcttttctgtactctagaccaccccttttcatcattttgctttttatgtctcccataagaaatgtgctttttagagcttcctaatgcatgtgttgcattattgcagcattagaaaaggagaggtagcatttttgctgaaatcgggcctgtcactctccaataaaggttctggcacttcaatgccaggcaggtctcctaaatgaacagaatgatctgtgtgagccgatgcctgcccttccagaggggccactgtccccagccgcagccaactgtgtcccacaggaatgggagcctaggtttccaaatcttgtgattctttaggagaaacatgaaacctggatttcgtgtgaaatgtcccgattgttaaaaagttggctcaattatttttaaaacattttgtaagccaacaaaagtctgtgggctgccagtttattacttttgtcttaaaacatgatcattgttctctcacggtatccttctgtcttcccgttgcaaattcacttttctttcttcctgacattgccattgagggctttgttaccacaagctaagaaactgagtttaacagcccagttatctgcaacatgtcaattacctttgctcctctcctgtgattcccaccatgctgtgaccctcagctgtctccctttgctgggaattctgcaccaatgtctcccctcaacccattccctggttggtcctactcccgtgtggccagagacatcctagcaaatccttcctcctattatatctgacactaatttcttttcaacagcgctcatgtctcttggcccagtcaggtgctgccaggtttagataggaaagtacatgtcccattttcatgggtgcccttaatgtggtccacgtcctatatcttattatatttactcatggctcaatgggggcctccagagaccctctcaggctgctgagctagactaaggaatgcatccaccgtcatcacatgagacactgactctgtgacgacaaaagtacaaacagtctgaggctaagaaaggttcatctcacaacaggaaaaacaaatctcaacacacattagagataattgattcaggggttttctctcccagtctcccagcagggactgatttcatttctgacccactaggttttctttccagaaataggtagcaaggacaagaactaaacaatcccagccccacccagcaacacagaacacaggagtttgcttttggcttctcactctccaagtaaccctgaattaggcccagaatggctgaggcttggagcatctcctcagacagagcagaggcgacacctcttcaggggtgtgtggagtaaatagctcgaagagctgaagacagaaaaccagtttcacgccaggtgcgagagagagcataatggagggaagcccgctttctctctcctcttcttttctctttatttctttagagcacttgacttttttttctctctctctctagtattctaaactgaccccatgaccaactgagaatttatttttgtttcattggttgtttcacagaattagaacacacacgactttttattcctccattgcaaaatggaatcaagatactacacaagacctgtgctttcttcctttgcatgatttacacctccgcctgttttggtgctagctgtctagaacttctctcttggtttgaatctgattccttcacactacactagaagtttatttcatcttgttttgtctagactccagatacagagggacagctggactgaggacaagcaattccatctagcatagggtctctcagggttggtgcatccagccacatgggcagggccagtcacatctagtctatgtccccagagcccttggagttgcgcagcttagctgacttgactccaaggaaattagtacagaagtaaccactctattaagtgtgttctgctatgttcacatgcctgtagtacctgcaaaccatgccaggttcatctaaagacataggggaagattaaggactcttttggacagaccatgaattgaatttgctgccaggtgctgccagactgaatttggctgacagaactcccagcccaggaaagttccatgacaatgactgtcgcagaaggaaatttcccactaaagtcagtccattttcaagttttggtcttcagagacaaaagaacgtcccagccacctgattttgatggtgaggtaactctaagttgaattcaggctagtgttgcagtatagctttggcatgttcatgagtgagcacccagaatgtgttgaaccaacccccacccctaactactgactatgactgcagtgggtttttatggggaaaaaaagtgtgaaaagcaaaaagaaaggaacagagattttttatcacctttattgtaagacagtccatttatgaattgagtataaacacat

SEQ ID NO: 7580 - protein, 97 aa, Homo sapiens; identical to SEQ ID NO: 7576

SEQ ID NO: 7581 - DNA, 5663 bp, Homo sapiens
ttgcaccaactatcacatttctcgaatctccaacctcagaccaccactggtgcattccattcactgtgaaaggcaaccccaaaccagcgcttcagtggttctataacggggcaatattgaatgagtccaaatacatctgtactaaaatacatgttaccaatcacacggagtaccacggctgcctccagctggataatcccactcacatgaacaatggggactacactctaatagccaagaatgagtatgggaaggatgagtgcaaacccaaattatcctgatgtaatttatgaagattatggaactgcagcgaatgacatcggggacaccacgaacagaagtaatgaaatcccttccacagacgtcactgataaaaccggtcgggaacatctctcggtctatgctgtggtggtgattgcgtctgtggtgggattttgccttttggtaatgctgtttctgcttaagttggcaagacactccaagtttggcatgaaaggttttgttttgtttcataagatcccactggatgggtagctgaaataaaggaaaagacagagaaaggggctgtggtgcttgttggttgatgctgccatgtaagctggactcctgggactgctgttggcttatcccgggaagtgctgcttatctggggttttctggtagatgtgggcggtgtttggaggctgtactatatgaagcctgcatatactgtgagctgtgattggggaacaccaatgcagaggtaactctcaggcagctaagcagcacctcaagaaaacatgttaaattaatgcttctcttcttacagtagttcaaatacaaaactgaaatgaaatcccattggattgtacttctcttctgaaaagtgtgctttttgaccctactggacatttattgacttaattgcttctgtttattaaaattgacctgcaaagttaaaaaaaaattaaagttgagaacaggtataagtgcacactgaatagtctaatctacatgtaacacatattttagtgtgattttctatactctaatcagcactgaattcagagggtttgactttttcatctataacacagtgactaaaagagttaagggtatatataccatcactttgggacttggtagtattattaaaaggttatttccttcactgtcaataaaagtccaaatgtttagcttaggtctgagagtcaaacaatgttaaggattgtcttaaagttccttagccagcaaaacaaaacaaaacaaaacaaacaaatgaaaaacgtttaaaaagaagaagaagaaaaaaaacaagaacaagcagcaacagctgttttgttggggctatagatttaagttaggcatagtcaatttcagaataactaagagtggaatatatgcatatggtgaaattataaccttgcccttttttatttgccctctgcgatccacctgctttttagaagtctgccgagtgagaaggccacagtatctcatgctgtttgcattacagaactgcagcttttctactctgaaaaggcctgggagcagaatggctggcctgctgtgagcaggagaggagattctaagaaggatagtcccccctacaacatactgtcatactgctgggttttcatgggtaggaaagcttgtcctgaccccagcagcaaagaggtggcaggtcgctaatgaatatatgctttataatgtccttcttcattgctgagagggcagccttagagctgtggatttctgcatcccccctgagtctgacccatggacacctgtttcattcactttagcatcacagtgacctttgtatgctctgttcagtctgtgtcaggcagtatgcttgtcctgaagagaggtttggctatccccaccccaccccaccccaccctgttccttttttatcaggaggacttcagagccaggcctgcagcattttgtttgaaaacacaatcagctctgacagttagacatgcacacagacgccatagctggattggaaacattgatgttttaaaaatttattttttttggaaatagttgcacaaatgctgcaatttagctttaaggttctatagatttttaactagtccaacacagtcagaaacattgttttgaatcctctgtaaaccaaggcattaatcttaataaaccaggatccatttaggtaccacttgatataaaaaggatatccataatgaatattttatactgcatcctttacattagccactaaatacgttattgcttgatgaagacctttcacagaatcctatggattgcagcatttcacttggctacttcatacccatgccttaaagaggggcagtttctcaaaagcagaaacatgccgccagttctcaagttttcctcctaactccatttgaatgtaagggcagctggcccccaatgtggggaggtccgaacattttctgaattcccattttcttgttcgcggctaaatgacagtttctgtcattacttagattccgatctttcccaaaggtgttgatttacaaagaggccagctaatagcagaaatcatgaccctgaaagagagatgaaattcaagctgtgagccaggcaggagctcagtatggcaaaggttcttgagaatcagccatttggtacaaaaaagatttttaaagcttttatgttataccatggagccatagaaaggctatggattgtttaagaactattttaaagtgttccagacccaaaaaggaaaaataaaaaaaaaggaatatttgtacccaacagctagaaggattgcaaggtagatttttgttttaaaatggagagaagtggacagataaggccatttaatatatcaaagatcagttgacatctcctagggaatgatgaaaacagcaggctattagaaaattatttcatatagttctcgtgttcttttcttttttttaatccctgaagggatgatcagtaacatagcttctcttttctgtactctagaccaccccttttcatcattttgctttttatgtctcccataagaaatgtgctttttagagcttcctaatgcatgtgttgcattattgcagcattagaaaaggagaggtagcatttttgctgaaatcgggcctgtcactctccaataaaggttctggcacttcaatgccaggcaggtctcctaaatgaacagaatgatctgtgtgagccgatgcctgcccttccagaggggccactgtccccagccgcagccaactgtgtcccacaggaatgggagcctaggtttccaaatcttgtgattctttaggagaaacatgaaacctggatttcgtgtgaaatgtcccgattgttaaaaagttggctcaattatttttaaaacattttgtaagccaacaaaagtctgtgggctgccagtttattacttttgtcttaaaacatgatcattgttctctcacggtatccttctgtcttcccgttgcaaattcacttttctttcttcctgacattgccattgagggctttgttaccacaagctaagaaactgagtttaacagcccagttatctgcaacatgtcaattacctttgctcctctcctgtgattcccaccatgctgtgaccctcagctgtctccctttgctgggaattctgcaccaatgtctcccctcaacccattccctggttggtcctactcccgtgtggccagagacatcctagcaaatccttcctcctattatatctgacactaatttcttttcaacagcgctcatgtctcttggcccagtcaggtgctgccaggtttagataggaaagtacatgtcccattttcatgggtgcccttaatgtggtccacgtcctatatcttattatatttactcatggctcaatgggggcctccagagaccctctcaggctgctgagctagactaaggaatgcatccaccgtcatcacatgagacactgactctgtgacgacaaaagtacaaacagtctgaggctaagaaaggttcatctcacaacaggaaaaacaaatctcaacacacattagagataattgattcaggggttttctctcccagtctcccagcagggactgatttcatttctgacccactaggttttctttccagaaataggtagcaaggacaagaactaaacaatcccagccccacccagcaacacagaacacaggagtttgcttttggcttctcactctccaagtaaccctgaattaggcccagaatggctgaggcttggagcatctcctcagacagagcagaggcgacacctcttcaggggtgtgtggagtaaatagctcgaagagctgaagacagaaaaccagtttcacgccaggtgcgagagagagcataatggagggaagcccgctttctctctcctcttcttttctctttatttctttagagcacttgacttttttttctctctctctctagtattctaaactgaccccatgaccaactgagaatttatttttgtttcattggttgtttcacagaattagaacacacacgactttttattcctccattgcaaaatggaatcaagatactacacaagacctgtgctttcttcctttgcatgatttacacctccgcctgttttggtgctagctgtctagaacttctctcttggtttgaatctgattccttcacactacactagaagtttatttcatcttgttttgtctagactccagatacagagggacagctggactgaggacaagcaattccatctagcatagggtctctcagggttggtgcatccagccacatgggcagggccagtcacatctagtctatgtccccagagcccttggagttgcgcagcttagctgacttgactccaaggaaattagtacagaagtaaccactctattaagtgtgttctgctatgttcacatgcctgtagtacctgcaaaccatgccaggttcatctaaagacataggggaagattaaggactcttttggacagaccatgaattgaatttgctgccaggtgctgccagactgaatttggctgacagaactcccagcccaggaaagttccatgacaatgactgtcgcagaaggaaatttcccactaaagtcagtccattttcaagttttggtcttcagagacaaaagaacgtcccagccacctgattttgatggtgaggtaactctaagttgaattcaggctagtgttgcagtatagctttggcatgttcatgagtgagcacccagaatgtgttgaaccaacccccacccctaactactgactatgactgcagtgggtttttatggggaaaaaaagtgtgaaaagcaaaaagaaaggaacagagattttttatcacctttattgtaagacagtccatttatgaattgagtataaacacatacaaagtaacaagagattcctaagaaacgcaaatccttgagtttcacgcacttcatgttcaaccatttgctgtaatccagaggcagcctgtgaatcattctcatgccctgttttttttttttttttcctataatgttctgggtttaaaagccatcttttccacattttctgtaaataatggataatcattttaaaaatttttatttttagtgctgttttaacaatgtagatagatcataaatgtacttgctgaattcaatcatttttaacaagccaataaagtttgataattcatctcca

SEQ ID NO: 7582 - protein, 97 aa, Homo sapiens; identical to SEQ ID NO: 7576

SEQ ID NO: 7583 - DNA, 817 bp, Homo sapiens
aaggcaaccccaaaccagcgcttcagtggttctataacggggcaatattgaatgagtccaaatacatctgtactaaaatacatgttaccaatcacacggagtaccacggctgcctccagctggataatcccactcacatgaacaatggggactacactctaatagccaagaatgagtatgggaaggatgagaaacagatttctgctcacttcatgggctggcctggaattgacgatggtgcaaacccaaattatcctgatgtaatttatgaagattatggaactgcagcgaatgacatcggggacaccacgaacagaagtaatgaaatcccttccacagacgtcactgataaaaccggtcgggaacatctctcggtctatgctgtggtggtgattgcgtctgtggtgggattttgccttttggtaatgctgtttctgcttaagttggcaagacactccaagtttggcatgaaaggttttgttttgtttcataagatcccactggatgggtagctgaaataaaggaaaagacagagaaaggggctgtggtgcttgttggttgatgctgccatgtaagctggactcctgggactgctgttggcttatcccgggaagtgctgcttatctggggttttctggtagatgtgggcggtgtttggaggctgtactatatgaagcctgcatatactgtgagctgtgattggggaacaccaatgcagaggtaactctcaggcagctaagcagcacctcaagaaaacatgttaaattaatgcttctcttcttacagtagttcaaatacaaaactgaaatgaaatccc

SEQ ID NO: 7584 - protein, 124 aa, Homo sapiens
MNNGDYTLIAKNEYGKDEKQISAHFMGWPGIDDGANPNYPDVIYEDYGTAANDIGDTTNRSNEIPSTDVTDKTGREHLSVYAVVVIASVVGFCLLVMLFLLKLARHSKFGMKGFVLFHKIPLDG

SEQ ID NO: 7585 - DNA, 950 bp, Homo sapiens
aaggcaaccccaaaccagcgcttcagtggttctataacggggcaatattgaatgagtccaaatacatctgtactaaaatacatgttaccaatcacacggagtaccacggctgcctccagctggataatcccactcacatgaacaatggggactacactctaatagccaagaatgagtatgggaaggatgagaaacagatttctgctcacttcatgggctggcctggaattgacgatggtgcaaacccaaattatcctgatgtaatttatgaagattatggaactgcagcgaatgacatcggggacaccacgaacagaagtaatgaaatcccttccacagacgtcactgataaaaccggtcgggaacatctctcggtctatgctgtggtggtgattgcgtctgtggtgggattttgccttttggtaatgctgtttctgcttaagttggcaagacactccaagtttggcatgaaaggttttgttttgtttcataagatcccactggatgggtagctgaaataaaggaaaagacagagaaaggggctgtggtgcttgttggttgatgctgccatgtaagctggactcctgggactgctgttggcttatcccgggaagtgctgcttatctggggttttctggtagatgtgggcggtgtttggaggctgtactatatgaagcctgcatatactgtgagctgtgattggggaacaccaatgcagaggtaactctcaggcagctaagcagcacctcaagaaaacatgttaaattaatgcttctcttcttacagtagttcaaatacaaaactgaaatgaaatcccattggattgtacttctcttctgaaaagtgtgctttttgaccctactggacatttattgacttaattgcttctgtttattaaaattgacctgcaaagttaaaaaaaaattaaagttgagaacaggtataagtgc

SEQ ID NO: 7586 - protein, 124 aa, Homo sapiens; identical to SEQ ID NO: 7584

SEQ ID NO: 7587 - DNA, 586 bp, Homo sapiens
gtattattaggctaaaataattaaaagatgtctactgagataaagaaaacaacatatcctattttggagaaaaacagcaaaaaggaaccagaagtagagacagatggatcaaaataacaacaagaacaaagagaaatgaataattaaaataaataataatcttgaagatcgctgcaaatttgtaagcctaggcttggatcctggtattgccactcaccccctacacacaggtgaggccagcaccatgaagaaagagtaccattcccattgtccagaagatggaaagccagcaaagaaaggctccatccaagtgggaaaattgcagaggcagaaaaaataccacagcttttctgctagagcgacagccacagcaaagctaggtatgacggggcagaggggagagccgcagaacgtgccagcaacctctgcttcttcacagttccgtttcctatagaggggatacagcctcatacttcacttttgcttttcccttttcctgcttccttttaaatggttttccaaagttttctgagaattagatttcaagtatgttcagattagaaatttccaaaataaagctttctat

SEQ ID NO: 7588 - protein, 69 aa, Homo sapiens
MKKEYHSHCPEDGKPAKKGSIQVGKLQRQKKYHSFSARATATAKLGMTGQRGEPQNVPATSASSQFRFL

SEQ ID NO: 7589 - DNA, 285 bp, Homo sapiens
tggctcaactcacatggtgaatatgaattgtccaaggtcacccaagaatgaatgagagagctgaaatctaaactcagagcctcggaattgtcagtccctctttggcaaagaaaggaaaatgaagagcaacctgcaacctatgcccctgtccatataagcaaatgcaccaacggccacggacaaggatgcccccattttcgggtgatggctcctgcctatttctaggcaacttcttcctaatctccttgtaattttgtattttcatagattaaatctctctctctg

SEQ ID NO: 7590 - protein, 57 aa, Homo sapiens
MRELKSKLRASELSVPLWQRKENEEQPATYAPVHISKCTNGHGQGCPHFRVMAPAYF

SEQ ID NO: 7591 - DNA, 489 bp, Homo sapiens
tggaaagaaaaccctaacacctcttcgtatttagaaaacaactatgttttttaggcataaaacaaatgcaatttctgaattattttggagttaactggaatgcagactctggatcccaaaggccctgtctgaattcttgctgtgacatttattagctccgtcacctcgacagatgatttggcagcaaaaagccctagattcccacgtggcacccagagctggagttgcgctcagagaacataagctccctgaagacagtactttgcttttctcaccctgtggccccagcacttggcacagtccaaggcaaggagaagggttaaatgcatggttgaatgaacgaggtaggctttaaatctaatgagaatttctataagaggaagagaggacacagagactcagggagaaggcgagctgaaggcagctgcagtgactggagtgatacagctacaagccaaaggatgccgataattgcccctggaaactaag

SEQ ID NO: 7592 - protein, 60 aa, Homo sapiens
MIWQQKALDSHVAPRAGVALREHKLPEDSTLLFSPCGPSTWHSPRQGEGLNAWLNERGRL

SEQ ID NO: 7593 - DNA, 566 bp, Homo sapiens
aaaccctaacacctcttcgtatttagaaaacaactatgttttttaggcataaaacaaatgcaatttctgaattattttggagttaactgggtatgatcatgaagaataatttacaaattttatttcagtggcagtgaaagatctttccgtctgagctaaaatatcttgccttttttagaggtttatcttactttgaatcagaacctactcttccagtcactaagaaaagagaactgtgagaatctcctaagtgtacttacatcctgtgatcacctgtgctgaccaccccttctgttgattatccatcatgtggcctaggccctgaagtctcttcttttctcttacaagaatgcagactctggatcccaaaggccctgtctgaattcttgctgtgacatttattagctccgtcacctcgacagatgatttggcagcaaaaagccctagattcccacgtggcacccagagctggagttgcgctcagagaacataagctccctgaagacagtactttgcttttctcaccctgtggccccagcacttggcacagtccaaggcaaggagaa

SEQ ID NO: 7594 - protein, 47 aa, Homo sapiens
MIWQQKALDSHVAPRAGVALREHKLPEDSTLLFSPCGPSTWHSPRQG

SEQ ID NO: 7595 - DNA, 4629 bp, Homo sapiens
gctgtaacactcaccgtgaaggtctgcagcttcactcccgagccagcgagaccacgaacccaccagaaggaagaaactctgaacacatctgaacatcagaagggacagactccagacgcgccaccactctgctaacaccagatagtggaaagaaaccatgtgctgaaatgtttgacgacactgatggtttgactctgctaactggaatggcttattgtgcaagaaagtacacctggtcgggtcctggggctcatctctagcaccagcaaagatttctgaagacgtctttctagaaatgactggaaagtttcaagaggcataagatacagcatttcttctgaggccctgaagaagtatcaagtgggctttgacattgcggtggtgagagcgacccctcctcacctggagaactgggaaatgtggattctcagggaccgcgctgttcacgagctccaggctgtgctgctggccctggtcctggggcgctgagccgcatctgcaatagcacacctgcccggccacctgctgccgtgagcctttgctgctgaagcccctggggtcgcctctacctgatgaggatgtgcacccccattagggggctgctcatggcccttgcagtgatgtttgggacagcgatggcatttgcacccataccccggatcacctgggagcacagagaggtgcacctggtgcagtttcatgagccagacatctacaactactcagccttgctgctgagcgaggacaaggacaccttgtacataggtgcccgggaggcggtcttcgctgtgaacgcactcaacatctccgagaagcagcatgaggtgtattggaaggtctcagaagacaaaaaagcaaaatgtgcagaaaaggggaaatcaaaacagacagagtgcctcaactacatccgggtgctgcagccactcagcgccacttccctttacgtgtgtgggaccaacgcattccagccggcctgtgaccacctgaacttaacatcctttaagtttctggggaaaaatgaagatggcaaaggaagatgtccctttgacccagcacacagctacacatccgtcatggttgatggagaactttattcggggacgtcgtataattttttgggaagtgaacccatcatctcccgaaattcttcccacagtcctctgaggacagaatatgcaatcccttggctgaacgagcctagtttcgtgtttgctgacgtgatccgaaaaagcccagacagccccgacggcgaggatgacagggtctacttcttcttcacggaggtgtctgtggagtatgagtttgtgttcagggtgctgatcccacggatagcaagagtgtgcaagggggaccagggcggcctgaggaccttgcagaagaaatggacctccttcctgaaagcccgactcatctgctcccggccagacagcggcttggtcttcaatgtgctgcgggatgtcttcgtgctcaggtccccgggcctgaaggtgcctgtgttctatgcactcttcaccccacagctgaacaacgtggggctgtcggcagtgtgcgcctacaacctgtccacagccgaggaggtcttctcccacgggaagtacatgcagagcaccacagtggagcagtcccacaccaagtgggtgcgctataatggcccggtacccaagccgcggcctggagcgtgcatcgacagcgaggcacgggccgccaactacaccagctccttgaatttgccagacaagacgctgcagttcgttaaagaccaccctttgatggatgactcggtaaccccaatagacaacaggcccaggttaatcaagaaagatgtgaactacacccagatcgtggtggaccggacccaggccctggatgggactgtctatgatgtcatgtttgtcagcacagaccggggagctctgcacaaagccatcagcctcgagcacgctgttcacatcatcgaggagacccagctcttccaggactttgagccagtccagaccctgctgctgtcttcaaagaagggcaacaggtttgtctatgctggctctaactcgggcgtggtccaggccccgctggccttctgtgggaagcacggcacctgcgaggactgtgtgctggcgcgggacccctactgcgcctggagcccgcccacagcgacctgcgtggctctgcaccagaccgagagccccagcaggggtttgattcaggagatgagcggcgatgcttctgtgtgcccggataaaagtaaaggaagttaccggcagcattttttcaagcacggtggcacagcggaactgaaatgctcccaaaaatccaacctggcccgggtcttttggaagttccagaatggcgtgttgaaggccgagagccccaagtacggtcttatgggcagaaaaaacttgctcatcttcaacttgtcagaaggagacagtggggtgtaccagtgcctgtcagaggagagggttaagaacaaaacggtcttccaagtggtcgccaagcacgtcctggaagtgaaggtggttccaaagcccgtagtggcccccaccttgtcagttgttcagacagaaggtagtaggattgccaccaaagtgttggtggcatccacccaagggtcttctcccccaaccccagccgtgcaggccacctcctccggggccatcacccttcctcccaagcctgcgcccaccggcacatcctgcgaaccaaagatcgtcatcaacacggtcccccagctccactcggagaaaaccatgtatcttaagtccagcgacaaccgcctcctcatgtccctcttcctcttcttctttgttctcttcctctgcctctttttctacaactgctataagggatacctgcccagacagtgcttgaaattccgctcggccctactaattgggaagaagaagcccaagtcagatttctgtgaccgtgagcagagcctgaaggagacgttagtagagccagggagcttctcccagcagaatggggagcaccccaagccagccctggacaccggctatgagaccgagcaagacaccatcaccagcaaagtccccacggatagggaggactcacagaggatcgacgacctttctgccagggacaagccctttgacgtcaagtgtgagctgaagttcgctgactcagacgcagatggagactgaggccggctgtgcatccccgctggtgcctcggctgcgacgtgtccaggcgtggagagttttgtgtttctcctgttcagtatccgagtctcgtgcagtgctgcgtaggttagcccgcatcgtgcagacaacctcagtcctcttgtctattttctcttgggttgagcctgtgacttggtttctctttgtccttttggaaaaatgacaagcattgcatcccagtcttgtgttccgaagtcagtcggagtacttgaagaaggcccacgggcggcacggagttcctgagccctttctgtagtgggggaaaggtggctggacctctgttggctgagaagagcatcccttcagcttcccctccccgtagcagccactaaaagattatttaattccagattggaaatgacattttagtttatcagattggtaacttatcgcctgttgtccagattggcacgaaccttttcttccacttaattatttttttaggattttgctttgattgtgtttatgtcatgggtcatttttttttagttacagaagcagttgtgttaatatttagaagaagatgtatatcttccagattttgttatatatttggcataaaatacggcttacgttgcttaagattctcagggataaacttccttttgctaaatgcattctttctgcttttagaaatgtagacataaacactccccggagcccactcaccttttttctttttctttttttttttttaactttattccttgagggaagcattgtttttggagagattttctttctgtacttcgttttacttttctttttttttaacttttactctctcgaagaagaggaccttcccacatccacgaggtgggttttgagcaagggaaggtagcctggatgagctgagtggagccaggctggcccagagctgagatgggagtgcggtacaatctggagcccacagctgtcggtcagaacctcctgtgagacagatggaaccttcacaagggcgcctttggttctctgaacatctcctttctcttcttgcttcaattgcttacccactgcctgcccagactttctatccagcctcactgagctgcccactactggaagggaactgggcctcggtggccggggccgcgagctgtgaccacagcaccctcaagcatacggcgctgttcctgccactgtcctgaagatgtgaatgggtggtacgatttcaacactggttaatttcacactccatctccccgctttgtaaatacccatcgggaagagactttttttccatggtgaagagcaataaactctggatgtttgtgcgcgtgtgtggacagtcttatcttccagcatgataggatttgaccattttggtgtaaacatttgtgttttataagatttaccttgtttttatttttctactttgaattgtatacatttggaaagtacccaaataaatgagaagcttctatccttg

SEQ ID NO: 7596 - protein, 862 aa, Homo sapiens
MRMCTPIRGLLMALAVMFGTAMAFAPIPRITWEHREVHLVQFHEPDIYNYSALLLSEDKDTLYIGAREAVFAVNALNISEKQHEVYWKVSEDKKAKCAEKGKSKQTECLNYIRVLQPLSATSLYVCGTNAFQPACDHLNLTSFKFLGKNEDGKGRCPFDPAHSYTSVMVDGELYSGTSYNFLGSEPIISRNSSHSPLRTEYAIPWLNEPSFVFADVIRKSPDSPDGEDDRVYFFFTEVSVEYEFVFRVLIPRIARVCKGDQGGLRTLQKKWTSFLKARLICSRPDSGLVFNVLRDVFVLRSPGLKVPVFYALFTPQLNNVGLSAVCAYNLSTAEEVFSHGKYMQSTTVEQSHTKWVRYNGPVPKPRPGACIDSEARAANYTSSLNLPDKTLQFVKDHPLMDDSVTPIDNRPRLIKKDVNYTQIVVDRTQALDGTVYDVMFVSTDRGALHKAISLEHAVHIIEETQLFQDFEPVQTLLLSSKKGNRFVYAGSNSGVVQAPLAFCGKHGTCEDCVLARDPYCAWSPPTATCVALHQTESPSRGLIQEMSGDASVCPDKSKGSYRQHFFKHGGTAELKCSQKSNLARVFWKFQNGVLKAESPKYGLMGRKNLLIFNLSEGDSGVYQCLSEERVKNKTVFQVVAKHVLEVKVVPKPVVAPTLSVVQTEGSRIATKVLVASTQGSSPPTPAVQATSSGAITLPPKPAPTGTSCEPKIVINTVPQLHSEKTMYLKSSDNRLLMSLFLFFFVLFLCLFFYNCYKGYLPRQCLKFRSALLIGKKKPKSDFCDREQSLKETLVEPGSFSQQNGEHPKPALDTGYETEQDTITSKVPTDREDSQRIDDLSARDKPFDVKCELKFADSDADGD

SEQ ID NO: 7597 - DNA, 4266 bp, Homo sapiens
ctggcgcccgaactcgcccggccgggagccgccgcgggcaggacgcgcgctgcagactctgctaacaccagatagtggaaagaaaccatgtgctgaaatgtttgacgacactgatggtttgcatttcttctgaggccctgaagaagtatcaagtgggctttgacattgcggtggtgagagcgacccctcctcacctggagaactgggaaatgtggattctcagggaccgcgctgttcacgagctccaggctgtgctgctggccctggtcctggggcgctgagccgcatctgcaatagcacacctgcccggccacctgctgccgtgagcctttgctgctgaagcccctggggtcgcctctacctgatgaggatgtgcacccccattagggggctgctcatggcccttgcagtgatgtttgggacagcgatggcatttgcacccataccccggatcacctgggagcacagagaggtgcacctggtgcagtttcatgagccagacatctacaactactcagccttgctgctgagcgaggacaaggacaccttgtacataggtgcccgggaggcggtcttcgctgtgaacgcactcaacatctccgagaagcagcatgaggtgtattggaaggtctcagaagacaaaaaagcaaaatgtgcagaaaaggggaaatcaaaacagacagagtgcctcaactacatccgggtgctgcagccactcagcgccacttccctttacgtgtgtgggaccaacgcattccagccggcctgtgaccacctgaacttaacatcctttaagtttctggggaaaaatgaagatggcaaaggaagatgtccctttgacccagcacacagctacacatccgtcatggttgatggagaactttattcggggacgtcgtataattttttgggaagtgaacccatcatctcccgaaattcttcccacagtcctctgaggacagaatatgcaatcccttggctgaacgagcctagtttcgtgtttgctgacgtgatccgaaaaagcccagacagccccgacggcgaggatgacagggtctacttcttcttcacggaggtgtctgtggagtatgagtttgtgttcagggtgctgatcccacggatagcaagagtgtgcaagggggaccagggcggcctgaggaccttgcagaagaaatggacctccttcctgaaagcccgactcatctgctcccggccagacagcggcttggtcttcaatgtgctgcgggatgtcttcgtgctcaggtccccgggcctgaaggtgcctgtgttctatgcactcttcaccccacagctgaacaacgtggggctgtcggcagtgtgcgcctacaacctgtccacagccgaggaggtcttctcccacgggaagtacatgcagagcaccacagtggagcagtcccacaccaagtgggtgcgctataatggcccggtacccaagccgcggcctggagcgtgcatcgacagcgaggcacgggccgccaactacaccagctccttgaatttgccagacaagacgctgcagttcgttaaagaccaccctttgatggatgactcggtaaccccaatagacaacaggcccaggttaatcaagaaagatgtgaactacacccagatcgtggtggaccggacccaggccctggatgggactgtctatgatgtcatgtttgtcagcacagaccggggagctctgcacaaagccatcagcctcgagcacgctgttcacatcatcgaggagacccagctcttccaggactttgagccagtccagaccctgctgctgtcttcaaagaagggcaacaggtttgtctatgctggctctaactcgggcgtggtccaggccccgctggccttctgtgggaagcacggcacctgcgaggactgtgtgctggcgcgggacccctactgcgcctggagcccgcccacagcgacctgcgtggctctgcaccagaccgagagccccagcaggggtttgattcaggagatgagcggcgatgcttctgtgtgcccggataaaagtaaaggaagttaccggcagcattttttcaagcacggtggcacagcggaactgaaatgctcccaaaaatccaacctggcccgggtcttttggaagttccagaatggcgtgttgaaggccgagagccccaagtacggtcttatgggcagaaaaaacttgctcatcttcaacttgtcagaaggagacagtggggtgtaccagtgcctgtcagaggagagggttaagaacaaaacggtcttccaagtggtcgccaagcacgtcctggaagtgaaggtggttccaaagcccgtagtggcccccaccttgtcagttgttcagacagaaggtagtaggattgccaccaaagtgttggtggcatccacccaagggtcttctcccccaaccccagccgtgcaggccacctcctccggggccatcacccttcctcccaagcctgcgcccaccggcacatcctgcgaaccaaagatcgtcatcaacacggtcccccagctccactcggagaaaaccatgtatcttaagtccagcgacaaccgcctcctcatgtccctcttcctcttcttctttgttctcttcctctgcctctttttctacaactgctataagggatacctgcccagacagtgcttgaaattccgctcggccctactaattgggaagaagaagcccaagtcagatttctgtgaccgtgagcagagcctgaaggagacgttagtagagccagggagcttctcccagcagaatggggagcaccccaagccagccctggacaccggctatgagaccgagcaagacaccatcaccagcaaagtccccacggatagggaggactcacagaggatcgacgacctttctgccagggacaagccctttgacgtcaagtgtgagctgaagttcgctgactcagacgcagatggagactgaggccggctgtgcatccccgctggtgcctcggctgcgacgtgtccaggcgtggagagttttgtgtttctcctgttcagtatccgagtctcgtgcagtgctgcgtaggttagcccgcatcgtgcagacaacctcagtcctcttgtctattttctcttgggttgagcctgtgacttggtttctctttgtccttttggaaaaatgacaagcattgcatcccagtcttgtgttccgaagtcagtcggagtacttgaagaaggcccacgggcggcacggagttcctgagccctttctgtagtgggggaaaggtggctggacctctgttggctgagaagagcatcccttcagcttcccctccccgtagcagccactaaaagattatttaattccagattggaaatgacattttagtttatcagattggtaacttatcgcctgttgtccagattggcacgaaccttttcttccacttaattatttttttaggattttgctttgattgtgtttatgtcatgggtcatttttttttagttacagaagcagttgtgttaatatttagaagaagatgtatatcttccagattttgttatatatttggcataaaatacggcttacgttgcttaagattctcagggataaacttccttttgctaaatgcattctttctgcttttagaaatgtagacataaacactccccggagcccactcaccttttttctttttctttttttttttttaactttattccttgagggaagcattgtttttggagagattttctttctgtacttcgttttacttttctttttttttaacttttactctctcgaagaagaggaccttcccacatccacgaggtgggttttgagcaagggaaggtagcctggatgagctgagtggagccaggctggcccagagctgagatgggagtgcggtacaatctggagcccacagctgtcggtcagaacctcctgtgagacagatggaaccttcacaagggcgcctttggttctctgaacatctcctttctcttcttgcttcaattgcttacccactgcctgcccagactttctatccagcctcactgagctgcccactactggaagggaactgggcctcggtggccggggccgcgagctgtgaccacagcaccctcaagcatacggcgctgttcctgccactgtcctgaagatgtgaatgggtggtacgatttcaacactggttaatttcacactccatctccccgctttgtaaatacccatcgggaagagactttttttccatggtgaagagcaataaactctggatgtttgtg

SEQ ID NO: 7598 - protein, 862 aa, Homo sapiens; identical to SEQ ID NO: 7596

SEQ ID NO: 7599 - DNA, 2163 bp, Homo sapiens
gttcctgtccctggctttcctggctttttggatccccatcctggctctggggggaaggaggatgggtctggagcacctgtgagacccgagcctgggcccaccacagcagaggatgcagcctcccaaccccaagagtcccagattggagtccctgagagaagctgggccccgtttaaccggacagaggatgactttcttctctggagtgctctgggtcacgcttggggacacatgaaggatacgccctccctttcaggctcccatcgcacgttgaacctggcttgtgaacacagccctctgggacactactaggaacaaagtgttccggatgctgcagaagctcagctgccacctggaaaacctgtttggccactttaggtccagatgacgggagccagtccggctcaggagaacagagctggcccagtaacacctcgcttcctccctgctgcagagacctgggagggccctgcccagcacagcacactggagtggccctgcggcagcatctgggctgctgtacccatggtgcctcccagcccgaggggctcccggcagctctggagactcctgctgtcacgtcacctggcccctcaccatcaccatcctcatctctcttgggaattaagacattgaaggaactgctgctgccagcaagagaggctgttgcaagaaagaaaggctgctgcaagaaacgcaagaaaggctgctgccagcattgcatttctgtcaagaagctgccccgcaaaatttatggatgtatcgctgtatgcacctaatagcaagctctactggatgaatggcttataaagatctcccctgaataaaattgtggtttttaactttagaagaacaatgtcaattctctctgcatcctttatgggagcctcagcatgtgttcagcactggtatttattctatatgactgcttgttaagcaacaggctgaattaaaatgggaaagctcaccgaggagttttcttgaaatactgcttttctagcaaggagaacatagaagatggtgaggcagccgcagctggagtgctgactgcccagaagcagaggggcaaaatgcactccagtatggattttggtcattgaggccttgctgagagcatgccccaggctgggttcacttttgcctgaaggggctgcagcagaatgaaaactcaactgtgcaaaacaaaacactcaaattttaaaaagcacaagattctgctgggatcatctggcagcaggggcagcaggaaagacgtaatagagatttcaaagcaggctgaggaggaggacagggcattccagcctctgtggttcagcaatctcaccactccacaaccgacggtggctttccagcacagatcttcacggattgcagcattcaggacctgagtccatgcccatgcagaggcccattgcagtgtttgcttagcatagctgcatttccagaatgtaggcaggagaagctgtaaaagattctcaccctgccatgcacactgatggctcacattctaaagagtcaggagtcattttggatttgggctgacctggtagacttctgaaagacagtgctctgggttcaagttgtcctcagggctggatgatccatagcaaatatcccctgatggataagcattgtgctgagagacttgcctccatcagctgtgtaaacctcaggatgacctgcacacaggtatactaaggcacacagagaccagctcgtagtcagtgacaagtaacttgccaagagctgtggtttaaaagcatgtctgcaaattcttggacactcttgtcatccagaaatagagtctaaccctcctcccttgaatacgggctggcttcagtggtggaaatgacaatgtgtgagtttgaggtttgattagaaaagatgacacagcctctgcctgactctcaaggcccttgttcttggacattagctgccatgctgggaggaagcccagcagccacacagagaggccacgacagccgaggtcccagccaagccagcatcaactgcccaacacgtcaatgagtgatcctgcagagcctcccatctcctagccaccgcagctgatgctctgagagcggaggcaagctgtccttgctgggcgctgcttaaactgcagatgtatgaacaaaataaaaatggtggttattttaagacact

SEQ ID NO: 7600 - protein, 83 aa, Homo sapiens
MTGASPAQENRAGPVTPRFLPAAETWEGPAQHSTLEWPCGSIWAAVPMVPPSPRGSRQLWRLLLSRHLAPHHHHPHLSWELRH

SEQ ID NO: 7601 - DNA, 838 bp, Homo sapiens
ctgcatggaggctgccggagttgcttcctgctccgtgctcccacaccgttcttcagctgaccaagtagtgacagcaggactccagggttctgtccctgtgcggcaaagcacacactttcagtgctgcggttgatgcttgagacgctcagtgggagccccgtttaaccggacagaggatgactttcttctctggagtgctctgggtcacgcttggggacacatgaaggatacgccctccctttcaggctcccatcgcacgttgaacctggcttgtgaacacagccctctgggacactactaggaacaaagtgttccggatgctgcagaagctcagctgccacctggaaaacctgtttggccactttaggtccagatgacgggagccagtccggctcaggagaacagagctggcccagtaacacctcgcttcctccctgctgcagagacctgggagggccctgcccagcacagcacactggagtggccctgcggcagcatctgggctgctgtacccatggtgcctcccagcccgaggggctcccggcagctctggagactcctgctgtcacgtcacctggcccctcaccatcaccatcctcatctctcttgggaattaagacattgaaggaactgctgctgccagcaagagaggctgttgcaagaaagaaaggctgctgcaagaaacgcaagaaaggctgctgccagcattgcatttctgtcaagaagctgccccgcaaaatttatggatgtatcgctgtatgcacctaatagcaagctctactggatgaatggcttataaagatctcccctgaataaaattgtggtttttaactttaga

SEQ ID NO: 7602 - protein, 83 aa, Homo sapiens; identical to SEQ ID NO: 7600

SEQ ID NO: 7603 - DNA, 823 bp, Homo sapiens
ggcagtctgagtccccagtgcctggcgtgggtgagctcagggctgctccgtatgggggcatccaggcctggctgctgatgccctgtggctgaggacacctccatctgcatgagccagtttggaagtccagcttgccccccaggcagtggaggccagtaagggcttctccccagattgaccactcagatcaaattgatccaggtgttgagacagaattggccccattttctgctaatttccattctctgattgtgctgcctgctacaggagtcattttggatttgggctgacctggtagacttctgaaagacagtgctctgggttcaagttgtcctcagggctggatgatccatagcaaatatcccctgatggataagcattgtgctgagagacttgcctccatcagctgtgtaaacctcaggatgacctgcacacaggtatactaaggcacacagagaccagctcgtagtcagtgacaagtaacttgccaagagctgtggtttaaaagcatgtctgcaaattcttggacactcttgtcatccagaaatagagtctaaccctcctcccttgaatacgggctggcttcagtggtggaaatgacaatgtgtgagtttgaggtttgattagaaaagatgacacagcctctgcctgactctcaaggcccttgttcttggacattagctgccatgctgggaggaagcccagcagccacacagagaggccacgacagccgaggtcccagccaagccagcatcaactgcccaacacgtcaatgagtgatcctgcagagcctcccatctcctagccaccgcagctgatgctc

SEQ ID NO: 7604 - protein, 47 aa, Homo sapiens
MTQPLPDSQGPCSWTLAAMLGGSPAATQRGHDSRGPSQASINCPTRQ

SEQ ID NO: 7605 - DNA, 712 bp, Homo sapiens
acactgggaggaagtgcgggccgcctgcccgggcgcgttaaggaagttgcccaaaatgaggaaggcacaccactacaccatcgagcgggagctgaatggcacctacgccatcgccggtggcaggacccatgccagccccgccgacctctgccactaccactcccaggagtctgatggcctggtctgcctcctcaagaagcccttcaaccggccccaaggggtgcagcccaagactgggccctttgaggatttgaaggaaaacctcatcagggaatatgtgaagcagacatggaacctgcagggtcaggctctggagcaggccatcatcagtcagaaaagccctacccatggacacagaggtgtacgagagcccctacgcggaccccgaggagatcaggcccaaggaggtttacctggaccgaaagctgctgacgctggaagacaaagaactgggctctggtaattttggaactgtgaaaaagggctactaccaaatgaaaaaagttgtgaaaaccgtggctgtgaaaatactgaaaaacgaggccaatgaccccgctcttaaagatgagttattagcagaagcaaatgtcatgcagcagctggacaacccgtacatcgtgcggatgatcgggatatgcgaggccgagtcctggatgctggttatggagatggcagaacttggtcccctcaataagtatttgcagcagaacag

SEQ ID NO: 7606 - protein, 135 aa, Homo sapiens
MRKAHHYTIERELNGTYAIAGGRTHASPADLCHYHSQESDGLVCLLKKPFNRPQGVQPKTGPFEDLKENLIREYVKQTWNLQGQALEQAIISQKSPTHGHRGVREPLRGPRGDQAQGGLPGPKAADAGRQRTGLW

SEQ ID NO: 7607 - DNA, 4188 bp, Homo sapiens
acactgggaggaagtgcgggccgcctgcccgggcgcgttaaggaagttgcccaaaatgaggaaggcacaccactacaccatcgagcgggagctgaatggcacctacgccatcgccggtggcaggacccatgccagccccgccgacctctgccactaccactcccaggagtctgatggcctggtctgcctcctcaagaagcccttcaaccggccccaaggggtgcagcccaagactgggccctttgaggatttgaaggaaaacctcatcagggaatatgtgaagcagacatggaacctgcagggtcaggctctggagcaggccatcatcagtcagaaaagccctacccatggacacagaggtgtacgagagcccctacgcggaccccgaggagatcaggcccaaggaggtttacctggaccgaaagctgctgacgctggaagacaaagaactgggctctggtaattttggaactgtgaaaaagggctactaccaaatgaaaaaagttgtgaaaaccgtggctgtgaaaatactgaaaaacgaggccaatgaccccgctcttaaagatgagttattagcagaagcaaatgtcatgcagcagctggacaacccgtacatcgtgcggatgatcgggatatgcgaggccgagtcctggatgctggttatggagatggcagaacttggtcccctcaataagtatttgcagcagaacagacatgtcaaggataagaacatcatagaactggttcatcaggtttccatgggcatgaagtacttggaggagagcaattttgtgcacagagatctggctgcaagaaatgtgttgctagttacccaacattacgccaagatcagtgatttcggactttccaaagcactgcgtgctgatgaaaactactacaaggcccagacccatggaaagtggcctgtcaagtggtacgctccggaatgcatcaactactacaagttctccagcaaaagcgatgtctggagctttggagtgttgatgtgggaagcattctcctatgggcagaagccatatcgagggatgaaaggaagtgaagtcaccgctatgttagagaaaggagagcggatggggtgccctgcagggtgtccaagagagatgtacgatctcatgaatctgtgctggacatacgatgtggaaaacaggcccggattcgcagcagtggaactgcggctgcgcaattactactatgacgtggtgaactaaccgctcccgcacctgtcggtggctgcctttgatcacaggagcaatcacaggaaaatgtatccagaggaattgattgtcagccacctccctctgccagtcgggagagccaggcttggatggaacatgcccacaacttgtcacccaaagcctgtcccaggactcaccctccacaaagcaaaggcagtcccgggagaaaagacggatggcaggatccaaggggctagctggatttgtttgttttcttgtctgtgtgattttcatacaggttatttttacgatctgtttccaaatccctttcatgtctttccacttctctgggtcccggggtgcatttgttactcatcgggcccagggacattgcagagtggcctagagcactctcaccccaagcggccttttccaaatgcccaaggatgccttagcatgtgactcctgaagggaaggcaaaggcagaggaatttggctgcttctacggccatgagactgatccctggccactgaaaagctttcctgacaataaaaatgttttgaggctttaaaaagaaaatcaagtttgaccagtgcagtttctaagcatgtagccagttaaggaaagaaagaaagaaaaaaaaaaaaggcctggatactgcttttgctgtctctgttatgagatggaagacttacatgtttgtgataaaaggggaccatgagaatgaattggcttggcttactttccccctgaaatcctctctcctgcagactgtcttgaagacctggtgactggtaaataaagccctgcatggaggctgcacagcaggggcaagaggcccatcccccagcatctcactgaggacagcttcaggctgccttcctctgaacgtggtccacaccttcctctcctccacagagagggtgccgccagaatcccctgtcgctttctgtgtctgcaatggggggcagcacagggatcaaagccatctaaagagtttccaaagaaagtattaattcagaacaagccaaagaccctgagcctcaccacaaacaggccttttggagtgtgaatttgagttgaagatacaagatcggagaatgattttctggtcttaactaatcctcatcttcatgtttgatctttaagaagtcatcacccattgatttcagttttgctgtacctcttgaaagttaaagagacatctcagcactttaggaggccgaggcgggtggatcacttgaggtaaggagtttgagactagcctggccaatatggtaaaaccccatctctactaaaaatacaaaaattagccgggcatggtggcatgtgtctgtagtcccagctactcgggaggctgaggcaggagaatcgcttgaacccaggaaacggaggtcgcagtgagccaagatcatgccactgcactccagcttgggcatcacagcgagactctgtcaaaacaaacaaacaaaaaaacaacttaaagaggtaatttagccatcattcttatgccagcagatataaataaacttggacccatctggtcttcagctaaacctgagacattttaaagtgcatggacagccatggacagcaggccctcctctaacaggggatgcaaggcatggagaaagacaatcagtacccaagctcagccacagaagacaggagtcactcatataacttgtgtttagaagtttttggtagccacgcacactttctgaaatcacactatctggtggtttaatcatatttttaaagacagaatccctgagtgctgagcagattctcaaaacacatttagaatccctgaaattagaaagatcaatgacaaaatatctgtcagccaggccacaaacaggtgtaaaattatgaaaggagtggttggatgtgccaagtttggtaaagtggtgactgcatctgagaaagaggctgtgaggctgaactcttggtggcttccttctgtaacttccagagggagtcttcaacacaggccccgtgctcgtaggaatacggtagcacctatgtaggaagtgcgtggagttttctgtcttctttctgtgtgatttttggcctttttatcagcacttctcccctcccaggagcctggggatgccaaacatccagaatgtgatgggacaagatgggggcaggggcctcacctccctgcagaggtccggccaggtctccttgtccctggacaatctcctgagcctctctgcttggtggagcaggcacctgtgtgcagaattcccactgtggccagcacgaggaagtcttttctagtgaaaatgtgtcttgtggtcaggaataattatcctttcccctgtagccaccaaggagggcaaatagagaaaggtaacctaattgaaggattggtcatgtgaaaagggctacatttgggaagctgggaaaggcctccaggcttctagagcagctagcttgggctggattctcatacccaggctgccccttggattgttctacccaagcttttccctggggtctgggctcactccataaggtaaggtgccttttaccttatggtccttctttagcaggtaacaaaggagcatcaggggcaggctgccctggtggcatcacactggctagtgaggccgtgaatatcttgtcccccagcagggccgacagtttctatcacagaaaacagtgtgttcagtggtgaaaatcgttgcatgcatgttttcatctgagcgtgtccttctcccatactccctatcagccagccctgcctgtagctgctgtatggtgattgcacttggacatcagtccaatgactgcaagtcggcctggattttcacttgcagaggctacagctgcattgtcaggtctcccagccctgcagagagctccctccactggttagcagtgtgttgtgttttccattcatttcagaagagctacattgtgtcactggacatttttaaaaactgtgatttttaataaaaatttaaaatttgctttgtgatg

SEQ ID NO: 7608 - protein, 293 aa, Homo sapiens
MDTEVYESPYADPEEIRPKEVYLDRKLLTLEDKELGSGNFGTVKKGYYQMKKVVKTVAVKILKNEANDPALKDELLAEANVMQQLDNPYIVRMIGICEAESWMLVMEMAELGPLNKYLQQNRHVKDKNIIELVHQVSMGMKYLEESNFVHRDLAARNVLLVTQHYAKISDFGLSKALRADENYYKAQTHGKWPVKWYAPECINYYKFSSKSDVWSFGVLMWEAFSYGQKPYRGMKGSEVTAMLEKGERMGCPAGCPREMYDLMNLCWTYDVENRPGFAAVELRLRNYYYDVVN

SEQ ID NO: 7609 - DNA, 1854 bp, Homo sapiens
gcgttaaggaagttgcccaaaatgaggaagagccgcgggcccggcggctgaggccaccccggcggcggctggagagcgaggaggagcgggtggccccgcgctgcgcccgccctcgcctcacctggcgcaggtggacacctgcgcaggtgtgtgccctccggcccctgaagcatggccagcagcggcatggctgacagcgccaaccacctgcccttctttttcggcaacatcacccgggaggaggcagaagattacctggtccaggggggcatgagtgatgggctttatttgctgcgccagagccgcaactacctgggtggcttcgccctgtccgtggcccacgggaggaaggcacaccactacaccatcgagcgggagctgaatggcacctacgccatcgccggtggcaggacccatgccagccccgccgacctctgccactaccactcccaggagtctgatggcctggtctgcctcctcaagaagcccttcaaccggccccaaggggtgcagcccaagactgggccctttgaggatttgaaggaaaacctcatcagggaatatgtgaagcagacatggaacctgcagggtcaggctctggagcaggccatcatcagtcagaagcctcagctggagaagctgatcgctaccacagcccatgaaaaaatgccttggttccatggaaaaatctctcgggaagaatctgagcaaattgtcctgataggatcaaagacaaatggaaagttcctgtgagtatcgtgccttccccctcacctcctgccaccaggcctgtgtggacaattgggaataattcagcttccttgtgactggccccacatgaccctgggaagaggccatgcattgccatttgacaacatgcatgctggcctgttctaaagacatttctaaccaaagctatcacttgtgacccagtgtttattttgcccagtctaactctaaaatgaacactctttttgggcaccgagggatgtaatatttaaagaaaatgtgattcagccccatattctccttttaatggcaaattataggttgcatagcacattctgtggttatccaactaaaattaaaatactgcagtttttttactcaaactacccccttgatctcagactttacttctattttacatgaaacaagatgccaacaggaaagatgttaaggaaaagttcctgggagtagcatccatgagtggtgagtgcaggtttgaagacttcagccttaggcccacagtcattagagggtctgtctgaatcctgggttctgtttgctatcctcagtggttcagtgtaaatctaaattgtagaaggttctgagatacaggccaacgtggtcagtcagttgtccagagaaggtaaagaactgtctttgggaggtgtcaaccttgttccctcgagggggtctggtcaaggtggctcagtggggcagttgtccctgggggaaatgatcccctggtcacctctcagtgtccctacagagatgcttaccttggaaacataaccagaaacagcgatgcagcctcatggtttggcaattggtgaatccccagccgacttcgtaaacttttcctagatttagaagcgttttctctgcctgtccatctattcaaaggaatttcctcagacttcactgtcataccttgtattttaaaaatgatcttagctgagtgcagtggcacgcacctgtagtcccagctactcctggcaggaggatcgcttcatcctcactatgatctcactatcgtttgaggctagtttgagaccagcctgggcaacatagtgaggccctgtctcaaaaaaagaaaaaaagaaaagaaaaattgaccacaatactctt

SEQ ID NO: 7610 - protein, 193 aa, Homo sapiens [sequence omitted]

SEQ ID NO: 7611 - DNA, 1731 bp, Homo sapiens
gcgttaaggaagttgcccaaaatgaggaagagccgcgggcccggcggctgaggccaccccggcggcggctggagagcgaggaggagcgggtggccccgcgctgcgcccgccctcgcctcacctggcgcaggtggacacctgcgcaggtgtgtgccctccggcccctgaagcatggccagcagcggcatggctgacagcgccaaccacctgcccttctttttcggcaacatcacccgggaggaggcagaagattacctggtccaggggggcatgagtgatgggctttatttgctgcgccagagccgcaactacctgggtggcttcgccctgtccgtggcccacgggaggaaggcacaccactacaccatcgagcgggagctgaatggcacctacgccatcgccggtggcaggacccatgccagccccgccgacctctgccactaccactcccaggagtctgatggcctggtctgcctcctcaagaagcccttcaaccggccccaaggggtgcagcccaagactgggccctttgaggatttgaaggaaaacctcatcagggaatatgtgaagcagacatggaacctgcagggtcaggctctggagcaggccatcatcagtcagaagcctcagctggagaagctgatcgctaccacagcccatgaaaaaatgccttggttccatggaaaaatctctcgggaagaatctgagcaaattgtcctgataggatcaaagacaaatggaaagttcctgatccgagccagagacaacaacggctcctacgccctgtgcctgctgcacgaagggaaggtgctgcactatcgcatcgacaaagacaagacagggaagctctccatccccgagggaaagaagttcgacacgctctggcagctagtcgagcattattcttataaagcagatggtttgttaagagttcttactgtcccatgtcaaaaaatcggcacacagggaaatgttaattttggaggccgtccacaacttccaggttcccatcctgcgacttggtcagcgggtggaataatctcaagaatcaaatcatactccttcccaaagcctggccacagaaaggtgctaaagcaacccctgcttgctgtccaactaagtggtaggaccaacgcgcactcagctcccgcccgcccagtctgccctgtgtgtgcgctgccccccatctcttgccactctgcttccaggcctctttgcccttgctcacacctgctgttcctgggcagccgcgccccaggtacatcatgtgcttttcatgtgggtcctcagtccgtcagctggaagtccaacagtgtgagcatgctttctgtgctcaagcgtcattttaaagtcgtttcagttggcgtcatccgtcatagctaattatcatgtccgaaaatcttttcaaagatggcccacttactttttggtggccagactcacgtgttgcagtgttctggtaattgattatgtaagttacgttgtgatggagggaacaccaaggttttgtgaggcgcgctgcacagtgaggtcaggcagtgcatggtaacttcattatggcttagacgtctaacatagaactgcaaatgtgacatgtaaagaagaggtgtaatctgaggtctagaaaaaccagttttctttttgaggcagtaatgttgacatctcattgatttccatgttttgttctattattggattttgagggaaaataaaaataagttctttttcatg

SEQ ID NO: 7612 - protein, 403 aa, Homo sapiens
MASSGMADSANHLPFFFGNITREEAEDYLVQGGMSDGLYLLRQSRNYLGGFALSVAHGRKAHHYTIERELNGTYAIAGGRTHASPADLCHYHSQESDGLVCLLKKPFNRPQGVQPKTGPFEDLKENLIREYVKQTWNLQGQALEQAIISQKPQLEKLIATTAHEKMPWFHGKISREESEQIVLIGSKTNGKFLIRARDNNGSYALCLLHEGKVLHYRIDKDKTGKLSIPEGKKFDTLWQLVEHYSYKADGLLRVLTVPCQKIGTQGNVNFGGRPQLPGSHPATWSAGGIISRIKSYSFPKPGHRKVLKQPLLAVQLSGRTNAHSAPARPVCPVCALPPISCHSASRPLCPCSHLLFLGSRAPGTSCAFHVGPQSVSWKSNSVSMLSVLKRHFKVVSVGVIRHS

SEQ ID NO: 7613 - DNA, 2628 bp, Homo sapiens
gcgttaaggaagttgcccaaaatgaggaagagccgcgggcccggcggctgaggccaccccggcggcggctggagagcgaggaggagcgggtggccccgcgctgcgcccgccctcgcctcacctggcgcaggtggacacctgcgcaggtgtgtgccctccggcccctgaagcatggccagcagcggcatggctgacagcgccaaccacctgcccttctttttcggcaacatcacccgggaggaggcagaagattacctggtccaggggggcatgagtgatgggctttatttgctgcgccagagccgcaactacctgggtggcttcgccctgtccgtggcccacgggaggaaggcacaccactacaccatcgagcgggagctgaatggcacctacgccatcgccggtggcaggacccatgccagccccgccgacctctgccactaccactcccaggagtctgatggcctggtctgcctcctcaagaagcccttcaaccggccccaaggggtgcagcccaagactgggccctttgaggatttgaaggaaaacctcatcagggaatatgtgaagcagacatggaacctgcagggtcaggctctggagcaggccatcatcagtcagaagcctcagctggagaagctgatcgctaccacagcccatgaaaaaatgccttggttccatggaaaaatctctcgggaagaatctgagcaaattgtcctgataggatcaaagacaaatggaaagttcctgatccgagccagagacaacaacggctcctacgccctgtgcctgctgcacgaagggaaggtgctgcactatcgcatcgacaaagacaagacagggaagctctccatccccgagggaaagaagttcgacacgctctggcagctagtcgagcattattcttataaagcagatggtttgttaagagttcttactgtcccatgtcaaaaaatcggcacacagggaaatgttaattttggaggccgtccacaacttccaggttcccatcctgcgacttggtcagcgggtggaataatctcaagaatcaaatcatactccttcccaaagcctggccacagaaagtcctcccctgcccaagggaaccggcaagagagtactgtgtcattcaatccgtatgagccagaacttgcaccctgggctgcagacaaaggcccccagagagaagccctacccatggacacagaggtgtacgagagcccctacgcggaccccgaggagatcaggcccaaggaggtttacctggaccgaaagctgctgacgctggaagacaaagaactgggctctggtaattttggaactgtgaaaaagggctactaccaaatgaaaaaagttgtgaaaaccgtggctgtgaaaatactgaaaaacgaggccaatgaccccgctcttaaagatgagttattagcagaagcaaatgtcatgcagcagctggacaacccgtacatcgtgcggatgatcgggatatgcgaggccgagtcctggatgctggttatggagatggcagaacttggtcccctcaataagtatttgcagcagaacagacatgtcaaggataagaacatcatagaactggttcatcaggtttccatgggcatgaagtacttggaggagagcaattttgtgcacagagatctggctgcaagaaatgtgttgctagttacccaacattacgccaagatcagtgatttcggactttccaaagcactgcgtgctgatgaaaactactacaaggcccagacccatggaaagtggcctgtcaagtggtacgctccggaatgcatcaactactacaagttctccagcaaaagcgatgtctggagctttggagtgttgatgtgggaagcattctcctatgggcagaagccatatcgagggatgaaaggaagtgaagtcaccgctatgttagagaaaggagagcggatggggtgccctgcagggtgtccaagagagatgtacgatctcatgaatctgtgctggacatacgatgtggaaaacaggcccggattcgcagcagtggaactgcggctgcgcaattactactatgacgtggtgaactaaccgctcccgcacctgtcggtggctgcctttgatcacaggagcaatcacaggaaaatgtatccagaggaattgattgtcagccacctccctctgccagtcgggagagccaggcttggatggaacatgcccacaacttgtcacccaaagcctgtcccaggactcaccctccacaaagcaaaggcagtcccgggagaaaagacggatggcaggatccaaggggctagctggatttgtttgttttcttgtctgtgtgattttcatacaggttatttttacgatctgtttccaaatccctttcatgtctttccacttctctgggtcccggggtgcatttgttactcatcgggcccagggacattgcagagtggcctagagcactctcaccccaagcggccttttccaaatgcccaaggatgccttagcatgtgactcctgaagggaaggcaaaggcagaggaatttggctgcttctacggccatgagactgatccctggccactgaaaagctttcctgacaataaaaatgttttgaggctttaaaaagaaaatc

SEQ ID NO: 7614 - protein, 635 aa, Homo sapiens; identical to SEQ ID NO: 1102

SEQ ID NO: 7615 - DNA, 2559 bp, Homo sapiens
gcgttaaggaagttgcccaaaatgaggaagagccgcgggcccggcggctgaggccaccccggcggcggctggagagcgaggaggagcgggtggccccgcgctgcgcccgccctcgcctcacctggcgcaggtggacacctgcgcaggtgtgtgccctccggcccctgaagcatggccagcagcggcatggctgacagcgccaaccacctgcccttctttttcggcaacatcacccgggaggaggcagaagattacctggtccaggggggcatgagtgatgggctttatttgctgcgccagagccgcaactacctgggtggcttcgccctgtccgtggcccacgggaggaaggcacaccactacaccatcgagcgggagctgaatggcacctacgccatcgccggtggcaggacccatgccagccccgccgacctctgccactaccactcccaggagtctgatggcctggtctgcctcctcaagaagcccttcaaccggccccaaggggtgcagcccaagactgggccctttgaggatttgaaggaaaacctcatcagggaatatgtgaagcagacatggaacctgcagggtcaggctctggagcaggccatcatcagtcagaagcctcagctggagaagctgatcgctaccacagcccatgaaaaaatgccttggttccatggaaaaatctctcgggaagaatctgagcaaattgtcctgataggatcaaagacaaatggaaagttcctgatccgagccagagacaacaacggctcctacgccctgtgcctgctgcacgaagggaaggtgctgcactatcgcatcgacaaagacaagacagggaagctctccatccccgagggaaagaagttcgacacgctctggcagctagtcgagcattattcttataaagcagatggtttgttaagagttcttactgtcccatgtcaaaaaatcggcacacagggaaatgttaattttggaggccgtccacaacttccaggttcccatcctgcgtcctcccctgcccaagggaaccggcaagagagtactgtgtcattcaatccgtatgagccagaacttgcaccctgggctgcagacaaaggcccccagagagaagccctacccatggacacagaggtgtacgagagcccctacgcggaccccgaggagatcaggcccaaggaggtttacctggaccgaaagctgctgacgctggaagacaaagaactgggctctggtaattttggaactgtgaaaaagggctactaccaaatgaaaaaagttgtgaaaaccgtggctgtgaaaatactgaaaaacgaggccaatgaccccgctcttaaagatgagttattagcagaagcaaatgtcatgcagcagctggacaacccgtacatcgtgcggatgatcgggatatgcgaggccgagtcctggatgctggttatggagatggcagaacttggtcccctcaataagtatttgcagcagaacagacatgtcaaggataagaacatcatagaactggttcatcaggtttccatgggcatgaagtacttggaggagagcaattttgtgcacagagatctggctgcaagaaatgtgttgctagttacccaacattacgccaagatcagtgatttcggactttccaaagcactgcgtgctgatgaaaactactacaaggcccagacccatggaaagtggcctgtcaagtggtacgctccggaatgcatcaactactacaagttctccagcaaaagcgatgtctggagctttggagtgttgatgtgggaagcattctcctatgggcagaagccatatcgagggatgaaaggaagtgaagtcaccgctatgttagagaaaggagagcggatggggtgccctgcagggtgtccaagagagatgtacgatctcatgaatctgtgctggacatacgatgtggaaaacaggcccggattcgcagcagtggaactgcggctgcgcaattactactatgacgtggtgaactaaccgctcccgcacctgtcggtggctgcctttgatcacaggagcaatcacaggaaaatgtatccagaggaattgattgtcagccacctccctctgccagtcgggagagccaggcttggatggaacatgcccacaacttgtcacccaaagcctgtcccaggactcaccctccacaaagcaaaggcagtcccgggagaaaagacggatggcaggatccaaggggctagctggatttgtttgttttcttgtctgtgtgattttcatacaggttatttttacgatctgtttccaaatccctttcatgtctttccacttctctgggtcccggggtgcatttgttactcatcgggcccagggacattgcagagtggcctagagcactctcaccccaagcggccttttccaaatgcccaaggatgccttagcatgtgactcctgaagggaaggcaaaggcagaggaatttggctgcttctacggccatgagactgatccctggccactgaaaagctttcctgacaataaaaatgttttgaggctttaaaaagaaaatc

SEQ ID NO: 7616 - protein, 612 aa, Homo sapiens
MASSGMADSANHLPFFFGNITREEAEDYLVQGGMSDGLYLLRQSRNYLGGFALSVAHGRKAHHYTIERELNGTYAIAGGRTHASPADLCHYHSQESDGLVCLLKKPFNRPQGVQPKTGPFEDLKENLIREYVKQTWNLQGQALEQAIISQKPQLEKLIATTAHEKMPWFHGKISREESEQIVLIGSKTNGKFLIRARDNNGSYALCLLHEGKVLHYRIDKDKTGKLSIPEGKKFDTLWQLVEHYSYKADGLLRVLTVPCQKIGTQGNVNFGGRPQLPGSHPASSPAQGNRQESTVSFNPYEPELAPWAADKGPQREALPMDTEVYESPYADPEEIRPKEVYLDRKLLTLEDKELGSGNFGTVKKGYYQMKKVVKTVAVKILKNEANDPALKDELLAEANVMQQLDNPYIVRMIGICEAESWMLVMEMAELGPLNKYLQQNRHVKDKNIIELVHQVSMGMKYLEESNFVHRDLAARNVLLVTQHYAKISDFGLSKALRADENYYKAQTHGKWPVKWYAPECINYYKFSSKSDVWSFGVLMWEAFSYGQKPYRGMKGSEVTAMLEKGERMGCPAGCPREMYDLMNLCWTYDVENRPGFAAVELRLRNYYYDVVN

SEQ ID NO: 7617 - DNA, 5038 bp, Homo sapiens
gcgttaaggaagttgcccaaaatgaggaagagccgcgggcccggcggctgaggccaccccggcggcggctggagagcgaggaggagcgggtggccccgcgctgcgcccgccctcgcctcacctggcgcaggtggacacctgcgcaggtgtgtgccctccggcccctgaagcatggccagcagcggcatggctgacagcgccaaccacctgcccttctttttcggcaacatcacccgggaggaggcagaagattacctggtccaggggggcatgagtgatgggctttatttgctgcgccagagccgcaactacctgggtggcttcgccctgtccgtggcccacgggaggaaggcacaccactacaccatcgagcgggagctgaatggcacctacgccatcgccggtggcaggacccatgccagccccgccgacctctgccactaccactcccaggagtctgatggcctggtctgcctcctcaagaagcccttcaaccggccccaaggggtgcagcccaagactgggccctttgaggatttgaaggaaaacctcatcagggaatatgtgaagcagacatggaacctgcagggtcaggctctggagcaggccatcatcagtcagaagcctcagctggagaagctgatcgctaccacagcccatgaaaaaatgccttggttccatggaaaaatctctcgggaagaatctgagcaaattgtcctgataggatcaaagacaaatggaaagttcctgatccgagccagagacaacaacggctcctacgccctgtgcctgctgcacgaagggaaggtgctgcactatcgcatcgacaaagacaagacagggaagctctccatccccgagggaaagaagttcgacacgctctggcagctagtcgagcattattcttataaagcagatggtttgttaagagttcttactgtcccatgtcaaaaaatcggcacacagggaaatgttaattttggaggccgtccacaacttccaggttcccatcctgcgacttggtcagcgggtggaataatctcaagaatcaaatcatactccttcccaaagcctggccacagaaagtcctcccctgcccaagggaaccggcaagagagtactgtgtcattcaatccgtatgagccagaacttgcaccctgggctgcagacaaaggcccccagagagaagccctacccatggacacagaggtgtacgagagcccctacgcggaccccgaggagatcaggcccaaggaggtttacctggaccgaaagctgctgacgctggaagacaaagaactgggctctggtaattttggaactgtgaaaaagggctactaccaaatgaaaaaagttgtgaaaaccgtggctgtgaaaatactgaaaaacgaggccaatgaccccgctcttaaagatgagttattagcagaagcaaatgtcatgcagcagctggacaacccgtacatcgtgcggatgatcgggatatgcgaggccgagtcctggatgctggttatggagatggcagaacttggtcccctcaataagtatttgcagcagaacagacatgtcaaggataagaacatcatagaactggttcatcaggtttccatgggcatgaagtacttggaggagagcaattttgtgcacagagatctggctgcaagaaatgtgttgctagttacccaacattacgccaagatcagtgatttcggactttccaaagcactgcgtgctgatgaaaactactacaaggcccagacccatggaaagtggcctgtcaagtggtacgctccggaatgcatcaactactacaagttctccagcaaaagcgatgtctggagctttggagtgttgatgtgggaagcattctcctatgggcagaagccatatcgagggatgaaaggaagtgaagtcaccgctatgttagagaaaggagagcggatggggtgccctgcagggtgtccaagagagatgtacgatctcatgaatctgtgctggacatacgatgtggaaaacaggcccggattcgcagcagtggaactgcggctgcgcaattactactatgacgtggtgaactaaccgctcccgcacctgtcggtggctgcctttgatcacaggagcaatcacaggaaaatgtatccagaggaattgattgtcagccacctccctctgccagtcgggagagccaggcttggatggaacatgcccacaacttgtcacccaaagcctgtcccaggactcaccctccacaaagcaaaggcagtcccgggagaaaagacggatggcaggatccaaggggctagctggatttgtttgttttcttgtctgtgtgattttcatacaggttatttttacgatctgtttccaaatccctttcatgtctttccacttctctgggtcccggggtgcatttgttactcatcgggcccagggacattgcagagtggcctagagcactctcaccccaagcggccttttccaaatgcccaaggatgccttagcatgtgactcctgaagggaaggcaaaggcagaggaatttggctgcttctacggccatgagactgatccctggccactgaaaagctttcctgacaataaaaatgttttgaggctttaaaaagaaaatcaagtttgaccagtgcagtttctaagcatgtagccagttaaggaaagaaagaaagaaaaaaaaaaaaggcctggatactgcttttgctgtctctgttatgagatggaagacttacatgtttgtgataaaaggggaccatgagaatgaattggcttggcttactttccccctgaaatcctctctcctgcagactgtcttgaagacctggtgactggtaaataaagccctgcatggaggctgcacagcaggggcaagaggcccatcccccagcatctcactgaggacagcttcaggctgccttcctctgaacgtggtccacaccttcctctcctccacagagagggtgccgccagaatcccctgtcgctttctgtgtctgcaatggggggcagcacagggatcaaagccatctaaagagtttccaaagaaagtattaattcagaacaagccaaagaccctgagcctcaccacaaacaggccttttggagtgtgaatttgagttgaagatacaagatcggagaatgattttctggtcttaactaatcctcatcttcatgtttgatctttaagaagtcatcacccattgatttcagttttgctgtacctcttgaaagttaaagagacatctcagcactttaggaggccgaggcgggtggatcacttgaggtaaggagtttgagactagcctggccaatatggtaaaaccccatctctactaaaaatacaaaaattagccgggcatggtggcatgtgtctgtagtcccagctactcgggaggctgaggcaggagaatcgcttgaacccaggaaacggaggtcgcagtgagccaagatcatgccactgcactccagcttgggcatcacagcgagactctgtcaaaacaaacaaacaaaaaaacaacttaaagaggtaatttagccatcattcttatgccagcagatataaataaacttggacccatctggtcttcagctaaacctgagacattttaaagtgcatggacagccatggacagcaggccctcctctaacaggggatgcaaggcatggagaaagacaatcagtacccaagctcagccacagaagacaggagtcactcatataacttgtgtttagaagtttttggtagccacgcacactttctgaaatcacactatctggtggtttaatcatatttttaaagacagaatccctgagtgctgagcagattctcaaaacacatttagaatccctgaaattagaaagatcaatgacaaaatatctgtcagccaggccacaaacaggtgtaaaattatgaaaggagtggttggatgtgccaagtttggtaaagtggtgactgcatctgagaaagaggctgtgaggctgaactcttggtggcttccttctgtaacttccagagggagtcttcaacacaggccccgtgctcgtaggaatacggtagcacctatgtaggaagtgcgtggagttttctgtcttctttctgtgtgatttttggcctttttatcagcacttctcccctcccaggagcctggggatgccaaacatccagaatgtgatgggacaagatgggggcaggggcctcacctccctgcagaggtccggccaggtctccttgtccctggacaatctcctgagcctctctgcttggtggagcaggcacctgtgtgcagaattcccactgtggccagcacgaggaagtcttttctagtgaaaatgtgtcttgtggtcaggaataattatcctttcccctgtagccaccaaggagggcaaatagagaaaggtaacctaattgaaggattggtcatgtgaaaagggctacatttgggaagctgggaaaggcctccaggcttctagagcagctagcttgggctggattctcatacccaggctgccccttggattgttctacccaagcttttccctggggtctgggctcactccataaggtaaggtgccttttaccttatggtccttctttagcaggtaacaaaggagcatcaggggcaggctgccctggtggcatcacactggctagtgaggccgtgaatatcttgtcccccagcagggccgacagtttctatcacagaaaacagtgtgttcagtggtgaaaatcgttgcatgcatgttttcatctgagcgtgtccttctcccatactccctatcagccagccctgcctgtagctgctgtatggtgattgcacttggacatcagtccaatgactgcaagtcggcctggattttcacttgcagaggctacagctgcattgtcaggtctcccagccctgcagagagctccctccactggttagcagtgtgttgtgttttccattcatttcagaagagctacattgtgtcactggacatttttaaaaactgtgatttttaataaaaatttaaaatttgctttgtgatg

SEQ ID NO: 7618 - protein, 635 aa, Homo sapiens; identical to SEQ ID NO: 1102

SEQ ID NO: 7619 - DNA, 1849 bp, Homo sapiens
acccggccgggactttctggtaaggagaggaggttacggggaacgacgcgctgctttcatgccctttcttgttctaccttcatcggccgaggtaaaagtgctgaaaccatgtgaataaaatacaggtggacacctgcgcaggtgtgtgccctccggcccctgaagcatggccagcagcggcatggctgacagcgccaaccacctgcccttctttttcggcaacatcacccgggaggaggcagaagattacctggtccaggggggcatgagtgatgggctttatttgctgcgccagagccgcaactacctgggtggcttcgccctgtccgtggcccacgggaggaaggcacaccactacaccatcgagcgggagctgaatggcacctacgccatcgccggtggcaggacccatgccagccccgccgacctctgccactaccactcccaggagtctgatggcctggtctgcctcctcaagaagcccttcaaccggccccaaggggtgcagcccaagactgggccctttgaggatttgaaggaaaacctcatcagggaatatgtgaagcagacatggaacctgcagggtcaggctctggagcaggccatcatcagtcagaagcctcagctggagaagctgatcgctaccacagcccatgaaaaaatgccttggttccatggaaaaatctctcgggaagaatctgagcaaattgtcctgataggatcaaagacaaatggaaagttcctgtgagtatcgtgccttccccctcacctcctgccaccaggcctgtgtggacaattgggaataattcagcttccttgtgactggccccacatgaccctgggaagaggccatgcattgccatttgacaacatgcatgctggcctgttctaaagacatttctaaccaaagctatcacttgtgacccagtgtttattttgcccagtctaactctaaaatgaacactctttttgggcaccgagggatgtaatatttaaagaaaatgtgattcagccccatattctccttttaatggcaaattataggttgcatagcacattctgtggttatccaactaaaattaaaatactgcagtttttttactcaaactacccccttgatctcagactttacttctattttacatgaaacaagatgccaacaggaaagatgttaaggaaaagttcctgggagtagcatccatgagtggtgagtgcaggtttgaagacttcagccttaggcccacagtcattagagggtctgtctgaatcctgggttctgtttgctatcctcagtggttcagtgtaaatctaaattgtagaaggttctgagatacaggccaacgtggtcagtcagttgtccagagaaggtaaagaactgtctttgggaggtgtcaaccttgttccctcgagggggtctggtcaaggtggctcagtggggcagttgtccctgggggaaatgatcccctggtcacctctcagtgtccctacagagatgcttaccttggaaacataaccagaaacagcgatgcagcctcatggtttggcaattggtgaatccccagccgacttcgtaaacttttcctagatttagaagcgttttctctgcctgtccatctattcaaaggaatttcctcagacttcactgtcataccttgtattttaaaaatgatcttagctgagtgcagtggcacgcacctgtagtcccagctactcctggcaggaggatcgcttcatcctcactatgatctcactatcgtttgaggctagtttgagaccagcctgggcaacatagtgaggccctgtctcaaaaaaagaaaaaaagaaaagaaaaattgaccacaatactctt

SEQ ID NO: 7620 - protein, 193 aa, Homo sapiens [sequence omitted]

SEQ ID NO: 7621 - DNA, 4918 bp, Homo sapiens
ctttctggtaaggagaggaggttacggggaacgacgcgctgctttcatgccctttcttgttctaccttcatcggccgaggtggacacctgcgcaggtgtgtgccctccggcccctgaagcatggccagcagcggcatggctgacagcgccaaccacctgcccttctttttcggcaacatcacccgggaggaggcagaagattacctggtccaggggggcatgagtgatgggctttatttgctgcgccagagccgcaactacctgggtggcttcgccctgtccgtggcccacgggaggaaggcacaccactacaccatcgagcgggagctgaatggcacctacgccatcgccggtggcaggacccatgccagccccgccgacctctgccactaccactcccaggagtctgatggcctggtctgcctcctcaagaagcccttcaaccggccccaaggggtgcagcccaagactgggccctttgaggatttgaaggaaaacctcatcagggaatatgtgaagcagacatggaacctgcagggtcaggctctggagcaggccatcatcagtcagaagcctcagctggagaagctgatcgctaccacagcccatgaaaaaatgccttggttccatggaaaaatctctcgggaagaatctgagcaaattgtcctgataggatcaaagacaaatggaaagttcctgatccgagccagagacaacaacggctcctacgccctgtgcctgctgcacgaagggaaggtgctgcactatcgcatcgacaaagacaagacagggaagctctccatccccgagggaaagaagttcgacacgctctggcagctagtcgagcattattcttataaagcagatggtttgttaagagttcttactgtcccatgtcaaaaaatcggcacacagggaaatgttaattttggaggccgtccacaacttccaggttcccatcctgcgtcctcccctgcccaagggaaccggcaagagagtactgtgtcattcaatccgtatgagccagaacttgcaccctgggctgcagacaaaggcccccagagagaagccctacccatggacacagaggtgtacgagagcccctacgcggaccccgaggagatcaggcccaaggaggtttacctggaccgaaagctgctgacgctggaagacaaagaactgggctctggtaattttggaactgtgaaaaagggctactaccaaatgaaaaaagttgtgaaaaccgtggctgtgaaaatactgaaaaacgaggccaatgaccccgctcttaaagatgagttattagcagaagcaaatgtcatgcagcagctggacaacccgtacatcgtgcggatgatcgggatatgcgaggccgagtcctggatgctggttatggagatggcagaacttggtcccctcaataagtatttgcagcagaacagacatgtcaaggataagaacatcatagaactggttcatcaggtttccatgggcatgaagtacttggaggagagcaattttgtgcacagagatctggctgcaagaaatgtgttgctagttacccaacattacgccaagatcagtgatttcggactttccaaagcactgcgtgctgatgaaaactactacaaggcccagacccatggaaagtggcctgtcaagtggtacgctccggaatgcatcaactactacaagttctccagcaaaagcgatgtctggagctttggagtgttgatgtgggaagcattctcctatgggcagaagccatatcgagggatgaaaggaagtgaagtcaccgctatgttagagaaaggagagcggatggggtgccctgcagggtgtccaagagagatgtacgatctcatgaatctgtgctggacatacgatgtggaaaacaggcccggattcgcagcagtggaactgcggctgcgcaattactactatgacgtggtgaactaaccgctcccgcacctgtcggtggctgcctttgatcacaggagcaatcacaggaaaatgtatccagaggaattgattgtcagccacctccctctgccagtcgggagagccaggcttggatggaacatgcccacaacttgtcacccaaagcctgtcccaggactcaccctccacaaagcaaaggcagtcccgggagaaaagacggatggcaggatccaaggggctagctggatttgtttgttttcttgtctgtgtgattttcatacaggttatttttacgatctgtttccaaatccctttcatgtctttccacttctctgggtcccggggtgcatttgttactcatcgggcccagggacattgcagagtggcctagagcactctcaccccaagcggccttttccaaatgcccaaggatgccttagcatgtgactcctgaagggaaggcaaaggcagaggaatttggctgcttctacggccatgagactgatccctggccactgaaaagctttcctgacaataaaaatgttttgaggctttaaaaagaaaatcaagtttgaccagtgcagtttctaagcatgtagccagttaaggaaagaaagaaagaaaaaaaaaaaaggcctggatactgcttttgctgtctctgttatgagatggaagacttacatgtttgtgataaaaggggaccatgagaatgaattggcttggcttactttccccctgaaatcctctctcctgcagactgtcttgaagacctggtgactggtaaataaagccctgcatggaggctgcacagcaggggcaagaggcccatcccccagcatctcactgaggacagcttcaggctgccttcctctgaacgtggtccacaccttcctctcctccacagagagggtgccgccagaatcccctgtcgctttctgtgtctgcaatggggggcagcacagggatcaaagccatctaaagagtttccaaagaaagtattaattcagaacaagccaaagaccctgagcctcaccacaaacaggccttttggagtgtgaatttgagttgaagatacaagatcggagaatgattttctggtcttaactaatcctcatcttcatgtttgatctttaagaagtcatcacccattgatttcagttttgctgtacctcttgaaagttaaagagacatctcagcactttaggaggccgaggcgggtggatcacttgaggtaaggagtttgagactagcctggccaatatggtaaaaccccatctctactaaaaatacaaaaattagccgggcatggtggcatgtgtctgtagtcccagctactcgggaggctgaggcaggagaatcgcttgaacccaggaaacggaggtcgcagtgagccaagatcatgccactgcactccagcttgggcatcacagcgagactctgtcaaaacaaacaaacaaaaaaacaacttaaagaggtaatttagccatcattcttatgccagcagatataaataaacttggacccatctggtcttcagctaaacctgagacattttaaagtgcatggacagccatggacagcaggccctcctctaacaggggatgcaaggcatggagaaagacaatcagtacccaagctcagccacagaagacaggagtcactcatataacttgtgtttagaagtttttggtagccacgcacactttctgaaatcacactatctggtggtttaatcatatttttaaagacagaatccctgagtgctgagcagattctcaaaacacatttagaatccctgaaattagaaagatcaatgacaaaatatctgtcagccaggccacaaacaggtgtaaaattatgaaaggagtggttggatgtgccaagtttggtaaagtggtgactgcatctgagaaagaggctgtgaggctgaactcttggtggcttccttctgtaacttccagagggagtcttcaacacaggccccgtgctcgtaggaatacggtagcacctatgtaggaagtgcgtggagttttctgtcttctttctgtgtgatttttggcctttttatcagcacttctcccctcccaggagcctggggatgccaaacatccagaatgtgatgggacaagatgggggcaggggcctcacctccctgcagaggtccggccaggtctccttgtccctggacaatctcctgagcctctctgcttggtggagcaggcacctgtgtgcagaattcccactgtggccagcacgaggaagtcttttctagtgaaaatgtgtcttgtggtcaggaataattatcctttcccctgtagccaccaaggagggcaaatagagaaaggtaacctaattgaaggattggtcatgtgaaaagggctacatttgggaagctgggaaaggcctccaggcttctagagcagctagcttgggctggattctcatacccaggctgccccttggattgttctacccaagcttttccctggggtctgggctcactccataaggtaaggtgccttttaccttatggtccttctttagcaggtaacaaaggagcatcaggggcaggctgccctggtggcatcacactggctagtgaggccgtgaatatcttgtcccccagcagggccgacagtttctatcacagaaaacagtgtgttcagtggtgaaaatcgttgcatgcatgttttcatctgagcgtgtccttctcccatactccctatcagccagccctgcctgtagctgctgtatggtgattgcacttggacatcagtccaatgactgcaagtcggcctggattttcacttgcagaggctacagctgcattgtcaggtctcccagccctgcagagagctccctccactggttagcagtgtgttgtgttttccattcatttcagaagagctacattgtgtcactggacatttttaaaaactgtgatttttaataaaaatttaaaatttgctttgtgatg

SEQ ID NO: 7622 - protein, 612 aa, Homo sapiens; identical to SEQ ID NO: 7616

SEQ ID NO: 7623 - DNA, 1073 bp, Homo sapiens
ggaggttacggggaacgacgcgctgctttcatgccctttcttgttctaccttcatcggccgaggtaaaagtgctgaaaccatgtgaataaaatacaggtggacacctgcgcaggtgtgtgccctccggcccctgaagcatggccagcagcggcatggctgacagcgccaaccacctgcccttctttttcggcaacatcacccgggaggaggcagaagattacctggtccaggggggcatgagtgatgggctttatttgctgcgccagagccgcaactacctgggtggcttcgccctgtccgtggcccacgggaggaaggcacaccactacaccatcgagcgggagctgaatggcacctacgccatcgccggtggcaggacccatgccagccccgccgacctctgccactaccactcccaggagtctgatggcctggtctgcctcctcaagaagcccttcaaccggccccaaggggtgcagcccaagactgggccctttgaggatttgaaggaaaacctcatcagggaatatgtgaagcagacatggaacctgcaggtgggccacagctggtcctgctccctgggcccagggggccctgtgaccccacacagacttcctggctacatgcaacacatgtgcctatgtgccctgtgtgcccaaataacacaaccatctccttaagcatcaattttggccaaaaaatgcctctctctgataagagcctttcctctttcacagccacagctgagagggtgggtccctttgtgccagcagtgtgggtttctccacagcagggaaccactgttacccagtgcaaggagggccttttcagagaggcattgataggtgttgattggtttctgtttatctgacaaggtcctaccatacacactgataggcacttgattttatggcttcctaatatctcttgcagaactttctgtgtcaacactcatatagttgcatcacccgttctttggctatctggtatcacctgctatgcaccacaatttatttaactagtacctattgatggacacatttgctgtttatgaataaacgctgctaacaac

SEQ ID NO: 7624 - protein, 180 aa, Homo sapiens
MASSGMADSANHLPFFFGNITREEAEDYLVQGGMSDGLYLLRQSRNYLGGFALSVAHGRKAHHYTIERELNGTYAIAGGRTHASPADLCHYHSQESDGLVCLLKKPFNRPQGVQPKTGPFEDLKENLIREYVKQTWNLQVGHSWSCSLGPGGPVTPHRLPGYMQHMCLCALCAQITQPSP

SEQ ID NO: 7625 - DNA, 2658 bp, Homo sapiens
agcactctggcttgttgatgcctgtcttgtgctttctctctgtttcagctgttttccttttaagatactcctctcagatttgtgtgcttcttcccttcccacattctatactgcccagcgcctgggattccagatctgcgtttgaatccaggaaagggaggtggacacctgcgcaggtgtgtgccctccggcccctgaagcatggccagcagcggcatggctgacagcgccaaccacctgcccttctttttcggcaacatcacccgggaggaggcagaagattacctggtccaggggggcatgagtgatgggctttatttgctgcgccagagccgcaactacctgggtggcttcgccctgtccgtggcccacgggaggaaggcacaccactacaccatcgagcgggagctgaatggcacctacgccatcgccggtggcaggacccatgccagccccgccgacctctgccactaccactcccaggagtctgatggcctggtctgcctcctcaagaagcccttcaaccggccccaaggggtgcagcccaagactgggccctttgaggatttgaaggaaaacctcatcagggaatatgtgaagcagacatggaacctgcagggtcaggctctggagcaggccatcatcagtcagaagcctcagctggagaagctgatcgctaccacagcccatgaaaaaatgccttggttccatggaaaaatctctcgggaagaatctgagcaaattgtcctgataggatcaaagacaaatggaaagttcctgatccgagccagagacaacaacggctcctacgccctgtgcctgctgcacgaagggaaggtgctgcactatcgcatcgacaaagacaagacagggaagctctccatccccgagggaaagaagttcgacacgctctggcagctagtcgagcattattcttataaagcagatggtttgttaagagttcttactgtcccatgtcaaaaaatcggcacacagggaaatgttaattttggaggccgtccacaacttccaggttcccatcctgcgacttggtcagcgggtggaataatctcaagaatcaaatcatactccttcccaaagcctggccacagaaagtcctcccctgcccaagggaaccggcaagagagtactgtgtcattcaatccgtatgagccagaacttgcaccctgggctgcagacaaaggcccccagagagaagccctacccatggacacagaggtgtacgagagcccctacgcggaccccgaggagatcaggcccaaggaggtttacctggaccgaaagctgctgacgctggaagacaaagaactgggctctggtaattttggaactgtgaaaaagggctactaccaaatgaaaaaagttgtgaaaaccgtggctgtgaaaatactgaaaaacgaggccaatgaccccgctcttaaagatgagttattagcagaagcaaatgtcatgcagcagctggacaacccgtacatcgtgcggatgatcgggatatgcgaggccgagtcctggatgctggttatggagatggcagaacttggtcccctcaataagtatttgcagcagaacagacatgtcaaggataagaacatcatagaactggttcatcaggtttccatgggcatgaagtacttggaggagagcaattttgtgcacagagatctggctgcaagaaatgtgttgctagttacccaacattacgccaagatcagtgatttcggactttccaaagcactgcgtgctgatgaaaactactacaaggcccagacccatggaaagtggcctgtcaagtggtacgctccggaatgcatcaactactacaagttctccagcaaaagcgatgtctggagctttggagtgttgatgtgggaagcattctcctatgggcagaagccatatcgagggatgaaaggaagtgaagtcaccgctatgttagagaaaggagagcggatggggtgccctgcagggtgtccaagagagatgtacgatctcatgaatctgtgctggacatacgatgtggaaaacaggcccggattcgcagcagtggaactgcggctgcgcaattactactatgacgtggtgaactaaccgctcccgcacctgtcggtggctgcctttgatcacaggagcaatcacaggaaaatgtatccagaggaattgattgtcagccacctccctctgccagtcgggagagccaggcttggatggaacatgcccacaacttgtcacccaaagcctgtcccaggactcaccctccacaaagcaaaggcagtcccgggagaaaagacggatggcaggatccaaggggctagctggatttgtttgttttcttgtctgtgtgattttcatacaggttatttttacgatctgtttccaaatccctttcatgtctttccacttctctgggtcccggggtgcatttgttactcatcgggcccagggacattgcagagtggcctagagcactctcaccccaagcggccttttccaaatgcccaaggatgccttagcatgtgactcctgaagggaaggcaaaggcagaggaatttggctgcttctacggccatgagactgatccctggccactgaaaagctttcctgacaataaaaatgttttgaggctttaaaaagaaaatc

SEQ ID NO: 7626 - protein, 635 aa, Homo sapiens; identical to SEQ ID NO: 1102

SEQ ID NO: 7627 - DNA, 5068 bp, Homo sapiens
agcactctggcttgttgatgcctgtcttgtgctttctctctgtttcagctgttttccttttaagatactcctctcagatttgtgtgcttcttcccttcccacattctatactgcccagcgcctgggattccagatctgcgtttgaatccaggaaagggaggtggacacctgcgcaggtgtgtgccctccggcccctgaagcatggccagcagcggcatggctgacagcgccaaccacctgcccttctttttcggcaacatcacccgggaggaggcagaagattacctggtccaggggggcatgagtgatgggctttatttgctgcgccagagccgcaactacctgggtggcttcgccctgtccgtggcccacgggaggaaggcacaccactacaccatcgagcgggagctgaatggcacctacgccatcgccggtggcaggacccatgccagccccgccgacctctgccactaccactcccaggagtctgatggcctggtctgcctcctcaagaagcccttcaaccggccccaaggggtgcagcccaagactgggccctttgaggatttgaaggaaaacctcatcagggaatatgtgaagcagacatggaacctgcagggtcaggctctggagcaggccatcatcagtcagaagcctcagctggagaagctgatcgctaccacagcccatgaaaaaatgccttggttccatggaaaaatctctcgggaagaatctgagcaaattgtcctgataggatcaaagacaaatggaaagttcctgatccgagccagagacaacaacggctcctacgccctgtgcctgctgcacgaagggaaggtgctgcactatcgcatcgacaaagacaagacagggaagctctccatccccgagggaaagaagttcgacacgctctggcagctagtcgagcattattcttataaagcagatggtttgttaagagttcttactgtcccatgtcaaaaaatcggcacacagggaaatgttaattttggaggccgtccacaacttccaggttcccatcctgcgacttggtcagcgggtggaataatctcaagaatcaaatcatactccttcccaaagcctggccacagaaagtcctcccctgcccaagggaaccggcaagagagtactgtgtcattcaatccgtatgagccagaacttgcaccctgggctgcagacaaaggcccccagagagaagccctacccatggacacagaggtgtacgagagcccctacgcggaccccgaggagatcaggcccaaggaggtttacctggaccgaaagctgctgacgctggaagacaaagaactgggctctggtaattttggaactgtgaaaaagggctactaccaaatgaaaaaagttgtgaaaaccgtggctgtgaaaatactgaaaaacgaggccaatgaccccgctcttaaagatgagttattagcagaagcaaatgtcatgcagcagctggacaacccgtacatcgtgcggatgatcgggatatgcgaggccgagtcctggatgctggttatggagatggcagaacttggtcccctcaataagtatttgcagcagaacagacatgtcaaggataagaacatcatagaactggttcatcaggtttccatgggcatgaagtacttggaggagagcaattttgtgcacagagatctggctgcaagaaatgtgttgctagttacccaacattacgccaagatcagtgatttcggactttccaaagcactgcgtgctgatgaaaactactacaaggcccagacccatggaaagtggcctgtcaagtggtacgctccggaatgcatcaactactacaagttctccagcaaaagcgatgtctggagctttggagtgttgatgtgggaagcattctcctatgggcagaagccatatcgagggatgaaaggaagtgaagtcaccgctatgttagagaaaggagagcggatggggtgccctgcagggtgtccaagagagatgtacgatctcatgaatctgtgctggacatacgatgtggaaaacaggcccggattcgcagcagtggaactgcggctgcgcaattactactatgacgtggtgaactaaccgctcccgcacctgtcggtggctgcctttgatcacaggagcaatcacaggaaaatgtatccagaggaattgattgtcagccacctccctctgccagtcgggagagccaggcttggatggaacatgcccacaacttgtcacccaaagcctgtcccaggactcaccctccacaaagcaaaggcagtcccgggagaaaagacggatggcaggatccaaggggctagctggatttgtttgttttcttgtctgtgtgattttcatacaggttatttttacgatctgtttccaaatccctttcatgtctttccacttctctgggtcccggggtgcatttgttactcatcgggcccagggacattgcagagtggcctagagcactctcaccccaagcggccttttccaaatgcccaaggatgccttagcatgtgactcctgaagggaaggcaaaggcagaggaatttggctgcttctacggccatgagactgatccctggccactgaaaagctttcctgacaataaaaatgttttgaggctttaaaaagaaaatcaagtttgaccagtgcagtttctaagcatgtagccagttaaggaaagaaagaaagaaaaaaaaaaaaggcctggatactgcttttgctgtctctgttatgagatggaagacttacatgtttgtgataaaaggggaccatgagaatgaattggcttggcttactttccccctgaaatcctctctcctgcagactgtcttgaagacctggtgactggtaaataaagccctgcatggaggctgcacagcaggggcaagaggcccatcccccagcatctcactgaggacagcttcaggctgccttcctctgaacgtggtccacaccttcctctcctccacagagagggtgccgccagaatcccctgtcgctttctgtgtctgcaatggggggcagcacagggatcaaagccatctaaagagtttccaaagaaagtattaattcagaacaagccaaagaccctgagcctcaccacaaacaggccttttggagtgtgaatttgagttgaagatacaagatcggagaatgattttctggtcttaactaatcctcatcttcatgtttgatctttaagaagtcatcacccattgatttcagttttgctgtacctcttgaaagttaaagagacatctcagcactttaggaggccgaggcgggtggatcacttgaggtaaggagtttgagactagcctggccaatatggtaaaaccccatctctactaaaaatacaaaaattagccgggcatggtggcatgtgtctgtagtcccagctactcgggaggctgaggcaggagaatcgcttgaacccaggaaacggaggtcgcagtgagccaagatcatgccactgcactccagcttgggcatcacagcgagactctgtcaaaacaaacaaacaaaaaaacaacttaaagaggtaatttagccatcattcttatgccagcagatataaataaacttggacccatctggtcttcagctaaacctgagacattttaaagtgcatggacagccatggacagcaggccctcctctaacaggggatgcaaggcatggagaaagacaatcagtacccaagctcagccacagaagacaggagtcactcatataacttgtgtttagaagtttttggtagccacgcacactttctgaaatcacactatctggtggtttaatcatatttttaaagacagaatccctgagtgctgagcagattctcaaaacacatttagaatccctgaaattagaaagatcaatgacaaaatatctgtcagccaggccacaaacaggtgtaaaattatgaaaggagtggttggatgtgccaagtttggtaaagtggtgactgcatctgagaaagaggctgtgaggctgaactcttggtggcttccttctgtaacttccagagggagtcttcaacacaggccccgtgctcgtaggaatacggtagcacctatgtaggaagtgcgtggagttttctgtcttctttctgtgtgatttttggcctttttatcagcacttctcccctcccaggagcctggggatgccaaacatccagaatgtgatgggacaagatgggggcaggggcctcacctccctgcagaggtccggccaggtctccttgtccctggacaatctcctgagcctctctgcttggtggagcaggcacctgtgtgcagaattcccactgtggccagcacgaggaagtcttttctagtgaaaatgtgtcttgtggtcaggaataattatcctttcccctgtagccaccaaggagggcaaatagagaaaggtaacctaattgaaggattggtcatgtgaaaagggctacatttgggaagctgggaaaggcctccaggcttctagagcagctagcttgggctggattctcatacccaggctgccccttggattgttctacccaagcttttccctggggtctgggctcactccataaggtaaggtgccttttaccttatggtccttctttagcaggtaacaaaggagcatcaggggcaggctgccctggtggcatcacactggctagtgaggccgtgaatatcttgtcccccagcagggccgacagtttctatcacagaaaacagtgtgttcagtggtgaaaatcgttgcatgcatgttttcatctgagcgtgtccttctcccatactccctatcagccagccctgcctgtagctgctgtatggtgattgcacttggacatcagtccaatgactgcaagtcggcctggattttcacttgcagaggctacagctgcattgtcaggtctcccagccctgcagagagctccctccactggttagcagtgtgttgtgttttccattcatttcagaagagctacattgtgtcactggacatttttaaaaactgtgatttttaataaaaatttaaaatttgctttgtgatg

SEQ ID NO: 7628 - protein, 635 aa, Homo sapiens; identical to SEQ ID NO: 1102

SEQ ID NO: 7629 - DNA, 816 bp, Homo sapiens
ccgggaggaggcagaagattacctgggtggcttcgccctgtccgtggcccacgggaggaaggcacaccactacaccatcgagcgggagctgaatggcacctacgccatcgccggtggcaggacccatgccagccccgccgacctctgccactaccactcccaggagtctgatggcctggtctgcctcctcaagaagcccttcaaccggccccaaggggtgcagcccaagactgggccctttgaggatttgaaggaaaacctcatcagggaatatgtgaagcagacatggaacctgcaggtgggccacagctggtcctgctccctgggcccagggggccctgtgaccccacacagacttcctggctacatgcaacacatgtgcctatgtgccctgtgtgcccaaataacacaaccatctccttaagcatcaattttggccaaaaaatgcctctctctgataagagcctttcctctttcacagccacagctgagagggtgggtccctttgtgccagcagtgtgggtttctccacagcagggaaccactgttacccagtgcaaggagggccttttcagagaggcattgataggtgttgattggtttctgtttatctgacaaggtcctaccatacacactgataggcacttgattttatggcttcctaatatctcttgcagaactttctgtgtcaacactcatatagttgcatcacccgttctttggctatctggtatcacctgctatgcaccacaatttatttaactagtacctattgatggacacatttgctgtttatgaataaacgctgctaacaac

SEQ ID NO: 7630 - protein, 109 aa, Homo sapiens
MEPAGGPQLVLLPGPRGPCDPTQTSWLHATHVPMCPVCPNNTTISLSINFGQKMPLSDKSLSSFTATAERVGPFVPAVWVSPQQGTTVTQCKEGLFREALIGVDWFLFI

SEQ ID NO: 7631 - DNA, 935 bp, Homo sapiens
aagaagaggttgttctcacagtggggaggtttcagcacagccacctgctgaggccacagagaacctagatatgtgtcctgtaccctggccagctgccctgagctgtggggtgctgtgcatggccaagcaccgctagaaaagacacttattctgaatttcactcctcccatgccatcgttcagctttcaagtcttgggttagctttttgagataagtctccatggcaagggacaggaaagcatggccatgtccagttctgaaggccatctcaactctccctgtggtcgtgtatctgacttcttgcaaccaggaggaggcatcagaaatttccccagtacccagacgtcccaaggcagttgggcacacttgaactctgccccaagtacagtgcatttgggcacgtggcttaacaattttggacctcagcttcctcattttagaaaatgcaggggccaaagaggcttcctgggacttcatgactcaccctcagaacctaagatctcatgaaccaaagggctgcagctgtggagaggggagaatggggcagtgtgtgtgactacgaagctaaactgggggattcgcacccatttcgtgccttttcagcctccactgggacctcgaactccccaagtcccacaggtcttccaggggatctctcacctccccatgagtcataagccttacgtggcatgcactgcagtgggggtgttgttccctgcctggcatcagactcctgtgtttctgttcaccaggacccagggcagggggttgttctgagggtcgcccacactccaagctaggtggtagagctgtccatcttggatctaacccaaatgcaggccctggtgaagaaaggtgagtccacagtgctccacagataatcagggcccgtggtgcccctgtgctcatcaccctgagaagcgtcactgctactg

SEQ ID NO: 7632 - protein, 36 aa, Homo sapiens [sequence omitted]

SEQ ID NO: 7633 - DNA, 5577 bp, Homo sapiens
caggccgccggcccgggagagcgcgcggcggcggcggcggcgggacggccccgagcgcgccctcccgcctgcggccactcgcagccggcgctggccgggccggcgcgccccgcaggcggctagagcgcggcctcggcctcggcgcgggcttgccccgggccgtagcccgcgagaggcggcgcgggcggccgagggcactgacggcgtcgcgggacgctcccgggcggcggcgcagcggcagcggcagcggcagcggcagcgcagggggcggaggcagggggcgcccccagccaggatgctgcggttcctgcgccggacctttggccgccgctccatgcagcgctacgcgcggggcgcggcggggcgcggggccgccgggctgggggacgagcgcgatggggggccacgggggggcccggccgccgccgcctcctcctcggcgctgcccgccgcgcccgggggcagcgtgttcccggcgggcggcgggcccctgctcaccggcggcgcggccgtgcacatctccgccgccggcgccgccaaggccaccctctactgccgcgtcttcctgctcgacgggaccgaagtgagcgtggacctgccgaaacatgccaaaggccaggatttgtttgatcagattgtgtaccacttggaccttgtggaaacagattactttggcctccagttcctcgactctgcccaggttgcgcactggctggatcatgccaaacccataaaaaagcagatgaaaattggacctgcttatgctttacactttcgagttaaatactattcttcagaaccaaacaaccttcgtgaggagtttacaaggtacctgtttgttttacaactcaggcatgacattctttctggaaaattgaaatgcccttatgaaacagctgtggaattagctgctctctgtctacaagcggagcttggggagtgcgagcttccagaacacacaccagagcttgtgtctgagtttcggttcattccaaatcagacagaagcaatggaatttgatatcttccagagatggaaagagtgcaggggaaagagccctgcccaggcggaactctcctatctgaataaagcgaagtggctggaaatgtatggggtagacatgcacgttgtcaggggaagagatggctgtgaatattctcttggactgaccccgacaggcatattaatctttgaaggagctaacaaaataggcttattcttttggcctaaaattaccaaaatggattttaaaaagagcaaattgacactcgtggtggtcgaggatgatgatcagggacgtgagcaagagcacacgtttgtgttccggttagacagtgccaggacctgcaaacacctttggaagtgtgcagttgagcaccacgcattcttccgactgcggacgccaggaaacagcaaatccaatagatccgactttatcaggctgggctctcgcttcagattcagtgggcggacagaatatcaagctacacatggctccaggttacgaagaaccagcacctttgagaggaagcctagtaaacgttatccatcccggagacattcaacgttcaaagcaagcaacccagtgatagcagcccagctctgctctaaaacaaatccagaagtccataattaccagcctcaatatcatcctaatatccatcccagccagccccggtggcatcctcactctccaaatgtcagctacccgctcccttccccagtgcttagcagctcggaccggttgccttttggcattgaggagaatgggggcacaccgttcctcaccgcagcttcaggaaggcatcaccaccagcaccagcatcagcatcagcaccagcaccactcaaactacagcctctcactgaccctggagaacaaagaggggcctctgaggtccccaaactccagcagcaagtcccttacaaaactgagtccaggaacacctgccttgttcagtgaagccgctgcccatctaaagaagctggaactggaaactgtgaaggctgctggaccctggcctcctctgcacatcaacataaacaaggctgaagaaaagaaagtctcggagaaaactcttcagactccacttttgccttcccctgttgcggatcatgtgaagtgtaacattctgaaagcccagttggaaaatgcttcccgagtgaacatccagggtggaaaggaggaatcaccgtttgtaaatatcaataagaaatccagtcttcaggacgctagtgtaagaagtcctattcctattcgtgtggaaactgcccagccagctgtggaaaagccggaaatcaagcctccccgagtgaggaagttaacaagacagtatagttttgatgaagacgacctccctccagacctggccgaggcagtgggagtgaccacatctacaaccacaaacaccacaacggccgccacacaagtctccgtgccgctgccgtcccccaaggtccagaatgtcagctcgcctcacaagtcagaaggcaaaggcctgctgtcccctggggccaagagcccctctgaccgaggaggtgcctttaccctggagccgggtgatcttctgatggatttcacagaagccactcctctggcagagcccgccagcaacccccactgtgcccactctcgctgttctcctccactctctctccccatgaaggaagagaccactggagtttgcatgtaccctccaatcaaaacgaggctgataaaaacattcccggttgatacaatgaacccgtttcctgatactttcaccacagggccacagtttactgcagacttcagagacagtaaattacagtgctgtcctggcccgacttccccgctgatcccagcagcgaccctgaggcctttgacagagaccgtctccacagtgcagaccatttacaccacccggaaacctgtttctctggcagccagtgcagagacactccggcaggaactggagagagagaagatgatgaaaagactgttgatgaccgaactgtgaaattctccccttgtcacctggaagatggcatggtgccttctgtccgtcttctttcttcgggctttgtgtgctcactctagcacagcatacaagtgtgtgctctgttcgcccaggtctccatggttagttgaagccaatttctggcttgacttttatgggaaaagttattttatgtctcctaagcattagagtttttctattactctatgtagttgagacaggatttgataagtctaggaaaagaaagatgggaaaacgggattccttttcagaagtacctgtgtgtatctgttaataaccacaggggttaatatgatgtaggatcttttactatcaatttcaaccatttgattttgtatgattgaaacttgcaccgagctttgactgtttgttaaagagtcatttttaatgaaagaataattctttattgctggtttttcatttacactgataaatacacagatcttataaagtctttaacattcatttgtattcagatgtgagtagaagaactaaaaaaagaaagttacatatcactatgactgaaggtacttcagcttaatctgaaatataatttaacttgtgaactccttggatatgatattatttggaataaacagaatttatcattgaacccaaagtaggaaatgatagcttacattgtctaaaaatccttacaaggttaagatgattcaatatcaagaagattcagaaaattatttctaaagttgatcgattcatgtcgtattgatagaatcttgaccagaagaaattttgctctttttatatagtttcaagaaatgtgtttttaaatttttattaatgcacttgaacaactttgcaggaataaagcaaccccctaaccacaaaatatccctctaaattagttccctagctttctcaatgaatacacacatatttttacatagctatgatcgttgtgtacattctcctttgttttacttctcggcctaacacttgtctcctcttgtcaacacagattctactctcaccaatttaaatgtctttatatccatgtaacatgggtaacctcacttcaccccattattagatatttgagttatatctaatttttcactcttataaatagtgctgctatgaatgtctgtaaaaaaaaaaaactgctccttcttttggattattcccttaggaatatctccaaagagggattacaaggtcaaagagcatgaagtattttatagctcttgttttatattgccagattgctttctagaaagatccaatctttgggttggaaggaccttaaaggtcatctagtttagcctccccaccccctctgaatgcttgaatcccctcgacaatttatgatgccaccagcaatgtataagcatttctgtttaccaatagctctgccagtattgggttttgccatttttatttatttttgctagtttaataggtatgtatagttgttcttgaagagttgttttatttcattaattgctagcaaggctgagcacttttccatgtgatgatttactagttgtatttccttgtgtgtaaaatgttcattcatttcttatgaccacttgttaagaggaactgatctcatatatttgtatcagaactgtatttttatgttatattgtatagtttgctctcctgcccctctccttaaaactgaatggtgccaataatttgatactaatgactacaaaaaaaggtaatgcctcatttactagtattgttgtaaaatgaggaatgtatgtgaatattcagataaccgaggattaaccctttaagtgctgaatctttaaaattttaatatatttttttttgagggaaatctttctaaaatgtattacgcacttccctgccttagtaaacagagtatactggagagtatttaaccttttcttgatgagtcatggtcatgattataaacatcagccccttttataccttggtacggtgcagtgatatcattaagagctatcaatatgtgtagggcttggcttggccttttataggatattatgctgttctcactgatggttttttactgctctctgctctgtcagtggagctatccggggcaattgtagcgtttgggtccttttacccctatgtcccccggctatacttttaaaacagctttagctgttctttatcttgtgcacatgatacaaaatatgttcccgtacaatatggggctgtcacttcttgccaacccagcaccctcttcctcttctaacctgctttctgaggcttctgctcttcacctcctgctcgctgatggaaacctccagggcaaagctgaaggtttcttggggaagccaggaaagccagtatttcctatgtgtcagatctgcttggcttccaagaagggatgcatgggctttttggccagtgtttccaggaggctctgggcttcctgcttcttccccgcttcccccagagttcacagatgttgaagtttctgaaggttgacgtcactggaagtctgaccacaaacaagttggctgttactgtatttgaaacccagtacctttggcagctcacctctaaccagtaaaataagaggattccatggtttc

SEQ ID NO: 7634 - protein, 900 aa, Homo sapiens; identical to SEQ ID NO: 1106

SEQ ID NO: 7635 - DNA, 2888 bp, Homo sapiens
cagggtctgtgattcttttccccctccctcttttctctcccttatttcactgacttttttccagccagagttctagcatcttctttgtcaagcttttaatgattttccctgccacatctatccttttaaaaacaaaatggagtgtaagcggctaagctgtacctcattcccagggctctgtccatgcaggccctcacggcgtccccgaggcccctcagtccagacccatgcttatattgcatccctgatcaccgtgtgctgttttcccttttacccacttctctgtatctgcctttctctgtctctagacagggaacttcttgagagcagagactgtgtctctttgtccctgcctcccagagcgcccagccctgggaacctgctgagtggatggttgctgagtgaatcagagggaggggtagtttactctccctgaggaaaggagaagtagccaccatgcagttctgcctgggttggagttggaaaggctctgtgatggtagaagtctcgcatggccattatctgtcattgcatggtgaaagcgataaagttctctaagatgtcataactttctgtttttcctttatagcaagcaacccagtgatagcagcccagctctgctctaaaacaaatccagaagtccataattaccagcctcaatatcatcctaatatccatcccagccagccccggtggcatcctcactctccaaatgtcagctttctccagacggacttgacccatgagacaccctttgagaaatgatgacttgaccatagacagacccttgctctgcttggaagttcataggccatcctttcaggatgacaggtcgcattggaaagcatcggccagtggagatgacagccattttgattatgtccacgaccagaaccagaagaacttaggagggatgcaaagtatgatgtatcgagataaactcatgactgcactttgagagactgaagcatctctcttccattcaccttcatagtttcattgcattccatgaaaagtgtcttggcctcagatggatggatgtgtttggacgagtgtctttaaggagtagtcctgaaaggtgtttttggtgtccatgtaaatatttgaagataaaaccactatagcttgtcataatttactgttgactgcattctcattaaaatgaaggtaaaggctcaggaatcatattgatgttctgattttaaaattggagtcaaagtctatgtttatcattttactatgttcctgatgttctttgttatttaattaatgggagcaaataaaaccagaagagcttgggaagattgctcagcatatattcctgtcgtagaagttgagattgctagggtccagtttccctagtgtggcctggacgagtcatttccccttcattgacctcattttccccatctgaaaagagagggttggactaagtgatctccaaggtcctttccaactctaaaattctgcaatttgttaacatttcattttgtttaggttgaggacatacattcaaactaattttatcacaaggaaaactgcaatacccacttccttgacagagttactcctttcagaagctaaataaagtatataacttattagatgttatatagatacagggggactttgaatttcacatcttaaagcagttgagctactttgaatttaagcagtcgtactaatcttaaattgcatagcatttgttttgatcgaatttgctgctcaagtatgggaataatttttaatgtcttaatgattggtgctgctaacttgcgtgatttcagaagacataattgtgaatacacactgtcagaattgggggattggtttttaccctagacttcactcttaaaaagcaacgtgcaatcaagatcatttatggctcaaatgaaagcatataaggttttcttgaagttgtgccaaagcattctgtagagtaggatgagatggttgttgccctagtctgttggtagaaccagaaatcaatatgttgtcttttaggttaaagcttgtaccaaaatatttatttcccccatttcaagccctgagtcaaacatttttttctcttaataatagacctgaaatgttttattagtatttctgtgaaatcagttgattcttgtgccatttttgtatatgtaattgtaattttgcccatgttaggccctctaaaaaatgtttgacatcctttgagatattttattactaaaatctgatcttttttggctactgcaaaaatctattcagcaagaaggtatcagctgcataccttgcacagtggagctgactacctataaactctccctaaggcatttgtttacaggtgtattccattttagcagacgttctgatgctcagtgtatgtgctgcatacaaataaatgtgttctgaatcttttcatcttattgatagcatttttacaaatgtgtttccaaggaataaagattattcttgctttttttttgactccatcttcattttttttaaattgattcttgttgctatgcagaagtctcatttgtgaatgaccttggtaacagaacagttggcttttggaagtctgaaggtgagcattcagttaggtgggtggagcaagatcatcctagaatgaggctgctcttggcaagagtggatcttataggcacagcagctgatgcctttcttcatctggggcaactctggtgaaggttgtcctgcctgtcacaggtgctgagtagagagaagtggtggcagtgggatttcctcagtaatagtcctgtaaaggtacgtgtttgtcctggctacttgtgctcttcctggcaggaaggcatccaaacccttatctgtgggctcctggaaattgtgtatgccatataataccctctaataaatacctctctgcttaa

SEQ ID NO: 7636 - protein, 71 aa, Homo sapiens
MRHPLRNDDLTIDRPLLCLEVHRPSFQDDRSHWKASASGDDSHFDYVHDQNQKNLGGMQSMMYRDKLMTAL

SEQ ID NO: 7637 - DNA, 4005 bp, Homo sapiens
ggaaaaggcgccttgggagcgggcgctcggcggggcctcctcgggccccgggcgcggcgcggcgagtgggagcgagcgcgccaggaccacgcaggcgccctgctccggctggccctcggccggcgcgcggcgcgggagcagcccgcagcccgcctcccgcgcccccggcagccccctggcagcccgcagccgcccgtccggagcagcccctcggcagcccgcgcaggccgccggcccgggagagcgcgcggcggcggcggcggcgggacggccccgagcgcgccctcccgcctgcggccactcgcagccggcgctggccgggccggcgcgccccgcaggcggctagagcgcggcctcggcctcggcgcgggcttgccccgggccgtagcccgcgagaggcggcgcgggcggccgagggcactgacggcgtcgcgggacgctcccgggcggcggcgcagcggcagcggcagcggcagcggcagcgcagggggcggaggcagggggcgcccccagccaggatgctgcggttcctgcgccggacctttggccgccgctccatgcagcgctacgcgcggggcgcggcggggcgcggggccgccgggctgggggacgagcgcgatggggggccacgggggggcccggccgccgccgcctcctcctcggcgctgcccgccgcgcccgggggcagcgtgttcccggcgggcggcgggcccctgctcaccggcggcgcggccgtgcacatctccgccgccggcgccgccaaggccaccctctactgccgcgtcttcctgctcgacgggaccgaagtgagcgtggacctgccgaaacatgccaaaggccaggatttgtttgatcagattgtgtaccacttggaccttgtggaaacagattactttggcctccagttcctcgactctgcccaggttgcgcactggctggatcatgccaaacccataaaaaagcagatgaaaattggacctgcttatgctttacactttcgagttaaatactattcttcagaaccaaacaaccttcgtgaggagtttacaaggtacctgtttgttttacaactcaggcatgacattctttctggaaaattgaaatgcccttatgaaacagctgtggaattagctgctctctgtctacaagcggagcttggggagtgcgagcttccagaacacacaccagagcttgtgtctgagtttcggttcattccaaatcagacagaagcaatggaatttgatatcttccagagatggaaagagtgcaggggaaagagccctgcccaggcggaactctcctatctgaataaagcgaagtggctggaaatgtatggggtagacatgcacgttgtcaggggaagagatggctgtgaatattctcttggactgaccccgacaggcatattaatctttgaaggagctaacaaaataggcttattcttttggcctaaaattaccaaaatggattttaaaaagagcaaattgacactcgtggtggtcgaggatgatgatcagggacgtgagcaagagcacacgtttgtgttccggttagacagtgccaggacctgcaaacacctttggaagtgtgcagttgagcaccacgcattcttccgactgcggacgccaggaaacagcaaatccaatagatccgactttatcaggctgggctctcgcttcagattcagtgggcggacagaatatcaagctacacatggctccaggttacgaagaaccagcacctttgagaggaagcctagtaaacgttatccatcccggagacattcaacgttcaaagcaagcaacccagtgatagcagcccagctctgctctaaaacaaatccagaagtccataattaccagcctcaatatcatcctaatatccatcccagccagccccggtggcatcctcactctccaaatgtcaggccatcctttcaggatgacaggtcgcattggaaagcatcggccagtggagatgacagccattttgattatgtccacgaccagaaccagaagaacttaggagggatgcaaagtatgatgtatcgagataaactcatgactgcactttgagagactgaagcatctctcttccattcaccttcatagtttcattgcattccatgaaaagtgtcttggcctcagatggatggatgtgtttggacgagtgtctttaaggagtagtcctgaaaggtgtttttggtgtccatgtaaatatttgaagataaaaccactatagcttgtcataatttactgttgactgcattctcattaaaatgaaggtaaaggctcaggaatcatattgatgttctgattttaaaattggagtcaaagtctatgtttatcattttactatgttcctgatgttctttgttatttaattaatgggagcaaataaaaccagaagagcttgggaagattgctcagcatatattcctgtcgtagaagttgagattgctagggtccagtttccctagtgtggcctggacgagtcatttccccttcattgacctcattttccccatctgaaaagagagggttggactaagtgatctccaaggtcctttccaactctaaaattctgcaatttgttaacatttcattttgtttaggttgaggacatacattcaaactaattttatcacaaggaaaactgcaatacccacttccttgacagagttactcctttcagaagctaaataaagtatataacttattagatgttatatagatacagggggactttgaatttcacatcttaaagcagttgagctactttgaatttaagcagtcgtactaatcttaaattgcatagcatttgttttgatcgaatttgctgctcaagtatgggaataatttttaatgtcttaatgattggtgctgctaacttgcgtgatttcagaagacataattgtgaatacacactgtcagaattgggggattggtttttaccctagacttcactcttaaaaagcaacgtgcaatcaagatcatttatggctcaaatgaaagcatataaggttttcttgaagttgtgccaaagcattctgtagagtaggatgagatggttgttgccctagtctgttggtagaaccagaaatcaatatgttgtcttttaggttaaagcttgtaccaaaatatttatttcccccatttcaagccctgagtcaaacatttttttctcttaataatagacctgaaatgttttattagtatttctgtgaaatcagttgattcttgtgccatttttgtatatgtaattgtaattttgcccatgttaggccctctaaaaaatgtttgacatcctttgagatattttattactaaaatctgatcttttttggctactgcaaaaatctattcagcaagaaggtatcagctgcataccttgcacagtggagctgactacctataaactctccctaaggcatttgtttacaggtgtattccattttagcagacgttctgatgctcagtgtatgtgctgcatacaaataaatgtgttctgaatcttttcatcttattgatagcatttttacaaatgtgtttccaaggaataaagattattcttgctttttttttgactccatcttcattttttttaaattgattcttgttgctatgcagaagtctcatttgtgaatgaccttggtaacagaacagttggcttttggaagtctgaaggtgagcattcagttaggtgggtggagcaagatcatcctagaatgaggctgctcttggcaagagtggatcttataggcacagcagctgatgcctttcttcatctggggcaactctggtgaaggttgtcctgcctgtcacaggtgctgagtagagagaagtggtggcagtgggatttcctcagtaatagtcctgtaaaggtacgtgtttgtcctggctacttgtgctcttcctggcaggaaggcatccaaacccttatctgtgggctcctggaaattgtgtatgccatataataccctctaataaatacctctctgcttaa

SEQ ID NO: 7638 - protein, 518 aa, Homo sapiens; identical to SEQ ID NO: 1104

SEQ ID NO: 7639 - DNA, 2468 bp, Homo sapiens
cagggtctgtgattcttttccccctccctcttttctctcccttatttcactgacttttttccagccagagttctagcatcttctttgtcaagcttttaatgattttccctgccacatctatccttttaaaaacaaaatggagtgtaagcggctaagctgtacctcattcccagggctctgtccatgcaggccctcacggcgtccccgaggcccctcagtccagacccatgcttatattgcatccctgatcaccgtgtgctgttttcccttttacccacttctctgtatctgcctttctctgtctctagacagggaacttcttgagagcagagactgtgtctctttgtccctgcctcccagagcgcccagccctgggaacctgctgagtggatggttgctgagtgaatcagagggaggggtagtttactctccctgaggaaaggagaagtagccaccatgcagttctgcctgggttggagttggaaaggctctgtgatggtagaagtctcgcatggccattatctgtcattgcatggtgaaagcgataaagttctctaagatgtcataactttctgtttttcctttatagcaagcaacccagtgatagcagcccagctctgctctaaaacaaatccagaagtccataattaccagcctcaatatcatcctaatatccatcccagccagccccggtggcatcctcactctccaaatgtcagctttctccagacggacttgacccatgagacaccctttgagaaatgatgacttgaccatagacagacccttgctctgcttggaagttcataggccatcctttcaggatgacaggtcgcattggaaagcatcggccagtggagatgacagccattttgattatgtccacgaccagaaccagaagaacttaggagggatgcaaagtatgatgtatcgagataaactcatgactgcactttgagagactgaagcatctctcttccattcaccttcatagtttcattgcattccatgaaaagtgtcttggcctcagatggatggatgtgtttggacgagtgtctttaaggagtagtcctgaaaggtgtttttggtgtccatgtaaatatttgaagataaaaccactatagcttgtcataatttactgttgactgcattctcattaaaatgaaggtaaaggctcaggaatcatattgatgttctgattttaaaattggagtcaaagtctatgtttatcattttactatgttcctgatgttctttgttatttaattaatgggagcaaataaaaccagaagagcttgggaagattgctcagcatatattcctgtcgtagaagttgagattgctagggtccagtttccctagtgtggcctggacgagtcatttccccttcattgacctcattttccccatctgaaaagagagggttggactaagtgatctccaaggtcctttccaactctaaaattctgcaatttgttaacatttcattttgtttaggttgaggacatacattcaaactaattttatcacaaggaaaactgcaatacccacttccttgacagagttactcctttcagaagctaaataaagtatataacttattagatgttatatagatacagggggactttgaatttcacatcttaaagcagttgagctactttgaatttaagcagtcgtactaatcttaaattgcatagcatttgttttgatcgaatttgctgctcaagtatgggaataatttttaatgtcttaatgattggtgctgctaacttgcgtgatttcagaagacataattgtgaatacacactgtcagaattgggggattggtttttaccctagacttcactcttaaaaagcaacgtgcaatcaagatcatttatggctcaaatgaaagcatataaggttttcttgaagttgtgccaaagcattctgtagagtaggatgagatggttgttgccctagtctgttggtagaaccagaaatcaatatgttgtcttttaggttaaagcttgtaccaaaatatttatttcccccatttcaagccctgagtcaaacatttttttctcttaataatagacctgaaatgttttattagtatttctgtgaaatcagttgattcttgtgccatttttgtatatgtaattgtaattttgcccatgttaggccctctaaaaaatgtttgacatcctttgagatattttattactaaaatctgatcttttttggctactgcaaaaatctattcagcaagaaggtatcagctgcataccttgcacagtggagctgactacctataaactctccctaaggcatttgtttacaggtgtattccattttagcagacgttctgatgctcagtgtatgtgctgcatacaaataaatgtgttctgaatcttttcatcttattgatagcatttttacaaatgtgtttccaaggaataaagattattcttgctttttttttg

SEQ ID NO: 7640 - protein, 71 aa, Homo sapiens; identical to SEQ ID NO: 7636

SEQ ID NO: 7641 - DNA, 3065 bp, Homo sapiens
ctgtaaaagcctaccggggttagttattaacctgcagcgcactcttgacagcccattccatggcatttcaccgactggagtccttttattgctcttgcctgctggggcctgagacccaaggcccatatcacctctgctcagtcggttacaatctgtattgagtggcatcagcactgctttgatggtagcaagaatggctggttaaagtccagggaggggcccaagctggcttggaactggcccaggtcatgcacacagccagcagtgacacatccaatgggacactccaggatgaaacctgagaaaggaggtctgggatatgggatattgtaatgggagagcaggaaatttaaggtcggaggtatttgtttaggatacctcagtattctagagctatgggatttattttgctttgaagtccagaggtatttagctttattctaaaagcgatgaagttcctcttaattaaagacgctcctggaaaaaaaaaaaggaaaaatttaatgctgtcttttaaaagggcactggctggatcatgccaaacccataaaaaagcagatgaaaattggacctgcttatgctttacactttcgagttaaatactattcttcagaaccaaacaaccttcgtgaggagtttacaaggtacctgtttgttttacaactcaggcatgacattctttctggaaaattgaaatgcccttatgaaacagctgtggaattagctgctctctgtctacaagcggagcttggggagtgcgagcttccagaacacacaccagagcttgtgtctgagtttcggttcattccaaatcagacagaagcaatggaatttgatatcttccagagatggaaagagtgcaggggaaagagccctgcccaggcggaactctcctatctgaataaagcgaagtggctggaaatgtatggggtagacatgcacgttgtcaggggaagagatggctgtgaatattctcttggactgaccccgacaggcatattaatctttgaaggagctaacaaaataggcttattcttttggcctaaaattaccaaaatggattttaaaaagagcaaattgacactcgtggtggtcgaggatgatgatcagggacgtgagcaagagcacacgtttgtgttccggttagacagtgccaggacctgcaaacacctttggaagtgtgcagttgagcaccacgcattcttccgactgcggacgccaggaaacagcaaatccaatagatccgactttatcaggctgggctctcgcttcagattcagtgggcggacagaatatcaagctacacatggctccaggttacgaagaaccagcacctttgagaggaagcctagtaaacgttatccatcccggagacattcaacgttcaaagcaagcaacccagtgatagcagcccagctctgctctaaaacaaatccagaagtccataattaccagcctcaatatcatcctaatatccatcccagccagccccggtggcatcctcactctccaaatgtcaggccatcctttcaggatgacaggtcgcattggaaagcatcggccagtggagatgacagccattttgattatgtccacgaccagaaccagaagaacttaggagggatgcaaagtatgatgtatcgagataaactcatgactgcactttgagagactgaagcatctctcttccattcaccttcatagtttcattgcattccatgaaaagtgtcttggcctcagatggatggatgtgtttggacgagtgtctttaaggagtagtcctgaaaggtgtttttggtgtccatgtaaatatttgaagataaaaccactatagcttgtcataatttactgttgactgcattctcattaaaatgaaggtaaaggctcaggaatcatattgatgttctgattttaaaattggagtcaaagtctatgtttatcattttactatgttcctgatgttctttgttatttaattaatgggagcaaataaaaccagaagagcttgggaagattgctcagcatatattcctgtcgtagaagttgagattgctagggtccagtttccctatgttaacatttcattttgtttaggttgaggacatacattcaaactaattttatcacaaggaaaactgcaatacccacttccttgacagagttactcctttcagaagctaaataaagtatataacttattagatgttatatagatacagggggactttgaatttcacatcttaaagcagttgagctactttgaatttaagcagtcgtactaatcttaaattgcatagcatttgttttgatcgaatttgctgctcaagtatgggaataatttttaatgtcttaatgattggtgctgctaacttgcgtgatttcagaagacataattgtgaatacacactgtcagaattgggggattggtttttaccctagacttcactcttaaaaagcaacgtgcaatcaagatcatttatggctcaaatgaaagcatataaggttttcttgaagttgtgccaaagcattctgtagagtaggatgagatggttgttgccctagtctgttggtagaaccagaaatcaatatgttgtcttttaggttaaagcttgtaccaaaatatttatttcccccatttcaagccctgagtcaaacatttttttctcttaataatagacctgaaatgttttattagtatttctgtgaaatcagttgattcttgtgccatttttgtatatgtaattgtaattttgcccatgttaggccctctaaaaaatgtttgacatcctttgagatattttattactaaaatctgatcttttttggctactgcaaaaatctattcagcaagaaggtatcagctgcataccttgcacagtggagctgactacctataaactctccctaaggcatttgtttacaggtgtattccattttagcagacgttctgatgctcagtgtatgtgctgcatacaaataaatgtgttctgaatcttttcatcttattgatagcatttttacaaatgtgtttccaaggaataaagattattcttgctttttttttg

SEQ ID NO: 7642 - protein, 369 aa, Homo sapiens [sequence omitted]

SEQ ID NO: 7643 - DNA, 3585 bp, Homo sapiens
ggaaaaggcgccttgggagcgggcgctcggcggggcctcctcgggccccgggcgcggcgcggcgagtgggagcgagcgcgccaggaccacgcaggcgccctgctccggctggccctcggccggcgcgcggcgcgggagcagcccgcagcccgcctcccgcgcccccggcagccccctggcagcccgcagccgcccgtccggagcagcccctcggcagcccgcgcaggccgccggcccgggagagcgcgcggcggcggcggcggcgggacggccccgagcgcgccctcccgcctgcggccactcgcagccggcgctggccgggccggcgcgccccgcaggcggctagagcgcggcctcggcctcggcgcgggcttgccccgggccgtagcccgcgagaggcggcgcgggcggccgagggcactgacggcgtcgcgggacgctcccgggcggcggcgcagcggcagcggcagcggcagcggcagcgcagggggcggaggcagggggcgcccccagccaggatgctgcggttcctgcgccggacctttggccgccgctccatgcagcgctacgcgcggggcgcggcggggcgcggggccgccgggctgggggacgagcgcgatggggggccacgggggggcccggccgccgccgcctcctcctcggcgctgcccgccgcgcccgggggcagcgtgttcccggcgggcggcgggcccctgctcaccggcggcgcggccgtgcacatctccgccgccggcgccgccaaggccaccctctactgccgcgtcttcctgctcgacgggaccgaagtgagcgtggacctgccgaaacatgccaaaggccaggatttgtttgatcagattgtgtaccacttggaccttgtggaaacagattactttggcctccagttcctcgactctgcccaggttgcgcactggctggatcatgccaaacccataaaaaagcagatgaaaattggacctgcttatgctttacactttcgagttaaatactattcttcagaaccaaacaaccttcgtgaggagtttacaaggtacctgtttgttttacaactcaggcatgacattctttctggaaaattgaaatgcccttatgaaacagctgtggaattagctgctctctgtctacaagcggagcttggggagtgcgagcttccagaacacacaccagagcttgtgtctgagtttcggttcattccaaatcagacagaagcaatggaatttgatatcttccagagatggaaagagtgcaggggaaagagccctgcccaggcggaactctcctatctgaataaagcgaagtggctggaaatgtatggggtagacatgcacgttgtcaggggaagagatggctgtgaatattctcttggactgaccccgacaggcatattaatctttgaaggagctaacaaaataggcttattcttttggcctaaaattaccaaaatggattttaaaaagagcaaattgacactcgtggtggtcgaggatgatgatcagggacgtgagcaagagcacacgtttgtgttccggttagacagtgccaggacctgcaaacacctttggaagtgtgcagttgagcaccacgcattcttccgactgcggacgccaggaaacagcaaatccaatagatccgactttatcaggctgggctctcgcttcagattcagtgggcggacagaatatcaagctacacatggctccaggttacgaagaaccagcacctttgagaggaagcctagtaaacgttatccatcccggagacattcaacgttcaaagcaagcaacccagtgatagcagcccagctctgctctaaaacaaatccagaagtccataattaccagcctcaatatcatcctaatatccatcccagccagccccggtggcatcctcactctccaaatgtcaggccatcctttcaggatgacaggtcgcattggaaagcatcggccagtggagatgacagccattttgattatgtccacgaccagaaccagaagaacttaggagggatgcaaagtatgatgtatcgagataaactcatgactgcactttgagagactgaagcatctctcttccattcaccttcatagtttcattgcattccatgaaaagtgtcttggcctcagatggatggatgtgtttggacgagtgtctttaaggagtagtcctgaaaggtgtttttggtgtccatgtaaatatttgaagataaaaccactatagcttgtcataatttactgttgactgcattctcattaaaatgaaggtaaaggctcaggaatcatattgatgttctgattttaaaattggagtcaaagtctatgtttatcattttactatgttcctgatgttctttgttatttaattaatgggagcaaataaaaccagaagagcttgggaagattgctcagcatatattcctgtcgtagaagttgagattgctagggtccagtttccctagtgtggcctggacgagtcatttccccttcattgacctcattttccccatctgaaaagagagggttggactaagtgatctccaaggtcctttccaactctaaaattctgcaatttgttaacatttcattttgtttaggttgaggacatacattcaaactaattttatcacaaggaaaactgcaatacccacttccttgacagagttactcctttcagaagctaaataaagtatataacttattagatgttatatagatacagggggactttgaatttcacatcttaaagcagttgagctactttgaatttaagcagtcgtactaatcttaaattgcatagcatttgttttgatcgaatttgctgctcaagtatgggaataatttttaatgtcttaatgattggtgctgctaacttgcgtgatttcagaagacataattgtgaatacacactgtcagaattgggggattggtttttaccctagacttcactcttaaaaagcaacgtgcaatcaagatcatttatggctcaaatgaaagcatataaggttttcttgaagttgtgccaaagcattctgtagagtaggatgagatggttgttgccctagtctgttggtagaaccagaaatcaatatgttgtcttttaggttaaagcttgtaccaaaatatttatttcccccatttcaagccctgagtcaaacatttttttctcttaataatagacctgaaatgttttattagtatttctgtgaaatcagttgattcttgtgccatttttgtatatgtaattgtaattttgcccatgttaggccctctaaaaaatgtttgacatcctttgagatattttattactaaaatctgatcttttttggctactgcaaaaatctattcagcaagaaggtatcagctgcataccttgcacagtggagctgactacctataaactctccctaaggcatttgtttacaggtgtattccattttagcagacgttctgatgctcagtgtatgtgctgcatacaaataaatgtgttctgaatcttttcatcttattgatagcatttttacaaatgtgtttccaaggaataaagattattcttgctttttttttg

SEQ ID NO: 7644 - protein, 518 aa, Homo sapiens; identical to SEQ ID NO: 1104

SEQ ID NO: 7645 - DNA, 3210 bp, Homo sapiens
cctctgcactcccagcctcctggccccttctgtacatgatttccttgtggccactccatgcatttttcttggctcaggacttagtgggcctccatgggacttggtacctctacttgttcccttctggaatctgtaactttgtgttccccaccattctttcctttatgaaccgatggtgcaacagcatgactacctgaaattcttagtcactcccagctgctttagtggagggaaaatgcccacagcacaggaaatagtcctgcccttcgagagaggccaggggatgggagcgtgtccagagaagggcgatgggttgatgaagggtggccacagcgcccgggaggaaggggccagaacgctctctgttctgttccatgaggaggattatgctggtgtgtgtagtccactggttcagagttgtccagaaatagctcagtgtaaggaacaattttccaaagatcaaaagagctgtctcaagatagcagtgcgttcccagcccctacaggtgtatacagcacaaagggagggaccccctggtgtggctgtcacagagggaagtggacgtcctgtggtttgaccccaccagatggctttagagatctgggccccagggtctgtgattcttttccccctccctcttttctctcccttatttcactgacttttttccagccagagttctagcatcttctttgtcaagcttttaatgattttccctgccacatctatccttttaaaaacaaaatggagtgtaagcggctaagctgtacctcattcccagggctctgtccatgcaggccctcacggcgtccccgaggcccctcagtccagacccatgcttatattgcatccctgatcaccgtgtgctgttttcccttttacccacttctctgtatctgcctttctctgtctctagacagggaacttcttgagagcagagactgtgtctctttgtccctgcctcccagagcgcccagccctgggaacctgctgagtggatggttgctgagtgaatcagagggaggggtagtttactctccctgaggaaaggagaagtagccaccatgcagttctgcctgggttggagttggaaaggctctgtgatggtagaagtctcgcatggccattatctgtcattgcatggtgaaagcgataaagttctctaagatgtcataactttctgtttttcctttatagcaagcaacccagtgatagcagcccagctctggtgagtgtccttgagctctagagcacagctctcctctctaaggatcgtatttatttgcaatgttgactttttccttactacagtgaaatcaggaagtgtgtcatctggtaatttttttcccctttttctgctgcctggctattccatgctcatggctttcaataagtacacaatataatgttccaagacagtttggtttttttggcaaacacagctgctttgtttgagtagctgtgtgctttgtttatgataacagtgggtgggaaaggtagaggcctgtgcgcagcacactgtgctcatggcgtggcaggcagtgctgggagaggaaggccttgctcgcgagcaaaagctggacgagagcagatgctagatttgctcagtgacgtgcaggttttacatcatagaagacattaaacacctttactgaaattcctgcaggaaaatgaacttatcacaagagtgaaaattgccagcacaggattcagcaaacattttctgtaaagggccacatagtccatgtttgagactttgcaggctctgctgtgtctttcacagctactcacctctgctgttgtagctagagagccgctgtggaaaatatgtaaatgagcgaacgtgactgcattccaataaaactttacttataaatatcagtggaccagatttggcccaaggggtatagtttttgcaggcctcttccctggcacaggtgtccagggtcttgcctgtatagtagaatgatctggtgagcataattatctgaaacatcctccgcagccacaccccaggcgcattgaatcagtctctcagggtgggacccatatagcttgtttttaaagctgcccaggtgagtctgcccggcatataccgctcttgctctctctgaaacaactgcctgtcttatgtgagttttggcttgttgagtagacaagctgtcatgtgagagaaccacagacttgcattgtttggacctttggtctgaactgcagccgctggtaggtaggccaggttcattaggctctcagtcatcccaggcgcaggtctcaaggcggctgagagggtggtctttgagatgggcacagcttgactgtgccatgcactatcagtcaggacagttggcaaaacgtggcacggggtggagcgggttgcagataccccggtgagcgaggagagccctggctgaggcatcaggaaccctccctccaggtaccagctgtgttctaacccagctctggagacttaggccttcctacttctgggcctccgttttcttttttgcaaatcaggaggttgggctagatcagtgtttttccaaactcttttaccctctgattttcaccctctagaagaaacctgatgtcaaagcccaaaatacagaacagacaaatgtggaggtcctccggatgaagccgagtggggagggagaggccagttcctgcctgctcttctgccactcctcccaccccgtagctccagggcaccttcaaggaacccagggttctagagaacacagctggtccctcatattacacagctggaaactcaacctcgcatctctgattccaaatcctactttcagcgtcattctgccttttgtctctgggttttgttctcagcatctgatgaaggggctcaggggtcctgttgaactgctctgtgtcgccccctgccccggagggtgggaggaggttgcagtattctggatgggttagttgtaggtccctagattcaccccatttttaggatccttctggcagatagtatgccaaatggtatctgtacctttcttagcttgtcggggtgtcttgcttttaattctctggggcttgtaagttacagccccaatttctttactttgctctctaaggtagtgattgttttgcttgtttctccctaataaaattacattttcctcccagcatctagtggagattatatattgggaaccaaaacaaactaaaaaaaaaaaaaaaattctgccc

SEQ ID NO: 7646 - protein, 134 aa, Homo sapiens
MVQQHDYLKFLVTPSCFSGGKMPTAQEIVLPFERGQGMGACPEKGDGLMKGGHSAREEGARTLSVLFHEEDYAGVCSPLVQSCPEIAQCKEQFSKDQKSCLKIAVRSQPLQVYTAQREGPPGVAVTEGSGRPVV

SEQ ID NO: 7647 - DNA, 570 bp, Homo sapiens
gcacatctccgccgccggcgccgccaaggccaccctctactgccgcgtcttcctgctcgacgggaccgaagtgagcgtggacctgccgaaacatgccaaaggccaggatttgtttgatcagattgtgtaccacttggaccttgtggaaacagattactttggcctccagttcctcgactctgcccaggttgcgcactggctggatcatgccaaacccataaaaaagcagatgaaaattggacctgcttatgctttacactttcgagttaaatactattcttcagaaccaaacaaccttcgtgaggagtttacaaggtacctgtttgttttacaactcaggcatgacattctttctggaaaattgaaatgcccttatgaaacagctgtggaattagctgctctctgtctacaagcggagcttggggagtgcgagcttccagaacacacaccagagcttgtgtctgagtttcggttcattccaaatcagacagaagcaatggaatttgatatcttccagagatggaaagagtgcagggaagagatggctgtgaatattctcttggactgacc

SEQ ID NO: 7648 - protein, 112 aa, Homo sapiens
MKIGPAYALHFRVKYYSSEPNNLREEFTRYLFVLQLRHDILSGKLKCPYETAVELAALCLQAELGECELPEHTPELVSEFRFIPNQTEAMEFDIFQRWKECREEMAVNILLD

SEQ ID NO: 7649 - DNA, 4576 bp, Homo sapiens
atggccggttgcatacacggggaaactgaggcaccgagcaccccggcccaaggtcactctggctatgccactgcaggggccgggccgaagccccagtctttaaccctccagtcccgagctctttctccttccgcggagctgaggaaagcggcgaggaaggtccttgtcccgctgggaaaaggacggtacccatgcacagggagcccagtctactttcggtccagagaccgtgctggagttcgccctgccggaaagcagcacgccgccgcggcattttacgacgtcggcggtgacaggccctgggactctgggaatacccagcttcctccccgcaacccggtgaaagccaacgcaatgttcggtgcgggggacgaggacgacaccgatttcctctcgccgagcggcggtgccagattggcctcactttttggactggatcaggcagctgctggccatggaaatgaatttttccagtacacagccccaaaacagcctaagaaaggccagggaacggcagcaacaggaaatcaggcaacaccaaaaacagcaccagccaccatgagcactcccacaatactggtcgcaacagcagtccatgcatatcgatacacaaatggtcaatatgtaaagcagggcaaatttggtgctgcagttctggggaaccacacagccagagagtataggattcttctttatatcagtcaacaacagccagttacggttgctaggattcatgtgaactttgagctaatggttcggcccaataactatagcaccttttatgatgaccagagacagaactggtccatcatgtttgagtcggaaaaggctgctgtggagttcaataagcaggtgtgcattgctaagtgcaacagtacctcttccctggatgcagtgctctcccaggacctcattgtggcagacggccctgctgtagaagttggagattctttggaagtggcctataccggctggctctttcagaatcatgtgctgggccaggttttcgactccactgctaacaaagataagttgcttcgcttgaagttaggatcaggaaaagtcatcaagggctgggaggatggaatgctgggcatgaaaaaaggaggaaagcgattgcttattgtccctccagcctgtgctgttggctcagaaggggtaataggctggactcaagcaacggactcgatcctggtgttcgaggtggaggttaggcgggtgaagtttgccagagattctggctctgatggtcacagtgttagttcccgcgattctgcagctccgtctcccatccctggtgctgacaacctctctgctgatcctgttgtgtcaccacccacatcaatacctttcaaatcaggggagccagctcttcgtaccaaatctaactccctcagtgaacaacttgcaataaatacaagtcccgatgcagtcaaagccaagttgatctctcggatggctaaaatgggccagcccatgctgcccatccttccaccacagctggattccaatgattcagaaatcgaagatgtgaacactctgcaaggaggtgggcagcctgtggtgactccgtccgtccagccctctcttcatccggcccatccagcgttaccacagatgacctcacaggcacctcagccatctgttactgggctccaggcaccttctgctgccttaatgcaagtgtcatctctcgattcccactcagctgtatctggaaatgcccaatcctttcagccctatgcaggtatgcaagcctacgcttatccccaggcatctgccgtcacctcccagctgcagcccgttcggcctttgtacccagcaccgctctctcagcctccccatttccaaggatcaggtgatatggcttcatttctcatgactgaagcccggcaacataacactgaaattcgaatggcagtcagcaaagtggctgataaaatggatcatctcatgactaaggttgaagagttacagaaacatagtgctggcaattccatgcttattcctagcatgtcagttacaatggaaacaagcatgattatgagcaacatccagcgaatcattcaggaaaatgaaagattgaagcaagagatccttgaaaagagcaatcggatagaagaacagaatgacaagattagtgaactaattgaacgaaatcagaggtatgttgagcagagtaacctgatgatggagaagaggaacaactcacttcagacagccacagaaaacacacaggcaagagtattgcatgctgaacaagagaaggccaaggtgacagaggagttagcagcggccactgcacaggtctctcatctgcagctgaaaatgactgctcaccaaaaaaaggaaacagagctgcagatgcagctgacagaaagcctgaaggagacagatcttctcaggggccagctcaccaaagtgcaggcaaagctctcagagctccaagaaacctctgagcaagcacagtccaaattcaaaagtgaaaagcagaaccggaaacaactggaactcaaggtgacatccctggaggaggaactgactgaccttcgagttgagaaggagtccttggaaaagaacctctcagaaaggaaaaagaagtcagctcaagagcgttctcaggccgaggaggagatagatgaaattcgcaagtcataccaggaggaattggacaaacttcgacagctcttgaaaaagactcgagtgtccacagaccaagcagctgcagagcagctgtctttagtacaggctgagctacagacccagtgggaagcaaaatgtgaacatttgttggcctccgccaaggatgagcacctgcagcagtaccaggaggtgtgcgcacagagagatgcctaccagcagaagctggtacaacttcaggaaaagtgtttagccctccaggcccaaatcacagctctcaccaagcaaaatgaacagcacatcaaggaactagagaagaacaagtcccagatgtctggggttgaagctgctgcatctgacccctcagagaaggtcaagaagatcatgaaccaggtgttccagtccttacggagagagtttgagctggaggaatcttacaatggcaggaccattctgggaaccatcatgaatacgatcaagatggtgactcttcagctgttaaaccaacaggagcaagagaaggaagagagcagcagtgaagaagaagaagaaaaagcagaagagcggccacgaagaccttcccaggagcagtcagcctcagccagttctgggcagcctcaagcacccctgaatagggagaggccagagtcccccatggtgccctcagagcaggtggtcgaggaagctgtcccgttgcctcctcaggccctcaccacttcccaggatggacacagaaggaaaggggactcagaagctgaggcactctcagagataaaagatggttcccttccacccgaactgtcttgcatcccatcccacagagttctagggcccccgacttcaattccacctgagcccctaggccctgtatccatggactctgagtgtgaggagtcacttgctgccagcccaatggcagctaagcccgacaacccatcaggaaaggtctgtgtcagggaagtagcaccagatggcccactacaagaaagctccacaagactgtccctgacttcagaccccgaggagggggacccactggccttagggcctgaaagcccaggagagcctcagcctccacagctcaagaaagatgatgtcactagctccaccggtccccacaaggagctgtcaagcacagaggcaggttccacagttgcaggagcagccctcagacccagccatcattcccagcgttccagtctctctggggatgaagaggatgaactgtttaaaggggcaactctgaaagctctgaggcccaaagcacagcctgaggaggaggatgaagacgaggtgagcatgaagggacgcccgcccccaacgcccctttttggagatgatgatgatgacgatgacattgactggctgggatgaagacccaggaaactggtgcaaaggtttctctgcaacccttccctaagcatgattttgcacagccaaccctgggtctaggcgaaccacagggtgaggtcaaggtgagcattctgggaacaatatttgggctcagagggtgggttggccaccttctgagccccacccccgccagacctggtgaagaggatcataaccctgtcttcaagaacactgggatttcagcagcaagttggaagaaggactggtaggttcccctccaagccagtcacctgtaagagtcctgtcctctgccagactttttaatctcttcattaactctcagactgacctgggagccctcctctacctgaatccagtgctcaactgtgccccggcaacaagacctgggctgaggtctccctggtagaactaagggagattacaccatctaaatcccagtgcagtcaacagcctggcctatagtcctgggacatgtatcttcttctttgccttaaatctgatacaagaggtcaatgactttgaaaataaaactaaaataaatgtctataatgaaacttgaccc

SEQ ID NO: 7650 - protein, 1337 aa, Homo sapiens
MAGCIHGETEAPSTPAQGHSGYATAGAGPKPQSLTLQSRALSPSAELRKAARKVLVPLGKGRYPCTGSPVYFRSRDRAGVRPAGKQHAAAAFYDVGGDRPWDSGNTQLPPRNPVKANAMFGAGDEDDTDFLSPSGGARLASLFGLDQAAAGHGNEFFQYTAPKQPKKGQGTAATGNQATPKTAPATMSTPTILVATAVHAYRYTNGQYVKQGKFGAAVLGNHTAREYRILLYISQQQPVTVARIHVNFELMVRPNNYSTFYDDQRQNWSIMFESEKAAVEFNKQVCIAKCNSTSSLDAVLSQDLIVADGPAVEVGDSLEVAYTGWLFQNHVLGQVFDSTANKDKLLRLKLGSGKVIKGWEDGMLGMKKGGKRLLIVPPACAVGSEGVIGWTQATDSILVFEVEVRRVKFARDSGSDGHSVSSRDSAAPSPIPGADNLSADPVVSPPTSIPFKSGEPALRTKSNSLSEQLAINTSPDAVKAKLISRMAKMGQPMLPILPPQLDSNDSEIEDVNTLQGGGQPVVTPSVQPSLHPAHPALPQMTSQAPQPSVTGLQAPSAALMQVSSLDSHSAVSGNAQSFQPYAGMQAYAYPQASAVTSQLQPVRPLYPAPLSQPPHFQGSGDMASFLMTEARQHNTEIRMAVSKVADKMDHLMTKVEELQKHSAGNSMLIPSMSVTMETSMIMSNIQRIIQENERLKQEILEKSNRIEEQNDKISELIERNQRYVEQSNLMMEKRNNSLQTATENTQARVLHAEQEKAKVTEELAAATAQVSHLQLKMTAHQKKETELQMQLTESLKETDLLRGQLTKVQAKLSELQETSEQAQSKFKSEKQNRKQLELKVTSLEEELTDLRVEKESLEKNLSERKKKSAQERSQAEEEIDEIRKSYQEELDKLRQLLKKTRVSTDQAAAEQLSLVQAELQTQWEAKCEHLLASAKDEHLQQYQEVCAQRDAYQQKLVQLQEKCLALQAQITALTKQNEQHIKELEKNKSQMSGVEAAASDPSEKVKKIMNQVFQSLRREFELEESYNGRTILGTIMNTIKMVTLQLLNQQEQEKEESSSEEEEEKAEERPRRPSQEQSASASSGQPQAPLNRERPESPMVPSEQVVEEAVPLPPQALTTSQDGHRRKGDSEAEALSEIKDGSLPPELSCIPSHRVLGPPTSIPPEPLGPVSMDSECEESLAASPMAAKPDNPSGKVCVREVAPDGPLQESSTRLSLTSDPEEGDPLALGPESPGEPQPPQLKKDDVTSSTGPHKELSSTEAGSTVAGAALRPSHHSQRSSLSGDEEDELFKGATLKALRPKAQPEEEDEDEVSMKGRPPPTPLFGDDDDDDDIDWLG

SEQ ID NO: 7651 - DNA, 4591 bp, Homo sapiens
atggccggttgcatacacggggaaactgaggcaccgagcaccccggcccaaggtcactctggctatgccactgcaggggccgggccgaagccccagtctttaaccctccagtcccgagctctttctccttccgcggagctgaggaaagcggcgaggaaggtccttgtcccgctgggaaaaggacggtacccatgcacaggggtgcgaaagaggggccgagagaagccttacctttccagagaccgtgctggagttcgccctgccggaaagcagcacgccgccgcggcattttacgacgtcggcggtgacaggccctgggactctgggaatacccagcttcctccccgcaacccggtgaaagccaacgcaatgttcggtgcgggggacgaggacgacaccgatttcctctcgccgagcggcggtgccagattggcctcactttttggactggatcaggcagctgctggccatggaaatgaatttttccagtacacagccccaaaacagcctaagaaaggccagggaacggcagcaacaggaaatcaggcaacaccaaaaacagcaccagccaccatgagcactcccacaatactggtcgcaacagcagtccatgcatatcgatacacaaatggtcaatatgtaaagcagggcaaatttggtgctgcagttctggggaaccacacagccagagagtataggattcttctttatatcagtcaacaacagccagttacggttgctaggattcatgtgaactttgagctaatggttcggcccaataactatagcaccttttatgatgaccagagacagaactggtccatcatgtttgagtcggaaaaggctgctgtggagttcaataagcaggtgtgcattgctaagtgcaacagtacctcttccctggatgcagtgctctcccaggacctcattgtggcagacggccctgctgtagaagttggagattctttggaagtggcctataccggctggctctttcagaatcatgtgctgggccaggttttcgactccactgctaacaaagataagttgcttcgcttgaagttaggatcaggaaaagtcatcaagggctgggaggatggaatgctgggcatgaaaaaaggaggaaagcgattgcttattgtccctccagcctgtgctgttggctcagaaggggtaataggctggactcaagcaacggactcgatcctggtgttcgaggtggaggttaggcgggtgaagtttgccagagattctggctctgatggtcacagtgttagttcccgcgattctgcagctccgtctcccatccctggtgctgacaacctctctgctgatcctgttgtgtcaccacccacatcaatacctttcaaatcaggggagccagctcttcgtaccaaatctaactccctcagtgaacaacttgcaataaatacaagtcccgatgcagtcaaagccaagttgatctctcggatggctaaaatgggccagcccatgctgcccatccttccaccacagctggattccaatgattcagaaatcgaagatgtgaacactctgcaaggaggtgggcagcctgtggtgactccgtccgtccagccctctcttcatccggcccatccagcgttaccacagatgacctcacaggcacctcagccatctgttactgggctccaggcaccttctgctgccttaatgcaagtgtcatctctcgattcccactcagctgtatctggaaatgcccaatcctttcagccctatgcaggtatgcaagcctacgcttatccccaggcatctgccgtcacctcccagctgcagcccgttcggcctttgtacccagcaccgctctctcagcctccccatttccaaggatcaggtgatatggcttcatttctcatgactgaagcccggcaacataacactgaaattcgaatggcagtcagcaaagtggctgataaaatggatcatctcatgactaaggttgaagagttacagaaacatagtgctggcaattccatgcttattcctagcatgtcagttacaatggaaacaagcatgattatgagcaacatccagcgaatcattcaggaaaatgaaagattgaagcaagagatccttgaaaagagcaatcggatagaagaacagaatgacaagattagtgaactaattgaacgaaatcagaggtatgttgagcagagtaacctgatgatggagaagaggaacaactcacttcagacagccacagaaaacacacaggcaagagtattgcatgctgaacaagagaaggccaaggtgacagaggagttagcagcggccactgcacaggtctctcatctgcagctgaaaatgactgctcaccaaaaaaaggaaacagagctgcagatgcagctgacagaaagcctgaaggagacagatcttctcaggggccagctcaccaaagtgcaggcaaagctctcagagctccaagaaacctctgagcaagcacagtccaaattcaaaagtgaaaagcagaaccggaaacaactggaactcaaggtgacatccctggaggaggaactgactgaccttcgagttgagaaggagtccttggaaaagaacctctcagaaaggaaaaagaagtcagctcaagagcgttctcaggccgaggaggagatagatgaaattcgcaagtcataccaggaggaattggacaaacttcgacagctcttgaaaaagactcgagtgtccacagaccaagcagctgcagagcagctgtctttagtacaggctgagctacagacccagtgggaagcaaaatgtgaacatttgttggcctccgccaaggatgagcacctgcagcagtaccaggaggtgtgcgcacagagagatgcctaccagcagaagctggtacaacttcaggaaaagtgtttagccctccaggcccaaatcacagctctcaccaagcaaaatgaacagcacatcaaggaactagagaagaacaagtcccagatgtctggggttgaagctgctgcatctgacccctcagagaaggtcaagaagatcatgaaccaggtgttccagtccttacggagagagtttgagctggaggaatcttacaatggcaggaccattctgggaaccatcatgaatacgatcaagatggtgactcttcagctgttaaaccaacaggagcaagagaaggaagagagcagcagtgaagaagaagaagaaaaagcagaagagcggccacgaagaccttcccaggagcagtcagcctcagccagttctgggcagcctcaagcacccctgaatagggagaggccagagtcccccatggtgccctcagagcaggtggtcgaggaagctgtcccgttgcctcctcaggccctcaccacttcccaggatggacacagaaggaaaggggactcagaagctgaggcactctcagagataaaagatggttcccttccacccgaactgtcttgcatcccatcccacagagttctagggcccccgacttcaattccacctgagcccctaggccctgtatccatggactctgagtgtgaggagtcacttgctgccagcccaatggcagctaagcccgacaacccatcaggaaaggtctgtgtcagggaagtagcaccagatggcccactacaagaaagctccacaagactgtccctgacttcagaccccgaggagggggacccactggccttagggcctgaaagcccaggagagcctcagcctccacagctcaagaaagatgatgtcactagctccaccggtccccacaaggagctgtcaagcacagaggcaggttccacagttgcaggagcagccctcagacccagccatcattcccagcgttccagtctctctggggatgaagaggatgaactgtttaaaggggcaactctgaaagctctgaggcccaaagcacagcctgaggaggaggatgaagacgaggtgagcatgaagggacgcccgcccccaacgcccctttttggagatgatgatgatgacgatgacattgactggctgggatgaagacccaggaaactggtgcaaaggtttctctgcaacccttccctaagcatgattttgcacagccaaccctgggtctaggcgaaccacagggtgaggtcaaggtgagcattctgggaacaatatttgggctcagagggtgggttggccaccttctgagccccacccccgccagacctggtgaagaggatcataaccctgtcttcaagaacactgggatttcagcagcaagttggaagaaggactggtaggttcccctccaagccagtcacctgtaagagtcctgtcctctgccagactttttaatctcttcattaactctcagactgacctgggagccctcctctacctgaatccagtgctcaactgtgccccggcaacaagacctgggctgaggtctccctggtagaactaagggagattacaccatctaaatcccagtgcagtcaacagcctggcctatagtcctgggacatgtatcttcttctttgccttaaatctgatacaagaggtcaatgactttgaaaataaaactaaaataaatgtctataatgaaacttgaccc

SEQ ID NO: 7652 - protein, 1342 aa, Homo sapiens
MAGCIHGETEAPSTPAQGHSGYATAGAGPKPQSLTLQSRALSPSAELRKAARKVLVPLGKGRYPCTGVRKRGREKPYLSRDRAGVRPAGKQHAAAAFYDVGGDRPWDSGNTQLPPRNPVKANAMFGAGDEDDTDFLSPSGGARLASLFGLDQAAAGHGNEFFQYTAPKQPKKGQGTAATGNQATPKTAPATMSTPTILVATAVHAYRYTNGQYVKQGKFGAAVLGNHTAREYRILLYISQQQPVTVARIHVNFELMVRPNNYSTFYDDQRQNWSIMFESEKAAVEFNKQVCIAKCNSTSSLDAVLSQDLIVADGPAVEVGDSLEVAYTGWLFQNHVLGQVFDSTANKDKLLRLKLGSGKVIKGWEDGMLGMKKGGKRLLIVPPACAVGSEGVIGWTQATDSILVFEVEVRRVKFARDSGSDGHSVSSRDSAAPSPIPGADNLSADPVVSPPTSIPFKSGEPALRTKSNSLSEQLAINTSPDAVKAKLISRMAKMGQPMLPILPPQLDSNDSEIEDVNTLQGGGQPVVTPSVQPSLHPAHPALPQMTSQAPQPSVTGLQAPSAALMQVSSLDSHSAVSGNAQSFQPYAGMQAYAYPQASAVTSQLQPVRPLYPAPLSQPPHFQGSGDMASFLMTEARQHNTEIRMAVSKVADKMDHLMTKVEELQKHSAGNSMLIPSMSVTMETSMIMSNIQRIIQENERLKQEILEKSNRIEEQNDKISELIERNQRYVEQSNLMMEKRNNSLQTATENTQARVLHAEQEKAKVTEELAAATAQVSHLQLKMTAHQKKETELQMQLTESLKETDLLRGQLTKVQAKLSELQETSEQAQSKFKSEKQNRKQLELKVTSLEEELTDLRVEKESLEKNLSERKKKSAQERSQAEEEIDEIRKSYQEELDKLRQLLKKTRVSTDQAAAEQLSLVQAELQTQWEAKCEHLLASAKDEHLQQYQEVCAQRDAYQQKLVQLQEKCLALQAQITALTKQNEQHIKELEKNKSQMSGVEAAASDPSEKVKKIMNQVFQSLRREFELEESYNGRTILGTIMNTIKMVTLQLLNQQEQEKEESSSEEEEEKAEERPRRPSQEQSASASSGQPQAPLNRERPESPMVPSEQVVEEAVPLPPQALTTSQDGHRRKGDSEAEALSEIKDGSLPPELSCIPSHRVLGPPTSIPPEPLGPVSMDSECEESLAASPMAAKPDNPSGKVCVREVAPDGPLQESSTRLSLTSDPEEGDPLALGPESPGEPQPPQLKKDDVTSSTGPHKELSSTEAGSTVAGAALRPSHHSQRSSLSGDEEDELFKGATLKALRPKAQPEEEDEDEVSMKGRPPPTPLFGDDDDDDDIDWLG

SEQ ID NO: 7653 - DNA, 2832 bp, Homo sapiens
gacgtcggcggtgacaggccctgggactctgggaatacccagcttcctccccgcaacccggtgaaagccaacgcaatgttcggtgcgggggacgaggacgacaccgatttcctctcgccgagcggcggtgccagattggcctcactttttggactggatcaggcagctgctggccatggaaatgaatttttccagtacacagccccaaaacagcctaagaaaggccagggaacggcagcaacaggaaatcaggcaacaccaaaaacagcaccagccaccatgagcactcccacaatactggtcgcaacagcagtccatgcatatcgatacacaaatggtcaatatgtaaagcagggcaaatttggtgctgcagttctggggaaccacacagccagagagtataggattcttctttatatcagtcaacaacagccagttacggttgctaggattcatgtgaactttgagctaatggttcggcccaataactatagcaccttttatgatgaccagagacagaactggtccatcatgtttgagtcggaaaaggctgctgtggagttcaataagcaggtgtgcattgctaagtgcaacagtacctcttccctggatgcagtgctctcccaggacctcattgtggcagacggccctgctgtagaagttggagattctttggaagtggcctataccggctggctctttcagaatcatgtgctgggccaggttttcgactccactgctaacaaagataagttgcttcgcttgaagttaggatcaggaaaagtcatcaagggctgggaggatggaatgctgggcatgaaaaaaggaggaaagcgattgcttattgtccctccagcctgtgctgttggctcagaaggggtaataggctggactcaagcaacggactcgatcctggtgttcgaggtggaggttaggcgggtgaagtttgccagagattctggctctgatggtcacagtgttagttcccgcgattctgcagctccgtctcccatccctggtgctgacaacctctctgctgatcctgttgtgtcaccacccacatcaatacctttcaaatcaggggagccagctcttcgtaccaaatctaactccctcagtgaacaacttgcaataaatacaagtcccgatgcagtcaaagccaagttgatctctcggatggctaaaatgggccagcccatgctgcccatccttccaccacagctggattccaatgattcagaaatcgaagatgtgaacactctgcaaggaggtgggcagcctgtggtgactccgtccgtccagccctctcttcatccggcccatccagcgttaccacagatgacctcacaggcacctcagccatctgttactgggctccaggcaccttctgctgccttaatgcaagtgtcatctctcgattcccactcagctgtatctggaaatgcccaatcctttcaggtaacattttataaccgtattaattatatcctataatttgctgtggttctagtcagtctcttttcttcttcctgtacatttcatacagtagcagttccccaaagtcagagtttgtaatttttttcccttccttggttaccactttctcatctctaaaccaggcaaaggataacctacgttccagtgtcataaagattaaatgcaagaacaagtagagcccctagtacaacgtagtaaagatgcaatcaatgtttgtttccttttcttttcacacatatccagttgaagcgtgtatattcgcgttcttctgtattcttttctactaaaagttggcaggctaacattctgcagtatattcagcagaatggtatggtttaaaagtggaaccatgtggaaaatgtagcttgactctgctatctagtaaacttttcttaaagaaggcctttttcctgttatcacagaaaacaatggcagcagcctgtttgccaggggtagcagaccctttcttctgcctcaacacacttggtggataaggcatactgtcactgggaacagctgctcactccttgtgatgcttaatggaggtgtgggaatgatggtggataggctatgcctcattaacatggggagtctcgaaactggaaaaagtcccactgttgccctctttctccccatccctcctctcctccatggagaattactatgctgtagactaagaattttttttaagtggatgcgtagttatatctatccctggaaatgagctagacttccttatttcaaggaagaattaccatcctcattaaaataaaagctgctgtttattaagcgcttactatctgtcaggcctgtaacttactagcttttcagaactttacctatctcacttcatttagtccacagaacagccctatgaagtgatattattatcttcctcttacagttgaggtgaccgagactcaaaggaacatgagagctcttggtctcgtggattagcttcagaatctagcaggggagaggcatccttggaaattggcagatttggtttggaatctcagtgagcacttcttctttaaactcaatggaagctaagcagagtttattaatctaaaaacttcttagacaataggcctgataatggggaatgaatccctgcttaattatctcaccagatgactgggtagtgacctaagatacactttcttcagtttctgggtaggattttagtgactggtttcccctgggatacatagataactctcctgctgcagtccttaccaactgccaaacccagatctcacccatctctagcttcagtaagtttgagtctcctcccagctcatccactttattccaccaaagaaaaatgtgaac

SEQ ID NO: 7654 - protein, 472 aa, Homo sapiens
MFGAGDEDDTDFLSPSGGARLASLFGLDQAAAGHGNEFFQYTAPKQPKKGQGTAATGNQATPKTAPATMSTPTILVATAVHAYRYTNGQYVKQGKFGAAVLGNHTAREYRILLYISQQQPVTVARIHVNFELMVRPNNYSTFYDDQRQNWSIMFESEKAAVEFNKQVCIAKCNSTSSLDAVLSQDLIVADGPAVEVGDSLEVAYTGWLFQNHVLGQVFDSTANKDKLLRLKLGSGKVIKGWEDGMLGMKKGGKRLLIVPPACAVGSEGVIGWTQATDSILVFEVEVRRVKFARDSGSDGHSVSSRDSAAPSPIPGADNLSADPVVSPPTSIPFKSGEPALRTKSNSLSEQLAINTSPDAVKAKLISRMAKMGQPMLPILPPQLDSNDSEIEDVNTLQGGGQPVVTPSVQPSLHPAHPALPQMTSQAPQPSVTGLQAPSAALMQVSSLDSHSAVSGNAQSFQVTFYNRINYIL

SEQ ID NO: 7655 - DNA, 843 bp, Homo sapiens
aacccggtgaaagccaacgcaatgttcggtgcgggggacgaggacgacaccgatttcctctcgccgagcggcggtgccagattggcctcactttttggactggatcaggcagctgctggccatggaaatgaatttttccagtacacagccccaaaacagcctaagaaaggccagggaacggcagcaacaggaaatcaggcaacaccaaaaacagcaccagccaccatgagcactcccacaatactggtcgcaacagcagtccatgcatatcgatacacaaatggtcaatatgtaaagcagggcaaatttggtgctgcagttctggggaaccacacagccagagaggtgagagtgctcccacatctcatgtatattcagatgtcccaaataataccaatgagctggcttttatctggcttgcccgatgtcttgtttatcagaagataaggatgattatttgtattgaatgttaatttataacatcaagcatatagtaaatgatcacattttgcttactattgtgcgttaaaacaaatccaaccattcaaaattgttaaatttgacctttgtgatatgatcctagcttaagaatttgggcatttttttgtttgtttgttgttcaattgtggggtgcgtgtgtacacacacatacacaaatacacacatatatatacacatacatatgtatatataagataaaatttgccatttaaccatttttaagtgcataatccagtgccattaattgcattcacagtattgattgagcaaccatcactactatccatttcccaaacagaaagtgtaaccattaagcaataactctacttcttcctttttccc

SEQ ID NO: 7656 - protein, 141 aa, Homo sapiens
MFGAGDEDDTDFLSPSGGARLASLFGLDQAAAGHGNEFFQYTAPKQPKKGQGTAATGNQATPKTAPATMSTPTILVATAVHAYRYTNGQYVKQGKFGAAVLGNHTAREVRVLPHLMYIQMSQIIPMSWLLSGLPDVLFIRR

SEQ ID NO: 7657 - DNA, 575 bp, Homo sapiens
cagcttcctccccgcaacccggtgaaagccaacgcaatgttcggtgcgggggacgaggacgacaccgatttcctctcgccgagcggcggtgccagattggcctcactttttggactggatcaggcagctgctggccatggaaatgaatttttccagtacacagccccaaaacagcctaagaaaggccagggaacggcagcaacaggaaatcaggcaacaccaaaaacagcaccagccaccatgagcactcccacaatactggtcgcaacagcagtccatgcatatcgatagtaagtcgctgagaaggaacaccctctgaagtttggtggaagggcgtgcagttaagctactttttctcgaaaaacctctgtttgttgcaaaacggttatttagcccttccacggacaaaatatcagtagaacttttaacatctgaattggagatttctgtggtaaaacttgaaaagccattatcttgtctactgtctttagggagtgcttgtaccctcaacagctgtcaaatgctcaaagaaagcctctccactgagatagcatgaatgatagatatttatattt

SEQ ID NO: 7658 - protein, 84 aa, Homo sapiens
MFGAGDEDDTDFLSPSGGARLASLFGLDQAAAGHGNEFFQYTAPKQPKKGQGTAATGNQATPKTAPATMSTPTILVATAVHAYR

SEQ ID NO: 7659 - DNA, 1851 bp, Homo sapiens
tggtcggtaatgctagggggcgggagggggcgggaaatcctcggcctcggtggcggtggtggacacgtcgagccgggtagaagtggaggggccgttcgaagagtcgtgagggggtgacgggttaagattcggagagagaggtgctagtggctggacttgacctggaaagaatcttctgctgactctcaacttttcctggaaaaaatggatcattcccaccatatggggatgagctatatggactccaacagtaccatgcaaccttctcaccatcacccaaccacttcagcctcacactcccatggtggaggagacagcagcatgatgatgatgcctatgaccttctactttggctttaagaatgtggaactactgttttccggtttggtgatcaatacagctggagaaatggctggagcttttgtggcagtgtttttactagcaatgttctatgaaggactcaagatagcccgagagagcctgctgcgtaagtcacaagtcagcattcgctacaattccatgcctgtcccaggaccaaatggaaccatccttatggagacacacaaaactgttgggcaacagatgctgagctttcctcacctcctgcaaacagtgctgcacatcatccaggtggtcataagctacttcctcatgctcatcttcatgacctacaacgggtacctctgcattgcagtagcagcaggggccggtacaggatacttcctcttcagctggaagaaggcagtggtagtggatatcacagagcattgccattgacatcaaactctatggcgtggccttatcgattgcagtgggaagttgttgaagacttgaagacgtgattcctgctccaatcatcccttcttgctcctctttgtgcacgtacacacacacacacacacacacacacacacacccctgctcaacagaggtttagtttacagtctctgaactaaagtagtaacctcccaaattgttttttctaataagctgagattcccatttctcttaaggagaagccacccatgagatgtcttttccttctccatcatcttagagccaagttatatgttcttgtctaatccatgtagctttttgttcaatgacttgatcatctgcttcctttttgaatttttaacagatagtaagtaaatttggtggttttttcccctgggtcagtgatggaaaggggttaacttcagccaggattgatggcagctgagggaaattcttgcccaactaaacccagaactcaaacttaacattagaaaataaggtccagggccggacacagtggcccatgcctgtaatcccagcactttggggggccaaggcaggctggatcacctgaggacaggagttcgagaccagtctggccaacatggggaaaccccgtctctactaaaaatacaaaaattagccgggcatggtggtgggcgcctgtaatcccagctactcagaaggctgaggcaggagaatcacttgaacctaggaggcggaggttgcagtgagccaagatggcgccattgcactccagcctgggtgacaagagtgaaactccatctcaaaaaaaaagaaaagaaggtccagcttttggattcaatgagtgggaaatacattgtgcctttctctagatgtgatacgttataccaaaatctttgtagtgtgcagagcggtggtttgagactaaatacaggcttagaacttgcagagtgtgtattcttggatggctgatgcatcgacttgcattcccacttaacactttgattagcatgaacttgccaatcaaaaaatgacaatcaatttgagaaaatagaaatagatatttttaaataaaaccattcacagttt

SEQ ID NO: 7660 - protein, 190 aa, Homo sapiens; identical to SEQ ID NO: 1108

SEQ ID NO: 7661 - DNA, 4795 bp, Homo sapiens
tggtcggtaatgctagggggcgggagggggcgggaaatcctcggcctcggtggcggtggtggacacgtcgagccgggtagaagtggaggggccgttcgaagagtcgtgagggggtgacgggttaagattcggagagagaggtgctagtggctggacttgacctggaaagaatcttctgctgactctcaacttttcctggaaaaaatggatcattcccaccatatggggatgagctatatggactccaacagtaccatgcaaccttctcaccatcacccaaccacttcagcctcacactcccatggtggaggagacagcagcatgatgatgatgcctatgaccttctactttggctttaagaatgtggaactactgttttccggtttggtgatcaatacagctggagaaatggctggagcttttgtggcagtgtttttactagcaatgttctatgaaggactcaagatagcccgagagagcctgctgcgtaagtcacaagtcagcattcgctacaattccatgcctgtcccaggaccaaatggaaccatccttatggagacacacaaaactgttgggcaacagatgctgagctttcctcacctcctgcaaacagtgctgcacatcatccaggtggtcataagctacttcctcatgctcatcttcatgacctacaacgggtacctctgcattgcagtagcagcaggggccggtacaggatacttcctcttcagctggaagaaggcagtggtagtggatatcacagagcattgccattgacatcaaactctatggcgtggccttatcgattgcagtgggaagttgttgaagacttgaagacgtgattcctgctccaatcatcccttcttgctcctctttgtgcacgtacacacacacacacacacacacacacacacacccctgctcaacagaggtttagtttacagtctctgaactaaagtagtaacctcccaaattgttttttctaataagctgagattcccatttctcttaaggagaagccacccatgagatgtcttttccttctccatcatcttagagccaagttatatgttcttgtctaatccatgtagctttttgttcaatgacttgatcatctgcttcctttttgaatttttaacagatagtaagtaaatttggtggttttttcccctgggtcagtgatggaaaggggttaacttcagccaggattgatggcagctgagggaaattcttgcccaactaaacccagaactcaaacttaacattagaaaataaggtccagggccggacacagtggcccatgcctgtaatcccagcactttggggggccaaggcaggctggatcacctgaggacaggagttcgagaccagtctggccaacatggggaaaccccgtctctactaaaaatacaaaaattagccgggcatggtggtgggcgcctgtaatcccagctactcagaaggctgaggcaggagaatcacttgaacctaggaggcggaggttgcagtgagccaagatggcgccattgcactccagcctgggtgacaagagtgaaactccatctcaaaaaaaaagaaaagaaggtccagcttttggattcaatgagtgggaaatacattgtgcctttctctagatgtgatacgttataccaaaatctttgtagtgtgcagagcggtggtttgagactaaatacaggcttagaacttgcagagtgtgtattcttggatggctgatgcatcgacttgcattcccacttaacactttgattagcatgaacttgccaatcaaaaaatgacaatcaatttgagaaaatagaaatagatatttttaaataaaaccattcacagtttactttgtcttgataccttggtttgtcccagctgaagtgaagcaagagagtttgaattaatttttccattataatgttttcgcatgtctgcctctaaaactgtgattttcaagctttagcgtgcatcagaatcacctgtagggcttgttaaaacactaattgctgggcctcaacccaaaagcccccaaagtggcacttctgagttcctgctgatgttacaagggaccacacttttgagaatctgtgctttaagctaaggaaatattgcctggtgggttggctgcctggtattgggcatggaaatttgaattgctgattggtagatggtgtgtctggacttaactcacgtagtaaatactgctgatcaatacctaatcattccacatttattgagctccacctgtgtgtatgtgtacccaagcacacatgtgtgaagggctatagccaaagtatttttactagcctgtatgaaatcactagtccttatttttaaaggtctatggtttcttggaagtagtttgattgttgagagagacctttgatctgcagtgtaaatctaccagtcatgggccagaagggcaaaagcccagctttctctttggaaagactcaggctgtggtttgttgatggccaggttttcctcaggctccaacaactgtgcttataccaagcagatcctcatcctccatataatcatctttgttattcgtgggggtttaattacattacaagtggccaaaacccctgttctcagtgaagaaccacattggatttgtattctgttcagttgtagtctacactgcagtcttattcctggttcaaactacctctttaaattgatttgtcttgtgctggtctgttaaatcctgccctccttggtgctagatccagttgtgcctcagggcagaggaaacaaaacacagctatcctgttggcctgtgttgtggttttgaagtttgtactttctctgtgggtgccagttaaatattggagagcaaggaatgtggacttgtatggctttgaaccaagagagggttatgagcctactggattgaggttaaaatccaagaaccaacatttagagctttgtgcttttctctcattccatcactttgtaatgatgatacttaacatgagcagggtgaatgacaggtactgacgaagtccaacacaaaggtataatacagcctgttgtctaaagccaaggagtcataaaaccatgagaaataaataggaatcaatagttagtagtgacattggtgctctctagaaatctcagcatgagctgctatagaataccctcccagcaacaaaacctaatcagtaaggccagctagacccaatggctcatgcctgtaatcccaacactttgggaggccaaggtgggaggatggcttgtgtccagaagttcgagaccagcctggacaacatagtgagatcctatctctataaaaaatcaaaaattagccaggcatggtggtgcatacctatagtcctggctatttgggaggctgaggcaggaggattgctttagccctggaggtcgaggctgcagtaagccatgattgcgccactgcactcagcccgggtgacaaagcaagaccctgtctcagaaaaaaagaaaattcaaggccagttaagacaaaatgctatgactttgaaattcacagaaagaaataacagtttagattaggtcttcaggtattcaggatagagataatctcctgaaaaacctgaatttcagagattcttagactggctgccaaaggatgaagctagtgaaggagaaaaagcttaaattccatcttgagctcttggattgtgataatacaatgatttcattaacttttcatttctgtatacctgttcatttggaatttaatgcttgacttctttgttcattttggatctaaacttctcttttcttccttccccattcacatctattagaagactgcatcaccatttctttggcccccttactctgttgtcctttcccttttctttcagtttttttaatcgcatgtctagtatattaagtctccatagccctcctgatgcagtagacagtgctatgctgtggatataataccaaccagaaattggcatttataaacctgttaagagactttaagcatgcttcaagaggcagttgacccactggaatttctataaggctggtacccttcccagagttacagaatcttaggtgccgtctctagtctgtgagggaggaactcccagcatccccattgcccacaaatggaatcctcactgtatccactaggagattagaaattaaggtttcttcactacttctatggtagggttgtctgaaattccctttcaggctgtgggtactggtcttgggttctagtcataaggggttccttataaggagcaggcggaggggagtacactttcatgtgatttaattttgatcctgccctctccagctgctccttcaaaagatacatcaaaagatagaaactctgggctgggcacagtggctcacacactttgggaggccaagcgggggtgcagatcacctgaggtcaggagtttgagaccagcctggccaatgtggtgaaaccccatctctactaaaaatacaaaaattagctgggcgtggtggtgcatgcctgtaatcccagctactcgggaggctgaggcaggagaatcgcttgaacccaggaggcggaggttgcagtgagccaagatggcgccattgcactccagcctgggcgacaagagcaaaactccgtctcaaaaaaaaaaaaaagatacaaagtctgcatttgatataatgccttaattactgggtctacaattaatgttgactgttttagattgtaagctcctggagagcagtattgctgtagtaggaatgttttaacagtgtcatatgaaaaagaacaaaataaatattttgattttgtgattct

SEQ ID NO: 7662 - protein, 190 aa, Homo sapiens; identical to SEQ ID NO: 1108

SEQ ID NO: 7663 - DNA, 3772 bp, Homo sapiens
tggtcggtaatgctagggggcgggagggggcgggaaatcctcggcctcggtggcggtggtggacacgtcgagccgggtagaagtggaggggccgttcgaagagtcgtgagggggtgacgggttaagattcggagagagaggtgctagtggctggacttgacctggaaagaatcttctgctgactctcaacttttcctggaaaaaatggatcattcccaccatatggggatgagctatatggactccaacagtaccatgcaaccttctcaccatcacccaaccacttcagcctcacactcccatggtggaggagacagcagcatgatgatgatgcctatgaccttctactttggctttaagaatgtggaactactgttttccggtttggtgatcaatacagctggagaaatggctggagcttttgtggcagtgtttttactagcaatgttctatgaaggactcaagatagcccgagagagcctgctgcgtaagtcacaagtcagcattcgctacaattccatgcctgtcccaggaccaaatggaaccatccttatggagacacacaaaactgttgggcaacagatgctgagctttcctcacctcctgcaaacagtgctgcacatcatccaggtggtcataagctacttcctcatgctcatcttcatgacctacaacgggtacctctgcattgcagtagcagcaggggccggtacaggatacttcctcttcagctggaagaaggcagtggtagtggatatcacagagcattgccattgacatcaaactctatggcgtggccttatcgattgcagtgggaagttgttgaagacttgaagacgtgattcctgctccaatcatcccttcttgctcctctttgtgcacgtacacacacacacacacacacacacacacacacccctgctcaacagaggtttagtttacagtctctgaactaaagtagtaacctcccaaattgttttttctaataagctgagattcccatttctcttaaggagaagccacccatgagatgtcttttccttctccatcatcttagagccaagttatatgttcttgtctaatccatgtagctttttgttcaatgacttgatcatctgcttcctttttgaatttttaacagatagtaagtaaatttggtggttttttcccctgggtcagtgatggaaaggggttaacttcagccaggattgatggcagctgagggaaattcttgcccaactaaacccagaactcaaacttaacattagaaaataaggtccagggtccagcttttggattcaatgagtgggaaatacattgtgcctttctctagatgtgatacgttataccaaaatctttgtagtgtgcagagcggtggtttgagactaaatacaggcttagaacttgcagagtgtgtattcttggatggctgatgcatcgacttgcattcccacttaacactttgattagcatgaacttgccaatcaaaaaatgacaatcaatttgagaaaatagaaatagatatttttaaataaaaccattcacagtttactttgtcttgataccttggtttgtcccagctgaagtgaagcaagagagtttgaattaatttttccattataatgttttcgcatgtctgcctctaaaacttgtgctttaagctaaggaaatattgcctggtgggttggctgcctggtattgggcatggaaatttgaattgctgattggtagatggtgtgtctggacttaactcacgtagtaaatactgctgatcaatacctaatcattccacatttattgagctccacctgtgtgtatgtgtacccaagcacacatgtgtgaagggctatagccaaagtatttttactagcctgtatgaaatcactagtccttatttttaaaggtctatggtttcttggaagtagtttgattgttgagagagacctttgatctgcagtgtaaatctaccagtcatgggccagaagggcaaaagcccagctttctctttggaaagactcaggctgtggtttgttgatggccaggttttcctcaggctccaacaactgtgcttataccaagcagatcctcatcctccatataatcatctttgttattcgtgggggtttaattacattacaagtggccaaaacccctgttctcagtgaagaaccacattggatttgtattctgttcagttgtagtctacactgcagtcttattcctggttcaaactacctctttaaattgatttgtcttgtgctggtctgttaaatcctgccctccttggtgctagatccagttgtgcctcagggcagaggaaacaaaacacagctatcctgttggcctgtgttgtggttttgaagtttgtactttctctgtgggtgccagttaaatattggagagcaaggaatgtggacttgtatggctttgaaccaagagagggttatgagcctactggattgaggttaaaatccaagaaccaacatttagagctttgtgcttttctctcattccatcactttgtaatgatgatacttaacatgagcagggtgaatgacaggtactgacgaagtccaacacaaaggtataatacagcctgttgtctaaagccaaggagtcataaaaccatgagaaataaataggaatcaatagttagtagtgacattggtgctctctagaaatctcagcatgagctgctatagaataccctcccagcaacaaaacctaatcagtaaggccttcaaggccagttaagacaaaatgctatgactttgaaattcacagaaagaaataacagtttagattaggtcttcaggtattcaggatagagataatctcctgaaaaacctgaatttcagagattcttagactggctgccaaaggatgaagctagtgaaggagaaaaagcttaaattccatcttgagctcttggattgtgataatacaatgatttcattaacttttcatttctgtatacctgttcatttggaatttaatgcttgacttctttgttcattttggatctaaacttctcttttcttccttccccattcacatctattagaagactgcatcaccatttctttggcccccttactctgttgtcctttcccttttctttcagtttttttaatcgcatgtctagtatattaagtctccatagccctcctgatgcagtagacagtgctatgctgtggatataataccaaccagaaattggcatttataaacctgttaagagactttaagcatgcttcaagaggcagttgacccactggaatttctataaggctggtacccttcccagagttacagaatcttaggtgccgtctctagtctgtgagggaggaactcccagcatccccattgcccacaaatggaatcctcactgtatccactaggagattagaaattaaggtttcttcactacttctatggtagggttgtctgaaattccctttcaggctgtgggtactggtcttgggttctagtcataaggggttccttataaggagcaggcggaggggagtacactttcatgtgatttaattttgatcctgccctctccagctgctccttcaaaagatacatcaaaagatagaaactctggatacaaagtctgcatttgatataatgccttaattactgggtctacaattaatgttgactgttttagattgtaagctcctggagagcagtattgctgtagtaggaatgttttaacagtgtcatatgaaaaagaacaaaataaatattttgattttgtgattct

SEQ ID NO: 7664 - protein, 190 aa, Homo sapiens; identical to SEQ ID NO: 1108

SEQ ID NO: 7665 - DNA, 5167 bp, Homo sapiens
tggtcggtaatgctagggggcgggagggggcgggaaatcctcggcctcggtggcggtggtggacacgtcgagccgggtagaagtggaggggccgttcgaagagtcgtgagggggtgacgggttaagattcggagagagaggtgctagtggctggacttgacctggaaagaatcttctgctgactctcaacttttcctggaaaaaatggatcattcccaccatatggggatgagctatatggactccaacagtaccatgcaaccttctcaccatcacccaaccacttcagcctcacactcccatggtggaggagacagcagcatgatgatgatgcctatgaccttctactttggctttaagaatgtggaactactgttttccggtttggtgatcaatacagctggagaaatggctggagcttttgtggcagtgtttttactagcaatgttctatgaaggactcaagatagcccgagagagcctgctgcgtaagtcacaagtcagcattcgctacaattccatgcctgtcccaggaccaaatggaaccatccttatggagacacacaaaactgttgggcaacagatgctgagctttcctcacctcctgcaaacagtgctgcacatcatccaggtggtcataagctacttcctcatgctcatcttcatgacctacaacgggtacctctgcattgcagtagcagcaggggccggtacaggatacttcctcttcagctggaagaaggcagtggtagtggatatcacagagcattgccattgacatcaaactctatggcgtggccttatcgattgcagtgggaagttgttgaagacttgaagacgtgattcctgctccaatcatcccttcttgctcctctttgtgcacgtacacacacacacacacacacacacacacacacccctgctcaacagaggtttagtttacagtctctgaactaaagtagtaacctcccaaattgttttttctaataagctgagattcccatttctcttaaggagaagccacccatgagatgtcttttccttctccatcatcttagagccaagttatatgttcttgtctaatccatgtagctttttgttcaatgacttgatcatctgcttcctttttgaatttttaacagatagtaagtaaatttggtggttttttcccctgggtcagtgatggaaaggggttaacttcagccaggattgatggcagctgagggaaattcttgcccaactaaacccagaactcaaacttaacattagaaaataaggtccagggccggacacagtggcccatgcctgtaatcccagcactttggggggccaaggcaggctggatcacctgaggacaggagttcgagaccagtctggccaacatggggaaaccccgtctctactaaaaatacaaaaattagccgggcatggtggtgggcgcctgtaatcccagctactcagaaggctgaggcaggagaatcacttgaacctaggaggcggaggttgcagtgagccaagatggcgccattgcactccagcctgggtgacaagagtgaaactccatctcaaaaaaaaagaaaagaaggtccagcttttggattcaatgagtgggaaatacattgtgcctttctctagatgtgatacgttataccaaaatctttgtagtgtgcagagcggtggtttgagactaaatacaggcttagaacttgcagagtgtgtattcttggatggctgatgcatcgacttgcattcccacttaacactttgattagcatgaacttgccaatcaaaaaatgacaatcaatttgagaaaatagaaatagatatttttaaataaaaccattcacagtttactttgtcttgataccttggtttgtcccagctgaagtgaagcaagagagtttgaattaatttttccattataatgttttcgcatgtctgcctctaaaactgtgattttcaagctttagcgtgcatcagaatcacctgtagggcttgttaaaacactaattgctgggcctcaacccaaaagcccccaaagtggcacttctgagttcctgctgatgttacaagggaccacacttttgagaatctgtgctttaagctaaggaaatattgcctggtgggttggctgcctggtattgggcatggaaatttgaattgctgattggtagatggtgtgtctggacttaactcacgtagtaaatactgctgatcaatacctaatcattccacatttattgagctccacctgtgtgtatgtgtacccaagcacacatgtgtgaagggctatagccaaagtatttttactagcctgtatgaaatcactagtccttatttttaaaggtctatggtttcttggaagtagtttgattgttgagagagacctttgatctgcagtgtaaatctaccagtcatgggccagaagggcaaaagcccagctttctctttggaaagactcaggctgtggtttgttgatggccaggttttcctcaggctccaacaactgtgcttataccaagcagatcctcatcctccatataatcatctttgttattcgtgggggtttaattacattacaagtggccaaaacccctgttctcagtgaagaaccacattggatttgtattctgttcagttgtagtctacactgcagtcttattcctggttcaaactacctctttaaattgatttgtcttgtgctggtctgttaaatcctgccctccttggtgctagatccagttgtgcctcagggcagaggaaacaaaacacagctatcctgttggcctgtgttgtggttttgaagtttgtactttctctgtgggtgccagttaaatattggagagcaaggaatgtggacttgtatggctttgaaccaagagagggttatgagcctactggattgaggttaaaatccaagaaccaacatttagagctttgtgcttttctctcattccatcactttgtaatgatgatacttaacatgagcagggtgaatgacaggtactgacgaagtccaacacaaaggtataatacagcctgttgtctaaagccaaggagtcataaaaccatgagaaataaataggaatcaatagttagtagtgacattggtgctctctagaaatctcagcatgagctgctatagaataccctcccagcaacaaaacctaatcagtaaggccagctagacccaatggctcatgcctgtaatcccaacactttgggaggccaaggtgggaggatggcttgtgtccagaagttcgagaccagcctggacaacatagtgagatcctatctctataaaaaatcaaaaattagccaggcatggtggtgcatacctatagtcctggctatttgggaggctgaggcaggaggattgctttagccctggaggtcgaggctgcagtaagccatgattgcgccactgcactcagcccgggtgacaaagcaagaccctgtctcagaaaaaaagaaaattcaaggccagttaagacaaaatgctatgactttgaaattcacagaaagaaataacagtttagattaggtcttcaggtattcaggatagagataatctcctgaaaaacctgaatttcagagattcttagactggctgccaaaggatgaagctagtgaaggagaaaaagcttaaattccatcttgagctcttggattgtgataatacaatgatttcattaacttttcatttctgtatacctgttcatttggaatttaatgcttgacttctttgttcattttggatctaaacttctcttttcttccttccccattcacatctattagaagactgcatcaccatttctttggcccccttactctgttgtcctttcccttttctttcagtttttttaatcgcatgtctagtatattaagtctccatagccctcctgatgcagtagacagtgctatgctgtggatataataccaaccagaaattggcatttataaacctgttaagagactttaagcatgcttcaagaggcagttgacccactggaatttctataaggctggtacccttcccagagttacagaatcttaggtgccgtctctagtctgtgagggaggaactcccagcatccccattgcccacaaatggaatcctcactgtatccactaggagattagaaattaaggtttcttcactacttctatggtagggttgtctgaaattccctttcaggctgtgggtactggtcttgggttctagtcataaggggttccttataaggagcaggcggaggggagtacactttcatgtgatttaattttgatcctgccctctccagctgctccttcaaaagatacatcaaaagatagaaactctgggctgggcacagtggctcacacactttgggaggccaagcgggggtgcagatcacctgaggtcaggagtttgagaccagcctggccaatgtggtgaaaccccatctctactaaaaatacaaaaattagctgggcgtggtggtgcatgcctgtaatcccagctactcgggaggctgaggcaggagaatcgcttgaacccaggaggcggaggttgcagtgagccaagatggcgccattgcactccagcctgggcgacaagagcaaaactccgtctcaaaaaaaaaaaaaagatacaaagtctgcatttgatataatgccttaattactgggtctacaattaatgttgactgttttagattgtaagctcctggagagcagtattgctgtagtaggaatgttttaacagtgtcatatgaaaaagaacaaaataaatattttgattttgtgattctatgcaagtctttctgcccagagtgataatgcaataagctagtcttttcatagtctgcatagagtctggccattaccatcagtttttaagatgtccatattgtggccgggcgcggtggctcacgcctggtaatcccagcactttgggaggctgaggcaggtggatcatgaggtcaggagatcgagaccatcctggctaacacggtgaaacccgtctctactaaaaaaaatattaaaaaattagccaggcctggtggtgggcgcctgtagtcccagctacttgggaggctgaggcaggagaatggtgtgaacccggaagtcagaggttgcagtgagccaagattgcacctgggcaacacagcgagactccgtct

SEQ ID NO: 7666 - protein, 190 aa, Homo sapiens; identical to SEQ ID NO: 1108

SEQ ID NO: 7667 - DNA, 1077 bp, Homo sapiens
tggtcggtaatgctagggggcgggagggggcgggaaatcctcggcctcggtggcggtggtggacacgtcgagccgggtagaagtggaggggccgttcgaagagtcgtgagggggtgacgggttaagattcggagagagaggtgctagtggctggacttgacctggaaagaatcttctgctgactctcaacttttcctggaaaaaatggatcattcccaccatatggggatgagctatatggactccaacagtaccatgcaaccttctcaccatcacccaaccacttcagcctcacactcccatggtggaggagacagcagcatgatgatgatgcctatgaccttctactttggctttaagaatgtggaactactgttttccggtttggtgatcaatacagctggagaaatggctggagcttttgtggcagtgtttttactagcaatgttctatgaaggactcaagatagcccgagagagcctgctgcgtaagtcacaagtcagcattcgctacaattccatgcctgtcccaggaccaaatggaaccatccttatggagacacacaaaactgttgggcaacagatgctgagctttcctcacctcctgcaaacagtgctgctctccccctcgtattactcagacttaaactaccccaaaaaggctaaagtcctgctaagagtctccgtagaactgatgattcaagaggctcttatgatcacagctggtgattccctgtgttgaattagtgaaaacaggccaggcacagcccagaacaatagggcatgattcaaaattatcctccgagctgcctctctggttctttctgggaaaaacacttaggcaagttgagaaaggaaggaaagttggaataatggcaaaactgttagaagcattcctctttcctccattgcctgtcctcccaacattatacccaaactagttacaaagccattctgtaaagagatcgggtacctacaatttcttcagatttacacaataggttaagtgaaagtggcagggatcaactagagtgtcctgtgcttagggtcttttaataaagatggaaagaatgatgtt

SEQ ID NO: 7668 - protein, 178 aa, Homo sapiens
MDHSHHMGMSYMDSNSTMQPSHHHPTTSASHSHGGGDSSMMMMPMTFYFGFKNVELLFSGLVINTAGEMAGAFVAVFLLAMFYEGLKIARESLLRKSQVSIRYNSMPVPGPNGTILMETHKTVGQQMLSFPHLLQTVLLSPSYYSDLNYPKKAKVLLRVSVELMIQEALMITAGDSLC

SEQ ID NO: 7669 - DNA, 742 bp, Homo sapiens
ctcggcctcggtggcggtggtggacacgtcgagccgggtagaagtggaggggccgttcgaagagtcgtgagggggtgacgggttaagattcggagagagaggtgctagtggctggacttgacctggaaagaatcttctgctgactctcaacttttcctggaaaaaatggatcattcccaccatatggggatgagctatatggactccaacagtaccatgcaaccttctcaccatcacccaaccacttcagcctcacactcccatggtggaggagacagcagcatgatgatgatgcctatgaccttctactttggctttaagaatgtggaactactgttttccggtttggtgatcaatacagctggagaaatggctggagcttttgtggcagtgtttttactagcaatgttctatgaaggactcaagatagcccgagagagcctgctgcgtaagtcacaagtcagcattcgctacaattccatgcctgtcccaggaccaaatggaaccatccttatggagacacacaaaactgttgggtaagaactgaacagatccagatgaagtcctaaagaactcgatcagttaagcagcaaagcgcagctgtgtgatcagcagcagccctcttcttgagttaggagttctgtatgaccttgatcaaaactgtccttggaggtttgggtttgtaggtcatgagcaggccaaaggaggaatgagagggagtcttctgcaaatatgaatgttt

SEQ ID NO: 7670 - protein, 124 aa, Homo sapiens
MDHSHHMGMSYMDSNSTMQPSHHHPTTSASHSHGGGDSSMMMMPMTFYFGFKNVELLFSGLVINTAGEMAGAFVAVFLLAMFYEGLKIARESLLRKSQVSIRYNSMPVPGPNGTILMETHKTVG

SEQ ID NO: 7671 - DNA, 595 bp, Homo sapiens
ctcggcctcggtggcggtggtggacacgtcgagccgggtagaagtggaggggccgttcgaagagtcgtgagggggtgacgggttaagattcggagagagaggtgctagtggctggacttgacctggaaagaatcttctgctgactctcaacttttcctggaaaaaatggatcattcccaccatatggggatgagctatatggactccaacagtaccatgcaaccttctcaccatcacccaaccacttcagcctcacactcccatggtggaggagacagcagcatgatgatgatgcctatgaccttctactttggctttaagaatgtgggtccagcttttggattcaatgagtgggaaatacattgtgcctttctctagatgtgatacgttataccaaaatctttgtagtgtgcagagcggtggtttgagactaaatacaggcttagaacttgcagagtgtgtattcttggatggctgatgcatcgacttgcattcccacttaacactttgattagcatgaacttgccaatcaaaaaatgacaatcaatttgagaaaatagaaatagatatttttaaataaaaccattcacagttt

SEQ ID NO: 7672 - protein, 70 aa, Homo sapiens
MDHSHHMGMSYMDSNSTMQPSHHHPTTSASHSHGGGDSSMMMMPMTFYFGFKNVGPAFGFNEWEIHCAFL

SEQ ID NO: 7673 - DNA, 476 bp, Homo sapiens
gtagaagtggaggggccgttcgaagagtcgtgagggggtgacgggttaagattcggagagagaggtgctagtggctggacttgacctggaaaggatcttgctttgttgcccaggctggagtgcaggagcacaatctcagctcactgcaacctctgtctcccaggctcaagcaatcttcccatctcagcctttcgagtagccgggactacaggcatgcaccaccacgcccagctaattttttgtatttttgatagagtcggggctttgccatgttgcccaggctggtctcaaactcctgagcttaagcagtctgcccaccttggcctcttagagtgctgggattacaggcatgagccaccatgtccagcctcatttgcattcttgtactgcattttcattaaatcattcaagttccttttatcttgtgtaacatatttaattgcattttcctactgaataaaaaaaagggaacagtt

SEQ ID NO: 7674 - protein, 80 aa, Homo sapiens
MHHHAQLIFCIFDRVGALPCCPGWSQTPELKQSAHLGLLECWDYRHEPPCPASFAFLYCIFIKSFKFLLSCVTYLIAFSY

SEQ ID NO: 7675 - DNA, 1608 bp, Homo sapiens
gaagtggaggggccgttcgaagagtcgtgagggggtgacgggttaagattcggagagagaggtgctagtggctggacttgacctggaaagcctatgaccttctactttggctttaagaatgtggaactactgttttccggtttggtgatcaatacagctggagaaatggctggagcttttgtggcagtgtttttactagcaatgttctatgaaggactcaagatagcccgagagagcctgctgcgtaagtcacaagtcagcattcgctacaattccatgcctgtcccaggaccaaatggaaccatccttatggagacacacaaaactgttgggcaacagatgctgagctttcctcacctcctgcaaacagtgctgcacatcatccaggtggtcataagctacttcctcatgctcatcttcatgacctacaacgggtacctctgcattgcagtagcagcaggggccggtacaggatacttcctcttcagctggaagaaggcagtggtagtggatatcacagagcattgccattgacatcaaactctatggcgtggccttatcgattgcagtgggaagttgttgaagacttgaagacgtgattcctgctccaatcatcccttcttgctcctctttgtgcacgtacacacacacacacacacacacacacacacacccctgctcaacagaggtttagtttacagtctctgaactaaagtagtaacctcccaaattgttttttctaataagctgagattcccatttctcttaaggagaagccacccatgagatgtcttttccttctccatcatcttagagccaagttatatgttcttgtctaatccatgtagctttttgttcaatgacttgatcatctgcttcctttttgaatttttaacagatagtaagtaaatttggtggttttttcccctgggtcagtgatggaaaggggttaacttcagccaggattgatggcagctgagggaaattcttgcccaactaaacccagaactcaaacttaacattagaaaataaggtccagggccggacacagtggcccatgcctgtaatcccagcactttggggggccaaggcaggctggatcacctgaggacaggagttcgagaccagtctggccaacatggggaaaccccgtctctactaaaaatacaaaaattagccgggcatggtggtgggcgcctgtaatcccagctactcagaaggctgaggcaggagaatcacttgaacctaggaggcggaggttgcagtgagccaagatggcgccattgcactccagcctgggtgacaagagtgaaactccatctcaaaaaaaaagaaaagaaggtccagcttttggattcaatgagtgggaaatacattgtgcctttctctagatgtgatacgttataccaaaatctttgtagtgtgcagagcggtggtttgagactaaatacaggcttagaacttgcagagtgtgtattcttggatggctgatgcatcgacttgcattcccacttaacactttgattagcatgaacttgccaatcaaaaaatgacaatcaatttgagaaaatagaaatagatatttttaaataaaaccattcacagttt

SEQ ID NO: 7676 - protein, 146 aa, Homo sapiens
MTFYFGFKNVELLFSGLVINTAGEMAGAFVAVFLLAMFYEGLKIARESLLRKSQVSIRYNSMPVPGPNGTILMETHKTVGQQMLSFPHLLQTVLHIIQVVISYFLMLIFMTYNGYLCIAVAAGAGTGYFLFSWKKAVVVDITEHCH

SEQ ID NO: 7677 - DNA, 4552 bp, Homo sapiens
gaagtggaggggccgttcgaagagtcgtgagggggtgacgggttaagattcggagagagaggtgctagtggctggacttgacctggaaagcctatgaccttctactttggctttaagaatgtggaactactgttttccggtttggtgatcaatacagctggagaaatggctggagcttttgtggcagtgtttttactagcaatgttctatgaaggactcaagatagcccgagagagcctgctgcgtaagtcacaagtcagcattcgctacaattccatgcctgtcccaggaccaaatggaaccatccttatggagacacacaaaactgttgggcaacagatgctgagctttcctcacctcctgcaaacagtgctgcacatcatccaggtggtcataagctacttcctcatgctcatcttcatgacctacaacgggtacctctgcattgcagtagcagcaggggccggtacaggatacttcctcttcagctggaagaaggcagtggtagtggatatcacagagcattgccattgacatcaaactctatggcgtggccttatcgattgcagtgggaagttgttgaagacttgaagacgtgattcctgctccaatcatcccttcttgctcctctttgtgcacgtacacacacacacacacacacacacacacacacccctgctcaacagaggtttagtttacagtctctgaactaaagtagtaacctcccaaattgttttttctaataagctgagattcccatttctcttaaggagaagccacccatgagatgtcttttccttctccatcatcttagagccaagttatatgttcttgtctaatccatgtagctttttgttcaatgacttgatcatctgcttcctttttgaatttttaacagatagtaagtaaatttggtggttttttcccctgggtcagtgatggaaaggggttaacttcagccaggattgatggcagctgagggaaattcttgcccaactaaacccagaactcaaacttaacattagaaaataaggtccagggccggacacagtggcccatgcctgtaatcccagcactttggggggccaaggcaggctggatcacctgaggacaggagttcgagaccagtctggccaacatggggaaaccccgtctctactaaaaatacaaaaattagccgggcatggtggtgggcgcctgtaatcccagctactcagaaggctgaggcaggagaatcacttgaacctaggaggcggaggttgcagtgagccaagatggcgccattgcactccagcctgggtgacaagagtgaaactccatctcaaaaaaaaagaaaagaaggtccagcttttggattcaatgagtgggaaatacattgtgcctttctctagatgtgatacgttataccaaaatctttgtagtgtgcagagcggtggtttgagactaaatacaggcttagaacttgcagagtgtgtattcttggatggctgatgcatcgacttgcattcccacttaacactttgattagcatgaacttgccaatcaaaaaatgacaatcaatttgagaaaatagaaatagatatttttaaataaaaccattcacagtttactttgtcttgataccttggtttgtcccagctgaagtgaagcaagagagtttgaattaatttttccattataatgttttcgcatgtctgcctctaaaactgtgattttcaagctttagcgtgcatcagaatcacctgtagggcttgttaaaacactaattgctgggcctcaacccaaaagcccccaaagtggcacttctgagttcctgctgatgttacaagggaccacacttttgagaatctgtgctttaagctaaggaaatattgcctggtgggttggctgcctggtattgggcatggaaatttgaattgctgattggtagatggtgtgtctggacttaactcacgtagtaaatactgctgatcaatacctaatcattccacatttattgagctccacctgtgtgtatgtgtacccaagcacacatgtgtgaagggctatagccaaagtatttttactagcctgtatgaaatcactagtccttatttttaaaggtctatggtttcttggaagtagtttgattgttgagagagacctttgatctgcagtgtaaatctaccagtcatgggccagaagggcaaaagcccagctttctctttggaaagactcaggctgtggtttgttgatggccaggttttcctcaggctccaacaactgtgcttataccaagcagatcctcatcctccatataatcatctttgttattcgtgggggtttaattacattacaagtggccaaaacccctgttctcagtgaagaaccacattggatttgtattctgttcagttgtagtctacactgcagtcttattcctggttcaaactacctctttaaattgatttgtcttgtgctggtctgttaaatcctgccctccttggtgctagatccagttgtgcctcagggcagaggaaacaaaacacagctatcctgttggcctgtgttgtggttttgaagtttgtactttctctgtgggtgccagttaaatattggagagcaaggaatgtggacttgtatggctttgaaccaagagagggttatgagcctactggattgaggttaaaatccaagaaccaacatttagagctttgtgcttttctctcattccatcactttgtaatgatgatacttaacatgagcagggtgaatgacaggtactgacgaagtccaacacaaaggtataatacagcctgttgtctaaagccaaggagtcataaaaccatgagaaataaataggaatcaatagttagtagtgacattggtgctctctagaaatctcagcatgagctgctatagaataccctcccagcaacaaaacctaatcagtaaggccagctagacccaatggctcatgcctgtaatcccaacactttgggaggccaaggtgggaggatggcttgtgtccagaagttcgagaccagcctggacaacatagtgagatcctatctctataaaaaatcaaaaattagccaggcatggtggtgcatacctatagtcctggctatttgggaggctgaggcaggaggattgctttagccctggaggtcgaggctgcagtaagccatgattgcgccactgcactcagcccgggtgacaaagcaagaccctgtctcagaaaaaaagaaaattcaaggccagttaagacaaaatgctatgactttgaaattcacagaaagaaataacagtttagattaggtcttcaggtattcaggatagagataatctcctgaaaaacctgaatttcagagattcttagactggctgccaaaggatgaagctagtgaaggagaaaaagcttaaattccatcttgagctcttggattgtgataatacaatgatttcattaacttttcatttctgtatacctgttcatttggaatttaatgcttgacttctttgttcattttggatctaaacttctcttttcttccttccccattcacatctattagaagactgcatcaccatttctttggcccccttactctgttgtcctttcccttttctttcagtttttttaatcgcatgtctagtatattaagtctccatagccctcctgatgcagtagacagtgctatgctgtggatataataccaaccagaaattggcatttataaacctgttaagagactttaagcatgcttcaagaggcagttgacccactggaatttctataaggctggtacccttcccagagttacagaatcttaggtgccgtctctagtctgtgagggaggaactcccagcatccccattgcccacaaatggaatcctcactgtatccactaggagattagaaattaaggtttcttcactacttctatggtagggttgtctgaaattccctttcaggctgtgggtactggtcttgggttctagtcataaggggttccttataaggagcaggcggaggggagtacactttcatgtgatttaattttgatcctgccctctccagctgctccttcaaaagatacatcaaaagatagaaactctgggctgggcacagtggctcacacactttgggaggccaagcgggggtgcagatcacctgaggtcaggagtttgagaccagcctggccaatgtggtgaaaccccatctctactaaaaatacaaaaattagctgggcgtggtggtgcatgcctgtaatcccagctactcgggaggctgaggcaggagaatcgcttgaacccaggaggcggaggttgcagtgagccaagatggcgccattgcactccagcctgggcgacaagagcaaaactccgtctcaaaaaaaaaaaaaagatacaaagtctgcatttgatataatgccttaattactgggtctacaattaatgttgactgttttagattgtaagctcctggagagcagtattgctgtagtaggaatgttttaacagtgtcatatgaaaaagaacaaaataaatattttgattttgtgattct

SEQ ID NO: 7678 - protein, 146 aa, Homo sapiens; identical to SEQ ID NO: 7676

SEQ ID NO: 7679 - DNA, 4924 bp, Homo sapiens
gaagtggaggggccgttcgaagagtcgtgagggggtgacgggttaagattcggagagagaggtgctagtggctggacttgacctggaaagcctatgaccttctactttggctttaagaatgtggaactactgttttccggtttggtgatcaatacagctggagaaatggctggagcttttgtggcagtgtttttactagcaatgttctatgaaggactcaagatagcccgagagagcctgctgcgtaagtcacaagtcagcattcgctacaattccatgcctgtcccaggaccaaatggaaccatccttatggagacacacaaaactgttgggcaacagatgctgagctttcctcacctcctgcaaacagtgctgcacatcatccaggtggtcataagctacttcctcatgctcatcttcatgacctacaacgggtacctctgcattgcagtagcagcaggggccggtacaggatacttcctcttcagctggaagaaggcagtggtagtggatatcacagagcattgccattgacatcaaactctatggcgtggccttatcgattgcagtgggaagttgttgaagacttgaagacgtgattcctgctccaatcatcccttcttgctcctctttgtgcacgtacacacacacacacacacacacacacacacacccctgctcaacagaggtttagtttacagtctctgaactaaagtagtaacctcccaaattgttttttctaataagctgagattcccatttctcttaaggagaagccacccatgagatgtcttttccttctccatcatcttagagccaagttatatgttcttgtctaatccatgtagctttttgttcaatgacttgatcatctgcttcctttttgaatttttaacagatagtaagtaaatttggtggttttttcccctgggtcagtgatggaaaggggttaacttcagccaggattgatggcagctgagggaaattcttgcccaactaaacccagaactcaaacttaacattagaaaataaggtccagggccggacacagtggcccatgcctgtaatcccagcactttggggggccaaggcaggctggatcacctgaggacaggagttcgagaccagtctggccaacatggggaaaccccgtctctactaaaaatacaaaaattagccgggcatggtggtgggcgcctgtaatcccagctactcagaaggctgaggcaggagaatcacttgaacctaggaggcggaggttgcagtgagccaagatggcgccattgcactccagcctgggtgacaagagtgaaactccatctcaaaaaaaaagaaaagaaggtccagcttttggattcaatgagtgggaaatacattgtgcctttctctagatgtgatacgttataccaaaatctttgtagtgtgcagagcggtggtttgagactaaatacaggcttagaacttgcagagtgtgtattcttggatggctgatgcatcgacttgcattcccacttaacactttgattagcatgaacttgccaatcaaaaaatgacaatcaatttgagaaaatagaaatagatatttttaaataaaaccattcacagtttactttgtcttgataccttggtttgtcccagctgaagtgaagcaagagagtttgaattaatttttccattataatgttttcgcatgtctgcctctaaaactgtgattttcaagctttagcgtgcatcagaatcacctgtagggcttgttaaaacactaattgctgggcctcaacccaaaagcccccaaagtggcacttctgagttcctgctgatgttacaagggaccacacttttgagaatctgtgctttaagctaaggaaatattgcctggtgggttggctgcctggtattgggcatggaaatttgaattgctgattggtagatggtgtgtctggacttaactcacgtagtaaatactgctgatcaatacctaatcattccacatttattgagctccacctgtgtgtatgtgtacccaagcacacatgtgtgaagggctatagccaaagtatttttactagcctgtatgaaatcactagtccttatttttaaaggtctatggtttcttggaagtagtttgattgttgagagagacctttgatctgcagtgtaaatctaccagtcatgggccagaagggcaaaagcccagctttctctttggaaagactcaggctgtggtttgttgatggccaggttttcctcaggctccaacaactgtgcttataccaagcagatcctcatcctccatataatcatctttgttattcgtgggggtttaattacattacaagtggccaaaacccctgttctcagtgaagaaccacattggatttgtattctgttcagttgtagtctacactgcagtcttattcctggttcaaactacctctttaaattgatttgtcttgtgctggtctgttaaatcctgccctccttggtgctagatccagttgtgcctcagggcagaggaaacaaaacacagctatcctgttggcctgtgttgtggttttgaagtttgtactttctctgtgggtgccagttaaatattggagagcaaggaatgtggacttgtatggctttgaaccaagagagggttatgagcctactggattgaggttaaaatccaagaaccaacatttagagctttgtgcttttctctcattccatcactttgtaatgatgatacttaacatgagcagggtgaatgacaggtactgacgaagtccaacacaaaggtataatacagcctgttgtctaaagccaaggagtcataaaaccatgagaaataaataggaatcaatagttagtagtgacattggtgctctctagaaatctcagcatgagctgctatagaataccctcccagcaacaaaacctaatcagtaaggccagctagacccaatggctcatgcctgtaatcccaacactttgggaggccaaggtgggaggatggcttgtgtccagaagttcgagaccagcctggacaacatagtgagatcctatctctataaaaaatcaaaaattagccaggcatggtggtgcatacctatagtcctggctatttgggaggctgaggcaggaggattgctttagccctggaggtcgaggctgcagtaagccatgattgcgccactgcactcagcccgggtgacaaagcaagaccctgtctcagaaaaaaagaaaattcaaggccagttaagacaaaatgctatgactttgaaattcacagaaagaaataacagtttagattaggtcttcaggtattcaggatagagataatctcctgaaaaacctgaatttcagagattcttagactggctgccaaaggatgaagctagtgaaggagaaaaagcttaaattccatcttgagctcttggattgtgataatacaatgatttcattaacttttcatttctgtatacctgttcatttggaatttaatgcttgacttctttgttcattttggatctaaacttctcttttcttccttccccattcacatctattagaagactgcatcaccatttctttggcccccttactctgttgtcctttcccttttctttcagtttttttaatcgcatgtctagtatattaagtctccatagccctcctgatgcagtagacagtgctatgctgtggatataataccaaccagaaattggcatttataaacctgttaagagactttaagcatgcttcaagaggcagttgacccactggaatttctataaggctggtacccttcccagagttacagaatcttaggtgccgtctctagtctgtgagggaggaactcccagcatccccattgcccacaaatggaatcctcactgtatccactaggagattagaaattaaggtttcttcactacttctatggtagggttgtctgaaattccctttcaggctgtgggtactggtcttgggttctagtcataaggggttccttataaggagcaggcggaggggagtacactttcatgtgatttaattttgatcctgccctctccagctgctccttcaaaagatacatcaaaagatagaaactctgggctgggcacagtggctcacacactttgggaggccaagcgggggtgcagatcacctgaggtcaggagtttgagaccagcctggccaatgtggtgaaaccccatctctactaaaaatacaaaaattagctgggcgtggtggtgcatgcctgtaatcccagctactcgggaggctgaggcaggagaatcgcttgaacccaggaggcggaggttgcagtgagccaagatggcgccattgcactccagcctgggcgacaagagcaaaactccgtctcaaaaaaaaaaaaaagatacaaagtctgcatttgatataatgccttaattactgggtctacaattaatgttgactgttttagattgtaagctcctggagagcagtattgctgtagtaggaatgttttaacagtgtcatatgaaaaagaacaaaataaatattttgattttgtgattctatgcaagtctttctgcccagagtgataatgcaataagctagtcttttcatagtctgcatagagtctggccattaccatcagtttttaagatgtccatattgtggccgggcgcggtggctcacgcctggtaatcccagcactttgggaggctgaggcaggtggatcatgaggtcaggagatcgagaccatcctggctaacacggtgaaacccgtctctactaaaaaaaatattaaaaaattagccaggcctggtggtgggcgcctgtagtcccagctacttgggaggctgaggcaggagaatggtgtgaacccggaagtcagaggttgcagtgagccaagattgcacctgggcaacacagcgagactccgtct

SEQ ID NO: 7680 - protein, 146 aa, Homo sapiens; identical to SEQ ID NO: 7676

SEQ ID NO: 7681 - DNA, 2965 bp, Homo sapiens
acacacacacacacacacacccctgctcaacagaggtttagtttacagtctctgaactaaagtagtaacctcccaaattgttttttctaataagctgagattcccatttctcttaaggagaagccacccatgagatgtcttttccttctccatcatcttagagccaagttatatgttcttgtctaatccatgtagctttttgttcaatgacttgatcatctgcttcctttttgaatttttaacagatagtaagtaaatttggtggttttttcccctgggtcagtgatggaaaggggttaacttcagccaggattgatggcagctgagggaaattcttgcccaactaaacccagaactcaaacttaacattagaaaataaggtccagggccggacacagtggcccatgcctgtaatcccagcactttggggggccaaggcaggctggatcacctgaggacaggagttcgagaccagtctggccaacatggggaaaccccgtctctactaaaaatacaaaaattagccgggcatggtggtgggcgcctgtaatcccagctactcagaaggctgaggcaggagaatcacttgaacctaggaggcggaggttgcagtgagccaagatggcgccattgcactccagcctgggtgacaagagtgaaactccatctcaaaaaaaaagaaaagaaggtccagcttttggattcaatgagtgggaaatacattgtgcctttctctagatgtgatacgttataccaaaatctttgtagtgtgcagagcggtggtttgagactaaatacaggcttagaacttgcagagtgtgtattcttggatggctgatgcatcgacttgcattcccacttaacactttgattagcatgaacttgccaatcaaaaaatgacaatcaatttgagaaaatagaaatagatatttttaaataaaaccattcacagtttactttgtcttgataccttggtttgtcccagctgaatgggtgccagttaaatattggagagcaaggaatgtggacttgtatggctttgaaccaagagagggttatgagcctactggattgaggttaaaatccaagaaccaacatttagagctttgtgcttttctctcattccatcactttgtaatgatgatacttaacatgagcagggtgaatgacaggtactgacgaagtccaacacaaaggtataatacagcctgttgtctaaagccaaggagtcataaaaccatgagaaataaataggaatcaatagttagtagtgacattggtgctctctagaaatctcagcatgagctgctatagaataccctcccagcaacaaaacctaatcagtaaggccagctagacccaatggctcatgcctgtaatcccaacactttgggaggccaaggtgggaggatggcttgtgtccagaagttcgagaccagcctggacaacatagtgagatcctatctctataaaaaatcaaaaattagccaggcatggtggtgcatacctatagtcctggctatttgggaggctgaggcaggaggattgctttagccctggaggtcgaggctgcagtaagccatgattgcgccactgcactcagcccgggtgacaaagcaagaccctgtctcagaaaaaaagaaaattcaaggccagttaagacaaaatgctatgactttgaaattcacagaaagaaataacagtttagattaggtcttcaggtattcaggatagagataatctcctgaaaaacctgaatttcagagattcttagactggctgccaaaggatgaagctagtgaaggagaaaaagcttaaattccatcttgagctcttggattgtgataatacaatgatttcattaacttttcatttctgtatacctgttcatttggaatttaatgcttgacttctttgttcattttggatctaaacttctcttttcttccttccccattcacatctattagaagactgcatcaccatttctttggcccccttactctgttgtcctttcccttttctttcagtttttttaatcgcatgtctagtatattaagtctccatagccctcctgatgcagtagacagtgctatgctgtggatataataccaaccagaaattggcatttataaacctgttaagagactttaagcatgcttcaagaggcagttgacccactggaatttctataaggctggtacccttcccagagttacagaatcttaggtgccgtctctagtctgtgagggaggaactcccagcatccccattgcccacaaatggaatcctcactgtatccactaggagattagaaattaaggtttcttcactacttctatggtagggttgtctgaaattccctttcaggctgtgggtactggtcttgggttctagtcataaggggttccttataaggagcaggcggaggggagtacactttcatgtgatttaattttgatcctgccctctccagctgctccttcaaaagatacatcaaaagatagaaactctgggctgggcacagtggctcacacactttgggaggccaagcgggggtgcagatcacctgaggtcaggagtttgagaccagcctggccaatgtggtgaaaccccatctctactaaaaatacaaaaattagctgggcgtggtggtgcatgcctgtaatcccagctactcgggaggctgaggcaggagaatcgcttgaacccaggaggcggaggttgcagtgagccaagatggcgccattgcactccagcctgggcgacaagagcaaaactccgtctcaaaaaaaaaaaaaagatacaaagtctgcatttgatataatgccttaattactgggtctacaattaatgttgactgttttagattgtaagctcctggagagcagtattgctgtagtaggaatgttttaacagtgtcatatgaaaaagaacaaaataaatattttgattttgtgattct

SEQ ID NO: 7682 - protein, 63 aa, Homo sapiens [sequence omitted]

SEQ ID NO: 7683 - DNA, 3337 bp, Homo sapiens
acacacacacacacacacacccctgctcaacagaggtttagtttacagtctctgaactaaagtagtaacctcccaaattgttttttctaataagctgagattcccatttctcttaaggagaagccacccatgagatgtcttttccttctccatcatcttagagccaagttatatgttcttgtctaatccatgtagctttttgttcaatgacttgatcatctgcttcctttttgaatttttaacagatagtaagtaaatttggtggttttttcccctgggtcagtgatggaaaggggttaacttcagccaggattgatggcagctgagggaaattcttgcccaactaaacccagaactcaaacttaacattagaaaataaggtccagggccggacacagtggcccatgcctgtaatcccagcactttggggggccaaggcaggctggatcacctgaggacaggagttcgagaccagtctggccaacatggggaaaccccgtctctactaaaaatacaaaaattagccgggcatggtggtgggcgcctgtaatcccagctactcagaaggctgaggcaggagaatcacttgaacctaggaggcggaggttgcagtgagccaagatggcgccattgcactccagcctgggtgacaagagtgaaactccatctcaaaaaaaaagaaaagaaggtccagcttttggattcaatgagtgggaaatacattgtgcctttctctagatgtgatacgttataccaaaatctttgtagtgtgcagagcggtggtttgagactaaatacaggcttagaacttgcagagtgtgtattcttggatggctgatgcatcgacttgcattcccacttaacactttgattagcatgaacttgccaatcaaaaaatgacaatcaatttgagaaaatagaaatagatatttttaaataaaaccattcacagtttactttgtcttgataccttggtttgtcccagctgaatgggtgccagttaaatattggagagcaaggaatgtggacttgtatggctttgaaccaagagagggttatgagcctactggattgaggttaaaatccaagaaccaacatttagagctttgtgcttttctctcattccatcactttgtaatgatgatacttaacatgagcagggtgaatgacaggtactgacgaagtccaacacaaaggtataatacagcctgttgtctaaagccaaggagtcataaaaccatgagaaataaataggaatcaatagttagtagtgacattggtgctctctagaaatctcagcatgagctgctatagaataccctcccagcaacaaaacctaatcagtaaggccagctagacccaatggctcatgcctgtaatcccaacactttgggaggccaaggtgggaggatggcttgtgtccagaagttcgagaccagcctggacaacatagtgagatcctatctctataaaaaatcaaaaattagccaggcatggtggtgcatacctatagtcctggctatttgggaggctgaggcaggaggattgctttagccctggaggtcgaggctgcagtaagccatgattgcgccactgcactcagcccgggtgacaaagcaagaccctgtctcagaaaaaaagaaaattcaaggccagttaagacaaaatgctatgactttgaaattcacagaaagaaataacagtttagattaggtcttcaggtattcaggatagagataatctcctgaaaaacctgaatttcagagattcttagactggctgccaaaggatgaagctagtgaaggagaaaaagcttaaattccatcttgagctcttggattgtgataatacaatgatttcattaacttttcatttctgtatacctgttcatttggaatttaatgcttgacttctttgttcattttggatctaaacttctcttttcttccttccccattcacatctattagaagactgcatcaccatttctttggcccccttactctgttgtcctttcccttttctttcagtttttttaatcgcatgtctagtatattaagtctccatagccctcctgatgcagtagacagtgctatgctgtggatataataccaaccagaaattggcatttataaacctgttaagagactttaagcatgcttcaagaggcagttgacccactggaatttctataaggctggtacccttcccagagttacagaatcttaggtgccgtctctagtctgtgagggaggaactcccagcatccccattgcccacaaatggaatcctcactgtatccactaggagattagaaattaaggtttcttcactacttctatggtagggttgtctgaaattccctttcaggctgtgggtactggtcttgggttctagtcataaggggttccttataaggagcaggcggaggggagtacactttcatgtgatttaattttgatcctgccctctccagctgctccttcaaaagatacatcaaaagatagaaactctgggctgggcacagtggctcacacactttgggaggccaagcgggggtgcagatcacctgaggtcaggagtttgagaccagcctggccaatgtggtgaaaccccatctctactaaaaatacaaaaattagctgggcgtggtggtgcatgcctgtaatcccagctactcgggaggctgaggcaggagaatcgcttgaacccaggaggcggaggttgcagtgagccaagatggcgccattgcactccagcctgggcgacaagagcaaaactccgtctcaaaaaaaaaaaaaagatacaaagtctgcatttgatataatgccttaattactgggtctacaattaatgttgactgttttagattgtaagctcctggagagcagtattgctgtagtaggaatgttttaacagtgtcatatgaaaaagaacaaaataaatattttgattttgtgattctatgcaagtctttctgcccagagtgataatgcaataagctagtcttttcatagtctgcatagagtctggccattaccatcagtttttaagatgtccatattgtggccgggcgcggtggctcacgcctggtaatcccagcactttgggaggctgaggcaggtggatcatgaggtcaggagatcgagaccatcctggctaacacggtgaaacccgtctctactaaaaaaaatattaaaaaattagccaggcctggtggtgggcgcctgtagtcccagctacttgggaggctgaggcaggagaatggtgtgaacccggaagtcagaggttgcagtgagccaagattgcacctgggcaacacagcgagactccgtct

SEQ ID NO: 7684 - protein, 63 aa, Homo sapiens [sequence omitted]

SEQ ID NO: 7685 - DNA, 528 bp, Homo sapiens
ttgatccctgccactttcacttaacccatctattcaataagtatttattgagtgtctaccatgtgccactcaacaaagatccctgcccttgtagaaattaaattctagtggatattgtgtaaatctgaagaaattgtaggtacccgatctctttacagaatggctttgtaactagtttgggtataatgttgggaggacaggcaatggaggaaagaggaatgcttctaacagttttgccattattccaactttccttcctttctcaacttgcctaagtgtttttcccagaaagaaccagagaggcagctcggaggataattttgaatcatgccctattgttctgggcattaaaaaaaaattttttttaaaaatttttattgttttatgtagagacaggcatctgtgttgcccaagctgggcttgagctcctgacattaagcagtcctctcaaagtgctgaggcaggaggattgcttgagtccaggagttagaccagcctgggcaacacagggaaaccctgactctataa

SEQ ID NO: 7686 - protein, 52 aa, Homo sapiens
KFLLFYVETGICVAQAGLELLTLSSPLKVLRQEDCLSPGVRPAWATQGNPDS

SEQ ID NO: 7687 - DNA, 974 bp, Homo sapiens
gtagtaggaaatggcgtcgtggcattgaggggcatccctcctagaacctccaggaaaagctcgcggaagacgaggttctgcggagagagaggctccaagcagtctgggaagtgtagtccagttggcttagcagtagtttcgttgggggggagccgaggttccgggaaggggctaggccggcttgaaaagagctggaacacaagaagtgtttgtttaatgaatgacgtacacatttaagatctgtttggacgcggaggataatcctgtgaattgctaatagttcactgggtttggcccttagtgttgacttcagtatgctgagacggaaaccaacacgcctagagctaaagcttgatgacattgaagagtttgagaacattcgaaaggacctggagtgcattctgcatccagtatcaagaatgatcttcagaaattttcaaatcctgtcattcccgtttaaaactcctcagtagttttctgcacttataacaaaatctgaattcttcaccatggcctacaagattttacccgtaagaaacagaaggaagatgtggaagttgtaggaggcagtgatggagaaggagccattgggcttagcagtgatcccaagagccgggaacaaatgatcaatgatcggattggttataaaccccaacccaagcccaataatcgttcatctcaatttggaagtcttgaattttagagatggattatcttgcatgccagagcgctggaatggaataaaatgatggcagaagtacaaaccagatttagagaattgagtgcttgcagtcaagcagaatgtacctcctgcagagacaaatcttctgcatgagattactgatgcttcacttgcactctaagctggaatccaaactctggtttgtctcttgaaaatttgactctataaaactgatctgattttctgtttttaaaaataaatatatttttggaaaaatgtgaggcatccttaa

SEQ ID NO: 7688 - protein, 52 aa, Homo sapiens
MLRRKPTRLELKLDDIEEFENIRKDLECILHPVSRMIFRNFQILSFPFKTPQ

SEQ ID NO: 7689 - DNA, 953 bp, Homo sapiens
gtagtaggaaatggcgtcgtggcattgaggggcatccctcctagaacctccaggaaaagctcgcggaagacgaggttctgcggagagagaggctccaagcagtctgggaagtgtagtccagttggcttagcagtagtttcgttgggggggagccgaggttccgggaaggggctaggccggcttgaaaagagctggaacacaagaagtgtttgtttaatgaatgacgtacacatttaagatctgtttggacgcggaggataatcctgtgaattgctaatagttcactgggtttggcccttagtgttgacttcagtatgctgagacggaaaccaacacgcctagagctaaagcttgatgacattgaagagtttgagaacattcgaaaggacctggagtgcattctgcatccagtatcaagaatgatcttcagaaattttcaaatcctgtcattcccgtttaaaactcctcagtagttttctgcacttataacaaaatctgaattcttcaccatggcctacaagattttacccgtaagaaacagaaggaagatgtggaagttgtaggaggcagtgatggagaaggagccattgggcttagcagtgatcccaagagccgggaacaaatgatcaatgatcggattggttataaaccccaacccaagcccaataatcgttcatctcaatttggaagtcttgaattttagagatggattatcttgcatgccagagcgctggaatggaataaaatgatggcagaagtacaaaccagatttagagaattgagtgcttgcagtcaagcagaatgtacctcctgcagagacaaatcttctgcatgagattactgatgcttcacttgcactctaagctggaatccaaactctggtttgtctcttgaaaatttgactctataaaactgatctgattttctgtttttaaaaataaatatatttttgg

SEQ ID NO: 7690 - protein, 52 aa, Homo sapiens; identical to SEQ ID NO: 7688

SEQ ID NO: 7691 - DNA, 1258 bp, Homo sapiens
cagagttcagccccgagccgcgcgagtcgactcacctacctcttttcaagccggcctagccccttcccggaacctcggctcccccccaacgaaactactgctaagccaactggactacacttcccagactgcttggagcctctctctccgcagaacctcgtcttccgcgagcttttcctggaggttctaggagggatgcccctcaatgccacgacgccatttcctactacgacttccatcatgctccgcgccgctccgggggcggtgacccctcttggcccacgtcttgtcagtgacgcacttcctgtcagtgacgcacttcccctctgctgggcgcgcggtggacggtctgaaagggagtgttcgggtttcgctggggcctcgcggctccagagcccagcatggcttcctcgcgagcctcttccacggcaaccaaaactaaagcacccgacgacttagttgctccggtcgtgaagaaaccacacatctattatggaagtttggaagagaaggagagggagcgtctggccaaaggagagtctgggattttggggaaagacggacttaaagcagggatcgaagctggaaatattaatataacctctggagaagtgtttgaaattgaagagcatatcagcgagcgacaggcagaagtattggctgagtttgagagaaggaagcgagcccggcagatcaatgtttccacagatgactcagaggtcaaagcttgccttagagccttgggggaacccatcacactttttggagagggtcctgctgaaagaagagaaaggttaagaaatatcctctcagttgtcggtactgatgccttgaaaaagaccaaaaaggatgatgagaagtctaaaaagtccaaagaagaggtagaacatgtctttaacttcacagtataaacatgaaggaaatgaggggataggtctctcgttttctgctttcaatggtttgttttgctgagatgttgggggaaatgtttttgaaggctctaccattcaagaagagttgctggcagtagttttggttcctttgtaagtatgaatggagctaagtgagttttccagtcaggaaagaatcatggcattcctggtataaccatgtagttacatatcatagaaaaaaattcagtagaaagtcctctgcctgatttcatcctattaccgaatgaattcaccttccttctgggcagttaaaatggagaaatgacagttataagaggagtagaatgcttcagatttgacctttc

SEQ ID NO: 7692 - protein, 169 aa, Homo sapiens
MASSRASSTATKTKAPDDLVAPVVKKPHIYYGSLEEKERERLAKGESGILGKDGLKAGIEAGNINITSGEVFEIEEHISERQAEVLAEFERRKRARQINVSTDDSEVKACLRALGEPITLFGEGPAERRERLRNILSVVGTDALKKTKKDDEKSKKSKEEVEHVFNFTV

SEQ ID NO: 7693 - DNA, 1167 bp, Homo sapiens
cagagttcagccccgagccgcgcgagtcgactcacctacctcttttcaagccggcctagccccttcccggaacctcggctcccccccaacgaaactactgctaagccaactggactacacttcccagactgcttggagcctctctctccgcagaacctcgtcttccgcgagcttttcctggaggttctaggagggatgcccctcaatgccacgacgccatttcctactacgacttccatcatgctccgcgccgctccgggggcggtgacccctcttggcccacgtcttgtcagtgacgcacttcctgtcagtgacgcacttcccctctgctgggcgcgcggtggacggtctgaaagggagtgttcgggtttcgctggggcctcgcggctccagagcccagcatggcttcctcgcgagcctcttccacggcaaccaaaactaaagcacccgacgacttagttgctccggtcgtgaagaaaccacacatctattatggaagtttggaagagaaggagagggagcgtctggccaaaggagagtctgggattttggggaaagacggacttaaagcagggatcgaagctggaaatattaatataacctctggagaagtgtttgaaattgaagagcatatcagcgagcgacaggcagaagtattggctgagtttgagagaaggaagcgagcccggcagatcaatgtttccacagatgactcagaggtcaaagcttgccttagagccttgggggaacccatcacactttttggagagggtcctgctgaaagaagagaaaggttaagaaatatcctctcagttgtcggtactgatgccttgaaaaagaccaaaaaggatgatgagaagtctaaaaagtccaaagaagagtatcagcaaacctggtatcatgaaggaccaaatagcttgaaggtggcaagactatggattgctaattattcgttgcccagggcaatgaaacgcttggaagaggcccgactccataaggagattcctgagacaacaaggacctcccagatgcaagagctgcacaagtctctccgggtaagatgctcccagcaattgtcccacatcttaaaggttcttcatgtttatttgatttttctactttggctcacctctgggaaggtagaggcaactagagtgattcctccct

SEQ ID NO: 7694 - protein, 254 aa, Homo sapiens
MASSRASSTATKTKAPDDLVAPVVKKPHIYYGSLEEKERERLAKGESGILGKDGLKAGIEAGNINITSGEVFEIEEHISERQAEVLAEFERRKRARQINVSTDDSEVKACLRALGEPITLFGEGPAERRERLRNILSVVGTDALKKTKKDDEKSKKSKEEYQQTWYHEGPNSLKVARLWIANYSLPRAMKRLEEARLHKEIPETTRTSQMQELHKSLRVRCSQQLSHILKVLHVYLIFLLWLTSGKVEATRVIP

SEQ ID NO: 7695 - DNA, 3095 bp, Homo sapiens
cagagttcagccccgagccgcgcgagtcgactcacctacctcttttcaagccggcctagccccttcccggaacctcggctcccccccaacgaaactactgctaagccaactggactacacttcccagactgcttggagcctctctctccgcagaacctcgtcttccgcgagcttttcctggaggttctaggagggatgcccctcaatgccacgacgccatttcctactacgacttccatcatgctccgcgccgctccgggggcggtgacccctcttggcccacgtcttgtcagtgacgcacttcctgtcagtgacgcacttcccctctgctgggcgcgcggtggacggtctgaaagggagtgttcgggtttcgctggggcctcgcggctccagagcccagcatggcttcctcgcgagcctcttccacggcaaccaaaactaaagcacccgacgacttagttgctccggtcgtgaagaaaccacacatctattatggaagtttggaagagaaggagagggagcgtctggccaaaggagagtctgggattttggggaaagacggacttaaagcagggatcgaagctggaaatattaatataacctctggagaagtgtttgaaattgaagagcatatcagcgagcgacaggcagaagtattggctgagtttgagagaaggaagcgagcccggcagatcaatgtttccacagatgactcagaggtcaaagcttgccttagagccttgggggaacccatcacactttttggagagggtcctgctgaaagaagagaaaggttaagaaatatcctctcagttgtcggtactgatgccttgaaaaagaccaaaaaggatgatgagaagtctaaaaagtccaaagaagagtatcagcaaacctggtatcatgaaggaccaaatagcttgaaggtggcaagactatggattgctaattattcgttgcccagggcaatgaaacgcttggaagaggcccgactccataaggagattcctgagacaacaaggacctcccagatgcaagagctgcacaagtctctccggtctttgaataatttttgcagtcagattggggatgatcggcctatctcctactgtcactttagtcccaattccaagatgctggccacagcttgttggagtgggctttgcaagctctggtctgttcctgattgcaacctccttcacactcttcgagggcataacacaaatgtaggagcaattgtattccatcccaaatccactgtctccttggacccaaaagatgtcaacctggcctcttgtgcggctgatggctctgtgaagctttggagtctcgacagtgatgaaccagtggcagatattgaaggccatacagtgcgtgtggcgcgggtaatgtggcatccttcaggacgtttcctgggcaccacctgctatgaccgttcatggcgcttatgggatttggaggctcaagaggagatcctgcatcaggaaggccatagcatgggtgtgtatgacattgccttccatcaagatggctctttggctggcactgggggactggatgcatttggtcgagtttgggacctacgcacaggacgttgtatcatgttcttagaaggccacctgaaagaaatctatggaataaatttctcccccaatggctatcacattgcaaccggcagtggtgacaacacctgcaaagtgtgggacctccgacagcggcgttgcgtctacaccatccctgctcatcagaacttagtgactggtgtcaagtttgagcctatccatgggaacttcttgcttactggtgcctatgataacacagccaagatctggacgcacccaggctggtccccgctgaagactctggctggccacgaaggcaaagtgatgggcctagatatttcttccgatgggcagctcatagccacttgctcatatgacaggaccttcaagctgtggatggctgaatagatgacaatgggaaaaggacttgaacctcaagctctctctaaggagctgttttcctcaaacgagaagaattgaagtgtttagttctatcatgttttctgccaattaccatgcatagaccctcagtagaattggatttccatgtcagcccccactccaggaaggcagcccaatccctaggtgatggggaacccctctcacggttgaaaatttattacctttttacgccctgccacgaactgtgtagacattgtttttattaatcttttgtttggccgggcgtggtggctcacgcctgtaatcctagcactttgggaggccgaggtgggtagatcgcttgagctcaggagttcaagacgagcctgggcaacatggcaaatgccgtctctgcaaaaaaatactaaaattagctggtcgcggtggcttctgcctgtgattccggctacttgggaggctgaggtgggagggattgcttaagcctgggaggcagaggttgcagtgagccgagattgcgccattgcactctagcctgtgtgacagagcaagaccctgtctcaaaaaaaaaaaaaatttgttcgaatgccttatagccttcctcacagcacccaggattgtgactgactctgcatttttaattcttgaaacttggctttccataacatggtacatgcttcaggactacatatgacccagagagcaaggtggctgaactatagtctggaagccctcaggtaaagaggcacatctcaccactcattggttaaacaatgcatcatagcgagcacttttcctttccctggagaatgggatgtgaagcagtagaccgcagccacgccgatggttatacagtgaagaagacttcacctcttcctattgagtttgcttggaatgctgacagcatcaggcaactctgaactgaacatttgctttgtcagaaaatatctttttttttactttgaagtttggcaaccttcatgttaccccaaagcaaaaccattgtgtcaggagtcaaacaaatgtttagaaagcaaacatgacgtctctattgtacaacctcctttctcttggctgtttaaaggatgtacttcgtgtattaaagggtactttatgttgaagtaacgaaaaaaccct

SEQ ID NO: 7696 - protein, 521 aa, Homo sapiens
MASSRASSTATKTKAPDDLVAPVVKKPHIYYGSLEEKERERLAKGESGILGKDGLKAGIEAGNINITSGEVFEIEEHISERQAEVLAEFERRKRARQINVSTDDSEVKACLRALGEPITLFGEGPAERRERLRNILSVVGTDALKKTKKDDEKSKKSKEEYQQTWYHEGPNSLKVARLWIANYSLPRAMKRLEEARLHKEIPETTRTSQMQELHKSLRSLNNFCSQIGDDRPISYCHFSPNSKMLATACWSGLCKLWSVPDCNLLHTLRGHNTNVGAIVFHPKSTVSLDPKDVNLASCAADGSVKLWSLDSDEPVADIEGHTVRVARVMWHPSGRFLGTTCYDRSWRLWDLEAQEEILHQEGHSMGVYDIAFHQDGSLAGTGGLDAFGRVWDLRTGRCIMFLEGHLKEIYGINFSPNGYHIATGSGDNTCKVWDLRQRRCVYTIPAHQNLVTGVKFEPIHGNFLLTGAYDNTAKIWTHPGWSPLKTLAGHEGKVMGLDISSDGQLIATCSYDRTFKLWMAE

SEQ ID NO: 7697 - DNA, 3211 bp, Homo sapiens
cagagttcagccccgagccgcgcgagtcgactcacctacctcttttcaagccggcctagccccttcccggaacctcggctcccccccaacgaaactactgctaagccaactggactacacttcccagactgcttggagcctctctctccgcagaacctcgtcttccgcgagcttttcctggaggttctaggagggatgcccctcaatgccacgacgccatttcctactacgacttccatcatgctccgcgccgctccgggggcggtgacccctcttggcccacgtcttgtcagtgacgcacttcctgtcagtgacgcacttcccctctgctgggcgcgcggtggacggtctgaaagggagtgttcgggtttcgctggggcctcgcggctccagagcccagcatggcttcctcgcgagcctcttccacggcaaccaaaactaaagcacccgacgacttagttgctccggtcgtgaagaaaccacacatctattatggaagtttggaagagaaggagagggagcgtctggccaaaggagagtctgggattttggggaaagacggacttaaagcagggatcgaagctggaaatattaatataacctctggagaagtgtttgaaattgaagagcatatcagcgagcgacaggcagaagtattggctgagtttgagagaaggaagcgagcccggcagatcaatgtttccacagatgactcagaggtcaaagcttgccttagagccttgggggaacccatcacactttttggagagggtcctgctgaaagaagagaaaggttaagaaatatcctctcagttgtcggtactgatgccttgaaaaagaccaaaaaggatgatgagaagtctaaaaagtccaaagaagagtatcagcaaacctggtatcatgaaggaccaaatagcttgaaggtggcaagactatggattgctaattattcgttgcccagggcaatgaaacgcttggaagaggcccgactccataaggagattcctgagacaacaaggacctcccagatgcaagagctgcacaagtctctccggtctttgaataatttttgcagtcagattggggatgatcggcctatctcctactgtcactttagtcccaattccaagatgctggccacagcttgttggagtgggctttgcaagctctggtctgttcctgattgcaacctccttcacactcttcgagggcataacacaaatgtaggagcaattgtattccatcccaaatccactgtctccttggacccaaaagatgtcaacctggcctcttgtgcggctgatggctctgtgaagctttggagtctcgacagtgatgaaccagtggcagatattgaaggccatacagtgcgtgtggcgcgggtaatgtggcatccttcaggacgtttcctgggcaccacctgctatgaccgttcatggcgcttatgggatttggaggctcaagaggagatcctgcatcaggaaggccatagcatgggtgtgtatgacattgccttccatcaagatggctctttggctggcactgggggactggatgcatttggtcgagtttgggacctacgcacaggacgttgtatcatgttcttagaaggccacctgaaagaaatctatggaataaatttctcccccaatggctatcacattgcaaccggcagtggtgacaacacctgcaaagtgtgggacctccgacagcggcgttgcgtctacaccatccctgctcatcagaacttagtgactggtgtcaagtttgagcctatccatgggaacttcttgcttactggtgcctatgataacacagccaagatctggacgcacccaggctggtccccgctgaagactctggctggccacgaaggcaaagtgatgggcctagatatttcttccgatgggcagctcatagccacttgctcatatgacaggaccttcaagctgtggatggctgaatagatgacaatgggaaaaggacttgaacctcaagctctctctaaggagctgttttcctcaaacgagaagaattgaagtgtttagttctatcatgttttctgccaattaccatgcatagaccctcagtagaattggatttccatgtcagcccccactccaggaaggcagcccaatccctaggtgatggggaacccctctcacggttgaaaatttattacctttttacgccctgccacgaactgtgtagacattgtttttattaatcttttgtttggccgggcgtggtggctcacgcctgtaatcctagcactttgggaggccgaggtgggtagatcgcttgagctcaggagttcaagacgagcctgggcaacatggcaaatgccgtctctgcaaaaaaatactaaaattagctggtcgcggtggcttctgcctgtgattccggctacttgggaggctgaggtgggagggattgcttaagcctgggaggcagaggttgcagtgagccgagattgcgccattgcactctagcctgtgtgacagagcaagaccctgtctcaaaaaaaaaaaaaatttgttcgaatgccttatagccttcctcacagcacccaggattgtgactgactctgcatttttaattcttgaaacttggctttccataacatggtacatgcttcaggactacatatgacccagagagcaaggtggctgaactatagtctggaagccctcaggtaaagaggcacatctcaccactcattggttaaacaatgcatcatagcgagcacttttcctttccctggagaatgggatgtgaagcagtagaccgcagccacgccgatggttatacagtgaagaagacttcacctcttcctattgagtttgcttggaatgctgacagcatcaggcaactctgaactgaacatttgctttgtcagaaaatatctttttttttactttgaagtttggcaaccttcatgttaccccaaagcaaaaccattgtgtcaggagtcaaacaaatgtttagaaagcaaacatgacgtctctattgtacaacctcctttctcttggctgtttaaaggatgtacttcgtgtattaaagggtactttatgttgaagtaacgaaaaaaccctaatgggtgttcctaaacctaaaccttttctttattccacatttgctacggtaaaatcctgttacaaaactaccctataaagaattattttctatagttaagcattttctgaatcct

SEQ ID NO: 7698 - protein, 521 aa, Homo sapiens; identical to SEQ ID NO: 7696

SEQ ID NO: 7699 - DNA, 3493 bp, Homo sapiens
cagagttcagccccgagccgcgcgagtcgactcacctacctcttttcaagccggcctagccccttcccggaacctcggctcccccccaacgaaactactgctaagccaactggactacacttcccagactgcttggagcctctctctccgcagaacctcgtcttccgcgagcttttcctggaggttctaggagggatgcccctcaatgccacgacgccatttcctactacgacttccatcatgctccgcgccgctccgggggcggtgacccctcttggcccacgtcttgtcagtgacgcacttcctgtcagtgacgcacttcccctctgctgggcgcgcggtggacggtctgaaagggagtgttcgggtttcgctggggcctcgcggctccagagcccagcatggcttcctcgcgagcctcttccacggcaaccaaaactaaagcacccgacgacttagttgctccggtcgtgaagaaaccacacatctattatggaagtttggaagagaaggagagggagcgtctggccaaaggagagtctgggattttggggaaagacggacttaaagcagggatcgaagctggaaatattaatataacctctggagaagtgtttgaaattgaagagcatatcagcgagcgacaggcagaagtattggctgagtttgagagaaggaagcgagcccggcagatcaatgtttccacagatgactcagaggtcaaagcttgccttagagccttgggggaacccatcacactttttggagagggtcctgctgaaagaagagaaaggttaagaaatatcctctcagttgtcggtactgatgccttgaaaaagaccaaaaaggatgatgagaagtctaaaaagtccaaagaagagtatcagcaaacctggtatcatgaaggaccaaatagcttgaaggtggcaagactatggattgctaattattcgttgcccagggcaatgaaacgcttggaagaggcccgactccataaggagattcctgagacaacaaggacctcccagatgcaagagctgcacaagtctctccggtctttgaataatttttgcagtcagattggggatgatcggcctatctcctactgtcactttagtcccaattccaagatgctggccacagcttgttggagtgggctttgcaagctctggtctgttcctgattgcaacctccttcacactcttcgagggcataacacaaatgtaggagcaattgtattccatcccaaatccactgtctccttggacccaaaagatgtcaacctggcctcttgtgcggctgatggctctgtgaagctttggagtctcgacagtgatgaaccagtggcagatattgaaggccatacagtgcgtgtggcgcgggtaatgtggcatccttcaggacgtttcctgggcaccacctgctatgaccgttcatggcgcttatgggatttggaggctcaagaggagatcctgcatcaggaaggccatagcatgggtgtgtatgacattgccttccatcaagatggctctttggctggcactgggggactggatgcatttggtcgagtttgggacctacgcacaggacgttgtatcatgttcttagaaggccacctgaaagaaatctatggaataaatttctcccccaatggctatcacattgcaaccggcagtggtgacaacacctgcaaagtgtgggacctccgacagcggcgttgcgtctacaccatccctgctcatcagaacttagtgactggtgtcaagtttgagcctatccatgggaacttcttgcttactggtgcctatgataacacagccaagatctggacgcacccaggctggtccccgctgaagactctggctggccacgaaggcaaagtgatgggcctagatatttcttccgatgggcagctcatagccacttgctcatatgacaggaccttcaagctgtggatggctgaatagatgacaatgggaaaaggacttgaacctcaagctctctctaaggagctgttttcctcaaacgagaagaattgaagtgtttagttctatcatgttttctgccaattaccatgcatagaccctcagtagaattggatttccatgtcagcccccactccaggaaggcagcccaatccctaggtgatggggaacccctctcacggttgaaaatttattacctttttacgccctgccacgaactgtgtagacattgtttttattaatcttttgtttggccgggcgtggtggctcacgcctgtaatcctagcactttgggaggccgaggtgggtagatcgcttgagctcaggagttcaagacgagcctgggcaacatggcaaatgccgtctctgcaaaaaaatactaaaattagctggtcgcggtggcttctgcctgtgattccggctacttgggaggctgaggtgggagggattgcttaagcctgggaggcagaggttgcagtgagccgagattgcgccattgcactctagcctgtgtgacagagcaagaccctgtctcaaaaaaaaaaaaaatttgttcgaatgccttatagccttcctcacagcacccaggattgtgactgactctgcatttttaattcttgaaacttggctttccataacatggtacatgcttcaggactacatatgacccagagagcaaggtggctgaactatagtctggaagccctcaggtaaagaggcacatctcaccactcattggttaaacaatgcatcatagcgagcacttttcctttccctggagaatgggatgtgaagcagtagaccgcagccacgccgatggttatacagtgaagaagacttcacctcttcctattgagtttgcttggaatgctgacagcatcaggcaactctgaactgaacatttgctttgtcagaaaatatctttttttttactttgaagtttggcaaccttcatgttaccccaaagcaaaaccattgtgtcaggagtcaaacaaatgtttagaaagcaaacatgacgtctctattgtacaacctcctttctcttggctgtttaaaggatgtacttcgtgtattaaagggtactttatgttgaagtaacgaaaaaaccctaatgggtgttcctaaacctaaaccttttctttattccacatttgctacggtaaaatcctgttacaaaactaccctataaagaattattttctatagttaagcattttctgaatcctagccattggtccatagaggtctcttttttttggtttgggatataatggatgatctcaaatatggattactctgatttatgtctccttagcaccttgttaacaattttttttaaaatagaaggctgtttgcattttgggccagactgccagtaagccaggcctggactcaattacaattcttaacttgtctgtcatgcacctcttttcacctcaactatacagcctctgaactctcaaattacacagtaaattcaaaaaaatatataggaatttggaagaaga

SEQ ID NO: 7700 - protein, 521 aa, Homo sapiens; identical to SEQ ID NO: 7696

SEQ ID NO: 7701 - DNA, 1774 bp, Homo sapiens
agaagcattaataacttaagctataatggcttagaatactttatgtgttgtagaaactgaataaatatcagctggttgattgttagtgtgatttggttttagctatgaccgttcatggcgcttatgggatttggaggctcaagaggagatcctgcatcaggaaggccatagcatgggtgtgtatgacattgccttccatcaagatggctctttggctggcactgggggactggatgcatttggtcgagtttgggacctacgcacaggacgttgtatcatgttcttagaaggccacctgaaagaaatctatggaataaatttctcccccaatggctatcacattgcaaccggcagtggtgacaacacctgcaaagtgtgggacctccgacagcggcgttgcgtctacaccatccctgctcatcagaacttagtgactggtgtcaagtttgagcctatccatgggaacttcttgcttactggtgcctatgataacacagccaagatctggacgcacccaggctggtccccgctgaagactctggctggccacgaaggcaaagtgatgggcctagatatttcttccgatgggcagctcatagccacttgctcatatgacaggaccttcaagctgtggatggctgaatagatgacaatgggaaaaggacttgaacctcaagctctctctaaggagctgttttcctcaaacgagaagaattgaagtgtttagttctatcatgttttctgccaattaccatgcatagaccctcagtagaattggatttccatgtcagcccccactccaggaaggcagcccaatccctaggtgatggggaacccctctcacggttgaaaatttattacctttttacgccctgccacgaactgtgtagacattgtttttattaatcttttgtttggccgggcgtggtggctcacgcctgtaatcctagcactttgggaggccgaggtgggtagatcgcttgagctcaggagttcaagacgagcctgggcaacatggcaaatgccgtctctgcaaaaaaatactaaaattagctggtcgcggtggcttctgcctgtgattccggctacttgggaggctgaggtgggagggattgcttaagcctgggaggcagaggttgcagtgagccgagattgcgccattgcactctagcctgtgtgacagagcaagaccctgtctcaaaaaaaaaaaaaatttgttcgaatgccttatagccttcctcacagcacccaggattgtgactgactctgcatttttaattcttgaaacttggctttccataacatggtacatgcttcaggactacatatgacccagagagcaaggtggctgaactatagtctggaagccctcaggtaaagaggcacatctcaccactcattggttaaacaatgcatcatagcgagcacttttcctttccctggagaatgggatgtgaagcagtagaccgcagccacgccgatggttatacagtgaagaagacttcacctcttcctattgagtttgcttggaatgctgacagcatcaggcaactctgaactgaacatttgctttgtcagaaaatatctttttttttactttgaagtttggcaaccttcatgttaccccaaagcaaaaccattgtgtcaggagtcaaacaaatgtttagaaagcaaacatgacgtctctattgtacaacctcctttctcttggctgtttaaaggatgtacttcgtgtattaaagggtactttatgttgaagtaacgaaaaaaccct

SEQ ID NO: 7702 - protein, 157 aa, Homo sapiens
MGVYDIAFHQDGSLAGTGGLDAFGRVWDLRTGRCIMFLEGHLKEIYGINFSPNGYHIATGSGDNTCKVWDLRQRRCVYTIPAHQNLVTGVKFEPIHGNFLLTGAYDNTAKIWTHPGWSPLKTLAGHEGKVMGLDISSDGQLIATCSYDRTFKLWMAE

SEQ ID NO: 7703 - DNA, 1890 bp, Homo sapiens
agaagcattaataacttaagctataatggcttagaatactttatgtgttgtagaaactgaataaatatcagctggttgattgttagtgtgatttggttttagctatgaccgttcatggcgcttatgggatttggaggctcaagaggagatcctgcatcaggaaggccatagcatgggtgtgtatgacattgccttccatcaagatggctctttggctggcactgggggactggatgcatttggtcgagtttgggacctacgcacaggacgttgtatcatgttcttagaaggccacctgaaagaaatctatggaataaatttctcccccaatggctatcacattgcaaccggcagtggtgacaacacctgcaaagtgtgggacctccgacagcggcgttgcgtctacaccatccctgctcatcagaacttagtgactggtgtcaagtttgagcctatccatgggaacttcttgcttactggtgcctatgataacacagccaagatctggacgcacccaggctggtccccgctgaagactctggctggccacgaaggcaaagtgatgggcctagatatttcttccgatgggcagctcatagccacttgctcatatgacaggaccttcaagctgtggatggctgaatagatgacaatgggaaaaggacttgaacctcaagctctctctaaggagctgttttcctcaaacgagaagaattgaagtgtttagttctatcatgttttctgccaattaccatgcatagaccctcagtagaattggatttccatgtcagcccccactccaggaaggcagcccaatccctaggtgatggggaacccctctcacggttgaaaatttattacctttttacgccctgccacgaactgtgtagacattgtttttattaatcttttgtttggccgggcgtggtggctcacgcctgtaatcctagcactttgggaggccgaggtgggtagatcgcttgagctcaggagttcaagacgagcctgggcaacatggcaaatgccgtctctgcaaaaaaatactaaaattagctggtcgcggtggcttctgcctgtgattccggctacttgggaggctgaggtgggagggattgcttaagcctgggaggcagaggttgcagtgagccgagattgcgccattgcactctagcctgtgtgacagagcaagaccctgtctcaaaaaaaaaaaaaatttgttcgaatgccttatagccttcctcacagcacccaggattgtgactgactctgcatttttaattcttgaaacttggctttccataacatggtacatgcttcaggactacatatgacccagagagcaaggtggctgaactatagtctggaagccctcaggtaaagaggcacatctcaccactcattggttaaacaatgcatcatagcgagcacttttcctttccctggagaatgggatgtgaagcagtagaccgcagccacgccgatggttatacagtgaagaagacttcacctcttcctattgagtttgcttggaatgctgacagcatcaggcaactctgaactgaacatttgctttgtcagaaaatatctttttttttactttgaagtttggcaaccttcatgttaccccaaagcaaaaccattgtgtcaggagtcaaacaaatgtttagaaagcaaacatgacgtctctattgtacaacctcctttctcttggctgtttaaaggatgtacttcgtgtattaaagggtactttatgttgaagtaacgaaaaaaccctaatgggtgttcctaaacctaaaccttttctttattccacatttgctacggtaaaatcctgttacaaaactaccctataaagaattattttctatagttaagcattttctgaatcct

SEQ ID NO: 7704 - protein, 157 aa, Homo sapiens; identical to SEQ ID NO: 7702

SEQ ID NO: 7705 - DNA, 2172 bp, Homo sapiens
agaagcattaataacttaagctataatggcttagaatactttatgtgttgtagaaactgaataaatatcagctggttgattgttagtgtgatttggttttagctatgaccgttcatggcgcttatgggatttggaggctcaagaggagatcctgcatcaggaaggccatagcatgggtgtgtatgacattgccttccatcaagatggctctttggctggcactgggggactggatgcatttggtcgagtttgggacctacgcacaggacgttgtatcatgttcttagaaggccacctgaaagaaatctatggaataaatttctcccccaatggctatcacattgcaaccggcagtggtgacaacacctgcaaagtgtgggacctccgacagcggcgttgcgtctacaccatccctgctcatcagaacttagtgactggtgtcaagtttgagcctatccatgggaacttcttgcttactggtgcctatgataacacagccaagatctggacgcacccaggctggtccccgctgaagactctggctggccacgaaggcaaagtgatgggcctagatatttcttccgatgggcagctcatagccacttgctcatatgacaggaccttcaagctgtggatggctgaatagatgacaatgggaaaaggacttgaacctcaagctctctctaaggagctgttttcctcaaacgagaagaattgaagtgtttagttctatcatgttttctgccaattaccatgcatagaccctcagtagaattggatttccatgtcagcccccactccaggaaggcagcccaatccctaggtgatggggaacccctctcacggttgaaaatttattacctttttacgccctgccacgaactgtgtagacattgtttttattaatcttttgtttggccgggcgtggtggctcacgcctgtaatcctagcactttgggaggccgaggtgggtagatcgcttgagctcaggagttcaagacgagcctgggcaacatggcaaatgccgtctctgcaaaaaaatactaaaattagctggtcgcggtggcttctgcctgtgattccggctacttgggaggctgaggtgggagggattgcttaagcctgggaggcagaggttgcagtgagccgagattgcgccattgcactctagcctgtgtgacagagcaagaccctgtctcaaaaaaaaaaaaaatttgttcgaatgccttatagccttcctcacagcacccaggattgtgactgactctgcatttttaattcttgaaacttggctttccataacatggtacatgcttcaggactacatatgacccagagagcaaggtggctgaactatagtctggaagccctcaggtaaagaggcacatctcaccactcattggttaaacaatgcatcatagcgagcacttttcctttccctggagaatgggatgtgaagcagtagaccgcagccacgccgatggttatacagtgaagaagacttcacctcttcctattgagtttgcttggaatgctgacagcatcaggcaactctgaactgaacatttgctttgtcagaaaatatctttttttttactttgaagtttggcaaccttcatgttaccccaaagcaaaaccattgtgtcaggagtcaaacaaatgtttagaaagcaaacatgacgtctctattgtacaacctcctttctcttggctgtttaaaggatgtacttcgtgtattaaagggtactttatgttgaagtaacgaaaaaaccctaatgggtgttcctaaacctaaaccttttctttattccacatttgctacggtaaaatcctgttacaaaactaccctataaagaattattttctatagttaagcattttctgaatcctagccattggtccatagaggtctcttttttttggtttgggatataatggatgatctcaaatatggattactctgatttatgtctccttagcaccttgttaacaattttttttaaaatagaaggctgtttgcattttgggccagactgccagtaagccaggcctggactcaattacaattcttaacttgtctgtcatgcacctcttttcacctcaactatacagcctctgaactctcaaattacacagtaaattcaaaaaaatatataggaatttggaagaaga

SEQ ID NO: 7706 - protein, 157 aa, Homo sapiens; identical to SEQ ID NO: 7702

SEQ ID NO: 7707 - DNA, 1199 bp, Homo sapiens
tggaaggggaagaggctctggaagggctgatctggggactggggcagggaagcttctgcaaggcttccaggacgtctcccgcgaagcctccccgtgtgtggctgaggatggctgagcagcagggccgggagcttgaggctgagtgccccgtctgctggaaccccttcaacaacacgttccatacccccaaaatgctggattgctgccactccttctgcgtggaatgtctggcccacctcagccttgtgactccagcccggcgccgcctgctgtgcccactctgtcgccagcccacagtgctggcctcagggcagcctgtcactgacttgcccacggacactgccatgctcgccctgctccgcctggagccccaccatgtcatcctggaaggccatcagctgtgcctcaaggaccagcccaagagccgctacttcctgcgccagcctcaagtctacacgctggaccttggcccccagcctgggggccagactgggccgcccccagacacggcctctgccaccgtgtctacgcccatcctcatccccagccaccactctttgagggagtgtttccgcaaccctcagttccgcatctttgcctacctgatggccgtcatcctcagtgtcactctgttgctcatattctccatcttttggaccaagcagttcctttggggtgtggggtgagtgctgttcccagacaagaaaccaaacctttttcggttgctgctgggtatggtgactacggagcctcatttggtattgtcttcctttgtagtgttgtttattttacaatccagggattgttcaggccatgtgtttgcttctgggaacaattttaaaaaaaaacaaaaaaacgaaaagcttgaaggactgggagatgtggagcgacctccgggtgtgagtgtggcgtcatggaagggcagagaagcggttctgaccacagagctccacagcaagttgtgccaaagggctgcacagtggtatccaggaacctgactagcccaaatagcaagttgcatttctcactggagctgcttcaaaatcagtgcatatttttttgagttgctcttttactatgggttgctaaaaaaaaaaaaaaaattgggaagtgagcttcaattctgtgggtaaatgtgtgtttgtttctctttgaatgtcttgccactggttgcagtaaaagtgttctgtattcattaa

SEQ ID NO: 7708 - protein, 192 aa, Homo sapiens; identical to SEQ ID NO: 1114

SEQ ID NO: 7709 - DNA, 1210 bp, Homo sapiens
cgattcaggggagggagcaactggagcctcaggccctccagagtagtctgcctgaccaccctggagcccacagaagcccaggacgtctcccgcgaagcctccccgtgtgtggctgaggatggctgagcagcagggccgggagcttgaggctgagtgccccgtctgctggaaccccttcaacaacacgttccatacccccaaaatgctggattgctgccactccttctgcgtggaatgtctggcccacctcagccttgtgactccagcccggcgccgcctgctgtgcccactctgtcgccagcccacagtgctggcctcagggcagcctgtcactgacttgcccacggacactgccatgctcgccctgctccgcctggagccccaccatgtcatcctggaaggccatcagctgtgcctcaaggaccagcccaagagccgctacttcctgcgccagcctcaagtctacacgctggaccttggcccccagcctgggggccagactgggccgcccccagacacggcctctgccaccgtgtctacgcccatcctcatccccagccaccactctttgagggagtgtttccgcaaccctcagttccgcatctttgcctacctgatggccgtcatcctcagtgtcactctgttgctcatattctccatcttttggaccaagcagttcctttggggtgtggggtgagtgctgttcccagacaagaaaccaaacctttttcggttgctgctgggtatggtgactacggagcctcatttggtattgtcttcctttgtagtgttgtttattttacaatccagggattgttcaggccatgtgtttgcttctgggaacaattttaaaaaaaaacaaaaaaacgaaaagcttgaaggactgggagatgtggagcgacctccgggtgtgagtgtggcgtcatggaagggcagagaagcggttctgaccacagagctccacagcaagttgtgccaaagggctgcacagtggtatccaggaacctgactagcccaaatagcaagttgcatttctcactggagctgcttcaaaatcagtgcatatttttttgagttgctcttttactatgggttgctaaaaaaaaaaaaaaaattgggaagtgagcttcaattctgtgggtaaatgtgtgtttgtttctctttgaatgtcttgccactggttgcagtaaaagtgttctgtattcattaa

SEQ ID NO: 7710 - protein, 192 aa, Homo sapiens; identical to SEQ ID NO: 1114

SEQ ID NO: 7711 - DNA, 2296 bp, Homo sapiens
cgaggggatggcaggagatcaatcggacccagaacagaggcctgcaaggatgagcgcacttgatcccctcagagaaaaagccagagtgactcacaggagaaagacaaagcaaccaaagcttccagggtgtacaggaggtccaaagtcaccagaaggaagaagaaaacctgaaacagcgagagctggccaaacgctgctaagacctatgcaaataagacccacccacgctacctggaaatcgggcctgggaagtcagaaaacaaagcacatgcgtgcagggctgcacgaacggaggcggaggaggcggctccgagggagcagctgatcctgaaacagcagtggatccctgggagagcagcacagataaagatccaggcaataatgatgcttcctcctcttggacagccttttacagttctggccatggaacttcagagaaggtaggtctgatttggggggaaacaggagatcttgacgtgtagtaatacaagcttactggatggagtaaagttagaattttcaggtaagagaattaaaaaaaaaaaaaaaacttataatcttgcccccagagataaccactgctaatatctggttgtttatctctccagacattttttccattgcacacacacttttggaaattggattatatggtaatatggttttgttgctggttctttttcgcttaatgacattatatcctaggtatatatccatattaatagttttaccacatcatattaaaggctgcataatatctcttcctatggatggagcagaatctacttaatcaatgtcctattactggatgatgacgtagttctccatacgtcaccgttaaaccagcgcctggatgggcatctctttactcacatctttgcagaagtccttgatggtttccgtggaatcgattcccagtgggggaaatgatgagtcaaggttacatacagtttacggcctctgcagatcaactcttcaaattattcgaatgacccatatgagaaacagagaaaagccaagtatttctggttgaaacggagaagctgggctggagtgcgcctccctccaactccccgctttaactccctaaggttggtgggatggccagctctaagatctcagaaggctgaccagctgtgtgctaagaacaaagcagaaggcagcgaggacgtctcccgcgaagcctccccgtgtgtggctgaggatggctgagcagcagggccgggagcttgaggctgagtgccccgtctgctggaaccccttcaacaacacgttccatacccccaaaatgctggattgctgccactccttctgcgtggaatgtctggcccacctcagccttgtgactccagcccggcgccgcctgctgtgcccactctgtcgccagcccacagtgctggcctcagggcagcctgtcactgacttgcccacggacactgccatgctcgccctgctccgcctggagccccaccatgtcatcctggaaggccatcagctgtgcctcaaggaccagcccaagagccgctacttcctgcgccagcctcaagtctacacgctggaccttggcccccagcctgggggccagactgggccgcccccagacacggcctctgccaccgtgtctacgcccatcctcatccccagccaccactctttgagggagtgtttccgcaaccctcagttccgcatctttgcctacctgatggccgtcatcctcagtgtcactctgttgctcatattctccatcttttggaccaagcagttcctttggggtgtggggtgagtgctgttcccagacaagaaaccaaacctttttcggttgctgctgggtatggtgactacggagcctcatttggtattgtcttcctttgtagtgttgtttattttacaatccagggattgttcaggccatgtgtttgcttctgggaacaattttaaaaaaaaacaaaaaaacgaaaagcttgaaggactgggagatgtggagcgacctccgggtgtgagtgtggcgtcatggaagggcagagaagcggttctgaccacagagctccacagcaagttgtgccaaagggctgcacagtggtatccaggaacctgactagcccaaatagcaagttgcatttctcactggagctgcttcaaaatcagtgcatatttttttgagttgctcttttactatgggttgctaaaaaaaaaaaaaaaattgggaagtgagcttcaattctgtgggtaaatgtgtgtttgtttctctttgaatgtcttgccactggttgcagtaaaagtgttctgtattcattaa

SEQ ID NO: 7712 - protein, 105 aa, Homo sapiens
MAGDQSDPEQRPARMSALDPLREKARVTHRRKTKQPKLPGCTGGPKSPEGRRKPETARAGQTLLRPMQIRPTHATWKSGLGSQKTKHMRAGLHERRRRRRLRGSS

SEQ ID NO: 7713 - DNA, 1012 bp, Homo sapiens
aaagcacatgcgtgcagggctgcacgaacggaggcggaggaggcggctccgagggagcagctgatcctgaaacagcagtggatccctgggagagcagcacagataaagatccaggcaataatgatgcttcctcctcttggacagccttttacagttctggccatggaacttcagagaagacattttttccattgcacacacacttttggaaattggattatatggctgcataatatctcttcctatggatggagcagaatctacttaatcaatgtcctattactggatgatgacgtagttctccatacgtcaccgttaaaccagcgcctggatgggcatctctttactcacatctttgcagaagtccttgatggtttccgtggaatcgattcccagtgggggaaatgatgagtcaaggttacatacagtttacggcctctgcagatcaactcttcaaattattcgaatgacccatatgagaaacagagaaaagccaagtatttctggttgaaacggagaagctgggctggagtgcgcctccctccaactccccgctttaactccctaaggttggtgggatggccagctctaagatctcagaaggctgaccagctgtgtgctaagaacaaagcagaaggcagcgaggtttgtacacgctgattgcagttacttaggcacattaaaagatcagcgggtgactggactgaatctgatagtcggagctcttaagcttcgaagtaggtgactttcacagcaaccaaagtgctgagcaggcagcccctttgtgcaaggaggaggttccagccactttcgaagagaaatgagggccccagagagaggaagcccagaagactcagttaccctcttcacatctacaaagacgaaattgccaccctacctttccagaccagggactccaggtgttgaagggactgcccacaatctcacaggtgcttggcttccaggttcaattagttgccatgccctggggggaactcaggtcccccatctt

SEQ ID NO: 7714 - protein, 95 aa, Homo sapiens
MMLPPLGQPFTVLAMELQRRHFFHCTHTFGNWIIWLHNISSYGWSRIYLINVLLLDDDVVLHTSPLNQRLDGHLFTHIFAEVLDGFRGIDSQWGK

SEQ ID NO: 7715 - DNA, 989 bp, Homo sapiens
gacaaagcaaccaaagcttccagggtgtacaggaggtccaaagtcaccagaaggaagaagaaaacctgaaacagcgagagctggccaaacgctgctaagacctatgcaaataagacccacccacgctacctggaaatcgggcctgggaagtcagaaaacaaagcacatgcgtgcagggctgcacgaacggaggcggaggaggcggctccgagggagcagctgatcctgaaacagcagtggatccctgggagagcagcacagataaagatccaggcaataatgatgcttcctcctcttggacagccttttacagttctggccatggaacttcagagaagaagtccttgatggtttccgtggaatcgattcccagtgggggaaatgatgagtcaaggttacatacagtttacggcctctgcagatcaactcttcaaattattcgaatgacccatatgagaaacagagaaaagccaagtatttctggttgaaacggagaagctgggctggagtgcgcctccctccaactccccgctttaactccctaaggttggtgggatggccagctctaagatctcagaaggctgaccagctgtgtgctaagaacaaagcagaaggcagcgaggtttgtacacgctgattgcagttacttaggcacattaaaagatcagcgggtgactggactgaatctgatagtcggagctcttaagcttcgaagtaggtgactttcacagcaaccaaagtgctgagcaggcagcccctttgtgcaaggaggaggttccagccactttcgaagagaaatgagggccccagagagaggaagcccagaagactcagttaccctcttcacatctacaaagacgaaattgccaccctacctttccagaccagggactccaggtgttgaagggactgcccacaatctcacaggtgcttggcttccaggttcaattagttgccatgccctggggggaactcaggtcccccatctt

SEQ ID NO: 7716 - protein, 46 aa, Homo sapiens
MVSVESIPSGGNDESRLHTVYGLCRSTLQIIRMTHMRNREKPSISG

SEQ ID NO: 7717 - DNA, 1539 bp, Homo sapiens
cttggacttctattcaaagtggcagcagagtgggagggcggtacccttctagcccagtgctgctgagcttgtgtgaaaatcagacctgagatggcttgaagcagccaagaaccacatgggcattgcccagaattacaggagttagcacaccagctctacagataagaaaacattgaaattcaaagattaaggccaaaaatatctcacttgcaattttaatattttcatttggatttatataaatgaaacatatatatgttttggaatggccagagtgaggcaaaggggatccctgaaataacattagaacatacaggaaaaacgaggcaggcagatcactttaggtcaggagttcaagaccagcctgtacgtgcgtgcctgtagtcccagctactcgggaggctgagatgggagaatcacttgaacctgggaggcagagtttgcagtgagctgagattgtgccactgcactccagtctgtgtgacagaatgagaccttgtcttgaaaaaaaaaaaaacaaaaaaccacatacaggaaaaaagagagggatggagtcaactgtgccccagacattaagcccccttcagtgaggaggggcaaggtgctcaggcctgcctgtgtggcccccaggagtcagacctcagcctcatgctcactggtccattttcctccagggaaaatggagttctttctgccttcagagatgcccacacataaggcacatgaggctgttggtgacaccatcaccaacactggagattccctttctgacaagtcccagccaaagaaagattttgcatttgtcttctctgtcctctgcttgtctctgataccagtgactgacagccaccttccttcttccctctctgagagtctgttcttaagctagtacaaaggacatagctattttaaatgccaggaaagccaggaaaggtggtgacaaatggtagccataattatttattgtcctctctgtccagactaaatgttcccttttccatattaaacatttaccattcttccttcatccattcttagatcttatcctctaaacctttagtcatcgtttcactctcctttgattccttgttatgggtctttcaactctggaaagacaaagagatagtgggagaggaagcccggtcactgagcatctacagagggctaaatatatttattctcatttgttattcccaatattctcttcacaaagtcatagaccatgacattgtttgtatcttcaagaccagttattaactttctggctccaaggagatcccctgcccaagtgcctaggggcagtagacagctgtctcagggacagtcgtagcatgtgctggattattagtgcagcagctgacactttttcccagaagggagagaggcagcaagtcagaaagttcacgggaatgagttgggagggggtcccagggaagggggacaggctgccaggagaaggaaagtacacgggagaaaatagtggggctctgatgagttagtagggttctgttaccaataaaattgtttccataaactgta

SEQ ID NO: 7718 - protein, 69 aa, Homo sapiens [sequence omitted]

SEQ ID NO: 7719 - DNA, 2882 bp, Homo sapiens
agcactcccgccctagcaacgtgcgcctgctgctaggggcggaggcgcgggagggctcggaggctgttcccacccccaggctccgcgttcccgccggccccagctccagccccgcagcccaccgtgcaaacatgcttagacagagaagagattaacttcagtggcttcccactaattacagagattaagaagtggctgcctgaactattttccaaaggatacacattacaaattattgaatagggcagctaaccaagaagatcctattggtttggggggaacacaacttccagcagccacaagggatgctgctactcaggtgccaactgaaacaagctcctccacagaaggtttcgtttaggttttgtgtcgtgatggggaaacagcaaagcaaactcaaacacagcacttataaatacggcaggcctgatgaaattatagaagagagaattcaaactaaagcttttcaagagtatagcccagctcacatggataccgtctctgtcgtggctgctttgaactcagacctttgtgtctctggagggaaagataagacagttgtggcctataattggaaaactggaaatgtggtgaaaaggttcaaaggacatgaacatgagatcaccaaggtagcctgtattcccaaatccagccagttcttcagtgcctctcgtgacaggatggtcatgatgtgggacttgcacggttcctcacaaccaaggcagcaattgtgtggccatgccatggtggtcaccggattggctgtgagtccagactcatcacagctgtgcactggctctcgggacaacaccctgcttctgtgggatgtggtgacaggacagagtgtggaaagagcatctgtctccaggaacgtggtcactcacctgtgctgggtccccagagaaccatacatactacagacctctgaagataaaaccctcagattatgggacagtcgggggctgcaggtagctcatatgtttcctgcaaagcagcacattcagacctactgtgaagtcagtgtggatggacacaagtgtatctcctgcagcaatggctttggaggagaaggctgtgaagccacgttgtgggacctaagacagactcgaaacagaatatgtgagtataaggggcatttccagactgtcgcatcctgcgtctttctaccaagagcattggccttgatgcctttaattgctacctcatcacatgattgcaaggtgaagatttggaaccaagatactggagcctgccttttcaccttgtctctggatggatcaggacccttgacttctctggctgttggtgacgccatctccttattgtgtgcaagttttaacagaggaattcacttactcagaatggaccacagccaagggctggaactgcaggaagtggcagcattctgaggccaagagacactcactggacaatatcaaaccatggctcctcctcagcatggctttgtgtctttcccagttatcttgaggggagtgggatgtagggctggtattctttgcttaggttcatttacaagatgtatcagtgttgtaagtccaataatttaagtccagtgattcaaaatcaggtatagagtccagaaacatggactacacataaggttctctatttaagttaaatacaaatgcaactttttagtgagcttttaggactactcttcaaaaaaagtgtattgctcagaatgatgacctgtaaatgtaagagtggcaggcctctgtctgtgaaagtcagaacacagggctcgagcctctggaactgaccctttgcaagtctttacaaaagaaaaaaggcagtggggagagagagtgttttggttacatcagaaataattgagatgggaaagaatagtgcagctccatagaggagacggactgtagacaatgagattaagcttcaatcactgctcctcagcaatgtgaagaatcaaagtcagggcaagaaagcgaaagcttggacttctattcaaagtggcagcagagtgggagggcggtacccttctagcccagtgctgctgagcttgtgtgaaaatcagacctgagatggcttgaagcagccaagaaccacatgggcattgcccagaattacaggagttagcacaccagctctacagataagaaaacattgaaattcaaagattaaggccaaaaatatctcacttgcaattttaatattttcatttggatttatataaatgaaacatatatatgttttggaatggccagagtgaggcaaaggggatccctgagccaggaaaggtggtgacaaatggtagccataattatttattgtcctctctgtccagactaaatgttcccttttccatattaaacatttaccattcttccttcatccattcttagatcttatcctctaaacctttagtcatcgtttcactctcctttgattccttgttatgggtctttcaactctggaaagacaaagagatagtgggagaggaagcccggtcactgagcatctacagagggctaaatatatttattctcatttgttattcccaatattctcttcacaaagtcatagaccatgacattgtttgtatcttcaagaccagttattaactttctggctccaaggagatcccctgcccaagtgcctaggggcagtagacagctgtctcagggacagtcgtagcatgtgctggattattagtgcagcagctgacactttttcccagaagggagagaggcagcaagtcagaaagttcacgggaatgagttgggagggggtcccagggaagggggacaggctgccaggagaaggaaagtacacgggagaaaatagtggggctctgatgagttagtagggttctgttaccaataaaattgtttccataaactgta

SEQ ID NO: 7720 - protein, 367 aa, Homo sapiens; identical to SEQ ID NO: 1118

SEQ ID NO: 7721 - DNA, 2723 bp, Homo sapiens
gcgttcccgccggccccagctccagccccgcagcccaccgtgcaaacatgcttagacagagaagagattaacttcagtggcttcccactaattacagagattaagaagtggctgcctgaactattttccaaaggatacacattacaaattattgaatagggcagctaaccaagaagatcctattggtttggggggaacacaacttccagcagccacaagggatgctgctactcaggtgccaactgaaacaagctcctccacagaagcaggcctgatgaaattatagaagagagaattcaaactaaagcttttcaagagtatagcccagctcacatggataccgtctctgtcgtggctgctttgaactcagacctttgtgtctctggagggaaagataagacagttgtggcctataattggaaaactggaaatgtggtgaaaaggttcaaaggacatgaacatgagatcaccaaggtagcctgtattcccaaatccagccagttcttcagtgcctctcgtgacaggatggtcatgatgtgggacttgcacggttcctcacaaccaaggcagcaattgtgtggccatgccatggtggtcaccggattggctgtgagtccagactcatcacagctgtgcactggctctcgggacaacaccctgcttctgtgggatgtggtgacaggacagagtgtggaaagagcatctgtctccaggaacgtggtcactcacctgtgctgggtccccagagaaccatacatactacagacctctgaagataaaaccctcaggtgggcttactgagcagctgtgaaagtgtttcttgtgagattatgggacagtcgggggctgcaggtagctcatatgtttcctgcaaagcagcacattcagacctactgtgaagtcagtgtggatggacacaagtgtatctcctgcagcaatggctttggaggagaaggctgtgaagccacgttgtgggacctaagacagactcgaaacagaatatgtgagtataaggggcatttccagactgtcgcatcctgcgtctttctaccaagagcattggccttgatgcctttaattgctacctcatcacatgattgcaaggtgaagatttggaaccaagatactggagcctgccttttcaccttgtctctggatggatcaggacccttgacttctctggctgttggtgacgccatctccttattgtgtgcaagttttaacagaggaattcacttactcagaatggaccacagccaagggctggaactgcaggaagtggcagcattctgaggccaagagacactcactggacaatatcaaaccatggctcctcctcagcatggctttgtgtctttcccagttatcttgaggggagtgggatgtagggctggtattctttgcttaggttcatttacaagatgtatcagtgttgtaagtccaataatttaagtccagtgattcaaaatcaggtatagagtccagaaacatggactacacataaggttctctatttaagttaaatacaaatgcaactttttagtgagcttttaggactactcttcaaaaaaagtgtattgctcagaatgatgacctgtaaatgtaagagtggcaggcctctgtctgtgaaagtcagaacacagggctcgagcctctggaactgaccctttgcaagtctttacaaaagaaaaaaggcagtggggagagagagtgttttggttacatcagaaataattgagatgggaaagaatagtgcagctccatagaggagacggactgtagacaatgagattaagcttcaatcactgctcctcagcaatgtgaagaatcaaagtcagggcaagaaagcgaaagcttggacttctattcaaagtggcagcagagtgggagggcggtacccttctagcccagtgctgctgagcttgtgtgaaaatcagacctgagatggcttgaagcagccaagaaccacatgggcattgcccagaattacaggagttagcacaccagctctacagataagaaaacattgaaattcaaagattaaggccaaaaatatctcacttgcaattttaatattttcatttggatttatataaatgaaacatatatatgttttggaatggccagagtgaggcaaaggggatccctgaaataacattagaacatacaggaaaaacgaggcaggcagatcactttaggtcaggagttcaagaccagcctgtacgtgcgtgcctgtagtcccagctactcgggaggctgagatgggagaatcacttgaacctgggaggcagagtttgcagtgagctgagattgtgccactgcactccagtctgtgtgacagaatgagaccttgtcttgaaaaaaaaaaaaacaaaaaaccacatacaggaaaaaagagagggatggagtcaactgtgccccagacattaagcccccttcagtgaggaggggcaaggtgctcaggcctgcctgtgtggcccccaggagtcagacctcagcctcatgctcactggtccattttcctccagggaaaatggagttctttctgccttcagagatgcccacacataaggcacatgaggctgttggtgacaccatcaccaacactggagattccctttctgacaagtcccagccaaagaaagattttgcatttgtcttctctgtcctctgcttgtctctgataccagtgactgacagccaccttccttcttccctctctt

SEQ ID NO: 7722 - protein, 155 aa, Homo sapiens
MDTVSVVAALNSDLCVSGGKDKTVVAYNWKTGNVVKRFKGHEHEITKVACIPKSSQFFSASRDRMVMMWDLHGSSQPRQQLCGHAMVVTGLAVSPDSSQLCTGSRDNTLLLWDVVTGQSVERASVSRNVVTHLCWVPREPYILQTSEDKTLRWAY

SEQ ID NO: 7723 - DNA, 2692 bp, Homo sapiens
agcaacgtgcgcctgctgctaggggcggaggcgcgggagggctcggaggctgttcccacccccaggctccgcgttcccgccggccccagctccagccccgcagcccaccgtgcaaacatgcttagacagagaagagattaacttcagtggcttcccactaattacagagattaagaagtggctgcctgaactattttccaaaggatacacattacaaattattgaatagggcagctaaccaagaagatcctattggtttggggggaacacaacttccagcagccacaagggatgctgctactcaggtgccaactgaaacaagctcctccacagaaggtttcgtttaggttttgtgtcgtgatggggaaacagcaaagcaaactcaaacacagcacttataaatacggacagttgtggcctataattggaaaactggaaatgtggtgaaaaggttcaaaggacatgaacatgagatcaccaaggtagcctgtattcccaaatccagccagttcttcagtgcctctcgtgacaggatggtcatgatgtgggacttgcacggttcctcacaaccaaggcagcaattgtgtggccatgccatggtggtcaccggattggctgtgagtccagactcatcacagctgtgcactggctctcgggacaacaccctgcttctgtgggatgtggtgacaggacagagtgtggaaagagcatctgtctccaggaacgtggtcactcacctgtgctgggtccccagagaaccatacatactacagacctctgaagataaaaccctcagattatgggacagtcgggggctgcaggtagctcatatgtttcctgcaaagcagcacattcagacctactgtgaagtcagtgtggatggacacaagtgtatctcctgcagcaatggctttggaggagaaggctgtgaagccacgttgtgggacctaagacagactcgaaacagaatatgtgagtataaggggcatttccagactgtcgcatcctgcgtctttctaccaagagcattggccttgatgcctttaattgctacctcatcacatgattgcaaggtgaagatttggaaccaagatactggagcctgccttttcaccttgtctctggatggatcaggacccttgacttctctggctgttggtgacgccatctccttattgtgtgcaagttttaacagaggaattcacttactcagaatggaccacagccaagggctggaactgcaggaagtggcagcattctgaggccaagagacactcactggacaatatcaaaccatggctcctcctcagcatggctttgtgtctttcccagttatcttgaggggagtgggatgtagggctggtattctttgcttaggttcatttacaagatgtatcagtgttgtaagtccaataatttaagtccagtgattcaaaatcaggtatagagtccagaaacatggactacacataaggttctctatttaagttaaatacaaatgcaactttttagtgagcttttaggactactcttcaaaaaaagtgtattgctcagaatgatgacctgtaaatgtaagagtggcaggcctctgtctgtgaaagtcagaacacagggctcgagcctctggaactgaccctttgcaagtctttacaaaagaaaaaaggcagtggggagagagagtgttttggttacatcagaaataattgagatgggaaagaatagtgcagctccatagaggagacggactgtagacaatgagattaagcttcaatcactgctcctcagcaatgtgaagaatcaaagtcagggcaagaaagcgaaagcttggacttctattcaaagtggcagcagagtgggagggcggtacccttctagcccagtgctgctgagcttgtgtgaaaatcagacctgagatggcttgaagcagccaagaaccacatgggcattgcccagaattacaggagttagcacaccagctctacagataagaaaacattgaaattcaaagattaaggccaaaaatatctcacttgcaattttaatattttcatttggatttatataaatgaaacatatatatgttttggaatggccagagtgaggcaaaggggatccctgaaataacattagaacatacaggaaaaacgaggcaggcagatcactttaggtcaggagttcaagaccagcctgtacgtgcgtgcctgtagtcccagctactcgggaggctgagatgggagaatcacttgaacctgggaggcagagtttgcagtgagctgagattgtgccactgcactccagtctgtgtgacagaatgagaccttgtcttgaaaaaaaaaaaaacaaaaaaccacatacaggaaaaaagagagggatggagtcaactgtgccccagacattaagcccccttcagtgaggaggggcaaggtgctcaggcctgcctgtgtggcccccaggagtcagacctcagcctcatgctcactggtccattttcctccagggaaaatggagttctttctgccttcagagatgcccacacataaggcacatgaggctgttggtgacaccatcaccaacactggagattccctttctgacaagtcccagccaaagaaagattttgcatttgtcttctctgtcctctgcttgtctctgataccagtgactgacagccaccttccttcttccctctctt

SEQ ID NO: 7724 - protein, 242 aa, Homo sapiens; identical to SEQ ID NO: 1116

SEQ ID NO: 7725 - DNA, 2839 bp, Homo sapiens
agcactcccgccctagcaacgtgcgcctgctgctaggggcggaggcgcgggagggctcggaggctgttcccacccccaggctccgcgttcccgccggccccagctccagccccgcagcccaccgtgcaaacatgcttagacagagaagagattaacttcagtggcttcccactaattacagagattaagaagtggctgcctgaactattttccaaaggatacacattacaaattattgaatagggcagctaaccaagaagatcctattggtttggggggaacacaacttccagcagccacaagggatgctgctactcaggtgccaactgaaacaagctcctccacagaaggtttcgtttaggttttgtgtcgtgatggggaaacagcaaagcaaactcaaacacagcacttataaatacggcaggcctgatgaaattatagaagagagaattcaaactaaagcttttcaagagtatagcccagctcacatggataccgtctctgtcgtggctgctttgaactcagacctttgtgtctctggagggaaagataagacagttgtggcctataattggaaaactggaaatgtggtgaaaaggttcaaaggacatgaacatgagatcaccaaggtagcctgtattcccaaatccagccagttcttcagtgcctctcgtgacaggatggtcatgatgtgggacttgcacggttcctcacaaccaaggcagcaattgtgtggccatgccatggtggtcaccggattggctgtgagtccagactcatcacagctgtgcactggctctcgggacaacaccctgcttctgtgggatgtggtgacaggacagagtgtggaaagagcatctgtctccaggaacgtggtcactcacctgtgctgggtccccagagaaccatacatactacagacctctgaagataaaaccctcagattatgggacagtcgggggctgcaggtagctcatatgtttcctgcaaagcagcacattcagacctactgtgaagtcagtgtggatggacacaagtgtatctcctgcagcaatggctttggaggagaaggctgtgaagccacgttgtgggacctaagacagactcgaaacagaatatgtgagtataaggggcatttccagactgtcgcatcctgcgtctttctaccaagagcattggccttgatgcctttaattgctacctcatcacatgattgcaaggtgaagatttggaaccaagatactggagcctgccttttcaccttgtctctggatggatcaggacccttgacttctctggctgttggtgacgccatctccttattgtgtgcaagttttaacagaggaattcacttactcagaatggaccacagccaagggctggaactgcaggaagtggcagcattctgaggccaagagacactcactggacaatatcaaaccatggctcctcctcagcatggctttgtgtctttcccagttatcttgaggggagtgggatgtagggctggtattctttgcttaggttcatttacaagatgtatcagtgttgtaagtccaataatttaagtccagtgattcaaaatcaggtatagagtccagaaacatggactacacataaggttctctatttaagttaaatacaaatgcaactttttagtgagcttttaggactactcttcaaaaaaagtgtattgctcagaatgatgacctgtaaatgtaagagtggcaggcctctgtctgtgaaagtcagaacacagggctcgagcctctggaactgaccctttgcaagtctttacaaaagaaaaaaggcagtggggagagagagtgttttggttacatcagaaataattgagatgggaaagaatagtgcagctccatagaggagacggactgtagacaatgagattaagcttcaatcactgctcctcagcaatgtgaagaatcaaagtcagggcaagaaagcgaaagcttggacttctattcaaagtggcagcagagtgggagggcggtacccttctagcccagtgctgctgagcttgtgtgaaaatcagacctgagatggcttgaagcagccaagaaccacatgggcattgcccagaattacaggagttagcacaccagctctacagataagaaaacattgaaattcaaagattaaggccaaaaatatctcacttgcaattttaatattttcatttggatttatataaatgaaacatatatatgttttggaatggccagagtgaggcaaaggggatccctgaaataacattagaacatacaggaaaaacgaggcaggcagatcactttaggtcaggagttcaagaccagcctgtacgtgcgtgcctgtagtcccagctactcgggaggctgagatgggagaatcacttgaacctgggaggcagagtttgcagtgagctgagattgtgccactgcactccagtctgtgtgacagaatgagaccttgtcttgaaaaaaaaaaaaacaaaaaaccacatacaggaaaaaagagagggatggagtcaactgtgccccagacattaagcccccttcagtgaggaggggcaaggtgctcaggcctgcctgtgtggcccccaggagtcagacctcagcctcatgctcactggtccattttcctccagggaaaatggagttctttctgccttcagagatgcccacacataaggcacatgaggctgttggtgacaccatcaccaacactggagattccctttctgacaagtcccagccaaagaaagattttgcatttgtcttctctgtcctctgcttgtctctgataccagtgactgacagccaccttccttcttccctctctt

SEQ ID NO: 7726 - protein, 367 aa, Homo sapiens; identical to SEQ ID NO: 1118

SEQ ID NO: 7727 - DNA, 533 bp, Homo sapiens
aggcgcgggagggctcggaggctgttcccacccccaggctccgcgttcccgccggccccagctccagccccgcagcccaccgggaacacaacttccagcagccacaagggatgctgctactcaggtgccaactgaaacaagctcctccacagaagacagttgtggcctataattggaaaactggaaatgtggtgaaaaggttcaaaggacatgaacatgagatcaccaaggtagcctgtattcccaaatccagccagttcttcagtgcctctcgtgacaggatggtcatgatgtgggacttgcacggttcctcacaaccaaggcagcaattgtgtggccatgccatggtggtcaccggattggctgtgagtccagactcatcacagctgtgcactggctctcgggacaacaccctgcttctgtgggatgtggtgacaggacagagtgtggaaagagcatctgtctccaggaacgtggtcactcacctgtgctgggtccccagagaaccatacatactacagacctctgaagat

SEQ ID NO: 7728 - protein, 140 aa, Homo sapiens
MLLLRCQLKQAPPQKTVVAYNWKTGNVVKRFKGHEHEITKVACIPKSSQFFSASRDRMVMMWDLHGSSQPRQQLCGHAMVVTGLAVSPDSSQLCTGSRDNTLLLWDVVTGQSVERASVSRNVVTHLCWVPREPYILQTSE

SEQ ID NO: 7729 - DNA, 2348 bp, Homo sapiens
cccgccgccacctgcgacaggtggagcgcacggggcgggcgcacggccatgtccgccgagggcgcggagccggggccggggtccgggtccgggcccgggccggggccactctgccccgaacacggccaggctctgagctggttctgcggctccgagcgacggcccgtgtgcgccgcctgcgcggggttgggcggtcgctgccgggggcaccgcatccgccgggcggaggagcgcgccgaggagctgcggaacaagattgtggaccagtgtgagaggctgcagttacagagtgctgccatcaccaagtatgtggcggacgtcctgccggggaagaatcaaagagcagtgagcatggccagtgcagcgagggaactggttatccagcggttgagtctggtgaggagtctttgcgagagcgaggagcagcggttactggaacaggtgcatggcgaagaggagcgggcccaccagagcatcctgacacagcgggtgcactgggccgaggcgctgcagaaacttgacaccatccgcactggcctggtgggcatgcttactcacctggatgacctccagctgattcagaaggagcaagagattttcgagaggaccgaagaagcagagggcattttggatccccaggagtcggaaatgttaaactttaatgagaagtgcactcggagcccactactgacccaactctgggcaacggcggttcttgggtctctctcaggcacagaggacatacggatcgatgagaggacagtcagccccttcctgcaattgtcagatgatcgaaagaccctgaccttcagcaccaagaagtcaaaggcctgtgcagatggcccggagcgcttcgaccactggcccaatgccctggctgccacctccttccagaatgggctccatgcctggatggtgaatgtccagaacagttgtgcctataaggtgggcgtggcttcaggccacctgccccgcaagggttctggcagtgactgccgtctgggccacaatgccttctcctgggtcttctctcgctatgatcaggagtttcgtttctcacacaatgggcagcacgagcccctggggctgctgcggggcccagcccagctgggtgtagtgctggacttgcaggttcaggagctgctcttctatgagccagcctccggcacagtgctctgtgcccatcatgtgtccttcccggggcccctcttcccagtctttgctgtggccgatcagaccatttctatcgtccgctgacctctggccacaggaagccaggtccaccgcccaccaccctttcaggccatgtttctactcagtgtgcttttcccaaatgatgtgtgtggtgtttctaagagaaacagggcccataaccagtgggcagctttaggagggatggggatctgtttcagatctaggcataacctgtaaatcacaggtgtccaaacttttggcttccctgggccacatttgaagaagaattttcttgggccacataaaatacactaacgatagctgatgagctaaaaaaaaaaaaaaagtctgtgtataatttttgtgatatctgccaccacagataagcaaaaaagtccttgcattcaaagggttggagattgctgctttgagtgctgggtacctgtggggaacctactactccctgggccttagtctcccaaatccaccatgcatctgcccctctgagggtgtcttcactttgtctctggcatctagcatggtgcctggtgcatagtgagcatgcaataaatatttggcaggtgagtggatggatagatggataggtgaatgtaggtggacaggtgactgggtggatgttgtggtctctggagaagcactgccattcagcctcctgctccagctgttcacatgcagaaatgctctcttcacaggcagagaagcctgtggctaaagtttccacatcccattaactcagtgcttttgtctttttcatgacatggcacatagagaaaatatttttttctagcacacaagagcaacctgaaaggctgctcctggccagaggactctgtcccgggggaccgtgtcctcccccatgtcctgcctaggccctcagaggaccaggggatcatgtctccaggtaacccgactgtagcccctgctggctgagctccagcctgtgcccactgataatagcagggacggccttttctcttagagcagctgataagtttccctacctgatggccccctctgacataaactgcacacctggggtgatggcttaaagccagaaagagctgagggagttaagagggccaaccttagggcacgtgggcattattaaaggtcttaaaagcattgaagattta

SEQ ID NO: 7730 - protein, 402 aa, Homo sapiens; identical to SEQ ID NO: 1122

SEQ ID NO: 7731 - DNA, 2222 bp, Homo sapiens
ccgccgccacctgcgacaggtggagcgcacggggcgggcgcacggccatgtccgccgagggcgcggagccggggccggggtccgggtccgggcccgggccggggccactctgccccgaacacggccaggctctgagctggttctgcggctccgagcgacggcccgtgtgcgccgcctgcgcggggttgggcggtcgctgccgggggcaccgcatccgccgggcggaggagcgcgccgaggagctgcggaacaagattgtggaccagtgtgagaggctgcagttacagagtgctgccatcaccaagtatgtggcggacgtcctgccggggaagaatcaaagagcagtgagcatggccagtgcagcgagggaactggttatccagcggttgagtctggtgaggagtctttgcgagagcgaggagcagcggttactggaacaggtgcatggcgaagaggagcgggcccaccagagcatcctgacacagcgggtgcactgggccgaggcgctgcagaaacttgacaccatccgcactggcctggtgggcatgcttactcacctggatgacctccagctgattcagaaggagcaagagattttcgagaggcacagaggacatacggatcgatgagaggacagtcagccccttcctgcaattgtcagatgatcgaaagaccctgaccttcagcaccaagaagtcaaaggcctgtgcagatggcccggagcgcttcgaccactggcccaatgccctggctgccacctccttccagaatgggctccatgcctggatggtgaatgtccagaacagttgtgcctataaggtgggcgtggcttcaggccacctgccccgcaagggttctggcagtgactgccgtctgggccacaatgccttctcctgggtcttctctcgctatgatcaggagtttcgtttctcacacaatgggcagcacgagcccctggggctgctgcggggcccagcccagctgggtgtagtgctggacttgcaggttcaggagctgctcttctatgagccagcctccggcacagtgctctgtgcccatcatgtgtccttcccggggcccctcttcccagtctttgctgtggccgatcagaccatttctatcgtccgctgacctctggccacaggaagccaggtccaccgcccaccaccctttcaggccatgtttctactcagtgtgcttttcccaaatgatgtgtgtggtgtttctaagagaaacagggcccataaccagtgggcagctttaggagggatggggatctgtttcagatctaggcataacctgtaaatcacaggtgtccaaacttttggcttccctgggccacatttgaagaagaattttcttgggccacataaaatacactaacgatagctgatgagctaaaaaaaaaaaaaaagtctgtgtataatttttgtgatatctgccaccacagataagcaaaaaagtccttgcattcaaagggttggagattgctgctttgagtgctgggtacctgtggggaacctactactccctgggccttagtctcccaaatccaccatgcatctgcccctctgagggtgtcttcactttgtctctggcatctagcatggtgcctggtgcatagtgagcatgcaataaatatttggcaggtgagtggatggatagatggataggtgaatgtaggtggacaggtgactgggtggatgttgtggtctctggagaagcactgccattcagcctcctgctccagctgttcacatgcagaaatgctctcttcacaggcagagaagcctgtggctaaagtttccacatcccattaactcagtgcttttgtctttttcatgacatggcacatagagaaaatatttttttctagcacacaagagcaacctgaaaggctgctcctggccagaggactctgtcccgggggaccgtgtcctcccccatgtcctgcctaggccctcagaggaccaggggatcatgtctccaggtaacccgactgtagcccctgctggctgagctccagcctgtgcccactgataatagcagggacggccttttctcttagagcagctgataagtttccctacctgatggccccctctgacataaactgcacacctggggtgatggcttaaagccagaaagagctgagggagttaagagggccaaccttagggcacgtgggcattattaaaggtcttaaaagcattgaagattta

SEQ ID NO: 7732 - protein, 193 aa, Homo sapiens
MSAEGAEPGPGSGSGPGPGPLCPEHGQALSWFCGSERRPVCAACAGLGGRCRGHRIRRAEERAEELRNKIVDQCERLQLQSAAITKYVADVLPGKNQRAVSMASAARELVIQRLSLVRSLCESEEQRLLEQVHGEEERAHQSILTQRVHWAEALQKLDTIRTGLVGMLTHLDDLQLIQKEQEIFERHRGHTDR

SEQ ID NO: 7733 - DNA, 2193 bp, Homo sapiens
ccgccgccacctgcgacaggtggagcgcacggggcgggcgcacggccatgtccgccgagggcgcggagccggggccggggtccgggtccgggcccgggccggggccactctgccccgaacacggccaggctctgagctggttctgcggctccgagcgacggcccgtgtgcgccgcctgcgcggggttgggcggtcgctgccgggggcaccgcatccgccgggcggaggagcgcgccgaggagctgcggaacaagattgtggaccagtgtgagaggctgcagttacagagtgctgccatcaccaagtatgtggcggacgtcctgccggggaagaatcaaagagcagtgagcatggccagtgcagcgagggaactggttatccagcggttgagtctggtgaggagtctttgcgagagcgaggagcagcggttactggaacaggtgcatggcgaagaggagcgggcccaccagagcatcctgacacagcgggtgcactgggccgaggcgctgcagaaacttgacaccatccgcactggcctggtgggcatgcttactcacctggatgacctccagctgattcagaggacatacggatcgatgagaggacagtcagccccttcctgcaattgtcagatgatcgaaagaccctgaccttcagcaccaagaagtcaaaggcctgtgcagatggcccggagcgcttcgaccactggcccaatgccctggctgccacctccttccagaatgggctccatgcctggatggtgaatgtccagaacagttgtgcctataaggtgggcgtggcttcaggccacctgccccgcaagggttctggcagtgactgccgtctgggccacaatgccttctcctgggtcttctctcgctatgatcaggagtttcgtttctcacacaatgggcagcacgagcccctggggctgctgcggggcccagcccagctgggtgtagtgctggacttgcaggttcaggagctgctcttctatgagccagcctccggcacagtgctctgtgcccatcatgtgtccttcccggggcccctcttcccagtctttgctgtggccgatcagaccatttctatcgtccgctgacctctggccacaggaagccaggtccaccgcccaccaccctttcaggccatgtttctactcagtgtgcttttcccaaatgatgtgtgtggtgtttctaagagaaacagggcccataaccagtgggcagctttaggagggatggggatctgtttcagatctaggcataacctgtaaatcacaggtgtccaaacttttggcttccctgggccacatttgaagaagaattttcttgggccacataaaatacactaacgatagctgatgagctaaaaaaaaaaaaaaagtctgtgtataatttttgtgatatctgccaccacagataagcaaaaaagtccttgcattcaaagggttggagattgctgctttgagtgctgggtacctgtggggaacctactactccctgggccttagtctcccaaatccaccatgcatctgcccctctgagggtgtcttcactttgtctctggcatctagcatggtgcctggtgcatagtgagcatgcaataaatatttggcaggtgagtggatggatagatggataggtgaatgtaggtggacaggtgactgggtggatgttgtggtctctggagaagcactgccattcagcctcctgctccagctgttcacatgcagaaatgctctcttcacaggcagagaagcctgtggctaaagtttccacatcccattaactcagtgcttttgtctttttcatgacatggcacatagagaaaatatttttttctagcacacaagagcaacctgaaaggctgctcctggccagaggactctgtcccgggggaccgtgtcctcccccatgtcctgcctaggccctcagaggaccaggggatcatgtctccaggtaacccgactgtagcccctgctggctgagctccagcctgtgcccactgataatagcagggacggccttttctcttagagcagctgataagtttccctacctgatggccccctctgacataaactgcacacctggggtgatggcttaaagccagaaagagctgagggagttaagagggccaaccttagggcacgtgggcattattaaaggtcttaaaagcattgaagattta

SEQ ID NO: 7734 - protein, 200 aa, Homo sapiens
MSAEGAEPGPGSGSGPGPGPLCPEHGQALSWFCGSERRPVCAACAGLGGRCRGHRIRRAEERAEELRNKIVDQCERLQLQSAAITKYVADVLPGKNQRAVSMASAARELVIQRLSLVRSLCESEEQRLLEQVHGEEERAHQSILTQRVHWAEALQKLDTIRTGLVGMLTHLDDLQLIQRTYGSMRGQSAPSCNCQMIERP

SEQ ID NO: 7735 - DNA, 1941 bp, Homo sapiens
ccgccgccacctgcgacaggtggagcgcacggggcgggcgcacggccatgtccgccgagggcgcggagccggggccggggtccgggtccgggcccgggccggggccactctgccccgaacacggccaggctctgagctggttctgcggctccgagcgacggcccgtgtgcgccgcctgcgcggggttgggcggtcgctgccgggggcaccgcatccgccgggcggaggagcgcgccgaggagctgcggaacaagattgtggaccagtgtgagaggctgcagttacagagtgctgccatcaccaagtatgtggcggacgtcctgccggggaagaatcaaagagcagtgagcatggccagtgcagcgagggaactggttatccagcggttgagtctggtgaggagtctttgcgagagcgaggagcagcggttactggaacaggtgcatggcgaagaggagcgggcccaccagagcatcctgacacagcgggtgcactgggccgaggcgctgcagaaacttgacaccatccgcactggcctggtgggcatgcttactcacctggatgacctccagctgattcagaaggagcaagagattttcgagaggaccgaagaagcagagggcattttggatccccaggatttcgtttctcacacaatgggcagcacgagcccctggggctgctgcggggcccagcccagctgggtgtagtgctggacttgcaggttcaggagctgctcttctatgagccagcctccggcacagtgctctgtgcccatcatgtgtccttcccggggcccctcttcccagtctttgctgtggccgatcagaccatttctatcgtccgctgacctctggccacaggaagccaggtccaccgcccaccaccctttcaggccatgtttctactcagtgtgcttttcccaaatgatgtgtgtggtgtttctaagagaaacagggcccataaccagtgggcagctttaggagggatggggatctgtttcagatctaggcataacctgtaaatcacaggtgtccaaacttttggcttccctgggccacatttgaagaagaattttcttgggccacataaaatacactaacgatagctgatgagctaaaaaaaaaaaaaaagtctgtgtataatttttgtgatatctgccaccacagataagcaaaaaagtccttgcattcaaagggttggagattgctgctttgagtgctgggtacctgtggggaacctactactccctgggccttagtctcccaaatccaccatgcatctgcccctctgagggtgtcttcactttgtctctggcatctagcatggtgcctggtgcatagtgagcatgcaataaatatttggcaggtgagtggatggatagatggataggtgaatgtaggtggacaggtgactgggtggatgttgtggtctctggagaagcactgccattcagcctcctgctccagctgttcacatgcagaaatgctctcttcacaggcagagaagcctgtggctaaagtttccacatcccattaactcagtgcttttgtctttttcatgacatggcacatagagaaaatatttttttctagcacacaagagcaacctgaaaggctgctcctggccagaggactctgtcccgggggaccgtgtcctcccccatgtcctgcctaggccctcagaggaccaggggatcatgtctccaggtaacccgactgtagcccctgctggctgagctccagcctgtgcccactgataatagcagggacggccttttctcttagagcagctgataagtttccctacctgatggccccctctgacataaactgcacacctggggtgatggcttaaagccagaaagagctgagggagttaagagggccaaccttagggcacgtgggcattattaaaggtcttaaaagcattgaagattta

SEQ ID NO: 7736 - protein, 220 aa, Homo sapiens
MSAEGAEPGPGSGSGPGPGPLCPEHGQALSWFCGSERRPVCAACAGLGGRCRGHRIRRAEERAEELRNKIVDQCERLQLQSAAITKYVADVLPGKNQRAVSMASAARELVIQRLSLVRSLCESEEQRLLEQVHGEEERAHQSILTQRVHWAEALQKLDTIRTGLVGMLTHLDDLQLIQKEQEIFERTEEAEGILDPQDFVSHTMGSTSPWGCCGAQPSWV

SEQ ID NO: 7737 - DNA, 2891 bp, Homo sapiens
gcaggtgttttgaactccagctgagggcctgctggctgctgggaaactcctaggcagcagaggcccacgactacttcctcctgagtgccgttcagtggcctgtgtccaggctctgaagggctccaagaagctggtgctgtctgtgtactcagcagggcgcatccctgggggctacgtcaccaaccacatctacacctgggtggacccgcagggccgcagcatctccccaccctcgggcctgccccagccccacggtggtgccctgaggcagcaggagggtgaccggaggagcaccctgcacctcctgcaaggaggggatgagaaaaaggtgaacctggtgctgggggacggccggtccctgggcctcacgatccgtgggggagctgagtacggccttggcatttacatcactggcgtggacccaggctctgaagcagaaggcagcgggctcaaggttggggaccagattctagaagtgaatgggcggagctttctcaacatcctacacgacgaggctgtcaggctgcttaagtcatctcggcacctcatcctgacagtgaaggacgtcgggaggctgccccgtgcccgcaccactgtggacgagaccaagtggatcgccagttcccggatcagggagaccatggcgaactcggcagggtttcttggcgatctcacaacagaaggaataaacaagccaggattttacaagggcccagccggctcccaggtgaccctgagcagcctggggaaccagacacgagtgctgctggaggagcaggctcggcacctgctgaacgagcaggaacacgccaccatggcctactacctggatgagtaccgtggtggcagcgtctctgtggaggccctcgtcatggccctgttcaagctgctcaacacccacgccaagttctcactcctctctgaggtgagaggcaccatttccccgcaagacctagaacgcttcgaccacctggtgctgaggcgtgagattgagtccatgaaggcgcggcagcccccaggccccggggctggggacacctactccatggtctcctacagtgacacgggttcatccacaggcagccacggcacctccaccaccgtcagctcggccaggaacactctggacctggaggaaactggcgaggctgtccagggcaatatcaacgccctcccagatgtgtccgtggatgatgtcagatccacctcccaggggctgtcaagcttcaagccactgcctcgcccaccacctctggcccaaggcaacgacctcccactaggccagccaaggaagctggggagagaggacctccagccaccttcctccatgccttcctgctcgggcactgtcttctcggctccacagaaccgcagcccgccagcgggcaccgcacccaccccagggacctcctctgcacaggacttgccctcttcccccatctatgcctccgtctcccctgccaaccccagctccaagaggccgctggacgcccatctggccctggtcaaccaacaccccatcggccccttcccacgggtccagtcacccccgcacctgaaaagcccctctgcagaggccacagtggctgggggctgccttctgcccccatcaccctctggccacccagaccagacaggcacaaaccagcactttgtcatggtggaggtccaccgccccgacagcgagccagacgtcaatgaagtgagggcgctgccccagacgcgcacagcctctacgctctcccacctctcggacagcgggcagactctaagcgaggacagtggtgtggatgctggcgaggcagaggccagcgccccaggccgaggaaggcagtcggtgtccaccaagagcaggagtagcaaggagctgcctcggaacgagaggcccacagatggggccaacaaaccgcctggacttctggagcccacgtccactctggtccgtgtgaagaaaagtgcggccaccctgggcatcgccatcgagggtggcgccaacacccgccagcccctgcctaggattgtcactattcagagaggcggctcagctcacaactgtgggcagctcaaggtgggccacgtgattctggaagtgaatgggctgacgcttcggggcaaggagcaccgggaggccgcccgcattatcgccgaggccttcaagactaaggaccgtgactacattgactttctggtcactgagttcaatgtgatgctctagaggccaaggcctgagggcctcccaccactgcccagcccctggtcccagtccctttccaccgttggcttcatcaagctccttgcggggttggggctgcatggccagggtggcaggaagacatcccccctccatcccagcccactggaccagaactgggagaggaagagagcaggacaaggcagacagaaggtcaggtcaggaactggtgctgtactgggtacacagtaggcgcccaggacaagtgggttgcaagacaggaagaaaggaaaaggaagggcagagtgctggtttctccaggttgggttgggggcactgctgtcccccctccagctaggacccagcccatccccagatgcctgagcctttgtccaaagtgaggtcactcgagaattcatggacacggcccccagtcagggggcatcttgcaagacctttagtgccacaaataagcatcgagcacctccccattcacacccccattcctcctggctccttatcccccatggtgtttattatttatttccctccccatgcccctggggaccccaaggccccagcttccctctgcacccccagcctatcccagaggccttgcaggtgaccagcagtgtcattgtatttatatacagagcttatgactttaatttttcaataaagaaatctgaacaaggttaga

SEQ ID NO: 7738 - protein, 524 aa, Homo sapiens
MANSAGFLGDLTTEGINKPGFYKGPAGSQVTLSSLGNQTRVLLEEQARHLLNEQEHATMAYYLDEYRGGSVSVEALVMALFKLLNTHAKFSLLSEVRGTISPQDLERFDHLVLRREIESMKARQPPGPGAGDTYSMVSYSDTGSSTGSHGTSTTVSSARNTLDLEETGEAVQGNINALPDVSVDDVRSTSQGLSSFKPLPRPPPLAQGNDLPLGQPRKLGREDLQPPSSMPSCSGTVFSAPQNRSPPAGTAPTPGTSSAQDLPSSPIYASVSPANPSSKRPLDAHLALVNQHPIGPFPRVQSPPHLKSPSAEATVAGGCLLPPSPSGHPDQTGTNQHFVMVEVHRPDSEPDVNEVRALPQTRTASTLSHLSDSGQTLSEDSGVDAGEAEASAPGRGRQSVSTKSRSSKELPRNERPTDGANKPPGLLEPTSTLVRVKKSAATLGIAIEGGANTRQPLPRIVTIQRGGSAHNCGQLKVGHVILEVNGLTLRGKEHREAARIIAEAFKTKDRDYIDFLVTEFNVML

SEQ ID NO: 7739 - DNA, 4108 bp, Homo sapiens
cgggctggcaacgagacggcgtcggaactcgctggaagactcggcccgggtggctcaacagttcgcaaagtccgggcttgcggccgggcggcgcagaggcgcggaggctccccgggcggctgcatcccggggctgccccggacatgccccgcaccccttgtcggacgcccgcgccgcttcaccggctgccactccccggagtgctctgggactagagcgccctccgccccaacttctgactttggggtcccccagccctagaggaacgggcgcccggctgggggagccccgggcatggtgtgacggggcagtcaggtcagctttgcggcgcccccaaactccagccacccgtcgtctccgtgccctccagaatgtagctgctgaccccgcgccccccggactccagcagcagtctccgccacctccgggctccagcagccaactcttgtgtctctcaggaacccgccgacgtctccgcgtcccccggattccaggttcgcgacccccgccgtcttcgcgcctccgggactctagcagcggtctccgcgaccccctaggatccagccactgtacccgtgctccccaaacccaggctccagccgtcgtctccgcgctcccggggatccagctgtcgcgccagtacccgcgaggacagcggcaccgcccacaccccgcgcgctcagagcccggccgggcctcggcgtggagatgaacgcgccgctggacggcctgtcggtgagctcgtcctccaccggctcgctgggctcggcggccggggcgggcggcggcgggggcgcggggctgcggttactgtctgccaacgtgcgccagctgcaccaagcgctgaccgcgctgctgagcgaggcggagcgggagcagttcacccactgcctgaacgcttaccacgcgcgccgcaacgtcttcgacctggtgcgcaccctgcgcgtgctgctggacagtccggtcaagcggcgcctgctgcccatgcttcgtctggtcatcccgcgctccgaccagctgctcttcgaccaatacacggccgagggcctctacctgcccgccaccaccccctacaggcagcccgcctggggcggccccgacagcgcggggccaggggaggtgcgcctggtgagtttgcggcgtgccaaggcccacgagggcttgggcttcagcatccgtgggggctcggagcacggcgtgggcatctacgtgtctctggtggaaccaggctctctagctgagaaggaaggactgcgggtcggggaccagattctgcgcgtcaacgacaaatccctggcccgggtgacccacgcggaggccgtcaaggctctgaagggctccaagaagctggtgctgtctgtgtactcagcagggcgcatccctgggggctacgtcaccaaccacatctacacctgggtggacccgcagggccgcagcatctccccaccctcgggcctgccccagccccacggtggtgccctgaggcagcaggagggtgaccggaggagcaccctgcacctcctgcaaggaggggatgagaaaaaggtgaacctggtgctgggggacggccggtccctgggcctcacgatccgtgggggagctgagtacggccttggcatttacatcactggcgtggacccaggctctgaagcagaaggcagcgggctcaaggttggggaccagattctagaagtgaatgggcggagctttctcaacatcctacacgacgaggctgtcaggctgcttaagtcatctcggcacctcatcctgacagtgaaggacgtcgggaggctgccccgtgcccgcaccactgtggacgagaccaagtggatcgccagttcccggatcagggagaccatggcgaactcggcagggtttcttggcgatctcacaacagaaggaataaacaagccaggattttacaagggcccagccggctcccaggtgaccctgagcagcctggggaaccagacacgagtgctgctggaggagcaggctcggcacctgctgaacgagcaggaacacgccaccatggcctactacctggatgagtaccgtggtggcagcgtctctgtggaggccctcgtcatggccctgttcaagctgctcaacacccacgccaagttctcactcctctctgaggtgagaggcaccatttccccgcaagacctagaacgcttcgaccacctggtgctgaggcgtgagattgagtccatgaaggcgcggcagcccccaggccccggggctggggacacctactccatggtctcctacagtgacacgggttcatccacaggcagccacggcacctccaccaccgtcagctcggccaggaacactctggacctggaggaaactggcgaggctgtccagggcaatatcaacgccctcccagatgtgtccgtggatgatgtcagatccacctcccaggggctgtcaagcttcaagccactgcctcgcccaccacctctggcccaaggcaacgacctcccactaggccagccaaggaagctggggagagaggacctccagccaccttcctccatgccttcctgctcgggcactgtcttctcggctccacagaaccgcagcccgccagcgggcaccgcacccaccccagggacctcctctgcacaggacttgccctcttcccccatctatgcctccgtctcccctgccaaccccagctccaagaggccgctggacgcccatctggccctggtcaaccaacaccccatcggccccttcccacgggtccagtcacccccgcacctgaaaagcccctctgcagaggccacagtggctgggggctgccttctgcccccatcaccctctggccacccagaccagacaggcacaaaccagcactttgtcatggtggaggtccaccgccccgacagcgagccagacgtcaatgaagtgagggcgctgccccagacgcgcacagcctctacgctctcccacctctcggacagcgggcagactctaagcgaggacagtggtgtggatgctggcgaggcagaggccagcgccccaggccgaggaaggcagtcggtgtccaccaagagcaggagtagcaaggagctgcctcggaacgagaggcccacagatggggccaacaaaccgcctggacttctggagcccacgtccactctggtccgtgtgaagaaaagtgcggccaccctgggcatcgccatcgagggtggcgccaacacccgccagcccctgcctaggattgtcactattcagagaggcggctcagctcacaactgtgggcagctcaaggtgggccacgtgattctggaagtgaatgggctgacgcttcggggcaaggagcaccgggaggccgcccgcattatcgccgaggccttcaagactaaggaccgtgactacattgactttctggtcactgagttcaatgtgatgctctagaggccaaggcctgagggcctcccaccactgcccagcccctggtcccagtccctttccaccgttggcttcatcaagctccttgcggggttggggctgcatggccagggtggcaggaagacatcccccctccatcccagcccactggaccagaactgggagaggaagagagcaggacaaggcagacagaaggtcaggtcaggaactggtgctgtactgggtacacagtaggcgcccaggacaagtgggttgcaagacaggaagaaaggaaaaggaagggcagagtgctggtttctccaggttgggttgggggcactgctgtcccccctccagctaggacccagcccatccccagatgcctgagcctttgtccaaagtgaggtcactcgagaattcatggacacggcccccagtcagggggcatcttgcaagacctttagtgccacaaataagcatcgagcacctccccattcacacccccattcctcctggctccttatcccccatggtgtttattatttatttccctccccatgcccctggggaccccaaggccccagcttccctctgcacccccagcctatcccagaggccttgcaggtgaccagcagtgtcattgtatttatatacagagcttatgactttaatttttcaataaagaaatctgaacaaggttaga

SEQ ID NO: 7740 - protein, 907 aa, Homo sapiens
MNAPLDGLSVSSSSTGSLGSAAGAGGGGGAGLRLLSANVRQLHQALTALLSEAEREQFTHCLNAYHARRNVFDLVRTLRVLLDSPVKRRLLPMLRLVIPRSDQLLFDQYTAEGLYLPATTPYRQPAWGGPDSAGPGEVRLVSLRRAKAHEGLGFSIRGGSEHGVGIYVSLVEPGSLAEKEGLRVGDQILRVNDKSLARVTHAEAVKALKGSKKLVLSVYSAGRIPGGYVTNHIYTWVDPQGRSISPPSGLPQPHGGALRQQEGDRRSTLHLLQGGDEKKVNLVLGDGRSLGLTIRGGAEYGLGIYITGVDPGSEAEGSGLKVGDQILEVNGRSFLNILHDEAVRLLKSSRHLILTVKDVGRLPRARTTVDETKWIASSRIRETMANSAGFLGDLTTEGINKPGFYKGPAGSQVTLSSLGNQTRVLLEEQARHLLNEQEHATMAYYLDEYRGGSVSVEALVMALFKLLNTHAKFSLLSEVRGTISPQDLERFDHLVLRREIESMKARQPPGPGAGDTYSMVSYSDTGSSTGSHGTSTTVSSARNTLDLEETGEAVQGNINALPDVSVDDVRSTSQGLSSFKPLPRPPPLAQGNDLPLGQPRKLGREDLQPPSSMPSCSGTVFSAPQNRSPPAGTAPTPGTSSAQDLPSSPIYASVSPANPSSKRPLDAHLALVNQHPIGPFPRVQSPPHLKSPSAEATVAGGCLLPPSPSGHPDQTGTNQHFVMVEVHRPDSEPDVNEVRALPQTRTASTLSHLSDSGQTLSEDSGVDAGEAEASAPGRGRQSVSTKSRSSKELPRNERPTDGANKPPGLLEPTSTLVRVKKSAATLGIAIEGGANTRQPLPRIVTIQRGGSAHNCGQLKVGHVILEVNGLTLRGKEHREAARIIAEAFKTKDRDYIDFLVTEFNVML

SEQ ID NO: 7741 - DNA, 623 bp, Homo sapiens
agactcggcccgggtggctcaacagttcgcaaagtccgggcttgcggccgggcggcgcagaggcgcggaggctccccgggcggctgcatcccggggctgccccggacatgccccgcaccccttgtcggacgcccgcgccgcttcaccggctgccactccccggagtgctctgggactagagcgccctccgccccaacttctgactttggggtcccccagccctagaggaacgggcgcccggctgggggagccccgggcatggtgtgacggggcagtcaggtcagctttgcggcgcccccaaactccagccacccgtcgtctccgtgccctcttcccccatctatgcctccgtctcccctgccaaccccagctccaagaggccgctggacgcccatctggccctggtcaaccaacaccccatcggccccttcccacgggtccagtcacccccgcacctgaaaagcccctctgcagaggccacagtggctgggggctgccttctgcccccatcaccctctggccacccagaccagacaggcacaaaccagcactttgtcatggtggaggtccaccgccccgacagcgagccagacgtcaatgaagtgagggcgctgccccagacg

SEQ ID NO: 7742 - protein, 38 aa, Homo sapiens
MPPSPLPTPAPRGRWTPIWPWSTNTPSAPSHGSSHPRT

SEQ ID NO: 7743 - DNA, 1777 bp, Homo sapiens
cgggctggcaacgagacggcgtcggaactcgctggaagactcggcccgggtggctcaacagttcgcaaagtccgggcttgcggccgggcggcgcagaggcgcggaggctccccgggcggctgcatcccggggctgccccggacatgccccgcaccccttgtcggacgcccgcgccgcttcaccggctgccactccccggagtgctctgggactagagcgccctccgccccaacttctgactttggggtcccccagccctagaggaacgggcgcccggctgggggagccccgggcatggtgtgacggggcagtcaggtcagctttgcggcgcccccaaactccagccacccgtcgtctccgtgccctccagaatgtagctgctgaccccgcgccccccggactccagcagcagtctccgccacctccgggctccagcagccaactcttgtgtctctcaggaacccgccgacgtctccgcgtcccccggattccaggttcgcgacccccgccgtcttcgcgcctccgggactctagcagcggtctccgcgaccccctaggatccagccactgtacccgtgctccccaaacccaggctccagccgtcgtctccgcgctcccggggatccagctgtcgcgccagtacccgcgaggacagcggcaccgcccacaccccgcgcgctcagagcccggccgggcctcggcgtggagatgaacgcgccgctggacggcctgtcggtgagctcgtcctccaccggctcgctgggctcggcggccggggcgggcggcggcgggggcgcggggctgcggttactgtctgccaacgtgcgccagctgcaccaagcgctgaccgcgctgctgagcgaggcggagcgggagcagttcacccactgcctgaacgcttaccacgcgcgccgcaacgtcttcgacctggtgcgcaccctgcgcgtgctgctggacagtccggtcaagcggcgcctgctgcccatgcttcgtctggtcatcccgcgctccgaccagctgctcttcgaccaatacacggccgagggcctctacctgcccgccaccaccccctacaggcagcccgcctggggcggccccgacagcgcggggccaggggaggtgcgcctggtgagtttgcggcgtgccaaggcccacgagggcttgggcttcagcatccgtgggggctcggagcacggcgtgggcatctacgtgtctctggtggaaccaggctctctagctgagaaggaaggactgcgggtcggggaccagattctgcgcgtcaacgacaaatccctggcccgggtgacccacgcggaggccgtcaaggctctgaagggctccaagaagctggtgctgtctgtgtactcagcagggcgcatccctgggggctacgtcaccaaccacatctacacctgggtggacccgcagggccgcagcatctccccaccctcgggcctgccccagccccacggtggtgccctgaggcagcaggagggtgaccggaggagcaccctgcacctcctgcaaggaggggatgagaaaaaggtgagtggggtggggaaaggaggccagcctctcagacaccgtattctccctccgaacccagaacagcagagctgcttggaggccgcaagaagaggctggttctgtccaggctctgtcttccctcaagtctgtactgaagggtggtgttttttctttgcttttctttttgacctgtgtagtgtatgttataatacaggctaagctgccacaataaaagagcttaaatactgtg

SEQ ID NO: 7744 - protein, 345 aa, Homo sapiens
MNAPLDGLSVSSSSTGSLGSAAGAGGGGGAGLRLLSANVRQLHQALTALLSEAEREQFTHCLNAYHARRNVFDLVRTLRVLLDSPVKRRLLPMLRLVIPRSDQLLFDQYTAEGLYLPATTPYRQPAWGGPDSAGPGEVRLVSLRRAKAHEGLGFSIRGGSEHGVGIYVSLVEPGSLAEKEGLRVGDQILRVNDKSLARVTHAEAVKALKGSKKLVLSVYSAGRIPGGYVTNHIYTWVDPQGRSISPPSGLPQPHGGALRQQEGDRRSTLHLLQGGDEKKVSGVGKGGQPLRHRILPPNPEQQSCLEAARRGWFCPGSVFPQVCTEGWCFFFAFLFDLCSVCYNTG

SEQ ID NO: 7745 - DNA, 791 bp, Homo sapiens
gcccggccgggcctcggcgtggagatgaacgcgccgctggacggcctgtcggtgagctcgtcctccaccggctcgctgggctcggcggccggggcgggcggcggcgggggcgcggggctgcggttactgtctgccaacgtgcgccagctgcaccaagcgctgaccgcgctgctgagcgaggcggagcgggagcagttcacccactgcctgaacgcttaccacgcgcgccgcaacgtcttcgacctggtgcgcaccctgcgcgtgctgctggacagtccggtcaagcggcgcctgctgcccatgcttcgtctggtcatcccgcgctccgaccagctgctcttcgaccaatacacggccgagggcctctacctgcccgccaccaccccctacaggcagcccgcctggggcggccccgacagcgcggggccaggggaggtgcgcctggtgagtttgcggcgtgccaaggcccacgagggcttgggcttcagcatccgtgggggctcggagcacggcgtgggcatctacgtgtctctggtggaaccaggctctctagctgagaaggaaggactgcgggtcggggaccagattctgcgcgtcaacgacaaatccctggcccgggtgacccacgcggaggccgtcaaggttgtgtatcctgaagcaagtcacttgccctctcaggacctcttgttctccacttggaaaatggggccactggaccaaataagcggtccctaacctttttggaaatgagactcctgcctgaatgtaaaaaataaattccctagcccctg

SEQ ID NO: 7746 - protein, 236 aa, Homo sapiens
MNAPLDGLSVSSSSTGSLGSAAGAGGGGGAGLRLLSANVRQLHQALTALLSEAEREQFTHCLNAYHARRNVFDLVRTLRVLLDSPVKRRLLPMLRLVIPRSDQLLFDQYTAEGLYLPATTPYRQPAWGGPDSAGPGEVRLVSLRRAKAHEGLGFSIRGGSEHGVGIYVSLVEPGSLAEKEGLRVGDQILRVNDKSLARVTHAEAVKVVYPEASHLPSQDLLFSTWKMGPLDQISGP

SEQ ID NO: 7747 - DNA, 1084 bp, Homo sapiens
aacgagacggcgtcggaactcgctggaagactcggcccgggtggctcaacagttcgcaaagtccgggcttgcggccgggcggcgcagaggcgcggaggctccccgggcggctgcatcccggggctgccccggacatgccccgcaccccttgtcggacgcccgcgccgcttcaccggctgccactccccggagtgctctgggactagagcgccctccgccccaacttctgactttggggtcccccagccctagaggaacgggcgcccggctgggggagccccgggcatggtgtgacggggcagtcaggaacccgccgacgtctccgcgtcccccggattccaggttcgcgacccccgccgtcttcgcgcctccgggactctagcagcggtctccgcgaccccctaggatccagccactgtacccgtgctccccaaacccaggctccagccgtcgtctccgcgctcccggggatccagctgtcgcgccagtacccgcgaggacagcggcaccgcccacaccccgcgcgctcagagcccggccgggcctcggcgtggagatgaacgcgccgctggacggcctgtcggtgagctcgtcctccaccggctcgctgggctcggcggccggggcgggcggcggcgggggcgcggggctgcggttactgtctgccaacgtgcgccagctgcaccaagcgctgaccgcgctgctgagcgaggcggagcgggagcagttcacccactgcctgaacgcttaccacgcgcgccgcaacgtcttcgacctggtgcgcaccctgcgcgtgctgctggacagtccggtcaagcggcgcctgctgcccatgcttcgtctggtcatcccgcgctccgaccagctgctcttcgaccaatacacggccgagggcctctacctgcccgccaccaccccctacaggcagcccgcctggggcggccccgacagcgcggggccaggggaggtgcgcctggtgagtttgcggcgtgccaaggcccacgagggcttgggcttcagcatccgtgggggctcggagcacggcgtgggcatctacgtgtctctggtggaaccaggctctcta

SEQ ID NO: 7748 - protein, 175 aa, Homo sapiens
MNAPLDGLSVSSSSTGSLGSAAGAGGGGGAGLRLLSANVRQLHQALTALLSEAEREQFTHCLNAYHARRNVFDLVRTLRVLLDSPVKRRLLPMLRLVIPRSDQLLFDQYTAEGLYLPATTPYRQPAWGGPDSAGPGEVRLVSLRRAKAHEGLGFSIRGGSEHGVGIYVSLVEPGS

SEQ ID NO: 7749 - DNA, 1138 bp, Homo sapiens
cgggctggcaacgagacggcgtcggaactcgctggaagactcggcccgggtggctcaacagttcgcaaagtccgggcttgcggccgggcggcgcagaggcgcggaggctccccgggcggctgcatcccggggctgccccggacatgccccgcaccccttgtcggacgcccgcgccgcttcaccggctgccactccccggagtgctctgggactagagcgccctccgccccaacttctgactttggggtcccccagccctagaggaacgggcgcccggctgggggagccccgggcatggtgtgacggggcagtcaggtcagctttgcggcgcccccaaactccagccacccgtcgtctccgtgccctccagaatgtagctgctgaccccgcgccccccggactccagcagcagtctccgccacctccgggctccagcagccaactcttgtgtctctcaggaacccgccgacgtctccgcgtcccccggattccaggctccagccgtcgtctccgcgctcccggggatccagctgtcgcgccagtacccgcgaggacagcggcaccgcccacaccccgcgcgctcagagcccggccgggcctcggcgtggagatgaacgcgccgctggacggcctgtcggtgagctcgtcctccaccggctcgctgggctcggcggccggggcgggcggcggcgggggcgcggggctgcggttactgtctgccaacgtgcgccagctgcaccaagcgctgaccgcgctgctgagcgaggcggagcgggagcagttcacccactgcctgaacgcttaccacgcgcgccgcaacgtcttcgacctggtgcgcaccctgcgcgtgctgctggacagtccggtcaagcggcgcctgctgcccatgcttcgtctggtcatcccgcgctccgaccagctgctcttcgaccaatacacggccgagggcctctacctgcccgccaccaccccctacaggcagcccgcctggggcggccccgacagcgcggggccaggggaggtgcgcctggtgagtttgcggcgtgccaaggcccacgagggcttgggcttcagcatccgtgggggctcggagcacggcgtgggcatctacgtgtctctggtggaaccaggctctcta

SEQ ID NO: 7750 - protein, 175 aa, Homo sapiens; identical to SEQ ID NO: 7748

SEQ ID NO: 7751 - DNA, 556 bp, Homo sapiens
aacgagacggcgtcggaactcgctggaagactcggcccgggtggctcaacagttcgcaaagtccgggcttgcggccgggcggcgcagaggcgcggaggctccccgggcggctgcatcccggggctgccccggacatgccccgcaccccttgtcggacgcccgcgccgcttcaccggctgccactccccggagtgctctgggactagagcgccctccgccccaacttctgactttggggtcccccagccctagaggaacgggcgcccggctgggggagccccgggcatggtgtgacggggcagtcaggtcagctttgcggcgcccccaaactccagccacccgtcgtctccgtgccctccagaatgtagctgctgaccccgcgccccccggactccagcagcagtccccgccgtcttcgcgcctccgggactctagcagcggtctccgcgaccccctaggatccagccactgtacccgtgctccccaaacccaggctccagccgtcgtctccgcgctcccggggatccagctgtcgcgccagtacccgcgaggacag

SEQ ID NO: 7752 - protein, 184 aa, Homo sapiens
TRRRRNSLEDSARVAQQFAKSGLAAGRRRGAEAPRAAASRGCPGHAPHPLSDARAASPAATPRSALGLERPPPQLLTLGSPSPRGTGARLGEPRAWCDGAVRSALRRPQTPATRRLRALQNVAADPAPPGLQQQSPPSSRLRDSSSGLRDPLGSSHCTRAPQTQAPAVVSALPGIQLSRQYPRG

SEQ ID NO: 7753 - DNA, 1230 bp, Homo sapiens
tcacacaggttagcggcagacttgatcccgagtctcctaactggcaacccaagactctatccccggaactggcaagaatcttcctgaactaccccgataaaattttgagtgccaaagaaagtcccagaaagggagtgagtagagcagtgtggagagtaggaggaaagtgatttgacttggcccctcctctcttgacgttgagcatactgcaaacagacactatacgtggcagggcggctacagagtgaaccagcgacagggtagccattaaaagaggccagggagcggacagaggagtagagggcagtactgcgcagtagactgcacaggcgcagtcgaggagctccgctcctttctcctcagccccgccccgccccatttctgccgaatcacagaagttcaagagcggtcagctgatgctacgctgtgcggtcacgtgacaacgggggcgaagcgcaggcgcaaggagcaagcgcagattgtgggcggctgtgtcagctgacccaaggggccttcgaggtgccttaggccgcttgccttgctctcagaatcgctgccgccatggctagtcagtctcaggggattcagcagctgctgcaggccgagaagcgggcagccgagaaggtgtccgaggcccgcaaaagaaagaaccggaggctgaagcaggccaaagaagaagctcaggctgaaattgaacagtaccgcctgcagagggagaaagaattcaaggccaaggaagctgcggcattgggatcccgtggcagttgcagcactgaagtggagaaggagacccaggagaagatgaccatcctccagacatacttccggcagaacagggatgaagtcttggacaacctcttggcttttgtctgtgacattcggccagaaatccatgaaaactaccgcataaatggatagaagagagaagcacctgtgctgtggagtggcattttagatgccctcacgaatatgaagcttagcacagctctagttacattcttatgatatggcattaaattatttccatatattatataataggtccttccactttttggagagtagcaaatctagcttttttgtacagacttagaaattatctaaagatttcatctttttacctcatatttcttaggaatttaatggttatatgttgtctttttttcctatgtcttttggctcaagcaacatgtatatcagtgttgactttttctttcttagatctagttt

SEQ ID NO: 7754 - protein, 118 aa, Homo sapiens; identical to SEQ ID NO: 1126

SEQ ID NO: 7755 - DNA, 1557 bp, Homo sapiens
tcacacaggttagcggcagacttgatcccgagtctcctaactggcaacccaagactctatccccggaactggcaagaatcttcctgaactaccccgataaaattttgagtgccaaagaaagtcccagaaagggagtgagtagagcagtgtggagagtaggaggaaagtgatttgacttggcccctcctctcttgacgttgagcatactgcaaacagacactatacgtggcagggcggctacagagtgaaccagcgacagggtagccattaaaagaggccagggagcggacagaggagtagagggcagtactgcgcagtagactgcacaggcgcagtcgaggagctccgctcctttctcctcagccccgccccgccccatttctgccgaatcacagaagttcaagagcggtcagctgatgctacgctgtgcggtcacgtgacaacgggggcgaagcgcaggcgcaaggagcaagcgcagattgtgggcggctgtgtcagctgacccaaggggccttcgaggtgccttaggccgcttgccttgctctcagaatcgctgccgccatggctagtcagtctcaggggattcagcagctgctgcaggccgagaagcgggcagccgagaaggtgtccgaggcccgcaaaagaaagaaccggaggctgaagcaggccaaagaagaagctcaggctgaaattgaacagtaccgcctgcagagggagaaagaattcaaggccaaggaagctgcggcattgggatcccgtggcagttgcagcactgaagtggagaaggagacccaggagaagatgaccatcctccagacatacttccggcagaacagggatgaagtcttggacaacctcttggcttttgtctgtgacattcggccagaaatccatgaaaactaccgcataaatggatagaagagagaagcacctgtgctgtggagtggcattttagatgccctcacgaatatgaagcttagcacagctctagttacattcttatgatatggcattaaattatttccatatattatataataggtccttccactttttggagagtagcaaatctagcttttttgtacagacttagaaattatctaaagatttcatctttttacctcatatttcttaggaatttaatggttatatgttgtctttttttcctatgtcttttggctcaagcaacatgtatatcagtgttgactttttctttcttagatctagtttaaaaaaaaaaaaaaccacataacaattctttgaagaaaggaagggattaaataatttttttccctaacactttcttgaaggtcaggggctttatctatgaaaaagtagtaaatagttctttgtaacctgtgtgaagcagcagccagccttaaagtagtccattcttgctaatggttagaacagtgaatactagtggaattgtttgggctgcttttagtttctcttaatcaaaattactagatgatagaattcaagaacttgttacatgtattacttggtgtatcgataatcatttaaaagtaaagactctgtcatgcatttttcccc

SEQ ID NO: 7756 - protein, 118 aa, Homo sapiens; identical to SEQ ID NO: 1126

SEQ ID NO: 7757 - DNA, 2047 bp, Homo sapiens
tcacacaggttagcggcagacttgatcccgagtctcctaactggcaacccaagactctatccccggaactggcaagaatcttcctgaactaccccgataaaattttgagtgccaaagaaagtcccagaaagggagtgagtagagcagtgtggagagtaggaggaaagtgatttgacttggcccctcctctcttgacgttgagcatactgcaaacagacactatacgtggcagggcggctacagagtgaaccagcgacagggtagccattaaaagaggccagggagcggacagaggagtagagggcagtactgcgcagtagactgcacaggcgcagtcgaggagctccgctcctttctcctcagccccgccccgccccatttctgccgaatcacagaagttcaagagcggtcagctgatgctacgctgtgcggtcacgtgacaacgggggcgaagcgcaggcgcaaggagcaagcgcagattgtgggcggctgtgtcagctgacccaaggggccttcgaggtgccttaggccgcttgccttgctctcagaatcgctgccgccatggctagtcagtctcaggggattcagcagctgctgcaggccgagaagcgggcagccgagaaggtgtccgaggcccgcaaaagaaagaaccggaggctgaagcaggccaaagaagaagctcaggctgaaattgaacagtaccgcctgcagagggagaaagaattcaaggccaaggaagctgcggcattgggatcccgtggcagttgcagcactgaagtggagaaggagacccaggagaagatgaccatcctccagacatacttccggcagaacagggatgaagtcttggacaacctcttggcttttgtctgtgacattcggccagaaatccatgaaaactaccgcataaatggatagaagagagaagcacctgtgctgtggagtggcattttagatgccctcacgaatatgaagcttagcacagctctagttacattcttatgatatggcattaaattatttccatatattatataataggtccttccactttttggagagtagcaaatctagcttttttgtacagacttagaaattatctaaagatttcatctttttacctcatatttcttaggaatttaatggttatatgttgtctttttttcctatgtcttttggctcaagcaacatgtatatcagtgttgactttttctttcttagatctagtttaaaaaaaaaaaaaaccacataacaattctttgaagaaaggaagggattaaataatttttttccctaacactttcttgaaggtcaggggctttatctatgaaaaagtagtaaatagttctttgtaacctgtgtgaagcagcagccagccttaaagtagtccattcttgctaatggttagaacagtgaatactagtggaattgtttgggctgcttttagtttctcttaatcaaaattactagatgatagaattcaagaacttgttacatgtattacttggtgtatcgataatcatttaaaagtaaagactctgtcatgcatttttccccattcttttttttttccctgtctccgtgacaaccagtggttcttcatttttgatcatgcgaaatgcattttgacccagatggtctgcagaacttcacttaggacattagcacacaaatagcacacatatcacatacccatttatatacataattagaaaatgttcctgatacatgtgtcatgtgatttcttccaacaaatgttttggaaaacagcaagcaactagtctgtaggttgtcttttctctagagatccttgtcctgggacagcctggggcaagttattaagcatatttccttcctggtgggctagatgatgtgcattatacctgtagtaccttcatactagcccttacaagttaaatgtcctgtggccatcttagccgaaagtctttggttgcaaaatcttataggtaaaaacagttgaaagaacattatgggatttccttgcttgttctgatacaatacaactagatgaccttaaaaaccctca

SEQ ID NO: 7758 - protein, 118 aa, Homo sapiens; identical to SEQ ID NO: 1126

SEQ ID NO: 7759 - DNA, 1045 bp, Homo sapiens
ggcgaagcgcaggcgcaaggagcaagcgcagattgtgggcggctgtgtcagctgacccaaggggccttcgaggtgccttaggccgcttgccttgctctcagaatcgctgccgccatggctagtcagtctcaggggattcagcagctgctgcaggccgagaagcgggcagccgagaaggtgtccgaggcccgcaaaagaaagaaccggaggctgaagcaggccaaagaagaagctcaggctgaaattgaacagtaccgcctgcagagggagaaagaattcaaggccaaggaagctgcggcattgggatcccgtggcagttgcagcactgaagtggagaaggagacccaggagaagatgaccatcctccagacatacttccggcagaacagggatgaagtcttggacaacctcttggcttttgtctgtgacattcggccagaaatccatgaaaactaccgcataaatggatagaagagagaagcacctgtgctgtggagtggcattttagatgccctcacgaatatgaagcttagcacagctctagttacattcttatgatatggcattaaattatttccatatattatataataggtccttccactttttggagagtagcaaatctagcttttttgtacagacttagaaattatctaaagatttcatctttttaccacatgtatatcagtgttgactttttctttcttagatctagtttaaaaaaaaaaaaaaccacataacaattctttgaagaaaggaagggattaaataatttttttccctaacactttcttgaaggtcaggggctttatctatgaaaaagtagtaaatagttctttgtaacctgtgtgaagcagcagccagccttaaagtagtccattcttgctaatggttagaacagtgaatactagtggaattgtttgggctgcttttagtttctcttaatcaaaattactagatgatagaattcaagaacttgttacatgtattacttggtgtatcgataatcatttaaaagtaaagactctgtcatgcatttttcccc

SEQ ID NO: 7760 - protein, 118 aa, Homo sapiens; identical to SEQ ID NO: 1126

SEQ ID NO: 7761 - DNA, 575 bp, Homo sapiens
aggcgcaaggagcaagcgcagattgtgggcggctgtgtcagctgacccaaggggccttcgaggtgccttaggccgcttgccttgctctcagaatcgctgccgccatggctagtcagtctcaggggattcagcagctgctgcaggccgagaagcgggcagccgagaaggtgtccgaggcccgcaaaagaaagaaccggaggctgaagcaggccaaagaagaagctcaggctgaaattgaacagtaccgcctgcagagggagaaagaattcaaggccaaggaagctgcggcattgggatcccgtggcagttgcagcactgaagtggagaaggagacccaggagaagatgaccatcctccagacatacttccggcagaacagggatgaagtcttggacaacctcttggcttttgtctgtgacattcggccagaaatccatgaaaactaccgcataaatggatagaagagagaagcacctgtgctgtggagtggcattttagatgccctcacgaatatgaagcttagcacagctctagttacattcttatgatatggcattaaattatttccatatatt

SEQ ID NO: 7762 - protein, 118 aa, Homo sapiens; identical to SEQ ID NO: 1126

SEQ ID NO: 7763 - DNA, 970 bp, Homo sapiens
ggcgcaaggagcaagcgcagattgtgggcggctgtgtcagctgacccaaggggccttcgaggtgccttaggccgcttgccttgctctcagaatcgctgccgccatggctagtcagtctcaggggattcagcagctgctgcaggccgagaagcgggcagccgagaaggtgtccgaggcccgcaaaagtgagtttcagggtggggctgcccggcgtggcgcgagtcgaagaaagaccgctgggcctcaggtggtgggtagattaggcccgaaaaactgcggggtgcgggcgtgcgtatagtcgcggaaggttgtgtgtttcgaagctttgaggagctgaggctctggaaggcttgcggatcgcctggaagccacgatgtgagatggaaagaaccggaggctgaagcaggccaaagaagaagctcaggctgaaattgaacagtaccgcctgcagagggagaaagaattcaaggccaaggaagctgcggcattgggatcccgtggcagttgcagcactgaagtggagaaggagacccaggagaagatgaccatcctccagacatacttccggcagaacagggatgaagtcttggacaacctcttggcttttgtctgtgacattcggccagaaatccatgaaaactaccgcataaatggatagaagagagaagcacctgtgctgtggagtggcattttagatgccctcacgaatatgaagcttagcacagctctagttacattcttatgatatggcattaaattatttccatatattatataataggtccttccactttttggagagtagcaaatctagcttttttgtacagacttagaaattatctaaagatttcatctttttacctcatatttcttaggaatttaatggttatatgttgtctttttttcctatgtcttttggctcaagcaacatgtatatcagtgttgactttttctttcttagatctagttt

SEQ ID NO: 7764 - protein, 64 aa, Homo sapiens
MASQSQGIQQLLQAEKRAAEKVSEARKSEFQGGAARRGASRRKTAGPQVVGRLGPKNCGVRACV

SEQ ID NO: 7765 - DNA, 671 bp, Homo sapiens
ggcgcaaggagcaagcgcagattgtgggcggctgtgtcagctgacccaaggggccttcgaggtgccttaggccgcttgccttgctctcagaatcgctgccgccatggctagtcagtctcaggggattcagcagctgctgcaggccgagaagcgggcagccgagaaggtgtccgaggcccgcaaaagcattgggatcccgtggcagttgcagcactgaagtggagaaggagacccaggagaagatgaccatcctccagacatacttccggcagaacagggatgaagtcttggacaacctcttggcttttgtctgtgacattcggccagaaatccatgaaaactaccgcataaatggatagaagagagaagcacctgtgctgtggagtggcattttagatgccctcacgaatatgaagcttagcacagctctagttacattcttatgatatggcattaaattatttccatatattatataataggtccttccactttttggagagtagcaaatctagcttttttgtacagacttagaaattatctaaagatttcatctttttacctcatatttcttaggaatttaatggttatatgttgtctttttttcctatgtcttttggctcaagcaacatgtatatcagtgttgactttttctttcttagatctagttt

SEQ ID NO: 7766 - protein, 37 aa, Homo sapiens
MASQSQGIQQLLQAEKRAAEKVSEARKSIGIPWQLQH

SEQ ID NO: 7767 - DNA, 1297 bp, Homo sapiens
ggcgcaaggagcaagcgcagattgtgggcggctgtgtcagctgacccaaggggccttcgaggtgccttaggccgcttgccttgctctcagaatcgctgccgccatggctagtcagtctcaggggattcagcagctgctgcaggccgagaagcgggcagccgagaaggtgtccgaggcccgcaaaagtgagtttcagggtggggctgcccggcgtggcgcgagtcgaagaaagaccgctgggcctcaggtggtgggtagattaggcccgaaaaactgcggggtgcgggcgtgcgtatagtcgcggaaggttgtgtgtttcgaagctttgaggagctgaggctctggaaggcttgcggatcgcctggaagccacgatgtgagatggaaagaaccggaggctgaagcaggccaaagaagaagctcaggctgaaattgaacagtaccgcctgcagagggagaaagaattcaaggccaaggaagctgcggcattgggatcccgtggcagttgcagcactgaagtggagaaggagacccaggagaagatgaccatcctccagacatacttccggcagaacagggatgaagtcttggacaacctcttggcttttgtctgtgacattcggccagaaatccatgaaaactaccgcataaatggatagaagagagaagcacctgtgctgtggagtggcattttagatgccctcacgaatatgaagcttagcacagctctagttacattcttatgatatggcattaaattatttccatatattatataataggtccttccactttttggagagtagcaaatctagcttttttgtacagacttagaaattatctaaagatttcatctttttacctcatatttcttaggaatttaatggttatatgttgtctttttttcctatgtcttttggctcaagcaacatgtatatcagtgttgactttttctttcttagatctagtttaaaaaaaaaaaaaaccacataacaattctttgaagaaaggaagggattaaataatttttttccctaacactttcttgaaggtcaggggctttatctatgaaaaagtagtaaatagttctttgtaacctgtgtgaagcagcagccagccttaaagtagtccattcttgctaatggttagaacagtgaatactagtggaattgtttgggctgcttttagtttctcttaatcaaaattactagatgatagaattcaagaacttgttacatgtattacttggtgtatcgataatcatttaaaagtaaagactctgtcatgcatttttcccc

SEQ ID NO: 7768 - protein, 64 aa, Homo sapiens; identical to SEQ ID NO: 7764

SEQ ID NO: 7769 - DNA, 998 bp, Homo sapiens
ggcgcaaggagcaagcgcagattgtgggcggctgtgtcagctgacccaaggggccttcgaggtgccttaggccgcttgccttgctctcagaatcgctgccgccatggctagtcagtctcaggggattcagcagctgctgcaggccgagaagcgggcagccgagaaggtgtccgaggcccgcaaaagcattgggatcccgtggcagttgcagcactgaagtggagaaggagacccaggagaagatgaccatcctccagacatacttccggcagaacagggatgaagtcttggacaacctcttggcttttgtctgtgacattcggccagaaatccatgaaaactaccgcataaatggatagaagagagaagcacctgtgctgtggagtggcattttagatgccctcacgaatatgaagcttagcacagctctagttacattcttatgatatggcattaaattatttccatatattatataataggtccttccactttttggagagtagcaaatctagcttttttgtacagacttagaaattatctaaagatttcatctttttacctcatatttcttaggaatttaatggttatatgttgtctttttttcctatgtcttttggctcaagcaacatgtatatcagtgttgactttttctttcttagatctagtttaaaaaaaaaaaaaaccacataacaattctttgaagaaaggaagggattaaataatttttttccctaacactttcttgaaggtcaggggctttatctatgaaaaagtagtaaatagttctttgtaacctgtgtgaagcagcagccagccttaaagtagtccattcttgctaatggttagaacagtgaatactagtggaattgtttgggctgcttttagtttctcttaatcaaaattactagatgatagaattcaagaacttgttacatgtattacttggtgtatcgataatcatttaaaagtaaagactctgtcatgcatttttcccc

SEQ ID NO: 7770 - protein, 37 aa, Homo sapiens; identical to SEQ ID NO: 7766

SEQ ID NO: 7771 - DNA, 1787 bp, Homo sapiens
ggcgcaaggagcaagcgcagattgtgggcggctgtgtcagctgacccaaggggccttcgaggtgccttaggccgcttgccttgctctcagaatcgctgccgccatggctagtcagtctcaggggattcagcagctgctgcaggccgagaagcgggcagccgagaaggtgtccgaggcccgcaaaagtgagtttcagggtggggctgcccggcgtggcgcgagtcgaagaaagaccgctgggcctcaggtggtgggtagattaggcccgaaaaactgcggggtgcgggcgtgcgtatagtcgcggaaggttgtgtgtttcgaagctttgaggagctgaggctctggaaggcttgcggatcgcctggaagccacgatgtgagatggaaagaaccggaggctgaagcaggccaaagaagaagctcaggctgaaattgaacagtaccgcctgcagagggagaaagaattcaaggccaaggaagctgcggcattgggatcccgtggcagttgcagcactgaagtggagaaggagacccaggagaagatgaccatcctccagacatacttccggcagaacagggatgaagtcttggacaacctcttggcttttgtctgtgacattcggccagaaatccatgaaaactaccgcataaatggatagaagagagaagcacctgtgctgtggagtggcattttagatgccctcacgaatatgaagcttagcacagctctagttacattcttatgatatggcattaaattatttccatatattatataataggtccttccactttttggagagtagcaaatctagcttttttgtacagacttagaaattatctaaagatttcatctttttacctcatatttcttaggaatttaatggttatatgttgtctttttttcctatgtcttttggctcaagcaacatgtatatcagtgttgactttttctttcttagatctagtttaaaaaaaaaaaaaaccacataacaattctttgaagaaaggaagggattaaataatttttttccctaacactttcttgaaggtcaggggctttatctatgaaaaagtagtaaatagttctttgtaacctgtgtgaagcagcagccagccttaaagtagtccattcttgctaatggttagaacagtgaatactagtggaattgtttgggctgcttttagtttctcttaatcaaaattactagatgatagaattcaagaacttgttacatgtattacttggtgtatcgataatcatttaaaagtaaagactctgtcatgcatttttccccattcttttttttttccctgtctccgtgacaaccagtggttcttcatttttgatcatgcgaaatgcattttgacccagatggtctgcagaacttcacttaggacattagcacacaaatagcacacatatcacatacccatttatatacataattagaaaatgttcctgatacatgtgtcatgtgatttcttccaacaaatgttttggaaaacagcaagcaactagtctgtaggttgtcttttctctagagatccttgtcctgggacagcctggggcaagttattaagcatatttccttcctggtgggctagatgatgtgcattatacctgtagtaccttcatactagcccttacaagttaaatgtcctgtggccatcttagccgaaagtctttggttgcaaaatcttataggtaaaaacagttgaaagaacattatgggatttccttgcttgttctgatacaatacaactagatgaccttaaaaaccctca

SEQ ID NO: 7772 - protein, 64 aa, Homo sapiens; identical to SEQ ID NO: 7764

SEQ ID NO: 7773 - DNA, 1488 bp, Homo sapiens
ggcgcaaggagcaagcgcagattgtgggcggctgtgtcagctgacccaaggggccttcgaggtgccttaggccgcttgccttgctctcagaatcgctgccgccatggctagtcagtctcaggggattcagcagctgctgcaggccgagaagcgggcagccgagaaggtgtccgaggcccgcaaaagcattgggatcccgtggcagttgcagcactgaagtggagaaggagacccaggagaagatgaccatcctccagacatacttccggcagaacagggatgaagtcttggacaacctcttggcttttgtctgtgacattcggccagaaatccatgaaaactaccgcataaatggatagaagagagaagcacctgtgctgtggagtggcattttagatgccctcacgaatatgaagcttagcacagctctagttacattcttatgatatggcattaaattatttccatatattatataataggtccttccactttttggagagtagcaaatctagcttttttgtacagacttagaaattatctaaagatttcatctttttacctcatatttcttaggaatttaatggttatatgttgtctttttttcctatgtcttttggctcaagcaacatgtatatcagtgttgactttttctttcttagatctagtttaaaaaaaaaaaaaaccacataacaattctttgaagaaaggaagggattaaataatttttttccctaacactttcttgaaggtcaggggctttatctatgaaaaagtagtaaatagttctttgtaacctgtgtgaagcagcagccagccttaaagtagtccattcttgctaatggttagaacagtgaatactagtggaattgtttgggctgcttttagtttctcttaatcaaaattactagatgatagaattcaagaacttgttacatgtattacttggtgtatcgataatcatttaaaagtaaagactctgtcatgcatttttccccattcttttttttttccctgtctccgtgacaaccagtggttcttcatttttgatcatgcgaaatgcattttgacccagatggtctgcagaacttcacttaggacattagcacacaaatagcacacatatcacatacccatttatatacataattagaaaatgttcctgatacatgtgtcatgtgatttcttccaacaaatgttttggaaaacagcaagcaactagtctgtaggttgtcttttctctagagatccttgtcctgggacagcctggggcaagttattaagcatatttccttcctggtgggctagatgatgtgcattatacctgtagtaccttcatactagcccttacaagttaaatgtcctgtggccatcttagccgaaagtctttggttgcaaaatcttataggtaaaaacagttgaaagaacattatgggatttccttgcttgttctgatacaatacaactagatgaccttaaaaaccctca

SEQ ID NO: 7774 - protein, 37 aa, Homo sapiens; identical to SEQ ID NO: 7766

SEQ ID NO: 7775 - DNA, 678 bp, Homo sapiens
gtgggcggctgtgtcagctgacccaaggggccttcgaggtgccttaggccgcttgccttgctctcagaatcgctgccgccatggctagtcagtctcaggggattcagcagctgctgcaggccgagaactcaggctgaaattgaacagtaccgcctgcagagggagaaagaattcaaggccaaggaagctgcggcattgggatcccgtggcagttgcagcactgaagtggagaaggagacccaggagaagatgaccatcctccagacatacttccggcagaacagggatgaagtcttggacaacctcttggcttttgtctgtgacattcggccagaaatccatgaaaactaccgcataaatggatagaagagagaagcacctgtgctgtggagtggcattttagatgccctcacgaatatgaagcttagcacagctctagttacattcttatgatatggcattaaattatttccatatattatataataggtccttccactttttggagagtagcaaatctagcttttttgtacagacttagaaattatctaaagatttcatctttttacctcatatttcttaggaatttaatggttatatgttgtctttttttcctatgtcttttggctcaagcaacatgtatatcagtgttgactttttctttcttagatctagttt

SEQ ID NO: 7776 - protein, 38 aa, Homo sapiens
MTILQTYFRQNRDEVLDNLLAFVCDIRPEIHENYRING

SEQ ID NO: 7777 - DNA, 1005 bp, Homo sapiens
gtgggcggctgtgtcagctgacccaaggggccttcgaggtgccttaggccgcttgccttgctctcagaatcgctgccgccatggctagtcagtctcaggggattcagcagctgctgcaggccgagaactcaggctgaaattgaacagtaccgcctgcagagggagaaagaattcaaggccaaggaagctgcggcattgggatcccgtggcagttgcagcactgaagtggagaaggagacccaggagaagatgaccatcctccagacatacttccggcagaacagggatgaagtcttggacaacctcttggcttttgtctgtgacattcggccagaaatccatgaaaactaccgcataaatggatagaagagagaagcacctgtgctgtggagtggcattttagatgccctcacgaatatgaagcttagcacagctctagttacattcttatgatatggcattaaattatttccatatattatataataggtccttccactttttggagagtagcaaatctagcttttttgtacagacttagaaattatctaaagatttcatctttttacctcatatttcttaggaatttaatggttatatgttgtctttttttcctatgtcttttggctcaagcaacatgtatatcagtgttgactttttctttcttagatctagtttaaaaaaaaaaaaaaccacataacaattctttgaagaaaggaagggattaaataatttttttccctaacactttcttgaaggtcaggggctttatctatgaaaaagtagtaaatagttctttgtaacctgtgtgaagcagcagccagccttaaagtagtccattcttgctaatggttagaacagtgaatactagtggaattgtttgggctgcttttagtttctcttaatcaaaattactagatgatagaattcaagaacttgttacatgtattacttggtgtatcgataatcatttaaaagtaaagactctgtcatgcatttttcccc

SEQ ID NO: 7778 - protein, 38 aa, Homo sapiens; identical to SEQ ID NO: 7776

SEQ ID NO: 7779 - DNA, 1495 bp, Homo sapiens
gtgggcggctgtgtcagctgacccaaggggccttcgaggtgccttaggccgcttgccttgctctcagaatcgctgccgccatggctagtcagtctcaggggattcagcagctgctgcaggccgagaactcaggctgaaattgaacagtaccgcctgcagagggagaaagaattcaaggccaaggaagctgcggcattgggatcccgtggcagttgcagcactgaagtggagaaggagacccaggagaagatgaccatcctccagacatacttccggcagaacagggatgaagtcttggacaacctcttggcttttgtctgtgacattcggccagaaatccatgaaaactaccgcataaatggatagaagagagaagcacctgtgctgtggagtggcattttagatgccctcacgaatatgaagcttagcacagctctagttacattcttatgatatggcattaaattatttccatatattatataataggtccttccactttttggagagtagcaaatctagcttttttgtacagacttagaaattatctaaagatttcatctttttacctcatatttcttaggaatttaatggttatatgttgtctttttttcctatgtcttttggctcaagcaacatgtatatcagtgttgactttttctttcttagatctagtttaaaaaaaaaaaaaaccacataacaattctttgaagaaaggaagggattaaataatttttttccctaacactttcttgaaggtcaggggctttatctatgaaaaagtagtaaatagttctttgtaacctgtgtgaagcagcagccagccttaaagtagtccattcttgctaatggttagaacagtgaatactagtggaattgtttgggctgcttttagtttctcttaatcaaaattactagatgatagaattcaagaacttgttacatgtattacttggtgtatcgataatcatttaaaagtaaagactctgtcatgcatttttccccattcttttttttttccctgtctccgtgacaaccagtggttcttcatttttgatcatgcgaaatgcattttgacccagatggtctgcagaacttcacttaggacattagcacacaaatagcacacatatcacatacccatttatatacataattagaaaatgttcctgatacatgtgtcatgtgatttcttccaacaaatgttttggaaaacagcaagcaactagtctgtaggttgtcttttctctagagatccttgtcctgggacagcctggggcaagttattaagcatatttccttcctggtgggctagatgatgtgcattatacctgtagtaccttcatactagcccttacaagttaaatgtcctgtggccatcttagccgaaagtctttggttgcaaaatcttataggtaaaaacagttgaaagaacattatgggatttccttgcttgttctgatacaatacaactagatgaccttaaaaaccctca

SEQ ID NO: 7780 - protein, 38 aa, Homo sapiens; identical to SEQ ID NO: 7776

SEQ ID NO: 7781 - DNA, 3927 bp, Homo sapiens
agctcgggcgtcctggttcgcttcggcgtccgccgtctccgcagctgcctcctcttcctccttcgccaccgcgcgggagagcttccgttcatcccggctgcaaacccacaattccgtcattggcgtgcccatccgggagactcccatcctggatgactatgactgtgaggaggatgaggagccacctaggcgggccaaccatgtctcccgcgaggacgagtttggcagccaggtgacccacactctggacagtctgggacatccaggggaagagaaggtggactttgagaagaaagcagcagctgaggcgactcaggagacagtggagtccctgatgcagaagttcaaggagagtttccgcgctaacacgcccatcgagatcggtcagctgcaaccacccctgcgcagcacatcggcagggaagaggaagcggaggagcaagtctcgaggaggaatcagctttgggagagccaaggggacgtcgggctcagaggcagacgatgaaactcagctgacattctacacggagcagtaccgcagtcgccgccgcagcaaaggtttgctgaaaagcccagtgaacaagacagccctgacactgattgctgtgagttcctgcatcctggccatggtgtgtggcagccagatgtcttgtccactcactgtgaaggtgactctgcatgtgcccgagcacttcatagcagatggaagcagcttcgtggtgagtgaagggagctacctggacatctccgactggttaaacccggccaagctttccctgtattaccagatcaatgccacctccccatgggtgagggacctctgtggacaaaggacgacagatgcctgtgagcagctctgcgacccagaaaccggagagtgcagctgtcatgaaggctatgcccctgaccctgttcacagacacctgtgtgtgcgcagtgactggggacagagtgaaggaccttggccctacacgacacttgagaggggctatgatctggtgacaggggagcaagcccctgaaaagattctcaggtctactttcagcttgggccaaggcctctggcttcctgtcagcaaaagctttgtggttccgcctgtggagctgtccatcaaccccctggccagctgcaagaccgatgtgctcgtcacggaagaccctgcagatgtcagggaagaagcgatgctgtccacatactttgaaaccatcaatgacctgctgtcttccttcgggccagttcgtgactgctctcggaacaatgggggctgcactcgcaacttcaagtgtgtgtctgaccggcaggtggattcctcgggatgtgtgtgccctgaggagctgaaacccatgaaggatggctctggctgctacgaccactccaaaggcattgactgctctgatggctttaatggcggctgtgagcagctgtgcctgcagcagacgctgcccctgccctacgatgccacttcgagcaccatcttcatgttctgcggttgcgtggaggagtacaaactggctcctgatggaaaatcctgcttaatgctctcagatgtctgcgagggccccaagtgcctcaaacctgactccaaattcaatgataccctctttggagagatgctacatggttacaacaaccggacccagcatgtgaaccaaggccaagtcttccagatgacctttagggagaacaacttcatcaaggactttccccagctggccgatgggctgttggtgatcccgctgccggtggaggagcagtgccggggggtcctctccgagccccttccagacctccaactgctcactggagatatcaggtatgatgaggccatgggttaccccatggtgcagcagtggcgggtccggagcaacctctaccgtgtgaagctcagcaccatcaccctcgcagcaggcttcactaatgttctcaagatcctgaccaaggagagcagtcgggaggagctgctgtccttcatccagcactatggctcccactacatcgcagaggccctctatggctcagagctcacctgcatcatccactttcccagcaagaaggtccagcagcagctgtggctccagtatcagaaagagaccacagagctgggcagcaagaaggagctcaagtccatgcccttcatcacctacctctcaggtttgctgacagcccagatgctgtcagatgaccagctcatttcaggtgtggagattcgctgtgaggagaaggggcgctgtccatctacctgtcacctttgccgccggccaggcaaggagcagctgagccccacaccagtgctgctggaaatcaaccgtgtggtgccactttataccctcatccaagacaatggcacaaaggaggccttcaagagtgcactgatgagttcctactggtgctcagggaaaggggatgtgatcgatgactggtgcaggtgtgacctcagcgcctttgatgccaatgggctccccaactgcagcccccttctgcagccggtgctgcggctgtccccaacagtggagccctccagtactgtggtctccttggagtgggtggatgttcagccagctattgggaccaaggtctccgactatattctgcagcataagaaagtggatgaatacacagacactgacctgtacacaggagaattcctgagttttgctgatgacttactctctggcctgggcacatcttgtgtagcagctggtcgaagccatggagaggtccctgaagtcagtatctactcagtcatcttcaagtgtctggagcccgacggtctctacaagttcactctgtatgctgtggatacacgagggaggcactcagagctaagcacggtgaccctgaggacggcctgtccactggtagatgacaacaaggcagaagaaatagctgacaagatctacaatctgtacaatgggtacacaagtggaaaggagcagcagatggcctacaacacactgatggaggtctcagcctcgatgctgttccgagtccagcaccactacaactctcactatgaaaagtttggcgacttcgtctggagaagtgaggatgagctggggcccaggaaggcccacctgattctacggcgactggagagggtgagtagccactgctccagcctcctgcggagtgcctacatccagagccgcgtggaaacagtgccctatcttttctgccgcagcgaggaggtccggcctgcaggcatggtgtggtatagcatcctcaaggacaccaaaatcacgtgtgaggagaagatggtgtcaatggcccgaaacacgtacggggagtccaagggccggtgagggagggtattgccctccgtgagcacagagactctccatgggagggggagcagtattctcctggatcctggggcctgggtgggctgggggacagctgaggatgggcctagcagatgaagcttgccagcaaggccaaagcaaacggtttctcctgtggatagtggacagagacctttgtaaccaatggaattattcatttttctctatcttttattttttcaaagatattatttgactctatcaaaagtctctcctttttaaaccttttcttatggatggctgtcaatcccgaggcagaagttttcaggtggagaccaagcggcctttgctcttcttccttcttcctgccacactctgctttcttcctgccatggacccctggaggagacctatggagggacagttttgacctgacccctagaggagacagttttgacctcttcagcaccaggaaggaagctctgaggatggttgcagtgaggaagcatgggtctttaaggacttctctctcttttttgctggacattattgagtttgtgggaccctgcctcttcctgctacctgtgggtctgcccagagtccctgcaggcctgtccatgcattaaaaattcctattgtctctcttt

SEQ ID NO: 7782 - protein, 988 aa, Homo sapiens
MQKFKESFRANTPIEIGQLQPPLRSTSAGKRKRRSKSRGGISFGRAKGTSGSEADDETQLTFYTEQYRSRRRSKGLLKSPVNKTALTLIAVSSCILAMVCGSQMSCPLTVKVTLHVPEHFIADGSSFVVSEGSYLDISDWLNPAKLSLYYQINATSPWVRDLCGQRTTDACEQLCDPETGECSCHEGYAPDPVHRHLCVRSDWGQSEGPWPYTTLERGYDLVTGEQAPEKILRSTFSLGQGLWLPVSKSFVVPPVELSINPLASCKTDVLVTEDPADVREEAMLSTYFETINDLLSSFGPVRDCSRNNGGCTRNFKCVSDRQVDSSGCVCPEELKPMKDGSGCYDHSKGIDCSDGFNGGCEQLCLQQTLPLPYDATSSTIFMFCGCVEEYKLAPDGKSCLMLSDVCEGPKCLKPDSKFNDTLFGEMLHGYNNRTQHVNQGQVFQMTFRENNFIKDFPQLADGLLVIPLPVEEQCRGVLSEPLPDLQLLTGDIRYDEAMGYPMVQQWRVRSNLYRVKLSTITLAAGFTNVLKILTKESSREELLSFIQHYGSHYIAEALYGSELTCIIHFPSKKVQQQLWLQYQKETTELGSKKELKSMPFITYLSGLLTAQMLSDDQLISGVEIRCEEKGRCPSTCHLCRRPGKEQLSPTPVLLEINRVVPLYTLIQDNGTKEAFKSALMSSYWCSGKGDVIDDWCRCDLSAFDANGLPNCSPLLQPVLRLSPTVEPSSTVVSLEWVDVQPAIGTKVSDYILQHKKVDEYTDTDLYTGEFLSFADDLLSGLGTSCVAAGRSHGEVPEVSIYSVIFKCLEPDGLYKFTLYAVDTRGRHSELSTVTLRTACPLVDDNKAEEIADKIYNLYNGYTSGKEQQMAYNTLMEVSASMLFRVQHHYNSHYEKFGDFVWRSEDELGPRKAHLILRRLERVSSHCSSLLRSAYIQSRVETVPYLFCRSEEVRPAGMVWYSILKDTKITCEEKMVSMARNTYGESKGR

SEQ ID NO: 7783 - DNA, 2279 bp, Homo sapiens
agtgcttgttactgtgccaatttcagtatgactagggctgtggtaggagcaatgctaggcgatggggaatccgaagacgcacaggagtccaagggttggctgactgcagaccctcatcataagtctagagccggagaagatggggagacgccggcctgcgccctttcgtgccctcgtgaggctggcatgcaggatggcaggacagcccggccacatgccccatggagggagttccaacaacctctgccacaccctggggcctgtgcatcctcctgacccacagaggcatcccaacacgctgtcttttcgctgctcgctggcggacttccagatcgaaaagaagataggccgaggacagttcagcgaggtgtacaaggccacctgcctgctggacaggaagacagtggctctgaagaaggtgcagatctttgagatgatggacgccaaggcgaggcaggactgtgtcaaggagatcggcctcttgaagcaactgaaccacccaaatatcatcaagtatttggactcgtttatcgaagacaacgagctgaacattgtgctggagttggctgacgcaggggacctctcgcagatgatcaagtactttaagaagcagaagcggctcatcccggagaggacagtatggaagtactttgtgcagctgtgcagcgccgtggagcacatgcattcacgccgggtgatgcaccgagacatcaagcctgccaacgtgttcatcacagccacgggcgtcgtgaagctcggtgaccttggtctgggccgcttcttcagctctgagaccaccgcagcccactccctagtggggacgccctactacatgtcaccggagaggatccatgagaacggctacaacttcaagtccgacatctggtccctgggctgtctgctgtacgagatggcagccctccagagccccttctatggagataagatgaatctcttctccctgtgccagaagatcgagcagtgtgactaccccccactccccggggagcactactccgagaagttacgagaactggtcagcatgtgcatctgccctgacccccaccagagacctgacatcggatacgtgcaccaggtggccaagcagatgcacatctggatgtccagcacctgagcgtggatgcaccgtgccttatcaaagccagcaccactttgccttacttgagtcgtcttctcttcgagtggccacctggtagcctagaacagctaagaccacagggttcagcaggttccccaaaaggctgcccagccttacagcagatgctgaaggcagagcagctgagggaggggcgctggccacatgtcactgatggtcagattccaaagtcctttctttatactgttgtggacaatctcagctgggtcaataagggcaggtggttcagcgagccacggcagccccctgtatctggattgtaatgtgaatctttagggtaattcctccagtgacctgtcaaggcttatgctaacaggagacttgcaggagaccgtgtgatttgtgtagtgagcctttgaaaatggttagtaccgggttcagtttagttcttagtatcttttcaatcaagctgtgtgcttaatttactctgttgtaaagggataaagtggaaatcatttttttccgtggagtggtgattctgctaacatttttatctacgttttataacttggtgagtgacgatgagagccctgcacctggccagagtgtcacaggcaaaaggcatcgggaagcaggagcatcttcttggcagccaggctgggccatcttctcctggacacctgctgtgtaccaggaacttcgtcacctccttgaatgctggcggttcatttcatgatcagtgttaagcattttcctccatgggaaggaagcatgggatatagaaaagcgaagggctgtcctttacaaattctggttctgcaacttcctagcgtgactttgggcttgggcaagtttcttagccgttctgagccttcatttcctcatctgtacaatgagattaatagtacctatcatctaccttcaggattgctgacagacagaatttgaaataaaatatgcaagttagctaatacaaaaagtagatgatccaaaaatggtagccactcacccttcacaaactgaagtccatggaccacggaagtcgagaattaatgtacacctgtatcatgtgtaggaaaccagaaatgtgttccttatttcttgttcccaaacaggattaactgtgaagactaatttataaatgtgaacctaagaaaactcc

SEQ ID NO: 7784 - protein, 331 aa, Homo sapiens
MGRRRPAPFRALVRLACRMAGQPGHMPHGGSSNNLCHTLGPVHPPDPQRHPNTLSFRCSLADFQIEKKIGRGQFSEVYKATCLLDRKTVALKKVQIFEMMDAKARQDCVKEIGLLKQLNHPNIIKYLDSFIEDNELNIVLELADAGDLSQMIKYFKKQKRLIPERTVWKYFVQLCSAVEHMHSRRVMHRDIKPANVFITATGVVKLGDLGLGRFFSSETTAAHSLVGTPYYMSPERIHENGYNFKSDIWSLGCLLYEMAALQSPFYGDKMNLFSLCQKIEQCDYPPLPGEHYSEKLRELVSMCICPDPHQRPDIGYVHQVAKQMHIWMSST

SEQ ID NO: 7785 - DNA, 1657 bp, Homo sapiens
aggggcgggcgcgcgggcgcgcgggcccgcgcaggcggtggcggcggcggcggaaccgagctgacgggcgtgcggccgctgcgccgcaaactcgtgtgggacgcaccgctccagccgcccgcgggccagcgcaccggtcccccagcggcagccgagcccgcccgcgcgccgttcgtgccctcgtgaggctggcatgcaggatggcaggacagcccggccacatgccccatggagggagttccaacaacctctgccacaccctggggcctgtgcatcctcctgacccacagaggcatcccaacacgctgtcttttcgctgctcgctggcggacttccagatcgaaaagaagataggccgaggacagttcagcgaggtgtacaaggccacctgcctgctggacaggaagacagtggctctgaagaaggtgcagatctttgagatgatggacgccaaggcgaggcaggactgtgtcaaggagatcggcctcttgaagcaactgaaccacccaaatatcatcaagtatttggactcgtttatcgaagacaacgagctgaacattgtgctggagttggctgacgcaggggacctctcgcagatgatcaagtactttaagaagcagaagcggctcatcccggagaggacagtatggaagtactttgtgcagctgtgcagcgccgtggagcacatgcattcacgccgggtgatgcaccgagacatcaagcctgccaacgtgttcatcacagccacgggcgtcgtgaagctcggtgaccttggtctgggccgcttcttcagctctgagaccaccgcagcccactccctagtggggacgccctactacatgtcaccggagaggatccatgagaacggctacaacttcaagtccgacatctggtccctgggctgtctgctgtacgagatggcagccctccagagccccttctatggagataagatgaatctcttctccctgtgccagaagatcgagcagtgtgactaccccccactccccggggagcactactccgagaagttacgagaactggtcagcatgtgcatctgccctgacccccaccagagacctgacatcggatacgtgcaccaggtggccaagcagatgcacatctggatgtccagcacctgagcgtggatgcaccgtgccttatcaaagccagcaccactttgccttacttgagtcgtcttctcttcgagtggccacctggtagcctagaacagctaagaccacagggttcagcaggttccccaaaaggctgcccagccttacagcagatgctgaaggcagagcagctgagggaggggcgctggccacatgtcactgatggtcagattccaaagtcctttctttatactgttgtggacaatctcagctgggtcaataagggcaggtggttcagcgagccacggcagccccctgtatctggattgtaatgtgaatctttagggtaattcctccagtgacctgtcaaggcttatgctaacaggagacttgcaggagaccgtgtgatttgtgtagtgagcctttgaaaatggttagtaccgggttcagtttagttcttagtatcttttcaatcaagctgtgtgcttaatttactctgttgtaaagggataaagtggaaatcatttttttccgtggagtgg

SEQ ID NO: 7786 - protein, 313 aa, Homo sapiens; identical to SEQ ID NO: 1136

SEQ ID NO: 7787 - DNA, 2286 bp, Homo sapiens
aggggcgggcgcgcgggcgcgcgggcccgcgcaggcggtggcggcggcggcggaaccgagctgacgggcgtgcggccgctgcgccgcaaactcgtgtgggacgcaccgctccagccgcccgcgggccagcgcaccggtcccccagcggcagccgagcccgcccgcgcgccgttcgtgccctcgtgaggctggcatgcaggatggcaggacagcccggccacatgccccatggagggagttccaacaacctctgccacaccctggggcctgtgcatcctcctgacccacagaggcatcccaacacgctgtcttttcgctgctcgctggcggacttccagatcgaaaagaagataggccgaggacagttcagcgaggtgtacaaggccacctgcctgctggacaggaagacagtggctctgaagaaggtgcagatctttgagatgatggacgccaaggcgaggcaggactgtgtcaaggagatcggcctcttgaagcaactgaaccacccaaatatcatcaagtatttggactcgtttatcgaagacaacgagctgaacattgtgctggagttggctgacgcaggggacctctcgcagatgatcaagtactttaagaagcagaagcggctcatcccggagaggacagtatggaagtactttgtgcagctgtgcagcgccgtggagcacatgcattcacgccgggtgatgcaccgagacatcaagcctgccaacgtgttcatcacagccacgggcgtcgtgaagctcggtgaccttggtctgggccgcttcttcagctctgagaccaccgcagcccactccctagtggggacgccctactacatgtcaccggagaggatccatgagaacggctacaacttcaagtccgacatctggtccctgggctgtctgctgtacgagatggcagccctccagagccccttctatggagataagatgaatctcttctccctgtgccagaagatcgagcagtgtgactaccccccactccccggggagcactactccgagaagttacgagaactggtcagcatgtgcatctgccctgacccccaccagagacctgacatcggatacgtgcaccaggtggccaagcagatgcacatctggatgtccagcacctgagcgtggatgcaccgtgccttatcaaagccagcaccactttgccttacttgagtcgtcttctcttcgagtggccacctggtagcctagaacagctaagaccacagggttcagcaggttccccaaaaggctgcccagccttacagcagatgctgaaggcagagcagctgagggaggggcgctggccacatgtcactgatggtcagattccaaagtcctttctttatactgttgtggacaatctcagctgggtcaataagggcaggtggttcagcgagccacggcagccccctgtatctggattgtaatgtgaatctttagggtaattcctccagtgacctgtcaaggcttatgctaacaggagacttgcaggagaccgtgtgatttgtgtagtgagcctttgaaaatggttagtaccgggttcagtttagttcttagtatcttttcaatcaagctgtgtgcttaatttactctgttgtaaagggataaagtggaaatcatttttttccgtggagtggtgattctgctaacatttttatctacgttttataacttggtgagtgacgatgagagccctgcacctggccagagtgtcacaggcaaaaggcatcgggaagcaggagcatcttcttggcagccaggctgggccatcttctcctggacacctgctgtgtaccaggaacttcgtcacctccttgaatgctggcggttcatttcatgatcagtgttaagcattttcctccatgggaaggaagcatgggatatagaaaagcgaagggctgtcctttacaaattctggttctgcaacttcctagcgtgactttgggcttgggcaagtttcttagccgttctgagccttcatttcctcatctgtacaatgagattaatagtacctatcatctaccttcaggattgctgacagacagaatttgaaataaaatatgcaagttagctaatacaaaaagtagatgatccaaaaatggtagccactcacccttcacaaactgaagtccatggaccacggaagtcgagaattaatgtacacctgtatcatgtgtaggaaaccagaaatgtgttccttatttcttgttcccaaacaggattaactgtgaagactaatttataaatgtgaacctaagaaaactcc

SEQ ID NO: 7788 - protein, 313 aa, Homo sapiens; identical to SEQ ID NO: 1136

SEQ ID NO: 7789 - DNA, 2633 bp, Homo sapiens
aggggcgggcgcgcgggcgcgcgggcccgcgcaggcggtggcggcggcggcggaaccgagctgacgggcgtgcggccgctgcgccgcaaactcgtgtgggacgcaccgctccagccgcccgcgggccagcgcaccggtcccccagcggcagccgagcccgcccgcgcgccgttcgtgccctcgtgaggctggcatgcaggatggcaggacagcccggccacatgccccatggagggagttccaacaacctctgccacaccctggggcctgtgcatcctcctgacccacagaggcatcccaacacgctgtcttttcgctgctcgctggcggacttccagatcgaaaagaagataggccgaggacagttcagcgaggtgtacaaggccacctgcctgctggacaggaagacagtggctctgaagaaggtgcagatctttgagatgatggacgccaaggcgaggcaggactgtgtcaaggagatcggcctcttgaagcaactgaaccacccaaatatcatcaagtatttggactcgtttatcgaagacaacgagctgaacattgtgctggagttggctgacgcaggggacctctcgcagatgatcaagtactttaagaagcagaagcggctcatcccggagaggacagtatggaagtactttgtgcagctgtgcagcgccgtggagcacatgcattcacgccgggtgatgcaccgagacatcaagcctgccaacgtgttcatcacagccacgggcgtcgtgaagctcggtgaccttggtctgggccgcttcttcagctctgagaccaccgcagcccactccctagtggggacgccctactacatgtcaccggagaggatccatgagaacggctacaacttcaagtccgacatctggtccctgggctgtctgctgtacgagatggcagccctccagagccccttctatggagataagatgaatctcttctccctgtgccagaagatcgagcagtgtgactaccccccactccccggggagcactactccgagaagttacgagaactggtcagcatgtgcatctgccctgacccccaccagagacctgacatcggatacgtgcaccaggtggccaagcagatgcacatctggatgtccagcacctgagcgtggatgcaccgtgccttatcaaagccagcaccactttgccttacttgagtcgtcttctcttcgagtggccacctggtagcctagaacagctaagaccacagggttcagcaggttccccaaaaggctgcccagccttacagcagatgctgaaggcagagcagctgagggaggggcgctggccacatgtcactgatggtcagattccaaagtcctttctttatactgttgtggacaatctcagctgggtcaataagggcaggtggttcagcgagccacggcagccccctgtatctggattgtaatgtgaatctttagggtaattcctccagtgacctgtcaaggcttatgctaacaggagacttgcaggagaccgtgtgatttgtgtagtgagcctttgaaaatggttagtaccgggttcagtttagttcttagtatcttttcaatcaagctgtgtgcttaatttactctgttgtaaagggataaagtggaaatcatttttttccgtggagtggtgattctgctaacatttttatctacgttttataacttggtgagtgacgatgagagccctgcacctggccagagtgtcacaggcaaaaggcatcgggaagcaggagcatcttcttggcagccaggctgggccatcttctcctggacacctgctgtgtaccaggaacttcgtcacctccttgaatgctggcggttcatttcatgatcagtgttaagcattttcctccatgggaaggaagcatgggatatagaaaagcgaagggctgtcctttacaaattctggttctgcaacttcctagcgtgactttgggcttgggcaagtttcttagccgttctgagccttcatttcctcatctgtacaatgagattaatagtacctatcatctaccttcaggattgctgacagacagaatttgaaataaaatatgcaagttagctaatacaaaaagtagatgatccaaaaatggtagccactcacccttcacaaactgaagtccatggaccacggaagtcgagaattaatgtacacctgtatcatgtgtaggaaaccagaaatgtgttccttatttcttgttcccaaacaggattaactgtgaagactaatttataaatgtgaacctaagaaaactccacctctgaaggaaatcatttgaattttgtttttgtacgtaaagttaaccttccaattgtctgagctgtcgtcactgacttcatgacagtctggccctccagacaagagcagcgctggcatcgggcaggtgattcctgacacctgctgcctgcaggcattcactgaccaggcctttcctggaggaaacacccagggccgggcggctgctgtttccacacgtggactcggatctgctgtgacaccgtcagcccgacagtctctccatatgcagcctttcctctgtacttttctccatggttgaaataaaacagggtgactgggagttacttagaattcatgaagatttt

SEQ ID NO: 7790 - protein, 313 aa, Homo sapiens; identical to SEQ ID NO: 1136

SEQ ID NO: 7791 - DNA, 9381 bp, Homo sapiens
aggggcgggcgcgcgggcgcgcgggcccgcgcaggcggtggcggcggcggcggaaccgagctgacgggcgtgcggccgctgcgccgcaaactcgtgtgggacgcaccgctccagccgcccgcgggccagcgcaccggtcccccagcggcagccgagcccgcccgcgcgccgttcgtgccctcgtgaggctggcatgcaggatggcaggacagcccggccacatgccccatggagggagttccaacaacctctgccacaccctggggcctgtgcatcctcctgacccacagaggcatcccaacacgctgtcttttcgctgctcgctggcggacttccagatcgaaaagaagataggccgaggacagttcagcgaggtgtacaaggccacctgcctgctggacaggaagacagtggctctgaagaaggtgcagatctttgagatgatggacgccaaggcgaggcaggactgtgtcaaggagatcggcctcttgaagcaactgaaccacccaaatatcatcaagtatttggactcgtttatcgaagacaacgagctgaacattgtgctggagttggctgacgcaggggacctctcgcagatgatcaagtactttaagaagcagaagcggctcatcccggagaggacagtatggaagtactttgtgcagctgtgcagcgccgtggagcacatgcattcacgccgggtgatgcaccgagacatcaagcctgccaacgtgttcatcacagccacgggcgtcgtgaagctcggtgaccttggtctgggccgcttcttcagctctgagaccaccgcagcccactccctagtggggacgccctactacatgtcaccggagaggatccatgagaacggctacaacttcaagtccgacatctggtccctgggctgtctgctgtacgagatggcagccctccagagccccttctatggagataagatgaatctcttctccctgtgccagaagatcgagcagtgtgactaccccccactccccggggagcactactccgagaagttacgagaactggtcagcatgtgcatctgccctgacccccaccagagacctgacatcggatacgtgcaccaggtggccaagcagatgcacatctggatgtccagcacctgagcgtggatgcaccgtgccttatcaaagccagcaccactttgccttacttgagtcgtcttctcttcgagtggccacctggtagcctagaacagctaagaccacagggttcagcaggttccccaaaaggctgcccagccttacagcagatgctgaaggcagagcagctgagggaggggcgctggccacatgtcactgatggtcagattccaaagtcctttctttatactgttgtggacaatctcagctgggtcaataagggcaggtggttcagcgagccacggcagccccctgtatctggattgtaatgtgaatctttagggtaattcctccagtgacctgtcaaggcttatgctaacaggagacttgcaggagaccgtgtgatttgtgtagtgagcctttgaaaatggttagtaccgggttcagtttagttcttagtatcttttcaatcaagctgtgtgcttaatttactctgttgtaaagggataaagtggaaatcatttttttccgtggagtggtgattctgctaacatttttatctacgttttataacttggtgagtgacgatgagagccctgcacctggccagagtgtcacaggcaaaaggcatcgggaagcaggagcatcttcttggcagccaggctgggccatcttctcctggacacctgctgtgtaccaggaacttcgtcacctccttgaatgctggcggttcatttcatgatcagtgttaagcattttcctccatgggaaggaagcatgggatatagaaaagcgaagggctgtcctttacaaattctggttctgcaacttcctagcgtgactttgggcttgggcaagtttcttagccgttctgagccttcatttcctcatctgtacaatgagattaatagtacctatcatctaccttcaggattgctgacagacagaatttgaaataaaatatgcaagttagctaatacaaaaagtagatgatccaaaaatggtagccactcacccttcacaaactgaagtccatggaccacggaagtcgagaattaatgtacacctgtatcatgtgtaggaaaccagaaatgtgttccttatttcttgttcccaaacaggattaactgtgaagactaatttataaatgtgaacctaagaaaactccacctctgaaggaaatcatttgaattttgtttttgtacgtaaagttaaccttccaattgtctgagctgtcgtcactgacttcatgacagtctggccctccagacaagagcagcgctggcatcgggcaggtgattcctgacacctgctgcctgcaggcattcactgaccaggcctttcctggaggaaacacccagggccgggcggctgctgtttccacacgtggactcggatctgctgtgacaccgtcagcccgacagtctctccatatgcagcctttcctctgtacttttctccatggttgaaataaaacagggtgactgggagttacttagaattcatgaagattttaaaatggctttggagattttgcttttaaaccagtagattcaaaacttaaacagcgtctgcagcacaatttcttgaggaaccttgaaaaacacaacttcccaggccccattcagtaatcccaggatttctttaagctccccaaataattttgaaactcatcatcagccgagtttctgccctcatgaggtaattccatcgttctccccagcctgcccctggcagctgtaacacaggagctggcctgagagcagattcaccctggaatgttctctccacagaacaatcaagtccctgtcgcctgcctagtgcttaccactgaagatttttctgattccagaccaactttttgccaacattctgcttccagctctctgagcccctgccgtgtctccccaacactgccagccccagcacgcaatcaacctactttgtgcatgccacccgctttccacactgtgagaacaatctgcccaactggaccctctggaggcgcacgatctcagccactcaccaggcctgagtgtttgtgaaatgatcatgtcctacttattacaaaaccgtaaccccaaaacattccttttatttctgtgaaaccggccaaagtgaggtccacccaccttcacacagctctggcggtgcacctgctcaccttctcttggttctcagaactgagctgggcttgagaacacagctttggctttgccatttttttcctacttggctgctgaggtggagggtgtgctgcacttatcaccccatttcaaaaccaaaccaaacctgaggccaccccaaacaaattcagccagcaaaaagggtaggtatcgatggtcacctgaagcctcaagggagtccactctgacttctgacagcagacagaacctatctgtcctcaggaggggcgcatggctcctacgctctcctctgagcctaggccagtgctcaaggaggatcagcaccctgaagggccaggccaatggccttagcagccccctactgcccccaaaaacaccacacagtgcccagacctcagctgcccaatttggtttttgttttttattgagttgagtttcattcggcaaacactagccacatgagtgtcttactgggcctcaatgctcaccaccttccagaaccgcggccagccacccactgatgccattcaggaagtgtccattgtttggactgtttcttccagcacctcaatctccagaggagtgattttctcagtgaggactgcagtagtccctttctcacacctgtaccggccaagcctagtaagagaaaaacaaaagcacagagttaggattctcctcaaggtgccagagggcagaagacagtgaaaataaatattcaggcaacgcagtgagcaggctggactggaatcttggctctcccgatcccagctctgtgatcttgggggattcaacttcctcagttctcaagtgctgcaaaatgggggtgcctgggaggcaaagagtgtcattagtgaacacggcacctggcccttggtggacacgtgactctccccccaccccaccatccccacaagtgctgggaagcacttggtcccttgacatcaatcttcaacctccctacaatactgttcagggacagcaggaagcaaatcccatcattacacaagagaagggcatgattgctcttccgtgcagcaacaagaatgacttaactgttaccttagacactgcacaaacatctggaagcataaacagtgtaaaaaaaatgtgcagccagactctgggcttgtcatttcagaccactctcaagtctcaagaaaagttaactgtccctttcagggacacagtgggtccccactaggacacacccaacaccttcttcctggagtgaatctggcagaggtttctttgagcaccagactgtctagaagatatgtatttgggctgttaatgctcacagtgggtcaggaattaggatactgtcaaatggcagcacacaaccaactgttcctctgctctagccccagctggggtaatatctctgtcaaacttgctgtccttcaggaactgccagaaggctgctggctgtgccatggccttgtgctcccggaacacccatcctctcccctggacacacgggctaaaagagggagcaggaagcagaacaaggagggcaacttccacagttctgcatccaggtcaggagcacggtcagcccagagcggcctgcctttatgctgccaagcctcccccgacccccaccctcttaaagaatccaagcaaaagtacctttgaacaatgtgtccccaccccatcagtttgaggatgcccctcatccctcacacgctggaaccttggtggcagcgtgcagtcttagagccaaagtcccacgtggcctctgtgtgcctgactcctctgaaccacccctcagtgtctccgggaggcttggacacacaagagcctcctcaccactgtggtgacagtgcccgatttttgcggcatgcattcagagcttccgccttacgtgccagtggactgcaagaccgtgtgctggagggctgcgggcagacaggcagcagggacttgccaggcaaggcccactggcgcatggcacgggatgcttcctcaggcctatcgccctgcccgcaccctagcatccaccctgggaagggctcccctaactcaggcagtgcccccatcttcagtcactggcaaagaagacaacagagtccagggagcttggacacttgctgcccttggccccaggacaccgatggggagcaggctccctgcaggttactgcacacccaccacacgcccagcagcttctgggtcgccttgctgattcttcccaagcagccgcaaggcggttttcttttgttcttgggtgtttagagcctctgtttacaagtggagcagcccatgtcccaggaagtaggatgtgccactgctgcactccctgtggatgaggactcctgcgctcagcacaggttccctaggcaaccacttctcactggcccagacgtggctttcagagtcctcgcccaggaccctggccagcctgaatggtgtaaccattccctaccccatcaccgcttcaccatggacttgctcaaatcacgcatcttgcaaaataaccagcgaagcaggctacatggagtacttggctcctgcctacctggagctcggcaaagcccggttccccaacacagctctgggcctgaaaggtggcttgccttcctgctaaaggcccgagggacttcgtgggctcattagaggtcatctggtttagctccatttccaagacagactgatttgctggaagccaccaagccagccaccaacactccccaaccccagtgccagcgttctctggccccgtgctgccccaccccatcaggagcccactgagcttccgcaaggttgagtgcagcccacagtgaatacctgctggttctgaacgttccattccttccttgtgaattactcctgatgtggagttgtgtgtgcagtgggagatggaagcaagcctgcagaaggtggtgctcacttcctcggggctaccgtggagctgagtgggagccgtagtttataaatgccctgtgctgcacccagatgctgcagctggaagcagcactcagggagcccatcctgacctgcccgggctcccagaagaggtcaggagccacaggatggtcaagcagccggacaatcacgagacactgcaaacgagctgctcctctgacacatgctagccaccaggtttggaaacctcccagttctgctcagcaaatcaactagaaccttctcccactgctctgagtctgcgctgcaccactgagccgaggggcccactcggcatgtaggctcaggctcaatggcacaactccctgtagcacagcacacacacactagctcccaaggccacctctgggaggctgttagcattgctgacttacacccagttaggaatctcggggcactctgagggaaagtgctggggctgccctgaaaaatgcaccttctcccagaaatcaggggattctttaagacacttgagaaaggacagcagatgatccaaacctctccggccccacctcccagcctagggctctttcctgggccaccctccacctctcccatcaaattaaatcactttcctacacctgacagcagcccactgtcataaagcaagtaacaagccgaaggtctgtgtgggaggttgatttgggaacactggatgtacttaatgtggaaagaaccaggaaaactccatccagatgccatggagataccaagggtggccacgacgccaggggacccaggaagaacttcgtctccttcactcacctggtccccttcttgttgggcactgtgtatgggcggagaaaatccagcttgttcttgctgatgacgcagaggtcaatgttgcttccggagcccaggtcgttgaagatgccagctgcgatggcttcgctcaccagattcttggcttcctcctcctgagaaacagaacggcggcaataatgtccccggccaaactagggcctgctctgacatccgcaatgtacgtccactagcagtgcgcaagacctcccgcgagacaggtgttgtttttaatgcccatctcacagatgaggaaaagatctcaaagtaccttgattatttacccaaagttcccgacccaggcctttaaaactttttatgcatgcaccgcctcttgaccacatcagacaatcaccacaaaacgatgggctgacagttactagagggttagtaacttatctttaaaagggccaggtagtaaatattttaggctttgtggccaaaagtctctaccacacctactcaactctgtcacgctagcacaaaacagccacacacaaatacattaaaaaatgggtataactgtgttccaataaaactctattagcaacaggcagtgggccagatctggcccactgactgcagtttactaactatcccctgatcaagaatgtccaacaatagctgaaagttacttgagaaagtcagcactgtaggaggaagaaactaacaccaaaacacaagccggtagttctggggaaatgctggcagaccaagggcgggacctcttgcccagaataatctctctctcctactaaggaacctataggttcactgaagtaatccattactttgaatcactctctcctttgccccacctttaaacacaaatccccatccctaatagttactggtgaacagatggactcatccctttcttatccgagaagccccatcacatgctatgtcctatcacatgctataccagaagctagggctgcagaggtggatgacgcccccagatccctgccccctaggggcttaagagtctagcaggggcacctgacccaagtaagtacaatgcagggtaaggctggctaaagagcacgtgaaaaggagctgggaacacagctggtcagcagagcttcagggagggctgaaggacaggctgcacacgaggcactcagaaaacagcagtgaaacagaaggcaggcagcaacggcagtggtactggacctggggaacaccaagttcaagctctatatacaacgaggacaaaaatgaaccaggctccctgaaagcagggaatctaacctgtgctacggcgccttcccagtccacgagggcgtgagagtacatacacatgcaagtgcactccagcgctcacccaagcaacacccttggagaaacacggactccaggcccaaatccagcctgagaccctcaaagggcagatccgctaacctcaagttttcagaagatctgaacccactgggggctcctgctcctctgcctgccccatgccagactaggattccagtgacataagcgccctctacagactcagaaggacagagaaggttctgctggaagtgggctcctcagcaaaccagcagataggggttcctttgatatttataccccaggttttttcactctcacgtgacatctatgtggggccaatgaagccaattcttcttttgtacatatgcagtcctgtaagaatgcattcaaacgggatccgctaattaggaattttctcctggaattctcaacagtctatggggccagaagctttccacaaaccagtgaaggtggcagcaaagaaagcctcttagacgaggagctggcagcagctgctatctagatagacagcaaaaaccaaccactaattcagcaaacacaacctcatacctaaccgcttccctttaaatggccttcggtgtgtgcgcacatgggcacgtgcggggagaaccatacttattcccctgttcccggcctaccacctctgctcccccttctcttctctaccatttaactgtctcctctgctttgtttcttatcactgctgctggtgtctagagccagccagcagtacctggcagacatcgcgaccctgcgggcagcgcttaggactgcacatttacatttcccaaatgatctgggtagatggggacaggtgaagacttggggaaacggaaatatacgaatgacatgagacatgcatatctagtgtcaatccattcgactgggcacaggacagcagactgctgacagtgctatgtaagattatgagtgatcctccctctattttgcaaacagtctgtaagtaactgataaaactttaaaatatgcaaattttaaaattatatagtttgatttactcatcaaattatcatgtatgctgttatttaagtatgaataaaggcttttttaaattgggaaaa

SEQ ID NO: 7792 - protein, 313 aa, Homo sapiens; identical to SEQ ID NO: 1136

SEQ ID NO: 7793 - DNA, 394 bp, Homo sapiens
ggtggcggcggcggcggaaccgagctgacgggcgtgcggccgctgcgccgcaaactcgtgtgggacgcaccgctccagccgcccgcgggccagcgcaccggtcccccagcggcagccgagcccgcccgcgcgccgctctataggatcctcctttcccttctccacaaatagaaaaattaacctcttgacaaaggagttggaagacttgagtccctgctgtgtgtcccggaaccaatcccccagcctcaggttccccggctgtgaaatgagaaggtgtcctctgttgacagggaggtggccccacctgccagtctgtgattgccacagagacaagccagccaagaagtgccaccctggacgaaggtcgggtgagtgctgattaaacaaaatctgg

SEQ ID NO: 7794 - protein, 37 aa, Homo sapiens
MRRCPLLTGRWPHLPVCDCHRDKPAKKCHPGRRSGEC

SEQ ID NO: 7795 - DNA, 1773 bp, Homo sapiens
gcggaaccgagctgacgggcgtgcggccgctgcgccgcaaactcgtgtgggacgcaccgctccagccgcccgcgggccagcgcaccggtcccccagcggcagccgagcccgcccgcgcgccggagaagaagacacatgaattagagacagcacgggggagcaggctgtggagctgggagtgacggggtgagtccaggaaggctgcctggaggagatgcccaggagagaagtttgctgggaggcagctcatttccggcaggaggagcagagcctgccaaggcctcgagttcgtgccctcgtgaggctggcatgcaggatggcaggacagcccggccacatgccccatggagggagttccaacaacctctgccacaccctggggcctgtgcatcctcctgacccacagaggcatcccaacacgctgtcttttcgctgctcgctggcggacttccagatcgaaaagaagataggccgaggacagttcagcgaggtgtacaaggccacctgcctgctggacaggaagacagtggctctgaagaaggtgcagatctttgagatgatggacgccaaggcgaggcaggactgtgtcaaggagatcggcctcttgaagcaactgaaccacccaaatatcatcaagtatttggactcgtttatcgaagacaacgagctgaacattgtgctggagttggctgacgcaggggacctctcgcagatgatcaagtactttaagaagcagaagcggctcatcccggagaggacagtatggaagtactttgtgcagctgtgcagcgccgtggagcacatgcattcacgccgggtgatgcaccgagacatcaagcctgccaacgtgttcatcacagccacgggcgtcgtgaagctcggtgaccttggtctgggccgcttcttcagctctgagaccaccgcagcccactccctagtggggacgccctactacatgtcaccggagaggatccatgagaacggctacaacttcaagtccgacatctggtccctgggctgtctgctgtacgagatggcagccctccagagccccttctatggagataagatgaatctcttctccctgtgccagaagatcgagcagtgtgactaccccccactccccggggagcactactccgagaagttacgagaactggtcagcatgtgcatctgccctgacccccaccagagacctgacatcggatacgtgcaccaggtggccaagcagatgcacatctggatgtccagcacctgagcgtggatgcaccgtgccttatcaaagccagcaccactttgccttacttgagtcgtcttctcttcgagtggccacctggtagcctagaacagctaagaccacagggttcagcaggttccccaaaaggctgcccagccttacagcagatgctgaaggcagagcagctgagggaggggcgctggccacatgtcactgatggtcagattccaaagtcctttctttatactgttgtggacaatctcagctgggtcaataagggcaggtggttcagcgagccacggcagccccctgtatctggattgtaatgtgaatctttagggtaattcctccagtgacctgtcaaggcttatgctaacaggagacttgcaggagaccgtgtgatttgtgtagtgagcctttgaaaatggttagtaccgggttcagtttagttcttagtatcttttcaatcaagctgtgtgcttaatttactctgttgtaaagggataaagtggaaatcatttttttccgtggagtgg

SEQ ID NO: 7796 - protein, 347 aa, Homo sapiens
MPRREVCWEAAHFRQEEQSLPRPRVRALVRLACRMAGQPGHMPHGGSSNNLCHTLGPVHPPDPQRHPNTLSFRCSLADFQIEKKIGRGQFSEVYKATCLLDRKTVALKKVQIFEMMDAKARQDCVKEIGLLKQLNHPNIIKYLDSFIEDNELNIVLELADAGDLSQMIKYFKKQKRLIPERTVWKYFVQLCSAVEHMHSRRVMHRDIKPANVFITATGVVKLGDLGLGRFFSSETTAAHSLVGTPYYMSPERIHENGYNFKSDIWSLGCLLYEMAALQSPFYGDKMNLFSLCQKIEQCDYPPLPGEHYSEKLRELVSMCICPDPHQRPDIGYVHQVAKQMHIWMSST

SEQ ID NO: 7797 - DNA, 1440 bp, Homo sapiens
cgctgcgccgcaaactcgtgtgggacgcaccgctccagccgcccgcgggccagcgcaccggtcccccagcggcagccgagcccgcccgcgcgccgttcgtgccctcgtgaggctggcatgcaggatggcaggacagcccggccacatgccccatggagggagttccaacaacctctgccacaccctggggcctgtgcatcctcctgacccacagatctttgagatgatggacgccaaggcgaggcaggactgtgtcaaggagatcggcctcttgaagcaactgaaccacccaaatatcatcaagtatttggactcgtttatcgaagacaacgagctgaacattgtgctggagttggctgacgcaggggacctctcgcagatgatcaagtactttaagaagcagaagcggctcatcccggagaggacagtatggaagtactttgtgcagctgtgcagcgccgtggagcacatgcattcacgccgggtgatgcaccgagacatcaagcctgccaacgtgttcatcacagccacgggcgtcgtgaagctcggtgaccttggtctgggccgcttcttcagctctgagaccaccgcagcccactccctagtggggacgccctactacatgtcaccggagaggatccatgagaacggctacaacttcaagtccgacatctggtccctgggctgtctgctgtacgagatggcagccctccagagccccttctatggagataagatgaatctcttctccctgtgccagaagatcgagcagtgtgactaccccccactccccggggagcactactccgagaagttacgagaactggtcagcatgtgcatctgccctgacccccaccagagacctgacatcggatacgtgcaccaggtggccaagcagatgcacatctggatgtccagcacctgagcgtggatgcaccgtgccttatcaaagccagcaccactttgccttacttgagtcgtcttctcttcgagtggccacctggtagcctagaacagctaagaccacagggttcagcaggttccccaaaaggctgcccagccttacagcagatgctgaaggcagagcagctgagggaggggcgctggccacatgtcactgatggtcagattccaaagtcctttctttatactgttgtggacaatctcagctgggtcaataagggcaggtggttcagcgagccacggcagccccctgtatctggattgtaatgtgaatctttagggtaattcctccagtgacctgtcaaggcttatgctaacaggagacttgcaggagaccgtgtgatttgtgtagtgagcctttgaaaatggttagtaccgggttcagtttagttcttagtatcttttcaatcaagctgtgtgcttaatttactctgttgtaaagggataaagtggaaatcatttttttccgtggagtgg

SEQ ID NO: 7798 - protein, 266 aa, Homo sapiens
MAGQPGHMPHGGSSNNLCHTLGPVHPPDPQIFEMMDAKARQDCVKEIGLLKQLNHPNIIKYLDSFIEDNELNIVLELADAGDLSQMIKYFKKQKRLIPERTVWKYFVQLCSAVEHMHSRRVMHRDIKPANVFITATGVVKLGDLGLGRFFSSETTAAHSLVGTPYYMSPERIHENGYNFKSDIWSLGCLLYEMAALQSPFYGDKMNLFSLCQKIEQCDYPPLPGEHYSEKLRELVSMCICPDPHQRPDIGYVHQVAKQMHIWMSST

SEQ ID NO: 7799 - DNA, 2069 bp, Homo sapiens
cgctgcgccgcaaactcgtgtgggacgcaccgctccagccgcccgcgggccagcgcaccggtcccccagcggcagccgagcccgcccgcgcgccgttcgtgccctcgtgaggctggcatgcaggatggcaggacagcccggccacatgccccatggagggagttccaacaacctctgccacaccctggggcctgtgcatcctcctgacccacagatctttgagatgatggacgccaaggcgaggcaggactgtgtcaaggagatcggcctcttgaagcaactgaaccacccaaatatcatcaagtatttggactcgtttatcgaagacaacgagctgaacattgtgctggagttggctgacgcaggggacctctcgcagatgatcaagtactttaagaagcagaagcggctcatcccggagaggacagtatggaagtactttgtgcagctgtgcagcgccgtggagcacatgcattcacgccgggtgatgcaccgagacatcaagcctgccaacgtgttcatcacagccacgggcgtcgtgaagctcggtgaccttggtctgggccgcttcttcagctctgagaccaccgcagcccactccctagtggggacgccctactacatgtcaccggagaggatccatgagaacggctacaacttcaagtccgacatctggtccctgggctgtctgctgtacgagatggcagccctccagagccccttctatggagataagatgaatctcttctccctgtgccagaagatcgagcagtgtgactaccccccactccccggggagcactactccgagaagttacgagaactggtcagcatgtgcatctgccctgacccccaccagagacctgacatcggatacgtgcaccaggtggccaagcagatgcacatctggatgtccagcacctgagcgtggatgcaccgtgccttatcaaagccagcaccactttgccttacttgagtcgtcttctcttcgagtggccacctggtagcctagaacagctaagaccacagggttcagcaggttccccaaaaggctgcccagccttacagcagatgctgaaggcagagcagctgagggaggggcgctggccacatgtcactgatggtcagattccaaagtcctttctttatactgttgtggacaatctcagctgggtcaataagggcaggtggttcagcgagccacggcagccccctgtatctggattgtaatgtgaatctttagggtaattcctccagtgacctgtcaaggcttatgctaacaggagacttgcaggagaccgtgtgatttgtgtagtgagcctttgaaaatggttagtaccgggttcagtttagttcttagtatcttttcaatcaagctgtgtgcttaatttactctgttgtaaagggataaagtggaaatcatttttttccgtggagtggtgattctgctaacatttttatctacgttttataacttggtgagtgacgatgagagccctgcacctggccagagtgtcacaggcaaaaggcatcgggaagcaggagcatcttcttggcagccaggctgggccatcttctcctggacacctgctgtgtaccaggaacttcgtcacctccttgaatgctggcggttcatttcatgatcagtgttaagcattttcctccatgggaaggaagcatgggatatagaaaagcgaagggctgtcctttacaaattctggttctgcaacttcctagcgtgactttgggcttgggcaagtttcttagccgttctgagccttcatttcctcatctgtacaatgagattaatagtacctatcatctaccttcaggattgctgacagacagaatttgaaataaaatatgcaagttagctaatacaaaaagtagatgatccaaaaatggtagccactcacccttcacaaactgaagtccatggaccacggaagtcgagaattaatgtacacctgtatcatgtgtaggaaaccagaaatgtgttccttatttcttgttcccaaacaggattaactgtgaagactaatttataaatgtgaacctaagaaaactcc

SEQ ID NO: 7800 - protein, 266 aa, Homo sapiens; identical to SEQ ID NO: 7798

SEQ ID NO: 7801 - DNA, 2416 bp, Homo sapiens
cgctgcgccgcaaactcgtgtgggacgcaccgctccagccgcccgcgggccagcgcaccggtcccccagcggcagccgagcccgcccgcgcgccgttcgtgccctcgtgaggctggcatgcaggatggcaggacagcccggccacatgccccatggagggagttccaacaacctctgccacaccctggggcctgtgcatcctcctgacccacagatctttgagatgatggacgccaaggcgaggcaggactgtgtcaaggagatcggcctcttgaagcaactgaaccacccaaatatcatcaagtatttggactcgtttatcgaagacaacgagctgaacattgtgctggagttggctgacgcaggggacctctcgcagatgatcaagtactttaagaagcagaagcggctcatcccggagaggacagtatggaagtactttgtgcagctgtgcagcgccgtggagcacatgcattcacgccgggtgatgcaccgagacatcaagcctgccaacgtgttcatcacagccacgggcgtcgtgaagctcggtgaccttggtctgggccgcttcttcagctctgagaccaccgcagcccactccctagtggggacgccctactacatgtcaccggagaggatccatgagaacggctacaacttcaagtccgacatctggtccctgggctgtctgctgtacgagatggcagccctccagagccccttctatggagataagatgaatctcttctccctgtgccagaagatcgagcagtgtgactaccccccactccccggggagcactactccgagaagttacgagaactggtcagcatgtgcatctgccctgacccccaccagagacctgacatcggatacgtgcaccaggtggccaagcagatgcacatctggatgtccagcacctgagcgtggatgcaccgtgccttatcaaagccagcaccactttgccttacttgagtcgtcttctcttcgagtggccacctggtagcctagaacagctaagaccacagggttcagcaggttccccaaaaggctgcccagccttacagcagatgctgaaggcagagcagctgagggaggggcgctggccacatgtcactgatggtcagattccaaagtcctttctttatactgttgtggacaatctcagctgggtcaataagggcaggtggttcagcgagccacggcagccccctgtatctggattgtaatgtgaatctttagggtaattcctccagtgacctgtcaaggcttatgctaacaggagacttgcaggagaccgtgtgatttgtgtagtgagcctttgaaaatggttagtaccgggttcagtttagttcttagtatcttttcaatcaagctgtgtgcttaatttactctgttgtaaagggataaagtggaaatcatttttttccgtggagtggtgattctgctaacatttttatctacgttttataacttggtgagtgacgatgagagccctgcacctggccagagtgtcacaggcaaaaggcatcgggaagcaggagcatcttcttggcagccaggctgggccatcttctcctggacacctgctgtgtaccaggaacttcgtcacctccttgaatgctggcggttcatttcatgatcagtgttaagcattttcctccatgggaaggaagcatgggatatagaaaagcgaagggctgtcctttacaaattctggttctgcaacttcctagcgtgactttgggcttgggcaagtttcttagccgttctgagccttcatttcctcatctgtacaatgagattaatagtacctatcatctaccttcaggattgctgacagacagaatttgaaataaaatatgcaagttagctaatacaaaaagtagatgatccaaaaatggtagccactcacccttcacaaactgaagtccatggaccacggaagtcgagaattaatgtacacctgtatcatgtgtaggaaaccagaaatgtgttccttatttcttgttcccaaacaggattaactgtgaagactaatttataaatgtgaacctaagaaaactccacctctgaaggaaatcatttgaattttgtttttgtacgtaaagttaaccttccaattgtctgagctgtcgtcactgacttcatgacagtctggccctccagacaagagcagcgctggcatcgggcaggtgattcctgacacctgctgcctgcaggcattcactgaccaggcctttcctggaggaaacacccagggccgggcggctgctgtttccacacgtggactcggatctgctgtgacaccgtcagcccgacagtctctccatatgcagcctttcctctgtacttttctccatggttgaaataaaacagggtgactgggagttacttagaattcatgaagatttt

SEQ ID NO: 7802 - protein, 266 aa, Homo sapiens; identical to SEQ ID NO: 7798

SEQ ID NO: 7803 - DNA, 9164 bp, Homo sapiens
cgctgcgccgcaaactcgtgtgggacgcaccgctccagccgcccgcgggccagcgcaccggtcccccagcggcagccgagcccgcccgcgcgccgttcgtgccctcgtgaggctggcatgcaggatggcaggacagcccggccacatgccccatggagggagttccaacaacctctgccacaccctggggcctgtgcatcctcctgacccacagatctttgagatgatggacgccaaggcgaggcaggactgtgtcaaggagatcggcctcttgaagcaactgaaccacccaaatatcatcaagtatttggactcgtttatcgaagacaacgagctgaacattgtgctggagttggctgacgcaggggacctctcgcagatgatcaagtactttaagaagcagaagcggctcatcccggagaggacagtatggaagtactttgtgcagctgtgcagcgccgtggagcacatgcattcacgccgggtgatgcaccgagacatcaagcctgccaacgtgttcatcacagccacgggcgtcgtgaagctcggtgaccttggtctgggccgcttcttcagctctgagaccaccgcagcccactccctagtggggacgccctactacatgtcaccggagaggatccatgagaacggctacaacttcaagtccgacatctggtccctgggctgtctgctgtacgagatggcagccctccagagccccttctatggagataagatgaatctcttctccctgtgccagaagatcgagcagtgtgactaccccccactccccggggagcactactccgagaagttacgagaactggtcagcatgtgcatctgccctgacccccaccagagacctgacatcggatacgtgcaccaggtggccaagcagatgcacatctggatgtccagcacctgagcgtggatgcaccgtgccttatcaaagccagcaccactttgccttacttgagtcgtcttctcttcgagtggccacctggtagcctagaacagctaagaccacagggttcagcaggttccccaaaaggctgcccagccttacagcagatgctgaaggcagagcagctgagggaggggcgctggccacatgtcactgatggtcagattccaaagtcctttctttatactgttgtggacaatctcagctgggtcaataagggcaggtggttcagcgagccacggcagccccctgtatctggattgtaatgtgaatctttagggtaattcctccagtgacctgtcaaggcttatgctaacaggagacttgcaggagaccgtgtgatttgtgtagtgagcctttgaaaatggttagtaccgggttcagtttagttcttagtatcttttcaatcaagctgtgtgcttaatttactctgttgtaaagggataaagtggaaatcatttttttccgtggagtggtgattctgctaacatttttatctacgttttataacttggtgagtgacgatgagagccctgcacctggccagagtgtcacaggcaaaaggcatcgggaagcaggagcatcttcttggcagccaggctgggccatcttctcctggacacctgctgtgtaccaggaacttcgtcacctccttgaatgctggcggttcatttcatgatcagtgttaagcattttcctccatgggaaggaagcatgggatatagaaaagcgaagggctgtcctttacaaattctggttctgcaacttcctagcgtgactttgggcttgggcaagtttcttagccgttctgagccttcatttcctcatctgtacaatgagattaatagtacctatcatctaccttcaggattgctgacagacagaatttgaaataaaatatgcaagttagctaatacaaaaagtagatgatccaaaaatggtagccactcacccttcacaaactgaagtccatggaccacggaagtcgagaattaatgtacacctgtatcatgtgtaggaaaccagaaatgtgttccttatttcttgttcccaaacaggattaactgtgaagactaatttataaatgtgaacctaagaaaactccacctctgaaggaaatcatttgaattttgtttttgtacgtaaagttaaccttccaattgtctgagctgtcgtcactgacttcatgacagtctggccctccagacaagagcagcgctggcatcgggcaggtgattcctgacacctgctgcctgcaggcattcactgaccaggcctttcctggaggaaacacccagggccgggcggctgctgtttccacacgtggactcggatctgctgtgacaccgtcagcccgacagtctctccatatgcagcctttcctctgtacttttctccatggttgaaataaaacagggtgactgggagttacttagaattcatgaagattttaaaatggctttggagattttgcttttaaaccagtagattcaaaacttaaacagcgtctgcagcacaatttcttgaggaaccttgaaaaacacaacttcccaggccccattcagtaatcccaggatttctttaagctccccaaataattttgaaactcatcatcagccgagtttctgccctcatgaggtaattccatcgttctccccagcctgcccctggcagctgtaacacaggagctggcctgagagcagattcaccctggaatgttctctccacagaacaatcaagtccctgtcgcctgcctagtgcttaccactgaagatttttctgattccagaccaactttttgccaacattctgcttccagctctctgagcccctgccgtgtctccccaacactgccagccccagcacgcaatcaacctactttgtgcatgccacccgctttccacactgtgagaacaatctgcccaactggaccctctggaggcgcacgatctcagccactcaccaggcctgagtgtttgtgaaatgatcatgtcctacttattacaaaaccgtaaccccaaaacattccttttatttctgtgaaaccggccaaagtgaggtccacccaccttcacacagctctggcggtgcacctgctcaccttctcttggttctcagaactgagctgggcttgagaacacagctttggctttgccatttttttcctacttggctgctgaggtggagggtgtgctgcacttatcaccccatttcaaaaccaaaccaaacctgaggccaccccaaacaaattcagccagcaaaaagggtaggtatcgatggtcacctgaagcctcaagggagtccactctgacttctgacagcagacagaacctatctgtcctcaggaggggcgcatggctcctacgctctcctctgagcctaggccagtgctcaaggaggatcagcaccctgaagggccaggccaatggccttagcagccccctactgcccccaaaaacaccacacagtgcccagacctcagctgcccaatttggtttttgttttttattgagttgagtttcattcggcaaacactagccacatgagtgtcttactgggcctcaatgctcaccaccttccagaaccgcggccagccacccactgatgccattcaggaagtgtccattgtttggactgtttcttccagcacctcaatctccagaggagtgattttctcagtgaggactgcagtagtccctttctcacacctgtaccggccaagcctagtaagagaaaaacaaaagcacagagttaggattctcctcaaggtgccagagggcagaagacagtgaaaataaatattcaggcaacgcagtgagcaggctggactggaatcttggctctcccgatcccagctctgtgatcttgggggattcaacttcctcagttctcaagtgctgcaaaatgggggtgcctgggaggcaaagagtgtcattagtgaacacggcacctggcccttggtggacacgtgactctccccccaccccaccatccccacaagtgctgggaagcacttggtcccttgacatcaatcttcaacctccctacaatactgttcagggacagcaggaagcaaatcccatcattacacaagagaagggcatgattgctcttccgtgcagcaacaagaatgacttaactgttaccttagacactgcacaaacatctggaagcataaacagtgtaaaaaaaatgtgcagccagactctgggcttgtcatttcagaccactctcaagtctcaagaaaagttaactgtccctttcagggacacagtgggtccccactaggacacacccaacaccttcttcctggagtgaatctggcagaggtttctttgagcaccagactgtctagaagatatgtatttgggctgttaatgctcacagtgggtcaggaattaggatactgtcaaatggcagcacacaaccaactgttcctctgctctagccccagctggggtaatatctctgtcaaacttgctgtccttcaggaactgccagaaggctgctggctgtgccatggccttgtgctcccggaacacccatcctctcccctggacacacgggctaaaagagggagcaggaagcagaacaaggagggcaacttccacagttctgcatccaggtcaggagcacggtcagcccagagcggcctgcctttatgctgccaagcctcccccgacccccaccctcttaaagaatccaagcaaaagtacctttgaacaatgtgtccccaccccatcagtttgaggatgcccctcatccctcacacgctggaaccttggtggcagcgtgcagtcttagagccaaagtcccacgtggcctctgtgtgcctgactcctctgaaccacccctcagtgtctccgggaggcttggacacacaagagcctcctcaccactgtggtgacagtgcccgatttttgcggcatgcattcagagcttccgccttacgtgccagtggactgcaagaccgtgtgctggagggctgcgggcagacaggcagcagggacttgccaggcaaggcccactggcgcatggcacgggatgcttcctcaggcctatcgccctgcccgcaccctagcatccaccctgggaagggctcccctaactcaggcagtgcccccatcttcagtcactggcaaagaagacaacagagtccagggagcttggacacttgctgcccttggccccaggacaccgatggggagcaggctccctgcaggttactgcacacccaccacacgcccagcagcttctgggtcgccttgctgattcttcccaagcagccgcaaggcggttttcttttgttcttgggtgtttagagcctctgtttacaagtggagcagcccatgtcccaggaagtaggatgtgccactgctgcactccctgtggatgaggactcctgcgctcagcacaggttccctaggcaaccacttctcactggcccagacgtggctttcagagtcctcgcccaggaccctggccagcctgaatggtgtaaccattccctaccccatcaccgcttcaccatggacttgctcaaatcacgcatcttgcaaaataaccagcgaagcaggctacatggagtacttggctcctgcctacctggagctcggcaaagcccggttccccaacacagctctgggcctgaaaggtggcttgccttcctgctaaaggcccgagggacttcgtgggctcattagaggtcatctggtttagctccatttccaagacagactgatttgctggaagccaccaagccagccaccaacactccccaaccccagtgccagcgttctctggccccgtgctgccccaccccatcaggagcccactgagcttccgcaaggttgagtgcagcccacagtgaatacctgctggttctgaacgttccattccttccttgtgaattactcctgatgtggagttgtgtgtgcagtgggagatggaagcaagcctgcagaaggtggtgctcacttcctcggggctaccgtggagctgagtgggagccgtagtttataaatgccctgtgctgcacccagatgctgcagctggaagcagcactcagggagcccatcctgacctgcccgggctcccagaagaggtcaggagccacaggatggtcaagcagccggacaatcacgagacactgcaaacgagctgctcctctgacacatgctagccaccaggtttggaaacctcccagttctgctcagcaaatcaactagaaccttctcccactgctctgagtctgcgctgcaccactgagccgaggggcccactcggcatgtaggctcaggctcaatggcacaactccctgtagcacagcacacacacactagctcccaaggccacctctgggaggctgttagcattgctgacttacacccagttaggaatctcggggcactctgagggaaagtgctggggctgccctgaaaaatgcaccttctcccagaaatcaggggattctttaagacacttgagaaaggacagcagatgatccaaacctctccggccccacctcccagcctagggctctttcctgggccaccctccacctctcccatcaaattaaatcactttcctacacctgacagcagcccactgtcataaagcaagtaacaagccgaaggtctgtgtgggaggttgatttgggaacactggatgtacttaatgtggaaagaaccaggaaaactccatccagatgccatggagataccaagggtggccacgacgccaggggacccaggaagaacttcgtctccttcactcacctggtccccttcttgttgggcactgtgtatgggcggagaaaatccagcttgttcttgctgatgacgcagaggtcaatgttgcttccggagcccaggtcgttgaagatgccagctgcgatggcttcgctcaccagattcttggcttcctcctcctgagaaacagaacggcggcaataatgtccccggccaaactagggcctgctctgacatccgcaatgtacgtccactagcagtgcgcaagacctcccgcgagacaggtgttgtttttaatgcccatctcacagatgaggaaaagatctcaaagtaccttgattatttacccaaagttcccgacccaggcctttaaaactttttatgcatgcaccgcctcttgaccacatcagacaatcaccacaaaacgatgggctgacagttactagagggttagtaacttatctttaaaagggccaggtagtaaatattttaggctttgtggccaaaagtctctaccacacctactcaactctgtcacgctagcacaaaacagccacacacaaatacattaaaaaatgggtataactgtgttccaataaaactctattagcaacaggcagtgggccagatctggcccactgactgcagtttactaactatcccctgatcaagaatgtccaacaatagctgaaagttacttgagaaagtcagcactgtaggaggaagaaactaacaccaaaacacaagccggtagttctggggaaatgctggcagaccaagggcgggacctcttgcccagaataatctctctctcctactaaggaacctataggttcactgaagtaatccattactttgaatcactctctcctttgccccacctttaaacacaaatccccatccctaatagttactggtgaacagatggactcatccctttcttatccgagaagccccatcacatgctatgtcctatcacatgctataccagaagctagggctgcagaggtggatgacgcccccagatccctgccccctaggggcttaagagtctagcaggggcacctgacccaagtaagtacaatgcagggtaaggctggctaaagagcacgtgaaaaggagctgggaacacagctggtcagcagagcttcagggagggctgaaggacaggctgcacacgaggcactcagaaaacagcagtgaaacagaaggcaggcagcaacggcagtggtactggacctggggaacaccaagttcaagctctatatacaacgaggacaaaaatgaaccaggctccctgaaagcagggaatctaacctgtgctacggcgccttcccagtccacgagggcgtgagagtacatacacatgcaagtgcactccagcgctcacccaagcaacacccttggagaaacacggactccaggcccaaatccagcctgagaccctcaaagggcagatccgctaacctcaagttttcagaagatctgaacccactgggggctcctgctcctctgcctgccccatgccagactaggattccagtgacataagcgccctctacagactcagaaggacagagaaggttctgctggaagtgggctcctcagcaaaccagcagataggggttcctttgatatttataccccaggttttttcactctcacgtgacatctatgtggggccaatgaagccaattcttcttttgtacatatgcagtcctgtaagaatgcattcaaacgggatccgctaattaggaattttctcctggaattctcaacagtctatggggccagaagctttccacaaaccagtgaaggtggcagcaaagaaagcctcttagacgaggagctggcagcagctgctatctagatagacagcaaaaaccaaccactaattcagcaaacacaacctcatacctaaccgcttccctttaaatggccttcggtgtgtgcgcacatgggcacgtgcggggagaaccatacttattcccctgttcccggcctaccacctctgctcccccttctcttctctaccatttaactgtctcctctgctttgtttcttatcactgctgctggtgtctagagccagccagcagtacctggcagacatcgcgaccctgcgggcagcgcttaggactgcacatttacatttcccaaatgatctgggtagatggggacaggtgaagacttggggaaacggaaatatacgaatgacatgagacatgcatatctagtgtcaatccattcgactgggcacaggacagcagactgctgacagtgctatgtaagattatgagtgatcctccctctattttgcaaacagtctgtaagtaactgataaaactttaaaatatgcaaattttaaaattatatagtttgatttactcatcaaattatcatgtatgctgttatttaagtatgaataaaggcttttttaaattgggaaaa

SEQ ID NO: 7804 - protein, 266 aa, Homo sapiens; identical to SEQ ID NO: 7798

SEQ ID NO: 7805 - DNA, 5147 bp, Homo sapiens
gatacagagtctcgctctgttgcctaggctggagtgcagtggcacaatctcagctcactgcagcctctgtctcccaggttcaagtgattctcacgcctcaggctcctcaggctcccgagtagctgggattaaaggtgtccaccaccacgcccagctaatttttcgtatttttagtagcgatggggttttgccatgttggctgggctggtctcaaactcctgacctcaagtgatctgcccgcctcggcctctcaaagtgctgggattataggcatgagcctgtcctggtctttgtgatttttacactaccttttttgtcacatggtacctcttagcagaattctaatcctaaagttgaatttctaaggcagatcacccccaagggtgcctgaggatcacggggctggtgcctggtgttactggcccgttttccggatgagggagtagaggctgggcccctgtgaagccctccttgcatgaggtgactacagaggagtggacctccagagcctggtgacaccctctcccaccacacagactacagctgggtctagggtgtgacgagctggcagagaagccgccccagagcgatagccacttccggaggacaaggatctctccaccggctcaggaaaacaagccagtttaagggaaacccaaatggctttggggggcgggggcataaaatgtgcaggactccctcaggccttgccatgcagaccttttcaggaggactgccaggggaagacggctgctcacttctgccccacggccaggcctgtgacagccgctcctgtcagcgcagtcctctgcggggccgacgctgtgtaaataattaacaaaacatctgccttgcttcataacacaccgtggctgacacagctctcagggccttcagagaccctccaatgccacgccgaggacttatggcctcgctttgtggggacaggtgggaacgagagcagatactgacaggcaaacattttcctgaggcgccacagggccaccctggtgcttaaatcctgcctctttgcaaactgcgctgtctccttcccttccgttttgggagccatgatcctaggaaggtgctctggtggaatccagaggggtccccggcacctgcttctggccttgtttagggcctcaatgcaggggcactggagacactctgggccacggaccaagggtcccggctgagtgaccctgggtgggtccttggtcattaaagattttccatgtctctcatgtaatcttggggaatgagcatcaagcacttaaaaggcgctgagcatctgaaatgcattatttcacttacttcctcccccgaagcttctgaggtcataatattatccctgttttccagatgatgacgctgaggctcagtgggcgacgtgctcatgagaggcaggtctgggactccagcctcattcactccatcgggtgcccaggctcaggctctcaatgcggctgtgggggagcgccttgctccctctgagcctcaggttctgttccgtgaaacagatgggtggcaagagtccttcagactccaaaagtccacaataaataaacccagtgctcgtctcaaccccagtgggtgtgtgcgaagctctctggattgggagcccagtgaattcctcatcagcagcttgattcattagagctgaaggtcatgtgcatccatccttttgcaggtgtcttcccaacaagcccaagtttcaaagacgttgaggacaaggaacaagagagggcaggcattcgagaaggggcctgtggactaattcccatactgccactcacctgcagtaagaacgcgcctctggaacatggagaagttcttcttaaagggatctctgttcacccaggtcaacatgacccaccccgcaagcctcagcctaattctgaagcatgagggttaaacaattcggggaaaatgcaggcactgcaggctctgaatggcaacttccctcccccttcccctgtccaaattccttcacactctatggaattcctacataaagccccttttttcttagaattctatgaggtcaccaccatgcagatgtctaagagaaagaaagaacggctccgtgcagatccaggccactgcaactgaatgcatttcagatctcggccaccccatctttcaattcccatggcccccccactcgcccagccacagctacagcggtggtggccagtcaggtctggtggggtgctgtgatcctgcccttgctggaggccaagaaggcctggctagaagacctgtgcctttaccaccagatcacccgagaagtcatctgtggaaaaatccagaattggagacaatggcgcagccatgtatgtgggggtctgtttccacacaagcaagtcctgttagagggacacatgtcaaaatgctagctcccactccaagttcaagttcccaaagttaacatcacaggaaattacaccaccaactgatttgccccaatgtcggctcctctgtctggaagtcgagtctgagaaggccattggtttagttcagctttggccaaaggaagggaccagctcagacaggaatgagtgaaagtgctggcctgattttttttctttttaaactaacattttccccaaaagttatcttgccattacccaagagtcataagtgaaaagacagccaaataccaaaaagccactgaggccctcaacagtgcctgctcatttcaaagccatttcacggacagccagggggtgcctgggccaccgcagaccacccctcactccaagagcactcctgctccccagagctccatgttccatgtaaagttccacggcatgtgcacaccacttcctaagaatgatgtcagcaaaaaaaaaaaaagataaaaatgtggaaaaaaggactatttttacctccccaaatcacaggccagacgggagaaaaatccatcaatgccagaaatgtggctgagccttcgcacaagatctattatttcacaccttaaattaacgcatctcaaagcaatttgcaaatgttcgtcaatttgcagaacatacatggaagggagagaaataccttttcctttcaacaccgaaggacactggcaggggggcacaacatggcccaaaccacacaggtcctcacacacaacattcatttcaagcacatgtagtagaagccgtgatcgaaatggaaatgagcagggaaaaaaggcaggcaggggacttaaatgacaagtgacaagaagcctacctacaagcgatctcgctgtcagatatttaggactgtgagtcaggcccgtgaaggtgacatcagggggccagaacaccggactcttcctgcgaacagtgtcccagcctcatctccacacaagcctggcagtgcctgcccgtatttaatcttggatgattcaccaggtccctccactctccaccctccaactcccttgcttggtctagcctgagaagaggaaggaaatattcttctccttttgacaattgttttgacacttcccttatgaaaagtatctggggcacttaaagaaaagaaaaaatgtgaacagcagccctttctctccagtagctctggccctgggcgaggaaggccagcagtgccttctggaagacctctcccaggtctcgggcaacccagccctgcaggaacctagcctgtcttaacctacttggctttgcagcatgcaacaggagcaaagcacgacaaaggcagccagatgtggtttaaggtgaggaactctggaatcagagacatgggttcgaatcccgactctgccatttgtgggtttatgaccctgcccaagttacttaacctccctctctgtaagatcaggaaaacgacactgaacctcagcacaggccaggcatccagcccacagtgcctgctaccttcctagtacagtggggagaccatgggctctgctcagacaagcctgggttcaaatccagctctgctgcgtattagcacatggtctttggcgcattctctcatctctctgtgccccagtttcctcatctgtaaatgggcatcgtgacagcttccatcttagtgttggtgagtggactgggtaaaatacagcaccagacctagcacacagtatatcctcagtaaatggggacatggccgggcatggtggctcatgcctgtaattccagcactttgggaggccaaggcgggcggatcacctgaggtcaggagttcgagaccagcctggctggccaacacagtgaaaccccatctctactaaaaatacaaaaattatctgggcgtggtggcacctgcctataatcccagctactcaggaggaggctgaggcaggaggctcacttgaacccaggaggcagagggtgcagggagctgagattgcgccactgtactccagctgtcctgggattcacacttggagcctaggagaggtataaataaatcaaaagatccgtctacttagcagggcaggcagagaggcccccacatacacaggcaagtctagggtcagccccccaggcctggctggagagagacaagaacaaagacaggagagcctggaggatatttaggaaaacacacgtcctcgggtgcccggccgaggggcccaccacagcctccgctcgcccagcctgtgtatgcagagagggtcctgccagtggccctgccgcagcctggctctaagacctttgcctctgtcaggcccagccaggctctgagtctgccctcctggcccctggttcaccggatcaggcccagccccgacccccagcccatgccaggccgcttctctctccacgggctccctggctcgggggccatcactgtgcaaaggcctggtgggcgcaaagggggccggcccctcaacctcagtaataaacacgctcgcacggccctgcacactcgttatactcacacccacacaggcatactttcgcccttctaggctcacgcatgtgcttgcacacaaatcactttggaatgcacacacgtgcacacacacactccctgagacccgcacgtactccctgcggcgcccggcacactcctccgcccgtcgtccccactcgggaagtgggtagcggggagccatgcccgcgtccccgcacgcactcaccccaacaacgccaccagacgctccggggtgcacacgcacacccgccggggac

SEQ ID NO: 7806 - protein, 130 aa, Homo sapiens [sequence omitted]

SEQ ID NO: 7807 - DNA, 358 bp, Homo sapiens
gctttaaggcaaactttagaaattccagagctccctagttggtctgacttttccaaattcagcttgccttttttgggggaaaatgtcgccttagtttggtgtacagtacgtgcaggcaggtcttggaggcacgtttaaaaaccctgtcgttaatggaagaagaatttcattgaaagggacgcagagccgtctggaagcgcctgccccggactcagcgagtttggactcagcgagtttgagcttaccgaatgaactttggacgtcttcttttagcaaacaaaaccttaaaccacatctggctgcctttgtcgtgctttgctcctgttgcatgctgcaaagccaagtaggttaagacagg

SEQ ID NO: 7808 - protein, 32 aa, Homo sapiens
MNFGRLLLANKTLNHIWLPLSCFAPVACCKAK

SEQ ID NO: 7809 - DNA, 373 bp, Homo sapiens
gtgcctgcattttccccgaattgtttaaccctcatgcttcagaattaggctgaggcttgcggggtgggtcatgttgacctgggtgaacagagatccctttaagaagaacttctccatgttccagaggcgcgttcttactgcagatggcgacactgaggcccagagagacatcatgaccagcctcaggtcccacatgcagcctgctgctctgtagcctaaatcagatcactgtcccagctttcaggtcaaggctctggttgtgacacctgggcctggactgcgggtgaaaagttttgatgcaaaaacacagaccgtccattgtcctatgggctaagtggactcccttctgctaaccagagatgcttgtgctggc

SEQ ID NO: 7810 - protein, 47 aa, Homo sapiens
MLTWVNRDPFKKNFSMFQRRVLTADGDTEAQRDIMTSLRSHMQPAAL

SEQ ID NO: 7811 - DNA, 1604 bp, Homo sapiens
cacccaccccagcccagagaggcgacccagctccctggaggcccaggcacctcatgtctgccctcaacccagagtggagcagaccttccctggagcttctcaggagccacttcaaaagttcgtgccctcgtgaggctggcatgcaggatggcaggacagcccggccacatgccccatggagggagttccaacaacctctgccacaccctggggcctgtgcatcctcctgacccacagaggcatcccaacacgctgtcttttcgctgctcgctggcggacttccagatcgaaaagaagataggccgaggacagttcagcgaggtgtacaaggccacctgcctgctggacaggaagacagtggctctgaagaaggtgcagatctttgagatgatggacgccaaggcgaggcaggactgtgtcaaggagatcggcctcttgaagcaactgaaccacccaaatatcatcaagtatttggactcgtttatcgaagacaacgagctgaacattgtgctggagttggctgacgcaggggacctctcgcagatgatcaagtactttaagaagcagaagcggctcatcccggagaggacagtatggaagtactttgtgcagctgtgcagcgccgtggagcacatgcattcacgccgggtgatgcaccgagacatcaagcctgccaacgtgttcatcacagccacgggcgtcgtgaagctcggtgaccttggtctgggccgcttcttcagctctgagaccaccgcagcccactccctagtggggacgccctactacatgtcaccggagaggatccatgagaacggctacaacttcaagtccgacatctggtccctgggctgtctgctgtacgagatggcagccctccagagccccttctatggagataagatgaatctcttctccctgtgccagaagatcgagcagtgtgactaccccccactccccggggagcactactccgagaagttacgagaactggtcagcatgtgcatctgccctgacccccaccagagacctgacatcggatacgtgcaccaggtggccaagcagatgcacatctggatgtccagcacctgagcgtggatgcaccgtgccttatcaaagccagcaccactttgccttacttgagtcgtcttctcttcgagtggccacctggtagcctagaacagctaagaccacagggttcagcaggttccccaaaaggctgcccagccttacagcagatgctgaaggcagagcagctgagggaggggcgctggccacatgtcactgatggtcagattccaaagtcctttctttatactgttgtggacaatctcagctgggtcaataagggcaggtggttcagcgagccacggcagccccctgtatctggattgtaatgtgaatctttagggtaattcctccagtgacctgtcaaggcttatgctaacaggagacttgcaggagaccgtgtgatttgtgtagtgagcctttgaaaatggttagtaccgggttcagtttagttcttagtatcttttcaatcaagctgtgtgcttaatttactctgttgtaaagggataaagtggaaatcatttttttccgtggagtgg

SEQ ID NO: 7812 - protein, 313 aa, Homo sapiens; identical to SEQ ID NO: 1136

SEQ ID NO: 7813 - DNA, 2233 bp, Homo sapiens
cacccaccccagcccagagaggcgacccagctccctggaggcccaggcacctcatgtctgccctcaacccagagtggagcagaccttccctggagcttctcaggagccacttcaaaagttcgtgccctcgtgaggctggcatgcaggatggcaggacagcccggccacatgccccatggagggagttccaacaacctctgccacaccctggggcctgtgcatcctcctgacccacagaggcatcccaacacgctgtcttttcgctgctcgctggcggacttccagatcgaaaagaagataggccgaggacagttcagcgaggtgtacaaggccacctgcctgctggacaggaagacagtggctctgaagaaggtgcagatctttgagatgatggacgccaaggcgaggcaggactgtgtcaaggagatcggcctcttgaagcaactgaaccacccaaatatcatcaagtatttggactcgtttatcgaagacaacgagctgaacattgtgctggagttggctgacgcaggggacctctcgcagatgatcaagtactttaagaagcagaagcggctcatcccggagaggacagtatggaagtactttgtgcagctgtgcagcgccgtggagcacatgcattcacgccgggtgatgcaccgagacatcaagcctgccaacgtgttcatcacagccacgggcgtcgtgaagctcggtgaccttggtctgggccgcttcttcagctctgagaccaccgcagcccactccctagtggggacgccctactacatgtcaccggagaggatccatgagaacggctacaacttcaagtccgacatctggtccctgggctgtctgctgtacgagatggcagccctccagagccccttctatggagataagatgaatctcttctccctgtgccagaagatcgagcagtgtgactaccccccactccccggggagcactactccgagaagttacgagaactggtcagcatgtgcatctgccctgacccccaccagagacctgacatcggatacgtgcaccaggtggccaagcagatgcacatctggatgtccagcacctgagcgtggatgcaccgtgccttatcaaagccagcaccactttgccttacttgagtcgtcttctcttcgagtggccacctggtagcctagaacagctaagaccacagggttcagcaggttccccaaaaggctgcccagccttacagcagatgctgaaggcagagcagctgagggaggggcgctggccacatgtcactgatggtcagattccaaagtcctttctttatactgttgtggacaatctcagctgggtcaataagggcaggtggttcagcgagccacggcagccccctgtatctggattgtaatgtgaatctttagggtaattcctccagtgacctgtcaaggcttatgctaacaggagacttgcaggagaccgtgtgatttgtgtagtgagcctttgaaaatggttagtaccgggttcagtttagttcttagtatcttttcaatcaagctgtgtgcttaatttactctgttgtaaagggataaagtggaaatcatttttttccgtggagtggtgattctgctaacatttttatctacgttttataacttggtgagtgacgatgagagccctgcacctggccagagtgtcacaggcaaaaggcatcgggaagcaggagcatcttcttggcagccaggctgggccatcttctcctggacacctgctgtgtaccaggaacttcgtcacctccttgaatgctggcggttcatttcatgatcagtgttaagcattttcctccatgggaaggaagcatgggatatagaaaagcgaagggctgtcctttacaaattctggttctgcaacttcctagcgtgactttgggcttgggcaagtttcttagccgttctgagccttcatttcctcatctgtacaatgagattaatagtacctatcatctaccttcaggattgctgacagacagaatttgaaataaaatatgcaagttagctaatacaaaaagtagatgatccaaaaatggtagccactcacccttcacaaactgaagtccatggaccacggaagtcgagaattaatgtacacctgtatcatgtgtaggaaaccagaaatgtgttccttatttcttgttcccaaacaggattaactgtgaagactaatttataaatgtgaacctaagaaaactcc

SEQ ID NO: 7814 - protein, 313 aa, Homo sapiens; identical to SEQ ID NO: 1136

SEQ ID NO: 7815 - DNA, 2580 bp, Homo sapiens
cacccaccccagcccagagaggcgacccagctccctggaggcccaggcacctcatgtctgccctcaacccagagtggagcagaccttccctggagcttctcaggagccacttcaaaagttcgtgccctcgtgaggctggcatgcaggatggcaggacagcccggccacatgccccatggagggagttccaacaacctctgccacaccctggggcctgtgcatcctcctgacccacagaggcatcccaacacgctgtcttttcgctgctcgctggcggacttccagatcgaaaagaagataggccgaggacagttcagcgaggtgtacaaggccacctgcctgctggacaggaagacagtggctctgaagaaggtgcagatctttgagatgatggacgccaaggcgaggcaggactgtgtcaaggagatcggcctcttgaagcaactgaaccacccaaatatcatcaagtatttggactcgtttatcgaagacaacgagctgaacattgtgctggagttggctgacgcaggggacctctcgcagatgatcaagtactttaagaagcagaagcggctcatcccggagaggacagtatggaagtactttgtgcagctgtgcagcgccgtggagcacatgcattcacgccgggtgatgcaccgagacatcaagcctgccaacgtgttcatcacagccacgggcgtcgtgaagctcggtgaccttggtctgggccgcttcttcagctctgagaccaccgcagcccactccctagtggggacgccctactacatgtcaccggagaggatccatgagaacggctacaacttcaagtccgacatctggtccctgggctgtctgctgtacgagatggcagccctccagagccccttctatggagataagatgaatctcttctccctgtgccagaagatcgagcagtgtgactaccccccactccccggggagcactactccgagaagttacgagaactggtcagcatgtgcatctgccctgacccccaccagagacctgacatcggatacgtgcaccaggtggccaagcagatgcacatctggatgtccagcacctgagcgtggatgcaccgtgccttatcaaagccagcaccactttgccttacttgagtcgtcttctcttcgagtggccacctggtagcctagaacagctaagaccacagggttcagcaggttccccaaaaggctgcccagccttacagcagatgctgaaggcagagcagctgagggaggggcgctggccacatgtcactgatggtcagattccaaagtcctttctttatactgttgtggacaatctcagctgggtcaataagggcaggtggttcagcgagccacggcagccccctgtatctggattgtaatgtgaatctttagggtaattcctccagtgacctgtcaaggcttatgctaacaggagacttgcaggagaccgtgtgatttgtgtagtgagcctttgaaaatggttagtaccgggttcagtttagttcttagtatcttttcaatcaagctgtgtgcttaatttactctgttgtaaagggataaagtggaaatcatttttttccgtggagtggtgattctgctaacatttttatctacgttttataacttggtgagtgacgatgagagccctgcacctggccagagtgtcacaggcaaaaggcatcgggaagcaggagcatcttcttggcagccaggctgggccatcttctcctggacacctgctgtgtaccaggaacttcgtcacctccttgaatgctggcggttcatttcatgatcagtgttaagcattttcctccatgggaaggaagcatgggatatagaaaagcgaagggctgtcctttacaaattctggttctgcaacttcctagcgtgactttgggcttgggcaagtttcttagccgttctgagccttcatttcctcatctgtacaatgagattaatagtacctatcatctaccttcaggattgctgacagacagaatttgaaataaaatatgcaagttagctaatacaaaaagtagatgatccaaaaatggtagccactcacccttcacaaactgaagtccatggaccacggaagtcgagaattaatgtacacctgtatcatgtgtaggaaaccagaaatgtgttccttatttcttgttcccaaacaggattaactgtgaagactaatttataaatgtgaacctaagaaaactccacctctgaaggaaatcatttgaattttgtttttgtacgtaaagttaaccttccaattgtctgagctgtcgtcactgacttcatgacagtctggccctccagacaagagcagcgctggcatcgggcaggtgattcctgacacctgctgcctgcaggcattcactgaccaggcctttcctggaggaaacacccagggccgggcggctgctgtttccacacgtggactcggatctgctgtgacaccgtcagcccgacagtctctccatatgcagcctttcctctgtacttttctccatggttgaaataaaacagggtgactgggagttacttagaattcatgaagatttt

SEQ ID NO: 7816 - protein, 313 aa, Homo sapiens; identical to SEQ ID NO: 1136

SEQ ID NO: 7817 - DNA, 9328 bp, Homo sapiens
cacccaccccagcccagagaggcgacccagctccctggaggcccaggcacctcatgtctgccctcaacccagagtggagcagaccttccctggagcttctcaggagccacttcaaaagttcgtgccctcgtgaggctggcatgcaggatggcaggacagcccggccacatgccccatggagggagttccaacaacctctgccacaccctggggcctgtgcatcctcctgacccacagaggcatcccaacacgctgtcttttcgctgctcgctggcggacttccagatcgaaaagaagataggccgaggacagttcagcgaggtgtacaaggccacctgcctgctggacaggaagacagtggctctgaagaaggtgcagatctttgagatgatggacgccaaggcgaggcaggactgtgtcaaggagatcggcctcttgaagcaactgaaccacccaaatatcatcaagtatttggactcgtttatcgaagacaacgagctgaacattgtgctggagttggctgacgcaggggacctctcgcagatgatcaagtactttaagaagcagaagcggctcatcccggagaggacagtatggaagtactttgtgcagctgtgcagcgccgtggagcacatgcattcacgccgggtgatgcaccgagacatcaagcctgccaacgtgttcatcacagccacgggcgtcgtgaagctcggtgaccttggtctgggccgcttcttcagctctgagaccaccgcagcccactccctagtggggacgccctactacatgtcaccggagaggatccatgagaacggctacaacttcaagtccgacatctggtccctgggctgtctgctgtacgagatggcagccctccagagccccttctatggagataagatgaatctcttctccctgtgccagaagatcgagcagtgtgactaccccccactccccggggagcactactccgagaagttacgagaactggtcagcatgtgcatctgccctgacccccaccagagacctgacatcggatacgtgcaccaggtggccaagcagatgcacatctggatgtccagcacctgagcgtggatgcaccgtgccttatcaaagccagcaccactttgccttacttgagtcgtcttctcttcgagtggccacctggtagcctagaacagctaagaccacagggttcagcaggttccccaaaaggctgcccagccttacagcagatgctgaaggcagagcagctgagggaggggcgctggccacatgtcactgatggtcagattccaaagtcctttctttatactgttgtggacaatctcagctgggtcaataagggcaggtggttcagcgagccacggcagccccctgtatctggattgtaatgtgaatctttagggtaattcctccagtgacctgtcaaggcttatgctaacaggagacttgcaggagaccgtgtgatttgtgtagtgagcctttgaaaatggttagtaccgggttcagtttagttcttagtatcttttcaatcaagctgtgtgcttaatttactctgttgtaaagggataaagtggaaatcatttttttccgtggagtggtgattctgctaacatttttatctacgttttataacttggtgagtgacgatgagagccctgcacctggccagagtgtcacaggcaaaaggcatcgggaagcaggagcatcttcttggcagccaggctgggccatcttctcctggacacctgctgtgtaccaggaacttcgtcacctccttgaatgctggcggttcatttcatgatcagtgttaagcattttcctccatgggaaggaagcatgggatatagaaaagcgaagggctgtcctttacaaattctggttctgcaacttcctagcgtgactttgggcttgggcaagtttcttagccgttctgagccttcatttcctcatctgtacaatgagattaatagtacctatcatctaccttcaggattgctgacagacagaatttgaaataaaatatgcaagttagctaatacaaaaagtagatgatccaaaaatggtagccactcacccttcacaaactgaagtccatggaccacggaagtcgagaattaatgtacacctgtatcatgtgtaggaaaccagaaatgtgttccttatttcttgttcccaaacaggattaactgtgaagactaatttataaatgtgaacctaagaaaactccacctctgaaggaaatcatttgaattttgtttttgtacgtaaagttaaccttccaattgtctgagctgtcgtcactgacttcatgacagtctggccctccagacaagagcagcgctggcatcgggcaggtgattcctgacacctgctgcctgcaggcattcactgaccaggcctttcctggaggaaacacccagggccgggcggctgctgtttccacacgtggactcggatctgctgtgacaccgtcagcccgacagtctctccatatgcagcctttcctctgtacttttctccatggttgaaataaaacagggtgactgggagttacttagaattcatgaagattttaaaatggctttggagattttgcttttaaaccagtagattcaaaacttaaacagcgtctgcagcacaatttcttgaggaaccttgaaaaacacaacttcccaggccccattcagtaatcccaggatttctttaagctccccaaataattttgaaactcatcatcagccgagtttctgccctcatgaggtaattccatcgttctccccagcctgcccctggcagctgtaacacaggagctggcctgagagcagattcaccctggaatgttctctccacagaacaatcaagtccctgtcgcctgcctagtgcttaccactgaagatttttctgattccagaccaactttttgccaacattctgcttccagctctctgagcccctgccgtgtctccccaacactgccagccccagcacgcaatcaacctactttgtgcatgccacccgctttccacactgtgagaacaatctgcccaactggaccctctggaggcgcacgatctcagccactcaccaggcctgagtgtttgtgaaatgatcatgtcctacttattacaaaaccgtaaccccaaaacattccttttatttctgtgaaaccggccaaagtgaggtccacccaccttcacacagctctggcggtgcacctgctcaccttctcttggttctcagaactgagctgggcttgagaacacagctttggctttgccatttttttcctacttggctgctgaggtggagggtgtgctgcacttatcaccccatttcaaaaccaaaccaaacctgaggccaccccaaacaaattcagccagcaaaaagggtaggtatcgatggtcacctgaagcctcaagggagtccactctgacttctgacagcagacagaacctatctgtcctcaggaggggcgcatggctcctacgctctcctctgagcctaggccagtgctcaaggaggatcagcaccctgaagggccaggccaatggccttagcagccccctactgcccccaaaaacaccacacagtgcccagacctcagctgcccaatttggtttttgttttttattgagttgagtttcattcggcaaacactagccacatgagtgtcttactgggcctcaatgctcaccaccttccagaaccgcggccagccacccactgatgccattcaggaagtgtccattgtttggactgtttcttccagcacctcaatctccagaggagtgattttctcagtgaggactgcagtagtccctttctcacacctgtaccggccaagcctagtaagagaaaaacaaaagcacagagttaggattctcctcaaggtgccagagggcagaagacagtgaaaataaatattcaggcaacgcagtgagcaggctggactggaatcttggctctcccgatcccagctctgtgatcttgggggattcaacttcctcagttctcaagtgctgcaaaatgggggtgcctgggaggcaaagagtgtcattagtgaacacggcacctggcccttggtggacacgtgactctccccccaccccaccatccccacaagtgctgggaagcacttggtcccttgacatcaatcttcaacctccctacaatactgttcagggacagcaggaagcaaatcccatcattacacaagagaagggcatgattgctcttccgtgcagcaacaagaatgacttaactgttaccttagacactgcacaaacatctggaagcataaacagtgtaaaaaaaatgtgcagccagactctgggcttgtcatttcagaccactctcaagtctcaagaaaagttaactgtccctttcagggacacagtgggtccccactaggacacacccaacaccttcttcctggagtgaatctggcagaggtttctttgagcaccagactgtctagaagatatgtatttgggctgttaatgctcacagtgggtcaggaattaggatactgtcaaatggcagcacacaaccaactgttcctctgctctagccccagctggggtaatatctctgtcaaacttgctgtccttcaggaactgccagaaggctgctggctgtgccatggccttgtgctcccggaacacccatcctctcccctggacacacgggctaaaagagggagcaggaagcagaacaaggagggcaacttccacagttctgcatccaggtcaggagcacggtcagcccagagcggcctgcctttatgctgccaagcctcccccgacccccaccctcttaaagaatccaagcaaaagtacctttgaacaatgtgtccccaccccatcagtttgaggatgcccctcatccctcacacgctggaaccttggtggcagcgtgcagtcttagagccaaagtcccacgtggcctctgtgtgcctgactcctctgaaccacccctcagtgtctccgggaggcttggacacacaagagcctcctcaccactgtggtgacagtgcccgatttttgcggcatgcattcagagcttccgccttacgtgccagtggactgcaagaccgtgtgctggagggctgcgggcagacaggcagcagggacttgccaggcaaggcccactggcgcatggcacgggatgcttcctcaggcctatcgccctgcccgcaccctagcatccaccctgggaagggctcccctaactcaggcagtgcccccatcttcagtcactggcaaagaagacaacagagtccagggagcttggacacttgctgcccttggccccaggacaccgatggggagcaggctccctgcaggttactgcacacccaccacacgcccagcagcttctgggtcgccttgctgattcttcccaagcagccgcaaggcggttttcttttgttcttgggtgtttagagcctctgtttacaagtggagcagcccatgtcccaggaagtaggatgtgccactgctgcactccctgtggatgaggactcctgcgctcagcacaggttccctaggcaaccacttctcactggcccagacgtggctttcagagtcctcgcccaggaccctggccagcctgaatggtgtaaccattccctaccccatcaccgcttcaccatggacttgctcaaatcacgcatcttgcaaaataaccagcgaagcaggctacatggagtacttggctcctgcctacctggagctcggcaaagcccggttccccaacacagctctgggcctgaaaggtggcttgccttcctgctaaaggcccgagggacttcgtgggctcattagaggtcatctggtttagctccatttccaagacagactgatttgctggaagccaccaagccagccaccaacactccccaaccccagtgccagcgttctctggccccgtgctgccccaccccatcaggagcccactgagcttccgcaaggttgagtgcagcccacagtgaatacctgctggttctgaacgttccattccttccttgtgaattactcctgatgtggagttgtgtgtgcagtgggagatggaagcaagcctgcagaaggtggtgctcacttcctcggggctaccgtggagctgagtgggagccgtagtttataaatgccctgtgctgcacccagatgctgcagctggaagcagcactcagggagcccatcctgacctgcccgggctcccagaagaggtcaggagccacaggatggtcaagcagccggacaatcacgagacactgcaaacgagctgctcctctgacacatgctagccaccaggtttggaaacctcccagttctgctcagcaaatcaactagaaccttctcccactgctctgagtctgcgctgcaccactgagccgaggggcccactcggcatgtaggctcaggctcaatggcacaactccctgtagcacagcacacacacactagctcccaaggccacctctgggaggctgttagcattgctgacttacacccagttaggaatctcggggcactctgagggaaagtgctggggctgccctgaaaaatgcaccttctcccagaaatcaggggattctttaagacacttgagaaaggacagcagatgatccaaacctctccggccccacctcccagcctagggctctttcctgggccaccctccacctctcccatcaaattaaatcactttcctacacctgacagcagcccactgtcataaagcaagtaacaagccgaaggtctgtgtgggaggttgatttgggaacactggatgtacttaatgtggaaagaaccaggaaaactccatccagatgccatggagataccaagggtggccacgacgccaggggacccaggaagaacttcgtctccttcactcacctggtccccttcttgttgggcactgtgtatgggcggagaaaatccagcttgttcttgctgatgacgcagaggtcaatgttgcttccggagcccaggtcgttgaagatgccagctgcgatggcttcgctcaccagattcttggcttcctcctcctgagaaacagaacggcggcaataatgtccccggccaaactagggcctgctctgacatccgcaatgtacgtccactagcagtgcgcaagacctcccgcgagacaggtgttgtttttaatgcccatctcacagatgaggaaaagatctcaaagtaccttgattatttacccaaagttcccgacccaggcctttaaaactttttatgcatgcaccgcctcttgaccacatcagacaatcaccacaaaacgatgggctgacagttactagagggttagtaacttatctttaaaagggccaggtagtaaatattttaggctttgtggccaaaagtctctaccacacctactcaactctgtcacgctagcacaaaacagccacacacaaatacattaaaaaatgggtataactgtgttccaataaaactctattagcaacaggcagtgggccagatctggcccactgactgcagtttactaactatcccctgatcaagaatgtccaacaatagctgaaagttacttgagaaagtcagcactgtaggaggaagaaactaacaccaaaacacaagccggtagttctggggaaatgctggcagaccaagggcgggacctcttgcccagaataatctctctctcctactaaggaacctataggttcactgaagtaatccattactttgaatcactctctcctttgccccacctttaaacacaaatccccatccctaatagttactggtgaacagatggactcatccctttcttatccgagaagccccatcacatgctatgtcctatcacatgctataccagaagctagggctgcagaggtggatgacgcccccagatccctgccccctaggggcttaagagtctagcaggggcacctgacccaagtaagtacaatgcagggtaaggctggctaaagagcacgtgaaaaggagctgggaacacagctggtcagcagagcttcagggagggctgaaggacaggctgcacacgaggcactcagaaaacagcagtgaaacagaaggcaggcagcaacggcagtggtactggacctggggaacaccaagttcaagctctatatacaacgaggacaaaaatgaaccaggctccctgaaagcagggaatctaacctgtgctacggcgccttcccagtccacgagggcgtgagagtacatacacatgcaagtgcactccagcgctcacccaagcaacacccttggagaaacacggactccaggcccaaatccagcctgagaccctcaaagggcagatccgctaacctcaagttttcagaagatctgaacccactgggggctcctgctcctctgcctgccccatgccagactaggattccagtgacataagcgccctctacagactcagaaggacagagaaggttctgctggaagtgggctcctcagcaaaccagcagataggggttcctttgatatttataccccaggttttttcactctcacgtgacatctatgtggggccaatgaagccaattcttcttttgtacatatgcagtcctgtaagaatgcattcaaacgggatccgctaattaggaattttctcctggaattctcaacagtctatggggccagaagctttccacaaaccagtgaaggtggcagcaaagaaagcctcttagacgaggagctggcagcagctgctatctagatagacagcaaaaaccaaccactaattcagcaaacacaacctcatacctaaccgcttccctttaaatggccttcggtgtgtgcgcacatgggcacgtgcggggagaaccatacttattcccctgttcccggcctaccacctctgctcccccttctcttctctaccatttaactgtctcctctgctttgtttcttatcactgctgctggtgtctagagccagccagcagtacctggcagacatcgcgaccctgcgggcagcgcttaggactgcacatttacatttcccaaatgatctgggtagatggggacaggtgaagacttggggaaacggaaatatacgaatgacatgagacatgcatatctagtgtcaatccattcgactgggcacaggacagcagactgctgacagtgctatgtaagattatgagtgatcctccctctattttgcaaacagtctgtaagtaactgataaaactttaaaatatgcaaattttaaaattatatagtttgatttactcatcaaattatcatgtatgctgttatttaagtatgaataaaggcttttttaaattgggaaaa

SEQ ID NO: 7818 - protein, 313 aa, Homo sapiens; identical to SEQ ID NO: 1136

SEQ ID NO: 7819 - DNA, 938 bp, Homo sapiens
ggcacttgcctgtaatcccagctacttgggaggctgagacaggagaatcacttgaccccgggaggcggaggttgaggagagtcgcggttgctgatcgtggtgcttgagtagagccgtggttggtgacagcatgacgagcgaggtgatagaagacgagaagcaattctattccaaggccaagacctactggaaacaaatcccacccacggtggacggcatgcttggggggtatggccacatctccagcatcgacatcaacagctcccggaagtttctgcagaggtttttgagggaaggcccgaacaagacaggaacgtcctgtgccctggactgtggagctggcattgggaggatcaccaagcggctgctcctgccgctgttcagagaggtggatatggtcgacataacggaggacttcctggttcaagccaagacctacctgggggaggagggcaagagggtgaggaactacttctgttgtgggctccaggacttcaccccggagccggactcttacgacgtgatctggatccagtgggtgataggccacctcaccgatcagcacctggccgagttcctgcggcgctgcaagggcagcctccgccccaacggcatcatcgtcatcaaagacaacatggcccaggagggcgtgattctggacgacgtggacagcagcgtgtgccgggaccttgacgtggtccgcaggatcatctgcagtgcaggcctcagcctcctggccgaggagaggcaggagaacctccccgatgagatctaccatgtctatagctttgccctgagatgagccggggctggcaggagaaactgaggaaccacagtcctggtggggggagctggcagctgggcaagatccaggcgccacgctggcggttcgtgagtgtcgaggcaccactaaatatagctgtctgccgtccactcat

SEQ ID NO: 7820 - protein, 223 aa, Homo sapiens; identical to SEQ ID NO: 1138

SEQ ID NO: 7821 - DNA, 1579 bp, Homo sapiens
ggcacttgcctgtaatcccagctacttgggaggctgagacaggagaatcacttgaccccgggaggcggaggttgaggagagtcgcggttgctgatcgtggtgcttgagtagagccgtggttggtgacagcatgacgagcgaggtgatagaagacgagaagcaattctattccaaggccaagacctactggaaacaaatcccacccacggtggacggcatgcttggggggtatggccacatctccagcatcgacatcaacagctcccggaagtttctgcagaggtttttgagggaaggcccgaacaagacaggaacgtcctgtgccctggactgtggagctggcattgggaggatcaccaagcggctgctcctgccgctgttcagagaggtggatatggtcgacataacggaggacttcctggttcaagccaagacctacctgggggaggagggcaagagggtgaggaactacttctgttgtgggctccaggacttcaccccggagccggactcttacgacgtgatctggatccagtgggtgataggccacctcaccgatcagcacctggccgagttcctgcggcgctgcaagggcagcctccgccccaacggcatcatcgtcatcaaagacaacatggcccaggagggcgtgattctggacgacgtggacagcagcgtgtgccgggaccttgacgtggtccgcaggatcatctgcagtgcaggcctcagcctcctggccgaggagaggcaggagaacctccccgatgagatctaccatgtctatagctttgccctgagatgagccggggctggcaggagaaactgaggaaccacagtcctggtggggggagctggcagctgggcaagatccaggcgccacgctggcggttcgtgagtgtcgaggcaccactaaatatagctgtctgccgtccactcattatgcgggctcttcttcaaaaggcaaggtgggacccggcggggagggtgctgctgaaccagcggtgaggcaggagcccagaccctgctctcctgcgagatgggattgggtggaaggggctccagggctcctggtgctccccatgtgggaatagggtggccacatcagtaaccgattccctgggcctccagcccggccttccagccatgggcctggctgcctgaagaggaaggaaaccacccccaacttggttgctggggacttgaagacttcagtgtgatctttacctaggggagggacagagctgggctggtggagcccatgggtgctgcctgatggtgctgtggggtgggtgctcatgtgccaagtcctgcttggcagtggagacctggggcccttaaagtgttacaacagcctgcagcaagggaagttccccgtagcctcagtcttctctgggcttgaggctgctccttggcaggcatttaaagtaaaaaataaaatggggctgggcgcggtggctcacgcctgtaatcccagcactttgggaggccgaggcgggcagatcacgaggtcaggagattgagaccatcctggctaacaggtgaaaccccgtctctacttaaaatacaaaaaaaaaaaaaa

SEQ ID NO: 7822 - protein, 223 aa, Homo sapiens; identical to SEQ ID NO: 1138

SEQ ID NO: 7823 - DNA, 1072 bp, Homo sapiens
gctccgaggtgccccatgtgcggcaggaagaagcagcctccacaggactgcgctcagcgggagacggggcttccccgtgaagaggtgctgagtgcgaatgcccactccaacacctggtcactgtgtgatcttgagaaagagttgagcctctctgggccctggcttccccaacaaccaaaggctgtacagagagcggcttaggagagagctcctgtgtgcgccgccgagggctctgctggctcaggacatctgtaggaccagttccagctccagtgggcaccgccagcacgcccaggagagtcgcggttgctgatcgtggtgcttgagtagagccgtggttggtgacagcatgacgagcgaggtgatagaagacgagaagcaattctattccaaggccaagacctactggaaacaaatcccacccacggtggacggcatgcttggggggtatggccacatctccagcatcgacatcaacagctcccggaagtttctgcagaggtttttgagggaaggcccgaacaagacaggaacgtcctgtgccctggactgtggagctggcattgggaggatcaccaagcggctgctcctgccgctgttcagagaggtggatatggtcgacataacggaggacttcctggttcaagccaagacctacctgggggaggagggcaagagggccacctcaccgatcagcacctggccgagttcctgcggcgctgcaagggcagcctccgccccaacggcatcatcgtcatcaaagacaacatggcccaggagggcgtgattctggacgacgtggacagcagcgtgtgccgggaccttgacgtggtccgcaggatcatctgcagtgcaggcctcagcctcctggccgaggagaggcaggagaacctccccgatgagatctaccatgtctatagctttgccctgagatgagccggggctggcaggagaaactgaggaaccacagtcctggtggggggagctggcagctgggcaagatccaggcgccacgctggcggttcgtgagtgtcgaggcaccactaaatatagctgtctgccgtccactcat

SEQ ID NO: 7824 - protein, 145 aa, Homo sapiens
MTSEVIEDEKQFYSKAKTYWKQIPPTVDGMLGGYGHISSIDINSSRKFLQRFLREGPNKTGTSCALDCGAGIGRITKRLLLPLFREVDMVDITEDFLVQAKTYLGEEGKRATSPISTWPSSCGAARAASAPTASSSSKTTWPRRA

SEQ ID NO: 7825 - DNA, 1137 bp, Homo sapiens
gctccgaggtgccccatgtgcggcaggaagaagcagcctccacaggactgcgctcagcgggagacggggcttccccgtgaagaggtgctgagtgcgaatgcccactccaacacctggtcactgtgtgatcttgagaaagagttgagcctctctgggccctggcttccccaacaaccaaaggctgtacagagagcggcttaggagagagctcctgtgtgcgccgccgagggctctgctggctcaggacatctgtaggaccagttccagctccagtgggcaccgccagcacgcccaggagagtcgcggttgctgatcgtggtgcttgagtagagccgtggttggtgacagcatgacgagcgaggtgatagaagacgagaagcaattctattccaaggccaagacctactggaaacaaatcccacccacggtggacggcatgcttggggggtatggccacatctccagcatcgacatcaacagctcccggaagtttctgcagaggtttttgagggaaggcccgaacaagacaggaacgtcctgtgccctggactgtggagctggcattgggaggatcaccaagcggctgctcctgccgctgttcagagaggtggatatggtcgacataacggaggacttcctggttcaagccaagacctacctgggggaggagggcaagagggccacctcaccgatcagcacctggccgagttcctgcggcgctgcaagggcagcctccgccccaacggcatcatcgtcatcaaagacaacatggcccaggagggcgtgattctggacgacgtggacagcagcgtgtgccgggaccttgacgtggtccgcaggatcatctgcagtgcaggcctcagcctcctggccgaggagaggcaggagaacctccccgatgagatctaccatgtctatagctttgccctgagatgagccggggctggcaggagaaactgaggaaccacagtcctggtggggggagctggcagctgggcaagatccaggcgccacgctggcggttcgtgagtgtcgaggcaccactaaatatagctgtctgccgtccactcattatgcgggctcttcttcaaaaggcaaggtgggacccggcggggagggtgctgctgaaccagcggt

SEQ ID NO: 7826 - protein, 145 aa, Homo sapiens; identical to SEQ ID NO: 7824

SEQ ID NO: 7827 - DNA, 970 bp, Homo sapiens
ggccctggctgcctgggcgccgattcccgggacgcgccggccgacagcaggggaggcggcagcagggaccgcagcagcccccgcttccgcacggcccgccgggtcgcggagagtcgcggttgctgatcgtggtgcttgagtagagccgtggttggtgacagcatgacgagcgaggtgatagaagacgagaagcaattctattccaaggccaagacctactggaaacaaatcccacccacggtggacggcatgcttggggggtatggccacatctccagcatcgacatcaacagctcccggaagtttctgcagaggtttttgagggaaggcccgaacaagacaggaacgtcctgtgccctggactgtggagctggcattgggaggatcaccaagcggctgctcctgccgctgttcagagaggtggatatggtcgacataacggaggacttcctggttcaagccaagacctacctgggggaggagggcaagagggtgaggaactacttctgttgtgggctccaggacttcaccccggagccggactcttacgacgtgatctggatccagtgggtgataggccacctcaccgatcagcacctggccgagttcctgcggcgctgcaagggcagcctccgccccaacggcatcatcgtcatcaaagacaacatggcccaggagggcgtgattctggacgacgtggacagcagcgtgtgccgggaccttgacgtggtccgcaggatcatctgcagtgcaggcctcagcctcctggccgaggagaggcaggagaacctccccgatgagatctaccatgtctatagctttgccctgagatgagccggggctggcaggagaaactgaggaaccacagtcctggtggggggagctggcagctgggcaagatccaggcgccacgctggcggttcgtgagtgtcgaggcaccactaaatatagctgtctgccgtccactcat

SEQ ID NO: 7828 - protein, 223 aa, Homo sapiens; identical to SEQ ID NO: 1138

SEQ ID NO: 7829 - DNA, 1611 bp, Homo sapiens
ggccctggctgcctgggcgccgattcccgggacgcgccggccgacagcaggggaggcggcagcagggaccgcagcagcccccgcttccgcacggcccgccgggtcgcggagagtcgcggttgctgatcgtggtgcttgagtagagccgtggttggtgacagcatgacgagcgaggtgatagaagacgagaagcaattctattccaaggccaagacctactggaaacaaatcccacccacggtggacggcatgcttggggggtatggccacatctccagcatcgacatcaacagctcccggaagtttctgcagaggtttttgagggaaggcccgaacaagacaggaacgtcctgtgccctggactgtggagctggcattgggaggatcaccaagcggctgctcctgccgctgttcagagaggtggatatggtcgacataacggaggacttcctggttcaagccaagacctacctgggggaggagggcaagagggtgaggaactacttctgttgtgggctccaggacttcaccccggagccggactcttacgacgtgatctggatccagtgggtgataggccacctcaccgatcagcacctggccgagttcctgcggcgctgcaagggcagcctccgccccaacggcatcatcgtcatcaaagacaacatggcccaggagggcgtgattctggacgacgtggacagcagcgtgtgccgggaccttgacgtggtccgcaggatcatctgcagtgcaggcctcagcctcctggccgaggagaggcaggagaacctccccgatgagatctaccatgtctatagctttgccctgagatgagccggggctggcaggagaaactgaggaaccacagtcctggtggggggagctggcagctgggcaagatccaggcgccacgctggcggttcgtgagtgtcgaggcaccactaaatatagctgtctgccgtccactcattatgcgggctcttcttcaaaaggcaaggtgggacccggcggggagggtgctgctgaaccagcggtgaggcaggagcccagaccctgctctcctgcgagatgggattgggtggaaggggctccagggctcctggtgctccccatgtgggaatagggtggccacatcagtaaccgattccctgggcctccagcccggccttccagccatgggcctggctgcctgaagaggaaggaaaccacccccaacttggttgctggggacttgaagacttcagtgtgatctttacctaggggagggacagagctgggctggtggagcccatgggtgctgcctgatggtgctgtggggtgggtgctcatgtgccaagtcctgcttggcagtggagacctggggcccttaaagtgttacaacagcctgcagcaagggaagttccccgtagcctcagtcttctctgggcttgaggctgctccttggcaggcatttaaagtaaaaaataaaatggggctgggcgcggtggctcacgcctgtaatcccagcactttgggaggccgaggcgggcagatcacgaggtcaggagattgagaccatcctggctaacaggtgaaaccccgtctctacttaaaatacaaaaaaaaaaaaaa

SEQ ID NO: 7830 - protein, 223 aa, Homo sapiens; identical to SEQ ID NO: 1138

SEQ ID NO: 7831 - DNA, 789 bp, Homo sapiens
ggacaaaggcagcgcgcgccgcgagctgtcgcgtctggtcgtggtctggcggagctgcggttggcttgtggcgtctccgccgccgccgccctcccttcctcttccccatcttcttctctcggtcccgggagcccccgcccggagaaggcccgaacaagacaggaacgtcctgtgccctggactgtggagctggcattgggaggatcaccaagcggctgctcctgccgctgttcagagaggtggatatggtcgacataacggaggacttcctggttcaagccaagacctacctgggggaggagggcaagagggtgaggaactacttctgttgtgggctccaggacttcaccccggagccggactcttacgacgtgatctggatccagtgggtgataggccacctcaccgatcagcacctggccgagttcctgcggcgctgcaagggcagcctccgccccaacggcatcatcgtcatcaaagacaacatggcccaggagggcgtgattctggacgacgtggacagcagcgtgtgccgggaccttgacgtggtccgcaggatcatctgcagtgcaggcctcagcctcctggccgaggagaggcaggagaacctccccgatgagatctaccatgtctatagctttgccctgagatgagccggggctggcaggagaaactgaggaaccacagtcctggtggggggagctggcagctgggcaagatccaggcgccacgctggcggttcgtgagtgtcgaggcaccactaaatatagctgtctgccgtccactcat

SEQ ID NO: 7832 - protein, 135 aa, Homo sapiens
MVDITEDFLVQAKTYLGEEGKRVRNYFCCGLQDFTPEPDSYDVIWIQWVIGHLTDQHLAEFLRRCKGSLRPNGIIVIKDNMAQEGVILDDVDSSVCRDLDVVRRIICSAGLSLLAEERQENLPDEIYHVYSFALR
